United States Patent Application Publication US 2008/0113351 A1 - sequence listing, part 5

SEQ ID NO: 99928 - DNA, 19 bp, Homo sapiens
  siRNA target sequence for RPS6KA6 (NM_014496.1,1845-1863).
gttgcacctgaggttctta

SEQ ID NO: 99929 - DNA, 19 bp, Homo sapiens
  siRNA target sequence for RPS6KA6 (NM_014496.1,1849-1867).
cacctgaggttcttatgca

SEQ ID NO: 99930 - DNA, 19 bp, Homo sapiens
  siRNA target sequence for RPS6KA6 (NM_014496.1,1900-1918).
gtttaggagtcctttttta

SEQ ID NO: 99931 - DNA, 19 bp, Homo sapiens
  siRNA target sequence for RPS6KA6 (NM_014496.1,1928-1946).
ggctggctacactccattt

SEQ ID NO: 99932 - DNA, 19 bp, Homo sapiens
  siRNA target sequence for RPS6KA6 (NM_014496.1,1947-1965).
gctaatggccccaatgata

SEQ ID NO: 99933 - DNA, 19 bp, Homo sapiens
  siRNA target sequence for RPS6KA6 (NM_014496.1,1983-2001).
ctgcgtataggcaatggaa

SEQ ID NO: 99934 - DNA, 19 bp, Homo sapiens
  siRNA target sequence for RPS6KA6 (NM_014496.1,1985-2003).
gcgtataggcaatggaaaa

SEQ ID NO: 99935 - DNA, 19 bp, Homo sapiens
  siRNA target sequence for RPS6KA6 (NM_014496.1,2016-2034).
ggtggaaactgggacaata

SEQ ID NO: 99936 - DNA, 19 bp, Homo sapiens
  siRNA target sequence for RPS6KA6 (NM_014496.1,2038-2056).
cagacggagcaaaggattt

SEQ ID NO: 99937 - DNA, 19 bp, Homo sapiens
  siRNA target sequence for RPS6KA6 (NM_014496.1,2062-2080).
cccatatgcttcatatgga

SEQ ID NO: 99938 - DNA, 19 bp, Homo sapiens
  siRNA target sequence for RPS6KA6 (NM_014496.1,2081-2099).
cccacatcagcggtatact

SEQ ID NO: 99939 - DNA, 19 bp, Homo sapiens
  siRNA target sequence for RPS6KA6 (NM_014496.1,2090-2108).
gcggtatactgctgaacaa

SEQ ID NO: 99940 - DNA, 19 bp, Homo sapiens
  siRNA target sequence for RPS6KA6 (NM_014496.1,2091-2109).
cggtatactgctgaacaaa

SEQ ID NO: 99941 - DNA, 19 bp, Homo sapiens
  siRNA target sequence for RPS6KA6 (NM_014496.1,2092-2110).
ggtatactgctgaacaaat

SEQ ID NO: 99942 - DNA, 19 bp, Homo sapiens
  siRNA target sequence for RPS6KA6 (NM_014496.1,2093-2111).
gtatactgctgaacaaata

SEQ ID NO: 99943 - DNA, 19 bp, Homo sapiens
  siRNA target sequence for RPS6KA6 (NM_014496.1,2137-2155).
gagaccagttgccaaatga

SEQ ID NO: 99944 - DNA, 19 bp, Homo sapiens
  siRNA target sequence for RPS6KA6 (NM_014496.1,2172-2190).
gatgtgtcacatgttgtta

SEQ ID NO: 99945 - DNA, 19 bp, Homo sapiens
  siRNA target sequence for RPS6KA6 (NM_014496.1,2194-2212).
gagcaatggttgcaacata

SEQ ID NO: 99946 - DNA, 19 bp, Homo sapiens
  siRNA target sequence for RPS6KA6 (NM_014496.1,2222-2240).
gactcacaagacctttcaa

SEQ ID NO: 99947 - DNA, 19 bp, Homo sapiens
  siRNA target sequence for RPS6KA6 (NM_014496.1,2276-2294).
ccagcgacggagcatgaaa

SEQ ID NO: 99948 - DNA, 19 bp, Homo sapiens
  siRNA target sequence for RPS6KA6 (NM_014496.1,2291-2309).
gaaaaagcgaacatcaact

SEQ ID NO: 99949 - DNA, 19 bp, Homo sapiens
  siRNA target sequence for RPS6KB1 (NM_003161.1,162-180).
ggaggggggtcagttaaat

SEQ ID NO: 99950 - DNA, 19 bp, Homo sapiens
  siRNA target sequence for RPS6KB1 (NM_003161.1,319-337).
ggtaaagggggctatggaa

SEQ ID NO: 99951 - DNA, 19 bp, Homo sapiens
  siRNA target sequence for RPS6KB1 (NM_003161.1,320-338).
gtaaagggggctatggaaa

SEQ ID NO: 99952 - DNA, 19 bp, Homo sapiens
  siRNA target sequence for RPS6KB1 (NM_003161.1,739-757).
ggactatgcaaagaatcta

SEQ ID NO: 99953 - DNA, 19 bp, Homo sapiens
  siRNA target sequence for RPS6KB1 (NM_003161.1,740-758).
gactatgcaaagaatctat

SEQ ID NO: 99954 - DNA, 19 bp, Homo sapiens
  siRNA target sequence for RPS6KB1 (NM_003161.1,746-764).
gcaaagaatctattcatga

SEQ ID NO: 99955 - DNA, 19 bp, Homo sapiens
  siRNA target sequence for RPS6KB1 (NM_003161.1,747-765).
caaagaatctattcatgat

SEQ ID NO: 99956 - DNA, 19 bp, Homo sapiens
  siRNA target sequence for RPS6KB1 (NM_003161.1,901-919).
ccattcactggggagaata

SEQ ID NO: 99957 - DNA, 19 bp, Homo sapiens
  siRNA target sequence for RPS6KB1 (NM_003161.1,1365-1383).
cagcccagtcaaattttct

SEQ ID NO: 99958 - DNA, 19 bp, Homo sapiens
  siRNA target sequence for RPS6KB2 (NM_003952.1,174-192).
gcctgtgggacactatgaa

SEQ ID NO: 99959 - DNA, 19 bp, Homo sapiens
  siRNA target sequence for RPS6KB2 (NM_003952.1,323-341).
ccaacttgggcaaaatata

SEQ ID NO: 99960 - DNA, 19 bp, Homo sapiens
  siRNA target sequence for RPS6KB2 (NM_003952.1,404-422).
gggctgagcggaacattct

SEQ ID NO: 99961 - DNA, 19 bp, Homo sapiens
  siRNA target sequence for RPS6KB2 (NM_003952.1,407-425).
ctgagcggaacattctaga

SEQ ID NO: 99962 - DNA, 19 bp, Homo sapiens
  siRNA target sequence for RPS6KB2 (NM_003952.1,428-446).
cagtgaagcacccctttat

SEQ ID NO: 99963 - DNA, 19 bp, Homo sapiens
  siRNA target sequence for RPS6KB2 (NM_003952.1,665-683).
gccagggccacatcaaact

SEQ ID NO: 99964 - DNA, 19 bp, Homo sapiens
  siRNA target sequence for RPS6KB2 (NM_003952.1,699-717).
ctgcaaggagtctatccat

SEQ ID NO: 99965 - DNA, 19 bp, Homo sapiens
  siRNA target sequence for RPS6KB2 (NM_003952.1,874-892).
cggaagaaaaccatggata

SEQ ID NO: 99966 - DNA, 19 bp, Homo sapiens
  siRNA target sequence for RPS6KB2 (NM_003952.1,1032-1050).
ctttttccggcacatgaat

SEQ ID NO: 99967 - DNA, 19 bp, Homo sapiens
  siRNA target sequence for RPS6KB2 (NM_003952.1,1113-1131).
ggacgtgagccagtttgat

SEQ ID NO: 99968 - DNA, 19 bp, Homo sapiens
  siRNA target sequence for RPS6KB2 (NM_003952.1,1114-1132).
gacgtgagccagtttgata

SEQ ID NO: 99969 - DNA, 19 bp, Homo sapiens
  siRNA target sequence for RPS6KC1 (NM_012424.2,175-193).
ccgacctggcccgtttcta

SEQ ID NO: 99970 - DNA, 19 bp, Homo sapiens
  siRNA target sequence for RPS6KC1 (NM_012424.2,219-237).
ccgaggggctacacagtat

SEQ ID NO: 99971 - DNA, 19 bp, Homo sapiens
  siRNA target sequence for RPS6KC1 (NM_012424.2,220-238).
cgaggggctacacagtata

SEQ ID NO: 99972 - DNA, 19 bp, Homo sapiens
  siRNA target sequence for RPS6KC1 (NM_012424.2,221-239).
gaggggctacacagtatat

SEQ ID NO: 99973 - DNA, 19 bp, Homo sapiens
  siRNA target sequence for RPS6KC1 (NM_012424.2,223-241).
ggggctacacagtatataa

SEQ ID NO: 99974 - DNA, 19 bp, Homo sapiens
  siRNA target sequence for RPS6KC1 (NM_012424.2,253-271).
gggttgtttcacgaagaaa

SEQ ID NO: 99975 - DNA, 19 bp, Homo sapiens
  siRNA target sequence for RPS6KC1 (NM_012424.2,254-272).
ggttgtttcacgaagaaat

SEQ ID NO: 99976 - DNA, 19 bp, Homo sapiens
  siRNA target sequence for RPS6KC1 (NM_012424.2,343-361).
ggcaaattcacaaaaactt

SEQ ID NO: 99977 - DNA, 19 bp, Homo sapiens
  siRNA target sequence for RPS6KC1 (NM_012424.2,407-425).
gtttgggcgatttgatgaa

SEQ ID NO: 99978 - DNA, 19 bp, Homo sapiens
  siRNA target sequence for RPS6KC1 (NM_012424.2,412-430).
ggcgatttgatgaaactgt

SEQ ID NO: 99979 - DNA, 19 bp, Homo sapiens
  siRNA target sequence for RPS6KC1 (NM_012424.2,413-431).
gcgatttgatgaaactgtt

SEQ ID NO: 99980 - DNA, 19 bp, Homo sapiens
  siRNA target sequence for RPS6KC1 (NM_012424.2,470-488).
gttctctgccaatattcct

SEQ ID NO: 99981 - DNA, 19 bp, Homo sapiens
  siRNA target sequence for RPS6KC1 (NM_012424.2,486-504).
cctgctctttacaatagta

SEQ ID NO: 99982 - DNA, 19 bp, Homo sapiens
  siRNA target sequence for RPS6KC1 (NM_012424.2,487-505).
ctgctctttacaatagtaa

SEQ ID NO: 99983 - DNA, 19 bp, Homo sapiens
  siRNA target sequence for RPS6KC1 (NM_012424.2,502-520).
gtaaacagcttgaagactt

SEQ ID NO: 99984 - DNA, 19 bp, Homo sapiens
  siRNA target sequence for RPS6KC1 (NM_012424.2,578-596).
ctcagattccctcattgat

SEQ ID NO: 99985 - DNA, 19 bp, Homo sapiens
  siRNA target sequence for RPS6KC1 (NM_012424.2,635-653).
cagtgatctggtatctctt

SEQ ID NO: 99986 - DNA, 19 bp, Homo sapiens
  siRNA target sequence for RPS6KC1 (NM_012424.2,665-683).
ggattctcttgctgagtta

SEQ ID NO: 99987 - DNA, 19 bp, Homo sapiens
  siRNA target sequence for RPS6KC1 (NM_012424.2,690-708).
ggaatggcttccaatcaaa

SEQ ID NO: 99988 - DNA, 19 bp, Homo sapiens
  siRNA target sequence for RPS6KC1 (NM_012424.2,721-739).
gaacttttggtctcaatct

SEQ ID NO: 99989 - DNA, 19 bp, Homo sapiens
  siRNA target sequence for RPS6KC1 (NM_012424.2,848-866).
gcttggcaagagagattat

SEQ ID NO: 99990 - DNA, 19 bp, Homo sapiens
  siRNA target sequence for RPS6KC1 (NM_012424.2,849-867).
cttggcaagagagattatt

SEQ ID NO: 99991 - DNA, 19 bp, Homo sapiens
  siRNA target sequence for RPS6KC1 (NM_012424.2,1005-1023).
cgagaagctgtgaagagaa

SEQ ID NO: 99992 - DNA, 19 bp, Homo sapiens
  siRNA target sequence for RPS6KC1 (NM_012424.2,1043-1061).
gcgggcagaaagtatctct

SEQ ID NO: 99993 - DNA, 19 bp, Homo sapiens
  siRNA target sequence for RPS6KC1 (NM_012424.2,1044-1062).
cgggcagaaagtatctcta

SEQ ID NO: 99994 - DNA, 19 bp, Homo sapiens
  siRNA target sequence for RPS6KC1 (NM_012424.2,1050-1068).
gaaagtatctctagtcttt

SEQ ID NO: 99995 - DNA, 19 bp, Homo sapiens
  siRNA target sequence for RPS6KC1 (NM_012424.2,1072-1090).
ggaaacctcagcttgatga

SEQ ID NO: 99996 - DNA, 19 bp, Homo sapiens
  siRNA target sequence for RPS6KC1 (NM_012424.2,1077-1095).
cctcagcttgatgatgtat

SEQ ID NO: 99997 - DNA, 19 bp, Homo sapiens
  siRNA target sequence for RPS6KC1 (NM_012424.2,1104-1122).
ccaggatcactaagttcaa

SEQ ID NO: 99998 - DNA, 19 bp, Homo sapiens
  siRNA target sequence for RPS6KC1 (NM_012424.2,1179-1197).
ggggtgattgacaaggttt

SEQ ID NO: 99999 - DNA, 19 bp, Homo sapiens
  siRNA target sequence for RPS6KC1 (NM_012424.2,1184-1202).
gattgacaaggttttactt

SEQ ID NO: 100000 - DNA, 19 bp, Homo sapiens
  siRNA target sequence for RPS6KC1 (NM_012424.2,1311-1329).
gtgtgtctgcataagtaca

SEQ ID NO: 100001 - DNA, 19 bp, Homo sapiens
  siRNA target sequence for RPS6KC1 (NM_012424.2,1377-1395).
ggcaaactgtggtcatata

SEQ ID NO: 100002 - DNA, 19 bp, Homo sapiens
  siRNA target sequence for RPS6KC1 (NM_012424.2,1383-1401).
ctgtggtcatatatcagta

SEQ ID NO: 100003 - DNA, 19 bp, Homo sapiens
  siRNA target sequence for RPS6KC1 (NM_012424.2,1388-1406).
gtcatatatcagtaaattt

SEQ ID NO: 100004 - DNA, 19 bp, Homo sapiens
  siRNA target sequence for RPS6KC1 (NM_012424.2,1397-1415).
cagtaaatttctaaacaga

SEQ ID NO: 100005 - DNA, 19 bp, Homo sapiens
  siRNA target sequence for RPS6KC1 (NM_012424.2,1456-1474).
ctacacttgcaaaagttca

SEQ ID NO: 100006 - DNA, 19 bp, Homo sapiens
  siRNA target sequence for RPS6KC1 (NM_012424.2,1478-1496).
gcagcagccaacttctagt

SEQ ID NO: 100007 - DNA, 19 bp, Homo sapiens
  siRNA target sequence for RPS6KC1 (NM_012424.2,1502-1520).
ggacagcagtagctttgaa

SEQ ID NO: 100008 - DNA, 19 bp, Homo sapiens
  siRNA target sequence for RPS6KC1 (NM_012424.2,1559-1577).
gcctttgaagagtagtctt

SEQ ID NO: 100009 - DNA, 19 bp, Homo sapiens
  siRNA target sequence for RPS6KC1 (NM_012424.2,1668-1686).
gaatgtactactagttatt

SEQ ID NO: 100010 - DNA, 19 bp, Homo sapiens
  siRNA target sequence for RPS6KC1 (NM_012424.2,1761-1779).
gaagggaatggtgttgata

SEQ ID NO: 100011 - DNA, 19 bp, Homo sapiens
  siRNA target sequence for RPS6KC1 (NM_012424.2,1764-1782).
gggaatggtgttgatacaa

SEQ ID NO: 100012 - DNA, 19 bp, Homo sapiens
  siRNA target sequence for RPS6KC1 (NM_012424.2,1765-1783).
ggaatggtgttgatacaaa

SEQ ID NO: 100013 - DNA, 19 bp, Homo sapiens
  siRNA target sequence for RPS6KC1 (NM_012424.2,1770-1788).
ggtgttgatacaaaagcta

SEQ ID NO: 100014 - DNA, 19 bp, Homo sapiens
  siRNA target sequence for RPS6KC1 (NM_012424.2,1771-1789).
gtgttgatacaaaagctat

SEQ ID NO: 100015 - DNA, 19 bp, Homo sapiens
  siRNA target sequence for RPS6KC1 (NM_012424.2,1773-1791).
gttgatacaaaagctatta

SEQ ID NO: 100016 - DNA, 19 bp, Homo sapiens
  siRNA target sequence for RPS6KC1 (NM_012424.2,1911-1929).
gattccctcagtagatcaa

SEQ ID NO: 100017 - DNA, 19 bp, Homo sapiens
  siRNA target sequence for RPS6KC1 (NM_012424.2,1915-1933).
ccctcagtagatcaaaaaa

SEQ ID NO: 100018 - DNA, 19 bp, Homo sapiens
  siRNA target sequence for RPS6KC1 (NM_012424.2,1938-1956).
cccatggaattctttagga

SEQ ID NO: 100019 - DNA, 19 bp, Homo sapiens
  siRNA target sequence for RPS6KC1 (NM_012424.2,1940-1958).
catggaattctttaggata

SEQ ID NO: 100020 - DNA, 19 bp, Homo sapiens
  siRNA target sequence for RPS6KC1 (NM_012424.2,2026-2044).
cagaacctttgaaaccatt

SEQ ID NO: 100021 - DNA, 19 bp, Homo sapiens
  siRNA target sequence for RPS6KC1 (NM_012424.2,2031-2049).
cctttgaaaccattcttta

SEQ ID NO: 100022 - DNA, 19 bp, Homo sapiens
  siRNA target sequence for RPS6KC1 (NM_012424.2,2068-2086).
gtgcttctaggagttttaa

SEQ ID NO: 100023 - DNA, 19 bp, Homo sapiens
  siRNA target sequence for RPS6KC1 (NM_012424.2,2070-2088).
gcttctaggagttttaata

SEQ ID NO: 100024 - DNA, 19 bp, Homo sapiens
  siRNA target sequence for RPS6KC1 (NM_012424.2,2145-2163).
gactcagtgccagttattt

SEQ ID NO: 100025 - DNA, 19 bp, Homo sapiens
  siRNA target sequence for RPS6KC1 (NM_012424.2,2238-2256).
ggtgaattggagtcaacaa

SEQ ID NO: 100026 - DNA, 19 bp, Homo sapiens
  siRNA target sequence for RPS6KC1 (NM_012424.2,2266-2284).
cagcaatgggacctactaa

SEQ ID NO: 100027 - DNA, 19 bp, Homo sapiens
  siRNA target sequence for RPS6KC1 (NM_012424.2,2268-2286).
gcaatgggacctactaagt

SEQ ID NO: 100028 - DNA, 19 bp, Homo sapiens
  siRNA target sequence for RPS6KC1 (NM_012424.2,2273-2291).
gggacctactaagtttaca

SEQ ID NO: 100029 - DNA, 19 bp, Homo sapiens
  siRNA target sequence for RPS6KC1 (NM_012424.2,2275-2293).
gacctactaagtttacaca

SEQ ID NO: 100030 - DNA, 19 bp, Homo sapiens
  siRNA target sequence for RPS6KC1 (NM_012424.2,2277-2295).
cctactaagtttacacaaa

SEQ ID NO: 100031 - DNA, 19 bp, Homo sapiens
  siRNA target sequence for RPS6KC1 (NM_012424.2,2296-2314).
ctaatatagggataataga

SEQ ID NO: 100032 - DNA, 19 bp, Homo sapiens
  siRNA target sequence for RPS6KC1 (NM_012424.2,2324-2342).
cttggaagcccctgatgtt

SEQ ID NO: 100033 - DNA, 19 bp, Homo sapiens
  siRNA target sequence for RPS6KC1 (NM_012424.2,2327-2345).
ggaagcccctgatgtttta

SEQ ID NO: 100034 - DNA, 19 bp, Homo sapiens
  siRNA target sequence for RPS6KC1 (NM_012424.2,2328-2346).
gaagcccctgatgttttat

SEQ ID NO: 100035 - DNA, 19 bp, Homo sapiens
  siRNA target sequence for RPS6KC1 (NM_012424.2,2351-2369).
caggcttagtactgaacaa

SEQ ID NO: 100036 - DNA, 19 bp, Homo sapiens
  siRNA target sequence for RPS6KC1 (NM_012424.2,2413-2431).
cctctgggcccaaatccta

SEQ ID NO: 100037 - DNA, 19 bp, Homo sapiens
  siRNA target sequence for RPS6KC1 (NM_012424.2,2414-2432).
ctctgggcccaaatcctat

SEQ ID NO: 100038 - DNA, 19 bp, Homo sapiens
  siRNA target sequence for RPS6KC1 (NM_012424.2,2418-2436).
gggcccaaatcctatagta

SEQ ID NO: 100039 - DNA, 19 bp, Homo sapiens
  siRNA target sequence for RPS6KC1 (NM_012424.2,2419-2437).
ggcccaaatcctatagtat

SEQ ID NO: 100040 - DNA, 19 bp, Homo sapiens
  siRNA target sequence for RPS6KC1 (NM_012424.2,2434-2452).
gtataacagagaaacacta

SEQ ID NO: 100041 - DNA, 19 bp, Homo sapiens
  siRNA target sequence for RPS6KC1 (NM_012424.2,2459-2477).
ggaggatcccaggatgtta

SEQ ID NO: 100042 - DNA, 19 bp, Homo sapiens
  siRNA target sequence for RPS6KC1 (NM_012424.2,2462-2480).
ggatcccaggatgttattt

SEQ ID NO: 100043 - DNA, 19 bp, Homo sapiens
  siRNA target sequence for RPS6KC1 (NM_012424.2,2484-2502).
gcagctgttgatcatagta

SEQ ID NO: 100044 - DNA, 19 bp, Homo sapiens
  siRNA target sequence for RPS6KC1 (NM_012424.2,2487-2505).
gctgttgatcatagtagtt

SEQ ID NO: 100045 - DNA, 19 bp, Homo sapiens
  siRNA target sequence for RPS6KC1 (NM_012424.2,2503-2521).
gttcaggagatatgtcttt

SEQ ID NO: 100046 - DNA, 19 bp, Homo sapiens
  siRNA target sequence for RPS6KC1 (NM_012424.2,2527-2545).
ccagctcagatcctaagtt

SEQ ID NO: 100047 - DNA, 19 bp, Homo sapiens
  siRNA target sequence for RPS6KC1 (NM_012424.2,2528-2546).
cagctcagatcctaagttt

SEQ ID NO: 100048 - DNA, 19 bp, Homo sapiens
  siRNA target sequence for RPS6KC1 (NM_012424.2,2530-2548).
gctcagatcctaagtttca

SEQ ID NO: 100049 - DNA, 19 bp, Homo sapiens
  siRNA target sequence for RPS6KC1 (NM_012424.2,2571-2589).
gcagtaactgcaaacaaca

SEQ ID NO: 100050 - DNA, 19 bp, Homo sapiens
  siRNA target sequence for RPS6KC1 (NM_012424.2,2600-2618).
cttattccgtatttgtagt

SEQ ID NO: 100051 - DNA, 19 bp, Homo sapiens
  siRNA target sequence for RPS6KC1 (NM_012424.2,2622-2640).
ctctcaggtgctaatgaat

SEQ ID NO: 100052 - DNA, 19 bp, Homo sapiens
  siRNA target sequence for RPS6KC1 (NM_012424.2,2813-2831).
ccttgataaaaaattagca

SEQ ID NO: 100053 - DNA, 19 bp, Homo sapiens
  siRNA target sequence for RPS6KC1 (NM_012424.2,2829-2847).
gcactagcctccaggtttt

SEQ ID NO: 100054 - DNA, 19 bp, Homo sapiens
  siRNA target sequence for RPS6KC1 (NM_012424.2,2830-2848).
cactagcctccaggtttta

SEQ ID NO: 100055 - DNA, 19 bp, Homo sapiens
  siRNA target sequence for RPS6KC1 (NM_012424.2,2832-2850).
ctagcctccaggttttaca

SEQ ID NO: 100056 - DNA, 19 bp, Homo sapiens
  siRNA target sequence for RPS6KC1 (NM_012424.2,2891-2909).
ggtagcccttgatgcttta

SEQ ID NO: 100057 - DNA, 19 bp, Homo sapiens
  siRNA target sequence for RPS6KC1 (NM_012424.2,2895-2913).
gcccttgatgctttacata

SEQ ID NO: 100058 - DNA, 19 bp, Homo sapiens
  siRNA target sequence for RPS6KC1 (NM_012424.2,2897-2915).
ccttgatgctttacataga

SEQ ID NO: 100059 - DNA, 19 bp, Homo sapiens
  siRNA target sequence for RPS6KC1 (NM_012424.2,2910-2928).
catagagagggaattgtgt

SEQ ID NO: 100060 - DNA, 19 bp, Homo sapiens
  siRNA target sequence for RPS6KC1 (NM_012424.2,2939-2957).
gaacccaaacaacatctta

SEQ ID NO: 100061 - DNA, 19 bp, Homo sapiens
  siRNA target sequence for RPS6KC1 (NM_012424.2,2971-2989).
gacacattcagctaacgta

SEQ ID NO: 100062 - DNA, 19 bp, Homo sapiens
  siRNA target sequence for RPS6KC1 (NM_012424.2,2973-2991).
cacattcagctaacgtatt

SEQ ID NO: 100063 - DNA, 19 bp, Homo sapiens
  siRNA target sequence for RPS6KC1 (NM_012424.2,2979-2997).
cagctaacgtattttagca

SEQ ID NO: 100064 - DNA, 19 bp, Homo sapiens
  siRNA target sequence for RPS6KC1 (NM_012424.2,2998-3016).
ggtggagtgaggttgaaga

SEQ ID NO: 100065 - DNA, 19 bp, Homo sapiens
  siRNA target sequence for RPS6KC1 (NM_012424.2,3028-3046).
gcgatgccatagagagaat

SEQ ID NO: 100066 - DNA, 19 bp, Homo sapiens
  siRNA target sequence for RPS6KC1 (NM_012424.2,3030-3048).
gatgccatagagagaatgt

SEQ ID NO: 100067 - DNA, 19 bp, Homo sapiens
  siRNA target sequence for RPS6KC1 (NM_012424.2,3033-3051).
gccatagagagaatgtact

SEQ ID NO: 100068 - DNA, 19 bp, Homo sapiens
  siRNA target sequence for RPS6KC1 (NM_012424.2,3110-3128).
gggtgctgtcctctttgaa

SEQ ID NO: 100069 - DNA, 19 bp, Homo sapiens
  siRNA target sequence for RPS6KC1 (NM_012424.2,3138-3156).
ggcaagactctggttgaat

SEQ ID NO: 100070 - DNA, 19 bp, Homo sapiens
  siRNA target sequence for RPS6KC1 (NM_012424.2,3218-3236).
ggctcgctcactcattcaa

SEQ ID NO: 100071 - DNA, 19 bp, Homo sapiens
  siRNA target sequence for RPS6KC1 (NM_012424.2,3283-3301).
ctggtgttgaagatatcaa

SEQ ID NO: 100072 - DNA, 19 bp, Homo sapiens
  siRNA target sequence for RPS6KL1 (NM_031464.2,340-358).
gcctgacatgacaaaacgt

SEQ ID NO: 100073 - DNA, 19 bp, Homo sapiens
  siRNA target sequence for RPS6KL1 (NM_031464.2,346-364).
catgacaaaacgtgactat

SEQ ID NO: 100074 - DNA, 19 bp, Homo sapiens
  siRNA target sequence for RPS6KL1 (NM_031464.2,395-413).
gccctggagcgcgatgtta

SEQ ID NO: 100075 - DNA, 19 bp, Homo sapiens
  siRNA target sequence for RPS6KL1 (NM_031464.2,397-415).
cctggagcgcgatgttagt

SEQ ID NO: 100076 - DNA, 19 bp, Homo sapiens
  siRNA target sequence for RPS6KL1 (NM_031464.2,432-450).
ccttcaaccactatcagaa

SEQ ID NO: 100077 - DNA, 19 bp, Homo sapiens
  siRNA target sequence for RPS6KL1 (NM_031464.2,820-838).
ggcgcactcccgacattct

SEQ ID NO: 100078 - DNA, 19 bp, Homo sapiens
  siRNA target sequence for RPS6KL1 (NM_031464.2,1395-1413).
gtcacatccggctcacata

SEQ ID NO: 100079 - DNA, 19 bp, Homo sapiens
  siRNA target sequence for RPS6KL1 (NM_031464.2,1397-1415).
cacatccggctcacatatt

SEQ ID NO: 100080 - DNA, 19 bp, Homo sapiens
  siRNA target sequence for RPS6KL1 (NM_031464.2,1530-1548).
gctttgggtctctactgta

SEQ ID NO: 100081 - DNA, 19 bp, Homo sapiens
  siRNA target sequence for RPS6KL1 (NM_031464.2,1531-1549).
ctttgggtctctactgtat

SEQ ID NO: 100082 - DNA, 19 bp, Homo sapiens
  siRNA target sequence for RPS6KL1 (NM_031464.2,1707-1725).
gtggtgtcagcaaactcaa

SEQ ID NO: 100083 - DNA, 19 bp, Homo sapiens
  siRNA target sequence for RUVBL1 (NM_003707.1,217-235).
ggcatgtggcgtcatagta

SEQ ID NO: 100084 - DNA, 19 bp, Homo sapiens
  siRNA target sequence for RUVBL1 (NM_003707.1,219-237).
catgtggcgtcatagtaga

SEQ ID NO: 100085 - DNA, 19 bp, Homo sapiens
  siRNA target sequence for RUVBL1 (NM_003707.1,222-240).
gtggcgtcatagtagaatt

SEQ ID NO: 100086 - DNA, 19 bp, Homo sapiens
  siRNA target sequence for RUVBL1 (NM_003707.1,224-242).
ggcgtcatagtagaattaa

SEQ ID NO: 100087 - DNA, 19 bp, Homo sapiens
  siRNA target sequence for RUVBL1 (NM_003707.1,225-243).
gcgtcatagtagaattaat

SEQ ID NO: 100088 - DNA, 19 bp, Homo sapiens
  siRNA target sequence for RUVBL1 (NM_003707.1,227-245).
gtcatagtagaattaatca

SEQ ID NO: 100089 - DNA, 19 bp, Homo sapiens
  siRNA target sequence for RUVBL1 (NM_003707.1,327-345).
ctcaggagctgggtagtaa

SEQ ID NO: 100090 - DNA, 19 bp, Homo sapiens
  siRNA target sequence for RUVBL1 (NM_003707.1,367-385).
ggggagtgaagtttactca

SEQ ID NO: 100091 - DNA, 19 bp, Homo sapiens
  siRNA target sequence for RUVBL1 (NM_003707.1,508-526).
gaatcccatgggaggatat

SEQ ID NO: 100092 - DNA, 19 bp, Homo sapiens
  siRNA target sequence for RUVBL1 (NM_003707.1,534-552).
ccattagccatgtgatcat

SEQ ID NO: 100093 - DNA, 19 bp, Homo sapiens
  siRNA target sequence for RUVBL1 (NM_003707.1,545-563).
gtgatcataggactcaaaa

SEQ ID NO: 100094 - DNA, 19 bp, Homo sapiens
  siRNA target sequence for RUVBL1 (NM_003707.1,592-610).
ggaccccagcatttttgaa

SEQ ID NO: 100095 - DNA, 19 bp, Homo sapiens
  siRNA target sequence for RUVBL1 (NM_003707.1,685-703).
gggcaggtgtgatacctat

SEQ ID NO: 100096 - DNA, 19 bp, Homo sapiens
  siRNA target sequence for RUVBL1 (NM_003707.1,849-867).
ccatgatgggccagctaat

SEQ ID NO: 100097 - DNA, 19 bp, Homo sapiens
  siRNA target sequence for RUVBL1 (NM_003707.1,882-900).
cagaaatcacagacaaact

SEQ ID NO: 100098 - DNA, 19 bp, Homo sapiens
  siRNA target sequence for RUVBL1 (NM_003707.1,899-917).
cttcgaggggagattaata

SEQ ID NO: 100099 - DNA, 19 bp, Homo sapiens
  siRNA target sequence for RUVBL1 (NM_003707.1,903-921).
gaggggagattaataaggt

SEQ ID NO: 100100 - DNA, 19 bp, Homo sapiens
  siRNA target sequence for RUVBL1 (NM_003707.1,961-979).
cccgggtgtgctgtttgtt

SEQ ID NO: 100101 - DNA, 19 bp, Homo sapiens
  siRNA target sequence for RUVBL1 (NM_003707.1,1045-1063).
cgctcccatcgtcatcttt

SEQ ID NO: 100102 - DNA, 19 bp, Homo sapiens
  siRNA target sequence for RUVBL1 (NM_003707.1,1139-1157).
ctggaccgagtgatgataa

SEQ ID NO: 100103 - DNA, 19 bp, Homo sapiens
  siRNA target sequence for RUVBL1 (NM_003707.1,1159-1177).
ccggaccatgctgtatact

SEQ ID NO: 100104 - DNA, 19 bp, Homo sapiens
  siRNA target sequence for RUVBL1 (NM_003707.1,1209-1227).
gtgcccagacggaaggaat

SEQ ID NO: 100105 - DNA, 19 bp, Homo sapiens
  siRNA target sequence for RUVBL1 (NM_003707.1,1214-1232).
cagacggaaggaatcaaca

SEQ ID NO: 100106 - DNA, 19 bp, Homo sapiens
  siRNA target sequence for RUVBL1 (NM_003707.1,1312-1330).
ggccaacttgcttgctaaa

SEQ ID NO: 100107 - DNA, 19 bp, Homo sapiens
  siRNA target sequence for RUVBL1 (NM_003707.1,1337-1355).
gggaaggacagcattgaga

SEQ ID NO: 100108 - DNA, 19 bp, Homo sapiens
  siRNA target sequence for RUVBL1 (NM_003707.1,1366-1384).
cgaagagatcagtgaactt

SEQ ID NO: 100109 - DNA, 19 bp, Homo sapiens
  siRNA target sequence for RUVBL1 (NM_003707.1,1424-1442).
cagcaggataagtacatga

SEQ ID NO: 100110 - DNA, 19 bp, Homo sapiens
  siRNA target sequence for RUVBL2 (NM_006666.1,43-61).
cccggagatccgtgatgta

SEQ ID NO: 100111 - DNA, 19 bp, Homo sapiens
  siRNA target sequence for RUVBL2 (NM_006666.1,44-62).
ccggagatccgtgatgtaa

SEQ ID NO: 100112 - DNA, 19 bp, Homo sapiens
  siRNA target sequence for RUVBL2 (NM_006666.1,46-64).
ggagatccgtgatgtaaca

SEQ ID NO: 100113 - DNA, 19 bp, Homo sapiens
  siRNA target sequence for RUVBL2 (NM_006666.1,47-65).
gagatccgtgatgtaacaa

SEQ ID NO: 100114 - DNA, 19 bp, Homo sapiens
  siRNA target sequence for RUVBL2 (NM_006666.1,52-70).
ccgtgatgtaacaaggatt

SEQ ID NO: 100115 - DNA, 19 bp, Homo sapiens
  siRNA target sequence for RUVBL2 (NM_006666.1,199-217).
gatccgggaagggaagatt

SEQ ID NO: 100116 - DNA, 19 bp, Homo sapiens
  siRNA target sequence for RUVBL2 (NM_006666.1,219-237).
ccggtcgggcagtccttat

SEQ ID NO: 100117 - DNA, 19 bp, Homo sapiens
  siRNA target sequence for RUVBL2 (NM_006666.1,220-238).
cggtcgggcagtccttatt

SEQ ID NO: 100118 - DNA, 19 bp, Homo sapiens
  siRNA target sequence for RUVBL2 (NM_006666.1,298-316).
ccctgacacgccattcaca

SEQ ID NO: 100119 - DNA, 19 bp, Homo sapiens
  siRNA target sequence for RUVBL2 (NM_006666.1,749-767).
gagatcgacgtcatcaact

SEQ ID NO: 100120 - DNA, 19 bp, Homo sapiens
  siRNA target sequence for RUVBL2 (NM_006666.1,1132-1150).
ccggtgcgaggaagaagat

SEQ ID NO: 100121 - DNA, 19 bp, Homo sapiens
  siRNA target sequence for RUVBL2 (NM_006666.1,1134-1152).
ggtgcgaggaagaagatgt

SEQ ID NO: 100122 - DNA, 19 bp, Homo sapiens
  siRNA target sequence for RUVBL2 (NM_006666.1,1255-1273).
gaaacgcaagggtacagaa

SEQ ID NO: 100123 - DNA, 19 bp, Homo sapiens
  siRNA target sequence for RUVBL2 (NM_006666.1,1323-1341).
cccgctccacgcagtacat

SEQ ID NO: 100124 - DNA, 19 bp, Homo sapiens
  siRNA target sequence for RUVBL2 (NM_006666.1,1325-1343).
cgctccacgcagtacatga

SEQ ID NO: 100125 - DNA, 19 bp, Homo sapiens
  siRNA target sequence for RUVBL2 (NM_006666.1,1326-1344).
gctccacgcagtacatgaa

SEQ ID NO: 100126 - DNA, 19 bp, Homo sapiens
  siRNA target sequence for RUVBL2 (NM_006666.1,1363-1381).
cctcttcaacgaactcaaa

SEQ ID NO: 100127 - DNA, 19 bp, Homo sapiens
  siRNA target sequence for RYK (NM_002958.1,325-343).
cggtcttgatgcagaactt

SEQ ID NO: 100128 - DNA, 19 bp, Homo sapiens
  siRNA target sequence for RYK (NM_002958.1,327-345).
gtcttgatgcagaacttta

SEQ ID NO: 100129 - DNA, 19 bp, Homo sapiens
  siRNA target sequence for RYK (NM_002958.1,350-368).
gtgagaaatgaccttatta

SEQ ID NO: 100130 - DNA, 19 bp, Homo sapiens
  siRNA target sequence for RYK (NM_002958.1,371-389).
cactacgctctatccttta

SEQ ID NO: 100131 - DNA, 19 bp, Homo sapiens
  siRNA target sequence for RYK (NM_002958.1,398-416).
gtacccagtgagacaaatt

SEQ ID NO: 100132 - DNA, 19 bp, Homo sapiens
  siRNA target sequence for RYK (NM_002958.1,437-455).
gcgaagtccaaggttgaat

SEQ ID NO: 100133 - DNA, 19 bp, Homo sapiens
  siRNA target sequence for RYK (NM_002958.1,438-456).
cgaagtccaaggttgaata

SEQ ID NO: 100134 - DNA, 19 bp, Homo sapiens
  siRNA target sequence for RYK (NM_002958.1,439-457).
gaagtccaaggttgaatat

SEQ ID NO: 100135 - DNA, 19 bp, Homo sapiens
  siRNA target sequence for RYK (NM_002958.1,444-462).
ccaaggttgaatataagct

SEQ ID NO: 100136 - DNA, 19 bp, Homo sapiens
  siRNA target sequence for RYK (NM_002958.1,499-517).
gccccaggtcaacatttct

SEQ ID NO: 100137 - DNA, 19 bp, Homo sapiens
  siRNA target sequence for RYK (NM_002958.1,526-544).
ggaagttccacgcacttta

SEQ ID NO: 100138 - DNA, 19 bp, Homo sapiens
  siRNA target sequence for RYK (NM_002958.1,527-545).
gaagttccacgcactttat

SEQ ID NO: 100139 - DNA, 19 bp, Homo sapiens
  siRNA target sequence for RYK (NM_002958.1,573-591).
ctggcaaagtagattctga

SEQ ID NO: 100140 - DNA, 19 bp, Homo sapiens
  siRNA target sequence for RYK (NM_002958.1,602-620).
ctaatgcagctcaacttga

SEQ ID NO: 100141 - DNA, 19 bp, Homo sapiens
  siRNA target sequence for RYK (NM_002958.1,610-628).
gctcaacttgacagtaaat

SEQ ID NO: 100142 - DNA, 19 bp, Homo sapiens
  siRNA target sequence for RYK (NM_002958.1,616-634).
cttgacagtaaattcttca

SEQ ID NO: 100143 - DNA, 19 bp, Homo sapiens
  siRNA target sequence for RYK (NM_002958.1,646-664).
cgtcttaaattttaaacga

SEQ ID NO: 100144 - DNA, 19 bp, Homo sapiens
  siRNA target sequence for RYK (NM_002958.1,721-739).
cactagcagaactatttat

SEQ ID NO: 100145 - DNA, 19 bp, Homo sapiens
  siRNA target sequence for RYK (NM_002958.1,752-770).
gcagctccaaccacttcta

SEQ ID NO: 100146 - DNA, 19 bp, Homo sapiens
  siRNA target sequence for RYK (NM_002958.1,763-781).
cacttctacgcgtgtgttt

SEQ ID NO: 100147 - DNA, 19 bp, Homo sapiens
  siRNA target sequence for RYK (NM_002958.1,765-783).
cttctacgcgtgtgtttta

SEQ ID NO: 100148 - DNA, 19 bp, Homo sapiens
  siRNA target sequence for RYK (NM_002958.1,768-786).
ctacgcgtgtgttttatat

SEQ ID NO: 100149 - DNA, 19 bp, Homo sapiens
  siRNA target sequence for RYK (NM_002958.1,836-854).
gctgttttgcaccttcata

SEQ ID NO: 100150 - DNA, 19 bp, Homo sapiens
  siRNA target sequence for RYK (NM_002958.1,869-887).
gaactggatgacagcatta

SEQ ID NO: 100151 - DNA, 19 bp, Homo sapiens
  siRNA target sequence for RYK (NM_002958.1,925-943).
cacccagacgactcagtat

SEQ ID NO: 100152 - DNA, 19 bp, Homo sapiens
  siRNA target sequence for RYK (NM_002958.1,927-945).
cccagacgactcagtatct

SEQ ID NO: 100153 - DNA, 19 bp, Homo sapiens
  siRNA target sequence for RYK (NM_002958.1,929-947).
cagacgactcagtatctga

SEQ ID NO: 100154 - DNA, 19 bp, Homo sapiens
  siRNA target sequence for RYK (NM_002958.1,953-971).
gacacgcccaacaatgcaa

SEQ ID NO: 100155 - DNA, 19 bp, Homo sapiens
  siRNA target sequence for RYK (NM_002958.1,974-992).
cctatcaccagttatccta

SEQ ID NO: 100156 - DNA, 19 bp, Homo sapiens
  siRNA target sequence for RYK (NM_002958.1,1004-1022).
gagaagaacgacttgagaa

SEQ ID NO: 100157 - DNA, 19 bp, Homo sapiens
  siRNA target sequence for RYK (NM_002958.1,1051-1069).
ggtgaaggatatagcaata

SEQ ID NO: 100158 - DNA, 19 bp, Homo sapiens
  siRNA target sequence for RYK (NM_002958.1,1071-1089).
ccagagagaggataactct

SEQ ID NO: 100159 - DNA, 19 bp, Homo sapiens
  siRNA target sequence for RYK (NM_002958.1,1072-1090).
cagagagaggataactcta

SEQ ID NO: 100160 - DNA, 19 bp, Homo sapiens
  siRNA target sequence for RYK (NM_002958.1,1078-1096).
gaggataactctaaaagat

SEQ ID NO: 100161 - DNA, 19 bp, Homo sapiens
  siRNA target sequence for RYK (NM_002958.1,1080-1098).
ggataactctaaaagatgt

SEQ ID NO: 100162 - DNA, 19 bp, Homo sapiens
  siRNA target sequence for RYK (NM_002958.1,1109-1127).
ggtacttttgggcgtattt

SEQ ID NO: 100163 - DNA, 19 bp, Homo sapiens
  siRNA target sequence for RYK (NM_002958.1,1113-1131).
cttttgggcgtattttcca

SEQ ID NO: 100164 - DNA, 19 bp, Homo sapiens
  siRNA target sequence for RYK (NM_002958.1,1225-1243).
gatgctcactgaaagttgt

SEQ ID NO: 100165 - DNA, 19 bp, Homo sapiens
  siRNA target sequence for RYK (NM_002958.1,1307-1325).
gaaaagcccatggtgatat

SEQ ID NO: 100166 - DNA, 19 bp, Homo sapiens
  siRNA target sequence for RYK (NM_002958.1,1321-1339).
gatattgccttacatgaat

SEQ ID NO: 100167 - DNA, 19 bp, Homo sapiens
  siRNA target sequence for RYK (NM_002958.1,1333-1351).
catgaattgggggaatctt

SEQ ID NO: 100168 - DNA, 19 bp, Homo sapiens
  siRNA target sequence for RYK (NM_002958.1,1336-1354).
gaattgggggaatcttaaa

SEQ ID NO: 100169 - DNA, 19 bp, Homo sapiens
  siRNA target sequence for RYK (NM_002958.1,1365-1383).
gacagtgcaagttagtaga

SEQ ID NO: 100170 - DNA, 19 bp, Homo sapiens
  siRNA target sequence for RYK (NM_002958.1,1421-1439).
gtacacatggctattcaga

SEQ ID NO: 100171 - DNA, 19 bp, Homo sapiens
  siRNA target sequence for RYK (NM_002958.1,1470-1488).
gggaagtcatccacaaaga

SEQ ID NO: 100172 - DNA, 19 bp, Homo sapiens
  siRNA target sequence for RYK (NM_002958.1,1582-1600).
ctgtctgggggacaatgaa

SEQ ID NO: 100173 - DNA, 19 bp, Homo sapiens
  siRNA target sequence for RYK (NM_002958.1,1648-1666).
gttctctagcgctagtgat

SEQ ID NO: 100174 - DNA, 19 bp, Homo sapiens
  siRNA target sequence for RYK (NM_002958.1,1789-1807).
caactgtcctgatgaatta

SEQ ID NO: 100175 - DNA, 19 bp, Homo sapiens
  siRNA target sequence for RYK (NM_002958.1,1876-1894).
gtgcctaacagagtttcat

SEQ ID NO: 100176 - DNA, 19 bp, Homo sapiens
  siRNA target sequence for SARS2 (NM_017827.2,227-245).
ggctgcatctccaacgata

SEQ ID NO: 100177 - DNA, 19 bp, Homo sapiens
  siRNA target sequence for SARS2 (NM_017827.2,831-849).
ctggccaccggtcctatta

SEQ ID NO: 100178 - DNA, 19 bp, Homo sapiens
  siRNA target sequence for SARS2 (NM_017827.2,834-852).
gccaccggtcctattacct

SEQ ID NO: 100179 - DNA, 19 bp, Homo sapiens
  siRNA target sequence for SARS2 (NM_017827.2,992-1010).
gccaacccatcccaaattt

SEQ ID NO: 100180 - DNA, 19 bp, Homo sapiens
  siRNA target sequence for SARS2 (NM_017827.2,1023-1041).
ctgcccgcttcaaagatct

SEQ ID NO: 100181 - DNA, 19 bp, Homo sapiens
  siRNA target sequence for SARS2 (NM_017827.2,1068-1086).
ggcttgcaggctacttcat

SEQ ID NO: 100182 - DNA, 19 bp, Homo sapiens
  siRNA target sequence for SARS2 (NM_017827.2,1143-1161).
gctaccgggcagagacaaa

SEQ ID NO: 100183 - DNA, 19 bp, Homo sapiens
  siRNA target sequence for SCN8A (NM_014191.1,445-463).
gacgcagaaaacctttgta

SEQ ID NO: 100184 - DNA, 19 bp, Homo sapiens
  siRNA target sequence for SCN8A (NM_014191.1,500-518).
gccacgcctgccttgtaca

SEQ ID NO: 100185 - DNA, 19 bp, Homo sapiens
  siRNA target sequence for SCN8A (NM_014191.1,504-522).
cgcctgccttgtacatttt

SEQ ID NO: 100186 - DNA, 19 bp, Homo sapiens
  siRNA target sequence for SCN8A (NM_014191.1,505-523).
gcctgccttgtacatttta

SEQ ID NO: 100187 - DNA, 19 bp, Homo sapiens
  siRNA target sequence for SCN8A (NM_014191.1,667-685).
cacgttcacagggatttat

SEQ ID NO: 100188 - DNA, 19 bp, Homo sapiens
  siRNA target sequence for SCN8A (NM_014191.1,784-802).
catgatggcgtatataaca

SEQ ID NO: 100189 - DNA, 19 bp, Homo sapiens
  siRNA target sequence for SCN8A (NM_014191.1,790-808).
ggcgtatataacagagttt

SEQ ID NO: 100190 - DNA, 19 bp, Homo sapiens
  siRNA target sequence for SCN8A (NM_014191.1,1045-1063).
cgagagctatcttgaaaat

SEQ ID NO: 100191 - DNA, 19 bp, Homo sapiens
  siRNA target sequence for SCN8A (NM_014191.1,1128-1146).
gcatgctggaacctttact

SEQ ID NO: 100192 - DNA, 19 bp, Homo sapiens
  siRNA target sequence for SCN8A (NM_014191.1,1179-1197).
cagagggataccagtgtat

SEQ ID NO: 100193 - DNA, 19 bp, Homo sapiens
  siRNA target sequence for SCN8A (NM_014191.1,1181-1199).
gagggataccagtgtatga

SEQ ID NO: 100194 - DNA, 19 bp, Homo sapiens
  siRNA target sequence for SCN8A (NM_014191.1,1303-1321).
gtatcaattgactttacga

SEQ ID NO: 100195 - DNA, 19 bp, Homo sapiens
  siRNA target sequence for SCN8A (NM_014191.1,1319-1337).
cgagcagccgggaaaacat

SEQ ID NO: 100196 - DNA, 19 bp, Homo sapiens
  siRNA target sequence for SCN8A (NM_014191.1,1479-1497).
caatgttggagcaacttaa

SEQ ID NO: 100197 - DNA, 19 bp, Homo sapiens
  siRNA target sequence for SCN8A (NM_014191.1,1598-1616).
cctcggagctcttctgaaa

SEQ ID NO: 100198 - DNA, 19 bp, Homo sapiens
  siRNA target sequence for SCN8A (NM_014191.1,1599-1617).
ctcggagctcttctgaaat

SEQ ID NO: 100199 - DNA, 19 bp, Homo sapiens
  siRNA target sequence for SCN8A (NM_014191.1,1603-1621).
gagctcttctgaaatctct

SEQ ID NO: 100200 - DNA, 19 bp, Homo sapiens
  siRNA target sequence for SCN8A (NM_014191.1,1709-1727).
gatcccgagaaggtgttta

SEQ ID NO: 100201 - DNA, 19 bp, Homo sapiens
  siRNA target sequence for SCN8A (NM_014191.1,1712-1730).
cccgagaaggtgtttaagt

SEQ ID NO: 100202 - DNA, 19 bp, Homo sapiens
  siRNA target sequence for SCN8A (NM_014191.1,1768-1786).
gctgccagacaacagaata

SEQ ID NO: 100203 - DNA, 19 bp, Homo sapiens
  siRNA target sequence for SCN8A (NM_014191.1,2208-2226).
gccctggatctcttttagt

SEQ ID NO: 100204 - DNA, 19 bp, Homo sapiens
  siRNA target sequence for SCN8A (NM_014191.1,2210-2228).
cctggatctcttttagttt

SEQ ID NO: 100205 - DNA, 19 bp, Homo sapiens
  siRNA target sequence for SCN8A (NM_014191.1,2260-2278).
ggacagaatcaacagtata

SEQ ID NO: 100206 - DNA, 19 bp, Homo sapiens
  siRNA target sequence for SCN8A (NM_014191.1,2272-2290).
cagtataatgagtgttgtt

SEQ ID NO: 100207 - DNA, 19 bp, Homo sapiens
  siRNA target sequence for SCN8A (NM_014191.1,2281-2299).
gagtgttgttacaaataca

SEQ ID NO: 100208 - DNA, 19 bp, Homo sapiens
  siRNA target sequence for SCN8A (NM_014191.1,2387-2405).
ccctactggataaaactga

SEQ ID NO: 100209 - DNA, 19 bp, Homo sapiens
  siRNA target sequence for SCN8A (NM_014191.1,2431-2449).
ggacccttttgtggattta

SEQ ID NO: 100210 - DNA, 19 bp, Homo sapiens
  siRNA target sequence for SCN8A (NM_014191.1,2461-2479).
ctgcatcgtcctgaataca

SEQ ID NO: 100211 - DNA, 19 bp, Homo sapiens
  siRNA target sequence for SCN8A (NM_014191.1,2463-2481).
gcatcgtcctgaatacact

SEQ ID NO: 100212 - DNA, 19 bp, Homo sapiens
  siRNA target sequence for SCN8A (NM_014191.1,2490-2508).
caatggagcaccatcctat

SEQ ID NO: 100213 - DNA, 19 bp, Homo sapiens
  siRNA target sequence for SCN8A (NM_014191.1,2494-2512).
ggagcaccatcctatgaca

SEQ ID NO: 100214 - DNA, 19 bp, Homo sapiens
  siRNA target sequence for SCN8A (NM_014191.1,2505-2523).
ctatgacaccacaatttga

SEQ ID NO: 100215 - DNA, 19 bp, Homo sapiens
  siRNA target sequence for SCN8A (NM_014191.1,2653-2671).
ctccctcagtttaatggaa

SEQ ID NO: 100216 - DNA, 19 bp, Homo sapiens
  siRNA target sequence for SCN8A (NM_014191.1,2819-2837).
gtgctggccattattgtct

SEQ ID NO: 100217 - DNA, 19 bp, Homo sapiens
  siRNA target sequence for SCN8A (NM_014191.1,3177-3195).
cagtgatccgtatcaagaa

SEQ ID NO: 100218 - DNA, 19 bp, Homo sapiens
  siRNA target sequence for SCN8A (NM_014191.1,3200-3218).
gtggcctggaccaaactaa

SEQ ID NO: 100219 - DNA, 19 bp, Homo sapiens
  siRNA target sequence for SCN8A (NM_014191.1,3281-3299).
gatgagttgtatgaaaaga

SEQ ID NO: 100220 - DNA, 19 bp, Homo sapiens
  siRNA target sequence for SCN8A (NM_014191.1,3393-3411).
gcagcgtggagaagtacat

SEQ ID NO: 100221 - DNA, 19 bp, Homo sapiens
  siRNA target sequence for SCN8A (NM_014191.1,3422-3440).
gaccacatgtccttcatca

SEQ ID NO: 100222 - DNA, 19 bp, Homo sapiens
  siRNA target sequence for SCN8A (NM_014191.1,3988-4006).
cattgtggctgtctcttta

SEQ ID NO: 100223 - DNA, 19 bp, Homo sapiens
  siRNA target sequence for SCN8A (NM_014191.1,3992-4010).
gtggctgtctctttagtca

SEQ ID NO: 100224 - DNA, 19 bp, Homo sapiens
  siRNA target sequence for SCN8A (NM_014191.1,4038-4056).
cggaactaggtgccataaa

SEQ ID NO: 100225 - DNA, 19 bp, Homo sapiens
  siRNA target sequence for SCN8A (NM_014191.1,4257-4275).
cttctgaaatccgatttga

SEQ ID NO: 100226 - DNA, 19 bp, Homo sapiens
  siRNA target sequence for SCN8A (NM_014191.1,4312-4330).
gcttatggaggggaacaat

SEQ ID NO: 100227 - DNA, 19 bp, Homo sapiens
  siRNA target sequence for SCN8A (NM_014191.1,4481-4499).
gaggacaatatctacatgt

SEQ ID NO: 100228 - DNA, 19 bp, Homo sapiens
  siRNA target sequence for SCN8A (NM_014191.1,4696-4714).
ccccttgaacaaaatccaa

SEQ ID NO: 100229 - DNA, 19 bp, Homo sapiens
  siRNA target sequence for SCN8A (NM_014191.1,4737-4755).
ctcagcaagcctttgacat

SEQ ID NO: 100230 - DNA, 19 bp, Homo sapiens
  siRNA target sequence for SCN8A (NM_014191.1,4799-4817).
gtggagacagacactcaaa

SEQ ID NO: 100231 - DNA, 19 bp, Homo sapiens
  siRNA target sequence for SCN8A (NM_014191.1,4878-4896).
gtgagtgtgtgctcaaaat

SEQ ID NO: 100232 - DNA, 19 bp, Homo sapiens
  siRNA target sequence for SCN8A (NM_014191.1,4978-4996).
gttcctggcagatataatt

SEQ ID NO: 100233 - DNA, 19 bp, Homo sapiens
  siRNA target sequence for SCN8A (NM_014191.1,5056-5074).
catcttgcgtctgatcaaa

SEQ ID NO: 100234 - DNA, 19 bp, Homo sapiens
  siRNA target sequence for SCN8A (NM_014191.1,5209-5227).
gcacgaggctggtatcgat

SEQ ID NO: 100235 - DNA, 19 bp, Homo sapiens
  siRNA target sequence for SCN8A (NM_014191.1,5333-5351).
cctgactgcagcctagata

SEQ ID NO: 100236 - DNA, 19 bp, Homo sapiens
  siRNA target sequence for SCN8A (NM_014191.1,5579-5597).
cagttcattgagtactgta

SEQ ID NO: 100237 - DNA, 19 bp, Homo sapiens
  siRNA target sequence for SCN8A (NM_014191.1,5791-5809).
gcggttcgtggcatccaat

SEQ ID NO: 100238 - DNA, 19 bp, Homo sapiens
  siRNA target sequence for SCN8A (NM_014191.1,5889-5907).
gtgcctaccggggacattt

SEQ ID NO: 100239 - DNA, 19 bp, Homo sapiens
  siRNA target sequence for SCN8A (NM_014191.1,5964-5982).
gcacacaccgggagaaaaa

SEQ ID NO: 100240 - DNA, 19 bp, Homo sapiens
  siRNA target sequence for SCN8A (NM_014191.1,5965-5983).
cacacaccgggagaaaaaa

SEQ ID NO: 100241 - DNA, 19 bp, Homo sapiens
  siRNA target sequence for SCYL1 (NM_020680.2,229-247).
gccttcaagcgcttcaaaa

SEQ ID NO: 100242 - DNA, 19 bp, Homo sapiens
  siRNA target sequence for SCYL1 (NM_020680.2,234-252).
caagcgcttcaaaactcta

SEQ ID NO: 100243 - DNA, 19 bp, Homo sapiens
  siRNA target sequence for SCYL1 (NM_020680.2,325-343).
gtgaccccgttgggaatat

SEQ ID NO: 100244 - DNA, 19 bp, Homo sapiens
  siRNA target sequence for SCYL1 (NM_020680.2,329-347).
ccccgttgggaatatacct

SEQ ID NO: 100245 - DNA, 19 bp, Homo sapiens
  siRNA target sequence for SCYL1 (NM_020680.2,448-466).
ctcatccacaacaatgtct

SEQ ID NO: 100246 - DNA, 19 bp, Homo sapiens
  siRNA target sequence for SCYL1 (NM_020680.2,575-593).
ccgagcttgagcagtatga

SEQ ID NO: 100247 - DNA, 19 bp, Homo sapiens
  siRNA target sequence for SCYL1 (NM_020680.2,744-762).
gctggtgccccattactgt

SEQ ID NO: 100248 - DNA, 19 bp, Homo sapiens
  siRNA target sequence for SCYL1 (NM_020680.2,840-858).
catgagcaaccgctttgta

SEQ ID NO: 100249 - DNA, 19 bp, Homo sapiens
  siRNA target sequence for SCYL1 (NM_020680.2,843-861).
gagcaaccgctttgtagaa

SEQ ID NO: 100250 - DNA, 19 bp, Homo sapiens
  siRNA target sequence for SCYL1 (NM_020680.2,898-916).
ccagccgagaagcaaaaat

SEQ ID NO: 100251 - DNA, 19 bp, Homo sapiens
  siRNA target sequence for SCYL1 (NM_020680.2,899-917).
cagccgagaagcaaaaatt

SEQ ID NO: 100252 - DNA, 19 bp, Homo sapiens
  siRNA target sequence for SCYL1 (NM_020680.2,901-919).
gccgagaagcaaaaattct

SEQ ID NO: 100253 - DNA, 19 bp, Homo sapiens
  siRNA target sequence for SCYL1 (NM_020680.2,1572-1590).
ctgcggtctcactgtagat

SEQ ID NO: 100254 - DNA, 19 bp, Homo sapiens
  siRNA target sequence for SCYL1 (NM_020680.2,1630-1648).
cggagcttcctgtccaaat

SEQ ID NO: 100255 - DNA, 19 bp, Homo sapiens
  siRNA target sequence for SEPHS2 (NM_012248.2,578-596).
gcagaccacggacttcttt

SEQ ID NO: 100256 - DNA, 19 bp, Homo sapiens
  siRNA target sequence for SEPHS2 (NM_012248.2,606-624).
gtagaagatccctacatga

SEQ ID NO: 100257 - DNA, 19 bp, Homo sapiens
  siRNA target sequence for SEPHS2 (NM_012248.2,662-680).
ctacgccatggggattact

SEQ ID NO: 100258 - DNA, 19 bp, Homo sapiens
  siRNA target sequence for SEPHS2 (NM_012248.2,710-728).
cgtcagccagagtatgagt

SEQ ID NO: 100259 - DNA, 19 bp, Homo sapiens
  siRNA target sequence for SEPHS2 (NM_012248.2,731-749).
ggaggaacgcgaaaaggta

SEQ ID NO: 100260 - DNA, 19 bp, Homo sapiens
  siRNA target sequence for SEPHS2 (NM_012248.2,732-750).
gaggaacgcgaaaaggtaa

SEQ ID NO: 100261 - DNA, 19 bp, Homo sapiens
  siRNA target sequence for SEPHS2 (NM_012248.2,821-839).
ggtggtcaacccttggatt

SEQ ID NO: 100262 - DNA, 19 bp, Homo sapiens
  siRNA target sequence for SEPHS2 (NM_012248.2,822-840).
gtggtcaacccttggatta

SEQ ID NO: 100263 - DNA, 19 bp, Homo sapiens
  siRNA target sequence for SEPHS2 (NM_012248.2,824-842).
ggtcaacccttggattata

SEQ ID NO: 100264 - DNA, 19 bp, Homo sapiens
  siRNA target sequence for SEPHS2 (NM_012248.2,825-843).
gtcaacccttggattataa

SEQ ID NO: 100265 - DNA, 19 bp, Homo sapiens
  siRNA target sequence for SEPHS2 (NM_012248.2,859-877).
ctgtagtatgccaaccaaa

SEQ ID NO: 100266 - DNA, 19 bp, Homo sapiens
  siRNA target sequence for SEPHS2 (NM_012248.2,869-887).
ccaaccaaatgagttcata

SEQ ID NO: 100267 - DNA, 19 bp, Homo sapiens
  siRNA target sequence for SEPHS2 (NM_012248.2,870-888).
caaccaaatgagttcataa

SEQ ID NO: 100268 - DNA, 19 bp, Homo sapiens
  siRNA target sequence for SEPHS2 (NM_012248.2,1041-1059).
caggaagccatgttcaata

SEQ ID NO: 100269 - DNA, 19 bp, Homo sapiens
  siRNA target sequence for SEPHS2 (NM_012248.2,1075-1093).
gaactgctgcaggtttaat

SEQ ID NO: 100270 - DNA, 19 bp, Homo sapiens
  siRNA target sequence for SEPHS2 (NM_012248.2,1107-1125).
gcccatgcggccacagata

SEQ ID NO: 100271 - DNA, 19 bp, Homo sapiens
  siRNA target sequence for SEPHS2 (NM_012248.2,1108-1126).
cccatgcggccacagatat

SEQ ID NO: 100272 - DNA, 19 bp, Homo sapiens
  siRNA target sequence for SEPHS2 (NM_012248.2,1110-1128).
catgcggccacagatatca

SEQ ID NO: 100273 - DNA, 19 bp, Homo sapiens
  siRNA target sequence for SEPHS2 (NM_012248.2,1185-1203).
gtgtcctttgttattcata

SEQ ID NO: 100274 - DNA, 19 bp, Homo sapiens
  siRNA target sequence for SEPHS2 (NM_012248.2,1189-1207).
cctttgttattcataatct

SEQ ID NO: 100275 - DNA, 19 bp, Homo sapiens
  siRNA target sequence for SEPHS2 (NM_012248.2,1249-1267).
gacggtttgggcttcttca

SEQ ID NO: 100276 - DNA, 19 bp, Homo sapiens
  siRNA target sequence for SEPHS2 (NM_012248.2,1285-1303).
cctctgggggattactgat

SEQ ID NO: 100277 - DNA, 19 bp, Homo sapiens
  siRNA target sequence for SEPHS2 (NM_012248.2,1286-1304).
ctctgggggattactgatt

SEQ ID NO: 100278 - DNA, 19 bp, Homo sapiens
  siRNA target sequence for SEPHS2 (NM_012248.2,1320-1338).
caggcggctcgcttttgtt

SEQ ID NO: 100279 - DNA, 19 bp, Homo sapiens
  siRNA target sequence for SEPHS2 (NM_012248.2,1322-1340).
ggcggctcgcttttgttct

SEQ ID NO: 100280 - DNA, 19 bp, Homo sapiens
  siRNA target sequence for SEPHS2 (NM_012248.2,1325-1343).
ggctcgcttttgttctgaa

SEQ ID NO: 100281 - DNA, 19 bp, Homo sapiens
  siRNA target sequence for SEPHS2 (NM_012248.2,1326-1344).
gctcgcttttgttctgaaa

SEQ ID NO: 100282 - DNA, 19 bp, Homo sapiens
  siRNA target sequence for SEPHS2 (NM_012248.2,1430-1448).
caagccgcgagttattgaa

SEQ ID NO: 100283 - DNA, 19 bp, Homo sapiens
  siRNA target sequence for SGK (NM_005627.2,80-98).
ctaagggcaccctcactta

SEQ ID NO: 100284 - DNA, 19 bp, Homo sapiens
  siRNA target sequence for SGK (NM_005627.2,110-128).
ggggcatggtggcaattct

SEQ ID NO: 100285 - DNA, 19 bp, Homo sapiens
  siRNA target sequence for SGK (NM_005627.2,112-130).
ggcatggtggcaattctca

SEQ ID NO: 100286 - DNA, 19 bp, Homo sapiens
  siRNA target sequence for SGK (NM_005627.2,113-131).
gcatggtggcaattctcat

SEQ ID NO: 100287 - DNA, 19 bp, Homo sapiens
  siRNA target sequence for SGK (NM_005627.2,122-140).
caattctcatcgctttcat

SEQ ID NO: 100288 - DNA, 19 bp, Homo sapiens
  siRNA target sequence for SGK (NM_005627.2,156-174).
gggtctgaacgactttatt

SEQ ID NO: 100289 - DNA, 19 bp, Homo sapiens
  siRNA target sequence for SGK (NM_005627.2,158-176).
gtctgaacgactttattca

SEQ ID NO: 100290 - DNA, 19 bp, Homo sapiens
  siRNA target sequence for SGK (NM_005627.2,160-178).
ctgaacgactttattcaga

SEQ ID NO: 100291 - DNA, 19 bp, Homo sapiens
  siRNA target sequence for SGK (NM_005627.2,184-202).
gccaataactcctatgcat

SEQ ID NO: 100292 - DNA, 19 bp, Homo sapiens
  siRNA target sequence for SGK (NM_005627.2,247-265).
caggagcctgagcttatga

SEQ ID NO: 100293 - DNA, 19 bp, Homo sapiens
  siRNA target sequence for SGK (NM_005627.2,249-267).
ggagcctgagcttatgaat

SEQ ID NO: 100294 - DNA, 19 bp, Homo sapiens
  siRNA target sequence for SGK (NM_005627.2,287-305).
caagtccttctcagcaaat

SEQ ID NO: 100295 - DNA, 19 bp, Homo sapiens
  siRNA target sequence for SGK (NM_005627.2,321-339).
gtccaatcctcatgctaaa

SEQ ID NO: 100296 - DNA, 19 bp, Homo sapiens
  siRNA target sequence for SGK (NM_005627.2,366-384).
gatcggaaagggcagtttt

SEQ ID NO: 100297 - DNA, 19 bp, Homo sapiens
  siRNA target sequence for SGK (NM_005627.2,423-441).
gttctatgcagtcaaagtt

SEQ ID NO: 100298 - DNA, 19 bp, Homo sapiens
  siRNA target sequence for SGK (NM_005627.2,491-509).
cggagcggaatgttctgtt

SEQ ID NO: 100299 - DNA, 19 bp, Homo sapiens
  siRNA target sequence for SGK (NM_005627.2,535-553).
gtgggccttcacttctctt

SEQ ID NO: 100300 - DNA, 19 bp, Homo sapiens
  siRNA target sequence for SGK (NM_005627.2,560-578).
ctgctgacaaattgtactt

SEQ ID NO: 100301 - DNA, 19 bp, Homo sapiens
  siRNA target sequence for SGK (NM_005627.2,582-600).
cctagactacattaatggt

SEQ ID NO: 100302 - DNA, 19 bp, Homo sapiens
  siRNA target sequence for SGK (NM_005627.2,697-715).
cattcactgaacatcgttt

SEQ ID NO: 100303 - DNA, 19 bp, Homo sapiens
  siRNA target sequence for SGK (NM_005627.2,708-726).
catcgtttatagagactta

SEQ ID NO: 100304 - DNA, 19 bp, Homo sapiens
  siRNA target sequence for SGK (NM_005627.2,735-753).
gaatattttgctagattca

SEQ ID NO: 100305 - DNA, 19 bp, Homo sapiens
  siRNA target sequence for SGK (NM_005627.2,830-848).
gtggcacgccggagtatct

SEQ ID NO: 100306 - DNA, 19 bp, Homo sapiens
  siRNA target sequence for SGK (NM_005627.2,854-872).
ctgaggtgcttcataagca

SEQ ID NO: 100307 - DNA, 19 bp, Homo sapiens
  siRNA target sequence for SGK (NM_005627.2,903-921).
cctgggagctgtcttgtat

SEQ ID NO: 100308 - DNA, 19 bp, Homo sapiens
  siRNA target sequence for SGK (NM_005627.2,934-952).
ggcctgccgcctttttata

SEQ ID NO: 100309 - DNA, 19 bp, Homo sapiens
  siRNA target sequence for SGK (NM_005627.2,1000-1018).
cagctgaaaccaaatatta

SEQ ID NO: 100310 - DNA, 19 bp, Homo sapiens
  siRNA target sequence for SGK (NM_005627.2,1092-1110).
cttcatggagattaagagt

SEQ ID NO: 100311 - DNA, 19 bp, Homo sapiens
  siRNA target sequence for SGK (NM_005627.2,1111-1129).
catgtcttcttctccttaa

SEQ ID NO: 100312 - DNA, 19 bp, Homo sapiens
  siRNA target sequence for SGK (NM_005627.2,1114-1132).
gtcttcttctccttaatta

SEQ ID NO: 100313 - DNA, 19 bp, Homo sapiens
  siRNA target sequence for SGK (NM_005627.2,1146-1164).
cattaataagaagattact

SEQ ID NO: 100314 - DNA, 19 bp, Homo sapiens
  siRNA target sequence for SGK (NM_005627.2,1328-1346).
cgcctcccacggactcttt

SEQ ID NO: 100315 - DNA, 19 bp, Homo sapiens
  siRNA target sequence for SGK2 (NM_016276.3,231-249).
gcttacctcgggtaggaaa

SEQ ID NO: 100316 - DNA, 19 bp, Homo sapiens
  siRNA target sequence for SGK2 (NM_016276.3,385-403).
gatcattgctacagaatga

SEQ ID NO: 100317 - DNA, 19 bp, Homo sapiens
  siRNA target sequence for SGK2 (NM_016276.3,564-582).
gtctgatggggcgttctat

SEQ ID NO: 100318 - DNA, 19 bp, Homo sapiens
  siRNA target sequence for SGK2 (NM_016276.3,586-604).
gtgaaggtactacagaaaa

SEQ ID NO: 100319 - DNA, 19 bp, Homo sapiens
  siRNA target sequence for SGK2 (NM_016276.3,713-731).
cacctgagaagctctactt

SEQ ID NO: 100320 - DNA, 19 bp, Homo sapiens
  siRNA target sequence for SGK2 (NM_016276.3,983-1001).
gtggtacccctgagtactt

SEQ ID NO: 100321 - DNA, 19 bp, Homo sapiens
  siRNA target sequence for SGK2 (NM_016276.3,1114-1132).
gtatcccagatgtatgaga

SEQ ID NO: 100322 - DNA, 19 bp, Homo sapiens
  siRNA target sequence for SGK2 (NM_016276.3,1230-1248).
gggctccaaagcagacttt

SEQ ID NO: 100323 - DNA, 19 bp, Homo sapiens
  siRNA target sequence for SGK2 (NM_016276.3,1252-1270).
gagattaagaaccatgtat

SEQ ID NO: 100324 - DNA, 19 bp, Homo sapiens
  siRNA target sequence for SGK2 (NM_016276.3,1345-1363).
cctgctgacttgaagcatt

SEQ ID NO: 100325 - DNA, 19 bp, Homo sapiens
  siRNA target sequence for SGK2 (NM_016276.3,1346-1364).
ctgctgacttgaagcattt

SEQ ID NO: 100326 - DNA, 19 bp, Homo sapiens
  siRNA target sequence for SGK2 (NM_016276.3,1472-1490).
cgccagaggatgatgacat

SEQ ID NO: 100327 - DNA, 19 bp, Homo sapiens
  siRNA target sequence for SGKL (NM_013257.3,245-263).
gaaagctgcccaagtgtaa

SEQ ID NO: 100328 - DNA, 19 bp, Homo sapiens
  siRNA target sequence for SGKL (NM_013257.3,249-267).
gctgcccaagtgtaagcat

SEQ ID NO: 100329 - DNA, 19 bp, Homo sapiens
  siRNA target sequence for SGKL (NM_013257.3,277-295).
cgatgaacacagagagaaa

SEQ ID NO: 100330 - DNA, 19 bp, Homo sapiens
  siRNA target sequence for SGKL (NM_013257.3,349-367).
gtttgtcttcaggagatat

SEQ ID NO: 100331 - DNA, 19 bp, Homo sapiens
  siRNA target sequence for SGKL (NM_013257.3,358-376).
caggagatatgcagagttt

SEQ ID NO: 100332 - DNA, 19 bp, Homo sapiens
  siRNA target sequence for SGKL (NM_013257.3,360-378).
ggagatatgcagagtttga

SEQ ID NO: 100333 - DNA, 19 bp, Homo sapiens
  siRNA target sequence for SGKL (NM_013257.3,368-386).
gcagagtttgataaacttt

SEQ ID NO: 100334 - DNA, 19 bp, Homo sapiens
  siRNA target sequence for SGKL (NM_013257.3,369-387).
cagagtttgataaacttta

SEQ ID NO: 100335 - DNA, 19 bp, Homo sapiens
  siRNA target sequence for SGKL (NM_013257.3,411-429).
ctgctatggccctgaagat

SEQ ID NO: 100336 - DNA, 19 bp, Homo sapiens
  siRNA target sequence for SGKL (NM_013257.3,483-501).
gacgagcaggactaaacga

SEQ ID NO: 100337 - DNA, 19 bp, Homo sapiens
  siRNA target sequence for SGKL (NM_013257.3,488-506).
gcaggactaaacgaattca

SEQ ID NO: 100338 - DNA, 19 bp, Homo sapiens
  siRNA target sequence for SGKL (NM_013257.3,489-507).
caggactaaacgaattcat

SEQ ID NO: 100339 - DNA, 19 bp, Homo sapiens
  siRNA target sequence for SGKL (NM_013257.3,492-510).
gactaaacgaattcattca

SEQ ID NO: 100340 - DNA, 19 bp, Homo sapiens
  siRNA target sequence for SGKL (NM_013257.3,494-512).
ctaaacgaattcattcaga

SEQ ID NO: 100341 - DNA, 19 bp, Homo sapiens
  siRNA target sequence for SGKL (NM_013257.3,551-569).
gtcagagcattccttcaaa

SEQ ID NO: 100342 - DNA, 19 bp, Homo sapiens
  siRNA target sequence for SGKL (NM_013257.3,658-676).
cctgggaccgtctggaaat

SEQ ID NO: 100343 - DNA, 19 bp, Homo sapiens
  siRNA target sequence for SGKL (NM_013257.3,845-863).
cgtaatgtgctcttgaaaa

SEQ ID NO: 100344 - DNA, 19 bp, Homo sapiens
  siRNA target sequence for SGKL (NM_013257.3,868-886).
gaaacatccgtttttggtt

SEQ ID NO: 100345 - DNA, 19 bp, Homo sapiens
  siRNA target sequence for SGKL (NM_013257.3,884-902).
gttggattgcattattcct

SEQ ID NO: 100346 - DNA, 19 bp, Homo sapiens
  siRNA target sequence for SGKL (NM_013257.3,909-927).
caactgaaaagctttattt

SEQ ID NO: 100347 - DNA, 19 bp, Homo sapiens
  siRNA target sequence for SGKL (NM_013257.3,992-1010).
gagcacagagctaggtttt

SEQ ID NO: 100348 - DNA, 19 bp, Homo sapiens
  siRNA target sequence for SGKL (NM_013257.3,1026-1044).
ctagtgcattgggttactt

SEQ ID NO: 100349 - DNA, 19 bp, Homo sapiens
  siRNA target sequence for SGKL (NM_013257.3,1031-1049).
gcattgggttacttacatt

SEQ ID NO: 100350 - DNA, 19 bp, Homo sapiens
  siRNA target sequence for SGKL (NM_013257.3,1160-1178).
gacaccactaccacatttt

SEQ ID NO: 100351 - DNA, 19 bp, Homo sapiens
  siRNA target sequence for SGKL (NM_013257.3,1162-1180).
caccactaccacattttgt

SEQ ID NO: 100352 - DNA, 19 bp, Homo sapiens
  siRNA target sequence for SGKL (NM_013257.3,1192-1210).
gtatcttgcacctgaagta

SEQ ID NO: 100353 - DNA, 19 bp, Homo sapiens
  siRNA target sequence for SGKL (NM_013257.3,1222-1240).
gccctatgacaatactgta

SEQ ID NO: 100354 - DNA, 19 bp, Homo sapiens
  siRNA target sequence for SGKL (NM_013257.3,1225-1243).
ctatgacaatactgtagat

SEQ ID NO: 100355 - DNA, 19 bp, Homo sapiens
  siRNA target sequence for SGKL (NM_013257.3,1252-1270).
ccttggggctgttctgtat

SEQ ID NO: 100356 - DNA, 19 bp, Homo sapiens
  siRNA target sequence for SGKL (NM_013257.3,1302-1320).
gccgagatgttgctgaaat

SEQ ID NO: 100357 - DNA, 19 bp, Homo sapiens
  siRNA target sequence for SGKL (NM_013257.3,1334-1352).
cttcacaaacccctaagtt

SEQ ID NO: 100358 - DNA, 19 bp, Homo sapiens
  siRNA target sequence for SGKL (NM_013257.3,1337-1355).
cacaaacccctaagtttga

SEQ ID NO: 100359 - DNA, 19 bp, Homo sapiens
  siRNA target sequence for SGKL (NM_013257.3,1357-1375).
gccaggagtgagtcttaca

SEQ ID NO: 100360 - DNA, 19 bp, Homo sapiens
  siRNA target sequence for SGKL (NM_013257.3,1428-1446).
gtgccaaggaagactttct

SEQ ID NO: 100361 - DNA, 19 bp, Homo sapiens
  siRNA target sequence for SGKL (NM_013257.3,1456-1474).
gaatcatcctttttttgaa

SEQ ID NO: 100362 - DNA, 19 bp, Homo sapiens
  siRNA target sequence for SGKL (NM_013257.3,1482-1500).
gctgggctgaccttgtaca

SEQ ID NO: 100363 - DNA, 19 bp, Homo sapiens
  siRNA target sequence for SGKL (NM_013257.3,1483-1501).
ctgggctgaccttgtacaa

SEQ ID NO: 100364 - DNA, 19 bp, Homo sapiens
  siRNA target sequence for SGKL (NM_013257.3,1507-1525).
gattccaccaccatttaat

SEQ ID NO: 100365 - DNA, 19 bp, Homo sapiens
  siRNA target sequence for SGKL (NM_013257.3,1511-1529).
ccaccaccatttaatccta

SEQ ID NO: 100366 - DNA, 19 bp, Homo sapiens
  siRNA target sequence for SGKL (NM_013257.3,1515-1533).
caccatttaatcctaatgt

SEQ ID NO: 100367 - DNA, 19 bp, Homo sapiens
  siRNA target sequence for SGKL (NM_013257.3,1539-1557).
gaccagatgatatcagaaa

SEQ ID NO: 100368 - DNA, 19 bp, Homo sapiens
  siRNA target sequence for SGKL (NM_013257.3,1604-1622).
gtatcttctgactattcta

SEQ ID NO: 100369 - DNA, 19 bp, Homo sapiens
  siRNA target sequence for SGKL (NM_013257.3,1608-1626).
cttctgactattctatagt

SEQ ID NO: 100370 - DNA, 19 bp, Homo sapiens
  siRNA target sequence for SGKL (NM_013257.3,1611-1629).
ctgactattctatagtgaa

SEQ ID NO: 100371 - DNA, 19 bp, Homo sapiens
  siRNA target sequence for SGKL (NM_013257.3,1645-1663).
ggcagatgatgcattcgtt

SEQ ID NO: 100372 - DNA, 19 bp, Homo sapiens
  siRNA target sequence for SGKL (NM_013257.3,1655-1673).
gcattcgttggtttctctt

SEQ ID NO: 100373 - DNA, 19 bp, Homo sapiens
  siRNA target sequence for SGKL (NM_013257.3,1656-1674).
cattcgttggtttctctta

SEQ ID NO: 100374 - DNA, 19 bp, Homo sapiens
  siRNA target sequence for SGKL (NM_013257.3,1660-1678).
cgttggtttctcttatgca

SEQ ID NO: 100375 - DNA, 19 bp, Homo sapiens
  siRNA target sequence for SGKL (NM_170709.1,1187-1205).
ccagagcctcctttttatt

SEQ ID NO: 100376 - DNA, 19 bp, Homo sapiens
  siRNA target sequence for SIK2 (NM_015191.1,343-361).
ccaccctcacataatcaaa

SEQ ID NO: 100377 - DNA, 19 bp, Homo sapiens
  siRNA target sequence for SIK2 (NM_015191.1,346-364).
ccctcacataatcaaactt

SEQ ID NO: 100378 - DNA, 19 bp, Homo sapiens
  siRNA target sequence for SIK2 (NM_015191.1,347-365).
cctcacataatcaaacttt

SEQ ID NO: 100379 - DNA, 19 bp, Homo sapiens
  siRNA target sequence for SIK2 (NM_015191.1,394-412).
gtaccttgtgacagaatat

SEQ ID NO: 100380 - DNA, 19 bp, Homo sapiens
  siRNA target sequence for SIK2 (NM_015191.1,423-441).
gagaaatttttgactatct

SEQ ID NO: 100381 - DNA, 19 bp, Homo sapiens
  siRNA target sequence for SIK2 (NM_015191.1,444-462).
ctaatcatggccggttaaa

SEQ ID NO: 100382 - DNA, 19 bp, Homo sapiens
  siRNA target sequence for SIK2 (NM_015191.1,449-467).
catggccggttaaatgagt

SEQ ID NO: 100383 - DNA, 19 bp, Homo sapiens
  siRNA target sequence for SIK2 (NM_015191.1,468-486).
ctgaagccaggcgaaaatt

SEQ ID NO: 100384 - DNA, 19 bp, Homo sapiens
  siRNA target sequence for SIK2 (NM_015191.1,470-488).
gaagccaggcgaaaattct

SEQ ID NO: 100385 - DNA, 19 bp, Homo sapiens
  siRNA target sequence for SIK2 (NM_015191.1,516-534).
gtcatggtcggaagattgt

SEQ ID NO: 100386 - DNA, 19 bp, Homo sapiens
  siRNA target sequence for SIK2 (NM_015191.1,565-583).
gctggataacaacatgaat

SEQ ID NO: 100387 - DNA, 19 bp, Homo sapiens
  siRNA target sequence for SIK2 (NM_015191.1,601-619).
cggttttggaaatttcttt

SEQ ID NO: 100388 - DNA, 19 bp, Homo sapiens
  siRNA target sequence for SIK2 (NM_015191.1,723-741).
gtatgggagttgttcttta

SEQ ID NO: 100389 - DNA, 19 bp, Homo sapiens
  siRNA target sequence for SIK2 (NM_015191.1,773-791).
ggaccgactcttccaattt

SEQ ID NO: 100390 - DNA, 19 bp, Homo sapiens
  siRNA target sequence for SIK2 (NM_015191.1,774-792).
gaccgactcttccaatttt

SEQ ID NO: 100391 - DNA, 19 bp, Homo sapiens
  siRNA target sequence for SIK2 (NM_015191.1,801-819).
gggttctggaaggaagatt

SEQ ID NO: 100392 - DNA, 19 bp, Homo sapiens
  siRNA target sequence for SIK2 (NM_015191.1,821-839).
cggattccgtatttcatgt

SEQ ID NO: 100393 - DNA, 19 bp, Homo sapiens
  siRNA target sequence for SIK2 (NM_015191.1,829-847).
gtatttcatgtcagaagat

SEQ ID NO: 100394 - DNA, 19 bp, Homo sapiens
  siRNA target sequence for SIK2 (NM_015191.1,874-892).
ggtcctagacccatccaaa

SEQ ID NO: 100395 - DNA, 19 bp, Homo sapiens
  siRNA target sequence for SIK2 (NM_015191.1,885-903).
catccaaacggctaaccat

SEQ ID NO: 100396 - DNA, 19 bp, Homo sapiens
  siRNA target sequence for SIK2 (NM_015191.1,896-914).
ctaaccatagcccaaatca

SEQ ID NO: 100397 - DNA, 19 bp, Homo sapiens
  siRNA target sequence for SIK2 (NM_015191.1,907-925).
ccaaatcaaggagcataaa

SEQ ID NO: 100398 - DNA, 19 bp, Homo sapiens
  siRNA target sequence for SIK2 (NM_015191.1,949-967).
ccagagacctgttctctat

SEQ ID NO: 100399 - DNA, 19 bp, Homo sapiens
  siRNA target sequence for SIK2 (NM_015191.1,990-1008).
catccatcggggagtttaa

SEQ ID NO: 100400 - DNA, 19 bp, Homo sapiens
  siRNA target sequence for SIK2 (NM_015191.1,993-1011).
ccatcggggagtttaatga

SEQ ID NO: 100401 - DNA, 19 bp, Homo sapiens
  siRNA target sequence for SIK2 (NM_015191.1,1027-1045).
gatgcacagccttggaata

SEQ ID NO: 100402 - DNA, 19 bp, Homo sapiens
  siRNA target sequence for SIK2 (NM_015191.1,1097-1115).
gctgccatttatttcttgt

SEQ ID NO: 100403 - DNA, 19 bp, Homo sapiens
  siRNA target sequence for SIK2 (NM_015191.1,1306-1324).
ggaggccttttcatttcca

SEQ ID NO: 100404 - DNA, 19 bp, Homo sapiens
  siRNA target sequence for SIK2 (NM_015191.1,1651-1669).
cagtgtggactctgagtat

SEQ ID NO: 100405 - DNA, 19 bp, Homo sapiens
  siRNA target sequence for SIK2 (NM_015191.1,1719-1737).
cccttaaggacatcatgtt

SEQ ID NO: 100406 - DNA, 19 bp, Homo sapiens
  siRNA target sequence for SIK2 (NM_015191.1,1720-1738).
ccttaaggacatcatgtta

SEQ ID NO: 100407 - DNA, 19 bp, Homo sapiens
  siRNA target sequence for SIK2 (NM_015191.1,1759-1777).
catgacatctcccttcata

SEQ ID NO: 100408 - DNA, 19 bp, Homo sapiens
  siRNA target sequence for SIK2 (NM_015191.1,1894-1912).
ccagggaattgtagcattt

SEQ ID NO: 100409 - DNA, 19 bp, Homo sapiens
  siRNA target sequence for SIK2 (NM_015191.1,1897-1915).
gggaattgtagcatttaga

SEQ ID NO: 100410 - DNA, 19 bp, Homo sapiens
  siRNA target sequence for SIK2 (NM_015191.1,1899-1917).
gaattgtagcatttagaca

SEQ ID NO: 100411 - DNA, 19 bp, Homo sapiens
  siRNA target sequence for SIK2 (NM_015191.1,1946-1964).
ggaattctagagttgaaca

SEQ ID NO: 100412 - DNA, 19 bp, Homo sapiens
  siRNA target sequence for SIK2 (NM_015191.1,1947-1965).
gaattctagagttgaacaa

SEQ ID NO: 100413 - DNA, 19 bp, Homo sapiens
  siRNA target sequence for SIK2 (NM_015191.1,1972-1990).
gttgttgtatgaacaaata

SEQ ID NO: 100414 - DNA, 19 bp, Homo sapiens
  siRNA target sequence for SIK2 (NM_015191.1,2205-2223).
cctgtcagctttattgcaa

SEQ ID NO: 100415 - DNA, 19 bp, Homo sapiens
  siRNA target sequence for SIK2 (NM_015191.1,2269-2287).
ccagcagaagcgactcttt

SEQ ID NO: 100416 - DNA, 19 bp, Homo sapiens
  siRNA target sequence for SIK2 (NM_015191.1,2272-2290).
gcagaagcgactctttctt

SEQ ID NO: 100417 - DNA, 19 bp, Homo sapiens
  siRNA target sequence for SIK2 (NM_015191.1,2303-2321).
caactgcaggcctatttta

SEQ ID NO: 100418 - DNA, 19 bp, Homo sapiens
  siRNA target sequence for SIK2 (NM_015191.1,2309-2327).
caggcctattttaatcaga

SEQ ID NO: 100419 - DNA, 19 bp, Homo sapiens
  siRNA target sequence for SIK2 (NM_015191.1,2460-2478).
cctccgagcagatgcaata

SEQ ID NO: 100420 - DNA, 19 bp, Homo sapiens
  siRNA target sequence for SIK2 (NM_015191.1,2829-2847).
ctggactctttgattgtga

SEQ ID NO: 100421 - DNA, 19 bp, Homo sapiens
  siRNA target sequence for SIK2 (NM_015191.1,2879-2897).
gggtatgtcctggtgaatt

SEQ ID NO: 100422 - DNA, 19 bp, Homo sapiens
  siRNA target sequence for SKD3 (NM_030813.3,270-288).
cagggaggacgcttcgata

SEQ ID NO: 100423 - DNA, 19 bp, Homo sapiens
  siRNA target sequence for SKD3 (NM_030813.3,274-292).
gaggacgcttcgataccaa

SEQ ID NO: 100424 - DNA, 19 bp, Homo sapiens
  siRNA target sequence for SKD3 (NM_030813.3,276-294).
ggacgcttcgataccaaat

SEQ ID NO: 100425 - DNA, 19 bp, Homo sapiens
  siRNA target sequence for SKD3 (NM_030813.3,325-343).
ctggtcccgaagaaacact

SEQ ID NO: 100426 - DNA, 19 bp, Homo sapiens
  siRNA target sequence for SKD3 (NM_030813.3,408-426).
gcagcgctggtggttcatt

SEQ ID NO: 100427 - DNA, 19 bp, Homo sapiens
  siRNA target sequence for SKD3 (NM_030813.3,412-430).
cgctggtggttcattgcta

SEQ ID NO: 100428 - DNA, 19 bp, Homo sapiens
  siRNA target sequence for SKD3 (NM_030813.3,472-490).
ctgcccgtgccaacaatat

SEQ ID NO: 100429 - DNA, 19 bp, Homo sapiens
  siRNA target sequence for SKD3 (NM_030813.3,475-493).
cccgtgccaacaatatgca

SEQ ID NO: 100430 - DNA, 19 bp, Homo sapiens
  siRNA target sequence for SKD3 (NM_030813.3,476-494).
ccgtgccaacaatatgcaa

SEQ ID NO: 100431 - DNA, 19 bp, Homo sapiens
  siRNA target sequence for SKD3 (NM_030813.3,481-499).
ccaacaatatgcaagaagt

SEQ ID NO: 100432 - DNA, 19 bp, Homo sapiens
  siRNA target sequence for SKD3 (NM_030813.3,514-532).
cagaaggtgcagatgtcaa

SEQ ID NO: 100433 - DNA, 19 bp, Homo sapiens
  siRNA target sequence for SKD3 (NM_030813.3,672-690).
gaacagggaatccattctt

SEQ ID NO: 100434 - DNA, 19 bp, Homo sapiens
  siRNA target sequence for SKD3 (NM_030813.3,714-732).
gcaagccggcacatcacaa

SEQ ID NO: 100435 - DNA, 19 bp, Homo sapiens
  siRNA target sequence for SKD3 (NM_030813.3,796-814).
cccgagaggatgacttcaa

SEQ ID NO: 100436 - DNA, 19 bp, Homo sapiens
  siRNA target sequence for SKD3 (NM_030813.3,799-817).
gagaggatgacttcaacaa

SEQ ID NO: 100437 - DNA, 19 bp, Homo sapiens
  siRNA target sequence for SKD3 (NM_030813.3,945-963).
ggacacacacccttggatt

SEQ ID NO: 100438 - DNA, 19 bp, Homo sapiens
  siRNA target sequence for SKD3 (NM_030813.3,946-964).
gacacacacccttggatta

SEQ ID NO: 100439 - DNA, 19 bp, Homo sapiens
  siRNA target sequence for SKD3 (NM_030813.3,967-985).
cccgagaaggggaagtgat

SEQ ID NO: 100440 - DNA, 19 bp, Homo sapiens
  siRNA target sequence for SKD3 (NM_030813.3,970-988).
gagaaggggaagtgatgaa

SEQ ID NO: 100441 - DNA, 19 bp, Homo sapiens
  siRNA target sequence for SKD3 (NM_030813.3,989-1007).
gcttctgaggacttctgaa

SEQ ID NO: 100442 - DNA, 19 bp, Homo sapiens
  siRNA target sequence for SKD3 (NM_030813.3,1063-1081).
ccctggagcagcgactaaa

SEQ ID NO: 100443 - DNA, 19 bp, Homo sapiens
  siRNA target sequence for SKD3 (NM_030813.3,1075-1093).
gactaaaggagcacatcat

SEQ ID NO: 100444 - DNA, 19 bp, Homo sapiens
  siRNA target sequence for SKD3 (NM_030813.3,1150-1168).
gctggtacgatgaagaaca

SEQ ID NO: 100445 - DNA, 19 bp, Homo sapiens
  siRNA target sequence for SKD3 (NM_030813.3,1254-1272).
gctaaaaagggcttcatca

SEQ ID NO: 100446 - DNA, 19 bp, Homo sapiens
  siRNA target sequence for SKD3 (NM_030813.3,1492-1510).
ggaagaccattgattgcaa

SEQ ID NO: 100447 - DNA, 19 bp, Homo sapiens
  siRNA target sequence for SKD3 (NM_030813.3,1507-1525).
gcaaggacgccatcttcat

SEQ ID NO: 100448 - DNA, 19 bp, Homo sapiens
  siRNA target sequence for SKD3 (NM_030813.3,1625-1643).
gggggatgtccagataagt

SEQ ID NO: 100449 - DNA, 19 bp, Homo sapiens
  siRNA target sequence for SKD3 (NM_030813.3,1627-1645).
gggatgtccagataagtga

SEQ ID NO: 100450 - DNA, 19 bp, Homo sapiens
  siRNA target sequence for SKD3 (NM_030813.3,1721-1739).
gtttctgggacggatcaat

SEQ ID NO: 100451 - DNA, 19 bp, Homo sapiens
  siRNA target sequence for SKD3 (NM_030813.3,1785-1803).
ctcgtcaacaaggaactaa

SEQ ID NO: 100452 - DNA, 19 bp, Homo sapiens
  siRNA target sequence for SKD3 (NM_030813.3,1874-1892).
gctggtcgacggctacaat

SEQ ID NO: 100453 - DNA, 19 bp, Homo sapiens
  siRNA target sequence for SMC1L1 (NM_006306.2,111-129).
gtacaagggtcgacagatt

SEQ ID NO: 100454 - DNA, 19 bp, Homo sapiens
  siRNA target sequence for SMC1L1 (NM_006306.2,173-191).
gctctggtaagtcaaatct

SEQ ID NO: 100455 - DNA, 19 bp, Homo sapiens
  siRNA target sequence for SMC1L1 (NM_006306.2,176-194).
ctggtaagtcaaatctcat

SEQ ID NO: 100456 - DNA, 19 bp, Homo sapiens
  siRNA target sequence for SMC1L1 (NM_006306.2,348-366).
ctttgcccgtgtcattgta

SEQ ID NO: 100457 - DNA, 19 bp, Homo sapiens
  siRNA target sequence for SMC1L1 (NM_006306.2,396-414).
caaagtggtccaactacat

SEQ ID NO: 100458 - DNA, 19 bp, Homo sapiens
  siRNA target sequence for SMC1L1 (NM_006306.2,521-539).
ggacagctctatttgaaga

SEQ ID NO: 100459 - DNA, 19 bp, Homo sapiens
  siRNA target sequence for SMC1L1 (NM_006306.2,526-544).
gctctatttgaagagatta

SEQ ID NO: 100460 - DNA, 19 bp, Homo sapiens
  siRNA target sequence for SMC1L1 (NM_006306.2,1033-1051).
gctcagaagcactacaaga

SEQ ID NO: 100461 - DNA, 19 bp, Homo sapiens
  siRNA target sequence for SMC1L1 (NM_006306.2,1044-1062).
ctacaagaagcgtaaaggt

SEQ ID NO: 100462 - DNA, 19 bp, Homo sapiens
  siRNA target sequence for SMC1L1 (NM_006306.2,1188-1206).
gaaataccaccggttgaaa

SEQ ID NO: 100463 - DNA, 19 bp, Homo sapiens
  siRNA target sequence for SMC1L1 (NM_006306.2,1464-1482).
ggccaagcggcgtattgat

SEQ ID NO: 100464 - DNA, 19 bp, Homo sapiens
  siRNA target sequence for SMC1L1 (NM_006306.2,1466-1484).
ccaagcggcgtattgatga

SEQ ID NO: 100465 - DNA, 19 bp, Homo sapiens
  siRNA target sequence for SMC1L1 (NM_006306.2,1467-1485).
caagcggcgtattgatgaa

SEQ ID NO: 100466 - DNA, 19 bp, Homo sapiens
  siRNA target sequence for SMC1L1 (NM_006306.2,1471-1489).
cggcgtattgatgaaatca

SEQ ID NO: 100467 - DNA, 19 bp, Homo sapiens
  siRNA target sequence for SMC1L1 (NM_006306.2,1473-1491).
gcgtattgatgaaatcaat

SEQ ID NO: 100468 - DNA, 19 bp, Homo sapiens
  siRNA target sequence for SMC1L1 (NM_006306.2,1729-1747).
cgggactgtattcagtata

SEQ ID NO: 100469 - DNA, 19 bp, Homo sapiens
  siRNA target sequence for SMC1L1 (NM_006306.2,1797-1815).
ggaggtgaagcctacagat

SEQ ID NO: 100470 - DNA, 19 bp, Homo sapiens
  siRNA target sequence for SMC1L1 (NM_006306.2,1845-1863).
gctagtgattgatgtgatt

SEQ ID NO: 100471 - DNA, 19 bp, Homo sapiens
  siRNA target sequence for SMC1L1 (NM_006306.2,2213-2231).
cccagagtgacctagaaca

SEQ ID NO: 100472 - DNA, 19 bp, Homo sapiens
  siRNA target sequence for SMC1L1 (NM_006306.2,2232-2250).
gaccaagacacgacatcta

SEQ ID NO: 100473 - DNA, 19 bp, Homo sapiens
  siRNA target sequence for SMC1L1 (NM_006306.2,2252-2270).
ccctgaatctgcaggaaaa

SEQ ID NO: 100474 - DNA, 19 bp, Homo sapiens
  siRNA target sequence for SMC1L1 (NM_006306.2,2283-2301).
gagtgagctagccaacttt

SEQ ID NO: 100475 - DNA, 19 bp, Homo sapiens
  siRNA target sequence for SMC1L1 (NM_006306.2,2298-2316).
ctttgggcctcgcattaat

SEQ ID NO: 100476 - DNA, 19 bp, Homo sapiens
  siRNA target sequence for SMC1L1 (NM_006306.2,2303-2321).
ggcctcgcattaatgatat

SEQ ID NO: 100477 - DNA, 19 bp, Homo sapiens
  siRNA target sequence for SMC1L1 (NM_006306.2,2305-2323).
cctcgcattaatgatatca

SEQ ID NO: 100478 - DNA, 19 bp, Homo sapiens
  siRNA target sequence for SMC1L1 (NM_006306.2,2306-2324).
ctcgcattaatgatatcaa

SEQ ID NO: 100479 - DNA, 19 bp, Homo sapiens
  siRNA target sequence for SMC1L1 (NM_006306.2,2308-2326).
cgcattaatgatatcaaga

SEQ ID NO: 100480 - DNA, 19 bp, Homo sapiens
  siRNA target sequence for SMC1L1 (NM_006306.2,2458-2476).
gtgaaacggcagaatgaaa

SEQ ID NO: 100481 - DNA, 19 bp, Homo sapiens
  siRNA target sequence for SMC1L1 (NM_006306.2,2513-2531).
ctcgcttgggcattcagtt

SEQ ID NO: 100482 - DNA, 19 bp, Homo sapiens
  siRNA target sequence for SMC1L1 (NM_006306.2,2706-2724).
caagaagtcggaagtgaat

SEQ ID NO: 100483 - DNA, 19 bp, Homo sapiens
  siRNA target sequence for SMC1L1 (NM_006306.2,2714-2732).
cggaagtgaatgacaagaa

SEQ ID NO: 100484 - DNA, 19 bp, Homo sapiens
  siRNA target sequence for SMC1L1 (NM_006306.2,2737-2755).
gagatggaggagattcgta

SEQ ID NO: 100485 - DNA, 19 bp, Homo sapiens
  siRNA target sequence for SMC1L1 (NM_006306.2,2742-2760).
ggaggagattcgtaagaaa

SEQ ID NO: 100486 - DNA, 19 bp, Homo sapiens
  siRNA target sequence for SMC1L1 (NM_006306.2,2837-2855).
gcagtgaccgtcacaactt

SEQ ID NO: 100487 - DNA, 19 bp, Homo sapiens
  siRNA target sequence for SMC1L1 (NM_006306.2,2867-2885).
gtaagatgcaggacattaa

SEQ ID NO: 100488 - DNA, 19 bp, Homo sapiens
  siRNA target sequence for SMC1L1 (NM_006306.2,2906-2924).
ccatggatgatattagtca

SEQ ID NO: 100489 - DNA, 19 bp, Homo sapiens
  siRNA target sequence for SMC1L1 (NM_006306.2,2992-3010).
cgagaggccctcattgaga

SEQ ID NO: 100490 - DNA, 19 bp, Homo sapiens
  siRNA target sequence for SMC1L1 (NM_006306.2,2993-3011).
gagaggccctcattgagat

SEQ ID NO: 100491 - DNA, 19 bp, Homo sapiens
  siRNA target sequence for SMC1L1 (NM_006306.2,2998-3016).
gccctcattgagattgact

SEQ ID NO: 100492 - DNA, 19 bp, Homo sapiens
  siRNA target sequence for SMC1L1 (NM_006306.2,3212-3230).
cccgaaagcgagcaaagaa

SEQ ID NO: 100493 - DNA, 19 bp, Homo sapiens
  siRNA target sequence for SMC1L1 (NM_006306.2,3231-3249).
ggccaagcaggcattcgaa

SEQ ID NO: 100494 - DNA, 19 bp, Homo sapiens
  siRNA target sequence for SMC1L1 (NM_006306.2,3241-3259).
gcattcgaacagatcaaga

SEQ ID NO: 100495 - DNA, 19 bp, Homo sapiens
  siRNA target sequence for SMC1L1 (NM_006306.2,3242-3260).
cattcgaacagatcaagaa

SEQ ID NO: 100496 - DNA, 19 bp, Homo sapiens
  siRNA target sequence for SMC1L1 (NM_006306.2,3264-3282).
gcgctttgaccgcttcaat

SEQ ID NO: 100497 - DNA, 19 bp, Homo sapiens
  siRNA target sequence for SMC1L1 (NM_006306.2,3273-3291).
ccgcttcaatgcttgtttt

SEQ ID NO: 100498 - DNA, 19 bp, Homo sapiens
  siRNA target sequence for SMC1L1 (NM_006306.2,3328-3346).
gccctgtcccgcaatagca

SEQ ID NO: 100499 - DNA, 19 bp, Homo sapiens
  siRNA target sequence for SMC1L1 (NM_006306.2,3436-3454).
cggcctatggacaacttgt

SEQ ID NO: 100500 - DNA, 19 bp, Homo sapiens
  siRNA target sequence for SMC1L1 (NM_006306.2,3571-3589).
ggcaaggtggcaaattaca

SEQ ID NO: 100501 - DNA, 19 bp, Homo sapiens
  siRNA target sequence for SMC1L1 (NM_006306.2,3572-3590).
gcaaggtggcaaattacat

SEQ ID NO: 100502 - DNA, 19 bp, Homo sapiens
  siRNA target sequence for SMC1L1 (NM_006306.2,3632-3650).
ctctcaaggaggagttcta

SEQ ID NO: 100503 - DNA, 19 bp, Homo sapiens
  siRNA target sequence for SMC1L1 (NM_006306.2,3663-3681).
gagcctcattggagtctat

SEQ ID NO: 100504 - DNA, 19 bp, Homo sapiens
  siRNA target sequence for SMC1L2 (NM_148674.1,99-117).
caacggctctggaaaatct

SEQ ID NO: 100505 - DNA, 19 bp, Homo sapiens
  siRNA target sequence for SMC1L2 (NM_148674.1,126-144).
ggatgcacttagttttgta

SEQ ID NO: 100506 - DNA, 19 bp, Homo sapiens
  siRNA target sequence for SMC1L2 (NM_148674.1,196-214).
catggagcacatattggaa

SEQ ID NO: 100507 - DNA, 19 bp, Homo sapiens
  siRNA target sequence for SMC1L2 (NM_148674.1,308-326).
cagaatttcgctttaatga

SEQ ID NO: 100508 - DNA, 19 bp, Homo sapiens
  siRNA target sequence for SMC1L2 (NM_148674.1,310-328).
gaatttcgctttaatgata

SEQ ID NO: 100509 - DNA, 19 bp, Homo sapiens
  siRNA target sequence for SMC1L2 (NM_148674.1,369-387).
gataggcataatagtcaaa

SEQ ID NO: 100510 - DNA, 19 bp, Homo sapiens
  siRNA target sequence for SMC1L2 (NM_148674.1,412-430).
ggaactgtagagtcaattt

SEQ ID NO: 100511 - DNA, 19 bp, Homo sapiens
  siRNA target sequence for SMC1L2 (NM_148674.1,476-494).
gcacttcaggagagcttat

SEQ ID NO: 100512 - DNA, 19 bp, Homo sapiens
  siRNA target sequence for SMC1L2 (NM_148674.1,540-558).
ggatgcacagtttaacttt

SEQ ID NO: 100513 - DNA, 19 bp, Homo sapiens
  siRNA target sequence for SMC1L2 (NM_148674.1,581-599).
cagagcgcagacaagcaaa

SEQ ID NO: 100514 - DNA, 19 bp, Homo sapiens
  siRNA target sequence for SMC1L2 (NM_148674.1,583-601).
gagcgcagacaagcaaaat

SEQ ID NO: 100515 - DNA, 19 bp, Homo sapiens
  siRNA target sequence for SMC1L2 (NM_148674.1,585-603).
gcgcagacaagcaaaatta

SEQ ID NO: 100516 - DNA, 19 bp, Homo sapiens
  siRNA target sequence for SMC1L2 (NM_148674.1,587-605).
gcagacaagcaaaattaga

SEQ ID NO: 100517 - DNA, 19 bp, Homo sapiens
  siRNA target sequence for SMC1L2 (NM_148674.1,679-697).
caactataccataatgaga

SEQ ID NO: 100518 - DNA, 19 bp, Homo sapiens
  siRNA target sequence for SMC1L2 (NM_148674.1,682-700).
ctataccataatgagaaaa

SEQ ID NO: 100519 - DNA, 19 bp, Homo sapiens
  siRNA target sequence for SMC1L2 (NM_148674.1,687-705).
ccataatgagaaaaagatt

SEQ ID NO: 100520 - DNA, 19 bp, Homo sapiens
  siRNA target sequence for SMC1L2 (NM_148674.1,719-737).
ccaagttagagcatgtgaa

SEQ ID NO: 100521 - DNA, 19 bp, Homo sapiens
  siRNA target sequence for SMC1L2 (NM_148674.1,730-748).
catgtgaatagggatttga

SEQ ID NO: 100522 - DNA, 19 bp, Homo sapiens
  siRNA target sequence for SMC1L2 (NM_148674.1,749-767).
gtgtcaaaagagagtcttt

SEQ ID NO: 100523 - DNA, 19 bp, Homo sapiens
  siRNA target sequence for SMC1L2 (NM_148674.1,891-909).
gtacattaaagccaaagaa

SEQ ID NO: 100524 - DNA, 19 bp, Homo sapiens
  siRNA target sequence for SMC1L2 (NM_148674.1,940-958).
gtggctaagaaatcaataa

SEQ ID NO: 100525 - DNA, 19 bp, Homo sapiens
  siRNA target sequence for SMC1L2 (NM_148674.1,961-979).
gacagcgaaaaacaatgtt

SEQ ID NO: 100526 - DNA, 19 bp, Homo sapiens
  siRNA target sequence for SMC1L2 (NM_148674.1,963-981).
cagcgaaaaacaatgttct

SEQ ID NO: 100527 - DNA, 19 bp, Homo sapiens
  siRNA target sequence for SMC1L2 (NM_148674.1,965-983).
gcgaaaaacaatgttctaa

SEQ ID NO: 100528 - DNA, 19 bp, Homo sapiens
  siRNA target sequence for SMC1L2 (NM_148674.1,1106-1124).
ccagtcagctggatcgtta

SEQ ID NO: 100529 - DNA, 19 bp, Homo sapiens
  siRNA target sequence for SMC1L2 (NM_148674.1,1109-1127).
gtcagctggatcgttataa

SEQ ID NO: 100530 - DNA, 19 bp, Homo sapiens
  siRNA target sequence for SMC1L2 (NM_148674.1,1113-1131).
gctggatcgttataaagaa

SEQ ID NO: 100531 - DNA, 19 bp, Homo sapiens
  siRNA target sequence for SMC1L2 (NM_148674.1,1116-1134).
ggatcgttataaagaactt

SEQ ID NO: 100532 - DNA, 19 bp, Homo sapiens
  siRNA target sequence for SMC1L2 (NM_148674.1,1117-1135).
gatcgttataaagaactta

SEQ ID NO: 100533 - DNA, 19 bp, Homo sapiens
  siRNA target sequence for SMC1L2 (NM_148674.1,1160-1178).
ctacaatgactcaacaact

SEQ ID NO: 100534 - DNA, 19 bp, Homo sapiens
  siRNA target sequence for SMC1L2 (NM_148674.1,1167-1185).
gactcaacaactggaaaaa

SEQ ID NO: 100535 - DNA, 19 bp, Homo sapiens
  siRNA target sequence for SMC1L2 (NM_148674.1,1315-1333).
gaggagtatacaaagacat

SEQ ID NO: 100536 - DNA, 19 bp, Homo sapiens
  siRNA target sequence for SMC1L2 (NM_148674.1,1334-1352).
gcatggattgcttgaaaga

SEQ ID NO: 100537 - DNA, 19 bp, Homo sapiens
  siRNA target sequence for SMC1L2 (NM_148674.1,1406-1424).
gaatgtctgaatttaatga

SEQ ID NO: 100538 - DNA, 19 bp, Homo sapiens
  siRNA target sequence for SMC1L2 (NM_148674.1,1480-1498).
ggaaaacgtcagcaaaaga

SEQ ID NO: 100539 - DNA, 19 bp, Homo sapiens
  siRNA target sequence for SMC1L2 (NM_148674.1,1564-1582).
ctgtgtcatcctattcata

SEQ ID NO: 100540 - DNA, 19 bp, Homo sapiens
  siRNA target sequence for SMC1L2 (NM_148674.1,1570-1588).
catcctattcataagaaat

SEQ ID NO: 100541 - DNA, 19 bp, Homo sapiens
  siRNA target sequence for SMC1L2 (NM_148674.1,1574-1592).
ctattcataagaaatacca

SEQ ID NO: 100542 - DNA, 19 bp, Homo sapiens
  siRNA target sequence for SMC1L2 (NM_148674.1,1594-1612).
ctggctgttactaaggttt

SEQ ID NO: 100543 - DNA, 19 bp, Homo sapiens
  siRNA target sequence for SMC1L2 (NM_148674.1,1609-1627).
gtttttggccggttcatca

SEQ ID NO: 100544 - DNA, 19 bp, Homo sapiens
  siRNA target sequence for SMC1L2 (NM_148674.1,1643-1661).
cctctgaaaaggtagcaaa

SEQ ID NO: 100545 - DNA, 19 bp, Homo sapiens
  siRNA target sequence for SMC1L2 (NM_148674.1,1657-1675).
gcaaaagattgtattcgat

SEQ ID NO: 100546 - DNA, 19 bp, Homo sapiens
  siRNA target sequence for SMC1L2 (NM_148674.1,1704-1722).
gacattcctcgctctagat

SEQ ID NO: 100547 - DNA, 19 bp, Homo sapiens
  siRNA target sequence for SMC1L2 (NM_148674.1,1706-1724).
cattcctcgctctagatta

SEQ ID NO: 100548 - DNA, 19 bp, Homo sapiens
  siRNA target sequence for SMC1L2 (NM_148674.1,1710-1728).
cctcgctctagattacctt

SEQ ID NO: 100549 - DNA, 19 bp, Homo sapiens
  siRNA target sequence for SMC1L2 (NM_148674.1,1714-1732).
gctctagattaccttgata

SEQ ID NO: 100550 - DNA, 19 bp, Homo sapiens
  siRNA target sequence for SMC1L2 (NM_148674.1,1715-1733).
ctctagattaccttgatat

SEQ ID NO: 100551 - DNA, 19 bp, Homo sapiens
  siRNA target sequence for SMC1L2 (NM_148674.1,1734-1752).
caagccaatcaatgaaaga

SEQ ID NO: 100552 - DNA, 19 bp, Homo sapiens
  siRNA target sequence for SMC1L2 (NM_148674.1,1758-1776).
ggagcttaaaggctgtaaa

SEQ ID NO: 100553 - DNA, 19 bp, Homo sapiens
  siRNA target sequence for SMC1L2 (NM_148674.1,1759-1777).
gagcttaaaggctgtaaaa

SEQ ID NO: 100554 - DNA, 19 bp, Homo sapiens
  siRNA target sequence for SMC1L2 (NM_148674.1,1780-1798).
gtgattgatgtcataaaga

SEQ ID NO: 100555 - DNA, 19 bp, Homo sapiens
  siRNA target sequence for SMC1L2 (NM_148674.1,1921-1939).
cttgatggaacattatttt

SEQ ID NO: 100556 - DNA, 19 bp, Homo sapiens
  siRNA target sequence for SMC1L2 (NM_148674.1,1964-1982).
ggtcaagtgacttaaaata

SEQ ID NO: 100557 - DNA, 19 bp, Homo sapiens
  siRNA target sequence for SMC1L2 (NM_148674.1,1997-2015).
gggatgagaaagagttaaa

SEQ ID NO: 100558 - DNA, 19 bp, Homo sapiens
  siRNA target sequence for SMC1L2 (NM_148674.1,2026-2044).
gacagacgaagccagaaaa

SEQ ID NO: 100559 - DNA, 19 bp, Homo sapiens
  siRNA target sequence for SMC1L2 (NM_148674.1,2047-2065).
caagagctaaagggtttaa

SEQ ID NO: 100560 - DNA, 19 bp, Homo sapiens
  siRNA target sequence for SMC1L2 (NM_148674.1,2070-2088).
gacactccgcaaagaaaca

SEQ ID NO: 100561 - DNA, 19 bp, Homo sapiens
  siRNA target sequence for SMC1L2 (NM_148674.1,2072-2090).
cactccgcaaagaaacaga

SEQ ID NO: 100562 - DNA, 19 bp, Homo sapiens
  siRNA target sequence for SMC1L2 (NM_148674.1,2077-2095).
cgcaaagaaacagatttga

SEQ ID NO: 100563 - DNA, 19 bp, Homo sapiens
  siRNA target sequence for SMC1L2 (NM_148674.1,2123-2141).
ctcaaacacgactcaaata

SEQ ID NO: 100564 - DNA, 19 bp, Homo sapiens
  siRNA target sequence for SMC1L2 (NM_148674.1,2125-2143).
caaacacgactcaaatatt

SEQ ID NO: 100565 - DNA, 19 bp, Homo sapiens
  siRNA target sequence for SMC1L2 (NM_148674.1,2129-2147).
cacgactcaaatattcaca

SEQ ID NO: 100566 - DNA, 19 bp, Homo sapiens
  siRNA target sequence for SMC1L2 (NM_148674.1,2131-2149).
cgactcaaatattcacaaa

SEQ ID NO: 100567 - DNA, 19 bp, Homo sapiens
  siRNA target sequence for SMC1L2 (NM_148674.1,2193-2211).
ccaggaacaatctcagtta

SEQ ID NO: 100568 - DNA, 19 bp, Homo sapiens
  siRNA target sequence for SMC1L2 (NM_148674.1,2216-2234).
gtgaactactaaatattga

SEQ ID NO: 100569 - DNA, 19 bp, Homo sapiens
  siRNA target sequence for SMC1L2 (NM_148674.1,2269-2287).
gaacgacaacgaagaatta

SEQ ID NO: 100570 - DNA, 19 bp, Homo sapiens
  siRNA target sequence for SMC1L2 (NM_148674.1,2304-2322).
gatagataaggtcatgaat

SEQ ID NO: 100571 - DNA, 19 bp, Homo sapiens
  siRNA target sequence for SMC1L2 (NM_148674.1,2313-2331).
ggtcatgaatgttatattt

SEQ ID NO: 100572 - DNA, 19 bp, Homo sapiens
  siRNA target sequence for SMC1L2 (NM_148674.1,2425-2443).
gaaattgatcaaaaaaggt

SEQ ID NO: 100573 - DNA, 19 bp, Homo sapiens
  siRNA target sequence for SMC1L2 (NM_148674.1,2463-2481).
ggtaaggagcttacatatt

SEQ ID NO: 100574 - DNA, 19 bp, Homo sapiens
  siRNA target sequence for SMC1L2 (NM_148674.1,2464-2482).
gtaaggagcttacatattt

SEQ ID NO: 100575 - DNA, 19 bp, Homo sapiens
  siRNA target sequence for SMC1L2 (NM_148674.1,2636-2654).
ccagtgccgagaaagttca

SEQ ID NO: 100576 - DNA, 19 bp, Homo sapiens
  siRNA target sequence for SMC1L2 (NM_148674.1,2637-2655).
cagtgccgagaaagttcaa

SEQ ID NO: 100577 - DNA, 19 bp, Homo sapiens
  siRNA target sequence for SMC1L2 (NM_148674.1,2728-2746).
gttgtaagtattcaaactt

SEQ ID NO: 100578 - DNA, 19 bp, Homo sapiens
  siRNA target sequence for SMC1L2 (NM_148674.1,2761-2779).
cgattagagaagcataact

SEQ ID NO: 100579 - DNA, 19 bp, Homo sapiens
  siRNA target sequence for SMC1L2 (NM_148674.1,2762-2780).
gattagagaagcataactt

SEQ ID NO: 100580 - DNA, 19 bp, Homo sapiens
  siRNA target sequence for SMC1L2 (NM_148674.1,2773-2791).
cataacttgctgcttgatt

SEQ ID NO: 100581 - DNA, 19 bp, Homo sapiens
  siRNA target sequence for SMC1L2 (NM_148674.1,2797-2815).
gtgcaagacattgagataa

SEQ ID NO: 100582 - DNA, 19 bp, Homo sapiens
  siRNA target sequence for SMC1L2 (NM_148674.1,2825-2843).
cggggtcactggatgacat

SEQ ID NO: 100583 - DNA, 19 bp, Homo sapiens
  siRNA target sequence for SMC1L2 (NM_148674.1,2888-2906).
cccaggcaacaattgatat

SEQ ID NO: 100584 - DNA, 19 bp, Homo sapiens
  siRNA target sequence for SMC1L2 (NM_148674.1,2890-2908).
caggcaacaattgatatct

SEQ ID NO: 100585 - DNA, 19 bp, Homo sapiens
  siRNA target sequence for SMC1L2 (NM_148674.1,2892-2910).
ggcaacaattgatatctat

SEQ ID NO: 100586 - DNA, 19 bp, Homo sapiens
  siRNA target sequence for SMC1L2 (NM_148674.1,2894-2912).
caacaattgatatctatga

SEQ ID NO: 100587 - DNA, 19 bp, Homo sapiens
  siRNA target sequence for SMC1L2 (NM_148674.1,2920-2938).
gaagcctttgaaatagact

SEQ ID NO: 100588 - DNA, 19 bp, Homo sapiens
  siRNA target sequence for SMC1L2 (NM_148674.1,2964-2982).
ggctctacagtctgatcaa

SEQ ID NO: 100589 - DNA, 19 bp, Homo sapiens
  siRNA target sequence for SMC1L2 (NM_148674.1,3019-3037).
gtagcatcccaggaagata

SEQ ID NO: 100590 - DNA, 19 bp, Homo sapiens
  siRNA target sequence for SMC1L2 (NM_148674.1,3022-3040).
gcatcccaggaagatatct

SEQ ID NO: 100591 - DNA, 19 bp, Homo sapiens
  siRNA target sequence for SMC1L2 (NM_148674.1,3023-3041).
catcccaggaagatatctt

SEQ ID NO: 100592 - DNA, 19 bp, Homo sapiens
  siRNA target sequence for SMC1L2 (NM_148674.1,3028-3046).
caggaagatatcttactga

SEQ ID NO: 100593 - DNA, 19 bp, Homo sapiens
  siRNA target sequence for SMC1L2 (NM_148674.1,3067-3085).
cgagcactggagaacttaa

SEQ ID NO: 100594 - DNA, 19 bp, Homo sapiens
  siRNA target sequence for SMC1L2 (NM_148674.1,3070-3088).
gcactggagaacttaaaga

SEQ ID NO: 100595 - DNA, 19 bp, Homo sapiens
  siRNA target sequence for SMC1L2 (NM_148674.1,3209-3227).
gttttgagcatgtctcaat

SEQ ID NO: 100596 - DNA, 19 bp, Homo sapiens
  siRNA target sequence for SMC1L2 (NM_148674.1,3216-3234).
gcatgtctcaatctcaatt

SEQ ID NO: 100597 - DNA, 19 bp, Homo sapiens
  siRNA target sequence for SMC1L2 (NM_148674.1,3222-3240).
ctcaatctcaattgatcaa

SEQ ID NO: 100598 - DNA, 19 bp, Homo sapiens
  siRNA target sequence for SMC1L2 (NM_148674.1,3230-3248).
caattgatcaaatctacaa

SEQ ID NO: 100599 - DNA, 19 bp, Homo sapiens
  siRNA target sequence for SMC1L2 (NM_148674.1,3310-3328).
ccttacttggagggaatta

SEQ ID NO: 100600 - DNA, 19 bp, Homo sapiens
  siRNA target sequence for SMC1L2 (NM_148674.1,3315-3333).
cttggagggaattagctat

SEQ ID NO: 100601 - DNA, 19 bp, Homo sapiens
  siRNA target sequence for SMC1L2 (NM_148674.1,3319-3337).
gagggaattagctataact

SEQ ID NO: 100602 - DNA, 19 bp, Homo sapiens
  siRNA target sequence for SMC1L2 (NM_148674.1,3321-3339).
gggaattagctataactgt

SEQ ID NO: 100603 - DNA, 19 bp, Homo sapiens
  siRNA target sequence for SMC1L2 (NM_148674.1,3417-3435).
gtttgctgtgcacagtttt

SEQ ID NO: 100604 - DNA, 19 bp, Homo sapiens
  siRNA target sequence for SMC1L2 (NM_148674.1,3468-3486).
ggatgcagccctagacaat

SEQ ID NO: 100605 - DNA, 19 bp, Homo sapiens
  siRNA target sequence for SMC1L2 (NM_148674.1,3473-3491).
cagccctagacaatactaa

SEQ ID NO: 100606 - DNA, 19 bp, Homo sapiens
  siRNA target sequence for SMC1L2 (NM_148674.1,3477-3495).
cctagacaatactaacata

SEQ ID NO: 100607 - DNA, 19 bp, Homo sapiens
  siRNA target sequence for SMC1L2 (NM_148674.1,3496-3514).
ggcaaagtaagtagttaca

SEQ ID NO: 100608 - DNA, 19 bp, Homo sapiens
  siRNA target sequence for SMC1L2 (NM_148674.1,3497-3515).
gcaaagtaagtagttacat

SEQ ID NO: 100609 - DNA, 19 bp, Homo sapiens
  siRNA target sequence for SMC1L2 (NM_148674.1,3557-3575).
ccctaaaagaagagttcta

SEQ ID NO: 100610 - DNA, 19 bp, Homo sapiens
  siRNA target sequence for SMC1L2 (NM_148674.1,3588-3606).
cgcgctgatcggcatctat

SEQ ID NO: 100611 - DNA, 19 bp, Homo sapiens
  siRNA target sequence for SMC1L2 (NM_148674.1,3623-3641).
gcatgttcagccgagtttt

SEQ ID NO: 100612 - DNA, 19 bp, Homo sapiens
  siRNA target sequence for SMC1L2 (NM_148674.1,3637-3655).
gttttgaccctagatcttt

SEQ ID NO: 100613 - DNA, 19 bp, Homo sapiens
  siRNA target sequence for SMC2L1 (NM_006444.1,258-276).
ctcagaggaccgaagtcaa

SEQ ID NO: 100614 - DNA, 19 bp, Homo sapiens
  siRNA target sequence for SMC2L1 (NM_006444.1,264-282).
ggaccgaagtcaatggttt

SEQ ID NO: 100615 - DNA, 19 bp, Homo sapiens
  siRNA target sequence for SMC2L1 (NM_006444.1,265-283).
gaccgaagtcaatggtttt

SEQ ID NO: 100616 - DNA, 19 bp, Homo sapiens
  siRNA target sequence for SMC2L1 (NM_006444.1,267-285).
ccgaagtcaatggttttga

SEQ ID NO: 100617 - DNA, 19 bp, Homo sapiens
  siRNA target sequence for SMC2L1 (NM_006444.1,289-307).
cctcttcaatgctatcact

SEQ ID NO: 100618 - DNA, 19 bp, Homo sapiens
  siRNA target sequence for SMC2L1 (NM_006444.1,321-339).
gtgggaaatccaacatatt

SEQ ID NO: 100619 - DNA, 19 bp, Homo sapiens
  siRNA target sequence for SMC2L1 (NM_006444.1,378-396).
ctcaggttcgggcttctaa

SEQ ID NO: 100620 - DNA, 19 bp, Homo sapiens
  siRNA target sequence for SMC2L1 (NM_006444.1,380-398).
caggttcgggcttctaatt

SEQ ID NO: 100621 - DNA, 19 bp, Homo sapiens
  siRNA target sequence for SMC2L1 (NM_006444.1,382-400).
ggttcgggcttctaattta

SEQ ID NO: 100622 - DNA, 19 bp, Homo sapiens
  siRNA target sequence for SMC2L1 (NM_006444.1,401-419).
caagatttagtttacaaaa

SEQ ID NO: 100623 - DNA, 19 bp, Homo sapiens
  siRNA target sequence for SMC2L1 (NM_006444.1,423-441).
ggcaggctggtattaccaa

SEQ ID NO: 100624 - DNA, 19 bp, Homo sapiens
  siRNA target sequence for SMC2L1 (NM_006444.1,443-461).
gcctctgtgtcaatcactt

SEQ ID NO: 100625 - DNA, 19 bp, Homo sapiens
  siRNA target sequence for SMC2L1 (NM_006444.1,449-467).
gtgtcaatcacttttgata

SEQ ID NO: 100626 - DNA, 19 bp, Homo sapiens
  siRNA target sequence for SMC2L1 (NM_006444.1,451-469).
gtcaatcacttttgataat

SEQ ID NO: 100627 - DNA, 19 bp, Homo sapiens
  siRNA target sequence for SMC2L1 (NM_006444.1,475-493).
caaaaagcaaagtccttta

SEQ ID NO: 100628 - DNA, 19 bp, Homo sapiens
  siRNA target sequence for SMC2L1 (NM_006444.1,569-587).
ggagtcaatgccaacaaca

SEQ ID NO: 100629 - DNA, 19 bp, Homo sapiens
  siRNA target sequence for SMC2L1 (NM_006444.1,588-606).
ccagagtacaggatctctt

SEQ ID NO: 100630 - DNA, 19 bp, Homo sapiens
  siRNA target sequence for SMC2L1 (NM_006444.1,649-667).
catgcagggccgaattaca

SEQ ID NO: 100631 - DNA, 19 bp, Homo sapiens
  siRNA target sequence for SMC2L1 (NM_006444.1,652-670).
gcagggccgaattacaaaa

SEQ ID NO: 100632 - DNA, 19 bp, Homo sapiens
  siRNA target sequence for SMC2L1 (NM_006444.1,655-673).
gggccgaattacaaaagta

SEQ ID NO: 100633 - DNA, 19 bp, Homo sapiens
  siRNA target sequence for SMC2L1 (NM_006444.1,656-674).
ggccgaattacaaaagtat

SEQ ID NO: 100634 - DNA, 19 bp, Homo sapiens
  siRNA target sequence for SMC2L1 (NM_006444.1,657-675).
gccgaattacaaaagtatt

SEQ ID NO: 100635 - DNA, 19 bp, Homo sapiens
  siRNA target sequence for SMC2L1 (NM_006444.1,659-677).
cgaattacaaaagtattga

SEQ ID NO: 100636 - DNA, 19 bp, Homo sapiens
  siRNA target sequence for SMC2L1 (NM_006444.1,694-712).
gattttatccatgatagaa

SEQ ID NO: 100637 - DNA, 19 bp, Homo sapiens
  siRNA target sequence for SMC2L1 (NM_006444.1,781-799).
ggctaagctgaaagaaatt

SEQ ID NO: 100638 - DNA, 19 bp, Homo sapiens
  siRNA target sequence for SMC2L1 (NM_006444.1,782-800).
gctaagctgaaagaaatta

SEQ ID NO: 100639 - DNA, 19 bp, Homo sapiens
  siRNA target sequence for SMC2L1 (NM_006444.1,783-801).
ctaagctgaaagaaattaa

SEQ ID NO: 100640 - DNA, 19 bp, Homo sapiens
  siRNA target sequence for SMC2L1 (NM_006444.1,820-838).
gattactccaaccattcaa

SEQ ID NO: 100641 - DNA, 19 bp, Homo sapiens
  siRNA target sequence for SMC2L1 (NM_006444.1,862-880).
ctacttggagtaccaaaaa

SEQ ID NO: 100642 - DNA, 19 bp, Homo sapiens
  siRNA target sequence for SMC2L1 (NM_006444.1,899-917).
catttgagtcgtttatata

SEQ ID NO: 100643 - DNA, 19 bp, Homo sapiens
  siRNA target sequence for SMC2L1 (NM_006444.1,904-922).
gagtcgtttatatattgct

SEQ ID NO: 100644 - DNA, 19 bp, Homo sapiens
  siRNA target sequence for SMC2L1 (NM_006444.1,906-924).
gtcgtttatatattgctta

SEQ ID NO: 100645 - DNA, 19 bp, Homo sapiens
  siRNA target sequence for SMC2L1 (NM_006444.1,928-946).
gtttttgctggctgaagat

SEQ ID NO: 100646 - DNA, 19 bp, Homo sapiens
  siRNA target sequence for SMC2L1 (NM_006444.1,956-974).
cgctcagctgaggaattaa

SEQ ID NO: 100647 - DNA, 19 bp, Homo sapiens
  siRNA target sequence for SMC2L1 (NM_006444.1,1006-1024).
ggaagaattgtctgagaat

SEQ ID NO: 100648 - DNA, 19 bp, Homo sapiens
  siRNA target sequence for SMC2L1 (NM_006444.1,1129-1147).
ggctcagcgagttaatact

SEQ ID NO: 100649 - DNA, 19 bp, Homo sapiens
  siRNA target sequence for SMC2L1 (NM_006444.1,1130-1148).
gctcagcgagttaatacta

SEQ ID NO: 100650 - DNA, 19 bp, Homo sapiens
  siRNA target sequence for SMC2L1 (NM_006444.1,1131-1149).
ctcagcgagttaatactaa

SEQ ID NO: 100651 - DNA, 19 bp, Homo sapiens
  siRNA target sequence for SMC2L1 (NM_006444.1,1133-1151).
cagcgagttaatactaaat

SEQ ID NO: 100652 - DNA, 19 bp, Homo sapiens
  siRNA target sequence for SMC2L1 (NM_006444.1,1135-1153).
gcgagttaatactaaatct

SEQ ID NO: 100653 - DNA, 19 bp, Homo sapiens
  siRNA target sequence for SMC2L1 (NM_006444.1,1158-1176).
gcgcatttgatctcaagaa

SEQ ID NO: 100654 - DNA, 19 bp, Homo sapiens
  siRNA target sequence for SMC2L1 (NM_006444.1,1229-1247).
gttgaggactcaaaaactt

SEQ ID NO: 100655 - DNA, 19 bp, Homo sapiens
  siRNA target sequence for SMC2L1 (NM_006444.1,1234-1252).
ggactcaaaaactttagca

SEQ ID NO: 100656 - DNA, 19 bp, Homo sapiens
  siRNA target sequence for SMC2L1 (NM_006444.1,1287-1305).
gactgcatgcccttcaaga

SEQ ID NO: 100657 - DNA, 19 bp, Homo sapiens
  siRNA target sequence for SMC2L1 (NM_006444.1,1296-1314).
cccttcaagaagcaagtaa

SEQ ID NO: 100658 - DNA, 19 bp, Homo sapiens
  siRNA target sequence for SMC2L1 (NM_006444.1,1366-1384).
cgctggcctgtccagtaat

SEQ ID NO: 100659 - DNA, 19 bp, Homo sapiens
  siRNA target sequence for SMC2L1 (NM_006444.1,1404-1422).
ctcttgctggtcaaatgat

SEQ ID NO: 100660 - DNA, 19 bp, Homo sapiens
  siRNA target sequence for SMC2L1 (NM_006444.1,1490-1508).
gctcaacaggaattaaaga

SEQ ID NO: 100661 - DNA, 19 bp, Homo sapiens
  siRNA target sequence for SMC2L1 (NM_006444.1,1662-1680).
ggcagctgtctcgtgatat

SEQ ID NO: 100662 - DNA, 19 bp, Homo sapiens
  siRNA target sequence for SMC2L1 (NM_006444.1,1671-1689).
ctcgtgatattggtagatt

SEQ ID NO: 100663 - DNA, 19 bp, Homo sapiens
  siRNA target sequence for SMC2L1 (NM_006444.1,1673-1691).
cgtgatattggtagattga

SEQ ID NO: 100664 - DNA, 19 bp, Homo sapiens
  siRNA target sequence for SMC2L1 (NM_006444.1,1674-1692).
gtgatattggtagattgaa

SEQ ID NO: 100665 - DNA, 19 bp, Homo sapiens
  siRNA target sequence for SMC2L1 (NM_006444.1,1682-1700).
ggtagattgaaagaaacat

SEQ ID NO: 100666 - DNA, 19 bp, Homo sapiens
  siRNA target sequence for SMC2L1 (NM_006444.1,1683-1701).
gtagattgaaagaaacata

SEQ ID NO: 100667 - DNA, 19 bp, Homo sapiens
  siRNA target sequence for SMC2L1 (NM_006444.1,1719-1737).
gatttcccaatcttcgatt

SEQ ID NO: 100668 - DNA, 19 bp, Homo sapiens
  siRNA target sequence for SMC2L1 (NM_006444.1,1724-1742).
cccaatcttcgatttgcat

SEQ ID NO: 100669 - DNA, 19 bp, Homo sapiens
  siRNA target sequence for SMC2L1 (NM_006444.1,1725-1743).
ccaatcttcgatttgcata

SEQ ID NO: 100670 - DNA, 19 bp, Homo sapiens
  siRNA target sequence for SMC2L1 (NM_006444.1,1759-1777).
gaactggaatagaaattgt

SEQ ID NO: 100671 - DNA, 19 bp, Homo sapiens
  siRNA target sequence for SMC2L1 (NM_006444.1,1799-1817).
ctgattagtgtgaaagaca

SEQ ID NO: 100672 - DNA, 19 bp, Homo sapiens
  siRNA target sequence for SMC2L1 (NM_006444.1,1823-1841).
gcaaccacagctttagaat

SEQ ID NO: 100673 - DNA, 19 bp, Homo sapiens
  siRNA target sequence for SMC2L1 (NM_006444.1,1827-1845).
ccacagctttagaattagt

SEQ ID NO: 100674 - DNA, 19 bp, Homo sapiens
  siRNA target sequence for SMC2L1 (NM_006444.1,1851-1869).
gagaacgactctacaatgt

SEQ ID NO: 100675 - DNA, 19 bp, Homo sapiens
  siRNA target sequence for SMC2L1 (NM_006444.1,1871-1889).
gtagtagacacagaagtta

SEQ ID NO: 100676 - DNA, 19 bp, Homo sapiens
  siRNA target sequence for SMC2L1 (NM_006444.1,1890-1908).
ctggtaaaaagctactaga

SEQ ID NO: 100677 - DNA, 19 bp, Homo sapiens
  siRNA target sequence for SMC2L1 (NM_006444.1,1919-1937).
ctgaaacgtcgatacacta

SEQ ID NO: 100678 - DNA, 19 bp, Homo sapiens
  siRNA target sequence for SMC2L1 (NM_006444.1,1921-1939).
gaaacgtcgatacactata

SEQ ID NO: 100679 - DNA, 19 bp, Homo sapiens
  siRNA target sequence for SMC2L1 (NM_006444.1,1935-1953).
ctataattccactcaataa

SEQ ID NO: 100680 - DNA, 19 bp, Homo sapiens
  siRNA target sequence for SMC2L1 (NM_006444.1,1968-1986).
gtattgcaccagaaactct

SEQ ID NO: 100681 - DNA, 19 bp, Homo sapiens
  siRNA target sequence for SMC2L1 (NM_006444.1,1989-2007).
gagttgctcagaatcttgt

SEQ ID NO: 100682 - DNA, 19 bp, Homo sapiens
  siRNA target sequence for SMC2L1 (NM_006444.1,2010-2028).
gccctgacaacgttcatgt

SEQ ID NO: 100683 - DNA, 19 bp, Homo sapiens
  siRNA target sequence for SMC2L1 (NM_006444.1,2143-2161).
gaggataatgactagaact

SEQ ID NO: 100684 - DNA, 19 bp, Homo sapiens
  siRNA target sequence for SMC2L1 (NM_006444.1,2146-2164).
gataatgactagaactgta

SEQ ID NO: 100685 - DNA, 19 bp, Homo sapiens
  siRNA target sequence for SMC2L1 (NM_006444.1,2170-2188).
cggaggtgatgtgtttgat

SEQ ID NO: 100686 - DNA, 19 bp, Homo sapiens
  siRNA target sequence for SMC2L1 (NM_006444.1,2186-2204).
gatcctcatgggacattga

SEQ ID NO: 100687 - DNA, 19 bp, Homo sapiens
  siRNA target sequence for SMC2L1 (NM_006444.1,2241-2259).
ccaagtttcaagaactcaa

SEQ ID NO: 100688 - DNA, 19 bp, Homo sapiens
  siRNA target sequence for SMC2L1 (NM_006444.1,2245-2263).
gtttcaagaactcaaagat

SEQ ID NO: 100689 - DNA, 19 bp, Homo sapiens
  siRNA target sequence for SMC2L1 (NM_006444.1,2342-2360).
gaaaagtatcgccaactaa

SEQ ID NO: 100690 - DNA, 19 bp, Homo sapiens
  siRNA target sequence for SMC2L1 (NM_006444.1,2387-2405).
gaggcagatttattacaaa

SEQ ID NO: 100691 - DNA, 19 bp, Homo sapiens
  siRNA target sequence for SMC2L1 (NM_006444.1,2410-2428).
gctccagcaaagctcatat

SEQ ID NO: 100692 - DNA, 19 bp, Homo sapiens
  siRNA target sequence for SMC2L1 (NM_006444.1,2483-2501).
gagactttgaaaaacacta

SEQ ID NO: 100693 - DNA, 19 bp, Homo sapiens
  siRNA target sequence for SMC2L1 (NM_006444.1,2699-2717).
ctcaagagagagcatacat

SEQ ID NO: 100694 - DNA, 19 bp, Homo sapiens
  siRNA target sequence for SMC2L1 (NM_006444.1,2701-2719).
caagagagagcatacatct

SEQ ID NO: 100695 - DNA, 19 bp, Homo sapiens
  siRNA target sequence for SMC2L1 (NM_006444.1,2706-2724).
gagagcatacatcttacaa

SEQ ID NO: 100696 - DNA, 19 bp, Homo sapiens
  siRNA target sequence for SMC2L1 (NM_006444.1,2739-2757).
ctgtaaatgaagctatcaa

SEQ ID NO: 100697 - DNA, 19 bp, Homo sapiens
  siRNA target sequence for SMC2L1 (NM_006444.1,2761-2779).
ctatgaaagtcagattgaa

SEQ ID NO: 100698 - DNA, 19 bp, Homo sapiens
  siRNA target sequence for SMC2L1 (NM_006444.1,2809-2827).
ggagtcagtaaataaagct

SEQ ID NO: 100699 - DNA, 19 bp, Homo sapiens
  siRNA target sequence for SMC2L1 (NM_006444.1,2862-2880).
cagcccaagacactgtaat

SEQ ID NO: 100700 - DNA, 19 bp, Homo sapiens
  siRNA target sequence for SMC2L1 (NM_006444.1,2913-2931).
ggagcaaaacaatgattct

SEQ ID NO: 100701 - DNA, 19 bp, Homo sapiens
  siRNA target sequence for SMC2L1 (NM_006444.1,2990-3008).
gatggtgctgcaaaggtat

SEQ ID NO: 100702 - DNA, 19 bp, Homo sapiens
  siRNA target sequence for SMC2L1 (NM_006444.1,2994-3012).
gtgctgcaaaggtatccaa

SEQ ID NO: 100703 - DNA, 19 bp, Homo sapiens
  siRNA target sequence for SMC2L1 (NM_006444.1,2999-3017).
gcaaaggtatccaaaatgt

SEQ ID NO: 100704 - DNA, 19 bp, Homo sapiens
  siRNA target sequence for SMC2L1 (NM_006444.1,3065-3083).
cccaatagtgcctatgatt

SEQ ID NO: 100705 - DNA, 19 bp, Homo sapiens
  siRNA target sequence for SMC2L1 (NM_006444.1,3066-3084).
ccaatagtgcctatgattt

SEQ ID NO: 100706 - DNA, 19 bp, Homo sapiens
  siRNA target sequence for SMC2L1 (NM_006444.1,3163-3181).
caatatgagagctatgaat

SEQ ID NO: 100707 - DNA, 19 bp, Homo sapiens
  siRNA target sequence for SMC2L1 (NM_006444.1,3252-3270).
ccaaaattcttacaactat

SEQ ID NO: 100708 - DNA, 19 bp, Homo sapiens
  siRNA target sequence for SMC2L1 (NM_006444.1,3253-3271).
caaaattcttacaactata

SEQ ID NO: 100709 - DNA, 19 bp, Homo sapiens
  siRNA target sequence for SMC2L1 (NM_006444.1,3289-3307).
gaaaaaccaagccctaaat

SEQ ID NO: 100710 - DNA, 19 bp, Homo sapiens
  siRNA target sequence for SMC2L1 (NM_006444.1,3296-3314).
caagccctaaatattgcat

SEQ ID NO: 100711 - DNA, 19 bp, Homo sapiens
  siRNA target sequence for SMC2L1 (NM_006444.1,3331-3349).
ggactttgggtctattttt

SEQ ID NO: 100712 - DNA, 19 bp, Homo sapiens
  siRNA target sequence for SMC2L1 (NM_006444.1,3387-3405).
caccagagggtcaaactgt

SEQ ID NO: 100713 - DNA, 19 bp, Homo sapiens
  siRNA target sequence for SMC2L1 (NM_006444.1,3389-3407).
ccagagggtcaaactgttt

SEQ ID NO: 100714 - DNA, 19 bp, Homo sapiens
  siRNA target sequence for SMC2L1 (NM_006444.1,3390-3408).
cagagggtcaaactgtttt

SEQ ID NO: 100715 - DNA, 19 bp, Homo sapiens
  siRNA target sequence for SMC2L1 (NM_006444.1,3486-3504).
ctttagtggccttgtcatt

SEQ ID NO: 100716 - DNA, 19 bp, Homo sapiens
  siRNA target sequence for SMC2L1 (NM_006444.1,3494-3512).
gccttgtcattaatactgt

SEQ ID NO: 100717 - DNA, 19 bp, Homo sapiens
  siRNA target sequence for SMC2L1 (NM_006444.1,3511-3529).
gtccatgcttctcttcaaa

SEQ ID NO: 100718 - DNA, 19 bp, Homo sapiens
  siRNA target sequence for SMC2L1 (NM_006444.1,3526-3544).
caaacctgctccaatttat

SEQ ID NO: 100719 - DNA, 19 bp, Homo sapiens
  siRNA target sequence for SMC2L1 (NM_006444.1,3560-3578).
gatgcagccttggatcttt

SEQ ID NO: 100720 - DNA, 19 bp, Homo sapiens
  siRNA target sequence for SMC2L1 (NM_006444.1,3604-3622).
gctgcgtactcatttcaca

SEQ ID NO: 100721 - DNA, 19 bp, Homo sapiens
  siRNA target sequence for SMC2L1 (NM_006444.1,3608-3626).
cgtactcatttcacacatt

SEQ ID NO: 100722 - DNA, 19 bp, Homo sapiens
  siRNA target sequence for SMC2L1 (NM_006444.1,3645-3663).
cactaaaagaaggtatgtt

SEQ ID NO: 100723 - DNA, 19 bp, Homo sapiens
  siRNA target sequence for SMC2L1 (NM_006444.1,3647-3665).
ctaaaagaaggtatgttca

SEQ ID NO: 100724 - DNA, 19 bp, Homo sapiens
  siRNA target sequence for SMC2L1 (NM_006444.1,3656-3674).
ggtatgttcaacaatgcaa

SEQ ID NO: 100725 - DNA, 19 bp, Homo sapiens
  siRNA target sequence for SMC2L1 (NM_006444.1,3661-3679).
gttcaacaatgcaaacgtt

SEQ ID NO: 100726 - DNA, 19 bp, Homo sapiens
  siRNA target sequence for SMC2L1 (NM_006444.1,3671-3689).
gcaaacgttcttttcaaaa

SEQ ID NO: 100727 - DNA, 19 bp, Homo sapiens
  siRNA target sequence for SMC2L1 (NM_006444.1,3700-3718).
ggatggtgtttctacagta

SEQ ID NO: 100728 - DNA, 19 bp, Homo sapiens
  siRNA target sequence for SMC2L1 (NM_006444.1,3714-3732).
cagtagccagatttactca

SEQ ID NO: 100729 - DNA, 19 bp, Homo sapiens
  siRNA target sequence for SMC2L1 (NM_006444.1,3716-3734).
gtagccagatttactcaat

SEQ ID NO: 100730 - DNA, 19 bp, Homo sapiens
  siRNA target sequence for SMC2L1 (NM_006444.1,3721-3739).
cagatttactcaatgtcaa

SEQ ID NO: 100731 - DNA, 19 bp, Homo sapiens
  siRNA target sequence for SMC5L1 (NM_015110.1,104-122).
gcgactccgagcaagaaga

SEQ ID NO: 100732 - DNA, 19 bp, Homo sapiens
  siRNA target sequence for SMC5L1 (NM_015110.1,280-298).
cttcctaacatatgatatt

SEQ ID NO: 100733 - DNA, 19 bp, Homo sapiens
  siRNA target sequence for SMC5L1 (NM_015110.1,283-301).
cctaacatatgatatttgt

SEQ ID NO: 100734 - DNA, 19 bp, Homo sapiens
  siRNA target sequence for SMC5L1 (NM_015110.1,314-332).
ggaccccacttgaatatga

SEQ ID NO: 100735 - DNA, 19 bp, Homo sapiens
  siRNA target sequence for SMC5L1 (NM_015110.1,315-333).
gaccccacttgaatatgat

SEQ ID NO: 100736 - DNA, 19 bp, Homo sapiens
  siRNA target sequence for SMC5L1 (NM_015110.1,376-394).
catttgccttggtttagct

SEQ ID NO: 100737 - DNA, 19 bp, Homo sapiens
  siRNA target sequence for SMC5L1 (NM_015110.1,412-430).
gggacgagcagataaggtt

SEQ ID NO: 100738 - DNA, 19 bp, Homo sapiens
  siRNA target sequence for SMC5L1 (NM_015110.1,442-460).
gaagagaggatgttctaga

SEQ ID NO: 100739 - DNA, 19 bp, Homo sapiens
  siRNA target sequence for SMC5L1 (NM_015110.1,456-474).
ctagaggcatggttgaaat

SEQ ID NO: 100740 - DNA, 19 bp, Homo sapiens
  siRNA target sequence for SMC5L1 (NM_015110.1,459-477).
gaggcatggttgaaattga

SEQ ID NO: 100741 - DNA, 19 bp, Homo sapiens
  siRNA target sequence for SMC5L1 (NM_015110.1,461-479).
ggcatggttgaaattgaat

SEQ ID NO: 100742 - DNA, 19 bp, Homo sapiens
  siRNA target sequence for SMC5L1 (NM_015110.1,462-480).
gcatggttgaaattgaatt

SEQ ID NO: 100743 - DNA, 19 bp, Homo sapiens
  siRNA target sequence for SMC5L1 (NM_015110.1,467-485).
gttgaaattgaattgttca

SEQ ID NO: 100744 - DNA, 19 bp, Homo sapiens
  siRNA target sequence for SMC5L1 (NM_015110.1,515-533).
gagattgatgtggcaaaaa

SEQ ID NO: 100745 - DNA, 19 bp, Homo sapiens
  siRNA target sequence for SMC5L1 (NM_015110.1,564-582).
ctacaacccagaaaatagt

SEQ ID NO: 100746 - DNA, 19 bp, Homo sapiens
  siRNA target sequence for SMC5L1 (NM_015110.1,589-607).
gaaagttgcagccttaaat

SEQ ID NO: 100747 - DNA, 19 bp, Homo sapiens
  siRNA target sequence for SMC5L1 (NM_015110.1,653-671).
ggagaatttgctaaactca

SEQ ID NO: 100748 - DNA, 19 bp, Homo sapiens
  siRNA target sequence for SMC5L1 (NM_015110.1,683-701).
ctcctcgaagccactgaaa

SEQ ID NO: 100749 - DNA, 19 bp, Homo sapiens
  siRNA target sequence for SMC5L1 (NM_015110.1,705-723).
caattggtcccccagaaat

SEQ ID NO: 100750 - DNA, 19 bp, Homo sapiens
  siRNA target sequence for SMC5L1 (NM_015110.1,734-752).
cactgtgaactcaaaaact

SEQ ID NO: 100751 - DNA, 19 bp, Homo sapiens
  siRNA target sequence for SMC5L1 (NM_015110.1,736-754).
ctgtgaactcaaaaactta

SEQ ID NO: 100752 - DNA, 19 bp, Homo sapiens
  siRNA target sequence for SMC5L1 (NM_015110.1,817-835).
ggttcagaggaatgaaaga

SEQ ID NO: 100753 - DNA, 19 bp, Homo sapiens
  siRNA target sequence for SMC5L1 (NM_015110.1,866-884).
cggaagcgacatttagatt

SEQ ID NO: 100754 - DNA, 19 bp, Homo sapiens
  siRNA target sequence for SMC5L1 (NM_015110.1,867-885).
ggaagcgacatttagattt

SEQ ID NO: 100755 - DNA, 19 bp, Homo sapiens
  siRNA target sequence for SMC5L1 (NM_015110.1,985-1003).
ggtcagaaaacttaaagaa

SEQ ID NO: 100756 - DNA, 19 bp, Homo sapiens
  siRNA target sequence for SMC5L1 (NM_015110.1,1020-1038).
catgtcgaattgaagaaat

SEQ ID NO: 100757 - DNA, 19 bp, Homo sapiens
  siRNA target sequence for SMC5L1 (NM_015110.1,1039-1057).
ggaaaacgagcgtcacaat

SEQ ID NO: 100758 - DNA, 19 bp, Homo sapiens
  siRNA target sequence for SMC5L1 (NM_015110.1,1040-1058).
gaaaacgagcgtcacaatt

SEQ ID NO: 100759 - DNA, 19 bp, Homo sapiens
  siRNA target sequence for SMC5L1 (NM_015110.1,1099-1117).
ggcatctcaaaaatgcaaa

SEQ ID NO: 100760 - DNA, 19 bp, Homo sapiens
  siRNA target sequence for SMC5L1 (NM_015110.1,1166-1184).
cagcaggctttaatagtaa

SEQ ID NO: 100761 - DNA, 19 bp, Homo sapiens
  siRNA target sequence for SMC5L1 (NM_015110.1,1204-1222).
ccgacagaggagaataggt

SEQ ID NO: 100762 - DNA, 19 bp, Homo sapiens
  siRNA target sequence for SMC5L1 (NM_015110.1,1205-1223).
cgacagaggagaataggta

SEQ ID NO: 100763 - DNA, 19 bp, Homo sapiens
  siRNA target sequence for SMC5L1 (NM_015110.1,1208-1226).
cagaggagaataggtaata

SEQ ID NO: 100764 - DNA, 19 bp, Homo sapiens
  siRNA target sequence for SMC5L1 (NM_015110.1,1220-1238).
ggtaatacccgcaaaatga

SEQ ID NO: 100765 - DNA, 19 bp, Homo sapiens
  siRNA target sequence for SMC5L1 (NM_015110.1,1221-1239).
gtaatacccgcaaaatgat

SEQ ID NO: 100766 - DNA, 19 bp, Homo sapiens
  siRNA target sequence for SMC5L1 (NM_015110.1,1230-1248).
gcaaaatgatagaggattt

SEQ ID NO: 100767 - DNA, 19 bp, Homo sapiens
  siRNA target sequence for SMC5L1 (NM_015110.1,1269-1287).
cggaaaactgcgagaatct

SEQ ID NO: 100768 - DNA, 19 bp, Homo sapiens
  siRNA target sequence for SMC5L1 (NM_015110.1,1294-1312).
ccagattgatgccattaca

SEQ ID NO: 100769 - DNA, 19 bp, Homo sapiens
  siRNA target sequence for SMC5L1 (NM_015110.1,1295-1313).
cagattgatgccattacaa

SEQ ID NO: 100770 - DNA, 19 bp, Homo sapiens
  siRNA target sequence for SMC5L1 (NM_015110.1,1408-1426).
gagtgtggacgatcatatt

SEQ ID NO: 100771 - DNA, 19 bp, Homo sapiens
  siRNA target sequence for SMC5L1 (NM_015110.1,1410-1428).
gtgtggacgatcatattgt

SEQ ID NO: 100772 - DNA, 19 bp, Homo sapiens
  siRNA target sequence for SMC5L1 (NM_015110.1,1417-1435).
cgatcatattgtacgtttt

SEQ ID NO: 100773 - DNA, 19 bp, Homo sapiens
  siRNA target sequence for SMC5L1 (NM_015110.1,1427-1445).
gtacgttttgacaatctta

SEQ ID NO: 100774 - DNA, 19 bp, Homo sapiens
  siRNA target sequence for SMC5L1 (NM_015110.1,1430-1448).
cgttttgacaatcttatga

SEQ ID NO: 100775 - DNA, 19 bp, Homo sapiens
  siRNA target sequence for SMC5L1 (NM_015110.1,1431-1449).
gttttgacaatcttatgaa

SEQ ID NO: 100776 - DNA, 19 bp, Homo sapiens
  siRNA target sequence for SMC5L1 (NM_015110.1,1486-1504).
cacgtatgatgctgtttta

SEQ ID NO: 100777 - DNA, 19 bp, Homo sapiens
  siRNA target sequence for SMC5L1 (NM_015110.1,1558-1576).
gctcacgatcaatatgaaa

SEQ ID NO: 100778 - DNA, 19 bp, Homo sapiens
  siRNA target sequence for SMC5L1 (NM_015110.1,1561-1579).
cacgatcaatatgaaagat

SEQ ID NO: 100779 - DNA, 19 bp, Homo sapiens
  siRNA target sequence for SMC5L1 (NM_015110.1,1622-1640).
gacttaagagcctttgtat

SEQ ID NO: 100780 - DNA, 19 bp, Homo sapiens
  siRNA target sequence for SMC5L1 (NM_015110.1,1672-1690).
caaagaggttcgtgacaat

SEQ ID NO: 100781 - DNA, 19 bp, Homo sapiens
  siRNA target sequence for SMC5L1 (NM_015110.1,1712-1730).
gttattgctcccaagagtt

SEQ ID NO: 100782 - DNA, 19 bp, Homo sapiens
  siRNA target sequence for SMC5L1 (NM_015110.1,1745-1763).
gcaccttcaagatctttga

SEQ ID NO: 100783 - DNA, 19 bp, Homo sapiens
  siRNA target sequence for SMC5L1 (NM_015110.1,1769-1787).
cttaaacaatacggatttt

SEQ ID NO: 100784 - DNA, 19 bp, Homo sapiens
  siRNA target sequence for SMC5L1 (NM_015110.1,1818-1836).
ctgatcctgtaatgagtta

SEQ ID NO: 100785 - DNA, 19 bp, Homo sapiens
  siRNA target sequence for SMC5L1 (NM_015110.1,1849-1867).
gtatcatattcatgaagtt

SEQ ID NO: 100786 - DNA, 19 bp, Homo sapiens
  siRNA target sequence for SMC5L1 (NM_015110.1,1901-1919).
gaacgggtaatacaagaaa

SEQ ID NO: 100787 - DNA, 19 bp, Homo sapiens
  siRNA target sequence for SMC5L1 (NM_015110.1,1916-1934).
gaaacccgattaaaacaga

SEQ ID NO: 100788 - DNA, 19 bp, Homo sapiens
  siRNA target sequence for SMC5L1 (NM_015110.1,1920-1938).
cccgattaaaacagattta

SEQ ID NO: 100789 - DNA, 19 bp, Homo sapiens
  siRNA target sequence for SMC5L1 (NM_015110.1,1922-1940).
cgattaaaacagatttata

SEQ ID NO: 100790 - DNA, 19 bp, Homo sapiens
  siRNA target sequence for SMC5L1 (NM_015110.1,1988-2006).
gttatttctagtaacacat

SEQ ID NO: 100791 - DNA, 19 bp, Homo sapiens
  siRNA target sequence for SMC5L1 (NM_015110.1,1995-2013).
ctagtaacacatctctaaa

SEQ ID NO: 100792 - DNA, 19 bp, Homo sapiens
  siRNA target sequence for SMC5L1 (NM_015110.1,2125-2143).
cttacgtgaaacaagcaaa

SEQ ID NO: 100793 - DNA, 19 bp, Homo sapiens
  siRNA target sequence for SMC5L1 (NM_015110.1,2269-2287).
ggatacttgcaatcttgaa

SEQ ID NO: 100794 - DNA, 19 bp, Homo sapiens
  siRNA target sequence for SMC5L1 (NM_015110.1,2341-2359).
gaaacttgttaccgaatta

SEQ ID NO: 100795 - DNA, 19 bp, Homo sapiens
  siRNA target sequence for SMC5L1 (NM_015110.1,2353-2371).
cgaattaacaaacctaata

SEQ ID NO: 100796 - DNA, 19 bp, Homo sapiens
  siRNA target sequence for SMC5L1 (NM_015110.1,2427-2445).
cagtgatctctgagaagaa

SEQ ID NO: 100797 - DNA, 19 bp, Homo sapiens
  siRNA target sequence for SMC5L1 (NM_015110.1,2429-2447).
gtgatctctgagaagaaca

SEQ ID NO: 100798 - DNA, 19 bp, Homo sapiens
  siRNA target sequence for SMC5L1 (NM_015110.1,2434-2452).
ctctgagaagaacaaatta

SEQ ID NO: 100799 - DNA, 19 bp, Homo sapiens
  siRNA target sequence for SMC5L1 (NM_015110.1,2493-2511).
cagagcaacatttcattga

SEQ ID NO: 100800 - DNA, 19 bp, Homo sapiens
  siRNA target sequence for SMC5L1 (NM_015110.1,2565-2583).
gagctaggcaagtatgtaa

SEQ ID NO: 100801 - DNA, 19 bp, Homo sapiens
  siRNA target sequence for SMC5L1 (NM_015110.1,2601-2619).
ctcttcctcaagaatacca

SEQ ID NO: 100802 - DNA, 19 bp, Homo sapiens
  siRNA target sequence for SMC5L1 (NM_015110.1,2689-2707).
cacattggatgaaattgat

SEQ ID NO: 100803 - DNA, 19 bp, Homo sapiens
  siRNA target sequence for SMC5L1 (NM_015110.1,2740-2758).
ctgcttcacgggactgaat

SEQ ID NO: 100804 - DNA, 19 bp, Homo sapiens
  siRNA target sequence for SMC5L1 (NM_015110.1,2748-2766).
cgggactgaatcctacaat

SEQ ID NO: 100805 - DNA, 19 bp, Homo sapiens
  siRNA target sequence for SMC5L1 (NM_015110.1,2751-2769).
gactgaatcctacaattgt

SEQ ID NO: 100806 - DNA, 19 bp, Homo sapiens
  siRNA target sequence for SMC5L1 (NM_015110.1,2834-2852).
gttgaactagatcaataca

SEQ ID NO: 100807 - DNA, 19 bp, Homo sapiens
  siRNA target sequence for SMC5L1 (NM_015110.1,2880-2898).
ggtggcttaatcctttaaa

SEQ ID NO: 100808 - DNA, 19 bp, Homo sapiens
  siRNA target sequence for SMC5L1 (NM_015110.1,2966-2984).
gttgatctccatacagaaa

SEQ ID NO: 100809 - DNA, 19 bp, Homo sapiens
  siRNA target sequence for SMC5L1 (NM_015110.1,3023-3041).
gtcaaatttcgaagtagta

SEQ ID NO: 100810 - DNA, 19 bp, Homo sapiens
  siRNA target sequence for SMC5L1 (NM_015110.1,3025-3043).
caaatttcgaagtagtact

SEQ ID NO: 100811 - DNA, 19 bp, Homo sapiens
  siRNA target sequence for SMC5L1 (NM_015110.1,3039-3057).
gtactcaactgcatgaatt

SEQ ID NO: 100812 - DNA, 19 bp, Homo sapiens
  siRNA target sequence for SMC5L1 (NM_015110.1,3090-3108).
gtgtttctaccatgttata

SEQ ID NO: 100813 - DNA, 19 bp, Homo sapiens
  siRNA target sequence for SMC5L1 (NM_015110.1,3092-3110).
gtttctaccatgttatact

SEQ ID NO: 100814 - DNA, 19 bp, Homo sapiens
  siRNA target sequence for SMC5L1 (NM_015110.1,3115-3133).
ggcacttcaggagctaaat

SEQ ID NO: 100815 - DNA, 19 bp, Homo sapiens
  siRNA target sequence for SMC5L1 (NM_015110.1,3116-3134).
gcacttcaggagctaaata

SEQ ID NO: 100816 - DNA, 19 bp, Homo sapiens
  siRNA target sequence for SMC5L1 (NM_015110.1,3119-3137).
cttcaggagctaaatagat

SEQ ID NO: 100817 - DNA, 19 bp, Homo sapiens
  siRNA target sequence for SMC5L1 (NM_015110.1,3138-3156).
gtccattcagagtagttga

SEQ ID NO: 100818 - DNA, 19 bp, Homo sapiens
  siRNA target sequence for SMC5L1 (NM_015110.1,3147-3165).
gagtagttgatgaaatcaa

SEQ ID NO: 100819 - DNA, 19 bp, Homo sapiens
  siRNA target sequence for SMC5L1 (NM_015110.1,3169-3187).
gggaatggacccaatcaat

SEQ ID NO: 100820 - DNA, 19 bp, Homo sapiens
  siRNA target sequence for SMC5L1 (NM_015110.1,3171-3189).
gaatggacccaatcaatga

SEQ ID NO: 100821 - DNA, 19 bp, Homo sapiens
  siRNA target sequence for SMC5L1 (NM_015110.1,3188-3206).
gaacggagagtgtttgaaa

SEQ ID NO: 100822 - DNA, 19 bp, Homo sapiens
  siRNA target sequence for SMC5L1 (NM_015110.1,3230-3248).
gaaaatacatctcaatact

SEQ ID NO: 100823 - DNA, 19 bp, Homo sapiens
  siRNA target sequence for SMC5L1 (NM_015110.1,3324-3342).
ctcatatgctggaaccaaa

SEQ ID NO: 100824 - DNA, 19 bp, Homo sapiens
  siRNA target sequence for SMC6L1 (NM_024624.2,286-304).
cgaagacgaatgtaaaggt

SEQ ID NO: 100825 - DNA, 19 bp, Homo sapiens
  siRNA target sequence for SMC6L1 (NM_024624.2,292-310).
cgaatgtaaaggtactact

SEQ ID NO: 100826 - DNA, 19 bp, Homo sapiens
  siRNA target sequence for SMC6L1 (NM_024624.2,293-311).
gaatgtaaaggtactactt

SEQ ID NO: 100827 - DNA, 19 bp, Homo sapiens
  siRNA target sequence for SMC6L1 (NM_024624.2,338-356).
gagagtattcacctaaaaa

SEQ ID NO: 100828 - DNA, 19 bp, Homo sapiens
  siRNA target sequence for SMC6L1 (NM_024624.2,342-360).
gtattcacctaaaaaactt

SEQ ID NO: 100829 - DNA, 19 bp, Homo sapiens
  siRNA target sequence for SMC6L1 (NM_024624.2,361-379).
catgtgtcattcaatgctt

SEQ ID NO: 100830 - DNA, 19 bp, Homo sapiens
  siRNA target sequence for SMC6L1 (NM_024624.2,380-398).
ggaccttttaagtttggtt

SEQ ID NO: 100831 - DNA, 19 bp, Homo sapiens
  siRNA target sequence for SMC6L1 (NM_024624.2,396-414).
gttctaatgtcaactttgt

SEQ ID NO: 100832 - DNA, 19 bp, Homo sapiens
  siRNA target sequence for SMC6L1 (NM_024624.2,501-519).
gatcctctttaaaaggttt

SEQ ID NO: 100833 - DNA, 19 bp, Homo sapiens
  siRNA target sequence for SMC6L1 (NM_024624.2,545-563).
gatatctcaataacattga

SEQ ID NO: 100834 - DNA, 19 bp, Homo sapiens
  siRNA target sequence for SMC6L1 (NM_024624.2,583-601).
ctttaaagccagtgtgtat

SEQ ID NO: 100835 - DNA, 19 bp, Homo sapiens
  siRNA target sequence for SMC6L1 (NM_024624.2,592-610).
cagtgtgtatggtaactct

SEQ ID NO: 100836 - DNA, 19 bp, Homo sapiens
  siRNA target sequence for SMC6L1 (NM_024624.2,594-612).
gtgtgtatggtaactctat

SEQ ID NO: 100837 - DNA, 19 bp, Homo sapiens
  siRNA target sequence for SMC6L1 (NM_024624.2,598-616).
gtatggtaactctatactt

SEQ ID NO: 100838 - DNA, 19 bp, Homo sapiens
  siRNA target sequence for SMC6L1 (NM_024624.2,603-621).
gtaactctatacttataca

SEQ ID NO: 100839 - DNA, 19 bp, Homo sapiens
  siRNA target sequence for SMC6L1 (NM_024624.2,645-663).
gtcgatcttataaacttaa

SEQ ID NO: 100840 - DNA, 19 bp, Homo sapiens
  siRNA target sequence for SMC6L1 (NM_024624.2,703-721).
gctgattgcaattcttgat

SEQ ID NO: 100841 - DNA, 19 bp, Homo sapiens
  siRNA target sequence for SMC6L1 (NM_024624.2,730-748).
catccaggtggataatcca

SEQ ID NO: 100842 - DNA, 19 bp, Homo sapiens
  siRNA target sequence for SMC6L1 (NM_024624.2,740-758).
gataatccagtttctgttt

SEQ ID NO: 100843 - DNA, 19 bp, Homo sapiens
  siRNA target sequence for SMC6L1 (NM_024624.2,781-799).
gttcttacagtctaaaaat

SEQ ID NO: 100844 - DNA, 19 bp, Homo sapiens
  siRNA target sequence for SMC6L1 (NM_024624.2,806-824).
gacaaatacaaattcttca

SEQ ID NO: 100845 - DNA, 19 bp, Homo sapiens
  siRNA target sequence for SMC6L1 (NM_024624.2,826-844).
gaaagcaacgcaacttgaa

SEQ ID NO: 100846 - DNA, 19 bp, Homo sapiens
  siRNA target sequence for SMC6L1 (NM_024624.2,831-849).
caacgcaacttgaacagat

SEQ ID NO: 100847 - DNA, 19 bp, Homo sapiens
  siRNA target sequence for SMC6L1 (NM_024624.2,834-852).
cgcaacttgaacagatgaa

SEQ ID NO: 100848 - DNA, 19 bp, Homo sapiens
  siRNA target sequence for SMC6L1 (NM_024624.2,912-930).
gagaagagcggcttactga

SEQ ID NO: 100849 - DNA, 19 bp, Homo sapiens
  siRNA target sequence for SMC6L1 (NM_024624.2,917-935).
gagcggcttactgaactaa

SEQ ID NO: 100850 - DNA, 19 bp, Homo sapiens
  siRNA target sequence for SMC6L1 (NM_024624.2,978-996).
ctggtttaagtacaatgaa

SEQ ID NO: 100851 - DNA, 19 bp, Homo sapiens
  siRNA target sequence for SMC6L1 (NM_024624.2,987-1005).
gtacaatgaagactaattt

SEQ ID NO: 100852 - DNA, 19 bp, Homo sapiens
  siRNA target sequence for SMC6L1 (NM_024624.2,1067-1085).
gccatcagagataatatca

SEQ ID NO: 100853 - DNA, 19 bp, Homo sapiens
  siRNA target sequence for SMC6L1 (NM_024624.2,1068-1086).
ccatcagagataatatcaa

SEQ ID NO: 100854 - DNA, 19 bp, Homo sapiens
  siRNA target sequence for SMC6L1 (NM_024624.2,1171-1189).
ggatattcaagacaaacta

SEQ ID NO: 100855 - DNA, 19 bp, Homo sapiens
  siRNA target sequence for SMC6L1 (NM_024624.2,1195-1213).
gattagtgaagagacaaat

SEQ ID NO: 100856 - DNA, 19 bp, Homo sapiens
  siRNA target sequence for SMC6L1 (NM_024624.2,1214-1232).
gcacgagcaccagaatgta

SEQ ID NO: 100857 - DNA, 19 bp, Homo sapiens
  siRNA target sequence for SMC6L1 (NM_024624.2,1215-1233).
cacgagcaccagaatgtat

SEQ ID NO: 100858 - DNA, 19 bp, Homo sapiens
  siRNA target sequence for SMC6L1 (NM_024624.2,1236-1254).
cattgaaagcagatgttgt

SEQ ID NO: 100859 - DNA, 19 bp, Homo sapiens
  siRNA target sequence for SMC6L1 (NM_024624.2,1257-1275).
ctaagaaaagggcctataa

SEQ ID NO: 100860 - DNA, 19 bp, Homo sapiens
  siRNA target sequence for SMC6L1 (NM_024624.2,1297-1315).
ccgatccttaaacgaatat

SEQ ID NO: 100861 - DNA, 19 bp, Homo sapiens
  siRNA target sequence for SMC6L1 (NM_024624.2,1298-1316).
cgatccttaaacgaatata

SEQ ID NO: 100862 - DNA, 19 bp, Homo sapiens
  siRNA target sequence for SMC6L1 (NM_024624.2,1299-1317).
gatccttaaacgaatataa

SEQ ID NO: 100863 - DNA, 19 bp, Homo sapiens
  siRNA target sequence for SMC6L1 (NM_024624.2,1339-1357).
gcagctttgtaaacgaatt

SEQ ID NO: 100864 - DNA, 19 bp, Homo sapiens
  siRNA target sequence for SMC6L1 (NM_024624.2,1342-1360).
gctttgtaaacgaattgaa

SEQ ID NO: 100865 - DNA, 19 bp, Homo sapiens
  siRNA target sequence for SMC6L1 (NM_024624.2,1438-1456).
gagagtaaaggcctttcaa

SEQ ID NO: 100866 - DNA, 19 bp, Homo sapiens
  siRNA target sequence for SMC6L1 (NM_024624.2,1447-1465).
ggcctttcaaaatcaagaa

SEQ ID NO: 100867 - DNA, 19 bp, Homo sapiens
  siRNA target sequence for SMC6L1 (NM_024624.2,1600-1618).
gaaagatagtaaaactgat

SEQ ID NO: 100868 - DNA, 19 bp, Homo sapiens
  siRNA target sequence for SMC6L1 (NM_024624.2,1781-1799).
cttctgcaggcctattgtt

SEQ ID NO: 100869 - DNA, 19 bp, Homo sapiens
  siRNA target sequence for SMC6L1 (NM_024624.2,1789-1807).
ggcctattgttgccataat

SEQ ID NO: 100870 - DNA, 19 bp, Homo sapiens
  siRNA target sequence for SMC6L1 (NM_024624.2,1791-1809).
cctattgttgccataatca

SEQ ID NO: 100871 - DNA, 19 bp, Homo sapiens
  siRNA target sequence for SMC6L1 (NM_024624.2,1825-1843).
ccttcaggcactcatgaaa

SEQ ID NO: 100872 - DNA, 19 bp, Homo sapiens
  siRNA target sequence for SMC6L1 (NM_024624.2,1826-1844).
cttcaggcactcatgaaaa

SEQ ID NO: 100873 - DNA, 19 bp, Homo sapiens
  siRNA target sequence for SMC6L1 (NM_024624.2,1829-1847).
caggcactcatgaaaaggt

SEQ ID NO: 100874 - DNA, 19 bp, Homo sapiens
  siRNA target sequence for SMC6L1 (NM_024624.2,1840-1858).
gaaaaggttttatttacca

SEQ ID NO: 100875 - DNA, 19 bp, Homo sapiens
  siRNA target sequence for SMC6L1 (NM_024624.2,1863-1881).
cctcacggccaccgataat

SEQ ID NO: 100876 - DNA, 19 bp, Homo sapiens
  siRNA target sequence for SMC6L1 (NM_024624.2,1864-1882).
ctcacggccaccgataata

SEQ ID NO: 100877 - DNA, 19 bp, Homo sapiens
  siRNA target sequence for SMC6L1 (NM_024624.2,1866-1884).
cacggccaccgataatagt

SEQ ID NO: 100878 - DNA, 19 bp, Homo sapiens
  siRNA target sequence for SMC6L1 (NM_024624.2,1868-1886).
cggccaccgataatagttt

SEQ ID NO: 100879 - DNA, 19 bp, Homo sapiens
  siRNA target sequence for SMC6L1 (NM_024624.2,1870-1888).
gccaccgataatagtttct

SEQ ID NO: 100880 - DNA, 19 bp, Homo sapiens
  siRNA target sequence for SMC6L1 (NM_024624.2,1872-1890).
caccgataatagtttctga

SEQ ID NO: 100881 - DNA, 19 bp, Homo sapiens
  siRNA target sequence for SMC6L1 (NM_024624.2,1989-2007).
caaatagcctaattgacat

SEQ ID NO: 100882 - DNA, 19 bp, Homo sapiens
  siRNA target sequence for SMC6L1 (NM_024624.2,2024-2042).
gtgctactaatcaaaaata

SEQ ID NO: 100883 - DNA, 19 bp, Homo sapiens
  siRNA target sequence for SMC6L1 (NM_024624.2,2046-2064).
ctgtagctcgtgcagtaat

SEQ ID NO: 100884 - DNA, 19 bp, Homo sapiens
  siRNA target sequence for SMC6L1 (NM_024624.2,2123-2141).
gtttttgcaggacgttatt

SEQ ID NO: 100885 - DNA, 19 bp, Homo sapiens
  siRNA target sequence for SMC6L1 (NM_024624.2,2175-2193).
gcagagatgtggattctga

SEQ ID NO: 100886 - DNA, 19 bp, Homo sapiens
  siRNA target sequence for SMC6L1 (NM_024624.2,2227-2245).
gacggcccagatattaaat

SEQ ID NO: 100887 - DNA, 19 bp, Homo sapiens
  siRNA target sequence for SMC6L1 (NM_024624.2,2230-2248).
ggcccagatattaaatctt

SEQ ID NO: 100888 - DNA, 19 bp, Homo sapiens
  siRNA target sequence for SMC6L1 (NM_024624.2,2291-2309).
gaggaacttcttaaaaggt

SEQ ID NO: 100889 - DNA, 19 bp, Homo sapiens
  siRNA target sequence for SMC6L1 (NM_024624.2,2307-2325).
ggtgccaactacattataa

SEQ ID NO: 100890 - DNA, 19 bp, Homo sapiens
  siRNA target sequence for SMC6L1 (NM_024624.2,2308-2326).
gtgccaactacattataaa

SEQ ID NO: 100891 - DNA, 19 bp, Homo sapiens
  siRNA target sequence for SMC6L1 (NM_024624.2,2311-2329).
ccaactacattataaagaa

SEQ ID NO: 100892 - DNA, 19 bp, Homo sapiens
  siRNA target sequence for SMC6L1 (NM_024624.2,2387-2405).
gaacaccagtctgtagata

SEQ ID NO: 100893 - DNA, 19 bp, Homo sapiens
  siRNA target sequence for SMC6L1 (NM_024624.2,2392-2410).
ccagtctgtagatattgca

SEQ ID NO: 100894 - DNA, 19 bp, Homo sapiens
  siRNA target sequence for SMC6L1 (NM_024624.2,2604-2622).
ctgattctgaagtggataa

SEQ ID NO: 100895 - DNA, 19 bp, Homo sapiens
  siRNA target sequence for SMC6L1 (NM_024624.2,2631-2649).
gagggaaacgacattatga

SEQ ID NO: 100896 - DNA, 19 bp, Homo sapiens
  siRNA target sequence for SMC6L1 (NM_024624.2,2666-2684).
cacttggataccttaaata

SEQ ID NO: 100897 - DNA, 19 bp, Homo sapiens
  siRNA target sequence for SMC6L1 (NM_024624.2,2717-2735).
gaactagaggagaaaatgt

SEQ ID NO: 100898 - DNA, 19 bp, Homo sapiens
  siRNA target sequence for SMC6L1 (NM_024624.2,2752-2770).
ctgcccagagcgtatagaa

SEQ ID NO: 100899 - DNA, 19 bp, Homo sapiens
  siRNA target sequence for SMC6L1 (NM_024624.2,2754-2772).
gcccagagcgtatagaagt

SEQ ID NO: 100900 - DNA, 19 bp, Homo sapiens
  siRNA target sequence for SMC6L1 (NM_024624.2,2755-2773).
cccagagcgtatagaagta

SEQ ID NO: 100901 - DNA, 19 bp, Homo sapiens
  siRNA target sequence for SMC6L1 (NM_024624.2,2757-2775).
cagagcgtatagaagtaga

SEQ ID NO: 100902 - DNA, 19 bp, Homo sapiens
  siRNA target sequence for SMC6L1 (NM_024624.2,2761-2779).
gcgtatagaagtagaaaaa

SEQ ID NO: 100903 - DNA, 19 bp, Homo sapiens
  siRNA target sequence for SMC6L1 (NM_024624.2,2794-2812).
ggacaaagaaattaatcga

SEQ ID NO: 100904 - DNA, 19 bp, Homo sapiens
  siRNA target sequence for SMC6L1 (NM_024624.2,2795-2813).
gacaaagaaattaatcgat

SEQ ID NO: 100905 - DNA, 19 bp, Homo sapiens
  siRNA target sequence for SMC6L1 (NM_024624.2,2797-2815).
caaagaaattaatcgatta

SEQ ID NO: 100906 - DNA, 19 bp, Homo sapiens
  siRNA target sequence for SMC6L1 (NM_024624.2,2811-2829).
gattaaggcagaagataca

SEQ ID NO: 100907 - DNA, 19 bp, Homo sapiens
  siRNA target sequence for SMC6L1 (NM_024624.2,2886-2904).
caagagagacctatcttga

SEQ ID NO: 100908 - DNA, 19 bp, Homo sapiens
  siRNA target sequence for SMC6L1 (NM_024624.2,2968-2986).
cagattcaagacatatcaa

SEQ ID NO: 100909 - DNA, 19 bp, Homo sapiens
  siRNA target sequence for SMC6L1 (NM_024624.2,2970-2988).
gattcaagacatatcaaca

SEQ ID NO: 100910 - DNA, 19 bp, Homo sapiens
  siRNA target sequence for SMC6L1 (NM_024624.2,3015-3033).
gcaaattatactttgacaa

SEQ ID NO: 100911 - DNA, 19 bp, Homo sapiens
  siRNA target sequence for SMC6L1 (NM_024624.2,3158-3176).
ggaggtgaacgttctttct

SEQ ID NO: 100912 - DNA, 19 bp, Homo sapiens
  siRNA target sequence for SMC6L1 (NM_024624.2,3202-3220).
gtggtccatcgcagaatct

SEQ ID NO: 100913 - DNA, 19 bp, Homo sapiens
  siRNA target sequence for SMC6L1 (NM_024624.2,3211-3229).
cgcagaatctcctttcaga

SEQ ID NO: 100914 - DNA, 19 bp, Homo sapiens
  siRNA target sequence for SMC6L1 (NM_024624.2,3279-3297).
ccatggacttgatactgaa

SEQ ID NO: 100915 - DNA, 19 bp, Homo sapiens
  siRNA target sequence for SMC6L1 (NM_024624.2,3302-3320).
gcagattcccagcgtttta

SEQ ID NO: 100916 - DNA, 19 bp, Homo sapiens
  siRNA target sequence for SMC6L1 (NM_024624.2,3310-3328).
ccagcgttttagacagttt

SEQ ID NO: 100917 - DNA, 19 bp, Homo sapiens
  siRNA target sequence for SMC6L1 (NM_024624.2,3311-3329).
cagcgttttagacagttta

SEQ ID NO: 100918 - DNA, 19 bp, Homo sapiens
  siRNA target sequence for SMC6L1 (NM_024624.2,3357-3375).
cacttccatccagtaaact

SEQ ID NO: 100919 - DNA, 19 bp, Homo sapiens
  siRNA target sequence for SMC6L1 (NM_024624.2,3359-3377).
cttccatccagtaaactga

SEQ ID NO: 100920 - DNA, 19 bp, Homo sapiens
  siRNA target sequence for SMC6L1 (NM_024624.2,3367-3385).
cagtaaactgataagaatt

SEQ ID NO: 100921 - DNA, 19 bp, Homo sapiens
  siRNA target sequence for SMC6L1 (NM_024624.2,3430-3448).
cagacctgtgactcaagaa

SEQ ID NO: 100922 - DNA, 19 bp, Homo sapiens
  siRNA target sequence for SNARK (NM_030952.1,219-237).
ccaagcccctaatgaagaa

SEQ ID NO: 100923 - DNA, 19 bp, Homo sapiens
  siRNA target sequence for SNARK (NM_030952.1,315-333).
cctacgggaaggtgaagaa

SEQ ID NO: 100924 - DNA, 19 bp, Homo sapiens
  siRNA target sequence for SNARK (NM_030952.1,372-390).
caatccggaaggacaaaat

SEQ ID NO: 100925 - DNA, 19 bp, Homo sapiens
  siRNA target sequence for SNARK (NM_030952.1,576-594).
gcgaagctaggcatttctt

SEQ ID NO: 100926 - DNA, 19 bp, Homo sapiens
  siRNA target sequence for SNARK (NM_030952.1,889-907).
ccataagatcctagtgaaa

SEQ ID NO: 100927 - DNA, 19 bp, Homo sapiens
  siRNA target sequence for SNARK (NM_030952.1,925-943).
ctaccgggagccacctaaa

SEQ ID NO: 100928 - DNA, 19 bp, Homo sapiens
  siRNA target sequence for SNARK (NM_030952.1,1236-1254).
gccagcattcgctcaagaa

SEQ ID NO: 100929 - DNA, 19 bp, Homo sapiens
  siRNA target sequence for SNARK (NM_030952.1,1257-1275).
cccgcaaggagaatgacat

SEQ ID NO: 100930 - DNA, 19 bp, Homo sapiens
  siRNA target sequence for SNARK (NM_030952.1,1490-1508).
cgcgagtctggctactact

SEQ ID NO: 100931 - DNA, 19 bp, Homo sapiens
  siRNA target sequence for SNARK (NM_030952.1,1547-1565).
gcaggcgacgtgtttgtga

SEQ ID NO: 100932 - DNA, 19 bp, Homo sapiens
  siRNA target sequence for SNARK (NM_030952.1,1908-1926).
gctggcggcaggatccttt

SEQ ID NO: 100933 - DNA, 19 bp, Homo sapiens
  siRNA target sequence for SNF1LK (NM_173354.1,230-248).
cggcatcgagtcaccaaaa

SEQ ID NO: 100934 - DNA, 19 bp, Homo sapiens
  siRNA target sequence for SNF1LK (NM_173354.1,244-262).
caaaacgcaggttgcaata

SEQ ID NO: 100935 - DNA, 19 bp, Homo sapiens
  siRNA target sequence for SNF1LK (NM_173354.1,272-290).
gataaaacacgattagatt

SEQ ID NO: 100936 - DNA, 19 bp, Homo sapiens
  siRNA target sequence for SNF1LK (NM_173354.1,281-299).
cgattagattcaagcaatt

SEQ ID NO: 100937 - DNA, 19 bp, Homo sapiens
  siRNA target sequence for SNF1LK (NM_173354.1,340-358).
gaaccatccacacatcata

SEQ ID NO: 100938 - DNA, 19 bp, Homo sapiens
  siRNA target sequence for SNF1LK (NM_173354.1,347-365).
ccacacatcataaagcttt

SEQ ID NO: 100939 - DNA, 19 bp, Homo sapiens
  siRNA target sequence for SNF1LK (NM_173354.1,400-418).
cgtcactgaatttgctaaa

SEQ ID NO: 100940 - DNA, 19 bp, Homo sapiens
  siRNA target sequence for SNF1LK (NM_173354.1,821-839).
cgcatccccttcttcatgt

SEQ ID NO: 100941 - DNA, 19 bp, Homo sapiens
  siRNA target sequence for SNF1LK (NM_173354.1,1062-1080).
cggtggagtcactgcaaaa

SEQ ID NO: 100942 - DNA, 19 bp, Homo sapiens
  siRNA target sequence for SNF1LK (NM_173354.1,1073-1091).
ctgcaaaacagcagctata

SEQ ID NO: 100943 - DNA, 19 bp, Homo sapiens
  siRNA target sequence for SNK (NM_006622.1,334-352).
gccgccagcaccaaaatgt

SEQ ID NO: 100944 - DNA, 19 bp, Homo sapiens
  siRNA target sequence for SNK (NM_006622.1,500-518).
cggagatctcgcggattat

SEQ ID NO: 100945 - DNA, 19 bp, Homo sapiens
  siRNA target sequence for SNK (NM_006622.1,565-583).
ggaaagggtggctttgcaa

SEQ ID NO: 100946 - DNA, 19 bp, Homo sapiens
  siRNA target sequence for SNK (NM_006622.1,619-637).
gtctacgccgcaaaaatta

SEQ ID NO: 100947 - DNA, 19 bp, Homo sapiens
  siRNA target sequence for SNK (NM_006622.1,624-642).
cgccgcaaaaattattcct

SEQ ID NO: 100948 - DNA, 19 bp, Homo sapiens
  siRNA target sequence for SNK (NM_006622.1,696-714).
gcttcacagaattcttcat

SEQ ID NO: 100949 - DNA, 19 bp, Homo sapiens
  siRNA target sequence for SNK (NM_006622.1,741-759).
ctacttcgaggacaaagaa

SEQ ID NO: 100950 - DNA, 19 bp, Homo sapiens
  siRNA target sequence for SNK (NM_006622.1,747-765).
cgaggacaaagaaaacatt

SEQ ID NO: 100951 - DNA, 19 bp, Homo sapiens
  siRNA target sequence for SNK (NM_006622.1,833-851).
cagagccagaagttcgata

SEQ ID NO: 100952 - DNA, 19 bp, Homo sapiens
  siRNA target sequence for SNK (NM_006622.1,864-882).
gattgtgtctggactgaaa

SEQ ID NO: 100953 - DNA, 19 bp, Homo sapiens
  siRNA target sequence for SNK (NM_006622.1,879-897).
gaaataccttcatgaacaa

SEQ ID NO: 100954 - DNA, 19 bp, Homo sapiens
  siRNA target sequence for SNK (NM_006622.1,886-904).
cttcatgaacaagaaatct

SEQ ID NO: 100955 - DNA, 19 bp, Homo sapiens
  siRNA target sequence for SNK (NM_006622.1,918-936).
caaactagggaactttttt

SEQ ID NO: 100956 - DNA, 19 bp, Homo sapiens
  siRNA target sequence for SNK (NM_006622.1,1022-1040).
gtggtaccccaaattatct

SEQ ID NO: 100957 - DNA, 19 bp, Homo sapiens
  siRNA target sequence for SNK (NM_006622.1,1159-1177).
gaaacttataggtgcataa

SEQ ID NO: 100958 - DNA, 19 bp, Homo sapiens
  siRNA target sequence for SNK (NM_006622.1,1173-1191).
cataagggaagcaaggtat

SEQ ID NO: 100959 - DNA, 19 bp, Homo sapiens
  siRNA target sequence for SNK (NM_006622.1,1214-1232).
ctcctgccaagcacttaat

SEQ ID NO: 100960 - DNA, 19 bp, Homo sapiens
  siRNA target sequence for SNK (NM_006622.1,1219-1237).
gccaagcacttaattgcta

SEQ ID NO: 100961 - DNA, 19 bp, Homo sapiens
  siRNA target sequence for SNK (NM_006622.1,1234-1252).
gctagtatgttgtccaaaa

SEQ ID NO: 100962 - DNA, 19 bp, Homo sapiens
  siRNA target sequence for SNK (NM_006622.1,1235-1253).
ctagtatgttgtccaaaaa

SEQ ID NO: 100963 - DNA, 19 bp, Homo sapiens
  siRNA target sequence for SNK (NM_006622.1,1260-1278).
ggatcgtcccagtttggat

SEQ ID NO: 100964 - DNA, 19 bp, Homo sapiens
  siRNA target sequence for SNK (NM_006622.1,1343-1361).
gtcatacagttccagattt

SEQ ID NO: 100965 - DNA, 19 bp, Homo sapiens
  siRNA target sequence for SNK (NM_006622.1,1351-1369).
gttccagatttccacttat

SEQ ID NO: 100966 - DNA, 19 bp, Homo sapiens
  siRNA target sequence for SNK (NM_006622.1,1354-1372).
ccagatttccacttatcaa

SEQ ID NO: 100967 - DNA, 19 bp, Homo sapiens
  siRNA target sequence for SNK (NM_006622.1,1439-1457).
gatatattgacacacataa

SEQ ID NO: 100968 - DNA, 19 bp, Homo sapiens
  siRNA target sequence for SNK (NM_006622.1,1451-1469).
cacataatagagtgtctaa

SEQ ID NO: 100969 - DNA, 19 bp, Homo sapiens
  siRNA target sequence for SNK (NM_006622.1,1477-1495).
gaagacatctacaagctta

SEQ ID NO: 100970 - DNA, 19 bp, Homo sapiens
  siRNA target sequence for SNK (NM_006622.1,1592-1610).
gaacacccgcagtagaaaa

SEQ ID NO: 100971 - DNA, 19 bp, Homo sapiens
  siRNA target sequence for SNK (NM_006622.1,1595-1613).
cacccgcagtagaaaacaa

SEQ ID NO: 100972 - DNA, 19 bp, Homo sapiens
  siRNA target sequence for SNK (NM_006622.1,1626-1644).
ggatgctattcggatgata

SEQ ID NO: 100973 - DNA, 19 bp, Homo sapiens
  siRNA target sequence for SNK (NM_006622.1,1630-1648).
gctattcggatgatagtca

SEQ ID NO: 100974 - DNA, 19 bp, Homo sapiens
  siRNA target sequence for SNK (NM_006622.1,1758-1776).
gccggaagctgattgcatt

SEQ ID NO: 100975 - DNA, 19 bp, Homo sapiens
  siRNA target sequence for SNK (NM_006622.1,1783-1801).
gagcagctgagcacatcat

SEQ ID NO: 100976 - DNA, 19 bp, Homo sapiens
  siRNA target sequence for SNK (NM_006622.1,1785-1803).
gcagctgagcacatcattt

SEQ ID NO: 100977 - DNA, 19 bp, Homo sapiens
  siRNA target sequence for SNK (NM_006622.1,1815-1833).
caaatgggttgattactct

SEQ ID NO: 100978 - DNA, 19 bp, Homo sapiens
  siRNA target sequence for SNK (NM_006622.1,1820-1838).
gggttgattactctaacaa

SEQ ID NO: 100979 - DNA, 19 bp, Homo sapiens
  siRNA target sequence for SNK (NM_006622.1,1822-1840).
gttgattactctaacaaat

SEQ ID NO: 100980 - DNA, 19 bp, Homo sapiens
  siRNA target sequence for SNK (NM_006622.1,1875-1893).
cggtgtccttttcaacaat

SEQ ID NO: 100981 - DNA, 19 bp, Homo sapiens
  siRNA target sequence for SNK (NM_006622.1,1978-1996).
gatgctcctgagcaattta

SEQ ID NO: 100982 - DNA, 19 bp, Homo sapiens
  siRNA target sequence for SNK (NM_006622.1,1985-2003).
ctgagcaatttattagtca

SEQ ID NO: 100983 - DNA, 19 bp, Homo sapiens
  siRNA target sequence for SNK (NM_006622.1,2002-2020).
caagtgacggtgctgaaat

SEQ ID NO: 100984 - DNA, 19 bp, Homo sapiens
  siRNA target sequence for SNK (NM_006622.1,2005-2023).
gtgacggtgctgaaatact

SEQ ID NO: 100985 - DNA, 19 bp, Homo sapiens
  siRNA target sequence for SNK (NM_006622.1,2067-2085).
gcctagtgttactgatatt

SEQ ID NO: 100986 - DNA, 19 bp, Homo sapiens
  siRNA target sequence for SNK (NM_006622.1,2103-2121).
cctccttcagtggctaaaa

SEQ ID NO: 100987 - DNA, 19 bp, Homo sapiens
  siRNA target sequence for SNK (NM_006622.1,2123-2141).
ctgataaggccctaatgat

SEQ ID NO: 100988 - DNA, 19 bp, Homo sapiens
  siRNA target sequence for SNK (NM_006622.1,2155-2173).
ggcacctttcaggtgaatt

SEQ ID NO: 100989 - DNA, 19 bp, Homo sapiens
  siRNA target sequence for SNK (NM_006622.1,2175-2193).
ctaccatgatcatacaaaa

SEQ ID NO: 100990 - DNA, 19 bp, Homo sapiens
  siRNA target sequence for SNK (NM_006622.1,2235-2253).
catcaatgaggataggata

SEQ ID NO: 100991 - DNA, 19 bp, Homo sapiens
  siRNA target sequence for SNK (NM_006622.1,2238-2256).
caatgaggataggatatct

SEQ ID NO: 100992 - DNA, 19 bp, Homo sapiens
  siRNA target sequence for SNK (NM_006622.1,2242-2260).
gaggataggatatctacaa

SEQ ID NO: 100993 - DNA, 19 bp, Homo sapiens
  siRNA target sequence for SNK (NM_006622.1,2244-2262).
ggataggatatctacaact

SEQ ID NO: 100994 - DNA, 19 bp, Homo sapiens
  siRNA target sequence for SNK (NM_006622.1,2281-2299).
ctgatgtctggctgttcat

SEQ ID NO: 100995 - DNA, 19 bp, Homo sapiens
  siRNA target sequence for SNRK (NM_017719.3,303-321).
cttgggtcgaggccatttt

SEQ ID NO: 100996 - DNA, 19 bp, Homo sapiens
  siRNA target sequence for SNRK (NM_017719.3,314-332).
gccattttgccgtggttaa

SEQ ID NO: 100997 - DNA, 19 bp, Homo sapiens
  siRNA target sequence for SNRK (NM_017719.3,315-333).
ccattttgccgtggttaaa

SEQ ID NO: 100998 - DNA, 19 bp, Homo sapiens
  siRNA target sequence for SNRK (NM_017719.3,363-381).
ggtggcagtaaaagttatt

SEQ ID NO: 100999 - DNA, 19 bp, Homo sapiens
  siRNA target sequence for SNRK (NM_017719.3,403-421).
ctagctactggtcatcttt

SEQ ID NO: 101000 - DNA, 19 bp, Homo sapiens
  siRNA target sequence for SNRK (NM_017719.3,466-484).
gtccgcctttatgaagtta

SEQ ID NO: 101001 - DNA, 19 bp, Homo sapiens
  siRNA target sequence for SNRK (NM_017719.3,468-486).
ccgcctttatgaagttatt

SEQ ID NO: 101002 - DNA, 19 bp, Homo sapiens
  siRNA target sequence for SNRK (NM_017719.3,487-505).
gacacccagaccaaactat

SEQ ID NO: 101003 - DNA, 19 bp, Homo sapiens
  siRNA target sequence for SNRK (NM_017719.3,489-507).
cacccagaccaaactatat

SEQ ID NO: 101004 - DNA, 19 bp, Homo sapiens
  siRNA target sequence for SNRK (NM_017719.3,492-510).
ccagaccaaactatatctt

SEQ ID NO: 101005 - DNA, 19 bp, Homo sapiens
  siRNA target sequence for SNRK (NM_017719.3,493-511).
cagaccaaactatatctta

SEQ ID NO: 101006 - DNA, 19 bp, Homo sapiens
  siRNA target sequence for SNRK (NM_017719.3,602-620).
ctcagatagttcatgctat

SEQ ID NO: 101007 - DNA, 19 bp, Homo sapiens
  siRNA target sequence for SNRK (NM_017719.3,604-622).
cagatagttcatgctatat

SEQ ID NO: 101008 - DNA, 19 bp, Homo sapiens
  siRNA target sequence for SNRK (NM_017719.3,761-779).
gctgtggatctcttgcata

SEQ ID NO: 101009 - DNA, 19 bp, Homo sapiens
  siRNA target sequence for SNRK (NM_017719.3,762-780).
ctgtggatctcttgcatat

SEQ ID NO: 101010 - DNA, 19 bp, Homo sapiens
  siRNA target sequence for SNRK (NM_017719.3,841-859).
ctgggagtgatccttttca

SEQ ID NO: 101011 - DNA, 19 bp, Homo sapiens
  siRNA target sequence for SNRK (NM_017719.3,845-863).
gagtgatccttttcatgtt

SEQ ID NO: 101012 - DNA, 19 bp, Homo sapiens
  siRNA target sequence for SNRK (NM_017719.3,944-962).
catcccatgtgtctaaaga

SEQ ID NO: 101013 - DNA, 19 bp, Homo sapiens
  siRNA target sequence for SNRK (NM_017719.3,963-981).
gtgtaaagacctaatcaca

SEQ ID NO: 101014 - DNA, 19 bp, Homo sapiens
  siRNA target sequence for SNRK (NM_017719.3,1013-1031).
cttctttagaagagattga

SEQ ID NO: 101015 - DNA, 19 bp, Homo sapiens
  siRNA target sequence for SNRK (NM_017719.3,1061-1079).
cttcaccagctacaaagta

SEQ ID NO: 101016 - DNA, 19 bp, Homo sapiens
  siRNA target sequence for SNRK (NM_017719.3,1067-1085).
cagctacaaagtataacat

SEQ ID NO: 101017 - DNA, 19 bp, Homo sapiens
  siRNA target sequence for SNRK (NM_017719.3,1087-1105).
ccccttgtgtcatacaaaa

SEQ ID NO: 101018 - DNA, 19 bp, Homo sapiens
  siRNA target sequence for SNRK (NM_017719.3,1088-1106).
cccttgtgtcatacaaaaa

SEQ ID NO: 101019 - DNA, 19 bp, Homo sapiens
  siRNA target sequence for SNRK (NM_017719.3,1119-1137).
ggagcacaacagcatcatt

SEQ ID NO: 101020 - DNA, 19 bp, Homo sapiens
  siRNA target sequence for SNRK (NM_017719.3,1164-1182).
ggatcgagacgccattgta

SEQ ID NO: 101021 - DNA, 19 bp, Homo sapiens
  siRNA target sequence for SNRK (NM_017719.3,1196-1214).
ccaacaggtataaccatat

SEQ ID NO: 101022 - DNA, 19 bp, Homo sapiens
  siRNA target sequence for SNRK (NM_017719.3,1286-1304).
ctgcaagcccgagcaatat

SEQ ID NO: 101023 - DNA, 19 bp, Homo sapiens
  siRNA target sequence for SNRK (NM_017719.3,1288-1306).
gcaagcccgagcaatatca

SEQ ID NO: 101024 - DNA, 19 bp, Homo sapiens
  siRNA target sequence for SNRK (NM_017719.3,1289-1307).
caagcccgagcaatatcaa

SEQ ID NO: 101025 - DNA, 19 bp, Homo sapiens
  siRNA target sequence for SNRK (NM_017719.3,1518-1536).
ggtgccacccgcaagctta

SEQ ID NO: 101026 - DNA, 19 bp, Homo sapiens
  siRNA target sequence for SNRK (NM_017719.3,1519-1537).
gtgccacccgcaagcttaa

SEQ ID NO: 101027 - DNA, 19 bp, Homo sapiens
  siRNA target sequence for SNRK (NM_017719.3,1521-1539).
gccacccgcaagcttaaaa

SEQ ID NO: 101028 - DNA, 19 bp, Homo sapiens
  siRNA target sequence for SNRK (NM_017719.3,1813-1831).
cgctaccaccggaggaaaa

SEQ ID NO: 101029 - DNA, 19 bp, Homo sapiens
  siRNA target sequence for SNRK (NM_017719.3,1843-1861).
ggctccagctgcagtagtt

SEQ ID NO: 101030 - DNA, 19 bp, Homo sapiens
  siRNA target sequence for SNRK (NM_017719.3,2080-2098).
ggcaaccccaccaatacat

SEQ ID NO: 101031 - DNA, 19 bp, Homo sapiens
  siRNA target sequence for SNRK (NM_017719.3,2170-2188).
gttgagagcctcaaactca

SEQ ID NO: 101032 - DNA, 19 bp, Homo sapiens
  siRNA target sequence for SNRK (NM_017719.3,2218-2236).
gggagcaccaagtacatta

SEQ ID NO: 101033 - DNA, 19 bp, Homo sapiens
  siRNA target sequence for SNRK (NM_017719.3,2223-2241).
caccaagtacattattgat

SEQ ID NO: 101034 - DNA, 19 bp, Homo sapiens
  siRNA target sequence for SNRK (NM_017719.3,2245-2263).
cagaatggcttgtcatttt

SEQ ID NO: 101035 - DNA, 19 bp, Homo sapiens
  siRNA target sequence for SNRK (NM_017719.3,2374-2392).
gcagataccaccactgaat

SEQ ID NO: 101036 - DNA, 19 bp, Homo sapiens
  siRNA target sequence for SNRK (NM_017719.3,2389-2407).
gaattggaacggataaaga

SEQ ID NO: 101037 - DNA, 19 bp, Homo sapiens
  siRNA target sequence for SNRK (NM_017719.3,2437-2455).
ctacctctgtgcgaaaaga

SEQ ID NO: 101038 - DNA, 19 bp, Homo sapiens
  siRNA target sequence for SNRK (NM_017719.3,2516-2534).
ccagctgttgccatgtcat

SEQ ID NO: 101039 - DNA, 19 bp, Homo sapiens
  siRNA target sequence for SPATA5 (NM_145207.1,99-117).
gaaccaaagcgcggaaaat

SEQ ID NO: 101040 - DNA, 19 bp, Homo sapiens
  siRNA target sequence for SPATA5 (NM_145207.1,102-120).
ccaaagcgcggaaaatggt

SEQ ID NO: 101041 - DNA, 19 bp, Homo sapiens
  siRNA target sequence for SPATA5 (NM_145207.1,103-121).
caaagcgcggaaaatggtt

SEQ ID NO: 101042 - DNA, 19 bp, Homo sapiens
  siRNA target sequence for SPATA5 (NM_145207.1,205-223).
ctgacggtgaccaacttat

SEQ ID NO: 101043 - DNA, 19 bp, Homo sapiens
  siRNA target sequence for SPATA5 (NM_145207.1,207-225).
gacggtgaccaacttatta

SEQ ID NO: 101044 - DNA, 19 bp, Homo sapiens
  siRNA target sequence for SPATA5 (NM_145207.1,209-227).
cggtgaccaacttattaga

SEQ ID NO: 101045 - DNA, 19 bp, Homo sapiens
  siRNA target sequence for SPATA5 (NM_145207.1,210-228).
ggtgaccaacttattagaa

SEQ ID NO: 101046 - DNA, 19 bp, Homo sapiens
  siRNA target sequence for SPATA5 (NM_145207.1,211-229).
gtgaccaacttattagaaa

SEQ ID NO: 101047 - DNA, 19 bp, Homo sapiens
  siRNA target sequence for SPATA5 (NM_145207.1,231-249).
ggtagatgacaaaattcct

SEQ ID NO: 101048 - DNA, 19 bp, Homo sapiens
  siRNA target sequence for SPATA5 (NM_145207.1,274-292).
catcttggactcaacacta

SEQ ID NO: 101049 - DNA, 19 bp, Homo sapiens
  siRNA target sequence for SPATA5 (NM_145207.1,277-295).
cttggactcaacactatga

SEQ ID NO: 101050 - DNA, 19 bp, Homo sapiens
  siRNA target sequence for SPATA5 (NM_145207.1,280-298).
ggactcaacactatgaagt

SEQ ID NO: 101051 - DNA, 19 bp, Homo sapiens
  siRNA target sequence for SPATA5 (NM_145207.1,288-306).
cactatgaagtctgcaaat

SEQ ID NO: 101052 - DNA, 19 bp, Homo sapiens
  siRNA target sequence for SPATA5 (NM_145207.1,294-312).
gaagtctgcaaatatatgt

SEQ ID NO: 101053 - DNA, 19 bp, Homo sapiens
  siRNA target sequence for SPATA5 (NM_145207.1,316-334).
ggtcgaccagtgttgctta

SEQ ID NO: 101054 - DNA, 19 bp, Homo sapiens
  siRNA target sequence for SPATA5 (NM_145207.1,319-337).
cgaccagtgttgcttacta

SEQ ID NO: 101055 - DNA, 19 bp, Homo sapiens
  siRNA target sequence for SPATA5 (NM_145207.1,507-525).
ggcactgagtgacaaagat

SEQ ID NO: 101056 - DNA, 19 bp, Homo sapiens
  siRNA target sequence for SPATA5 (NM_145207.1,508-526).
gcactgagtgacaaagata

SEQ ID NO: 101057 - DNA, 19 bp, Homo sapiens
  siRNA target sequence for SPATA5 (NM_145207.1,628-646).
ccgtacaagctgcaagtat

SEQ ID NO: 101058 - DNA, 19 bp, Homo sapiens
  siRNA target sequence for SPATA5 (NM_145207.1,629-647).
cgtacaagctgcaagtatt

SEQ ID NO: 101059 - DNA, 19 bp, Homo sapiens
  siRNA target sequence for SPATA5 (NM_145207.1,639-657).
gcaagtattgcgagtgaaa

SEQ ID NO: 101060 - DNA, 19 bp, Homo sapiens
  siRNA target sequence for SPATA5 (NM_145207.1,658-676).
ggggcagatggcatgatat

SEQ ID NO: 101061 - DNA, 19 bp, Homo sapiens
  siRNA target sequence for SPATA5 (NM_145207.1,812-830).
caagaagtactccttataa

SEQ ID NO: 101062 - DNA, 19 bp, Homo sapiens
  siRNA target sequence for SPATA5 (NM_145207.1,896-914).
gagatggcagtggacttat

SEQ ID NO: 101063 - DNA, 19 bp, Homo sapiens
  siRNA target sequence for SPATA5 (NM_145207.1,925-943).
gtcacaggtcttaaatgta

SEQ ID NO: 101064 - DNA, 19 bp, Homo sapiens
  siRNA target sequence for SPATA5 (NM_145207.1,988-1006).
gagagactgctaaagttca

SEQ ID NO: 101065 - DNA, 19 bp, Homo sapiens
  siRNA target sequence for SPATA5 (NM_145207.1,1020-1038).
gtgcaatactgatactttt

SEQ ID NO: 101066 - DNA, 19 bp, Homo sapiens
  siRNA target sequence for SPATA5 (NM_145207.1,1022-1040).
gcaatactgatacttttta

SEQ ID NO: 101067 - DNA, 19 bp, Homo sapiens
  siRNA target sequence for SPATA5 (NM_145207.1,1096-1114).
gagcaagacaaccaattca

SEQ ID NO: 101068 - DNA, 19 bp, Homo sapiens
  siRNA target sequence for SPATA5 (NM_145207.1,1104-1122).
caaccaattcaaagtaact

SEQ ID NO: 101069 - DNA, 19 bp, Homo sapiens
  siRNA target sequence for SPATA5 (NM_145207.1,1126-1144).
gacatgataggaggattaa

SEQ ID NO: 101070 - DNA, 19 bp, Homo sapiens
  siRNA target sequence for SPATA5 (NM_145207.1,1128-1146).
catgataggaggattaagt

SEQ ID NO: 101071 - DNA, 19 bp, Homo sapiens
  siRNA target sequence for SPATA5 (NM_145207.1,1149-1167).
ccagctgaaagcaattaga

SEQ ID NO: 101072 - DNA, 19 bp, Homo sapiens
  siRNA target sequence for SPATA5 (NM_145207.1,1192-1210).
cagcctgagcttttcaaga

SEQ ID NO: 101073 - DNA, 19 bp, Homo sapiens
  siRNA target sequence for SPATA5 (NM_145207.1,1195-1213).
cctgagcttttcaagagtt

SEQ ID NO: 101074 - DNA, 19 bp, Homo sapiens
  siRNA target sequence for SPATA5 (NM_145207.1,1196-1214).
ctgagcttttcaagagtta

SEQ ID NO: 101075 - DNA, 19 bp, Homo sapiens
  siRNA target sequence for SPATA5 (NM_145207.1,1227-1245).
ccctagaggagtgttactt

SEQ ID NO: 101076 - DNA, 19 bp, Homo sapiens
  siRNA target sequence for SPATA5 (NM_145207.1,1228-1246).
cctagaggagtgttacttt

SEQ ID NO: 101077 - DNA, 19 bp, Homo sapiens
  siRNA target sequence for SPATA5 (NM_145207.1,1229-1247).
ctagaggagtgttacttta

SEQ ID NO: 101078 - DNA, 19 bp, Homo sapiens
  siRNA target sequence for SPATA5 (NM_145207.1,1278-1296).
cgccagggctgttgctaat

SEQ ID NO: 101079 - DNA, 19 bp, Homo sapiens
  siRNA target sequence for SPATA5 (NM_145207.1,1304-1322).
gagcctatgtttctgtaat

SEQ ID NO: 101080 - DNA, 19 bp, Homo sapiens
  siRNA target sequence for SPATA5 (NM_145207.1,1307-1325).
cctatgtttctgtaattaa

SEQ ID NO: 101081 - DNA, 19 bp, Homo sapiens
  siRNA target sequence for SPATA5 (NM_145207.1,1327-1345).
ggtcctgaaattataagca

SEQ ID NO: 101082 - DNA, 19 bp, Homo sapiens
  siRNA target sequence for SPATA5 (NM_145207.1,1355-1373).
gtgagactgaagcaaagtt

SEQ ID NO: 101083 - DNA, 19 bp, Homo sapiens
  siRNA target sequence for SPATA5 (NM_145207.1,1371-1389).
gttacgtcagatatttgct

SEQ ID NO: 101084 - DNA, 19 bp, Homo sapiens
  siRNA target sequence for SPATA5 (NM_145207.1,1397-1415).
ctctacgacacccatcaat

SEQ ID NO: 101085 - DNA, 19 bp, Homo sapiens
  siRNA target sequence for SPATA5 (NM_145207.1,1399-1417).
ctacgacacccatcaatta

SEQ ID NO: 101086 - DNA, 19 bp, Homo sapiens
  siRNA target sequence for SPATA5 (NM_145207.1,1507-1525).
ctgatggatggcattggtt

SEQ ID NO: 101087 - DNA, 19 bp, Homo sapiens
  siRNA target sequence for SPATA5 (NM_145207.1,1516-1534).
ggcattggttcagaagtaa

SEQ ID NO: 101088 - DNA, 19 bp, Homo sapiens
  siRNA target sequence for SPATA5 (NM_145207.1,1518-1536).
cattggttcagaagtaagt

SEQ ID NO: 101089 - DNA, 19 bp, Homo sapiens
  siRNA target sequence for SPATA5 (NM_145207.1,1598-1616).
gaagacctgggcgatttga

SEQ ID NO: 101090 - DNA, 19 bp, Homo sapiens
  siRNA target sequence for SPATA5 (NM_145207.1,1604-1622).
ctgggcgatttgataaaga

SEQ ID NO: 101091 - DNA, 19 bp, Homo sapiens
  siRNA target sequence for SPATA5 (NM_145207.1,1606-1624).
gggcgatttgataaagaga

SEQ ID NO: 101092 - DNA, 19 bp, Homo sapiens
  siRNA target sequence for SPATA5 (NM_145207.1,1646-1664).
ctcaggaccggctagatat

SEQ ID NO: 101093 - DNA, 19 bp, Homo sapiens
  siRNA target sequence for SPATA5 (NM_145207.1,1682-1700).
gaagggtaccccatttgct

SEQ ID NO: 101094 - DNA, 19 bp, Homo sapiens
  siRNA target sequence for SPATA5 (NM_145207.1,1750-1768).
ggagcagacttgaaagtct

SEQ ID NO: 101095 - DNA, 19 bp, Homo sapiens
  siRNA target sequence for SPATA5 (NM_145207.1,1756-1774).
gacttgaaagtcttgtgta

SEQ ID NO: 101096 - DNA, 19 bp, Homo sapiens
  siRNA target sequence for SPATA5 (NM_145207.1,1847-1865).
gactggtgaagattactct

SEQ ID NO: 101097 - DNA, 19 bp, Homo sapiens
  siRNA target sequence for SPATA5 (NM_145207.1,1879-1897).
caggcaatgaatgatatca

SEQ ID NO: 101098 - DNA, 19 bp, Homo sapiens
  siRNA target sequence for SPATA5 (NM_145207.1,1906-1924).
gccatgagggaaatagcaa

SEQ ID NO: 101099 - DNA, 19 bp, Homo sapiens
  siRNA target sequence for SPATA5 (NM_145207.1,1922-1940).
caattgatgtcccaaatgt

SEQ ID NO: 101100 - DNA, 19 bp, Homo sapiens
  siRNA target sequence for SPATA5 (NM_145207.1,1958-1976).
gaggactggaaagtatcaa

SEQ ID NO: 101101 - DNA, 19 bp, Homo sapiens
  siRNA target sequence for SPATA5 (NM_145207.1,2017-2035).
ccagagtctttcattcgaa

SEQ ID NO: 101102 - DNA, 19 bp, Homo sapiens
  siRNA target sequence for SPATA5 (NM_145207.1,2073-2091).
gccacctgggtgctctaaa

SEQ ID NO: 101103 - DNA, 19 bp, Homo sapiens
  siRNA target sequence for SPATA5 (NM_145207.1,2078-2096).
ctgggtgctctaaaacaat

SEQ ID NO: 101104 - DNA, 19 bp, Homo sapiens
  siRNA target sequence for SPATA5 (NM_145207.1,2080-2098).
gggtgctctaaaacaatga

SEQ ID NO: 101105 - DNA, 19 bp, Homo sapiens
  siRNA target sequence for SPATA5 (NM_145207.1,2141-2159).
ctataaaggggcctgaatt

SEQ ID NO: 101106 - DNA, 19 bp, Homo sapiens
  siRNA target sequence for SPATA5 (NM_145207.1,2149-2167).
gggcctgaattaatgaata

SEQ ID NO: 101107 - DNA, 19 bp, Homo sapiens
  siRNA target sequence for SPATA5 (NM_145207.1,2221-2239).
gcagtggcgccttccatta

SEQ ID NO: 101108 - DNA, 19 bp, Homo sapiens
  siRNA target sequence for SPATA5 (NM_145207.1,2222-2240).
cagtggcgccttccattat

SEQ ID NO: 101109 - DNA, 19 bp, Homo sapiens
  siRNA target sequence for SPATA5 (NM_145207.1,2227-2245).
gcgccttccattattttct

SEQ ID NO: 101110 - DNA, 19 bp, Homo sapiens
  siRNA target sequence for SPATA5 (NM_145207.1,2256-2274).
ggatgccttagcagttgaa

SEQ ID NO: 101111 - DNA, 19 bp, Homo sapiens
  siRNA target sequence for SPATA5 (NM_145207.1,2345-2363).
ggattgaacagctaaagga

SEQ ID NO: 101112 - DNA, 19 bp, Homo sapiens
  siRNA target sequence for SPATA5 (NM_145207.1,2346-2364).
gattgaacagctaaaggat

SEQ ID NO: 101113 - DNA, 19 bp, Homo sapiens
  siRNA target sequence for SPATA5 (NM_145207.1,2369-2387).
ccattttggcagctactaa

SEQ ID NO: 101114 - DNA, 19 bp, Homo sapiens
  siRNA target sequence for SPATA5 (NM_145207.1,2384-2402).
ctaaccgtccagataggat

SEQ ID NO: 101115 - DNA, 19 bp, Homo sapiens
  siRNA target sequence for SPATA5 (NM_145207.1,2389-2407).
cgtccagataggatagaca

SEQ ID NO: 101116 - DNA, 19 bp, Homo sapiens
  siRNA target sequence for SPATA5 (NM_145207.1,2390-2408).
gtccagataggatagacaa

SEQ ID NO: 101117 - DNA, 19 bp, Homo sapiens
  siRNA target sequence for SPATA5 (NM_145207.1,2399-2417).
ggatagacaaggctttgat

SEQ ID NO: 101118 - DNA, 19 bp, Homo sapiens
  siRNA target sequence for SPATA5 (NM_145207.1,2415-2433).
gatgcggcctggaagaatt

SEQ ID NO: 101119 - DNA, 19 bp, Homo sapiens
  siRNA target sequence for SPATA5 (NM_145207.1,2502-2520).
ctccatgcctgtcagtaat

SEQ ID NO: 101120 - DNA, 19 bp, Homo sapiens
  siRNA target sequence for SPATA5 (NM_145207.1,2504-2522).
ccatgcctgtcagtaatga

SEQ ID NO: 101121 - DNA, 19 bp, Homo sapiens
  siRNA target sequence for SPATA5 (NM_145207.1,2505-2523).
catgcctgtcagtaatgaa

SEQ ID NO: 101122 - DNA, 19 bp, Homo sapiens
  siRNA target sequence for SPATA5 (NM_145207.1,2508-2526).
gcctgtcagtaatgaagtt

SEQ ID NO: 101123 - DNA, 19 bp, Homo sapiens
  siRNA target sequence for SPATA5 (NM_145207.1,2629-2647).
gccaatctcatcatgaaaa

SEQ ID NO: 101124 - DNA, 19 bp, Homo sapiens
  siRNA target sequence for SPATA5 (NM_145207.1,2669-2687).
gcactgtgacacctagaat

SEQ ID NO: 101125 - DNA, 19 bp, Homo sapiens
  siRNA target sequence for SPATA5 (NM_145207.1,2670-2688).
cactgtgacacctagaatt

SEQ ID NO: 101126 - DNA, 19 bp, Homo sapiens
  siRNA target sequence for SPATA5 (NM_145207.1,2681-2699).
ctagaattcctgagtcatt

SEQ ID NO: 101127 - DNA, 19 bp, Homo sapiens
  siRNA target sequence for SPATA5 (NM_145207.1,2694-2712).
gtcattgagacgtttttat

SEQ ID NO: 101128 - DNA, 19 bp, Homo sapiens
  siRNA target sequence for SPATA5 (NM_145207.1,2696-2714).
cattgagacgtttttatga

SEQ ID NO: 101129 - DNA, 19 bp, Homo sapiens
  siRNA target sequence for SPG4 (NM_014946.3,363-381).
cggaacctgtactatttct

SEQ ID NO: 101130 - DNA, 19 bp, Homo sapiens
  siRNA target sequence for SPG4 (NM_014946.3,655-673).
ctgtggaatggtataagaa

SEQ ID NO: 101131 - DNA, 19 bp, Homo sapiens
  siRNA target sequence for SPG4 (NM_014946.3,742-760).
ctagacgccttcaagctaa

SEQ ID NO: 101132 - DNA, 19 bp, Homo sapiens
  siRNA target sequence for SPG4 (NM_014946.3,745-763).
gacgccttcaagctaaaat

SEQ ID NO: 101133 - DNA, 19 bp, Homo sapiens
  siRNA target sequence for SPG4 (NM_014946.3,747-765).
cgccttcaagctaaaatga

SEQ ID NO: 101134 - DNA, 19 bp, Homo sapiens
  siRNA target sequence for SPG4 (NM_014946.3,753-771).
caagctaaaatgatgacta

SEQ ID NO: 101135 - DNA, 19 bp, Homo sapiens
  siRNA target sequence for SPG4 (NM_014946.3,756-774).
gctaaaatgatgactaatt

SEQ ID NO: 101136 - DNA, 19 bp, Homo sapiens
  siRNA target sequence for SPG4 (NM_014946.3,782-800).
ggccaaggaccgcttacaa

SEQ ID NO: 101137 - DNA, 19 bp, Homo sapiens
  siRNA target sequence for SPG4 (NM_014946.3,785-803).
caaggaccgcttacaactt

SEQ ID NO: 101138 - DNA, 19 bp, Homo sapiens
  siRNA target sequence for SPG4 (NM_014946.3,788-806).
ggaccgcttacaacttcta

SEQ ID NO: 101139 - DNA, 19 bp, Homo sapiens
  siRNA target sequence for SPG4 (NM_014946.3,841-859).
cacaaacggacgtctataa

SEQ ID NO: 101140 - DNA, 19 bp, Homo sapiens
  siRNA target sequence for SPG4 (NM_014946.3,852-870).
gtctataatgacagtacta

SEQ ID NO: 101141 - DNA, 19 bp, Homo sapiens
  siRNA target sequence for SPG4 (NM_014946.3,925-943).
gaaaagaccccttaacaca

SEQ ID NO: 101142 - DNA, 19 bp, Homo sapiens
  siRNA target sequence for SPG4 (NM_014946.3,933-951).
cccttaacacacactagta

SEQ ID NO: 101143 - DNA, 19 bp, Homo sapiens
  siRNA target sequence for SPG4 (NM_014946.3,934-952).
ccttaacacacactagtaa

SEQ ID NO: 101144 - DNA, 19 bp, Homo sapiens
  siRNA target sequence for SPG4 (NM_014946.3,940-958).
cacacactagtaattcact

SEQ ID NO: 101145 - DNA, 19 bp, Homo sapiens
  siRNA target sequence for SPG4 (NM_014946.3,959-977).
gcctcgttcaaaaacagtt

SEQ ID NO: 101146 - DNA, 19 bp, Homo sapiens
  siRNA target sequence for SPG4 (NM_014946.3,1011-1029).
catagagcacctagttaca

SEQ ID NO: 101147 - DNA, 19 bp, Homo sapiens
  siRNA target sequence for SPG4 (NM_014946.3,1020-1038).
cctagttacagtggtttat

SEQ ID NO: 101148 - DNA, 19 bp, Homo sapiens
  siRNA target sequence for SPG4 (NM_014946.3,1091-1109).
gggtactccgaaaacaaat

SEQ ID NO: 101149 - DNA, 19 bp, Homo sapiens
  siRNA target sequence for SPG4 (NM_014946.3,1092-1110).
ggtactccgaaaacaaata

SEQ ID NO: 101150 - DNA, 19 bp, Homo sapiens
  siRNA target sequence for SPG4 (NM_014946.3,1135-1153).
caactgctactcgtaagaa

SEQ ID NO: 101151 - DNA, 19 bp, Homo sapiens
  siRNA target sequence for SPG4 (NM_014946.3,1144-1162).
ctcgtaagaaaaaagactt

SEQ ID NO: 101152 - DNA, 19 bp, Homo sapiens
  siRNA target sequence for SPG4 (NM_014946.3,1184-1202).
cagcaaccttgctaacctt

SEQ ID NO: 101153 - DNA, 19 bp, Homo sapiens
  siRNA target sequence for SPG4 (NM_014946.3,1186-1204).
gcaaccttgctaaccttat

SEQ ID NO: 101154 - DNA, 19 bp, Homo sapiens
  siRNA target sequence for SPG4 (NM_014946.3,1187-1205).
caaccttgctaaccttata

SEQ ID NO: 101155 - DNA, 19 bp, Homo sapiens
  siRNA target sequence for SPG4 (NM_014946.3,1195-1213).
ctaaccttataatgaatga

SEQ ID NO: 101156 - DNA, 19 bp, Homo sapiens
  siRNA target sequence for SPG4 (NM_014946.3,1306-1324).
ctctgaggcctgagttgtt

SEQ ID NO: 101157 - DNA, 19 bp, Homo sapiens
  siRNA target sequence for SPG4 (NM_014946.3,1371-1389).
cctgggaatgggaagacaa

SEQ ID NO: 101158 - DNA, 19 bp, Homo sapiens
  siRNA target sequence for SPG4 (NM_014946.3,1372-1390).
ctgggaatgggaagacaat

SEQ ID NO: 101159 - DNA, 19 bp, Homo sapiens
  siRNA target sequence for SPG4 (NM_014946.3,1385-1403).
gacaatgctggctaaagca

SEQ ID NO: 101160 - DNA, 19 bp, Homo sapiens
  siRNA target sequence for SPG4 (NM_014946.3,1417-1435).
cgaatgcaaccttctttaa

SEQ ID NO: 101161 - DNA, 19 bp, Homo sapiens
  siRNA target sequence for SPG4 (NM_014946.3,1418-1436).
gaatgcaaccttctttaat

SEQ ID NO: 101162 - DNA, 19 bp, Homo sapiens
  siRNA target sequence for SPG4 (NM_014946.3,1422-1440).
gcaaccttctttaatataa

SEQ ID NO: 101163 - DNA, 19 bp, Homo sapiens
  siRNA target sequence for SPG4 (NM_014946.3,1504-1522).
ctgtggctcgagaacttca

SEQ ID NO: 101164 - DNA, 19 bp, Homo sapiens
  siRNA target sequence for SPG4 (NM_014946.3,1515-1533).
gaacttcaaccttctataa

SEQ ID NO: 101165 - DNA, 19 bp, Homo sapiens
  siRNA target sequence for SPG4 (NM_014946.3,1580-1598).
ggagcacgatgctagtaga

SEQ ID NO: 101166 - DNA, 19 bp, Homo sapiens
  siRNA target sequence for SPG4 (NM_014946.3,1590-1608).
gctagtagacgcctaaaaa

SEQ ID NO: 101167 - DNA, 19 bp, Homo sapiens
  siRNA target sequence for SPG4 (NM_014946.3,1594-1612).
gtagacgcctaaaaactga

SEQ ID NO: 101168 - DNA, 19 bp, Homo sapiens
  siRNA target sequence for SPG4 (NM_014946.3,1597-1615).
gacgcctaaaaactgaatt

SEQ ID NO: 101169 - DNA, 19 bp, Homo sapiens
  siRNA target sequence for SPG4 (NM_014946.3,1665-1683).
gtaatgggtgcaactaata

SEQ ID NO: 101170 - DNA, 19 bp, Homo sapiens
  siRNA target sequence for SPG4 (NM_014946.3,1705-1723).
ctgttctcaggcgtttcat

SEQ ID NO: 101171 - DNA, 19 bp, Homo sapiens
  siRNA target sequence for SPG4 (NM_014946.3,1707-1725).
gttctcaggcgtttcatca

SEQ ID NO: 101172 - DNA, 19 bp, Homo sapiens
  siRNA target sequence for SPG4 (NM_014946.3,1752-1770).
gaggagacaagactacttt

SEQ ID NO: 101173 - DNA, 19 bp, Homo sapiens
  siRNA target sequence for SPG4 (NM_014946.3,1757-1775).
gacaagactacttttgctt

SEQ ID NO: 101174 - DNA, 19 bp, Homo sapiens
  siRNA target sequence for SPG4 (NM_014946.3,1759-1777).
caagactacttttgcttaa

SEQ ID NO: 101175 - DNA, 19 bp, Homo sapiens
  siRNA target sequence for SPG4 (NM_014946.3,1772-1790).
gcttaaaaatctgttatgt

SEQ ID NO: 101176 - DNA, 19 bp, Homo sapiens
  siRNA target sequence for SPG4 (NM_014946.3,1834-1852).
ctagaatgactgatggata

SEQ ID NO: 101177 - DNA, 19 bp, Homo sapiens
  siRNA target sequence for SPG4 (NM_014946.3,1896-1914).
ggtcctatccgagaactaa

SEQ ID NO: 101178 - DNA, 19 bp, Homo sapiens
  siRNA target sequence for SPG4 (NM_014946.3,1897-1915).
gtcctatccgagaactaaa

SEQ ID NO: 101179 - DNA, 19 bp, Homo sapiens
  siRNA target sequence for SPG4 (NM_014946.3,1942-1960).
ccagtgagatgagaaatat

SEQ ID NO: 101180 - DNA, 19 bp, Homo sapiens
  siRNA target sequence for SPG4 (NM_014946.3,1947-1965).
gagatgagaaatattcgat

SEQ ID NO: 101181 - DNA, 19 bp, Homo sapiens
  siRNA target sequence for SPG4 (NM_014946.3,1949-1967).
gatgagaaatattcgatta

SEQ ID NO: 101182 - DNA, 19 bp, Homo sapiens
  siRNA target sequence for SPG4 (NM_014946.3,1952-1970).
gagaaatattcgattatct

SEQ ID NO: 101183 - DNA, 19 bp, Homo sapiens
  siRNA target sequence for SPG4 (NM_014946.3,2005-2023).
gcgtcagccctcaaacttt

SEQ ID NO: 101184 - DNA, 19 bp, Homo sapiens
  siRNA target sequence for SPG4 (NM_014946.3,2006-2024).
cgtcagccctcaaacttta

SEQ ID NO: 101185 - DNA, 19 bp, Homo sapiens
  siRNA target sequence for SPG7 (NM_003119.2,201-219).
gcagagcttacaattgaga

SEQ ID NO: 101186 - DNA, 19 bp, Homo sapiens
  siRNA target sequence for SPG7 (NM_003119.2,241-259).
gggatcaacggattgttgt

SEQ ID NO: 101187 - DNA, 19 bp, Homo sapiens
  siRNA target sequence for SPG7 (NM_003119.2,242-260).
ggatcaacggattgttgtt

SEQ ID NO: 101188 - DNA, 19 bp, Homo sapiens
  siRNA target sequence for SPG7 (NM_003119.2,246-264).
caacggattgttgttgaaa

SEQ ID NO: 101189 - DNA, 19 bp, Homo sapiens
  siRNA target sequence for SPG7 (NM_003119.2,249-267).
cggattgttgttgaaacaa

SEQ ID NO: 101190 - DNA, 19 bp, Homo sapiens
  siRNA target sequence for SPG7 (NM_003119.2,310-328).
ggtactttctattttaaca

SEQ ID NO: 101191 - DNA, 19 bp, Homo sapiens
  siRNA target sequence for SPG7 (NM_003119.2,637-655).
cctcggctagccttgatgt

SEQ ID NO: 101192 - DNA, 19 bp, Homo sapiens
  siRNA target sequence for SPG7 (NM_003119.2,638-656).
ctcggctagccttgatgta

SEQ ID NO: 101193 - DNA, 19 bp, Homo sapiens
  siRNA target sequence for SPG7 (NM_003119.2,657-675).
ccgaatgcaggttgcaaat

SEQ ID NO: 101194 - DNA, 19 bp, Homo sapiens
  siRNA target sequence for SPG7 (NM_003119.2,658-676).
cgaatgcaggttgcaaata

SEQ ID NO: 101195 - DNA, 19 bp, Homo sapiens
  siRNA target sequence for SPG7 (NM_003119.2,756-774).
caagcgaacaggattcttt

SEQ ID NO: 101196 - DNA, 19 bp, Homo sapiens
  siRNA target sequence for SPG7 (NM_003119.2,984-1002).
ccgcgagtttgtggattat

SEQ ID NO: 101197 - DNA, 19 bp, Homo sapiens
  siRNA target sequence for SPG7 (NM_003119.2,986-1004).
gcgagtttgtggattatct

SEQ ID NO: 101198 - DNA, 19 bp, Homo sapiens
  siRNA target sequence for SPG7 (NM_003119.2,1352-1370).
gtaccacagaccatgtcat

SEQ ID NO: 101199 - DNA, 19 bp, Homo sapiens
  siRNA target sequence for SPG7 (NM_003119.2,1383-1401).
cacgaaccgagctgacatt

SEQ ID NO: 101200 - DNA, 19 bp, Homo sapiens
  siRNA target sequence for SPG7 (NM_003119.2,1385-1403).
cgaaccgagctgacatttt

SEQ ID NO: 101201 - DNA, 19 bp, Homo sapiens
  siRNA target sequence for SPG7 (NM_003119.2,1439-1457).
ggcacgtcttcattgatct

SEQ ID NO: 101202 - DNA, 19 bp, Homo sapiens
  siRNA target sequence for SPG7 (NM_003119.2,1554-1572).
gctgacaccaggattcagt

SEQ ID NO: 101203 - DNA, 19 bp, Homo sapiens
  siRNA target sequence for SPG7 (NM_003119.2,1725-1743).
gaaagtggttgcgtttcat

SEQ ID NO: 101204 - DNA, 19 bp, Homo sapiens
  siRNA target sequence for SPG7 (NM_003119.2,1792-1810).
gtgatgaaggtctccataa

SEQ ID NO: 101205 - DNA, 19 bp, Homo sapiens
  siRNA target sequence for SPG7 (NM_003119.2,2244-2262).
ggacattgaggctctcatt

SEQ ID NO: 101206 - DNA, 19 bp, Homo sapiens
  siRNA target sequence for SPHK1 (NM_021972.2,402-420).
ggacgtggcctctttggtt

SEQ ID NO: 101207 - DNA, 19 bp, Homo sapiens
  siRNA target sequence for SPHK1 (NM_021972.2,403-421).
gacgtggcctctttggttt

SEQ ID NO: 101208 - DNA, 19 bp, Homo sapiens
  siRNA target sequence for SPHK1 (NM_021972.2,829-847).
ccaactgcacgctattgct

SEQ ID NO: 101209 - DNA, 19 bp, Homo sapiens
  siRNA target sequence for SPHK1 (NM_021972.2,1267-1285).
ctggcgtcatgcatctgtt

SEQ ID NO: 101210 - DNA, 19 bp, Homo sapiens
  siRNA target sequence for SPHK1 (NM_021972.2,1270-1288).
gcgtcatgcatctgttcta

SEQ ID NO: 101211 - DNA, 19 bp, Homo sapiens
  siRNA target sequence for SPHK1 (NM_021972.2,1348-1366).
gcaggcatatggagtatga

SEQ ID NO: 101212 - DNA, 19 bp, Homo sapiens
  siRNA target sequence for SPHK1 (NM_021972.2,1349-1367).
caggcatatggagtatgaa

SEQ ID NO: 101213 - DNA, 19 bp, Homo sapiens
  siRNA target sequence for SPHK1 (NM_021972.2,1365-1383).
gaatgcccctacttggtat

SEQ ID NO: 101214 - DNA, 19 bp, Homo sapiens
  siRNA target sequence for SPHK1 (NM_021972.2,1369-1387).
gcccctacttggtatatgt

SEQ ID NO: 101215 - DNA, 19 bp, Homo sapiens
  siRNA target sequence for SPHK1 (NM_021972.2,1437-1455).
gcagtggatggggaattga

SEQ ID NO: 101216 - DNA, 19 bp, Homo sapiens
  siRNA target sequence for SPHK1 (NM_021972.2,1438-1456).
cagtggatggggaattgat

SEQ ID NO: 101217 - DNA, 19 bp, Homo sapiens
  siRNA target sequence for SPHK1 (NM_021972.2,1443-1461).
gatggggaattgatggtta

SEQ ID NO: 101218 - DNA, 19 bp, Homo sapiens
  siRNA target sequence for SPHK1 (NM_021972.2,1479-1497).
caggtgcacccaaactact

SEQ ID NO: 101219 - DNA, 19 bp, Homo sapiens
  siRNA target sequence for SPHK1 (NM_021972.2,1482-1500).
gtgcacccaaactacttct

SEQ ID NO: 101220 - DNA, 19 bp, Homo sapiens
  siRNA target sequence for SPHK2 (NM_020126.3,952-970).
gcctggcagtggtgtaaga

SEQ ID NO: 101221 - DNA, 19 bp, Homo sapiens
  siRNA target sequence for SPHK2 (NM_020126.3,953-971).
cctggcagtggtgtaagaa

SEQ ID NO: 101222 - DNA, 19 bp, Homo sapiens
  siRNA target sequence for SPHK2 (NM_020126.3,1964-1982).
cgctggagggggactttgt

SEQ ID NO: 101223 - DNA, 19 bp, Homo sapiens
  siRNA target sequence for SRC (NM_005417.3,636-654).
ctgttcggaggcttcaact

SEQ ID NO: 101224 - DNA, 19 bp, Homo sapiens
  siRNA target sequence for SRC (NM_005417.3,772-790).
gcgagcggctccagattgt

SEQ ID NO: 101225 - DNA, 19 bp, Homo sapiens
  siRNA target sequence for SRC (NM_005417.3,888-906).
caggctgaggagtggtatt

SEQ ID NO: 101226 - DNA, 19 bp, Homo sapiens
  siRNA target sequence for SRC (NM_005417.3,1675-1693).
ggctggctcggctcattga

SEQ ID NO: 101227 - DNA, 19 bp, Homo sapiens
  siRNA target sequence for SRC (NM_005417.3,1681-1699).
ctcggctcattgaagacaa

SEQ ID NO: 101228 - DNA, 19 bp, Homo sapiens
  siRNA target sequence for SRMS (NM_080823.2,390-408).
gaccaaccctggtacttta

SEQ ID NO: 101229 - DNA, 19 bp, Homo sapiens
  siRNA target sequence for SRMS (NM_080823.2,746-764).
gctgggtgaaggctacttt

SEQ ID NO: 101230 - DNA, 19 bp, Homo sapiens
  siRNA target sequence for SRMS (NM_080823.2,807-825).
gcgatcaaggtcatcaagt

SEQ ID NO: 101231 - DNA, 19 bp, Homo sapiens
  siRNA target sequence for SRMS (NM_080823.2,1164-1182).
ctcaaggacgacatctact

SEQ ID NO: 101232 - DNA, 19 bp, Homo sapiens
  siRNA target sequence for SRPK1 (NM_003137.2,29-47).
cgctccaggcccgaaagaa

SEQ ID NO: 101233 - DNA, 19 bp, Homo sapiens
  siRNA target sequence for SRPK1 (NM_003137.2,30-48).
gctccaggcccgaaagaaa

SEQ ID NO: 101234 - DNA, 19 bp, Homo sapiens
  siRNA target sequence for SRPK1 (NM_003137.2,31-49).
ctccaggcccgaaagaaaa

SEQ ID NO: 101235 - DNA, 19 bp, Homo sapiens
  siRNA target sequence for SRPK1 (NM_003137.2,174-192).
gcaagaagatcctaatgat

SEQ ID NO: 101236 - DNA, 19 bp, Homo sapiens
  siRNA target sequence for SRPK1 (NM_003137.2,206-224).
gttatcatcttgtgaaaat

SEQ ID NO: 101237 - DNA, 19 bp, Homo sapiens
  siRNA target sequence for SRPK1 (NM_003137.2,249-267).
ccatgtgatccgaaagtta

SEQ ID NO: 101238 - DNA, 19 bp, Homo sapiens
  siRNA target sequence for SRPK1 (NM_003137.2,264-282).
gttaggctggggacacttt

SEQ ID NO: 101239 - DNA, 19 bp, Homo sapiens
  siRNA target sequence for SRPK1 (NM_003137.2,274-292).
ggacacttttcaacagtat

SEQ ID NO: 101240 - DNA, 19 bp, Homo sapiens
  siRNA target sequence for SRPK1 (NM_003137.2,279-297).
cttttcaacagtatggtta

SEQ ID NO: 101241 - DNA, 19 bp, Homo sapiens
  siRNA target sequence for SRPK1 (NM_003137.2,325-343).
gtggcaatgaaagtagtta

SEQ ID NO: 101242 - DNA, 19 bp, Homo sapiens
  siRNA target sequence for SRPK1 (NM_003137.2,360-378).
cactgaaacagcactagat

SEQ ID NO: 101243 - DNA, 19 bp, Homo sapiens
  siRNA target sequence for SRPK1 (NM_003137.2,393-411).
gaagtcagttcgcaattca

SEQ ID NO: 101244 - DNA, 19 bp, Homo sapiens
  siRNA target sequence for SRPK1 (NM_003137.2,404-422).
gcaattcagaccctaatga

SEQ ID NO: 101245 - DNA, 19 bp, Homo sapiens
  siRNA target sequence for SRPK1 (NM_003137.2,410-428).
cagaccctaatgatccaaa

SEQ ID NO: 101246 - DNA, 19 bp, Homo sapiens
  siRNA target sequence for SRPK1 (NM_003137.2,412-430).
gaccctaatgatccaaata

SEQ ID NO: 101247 - DNA, 19 bp, Homo sapiens
  siRNA target sequence for SRPK1 (NM_003137.2,438-456).
ggttgttcaactactagat

SEQ ID NO: 101248 - DNA, 19 bp, Homo sapiens
  siRNA target sequence for SRPK1 (NM_003137.2,595-613).
gtgttacagggtcttgatt

SEQ ID NO: 101249 - DNA, 19 bp, Homo sapiens
  siRNA target sequence for SRPK1 (NM_003137.2,777-795).
gcctaaaccagctgacaaa

SEQ ID NO: 101250 - DNA, 19 bp, Homo sapiens
  siRNA target sequence for SRPK1 (NM_003137.2,837-855).
gcgccaggcagaattacta

SEQ ID NO: 101251 - DNA, 19 bp, Homo sapiens
  siRNA target sequence for SRPK1 (NM_003137.2,960-978).
gaaagagaacccacctaat

SEQ ID NO: 101252 - DNA, 19 bp, Homo sapiens
  siRNA target sequence for SRPK1 (NM_003137.2,1023-1041).
ggatcaaacgcttatggaa

SEQ ID NO: 101253 - DNA, 19 bp, Homo sapiens
  siRNA target sequence for SRPK1 (NM_003137.2,1032-1050).
gcttatggaacgtgataca

SEQ ID NO: 101254 - DNA, 19 bp, Homo sapiens
  siRNA target sequence for SRPK1 (NM_003137.2,1076-1094).
gcaatggagtgattgaagt

SEQ ID NO: 101255 - DNA, 19 bp, Homo sapiens
  siRNA target sequence for SRPK1 (NM_003137.2,1081-1099).
ggagtgattgaagtcatta

SEQ ID NO: 101256 - DNA, 19 bp, Homo sapiens
  siRNA target sequence for SRPK1 (NM_003137.2,1135-1153).
cataaagaggatctacata

SEQ ID NO: 101257 - DNA, 19 bp, Homo sapiens
  siRNA target sequence for SRPK1 (NM_003137.2,1243-1261).
gactcttgtacacctataa

SEQ ID NO: 101258 - DNA, 19 bp, Homo sapiens
  siRNA target sequence for SRPK1 (NM_003137.2,1245-1263).
ctcttgtacacctataaca

SEQ ID NO: 101259 - DNA, 19 bp, Homo sapiens
  siRNA target sequence for SRPK1 (NM_003137.2,1290-1308).
ccagtcttcctcaactgta

SEQ ID NO: 101260 - DNA, 19 bp, Homo sapiens
  siRNA target sequence for SRPK1 (NM_003137.2,1432-1450).
gctggaaattttcttgtta

SEQ ID NO: 101261 - DNA, 19 bp, Homo sapiens
  siRNA target sequence for SRPK1 (NM_003137.2,1433-1451).
ctggaaattttcttgttaa

SEQ ID NO: 101262 - DNA, 19 bp, Homo sapiens
  siRNA target sequence for SRPK1 (NM_003137.2,1510-1528).
gcttgttggcacaaacatt

SEQ ID NO: 101263 - DNA, 19 bp, Homo sapiens
  siRNA target sequence for SRPK1 (NM_003137.2,1543-1561).
caaacaaggcaatatcgtt

SEQ ID NO: 101264 - DNA, 19 bp, Homo sapiens
  siRNA target sequence for SRPK1 (NM_003137.2,1558-1576).
cgttccttggaagttctaa

SEQ ID NO: 101265 - DNA, 19 bp, Homo sapiens
  siRNA target sequence for SRPK1 (NM_003137.2,1559-1577).
gttccttggaagttctaat

SEQ ID NO: 101266 - DNA, 19 bp, Homo sapiens
  siRNA target sequence for SRPK1 (NM_003137.2,1639-1657).
gccacaggtgactatttgt

SEQ ID NO: 101267 - DNA, 19 bp, Homo sapiens
  siRNA target sequence for SRPK1 (NM_003137.2,1685-1703).
ctcgagatgaagatcacat

SEQ ID NO: 101268 - DNA, 19 bp, Homo sapiens
  siRNA target sequence for SRPK1 (NM_003137.2,1789-1807).
ggtgacctgaaacatatca

SEQ ID NO: 101269 - DNA, 19 bp, Homo sapiens
  siRNA target sequence for SRPK1 (NM_003137.2,1815-1833).
gaaaccttggggccttttt

SEQ ID NO: 101270 - DNA, 19 bp, Homo sapiens
  siRNA target sequence for SRPK1 (NM_003137.2,1840-1858).
ctagtggagaagtatgagt

SEQ ID NO: 101271 - DNA, 19 bp, Homo sapiens
  siRNA target sequence for SRPK1 (NM_003137.2,1880-1898).
gcttcacagatttcttact

SEQ ID NO: 101272 - DNA, 19 bp, Homo sapiens
  siRNA target sequence for SRPK1 (NM_003137.2,1951-1969).
cggcacccttggcttaact

SEQ ID NO: 101273 - DNA, 19 bp, Homo sapiens
  siRNA target sequence for SRPK2 (NM_182691.1,424-442).
ccggtatcatgttattaga

SEQ ID NO: 101274 - DNA, 19 bp, Homo sapiens
  siRNA target sequence for SRPK2 (NM_182691.1,425-443).
cggtatcatgttattagaa

SEQ ID NO: 101275 - DNA, 19 bp, Homo sapiens
  siRNA target sequence for SRPK2 (NM_182691.1,426-444).
ggtatcatgttattagaaa

SEQ ID NO: 101276 - DNA, 19 bp, Homo sapiens
  siRNA target sequence for SRPK2 (NM_182691.1,449-467).
ggatgggggcacttctcta

SEQ ID NO: 101277 - DNA, 19 bp, Homo sapiens
  siRNA target sequence for SRPK2 (NM_182691.1,485-503).
gatatgcaggggaaaagat

SEQ ID NO: 101278 - DNA, 19 bp, Homo sapiens
  siRNA target sequence for SRPK2 (NM_182691.1,675-693).
gcatggtcttcgaagtact

SEQ ID NO: 101279 - DNA, 19 bp, Homo sapiens
  siRNA target sequence for SRPK2 (NM_182691.1,676-694).
catggtcttcgaagtactt

SEQ ID NO: 101280 - DNA, 19 bp, Homo sapiens
  siRNA target sequence for SRPK2 (NM_182691.1,746-764).
gtacgttgtgtgaagagta

SEQ ID NO: 101281 - DNA, 19 bp, Homo sapiens
  siRNA target sequence for SRPK2 (NM_182691.1,749-767).
cgttgtgtgaagagtatca

SEQ ID NO: 101282 - DNA, 19 bp, Homo sapiens
  siRNA target sequence for SRPK2 (NM_182691.1,750-768).
gttgtgtgaagagtatcat

SEQ ID NO: 101283 - DNA, 19 bp, Homo sapiens
  siRNA target sequence for SRPK2 (NM_182691.1,775-793).
ggtccttcaagggttagat

SEQ ID NO: 101284 - DNA, 19 bp, Homo sapiens
  siRNA target sequence for SRPK2 (NM_182691.1,776-794).
gtccttcaagggttagatt

SEQ ID NO: 101285 - DNA, 19 bp, Homo sapiens
  siRNA target sequence for SRPK2 (NM_182691.1,785-803).
gggttagattacttacaca

SEQ ID NO: 101286 - DNA, 19 bp, Homo sapiens
  siRNA target sequence for SRPK2 (NM_182691.1,804-822).
gtaagtgcaagatcattca

SEQ ID NO: 101287 - DNA, 19 bp, Homo sapiens
  siRNA target sequence for SRPK2 (NM_182691.1,836-854).
ccggaaaatatcttgatgt

SEQ ID NO: 101288 - DNA, 19 bp, Homo sapiens
  siRNA target sequence for SRPK2 (NM_182691.1,950-968).
gctccacagcagaaaccta

SEQ ID NO: 101289 - DNA, 19 bp, Homo sapiens
  siRNA target sequence for SRPK2 (NM_182691.1,965-983).
cctataggaaaaatatcta

SEQ ID NO: 101290 - DNA, 19 bp, Homo sapiens
  siRNA target sequence for SRPK2 (NM_182691.1,1020-1038).
ggcaggctgagttattgga

SEQ ID NO: 101291 - DNA, 19 bp, Homo sapiens
  siRNA target sequence for SRPK2 (NM_182691.1,1042-1060).
gcgcctgcaggagatagaa

SEQ ID NO: 101292 - DNA, 19 bp, Homo sapiens
  siRNA target sequence for SRPK2 (NM_182691.1,1144-1162).
ctgcccagaggtgaaacta

SEQ ID NO: 101293 - DNA, 19 bp, Homo sapiens
  siRNA target sequence for SRPK2 (NM_182691.1,1146-1164).
gcccagaggtgaaactaaa

SEQ ID NO: 101294 - DNA, 19 bp, Homo sapiens
  siRNA target sequence for SRPK2 (NM_182691.1,1307-1325).
gaccctacgtggatagaat

SEQ ID NO: 101295 - DNA, 19 bp, Homo sapiens
  siRNA target sequence for SRPK2 (NM_182691.1,1309-1327).
ccctacgtggatagaatca

SEQ ID NO: 101296 - DNA, 19 bp, Homo sapiens
  siRNA target sequence for SRPK2 (NM_182691.1,1335-1353).
ccaatggccatattgagaa

SEQ ID NO: 101297 - DNA, 19 bp, Homo sapiens
  siRNA target sequence for SRPK2 (NM_182691.1,1336-1354).
caatggccatattgagaat

SEQ ID NO: 101298 - DNA, 19 bp, Homo sapiens
  siRNA target sequence for SRPK2 (NM_182691.1,1410-1428).
gcccaaatcctgaggaata

SEQ ID NO: 101299 - DNA, 19 bp, Homo sapiens
  siRNA target sequence for SRPK2 (NM_182691.1,1412-1430).
ccaaatcctgaggaatata

SEQ ID NO: 101300 - DNA, 19 bp, Homo sapiens
  siRNA target sequence for SRPK2 (NM_182691.1,1419-1437).
ctgaggaatataatcttga

SEQ ID NO: 101301 - DNA, 19 bp, Homo sapiens
  siRNA target sequence for SRPK2 (NM_182691.1,1501-1519).
gccaaatggacgacataaa

SEQ ID NO: 101302 - DNA, 19 bp, Homo sapiens
  siRNA target sequence for SRPK2 (NM_182691.1,1558-1576).
gttctctggatccttagaa

SEQ ID NO: 101303 - DNA, 19 bp, Homo sapiens
  siRNA target sequence for SRPK2 (NM_182691.1,1682-1700).
ggggatttgccaaaagcaa

SEQ ID NO: 101304 - DNA, 19 bp, Homo sapiens
  siRNA target sequence for SRPK2 (NM_182691.1,1739-1757).
ccgcggaatgcagataaaa

SEQ ID NO: 101305 - DNA, 19 bp, Homo sapiens
  siRNA target sequence for SRPK2 (NM_182691.1,1740-1758).
cgcggaatgcagataaaat

SEQ ID NO: 101306 - DNA, 19 bp, Homo sapiens
  siRNA target sequence for SRPK2 (NM_182691.1,1837-1855).
ccgctccatagaggtttta

SEQ ID NO: 101307 - DNA, 19 bp, Homo sapiens
  siRNA target sequence for SRPK2 (NM_182691.1,1838-1856).
cgctccatagaggttttaa

SEQ ID NO: 101308 - DNA, 19 bp, Homo sapiens
  siRNA target sequence for SRPK2 (NM_182691.1,1839-1857).
gctccatagaggttttaat

SEQ ID NO: 101309 - DNA, 19 bp, Homo sapiens
  siRNA target sequence for SRPK2 (NM_182691.1,1840-1858).
ctccatagaggttttaata

SEQ ID NO: 101310 - DNA, 19 bp, Homo sapiens
  siRNA target sequence for SRPK2 (NM_182691.1,1896-1914).
cggcgtgtatggcatttga

SEQ ID NO: 101311 - DNA, 19 bp, Homo sapiens
  siRNA target sequence for SRPK2 (NM_182691.1,1916-1934).
ctggcaacgggagattatt

SEQ ID NO: 101312 - DNA, 19 bp, Homo sapiens
  siRNA target sequence for SRPK2 (NM_182691.1,1919-1937).
gcaacgggagattatttgt

SEQ ID NO: 101313 - DNA, 19 bp, Homo sapiens
  siRNA target sequence for SRPK2 (NM_182691.1,1920-1938).
caacgggagattatttgtt

SEQ ID NO: 101314 - DNA, 19 bp, Homo sapiens
  siRNA target sequence for SRPK2 (NM_182691.1,1923-1941).
cgggagattatttgtttga

SEQ ID NO: 101315 - DNA, 19 bp, Homo sapiens
  siRNA target sequence for SRPK2 (NM_182691.1,2023-2041).
ctttgctctatctggaaaa

SEQ ID NO: 101316 - DNA, 19 bp, Homo sapiens
  siRNA target sequence for SRPK2 (NM_182691.1,2100-2118).
cctggagcctctttgatgt

SEQ ID NO: 101317 - DNA, 19 bp, Homo sapiens
  siRNA target sequence for SRPK2 (NM_182691.1,2106-2124).
gcctctttgatgtacttgt

SEQ ID NO: 101318 - DNA, 19 bp, Homo sapiens
  siRNA target sequence for SRPK2 (NM_182691.1,2179-2197).
cccgatgttagaaatggtt

SEQ ID NO: 101319 - DNA, 19 bp, Homo sapiens
  siRNA target sequence for SRPK2 (NM_182691.1,2233-2251).
gcatccttggttgaattct

SEQ ID NO: 101320 - DNA, 19 bp, Homo sapiens
  siRNA target sequence for SSTK (NM_032037.1,141-159).
ctgagcgaactcggttata

SEQ ID NO: 101321 - DNA, 19 bp, Homo sapiens
  siRNA target sequence for SSTK (NM_032037.1,145-163).
gcgaactcggttataagct

SEQ ID NO: 101322 - DNA, 19 bp, Homo sapiens
  siRNA target sequence for SSTK (NM_032037.1,270-288).
ccggacttcgtcaacaagt

SEQ ID NO: 101323 - DNA, 19 bp, Homo sapiens
  siRNA target sequence for SSTK (NM_032037.1,271-289).
cggacttcgtcaacaagtt

SEQ ID NO: 101324 - DNA, 19 bp, Homo sapiens
  siRNA target sequence for SSTK (NM_032037.1,363-381).
gtgtgcaacgggaaactgt

SEQ ID NO: 101325 - DNA, 19 bp, Homo sapiens
  siRNA target sequence for SSTK (NM_032037.1,367-385).
gcaacgggaaactgtacat

SEQ ID NO: 101326 - DNA, 19 bp, Homo sapiens
  siRNA target sequence for SSTK (NM_032037.1,493-511).
gctacctgcacgatcatca

SEQ ID NO: 101327 - DNA, 19 bp, Homo sapiens
  siRNA target sequence for STCH (NM_006948.3,41-59).
gagatgacgatcttaggat

SEQ ID NO: 101328 - DNA, 19 bp, Homo sapiens
  siRNA target sequence for STCH (NM_006948.3,87-105).
gctatttggcacaacagta

SEQ ID NO: 101329 - DNA, 19 bp, Homo sapiens
  siRNA target sequence for STCH (NM_006948.3,115-133).
gcctactcctaaagtgatt

SEQ ID NO: 101330 - DNA, 19 bp, Homo sapiens
  siRNA target sequence for STCH (NM_006948.3,123-141).
ctaaagtgattggtattga

SEQ ID NO: 101331 - DNA, 19 bp, Homo sapiens
  siRNA target sequence for STCH (NM_006948.3,244-262).
gtcttttactgacaatgat

SEQ ID NO: 101332 - DNA, 19 bp, Homo sapiens
  siRNA target sequence for STCH (NM_006948.3,246-264).
cttttactgacaatgatgt

SEQ ID NO: 101333 - DNA, 19 bp, Homo sapiens
  siRNA target sequence for STCH (NM_006948.3,300-318).
caaatcctcaaaacacaat

SEQ ID NO: 101334 - DNA, 19 bp, Homo sapiens
  siRNA target sequence for STCH (NM_006948.3,382-400).
cagatacccatttaaggtt

SEQ ID NO: 101335 - DNA, 19 bp, Homo sapiens
  siRNA target sequence for STCH (NM_006948.3,384-402).
gatacccatttaaggtttt

SEQ ID NO: 101336 - DNA, 19 bp, Homo sapiens
  siRNA target sequence for STCH (NM_006948.3,470-488).
gttggctctcgactattgt

SEQ ID NO: 101337 - DNA, 19 bp, Homo sapiens
  siRNA target sequence for STCH (NM_006948.3,473-491).
ggctctcgactattgttga

SEQ ID NO: 101338 - DNA, 19 bp, Homo sapiens
  siRNA target sequence for STCH (NM_006948.3,474-492).
gctctcgactattgttgaa

SEQ ID NO: 101339 - DNA, 19 bp, Homo sapiens
  siRNA target sequence for STCH (NM_006948.3,477-495).
ctcgactattgttgaagtt

SEQ ID NO: 101340 - DNA, 19 bp, Homo sapiens
  siRNA target sequence for STCH (NM_006948.3,479-497).
cgactattgttgaagttaa

SEQ ID NO: 101341 - DNA, 19 bp, Homo sapiens
  siRNA target sequence for STCH (NM_006948.3,566-584).
gatctaaaacagagaaatt

SEQ ID NO: 101342 - DNA, 19 bp, Homo sapiens
  siRNA target sequence for STCH (NM_006948.3,569-587).
ctaaaacagagaaattcaa

SEQ ID NO: 101343 - DNA, 19 bp, Homo sapiens
  siRNA target sequence for STCH (NM_006948.3,608-626).
gcaggactgaagattttga

SEQ ID NO: 101344 - DNA, 19 bp, Homo sapiens
  siRNA target sequence for STCH (NM_006948.3,706-724).
cttgggcggaggaactcta

SEQ ID NO: 101345 - DNA, 19 bp, Homo sapiens
  siRNA target sequence for STCH (NM_006948.3,709-727).
gggcggaggaactctagat

SEQ ID NO: 101346 - DNA, 19 bp, Homo sapiens
  siRNA target sequence for STCH (NM_006948.3,711-729).
gcggaggaactctagatgt

SEQ ID NO: 101347 - DNA, 19 bp, Homo sapiens
  siRNA target sequence for STCH (NM_006948.3,717-735).
gaactctagatgtgtcttt

SEQ ID NO: 101348 - DNA, 19 bp, Homo sapiens
  siRNA target sequence for STCH (NM_006948.3,775-793).
gtctggaaacaataaactt

SEQ ID NO: 101349 - DNA, 19 bp, Homo sapiens
  siRNA target sequence for STCH (NM_006948.3,805-823).
cttcaatcagagattgctt

SEQ ID NO: 101350 - DNA, 19 bp, Homo sapiens
  siRNA target sequence for STCH (NM_006948.3,814-832).
gagattgcttcagtactta

SEQ ID NO: 101351 - DNA, 19 bp, Homo sapiens
  siRNA target sequence for STCH (NM_006948.3,870-888).
ctaggaaagaggaaatcca

SEQ ID NO: 101352 - DNA, 19 bp, Homo sapiens
  siRNA target sequence for STCH (NM_006948.3,947-965).
cagttgtcagtattactaa

SEQ ID NO: 101353 - DNA, 19 bp, Homo sapiens
  siRNA target sequence for STCH (NM_006948.3,1068-1086).
gacgtggcctttctgataa

SEQ ID NO: 101354 - DNA, 19 bp, Homo sapiens
  siRNA target sequence for STCH (NM_006948.3,1070-1088).
cgtggcctttctgataaga

SEQ ID NO: 101355 - DNA, 19 bp, Homo sapiens
  siRNA target sequence for STCH (NM_006948.3,1249-1267).
gggctccactcgtattcct

SEQ ID NO: 101356 - DNA, 19 bp, Homo sapiens
  siRNA target sequence for STCH (NM_006948.3,1266-1284).
ctcggatccgtcaagtcat

SEQ ID NO: 101357 - DNA, 19 bp, Homo sapiens
  siRNA target sequence for STCH (NM_006948.3,1270-1288).
gatccgtcaagtcattcaa

SEQ ID NO: 101358 - DNA, 19 bp, Homo sapiens
  siRNA target sequence for STCH (NM_006948.3,1275-1293).
gtcaagtcattcaagagtt

SEQ ID NO: 101359 - DNA, 19 bp, Homo sapiens
  siRNA target sequence for STCH (NM_006948.3,1324-1342).
ccctgacctagcagtagta

SEQ ID NO: 101360 - DNA, 19 bp, Homo sapiens
  siRNA target sequence for STCH (NM_006948.3,1325-1343).
cctgacctagcagtagtaa

SEQ ID NO: 101361 - DNA, 19 bp, Homo sapiens
  siRNA target sequence for STCH (NM_006948.3,1413-1431).
ccaataagcatttacaaaa

SEQ ID NO: 101362 - DNA, 19 bp, Homo sapiens
  siRNA target sequence for STCH (NM_006948.3,1414-1432).
caataagcatttacaaaaa

SEQ ID NO: 101363 - DNA, 19 bp, Homo sapiens
  siRNA target sequence for STCH (NM_006948.3,1427-1445).
caaaaaaccaacttcaact

SEQ ID NO: 101364 - DNA, 19 bp, Homo sapiens
  siRNA target sequence for STK10 (NM_005990.1,101-119).
gagaaagtcccgcgaatat

SEQ ID NO: 101365 - DNA, 19 bp, Homo sapiens
  siRNA target sequence for STK10 (NM_005990.1,103-121).
gaaagtcccgcgaatatga

SEQ ID NO: 101366 - DNA, 19 bp, Homo sapiens
  siRNA target sequence for STK10 (NM_005990.1,235-253).
ctgcggccaaagtcattga

SEQ ID NO: 101367 - DNA, 19 bp, Homo sapiens
  siRNA target sequence for STK10 (NM_005990.1,313-331).
gcgaccacccctacattgt

SEQ ID NO: 101368 - DNA, 19 bp, Homo sapiens
  siRNA target sequence for STK10 (NM_005990.1,315-333).
gaccacccctacattgtga

SEQ ID NO: 101369 - DNA, 19 bp, Homo sapiens
  siRNA target sequence for STK10 (NM_005990.1,366-384).
ctgtggatcatgattgagt

SEQ ID NO: 101370 - DNA, 19 bp, Homo sapiens
  siRNA target sequence for STK10 (NM_005990.1,683-701).
cacgccctacgactacaaa

SEQ ID NO: 101371 - DNA, 19 bp, Homo sapiens
  siRNA target sequence for STK10 (NM_005990.1,775-793).
ccatgcgggtcctgctaaa

SEQ ID NO: 101372 - DNA, 19 bp, Homo sapiens
  siRNA target sequence for STK10 (NM_005990.1,851-869).
ccgtgacttcctgaagata

SEQ ID NO: 101373 - DNA, 19 bp, Homo sapiens
  siRNA target sequence for STK10 (NM_005990.1,1289-1307).
ccgacccgtgtcaatggat

SEQ ID NO: 101374 - DNA, 19 bp, Homo sapiens
  siRNA target sequence for STK10 (NM_005990.1,1535-1553).
catggactatggtaccaat

SEQ ID NO: 101375 - DNA, 19 bp, Homo sapiens
  siRNA target sequence for STK10 (NM_005990.1,1561-1579).
ctgacctgtcgctgaacaa

SEQ ID NO: 101376 - DNA, 19 bp, Homo sapiens
  siRNA target sequence for STK10 (NM_005990.1,1604-1622).
ggacccgaaactgtacaaa

SEQ ID NO: 101377 - DNA, 19 bp, Homo sapiens
  siRNA target sequence for STK10 (NM_005990.1,1631-1649).
caagcggacacgcaaattt

SEQ ID NO: 101378 - DNA, 19 bp, Homo sapiens
  siRNA target sequence for STK10 (NM_005990.1,1820-1838).
gctggagcaaatgcataaa

SEQ ID NO: 101379 - DNA, 19 bp, Homo sapiens
  siRNA target sequence for STK10 (NM_005990.1,1823-1841).
ggagcaaatgcataaacgt

SEQ ID NO: 101380 - DNA, 19 bp, Homo sapiens
  siRNA target sequence for STK10 (NM_005990.1,1824-1842).
gagcaaatgcataaacgtt

SEQ ID NO: 101381 - DNA, 19 bp, Homo sapiens
  siRNA target sequence for STK10 (NM_005990.1,1826-1844).
gcaaatgcataaacgtttt

SEQ ID NO: 101382 - DNA, 19 bp, Homo sapiens
  siRNA target sequence for STK10 (NM_005990.1,1839-1857).
cgttttgaacaggaaatca

SEQ ID NO: 101383 - DNA, 19 bp, Homo sapiens
  siRNA target sequence for STK10 (NM_005990.1,1871-1889).
gttctttgacacggaatta

SEQ ID NO: 101384 - DNA, 19 bp, Homo sapiens
  siRNA target sequence for STK10 (NM_005990.1,2226-2244).
cgcgagtgcctcatgaaga

SEQ ID NO: 101385 - DNA, 19 bp, Homo sapiens
  siRNA target sequence for STK10 (NM_005990.1,2227-2245).
gcgagtgcctcatgaagaa

SEQ ID NO: 101386 - DNA, 19 bp, Homo sapiens
  siRNA target sequence for STK10 (NM_005990.1,2408-2426).
ctacaaccagcgcatgata

SEQ ID NO: 101387 - DNA, 19 bp, Homo sapiens
  siRNA target sequence for STK10 (NM_005990.1,2497-2515).
cgcgcatggccatgtacaa

SEQ ID NO: 101388 - DNA, 19 bp, Homo sapiens
  siRNA target sequence for STK10 (NM_005990.1,2664-2682).
cagtgtgagagcaacatga

SEQ ID NO: 101389 - DNA, 19 bp, Homo sapiens
  siRNA target sequence for STK11 (NM_000455.3,579-597).
ggaggttacggcacaaaaa

SEQ ID NO: 101390 - DNA, 19 bp, Homo sapiens
  siRNA target sequence for STK11 (NM_000455.3,580-598).
gaggttacggcacaaaaat

SEQ ID NO: 101391 - DNA, 19 bp, Homo sapiens
  siRNA target sequence for STK11 (NM_000455.3,828-846).
ccggtggcaccctcaaaat

SEQ ID NO: 101392 - DNA, 19 bp, Homo sapiens
  siRNA target sequence for STK11 (NM_000455.3,1032-1050).
ccttcgaaggggacaacat

SEQ ID NO: 101393 - DNA, 19 bp, Homo sapiens
  siRNA target sequence for STK11 (NM_000455.3,1430-1448).
cccaaggccgtgtgtatga

SEQ ID NO: 101394 - DNA, 19 bp, Homo sapiens
  siRNA target sequence for STK11 (NM_000455.3,1431-1449).
ccaaggccgtgtgtatgaa

SEQ ID NO: 101395 - DNA, 19 bp, Homo sapiens
  siRNA target sequence for STK16 (NM_003691.1,144-162).
ctcggggaactgtcatcat

SEQ ID NO: 101396 - DNA, 19 bp, Homo sapiens
  siRNA target sequence for STK16 (NM_003691.1,150-168).
gaactgtcatcattgacaa

SEQ ID NO: 101397 - DNA, 19 bp, Homo sapiens
  siRNA target sequence for STK16 (NM_003691.1,319-337).
catgcatcgcctcttcaat

SEQ ID NO: 101398 - DNA, 19 bp, Homo sapiens
  siRNA target sequence for STK16 (NM_003691.1,376-394).
ggaacggggtgctaagcat

SEQ ID NO: 101399 - DNA, 19 bp, Homo sapiens
  siRNA target sequence for STK16 (NM_003691.1,407-425).
ctgctaccattcttcaaga

SEQ ID NO: 101400 - DNA, 19 bp, Homo sapiens
  siRNA target sequence for STK16 (NM_003691.1,428-446).
ggtacgctgtggaatgaga

SEQ ID NO: 101401 - DNA, 19 bp, Homo sapiens
  siRNA target sequence for STK16 (NM_003691.1,429-447).
gtacgctgtggaatgagat

SEQ ID NO: 101402 - DNA, 19 bp, Homo sapiens
  siRNA target sequence for STK16 (NM_003691.1,478-496).
gaccgaggatcaaatcctt

SEQ ID NO: 101403 - DNA, 19 bp, Homo sapiens
  siRNA target sequence for STK16 (NM_003691.1,568-586).
gcccaccaatatattgctt

SEQ ID NO: 101404 - DNA, 19 bp, Homo sapiens
  siRNA target sequence for STK16 (NM_003691.1,597-615).
ggcagccagttttaatgga

SEQ ID NO: 101405 - DNA, 19 bp, Homo sapiens
  siRNA target sequence for STK16 (NM_003691.1,777-795).
ccctaggctgcgtgctata

SEQ ID NO: 101406 - DNA, 19 bp, Homo sapiens
  siRNA target sequence for STK16 (NM_003691.1,778-796).
cctaggctgcgtgctatat

SEQ ID NO: 101407 - DNA, 19 bp, Homo sapiens
  siRNA target sequence for STK16 (NM_003691.1,788-806).
gtgctatatgccatgatgt

SEQ ID NO: 101408 - DNA, 19 bp, Homo sapiens
  siRNA target sequence for STK16 (NM_003691.1,790-808).
gctatatgccatgatgttt

SEQ ID NO: 101409 - DNA, 19 bp, Homo sapiens
  siRNA target sequence for STK16 (NM_003691.1,809-827).
ggggaaggcccttatgaca

SEQ ID NO: 101410 - DNA, 19 bp, Homo sapiens
  siRNA target sequence for STK16 (NM_003691.1,920-938).
ctcctgaactcgatgatga

SEQ ID NO: 101411 - DNA, 19 bp, Homo sapiens
  siRNA target sequence for STK17A (NM_004760.1,318-336).
gggcagggggaaatttgca

SEQ ID NO: 101412 - DNA, 19 bp, Homo sapiens
  siRNA target sequence for STK17A (NM_004760.1,382-400).
gcaaagttcatgagaaaaa

SEQ ID NO: 101413 - DNA, 19 bp, Homo sapiens
  siRNA target sequence for STK17A (NM_004760.1,412-430).
caagattgtcggatggaaa

SEQ ID NO: 101414 - DNA, 19 bp, Homo sapiens
  siRNA target sequence for STK17A (NM_004760.1,415-433).
gattgtcggatggaaataa

SEQ ID NO: 101415 - DNA, 19 bp, Homo sapiens
  siRNA target sequence for STK17A (NM_004760.1,441-459).
gattgctgtacttgaacta

SEQ ID NO: 101416 - DNA, 19 bp, Homo sapiens
  siRNA target sequence for STK17A (NM_004760.1,457-475).
ctagcacaagacaatcctt

SEQ ID NO: 101417 - DNA, 19 bp, Homo sapiens
  siRNA target sequence for STK17A (NM_004760.1,466-484).
gacaatccttgggtcatta

SEQ ID NO: 101418 - DNA, 19 bp, Homo sapiens
  siRNA target sequence for STK17A (NM_004760.1,519-537).
gatcttagttctggaatat

SEQ ID NO: 101419 - DNA, 19 bp, Homo sapiens
  siRNA target sequence for STK17A (NM_004760.1,539-557).
ctgctgggggtgaaatctt

SEQ ID NO: 101420 - DNA, 19 bp, Homo sapiens
  siRNA target sequence for STK17A (NM_004760.1,542-560).
ctgggggtgaaatctttga

SEQ ID NO: 101421 - DNA, 19 bp, Homo sapiens
  siRNA target sequence for STK17A (NM_004760.1,611-629).
gacttatgcgacagatttt

SEQ ID NO: 101422 - DNA, 19 bp, Homo sapiens
  siRNA target sequence for STK17A (NM_004760.1,651-669).
cactcgtgatgtagttcat

SEQ ID NO: 101423 - DNA, 19 bp, Homo sapiens
  siRNA target sequence for STK17A (NM_004760.1,653-671).
ctcgtgatgtagttcatct

SEQ ID NO: 101424 - DNA, 19 bp, Homo sapiens
  siRNA target sequence for STK17A (NM_004760.1,658-676).
gatgtagttcatcttgatt

SEQ ID NO: 101425 - DNA, 19 bp, Homo sapiens
  siRNA target sequence for STK17A (NM_004760.1,712-730).
ccattgggtgacattaaga

SEQ ID NO: 101426 - DNA, 19 bp, Homo sapiens
  siRNA target sequence for STK17A (NM_004760.1,713-731).
cattgggtgacattaagat

SEQ ID NO: 101427 - DNA, 19 bp, Homo sapiens
  siRNA target sequence for STK17A (NM_004760.1,769-787).
gaagagctccgagaaatta

SEQ ID NO: 101428 - DNA, 19 bp, Homo sapiens
  siRNA target sequence for STK17A (NM_004760.1,855-873).
gtggagcattggagtgtta

SEQ ID NO: 101429 - DNA, 19 bp, Homo sapiens
  siRNA target sequence for STK17A (NM_004760.1,858-876).
gagcattggagtgttaaca

SEQ ID NO: 101430 - DNA, 19 bp, Homo sapiens
  siRNA target sequence for STK17A (NM_004760.1,860-878).
gcattggagtgttaacata

SEQ ID NO: 101431 - DNA, 19 bp, Homo sapiens
  siRNA target sequence for STK17A (NM_004760.1,880-898).
gtcatgcttacaggaatat

SEQ ID NO: 101432 - DNA, 19 bp, Homo sapiens
  siRNA target sequence for STK17A (NM_004760.1,987-1005).
gtctgagtcggctgttgat

SEQ ID NO: 101433 - DNA, 19 bp, Homo sapiens
  siRNA target sequence for STK17A (NM_004760.1,989-1007).
ctgagtcggctgttgattt

SEQ ID NO: 101434 - DNA, 19 bp, Homo sapiens
  siRNA target sequence for STK17A (NM_004760.1,991-1009).
gagtcggctgttgatttca

SEQ ID NO: 101435 - DNA, 19 bp, Homo sapiens
  siRNA target sequence for STK17A (NM_004760.1,1178-1196).
cggataccgacaaatcaga

SEQ ID NO: 101436 - DNA, 19 bp, Homo sapiens
  siRNA target sequence for STK17A (NM_004760.1,1208-1226).
ccattgtaaccgaagagtt

SEQ ID NO: 101437 - DNA, 19 bp, Homo sapiens
  siRNA target sequence for STK17A (NM_004760.1,1209-1227).
cattgtaaccgaagagtta

SEQ ID NO: 101438 - DNA, 19 bp, Homo sapiens
  siRNA target sequence for STK17A (NM_004760.1,1217-1235).
ccgaagagttaattgtagt

SEQ ID NO: 101439 - DNA, 19 bp, Homo sapiens
  siRNA target sequence for STK17A (NM_004760.1,1218-1236).
cgaagagttaattgtagtt

SEQ ID NO: 101440 - DNA, 19 bp, Homo sapiens
  siRNA target sequence for STK17A (NM_004760.1,1219-1237).
gaagagttaattgtagtta

SEQ ID NO: 101441 - DNA, 19 bp, Homo sapiens
  siRNA target sequence for STK17A (NM_004760.1,1224-1242).
gttaattgtagttacttca

SEQ ID NO: 101442 - DNA, 19 bp, Homo sapiens
  siRNA target sequence for STK17A (NM_004760.1,1285-1303).
gagcaaaaggccatttcca

SEQ ID NO: 101443 - DNA, 19 bp, Homo sapiens
  siRNA target sequence for STK17A (NM_004760.1,1295-1313).
ccatttccaaacgatttaa

SEQ ID NO: 101444 - DNA, 19 bp, Homo sapiens
  siRNA target sequence for STK17A (NM_004760.1,1296-1314).
catttccaaacgatttaaa

SEQ ID NO: 101445 - DNA, 19 bp, Homo sapiens
  siRNA target sequence for STK17A (NM_004760.1,1342-1360).
ccaggagaatttatctact

SEQ ID NO: 101446 - DNA, 19 bp, Homo sapiens
  siRNA target sequence for STK17B (NM_004226.2,266-284).
gtcgaggaggagatttgat

SEQ ID NO: 101447 - DNA, 19 bp, Homo sapiens
  siRNA target sequence for STK17B (NM_004226.2,277-295).
gatttgattgccgaagtat

SEQ ID NO: 101448 - DNA, 19 bp, Homo sapiens
  siRNA target sequence for STK17B (NM_004226.2,356-374).
ctatatacttacatctaaa

SEQ ID NO: 101449 - DNA, 19 bp, Homo sapiens
  siRNA target sequence for STK17B (NM_004226.2,396-414).
gctgtggttagacaatgta

SEQ ID NO: 101450 - DNA, 19 bp, Homo sapiens
  siRNA target sequence for STK17B (NM_004226.2,397-415).
ctgtggttagacaatgtat

SEQ ID NO: 101451 - DNA, 19 bp, Homo sapiens
  siRNA target sequence for STK17B (NM_004226.2,512-530).
gcttgaattggcaaagtct

SEQ ID NO: 101452 - DNA, 19 bp, Homo sapiens
  siRNA target sequence for STK17B (NM_004226.2,529-547).
cttgtccccgtgttattaa

SEQ ID NO: 101453 - DNA, 19 bp, Homo sapiens
  siRNA target sequence for STK17B (NM_004226.2,532-550).
gtccccgtgttattaatct

SEQ ID NO: 101454 - DNA, 19 bp, Homo sapiens
  siRNA target sequence for STK17B (NM_004226.2,536-554).
ccgtgttattaatcttcat

SEQ ID NO: 101455 - DNA, 19 bp, Homo sapiens
  siRNA target sequence for STK17B (NM_004226.2,557-575).
ggtctatgaaaatacaagt

SEQ ID NO: 101456 - DNA, 19 bp, Homo sapiens
  siRNA target sequence for STK17B (NM_004226.2,636-654).
gagttggctgaaatggttt

SEQ ID NO: 101457 - DNA, 19 bp, Homo sapiens
  siRNA target sequence for STK17B (NM_004226.2,663-681).
gatgttatcagactcatta

SEQ ID NO: 101458 - DNA, 19 bp, Homo sapiens
  siRNA target sequence for STK17B (NM_004226.2,774-792).
cctctcggggacattaaaa

SEQ ID NO: 101459 - DNA, 19 bp, Homo sapiens
  siRNA target sequence for STK17B (NM_004226.2,779-797).
cggggacattaaaatagta

SEQ ID NO: 101460 - DNA, 19 bp, Homo sapiens
  siRNA target sequence for STK17B (NM_004226.2,781-799).
gggacattaaaatagtaga

SEQ ID NO: 101461 - DNA, 19 bp, Homo sapiens
  siRNA target sequence for STK17B (NM_004226.2,917-935).
gtggaatattggtataata

SEQ ID NO: 101462 - DNA, 19 bp, Homo sapiens
  siRNA target sequence for STK17B (NM_004226.2,937-955).
catatatgttgttaactca

SEQ ID NO: 101463 - DNA, 19 bp, Homo sapiens
  siRNA target sequence for STK17B (NM_004226.2,963-981).
ccatttgtgggagaagata

SEQ ID NO: 101464 - DNA, 19 bp, Homo sapiens
  siRNA target sequence for STK17B (NM_004226.2,1006-1024).
ctcaagttaatgtagatta

SEQ ID NO: 101465 - DNA, 19 bp, Homo sapiens
  siRNA target sequence for STK17B (NM_004226.2,1020-1038).
gattattcggaagaaactt

SEQ ID NO: 101466 - DNA, 19 bp, Homo sapiens
  siRNA target sequence for STK17B (NM_004226.2,1059-1077).
gccacagactttattcaga

SEQ ID NO: 101467 - DNA, 19 bp, Homo sapiens
  siRNA target sequence for STK17B (NM_004226.2,1067-1085).
ctttattcagagcctttta

SEQ ID NO: 101468 - DNA, 19 bp, Homo sapiens
  siRNA target sequence for STK17B (NM_004226.2,1186-1204).
ccagttcctctcaaactca

SEQ ID NO: 101469 - DNA, 19 bp, Homo sapiens
  siRNA target sequence for STK17B (NM_004226.2,1296-1314).
gaggatagcagcatggttt

SEQ ID NO: 101470 - DNA, 19 bp, Homo sapiens
  siRNA target sequence for STK17B (NM_004226.2,1306-1324).
gcatggtttccaaaagatt

SEQ ID NO: 101471 - DNA, 19 bp, Homo sapiens
  siRNA target sequence for STK17B (NM_004226.2,1310-1328).
ggtttccaaaagatttcgt

SEQ ID NO: 101472 - DNA, 19 bp, Homo sapiens
  siRNA target sequence for STK17B (NM_004226.2,1311-1329).
gtttccaaaagatttcgtt

SEQ ID NO: 101473 - DNA, 19 bp, Homo sapiens
  siRNA target sequence for STK17B (NM_004226.2,1316-1334).
caaaagatttcgtttcgat

SEQ ID NO: 101474 - DNA, 19 bp, Homo sapiens
  siRNA target sequence for STK17B (NM_004226.2,1345-1363).
ccaatccccatgaacttgt

SEQ ID NO: 101475 - DNA, 19 bp, Homo sapiens
  siRNA target sequence for STK18 (NM_014264.2,207-225).
gagaagatcgaggatttta

SEQ ID NO: 101476 - DNA, 19 bp, Homo sapiens
  siRNA target sequence for STK18 (NM_014264.2,303-321).
gcaatcaaaatgatagata

SEQ ID NO: 101477 - DNA, 19 bp, Homo sapiens
  siRNA target sequence for STK18 (NM_014264.2,318-336).
gataagaaagccatgtaca

SEQ ID NO: 101478 - DNA, 19 bp, Homo sapiens
  siRNA target sequence for STK18 (NM_014264.2,347-365).
ggtacagagagtccaaaat

SEQ ID NO: 101479 - DNA, 19 bp, Homo sapiens
  siRNA target sequence for STK18 (NM_014264.2,400-418).
ctatcttggagctttataa

SEQ ID NO: 101480 - DNA, 19 bp, Homo sapiens
  siRNA target sequence for STK18 (NM_014264.2,479-497).
gaacaggtatctaaagaat

SEQ ID NO: 101481 - DNA, 19 bp, Homo sapiens
  siRNA target sequence for STK18 (NM_014264.2,557-575).
gatgttgtatcttcattct

SEQ ID NO: 101482 - DNA, 19 bp, Homo sapiens
  siRNA target sequence for STK18 (NM_014264.2,560-578).
gttgtatcttcattctcat

SEQ ID NO: 101483 - DNA, 19 bp, Homo sapiens
  siRNA target sequence for STK18 (NM_014264.2,611-629).
cctcctactgactcgtaat

SEQ ID NO: 101484 - DNA, 19 bp, Homo sapiens
  siRNA target sequence for STK18 (NM_014264.2,612-630).
ctcctactgactcgtaata

SEQ ID NO: 101485 - DNA, 19 bp, Homo sapiens
  siRNA target sequence for STK18 (NM_014264.2,615-633).
ctactgactcgtaatatga

SEQ ID NO: 101486 - DNA, 19 bp, Homo sapiens
  siRNA target sequence for STK18 (NM_014264.2,618-636).
ctgactcgtaatatgaaca

SEQ ID NO: 101487 - DNA, 19 bp, Homo sapiens
  siRNA target sequence for STK18 (NM_014264.2,655-673).
ggctggcaactcaactgaa

SEQ ID NO: 101488 - DNA, 19 bp, Homo sapiens
  siRNA target sequence for STK18 (NM_014264.2,705-723).
ggaactcctaactacattt

SEQ ID NO: 101489 - DNA, 19 bp, Homo sapiens
  siRNA target sequence for STK18 (NM_014264.2,716-734).
ctacatttcaccagaaatt

SEQ ID NO: 101490 - DNA, 19 bp, Homo sapiens
  siRNA target sequence for STK18 (NM_014264.2,779-797).
gggctgtatgttttataca

SEQ ID NO: 101491 - DNA, 19 bp, Homo sapiens
  siRNA target sequence for STK18 (NM_014264.2,780-798).
ggctgtatgttttatacat

SEQ ID NO: 101492 - DNA, 19 bp, Homo sapiens
  siRNA target sequence for STK18 (NM_014264.2,832-850).
cagtcaagaacacattaaa

SEQ ID NO: 101493 - DNA, 19 bp, Homo sapiens
  siRNA target sequence for STK18 (NM_014264.2,858-876).
gtattggcagattatgaaa

SEQ ID NO: 101494 - DNA, 19 bp, Homo sapiens
  siRNA target sequence for STK18 (NM_014264.2,917-935).
ccagttacttcgtagaaat

SEQ ID NO: 101495 - DNA, 19 bp, Homo sapiens
  siRNA target sequence for STK18 (NM_014264.2,920-938).
gttacttcgtagaaatcca

SEQ ID NO: 101496 - DNA, 19 bp, Homo sapiens
  siRNA target sequence for STK18 (NM_014264.2,963-981).
gtattggaccatcctttta

SEQ ID NO: 101497 - DNA, 19 bp, Homo sapiens
  siRNA target sequence for STK18 (NM_014264.2,983-1001).
gtcccgaaattcttcaaca

SEQ ID NO: 101498 - DNA, 19 bp, Homo sapiens
  siRNA target sequence for STK18 (NM_014264.2,1131-1149).
ggtcagccactcccaaata

SEQ ID NO: 101499 - DNA, 19 bp, Homo sapiens
  siRNA target sequence for STK18 (NM_014264.2,1132-1150).
gtcagccactcccaaataa

SEQ ID NO: 101500 - DNA, 19 bp, Homo sapiens
  siRNA target sequence for STK18 (NM_014264.2,1255-1273).
gaaggggaagagtaattca

SEQ ID NO: 101501 - DNA, 19 bp, Homo sapiens
  siRNA target sequence for STK18 (NM_014264.2,1289-1307).
gccacattctcgatacctt

SEQ ID NO: 101502 - DNA, 19 bp, Homo sapiens
  siRNA target sequence for STK18 (NM_014264.2,1305-1323).
cttcgtagagcttattcct

SEQ ID NO: 101503 - DNA, 19 bp, Homo sapiens
  siRNA target sequence for STK18 (NM_014264.2,1314-1332).
gcttattcctctgatagat

SEQ ID NO: 101504 - DNA, 19 bp, Homo sapiens
  siRNA target sequence for STK18 (NM_014264.2,1326-1344).
gatagatctggcacttcta

SEQ ID NO: 101505 - DNA, 19 bp, Homo sapiens
  siRNA target sequence for STK18 (NM_014264.2,1400-1418).
gctttcagtgtccaaaaga

SEQ ID NO: 101506 - DNA, 19 bp, Homo sapiens
  siRNA target sequence for STK18 (NM_014264.2,1448-1466).
ctcacccacagacaacaat

SEQ ID NO: 101507 - DNA, 19 bp, Homo sapiens
  siRNA target sequence for STK18 (NM_014264.2,1593-1611).
ccgacacctcagactgaaa

SEQ ID NO: 101508 - DNA, 19 bp, Homo sapiens
  siRNA target sequence for STK18 (NM_014264.2,1744-1762).
ggactgatacaaaagtcaa

SEQ ID NO: 101509 - DNA, 19 bp, Homo sapiens
  siRNA target sequence for STK18 (NM_014264.2,1826-1844).
gactgcacttcacagtaaa

SEQ ID NO: 101510 - DNA, 19 bp, Homo sapiens
  siRNA target sequence for STK18 (NM_014264.2,1850-1868).
gataatccaacaagaatgt

SEQ ID NO: 101511 - DNA, 19 bp, Homo sapiens
  siRNA target sequence for STK18 (NM_014264.2,1920-1938).
ccaccatggggttatcaga

SEQ ID NO: 101512 - DNA, 19 bp, Homo sapiens
  siRNA target sequence for STK18 (NM_014264.2,1921-1939).
caccatggggttatcagaa

SEQ ID NO: 101513 - DNA, 19 bp, Homo sapiens
  siRNA target sequence for STK18 (NM_014264.2,1930-1948).
gttatcagaatcgtacatt

SEQ ID NO: 101514 - DNA, 19 bp, Homo sapiens
  siRNA target sequence for STK18 (NM_014264.2,1935-1953).
cagaatcgtacattaagaa

SEQ ID NO: 101515 - DNA, 19 bp, Homo sapiens
  siRNA target sequence for STK18 (NM_014264.2,1941-1959).
cgtacattaagaagcatta

SEQ ID NO: 101516 - DNA, 19 bp, Homo sapiens
  siRNA target sequence for STK18 (NM_014264.2,2018-2036).
ggtgagcatacttgattca

SEQ ID NO: 101517 - DNA, 19 bp, Homo sapiens
  siRNA target sequence for STK18 (NM_014264.2,2043-2061).
gtgtgtgtggagcttgtaa

SEQ ID NO: 101518 - DNA, 19 bp, Homo sapiens
  siRNA target sequence for STK18 (NM_014264.2,2047-2065).
gtgtggagcttgtaaagga

SEQ ID NO: 101519 - DNA, 19 bp, Homo sapiens
  siRNA target sequence for STK18 (NM_014264.2,2063-2081).
ggagtatgcatctcaagaa

SEQ ID NO: 101520 - DNA, 19 bp, Homo sapiens
  siRNA target sequence for STK18 (NM_014264.2,2064-2082).
gagtatgcatctcaagaat

SEQ ID NO: 101521 - DNA, 19 bp, Homo sapiens
  siRNA target sequence for STK18 (NM_014264.2,2070-2088).
gcatctcaagaatatgtga

SEQ ID NO: 101522 - DNA, 19 bp, Homo sapiens
  siRNA target sequence for STK18 (NM_014264.2,2071-2089).
catctcaagaatatgtgaa

SEQ ID NO: 101523 - DNA, 19 bp, Homo sapiens
  siRNA target sequence for STK18 (NM_014264.2,2102-2120).
gatatctagtgatggaaat

SEQ ID NO: 101524 - DNA, 19 bp, Homo sapiens
  siRNA target sequence for STK18 (NM_014264.2,2107-2125).
ctagtgatggaaatacgat

SEQ ID NO: 101525 - DNA, 19 bp, Homo sapiens
  siRNA target sequence for STK18 (NM_014264.2,2112-2130).
gatggaaatacgatcacta

SEQ ID NO: 101526 - DNA, 19 bp, Homo sapiens
  siRNA target sequence for STK18 (NM_014264.2,2116-2134).
gaaatacgatcactattta

SEQ ID NO: 101527 - DNA, 19 bp, Homo sapiens
  siRNA target sequence for STK18 (NM_014264.2,2203-2221).
ggtacagctttgacaattt

SEQ ID NO: 101528 - DNA, 19 bp, Homo sapiens
  siRNA target sequence for STK18 (NM_014264.2,2204-2222).
gtacagctttgacaattta

SEQ ID NO: 101529 - DNA, 19 bp, Homo sapiens
  siRNA target sequence for STK18 (NM_014264.2,2234-2252).
ctggcgaaaatatcaatat

SEQ ID NO: 101530 - DNA, 19 bp, Homo sapiens
  siRNA target sequence for STK18 (NM_014264.2,2237-2255).
gcgaaaatatcaatatgct

SEQ ID NO: 101531 - DNA, 19 bp, Homo sapiens
  siRNA target sequence for STK18 (NM_014264.2,2289-2307).
cccaaaatcacttatttta

SEQ ID NO: 101532 - DNA, 19 bp, Homo sapiens
  siRNA target sequence for STK18 (NM_014264.2,2297-2315).
cacttattttacaagatat

SEQ ID NO: 101533 - DNA, 19 bp, Homo sapiens
  siRNA target sequence for STK18 (NM_014264.2,2489-2507).
gtatatggaccatgctaat

SEQ ID NO: 101534 - DNA, 19 bp, Homo sapiens
  siRNA target sequence for STK18 (NM_014264.2,2503-2521).
ctaatgagggtcatcgtat

SEQ ID NO: 101535 - DNA, 19 bp, Homo sapiens
  siRNA target sequence for STK18 (NM_014264.2,2508-2526).
gagggtcatcgtatttgtt

SEQ ID NO: 101536 - DNA, 19 bp, Homo sapiens
  siRNA target sequence for STK18 (NM_014264.2,2510-2528).
gggtcatcgtatttgttta

SEQ ID NO: 101537 - DNA, 19 bp, Homo sapiens
  siRNA target sequence for STK18 (NM_014264.2,2566-2584).
ctaggagtgctcccttttt

SEQ ID NO: 101538 - DNA, 19 bp, Homo sapiens
  siRNA target sequence for STK18 (NM_014264.2,2578-2596).
cctttttcccaataatcat

SEQ ID NO: 101539 - DNA, 19 bp, Homo sapiens
  siRNA target sequence for STK18 (NM_014264.2,2579-2597).
ctttttcccaataatcata

SEQ ID NO: 101540 - DNA, 19 bp, Homo sapiens
  siRNA target sequence for STK18 (NM_014264.2,2725-2743).
cacaggcaccaatccttaa

SEQ ID NO: 101541 - DNA, 19 bp, Homo sapiens
  siRNA target sequence for STK18 (NM_014264.2,2738-2756).
ccttaatccctctatggtt

SEQ ID NO: 101542 - DNA, 19 bp, Homo sapiens
  siRNA target sequence for STK18 (NM_014264.2,2739-2757).
cttaatccctctatggtta

SEQ ID NO: 101543 - DNA, 19 bp, Homo sapiens
  siRNA target sequence for STK18 (NM_014264.2,2746-2764).
cctctatggttacaaatga

SEQ ID NO: 101544 - DNA, 19 bp, Homo sapiens
  siRNA target sequence for STK18 (NM_014264.2,2763-2781).
gaaggacttggtcttacaa

SEQ ID NO: 101545 - DNA, 19 bp, Homo sapiens
  siRNA target sequence for STK18 (NM_014264.2,2766-2784).
ggacttggtcttacaacta

SEQ ID NO: 101546 - DNA, 19 bp, Homo sapiens
  siRNA target sequence for STK18 (NM_014264.2,2877-2895).
ggttgggctacacagttaa

SEQ ID NO: 101547 - DNA, 19 bp, Homo sapiens
  siRNA target sequence for STK18 (NM_014264.2,2882-2900).
ggctacacagttaactagt

SEQ ID NO: 101548 - DNA, 19 bp, Homo sapiens
  siRNA target sequence for STK18 (NM_014264.2,2952-2970).
ggagtgtcttctatcagtt

SEQ ID NO: 101549 - DNA, 19 bp, Homo sapiens
  siRNA target sequence for STK18 (NM_014264.2,2975-2993).
ctcaccaaatggtcaaaca

SEQ ID NO: 101550 - DNA, 19 bp, Homo sapiens
  siRNA target sequence for STK18 (NM_014264.2,2979-2997).
ccaaatggtcaaacaacta

SEQ ID NO: 101551 - DNA, 19 bp, Homo sapiens
  siRNA target sequence for STK18 (NM_014264.2,3076-3094).
ctaatccgactcctaattt

SEQ ID NO: 101552 - DNA, 19 bp, Homo sapiens
  siRNA target sequence for STK19 (NM_004197.1,148-166).
ctttcgatgatgcaatcat

SEQ ID NO: 101553 - DNA, 19 bp, Homo sapiens
  siRNA target sequence for STK19 (NM_004197.1,387-405).
ccggaagaccctattttca

SEQ ID NO: 101554 - DNA, 19 bp, Homo sapiens
  siRNA target sequence for STK19 (NM_004197.1,428-446).
ccccttccccggtaccata

SEQ ID NO: 101555 - DNA, 19 bp, Homo sapiens
  siRNA target sequence for STK19 (NM_004197.1,429-447).
cccttccccggtaccataa

SEQ ID NO: 101556 - DNA, 19 bp, Homo sapiens
  siRNA target sequence for STK19 (NM_004197.1,430-448).
ccttccccggtaccataaa

SEQ ID NO: 101557 - DNA, 19 bp, Homo sapiens
  siRNA target sequence for STK19 (NM_004197.1,431-449).
cttccccggtaccataaaa

SEQ ID NO: 101558 - DNA, 19 bp, Homo sapiens
  siRNA target sequence for STK19 (NM_004197.1,487-505).
cggagacctttggagttaa

SEQ ID NO: 101559 - DNA, 19 bp, Homo sapiens
  siRNA target sequence for STK19 (NM_004197.1,489-507).
gagacctttggagttaaga

SEQ ID NO: 101560 - DNA, 19 bp, Homo sapiens
  siRNA target sequence for STK19 (NM_004197.1,750-768).
gatgcccatggaattatct

SEQ ID NO: 101561 - DNA, 19 bp, Homo sapiens
  siRNA target sequence for STK19 (NM_004197.1,826-844).
gggcagtgcagaaatttct

SEQ ID NO: 101562 - DNA, 19 bp, Homo sapiens
  siRNA target sequence for STK19 (NM_004197.1,862-880).
cctgtggggaccttagttt

SEQ ID NO: 101563 - DNA, 19 bp, Homo sapiens
  siRNA target sequence for STK19 (NM_004197.1,999-1017).
gctgggagattcatcaagt

SEQ ID NO: 101564 - DNA, 19 bp, Homo sapiens
  siRNA target sequence for STK19 (NM_004197.1,1004-1022).
gagattcatcaagtacttt

SEQ ID NO: 101565 - DNA, 19 bp, Homo sapiens
  siRNA target sequence for STK19 (NM_004197.1,1072-1090).
gggaactgctcctatcaga

SEQ ID NO: 101566 - DNA, 19 bp, Homo sapiens
  siRNA target sequence for STK19 (NM_032454.1,779-797).
ctacaggaccagagtatgt

SEQ ID NO: 101567 - DNA, 19 bp, Homo sapiens
  siRNA target sequence for STK22C (NM_052841.2,200-218).
caaagaaaagtggcaatta

SEQ ID NO: 101568 - DNA, 19 bp, Homo sapiens
  siRNA target sequence for STK22C (NM_052841.2,270-288).
ctcgggagctccaaatcgt

SEQ ID NO: 101569 - DNA, 19 bp, Homo sapiens
  siRNA target sequence for STK22C (NM_052841.2,380-398).
ggaggggatgtctttgact

SEQ ID NO: 101570 - DNA, 19 bp, Homo sapiens
  siRNA target sequence for STK22C (NM_052841.2,651-669).
gcattccccacgatagcaa

SEQ ID NO: 101571 - DNA, 19 bp, Homo sapiens
  siRNA target sequence for STK22C (NM_052841.2,652-670).
cattccccacgatagcaaa

SEQ ID NO: 101572 - DNA, 19 bp, Homo sapiens
  siRNA target sequence for STK22C (NM_052841.2,692-710).
ggtgtggtcctgtatgtca

SEQ ID NO: 101573 - DNA, 19 bp, Homo sapiens
  siRNA target sequence for STK22C (NM_052841.2,693-711).
gtgtggtcctgtatgtcat

SEQ ID NO: 101574 - DNA, 19 bp, Homo sapiens
  siRNA target sequence for STK22C (NM_052841.2,859-877).
ccggccttcaattgaagaa

SEQ ID NO: 101575 - DNA, 19 bp, Homo sapiens
  siRNA target sequence for STK22C (NM_052841.2,861-879).
ggccttcaattgaagaagt

SEQ ID NO: 101576 - DNA, 19 bp, Homo sapiens
  siRNA target sequence for STK23 (NM_014370.1,234-252).
gatcggcgacgtgttcaat

SEQ ID NO: 101577 - DNA, 19 bp, Homo sapiens
  siRNA target sequence for STK23 (NM_014370.1,474-492).
caggatctcaggagtcaat

SEQ ID NO: 101578 - DNA, 19 bp, Homo sapiens
  siRNA target sequence for STK23 (NM_014370.1,686-704).
gtgtgggggacgcttacat

SEQ ID NO: 101579 - DNA, 19 bp, Homo sapiens
  siRNA target sequence for STK23 (NM_014370.1,757-775).
ccctcccgctccatagtca

SEQ ID NO: 101580 - DNA, 19 bp, Homo sapiens
  siRNA target sequence for STK23 (NM_014370.1,800-818).
ccggtaagctgtccaaaaa

SEQ ID NO: 101581 - DNA, 19 bp, Homo sapiens
  siRNA target sequence for STK23 (NM_014370.1,803-821).
gtaagctgtccaaaaacaa

SEQ ID NO: 101582 - DNA, 19 bp, Homo sapiens
  siRNA target sequence for STK23 (NM_014370.1,1104-1122).
cctggagccccaaaatgca

SEQ ID NO: 101583 - DNA, 19 bp, Homo sapiens
  siRNA target sequence for STK23 (NM_014370.1,1112-1130).
cccaaaatgcagataagat

SEQ ID NO: 101584 - DNA, 19 bp, Homo sapiens
  siRNA target sequence for STK23 (NM_014370.1,1347-1365).
ggaccacatcgctcacata

SEQ ID NO: 101585 - DNA, 19 bp, Homo sapiens
  siRNA target sequence for STK23 (NM_014370.1,1450-1468).
cggcacatccacaatctca

SEQ ID NO: 101586 - DNA, 19 bp, Homo sapiens
  siRNA target sequence for STK23 (NM_014370.1,1451-1469).
ggcacatccacaatctcaa

SEQ ID NO: 101587 - DNA, 19 bp, Homo sapiens
  siRNA target sequence for STK23 (NM_014370.1,1478-1496).
gcctgtacgaggtactcat

SEQ ID NO: 101588 - DNA, 19 bp, Homo sapiens
  siRNA target sequence for STK24 (NM_003576.2,168-186).
ggggactggccttgaataa

SEQ ID NO: 101589 - DNA, 19 bp, Homo sapiens
  siRNA target sequence for STK24 (NM_003576.2,169-187).
gggactggccttgaataaa

SEQ ID NO: 101590 - DNA, 19 bp, Homo sapiens
  siRNA target sequence for STK24 (NM_003576.2,170-188).
ggactggccttgaataaaa

SEQ ID NO: 101591 - DNA, 19 bp, Homo sapiens
  siRNA target sequence for STK24 (NM_003576.2,212-230).
ggagggagcacgaacctaa

SEQ ID NO: 101592 - DNA, 19 bp, Homo sapiens
  siRNA target sequence for STK24 (NM_003576.2,213-231).
gagggagcacgaacctaaa

SEQ ID NO: 101593 - DNA, 19 bp, Homo sapiens
  siRNA target sequence for STK24 (NM_003576.2,293-311).
gtgttcaaaggcattgaca

SEQ ID NO: 101594 - DNA, 19 bp, Homo sapiens
  siRNA target sequence for STK24 (NM_003576.2,415-433).
cagtccatatgtaaccaaa

SEQ ID NO: 101595 - DNA, 19 bp, Homo sapiens
  siRNA target sequence for STK24 (NM_003576.2,417-435).
gtccatatgtaaccaaata

SEQ ID NO: 101596 - DNA, 19 bp, Homo sapiens
  siRNA target sequence for STK24 (NM_003576.2,419-437).
ccatatgtaaccaaatatt

SEQ ID NO: 101597 - DNA, 19 bp, Homo sapiens
  siRNA target sequence for STK24 (NM_003576.2,430-448).
caaatattatggatcctat

SEQ ID NO: 101598 - DNA, 19 bp, Homo sapiens
  siRNA target sequence for STK24 (NM_003576.2,440-458).
ggatcctatctgaaggata

SEQ ID NO: 101599 - DNA, 19 bp, Homo sapiens
  siRNA target sequence for STK24 (NM_003576.2,445-463).
ctatctgaaggatacaaaa

SEQ ID NO: 101600 - DNA, 19 bp, Homo sapiens
  siRNA target sequence for STK24 (NM_003576.2,449-467).
ctgaaggatacaaaattat

SEQ ID NO: 101601 - DNA, 19 bp, Homo sapiens
  siRNA target sequence for STK24 (NM_003576.2,454-472).
ggatacaaaattatggata

SEQ ID NO: 101602 - DNA, 19 bp, Homo sapiens
  siRNA target sequence for STK24 (NM_003576.2,492-510).
gaggctccgcactagatct

SEQ ID NO: 101603 - DNA, 19 bp, Homo sapiens
  siRNA target sequence for STK24 (NM_003576.2,494-512).
ggctccgcactagatctat

SEQ ID NO: 101604 - DNA, 19 bp, Homo sapiens
  siRNA target sequence for STK24 (NM_003576.2,495-513).
gctccgcactagatctatt

SEQ ID NO: 101605 - DNA, 19 bp, Homo sapiens
  siRNA target sequence for STK24 (NM_003576.2,496-514).
ctccgcactagatctatta

SEQ ID NO: 101606 - DNA, 19 bp, Homo sapiens
  siRNA target sequence for STK24 (NM_003576.2,498-516).
ccgcactagatctattaga

SEQ ID NO: 101607 - DNA, 19 bp, Homo sapiens
  siRNA target sequence for STK24 (NM_003576.2,499-517).
cgcactagatctattagaa

SEQ ID NO: 101608 - DNA, 19 bp, Homo sapiens
  siRNA target sequence for STK24 (NM_003576.2,537-555).
cccagatcgctactatatt

SEQ ID NO: 101609 - DNA, 19 bp, Homo sapiens
  siRNA target sequence for STK24 (NM_003576.2,538-556).
ccagatcgctactatatta

SEQ ID NO: 101610 - DNA, 19 bp, Homo sapiens
  siRNA target sequence for STK24 (NM_003576.2,539-557).
cagatcgctactatattaa

SEQ ID NO: 101611 - DNA, 19 bp, Homo sapiens
  siRNA target sequence for STK24 (NM_003576.2,541-559).
gatcgctactatattaaga

SEQ ID NO: 101612 - DNA, 19 bp, Homo sapiens
  siRNA target sequence for STK24 (NM_003576.2,544-562).
cgctactatattaagagaa

SEQ ID NO: 101613 - DNA, 19 bp, Homo sapiens
  siRNA target sequence for STK24 (NM_003576.2,584-602).
ctccattcggagaagaaaa

SEQ ID NO: 101614 - DNA, 19 bp, Homo sapiens
  siRNA target sequence for STK24 (NM_003576.2,844-862).
gctgcaccccatgaaagtt

SEQ ID NO: 101615 - DNA, 19 bp, Homo sapiens
  siRNA target sequence for STK24 (NM_003576.2,845-863).
ctgcaccccatgaaagttt

SEQ ID NO: 101616 - DNA, 19 bp, Homo sapiens
  siRNA target sequence for STK24 (NM_003576.2,848-866).
caccccatgaaagttttat

SEQ ID NO: 101617 - DNA, 19 bp, Homo sapiens
  siRNA target sequence for STK24 (NM_003576.2,888-906).
caccgacgttggaaggaaa

SEQ ID NO: 101618 - DNA, 19 bp, Homo sapiens
  siRNA target sequence for STK24 (NM_003576.2,968-986).
cccactgctaaggagttat

SEQ ID NO: 101619 - DNA, 19 bp, Homo sapiens
  siRNA target sequence for STK24 (NM_003576.2,969-987).
ccactgctaaggagttatt

SEQ ID NO: 101620 - DNA, 19 bp, Homo sapiens
  siRNA target sequence for STK24 (NM_003576.2,982-1000).
gttattgaagcacaagttt

SEQ ID NO: 101621 - DNA, 19 bp, Homo sapiens
  siRNA target sequence for STK24 (NM_003576.2,988-1006).
gaagcacaagtttatacta

SEQ ID NO: 101622 - DNA, 19 bp, Homo sapiens
  siRNA target sequence for STK24 (NM_003576.2,1148-1166).
ggggactggatcttcacaa

SEQ ID NO: 101623 - DNA, 19 bp, Homo sapiens
  siRNA target sequence for STK24 (NM_003576.2,1149-1167).
gggactggatcttcacaat

SEQ ID NO: 101624 - DNA, 19 bp, Homo sapiens
  siRNA target sequence for STK24 (NM_003576.2,1265-1283).
cagtgtttatctacaatta

SEQ ID NO: 101625 - DNA, 19 bp, Homo sapiens
  siRNA target sequence for STK24 (NM_003576.2,1427-1445).
cagcggctccagagatact

SEQ ID NO: 101626 - DNA, 19 bp, Homo sapiens
  siRNA target sequence for STK24 (NM_003576.2,1429-1447).
gcggctccagagatactct

SEQ ID NO: 101627 - DNA, 19 bp, Homo sapiens
  siRNA target sequence for STK24 (NM_003576.2,1435-1453).
ccagagatactctctaagt

SEQ ID NO: 101628 - DNA, 19 bp, Homo sapiens
  siRNA target sequence for STK25 (NM_006374.3,315-333).
gtctacaagggcatcgata

SEQ ID NO: 101629 - DNA, 19 bp, Homo sapiens
  siRNA target sequence for STK25 (NM_006374.3,481-499).
ccaagctatggatcatcat

SEQ ID NO: 101630 - DNA, 19 bp, Homo sapiens
  siRNA target sequence for STK25 (NM_006374.3,520-538).
cagcactggacttgcttaa

SEQ ID NO: 101631 - DNA, 19 bp, Homo sapiens
  siRNA target sequence for STK25 (NM_006374.3,571-589).
cgatcctgcgggagattct

SEQ ID NO: 101632 - DNA, 19 bp, Homo sapiens
  siRNA target sequence for STK25 (NM_006374.3,720-738).
cagattaagaggaacacat

SEQ ID NO: 101633 - DNA, 19 bp, Homo sapiens
  siRNA target sequence for STK25 (NM_006374.3,845-863).
gggggagcctccaaactct

SEQ ID NO: 101634 - DNA, 19 bp, Homo sapiens
  siRNA target sequence for STK25 (NM_006374.3,1443-1461).
gagcgagtgcagaggtttt

SEQ ID NO: 101635 - DNA, 19 bp, Homo sapiens
  siRNA target sequence for STK25 (NM_006374.3,1445-1463).
gcgagtgcagaggttttca

SEQ ID NO: 101636 - DNA, 19 bp, Homo sapiens
  siRNA target sequence for STK25 (NM_006374.3,1447-1465).
gagtgcagaggttttcaca

SEQ ID NO: 101637 - DNA, 19 bp, Homo sapiens
  siRNA target sequence for STK29 (NM_003957.1,415-433).
cgcagcacgcgcagtatgt

SEQ ID NO: 101638 - DNA, 19 bp, Homo sapiens
  siRNA target sequence for STK29 (NM_003957.1,416-434).
gcagcacgcgcagtatgtt

SEQ ID NO: 101639 - DNA, 19 bp, Homo sapiens
  siRNA target sequence for STK29 (NM_003957.1,1181-1199).
gaaacacatatggtatata

SEQ ID NO: 101640 - DNA, 19 bp, Homo sapiens
  siRNA target sequence for STK29 (NM_003957.1,1193-1211).
gtatatagggggcaagaat

SEQ ID NO: 101641 - DNA, 19 bp, Homo sapiens
  siRNA target sequence for STK29 (NM_003957.1,1395-1413).
ctcctggaccggaaagaaa

SEQ ID NO: 101642 - DNA, 19 bp, Homo sapiens
  siRNA target sequence for STK29 (NM_003957.1,1516-1534).
ggccagaacgcaaatccat

SEQ ID NO: 101643 - DNA, 19 bp, Homo sapiens
  siRNA target sequence for STK29 (NM_003957.1,2145-2163).
gtcaagttccaggttgata

SEQ ID NO: 101644 - DNA, 19 bp, Homo sapiens
  siRNA target sequence for STK29 (NM_003957.1,2321-2339).
gtcagacaccactaactgt

SEQ ID NO: 101645 - DNA, 19 bp, Homo sapiens
  siRNA target sequence for STK29 (NM_003957.1,2327-2345).
caccactaactgtatggaa

SEQ ID NO: 101646 - DNA, 19 bp, Homo sapiens
  siRNA target sequence for STK29 (NM_003957.1,2332-2350).
ctaactgtatggaaatgat

SEQ ID NO: 101647 - DNA, 19 bp, Homo sapiens
  siRNA target sequence for STK3 (NM_006281.1,244-262).
gggtcttatggaagtgtat

SEQ ID NO: 101648 - DNA, 19 bp, Homo sapiens
  siRNA target sequence for STK3 (NM_006281.1,245-263).
ggtcttatggaagtgtatt

SEQ ID NO: 101649 - DNA, 19 bp, Homo sapiens
  siRNA target sequence for STK3 (NM_006281.1,248-266).
cttatggaagtgtatttaa

SEQ ID NO: 101650 - DNA, 19 bp, Homo sapiens
  siRNA target sequence for STK3 (NM_006281.1,259-277).
gtatttaaagcaatacaca

SEQ ID NO: 101651 - DNA, 19 bp, Homo sapiens
  siRNA target sequence for STK3 (NM_006281.1,286-304).
ggtcaagttgtcgcaatta

SEQ ID NO: 101652 - DNA, 19 bp, Homo sapiens
  siRNA target sequence for STK3 (NM_006281.1,287-305).
gtcaagttgtcgcaattaa

SEQ ID NO: 101653 - DNA, 19 bp, Homo sapiens
  siRNA target sequence for STK3 (NM_006281.1,370-388).
gacagcccatatgttgtaa

SEQ ID NO: 101654 - DNA, 19 bp, Homo sapiens
  siRNA target sequence for STK3 (NM_006281.1,376-394).
ccatatgttgtaaagtact

SEQ ID NO: 101655 - DNA, 19 bp, Homo sapiens
  siRNA target sequence for STK3 (NM_006281.1,416-434).
cagacctctggattgttat

SEQ ID NO: 101656 - DNA, 19 bp, Homo sapiens
  siRNA target sequence for STK3 (NM_006281.1,457-475).
gtctcagacataattagat

SEQ ID NO: 101657 - DNA, 19 bp, Homo sapiens
  siRNA target sequence for STK3 (NM_006281.1,463-481).
gacataattagattacgaa

SEQ ID NO: 101658 - DNA, 19 bp, Homo sapiens
  siRNA target sequence for STK3 (NM_006281.1,508-526).
gcaaccattcttaaatcta

SEQ ID NO: 101659 - DNA, 19 bp, Homo sapiens
  siRNA target sequence for STK3 (NM_006281.1,634-652).
ggagtggctggtcagttaa

SEQ ID NO: 101660 - DNA, 19 bp, Homo sapiens
  siRNA target sequence for STK3 (NM_006281.1,639-657).
ggctggtcagttaacagat

SEQ ID NO: 101661 - DNA, 19 bp, Homo sapiens
  siRNA target sequence for STK3 (NM_006281.1,663-681).
ggcaaaacgcaatactgta

SEQ ID NO: 101662 - DNA, 19 bp, Homo sapiens
  siRNA target sequence for STK3 (NM_006281.1,670-688).
cgcaatactgtaataggaa

SEQ ID NO: 101663 - DNA, 19 bp, Homo sapiens
  siRNA target sequence for STK3 (NM_006281.1,707-725).
ctgaggtgattcaagaaat

SEQ ID NO: 101664 - DNA, 19 bp, Homo sapiens
  siRNA target sequence for STK3 (NM_006281.1,750-768).
ctggtcccttggcattact

SEQ ID NO: 101665 - DNA, 19 bp, Homo sapiens
  siRNA target sequence for STK3 (NM_006281.1,755-773).
cccttggcattacttctat

SEQ ID NO: 101666 - DNA, 19 bp, Homo sapiens
  siRNA target sequence for STK3 (NM_006281.1,756-774).
ccttggcattacttctata

SEQ ID NO: 101667 - DNA, 19 bp, Homo sapiens
  siRNA target sequence for STK3 (NM_006281.1,760-778).
ggcattacttctatagaaa

SEQ ID NO: 101668 - DNA, 19 bp, Homo sapiens
  siRNA target sequence for STK3 (NM_006281.1,761-779).
gcattacttctatagaaat

SEQ ID NO: 101669 - DNA, 19 bp, Homo sapiens
  siRNA target sequence for STK3 (NM_006281.1,814-832).
ccaatgagggctattttta

SEQ ID NO: 101670 - DNA, 19 bp, Homo sapiens
  siRNA target sequence for STK3 (NM_006281.1,871-889).
gaactttggtccgatgatt

SEQ ID NO: 101671 - DNA, 19 bp, Homo sapiens
  siRNA target sequence for STK3 (NM_006281.1,975-993).
gaatgccaaacctgtatca

SEQ ID NO: 101672 - DNA, 19 bp, Homo sapiens
  siRNA target sequence for STK3 (NM_006281.1,979-997).
gccaaacctgtatcaatat

SEQ ID NO: 101673 - DNA, 19 bp, Homo sapiens
  siRNA target sequence for STK3 (NM_006281.1,980-998).
ccaaacctgtatcaatatt

SEQ ID NO: 101674 - DNA, 19 bp, Homo sapiens
  siRNA target sequence for STK3 (NM_006281.1,981-999).
caaacctgtatcaatatta

SEQ ID NO: 101675 - DNA, 19 bp, Homo sapiens
  siRNA target sequence for STK3 (NM_006281.1,986-1004).
ctgtatcaatattaagaga

SEQ ID NO: 101676 - DNA, 19 bp, Homo sapiens
  siRNA target sequence for STK3 (NM_006281.1,1018-1036).
gctatggagatcaaagcta

SEQ ID NO: 101677 - DNA, 19 bp, Homo sapiens
  siRNA target sequence for STK3 (NM_006281.1,1019-1037).
ctatggagatcaaagctaa

SEQ ID NO: 101678 - DNA, 19 bp, Homo sapiens
  siRNA target sequence for STK3 (NM_006281.1,1026-1044).
gatcaaagctaaaagacat

SEQ ID NO: 101679 - DNA, 19 bp, Homo sapiens
  siRNA target sequence for STK3 (NM_006281.1,1178-1196).
cccagaccatgattgaaca

SEQ ID NO: 101680 - DNA, 19 bp, Homo sapiens
  siRNA target sequence for STK3 (NM_006281.1,1179-1197).
ccagaccatgattgaacat

SEQ ID NO: 101681 - DNA, 19 bp, Homo sapiens
  siRNA target sequence for STK3 (NM_006281.1,1180-1198).
cagaccatgattgaacata

SEQ ID NO: 101682 - DNA, 19 bp, Homo sapiens
  siRNA target sequence for STK3 (NM_006281.1,1225-1243).
gggaccatggtgataaaca

SEQ ID NO: 101683 - DNA, 19 bp, Homo sapiens
  siRNA target sequence for STK3 (NM_006281.1,1227-1245).
gaccatggtgataaacagt

SEQ ID NO: 101684 - DNA, 19 bp, Homo sapiens
  siRNA target sequence for STK3 (NM_006281.1,1286-1304).
caacctcaccacaagtaca

SEQ ID NO: 101685 - DNA, 19 bp, Homo sapiens
  siRNA target sequence for STK3 (NM_006281.1,1300-1318).
gtacaaagaccatctttca

SEQ ID NO: 101686 - DNA, 19 bp, Homo sapiens
  siRNA target sequence for STK3 (NM_006281.1,1320-1338).
ggactactttgataagcaa

SEQ ID NO: 101687 - DNA, 19 bp, Homo sapiens
  siRNA target sequence for STK3 (NM_006281.1,1330-1348).
gataagcaagacttcaaga

SEQ ID NO: 101688 - DNA, 19 bp, Homo sapiens
  siRNA target sequence for STK3 (NM_006281.1,1353-1371).
gagtcacgaaaactgtaat

SEQ ID NO: 101689 - DNA, 19 bp, Homo sapiens
  siRNA target sequence for STK3 (NM_006281.1,1355-1373).
gtcacgaaaactgtaatca

SEQ ID NO: 101690 - DNA, 19 bp, Homo sapiens
  siRNA target sequence for STK3 (NM_006281.1,1387-1405).
cccttccctatgtccaaaa

SEQ ID NO: 101691 - DNA, 19 bp, Homo sapiens
  siRNA target sequence for STK3 (NM_006281.1,1388-1406).
ccttccctatgtccaaaaa

SEQ ID NO: 101692 - DNA, 19 bp, Homo sapiens
  siRNA target sequence for STK3 (NM_006281.1,1392-1410).
ccctatgtccaaaaacgtt

SEQ ID NO: 101693 - DNA, 19 bp, Homo sapiens
  siRNA target sequence for STK3 (NM_006281.1,1393-1411).
cctatgtccaaaaacgttt

SEQ ID NO: 101694 - DNA, 19 bp, Homo sapiens
  siRNA target sequence for STK3 (NM_006281.1,1469-1487).
gtttagaagaactacagat

SEQ ID NO: 101695 - DNA, 19 bp, Homo sapiens
  siRNA target sequence for STK3 (NM_006281.1,1512-1530).
gatggaacgggagatagaa

SEQ ID NO: 101696 - DNA, 19 bp, Homo sapiens
  siRNA target sequence for STK3 (NM_006281.1,1531-1549).
gaacttcgtcagagataca

SEQ ID NO: 101697 - DNA, 19 bp, Homo sapiens
  siRNA target sequence for STK3 (NM_006281.1,1542-1560).
gagatacactgcgaaaaga

SEQ ID NO: 101698 - DNA, 19 bp, Homo sapiens
  siRNA target sequence for STK33 (NM_030906.1,922-940).
ggctgatagtggcttagat

SEQ ID NO: 101699 - DNA, 19 bp, Homo sapiens
  siRNA target sequence for STK33 (NM_030906.1,932-950).
ggcttagataaaaaatcca

SEQ ID NO: 101700 - DNA, 19 bp, Homo sapiens
  siRNA target sequence for STK33 (NM_030906.1,1014-1032).
caagggttcctccagtttt

SEQ ID NO: 101701 - DNA, 19 bp, Homo sapiens
  siRNA target sequence for STK33 (NM_030906.1,1049-1067).
cagacatcaagcattggta

SEQ ID NO: 101702 - DNA, 19 bp, Homo sapiens
  siRNA target sequence for STK33 (NM_030906.1,1146-1164).
cctcaagaacctcaaatgt

SEQ ID NO: 101703 - DNA, 19 bp, Homo sapiens
  siRNA target sequence for STK33 (NM_030906.1,1147-1165).
ctcaagaacctcaaatgta

SEQ ID NO: 101704 - DNA, 19 bp, Homo sapiens
  siRNA target sequence for STK33 (NM_030906.1,1192-1210).
gggtcggggcaactttaca

SEQ ID NO: 101705 - DNA, 19 bp, Homo sapiens
  siRNA target sequence for STK33 (NM_030906.1,1194-1212).
gtcggggcaactttacaga

SEQ ID NO: 101706 - DNA, 19 bp, Homo sapiens
  siRNA target sequence for STK33 (NM_030906.1,1214-1232).
ggaaaagttcctcacataa

SEQ ID NO: 101707 - DNA, 19 bp, Homo sapiens
  siRNA target sequence for STK33 (NM_030906.1,1223-1241).
cctcacataaggattgaga

SEQ ID NO: 101708 - DNA, 19 bp, Homo sapiens
  siRNA target sequence for STK33 (NM_030906.1,1224-1242).
ctcacataaggattgagaa

SEQ ID NO: 101709 - DNA, 19 bp, Homo sapiens
  siRNA target sequence for STK33 (NM_030906.1,1250-1268).
gctattgaggaaatctata

SEQ ID NO: 101710 - DNA, 19 bp, Homo sapiens
  siRNA target sequence for STK33 (NM_030906.1,1334-1352).
gaaacgaagtgggcaatta

SEQ ID NO: 101711 - DNA, 19 bp, Homo sapiens
  siRNA target sequence for STK33 (NM_030906.1,1338-1356).
cgaagtgggcaattaaaaa

SEQ ID NO: 101712 - DNA, 19 bp, Homo sapiens
  siRNA target sequence for STK33 (NM_030906.1,1339-1357).
gaagtgggcaattaaaaaa

SEQ ID NO: 101713 - DNA, 19 bp, Homo sapiens
  siRNA target sequence for STK33 (NM_030906.1,1403-1421).
cgagaggtgaacattctga

SEQ ID NO: 101714 - DNA, 19 bp, Homo sapiens
  siRNA target sequence for STK33 (NM_030906.1,1411-1429).
gaacattctgaaaagtgta

SEQ ID NO: 101715 - DNA, 19 bp, Homo sapiens
  siRNA target sequence for STK33 (NM_030906.1,1583-1601).
ctcgcatcagctatagcat

SEQ ID NO: 101716 - DNA, 19 bp, Homo sapiens
  siRNA target sequence for STK33 (NM_030906.1,1585-1603).
cgcatcagctatagcatat

SEQ ID NO: 101717 - DNA, 19 bp, Homo sapiens
  siRNA target sequence for STK33 (NM_030906.1,1590-1608).
cagctatagcatatcttca

SEQ ID NO: 101718 - DNA, 19 bp, Homo sapiens
  siRNA target sequence for STK33 (NM_030906.1,1640-1658).
ctggaaaatataatggtta

SEQ ID NO: 101719 - DNA, 19 bp, Homo sapiens
  siRNA target sequence for STK33 (NM_030906.1,1767-1785).
catgtgggactcctatcta

SEQ ID NO: 101720 - DNA, 19 bp, Homo sapiens
  siRNA target sequence for STK33 (NM_030906.1,1789-1807).
ggcccctgaagttatcagt

SEQ ID NO: 101721 - DNA, 19 bp, Homo sapiens
  siRNA target sequence for STK33 (NM_030906.1,1842-1860).
gcataggcgtcgtaatgta

SEQ ID NO: 101722 - DNA, 19 bp, Homo sapiens
  siRNA target sequence for STK33 (NM_030906.1,1847-1865).
ggcgtcgtaatgtacatgt

SEQ ID NO: 101723 - DNA, 19 bp, Homo sapiens
  siRNA target sequence for STK33 (NM_030906.1,1848-1866).
gcgtcgtaatgtacatgtt

SEQ ID NO: 101724 - DNA, 19 bp, Homo sapiens
  siRNA target sequence for STK33 (NM_030906.1,1849-1867).
cgtcgtaatgtacatgtta

SEQ ID NO: 101725 - DNA, 19 bp, Homo sapiens
  siRNA target sequence for STK33 (NM_030906.1,1850-1868).
gtcgtaatgtacatgttat

SEQ ID NO: 101726 - DNA, 19 bp, Homo sapiens
  siRNA target sequence for STK33 (NM_030906.1,1966-1984).
cataagtgactgtgctaaa

SEQ ID NO: 101727 - DNA, 19 bp, Homo sapiens
  siRNA target sequence for STK33 (NM_030906.1,1971-1989).
gtgactgtgctaaaagtgt

SEQ ID NO: 101728 - DNA, 19 bp, Homo sapiens
  siRNA target sequence for STK33 (NM_030906.1,1973-1991).
gactgtgctaaaagtgttt

SEQ ID NO: 101729 - DNA, 19 bp, Homo sapiens
  siRNA target sequence for STK33 (NM_030906.1,2029-2047).
cacagctaaggaactacta

SEQ ID NO: 101730 - DNA, 19 bp, Homo sapiens
  siRNA target sequence for STK33 (NM_030906.1,2033-2051).
gctaaggaactactagata

SEQ ID NO: 101731 - DNA, 19 bp, Homo sapiens
  siRNA target sequence for STK33 (NM_030906.1,2034-2052).
ctaaggaactactagataa

SEQ ID NO: 101732 - DNA, 19 bp, Homo sapiens
  siRNA target sequence for STK33 (NM_030906.1,2045-2063).
ctagataaccagtggttaa

SEQ ID NO: 101733 - DNA, 19 bp, Homo sapiens
  siRNA target sequence for STK33 (NM_030906.1,2056-2074).
gtggttaacaggcaataaa

SEQ ID NO: 101734 - DNA, 19 bp, Homo sapiens
  siRNA target sequence for STK33 (NM_030906.1,2083-2101).
ggtgagaccaaccaatgta

SEQ ID NO: 101735 - DNA, 19 bp, Homo sapiens
  siRNA target sequence for STK33 (NM_030906.1,2084-2102).
gtgagaccaaccaatgtat

SEQ ID NO: 101736 - DNA, 19 bp, Homo sapiens
  siRNA target sequence for STK33 (NM_030906.1,2175-2193).
cgtccactgaagaaaagtt

SEQ ID NO: 101737 - DNA, 19 bp, Homo sapiens
  siRNA target sequence for STK33 (NM_030906.1,2219-2237).
gtccctgatgccaattaca

SEQ ID NO: 101738 - DNA, 19 bp, Homo sapiens
  siRNA target sequence for STK33 (NM_030906.1,2221-2239).
ccctgatgccaattacact

SEQ ID NO: 101739 - DNA, 19 bp, Homo sapiens
  siRNA target sequence for STK33 (NM_030906.1,2222-2240).
cctgatgccaattacactt

SEQ ID NO: 101740 - DNA, 19 bp, Homo sapiens
  siRNA target sequence for STK33 (NM_030906.1,2345-2363).
ctccttccagctgaaatca

SEQ ID NO: 101741 - DNA, 19 bp, Homo sapiens
  siRNA target sequence for STK35 (NM_080836.2,233-251).
gcagctacggcgtggttta

SEQ ID NO: 101742 - DNA, 19 bp, Homo sapiens
  siRNA target sequence for STK35 (NM_080836.2,234-252).
cagctacggcgtggtttat

SEQ ID NO: 101743 - DNA, 19 bp, Homo sapiens
  siRNA target sequence for STK35 (NM_080836.2,236-254).
gctacggcgtggtttatga

SEQ ID NO: 101744 - DNA, 19 bp, Homo sapiens
  siRNA target sequence for STK35 (NM_080836.2,485-503).
cgctgaaaggagaaaggat

SEQ ID NO: 101745 - DNA, 19 bp, Homo sapiens
  siRNA target sequence for STK35 (NM_080836.2,605-623).
ccaccaacaaaagtttcat

SEQ ID NO: 101746 - DNA, 19 bp, Homo sapiens
  siRNA target sequence for STK35 (NM_080836.2,785-803).
gcaaagagggcaatcaaga

SEQ ID NO: 101747 - DNA, 19 bp, Homo sapiens
  siRNA target sequence for STK35 (NM_080836.2,845-863).
cctgcggttcggacttcta

SEQ ID NO: 101748 - DNA, 19 bp, Homo sapiens
  siRNA target sequence for STK35 (NM_080836.2,984-1002).
gctcctggggacctacatt

SEQ ID NO: 101749 - DNA, 19 bp, Homo sapiens
  siRNA target sequence for STK35 (NM_080836.2,985-1003).
ctcctggggacctacatta

SEQ ID NO: 101750 - DNA, 19 bp, Homo sapiens
  siRNA target sequence for STK35 (NM_080836.2,1030-1048).
ggtgaggcgctgctagaaa

SEQ ID NO: 101751 - DNA, 19 bp, Homo sapiens
  siRNA target sequence for STK35 (NM_080836.2,1062-1080).
gttgcacatcccccaaaaa

SEQ ID NO: 101752 - DNA, 19 bp, Homo sapiens
  siRNA target sequence for STK35 (NM_080836.2,1104-1122).
gatcaagcagctcttgaaa

SEQ ID NO: 101753 - DNA, 19 bp, Homo sapiens
  siRNA target sequence for STK35 (NM_080836.2,1151-1169).
ggcctgatgcctttgaact

SEQ ID NO: 101754 - DNA, 19 bp, Homo sapiens
  siRNA target sequence for STK36 (NM_015690.2,231-249).
ccacgtgttggagatgatt

SEQ ID NO: 101755 - DNA, 19 bp, Homo sapiens
  siRNA target sequence for STK36 (NM_015690.2,273-291).
gtacaagggtcgaagaaaa

SEQ ID NO: 101756 - DNA, 19 bp, Homo sapiens
  siRNA target sequence for STK36 (NM_015690.2,417-435).
gcttgacagctttgaaact

SEQ ID NO: 101757 - DNA, 19 bp, Homo sapiens
  siRNA target sequence for STK36 (NM_015690.2,447-465).
ggtggtggtgacagactat

SEQ ID NO: 101758 - DNA, 19 bp, Homo sapiens
  siRNA target sequence for STK36 (NM_015690.2,469-487).
gagggagagctctttcaga

SEQ ID NO: 101759 - DNA, 19 bp, Homo sapiens
  siRNA target sequence for STK36 (NM_015690.2,578-596).
gcatcctacaccgagatat

SEQ ID NO: 101760 - DNA, 19 bp, Homo sapiens
  siRNA target sequence for STK36 (NM_015690.2,663-681).
ggctatgagcaccaataca

SEQ ID NO: 101761 - DNA, 19 bp, Homo sapiens
  siRNA target sequence for STK36 (NM_015690.2,664-682).
gctatgagcaccaatacaa

SEQ ID NO: 101762 - DNA, 19 bp, Homo sapiens
  siRNA target sequence for STK36 (NM_015690.2,665-683).
ctatgagcaccaatacaat

SEQ ID NO: 101763 - DNA, 19 bp, Homo sapiens
  siRNA target sequence for STK36 (NM_015690.2,684-702).
ggtgctgacatccatcaaa

SEQ ID NO: 101764 - DNA, 19 bp, Homo sapiens
  siRNA target sequence for STK36 (NM_015690.2,703-721).
ggcacaccactctatatgt

SEQ ID NO: 101765 - DNA, 19 bp, Homo sapiens
  siRNA target sequence for STK36 (NM_015690.2,705-723).
cacaccactctatatgtct

SEQ ID NO: 101766 - DNA, 19 bp, Homo sapiens
  siRNA target sequence for STK36 (NM_015690.2,779-797).
gctgcatactatatgaact

SEQ ID NO: 101767 - DNA, 19 bp, Homo sapiens
  siRNA target sequence for STK36 (NM_015690.2,819-837).
ctatgctacaagcatcttt

SEQ ID NO: 101768 - DNA, 19 bp, Homo sapiens
  siRNA target sequence for STK36 (NM_015690.2,953-971).
ggccagacctcttatatca

SEQ ID NO: 101769 - DNA, 19 bp, Homo sapiens
  siRNA target sequence for STK36 (NM_015690.2,983-1001).
ctggtcatgtcaccataat

SEQ ID NO: 101770 - DNA, 19 bp, Homo sapiens
  siRNA target sequence for STK36 (NM_015690.2,985-1003).
ggtcatgtcaccataataa

SEQ ID NO: 101771 - DNA, 19 bp, Homo sapiens
  siRNA target sequence for STK36 (NM_015690.2,1055-1073).
cagaacttcaggtcctaaa

SEQ ID NO: 101772 - DNA, 19 bp, Homo sapiens
  siRNA target sequence for STK36 (NM_015690.2,1285-1303).
gggatcttagcctcagaat

SEQ ID NO: 101773 - DNA, 19 bp, Homo sapiens
  siRNA target sequence for STK36 (NM_015690.2,1286-1304).
ggatcttagcctcagaatt

SEQ ID NO: 101774 - DNA, 19 bp, Homo sapiens
  siRNA target sequence for STK36 (NM_015690.2,1308-1326).
gagcagctgggctaaatca

SEQ ID NO: 101775 - DNA, 19 bp, Homo sapiens
  siRNA target sequence for STK36 (NM_015690.2,1362-1380).
ccggaccaccccagattgt

SEQ ID NO: 101776 - DNA, 19 bp, Homo sapiens
  siRNA target sequence for STK36 (NM_015690.2,1773-1791).
ccagcagcaatcttggtat

SEQ ID NO: 101777 - DNA, 19 bp, Homo sapiens
  siRNA target sequence for STK36 (NM_015690.2,1787-1805).
ggtatgggaccttcttaca

SEQ ID NO: 101778 - DNA, 19 bp, Homo sapiens
  siRNA target sequence for STK36 (NM_015690.2,1966-1984).
cggagggacagccttatgt

SEQ ID NO: 101779 - DNA, 19 bp, Homo sapiens
  siRNA target sequence for STK36 (NM_015690.2,2060-2078).
cgacacagcaggttgtctt

SEQ ID NO: 101780 - DNA, 19 bp, Homo sapiens
  siRNA target sequence for STK36 (NM_015690.2,2162-2180).
gagagcagagtgaggatat

SEQ ID NO: 101781 - DNA, 19 bp, Homo sapiens
  siRNA target sequence for STK36 (NM_015690.2,2166-2184).
gcagagtgaggatatacct

SEQ ID NO: 101782 - DNA, 19 bp, Homo sapiens
  siRNA target sequence for STK36 (NM_015690.2,2356-2374).
caccttctcaaggttctat

SEQ ID NO: 101783 - DNA, 19 bp, Homo sapiens
  siRNA target sequence for STK36 (NM_015690.2,2431-2449).
gccttggaatccctgttta

SEQ ID NO: 101784 - DNA, 19 bp, Homo sapiens
  siRNA target sequence for STK36 (NM_015690.2,2432-2450).
ccttggaatccctgtttat

SEQ ID NO: 101785 - DNA, 19 bp, Homo sapiens
  siRNA target sequence for STK36 (NM_015690.2,2441-2459).
ccctgtttatgttgattca

SEQ ID NO: 101786 - DNA, 19 bp, Homo sapiens
  siRNA target sequence for STK36 (NM_015690.2,2460-2478).
gggcaaggtaaaagtagta

SEQ ID NO: 101787 - DNA, 19 bp, Homo sapiens
  siRNA target sequence for STK36 (NM_015690.2,2463-2481).
caaggtaaaagtagtagat

SEQ ID NO: 101788 - DNA, 19 bp, Homo sapiens
  siRNA target sequence for STK36 (NM_015690.2,2495-2513).
ctgaagtgacactctactt

SEQ ID NO: 101789 - DNA, 19 bp, Homo sapiens
  siRNA target sequence for STK36 (NM_015690.2,2575-2593).
gacgttgctactctcttta

SEQ ID NO: 101790 - DNA, 19 bp, Homo sapiens
  siRNA target sequence for STK36 (NM_015690.2,2739-2757).
gactccaccaggtagttgt

SEQ ID NO: 101791 - DNA, 19 bp, Homo sapiens
  siRNA target sequence for STK36 (NM_015690.2,2809-2827).
gggaaggctagcctaatca

SEQ ID NO: 101792 - DNA, 19 bp, Homo sapiens
  siRNA target sequence for STK36 (NM_015690.2,2952-2970).
gccagactggacactgatt

SEQ ID NO: 101793 - DNA, 19 bp, Homo sapiens
  siRNA target sequence for STK36 (NM_015690.2,3099-3117).
ccccagcttcctgaatcaa

SEQ ID NO: 101794 - DNA, 19 bp, Homo sapiens
  siRNA target sequence for STK36 (NM_015690.2,3207-3225).
ggatgctgacctccttata

SEQ ID NO: 101795 - DNA, 19 bp, Homo sapiens
  siRNA target sequence for STK36 (NM_015690.2,3503-3521).
gccacttgtcctttatcca

SEQ ID NO: 101796 - DNA, 19 bp, Homo sapiens
  siRNA target sequence for STK36 (NM_015690.2,3590-3608).
ctgtgcgggcacacactta

SEQ ID NO: 101797 - DNA, 19 bp, Homo sapiens
  siRNA target sequence for STK36 (NM_015690.2,3919-3937).
ccccagcggctcctagaaa

SEQ ID NO: 101798 - DNA, 19 bp, Homo sapiens
  siRNA target sequence for STK36 (NM_015690.2,4038-4056).
gggtgccagtgagaaacta

SEQ ID NO: 101799 - DNA, 19 bp, Homo sapiens
  siRNA target sequence for STK36 (NM_015690.2,4039-4057).
ggtgccagtgagaaactat

SEQ ID NO: 101800 - DNA, 19 bp, Homo sapiens
  siRNA target sequence for STK36 (NM_015690.2,4063-4081).
ctctctctggggaatcagt

SEQ ID NO: 101801 - DNA, 19 bp, Homo sapiens
  siRNA target sequence for STK38 (NM_007271.2,309-327).
cttgctcatccatgagtaa

SEQ ID NO: 101802 - DNA, 19 bp, Homo sapiens
  siRNA target sequence for STK38 (NM_007271.2,318-336).
ccatgagtaaccacacaaa

SEQ ID NO: 101803 - DNA, 19 bp, Homo sapiens
  siRNA target sequence for STK38 (NM_007271.2,322-340).
gagtaaccacacaaaggaa

SEQ ID NO: 101804 - DNA, 19 bp, Homo sapiens
  siRNA target sequence for STK38 (NM_007271.2,333-351).
caaaggaaagggtgacaat

SEQ ID NO: 101805 - DNA, 19 bp, Homo sapiens
  siRNA target sequence for STK38 (NM_007271.2,382-400).
caaccttatcgctcaacat

SEQ ID NO: 101806 - DNA, 19 bp, Homo sapiens
  siRNA target sequence for STK38 (NM_007271.2,385-403).
ccttatcgctcaacatgaa

SEQ ID NO: 101807 - DNA, 19 bp, Homo sapiens
  siRNA target sequence for STK38 (NM_007271.2,509-527).
gagtttcttcgtttgaaga

SEQ ID NO: 101808 - DNA, 19 bp, Homo sapiens
  siRNA target sequence for STK38 (NM_007271.2,539-557).
ggattggaagattttgagt

SEQ ID NO: 101809 - DNA, 19 bp, Homo sapiens
  siRNA target sequence for STK38 (NM_007271.2,588-606).
gtgaggtacggcttgttca

SEQ ID NO: 101810 - DNA, 19 bp, Homo sapiens
  siRNA target sequence for STK38 (NM_007271.2,618-636).
cgggacatgtgtatgcaat

SEQ ID NO: 101811 - DNA, 19 bp, Homo sapiens
  siRNA target sequence for STK38 (NM_007271.2,621-639).
gacatgtgtatgcaatgaa

SEQ ID NO: 101812 - DNA, 19 bp, Homo sapiens
  siRNA target sequence for STK38 (NM_007271.2,693-711).
cggagcgtgacattctagt

SEQ ID NO: 101813 - DNA, 19 bp, Homo sapiens
  siRNA target sequence for STK38 (NM_007271.2,723-741).
gtttgtgggttgtgaaaat

SEQ ID NO: 101814 - DNA, 19 bp, Homo sapiens
  siRNA target sequence for STK38 (NM_007271.2,750-768).
gttttcaggataagctaaa

SEQ ID NO: 101815 - DNA, 19 bp, Homo sapiens
  siRNA target sequence for STK38 (NM_007271.2,764-782).
ctaaacctctacctaatca

SEQ ID NO: 101816 - DNA, 19 bp, Homo sapiens
  siRNA target sequence for STK38 (NM_007271.2,803-821).
gacatgatgaccttgttga

SEQ ID NO: 101817 - DNA, 19 bp, Homo sapiens
  siRNA target sequence for STK38 (NM_007271.2,847-865).
ggagactcagttttatata

SEQ ID NO: 101818 - DNA, 19 bp, Homo sapiens
  siRNA target sequence for STK38 (NM_007271.2,952-970).
caagggccatgtgaaactt

SEQ ID NO: 101819 - DNA, 19 bp, Homo sapiens
  siRNA target sequence for STK38 (NM_007271.2,1057-1075).
cactttccagaacatgaat

SEQ ID NO: 101820 - DNA, 19 bp, Homo sapiens
  siRNA target sequence for STK38 (NM_007271.2,1206-1224).
cgcttggggtgatcatgta

SEQ ID NO: 101821 - DNA, 19 bp, Homo sapiens
  siRNA target sequence for STK38 (NM_007271.2,1237-1255).
cggctacccacctttctgt

SEQ ID NO: 101822 - DNA, 19 bp, Homo sapiens
  siRNA target sequence for STK38 (NM_007271.2,1261-1279).
gacccctcaagagacatat

SEQ ID NO: 101823 - DNA, 19 bp, Homo sapiens
  siRNA target sequence for STK38 (NM_007271.2,1263-1281).
cccctcaagagacatataa

SEQ ID NO: 101824 - DNA, 19 bp, Homo sapiens
  siRNA target sequence for STK38 (NM_007271.2,1436-1454).
ggcgttgactgggaacata

SEQ ID NO: 101825 - DNA, 19 bp, Homo sapiens
  siRNA target sequence for STK38 (NM_007271.2,1437-1455).
gcgttgactgggaacatat

SEQ ID NO: 101826 - DNA, 19 bp, Homo sapiens
  siRNA target sequence for STK38 (NM_007271.2,1464-1482).
gacctgctgcaatatctat

SEQ ID NO: 101827 - DNA, 19 bp, Homo sapiens
  siRNA target sequence for STK38 (NM_007271.2,1506-1524).
cctcaaacttcgatgagtt

SEQ ID NO: 101828 - DNA, 19 bp, Homo sapiens
  siRNA target sequence for STK38 (NM_007271.2,1551-1569).
cagtggccacaagtaatca

SEQ ID NO: 101829 - DNA, 19 bp, Homo sapiens
  siRNA target sequence for STK38 (NM_007271.2,1572-1590).
ctgagactgactacaagaa

SEQ ID NO: 101830 - DNA, 19 bp, Homo sapiens
  siRNA target sequence for STK38L (NM_015000.1,193-211).
ctacaacaacctttcctat

SEQ ID NO: 101831 - DNA, 19 bp, Homo sapiens
  siRNA target sequence for STK38L (NM_015000.1,399-417).
gagttcttacggctcaaaa

SEQ ID NO: 101832 - DNA, 19 bp, Homo sapiens
  siRNA target sequence for STK38L (NM_015000.1,491-509).
ggtccagaagaaagataca

SEQ ID NO: 101833 - DNA, 19 bp, Homo sapiens
  siRNA target sequence for STK38L (NM_015000.1,513-531).
catatctatgcaatgaaga

SEQ ID NO: 101834 - DNA, 19 bp, Homo sapiens
  siRNA target sequence for STK38L (NM_015000.1,536-554).
gagaaagtctgatatgctt

SEQ ID NO: 101835 - DNA, 19 bp, Homo sapiens
  siRNA target sequence for STK38L (NM_015000.1,578-596).
ccgagcagaaagagatatt

SEQ ID NO: 101836 - DNA, 19 bp, Homo sapiens
  siRNA target sequence for STK38L (NM_015000.1,616-634).
cctgggtggtgaagatgtt

SEQ ID NO: 101837 - DNA, 19 bp, Homo sapiens
  siRNA target sequence for STK38L (NM_015000.1,623-641).
ggtgaagatgttttacagt

SEQ ID NO: 101838 - DNA, 19 bp, Homo sapiens
  siRNA target sequence for STK38L (NM_015000.1,645-663).
caggataagaggaatcttt

SEQ ID NO: 101839 - DNA, 19 bp, Homo sapiens
  siRNA target sequence for STK38L (NM_015000.1,655-673).
ggaatctttatctaatcat

SEQ ID NO: 101840 - DNA, 19 bp, Homo sapiens
  siRNA target sequence for STK38L (NM_015000.1,845-863).
gggtcatgtaaaattatct

SEQ ID NO: 101841 - DNA, 19 bp, Homo sapiens
  siRNA target sequence for STK38L (NM_015000.1,847-865).
gtcatgtaaaattatctga

SEQ ID NO: 101842 - DNA, 19 bp, Homo sapiens
  siRNA target sequence for STK38L (NM_015000.1,870-888).
ggtttatgtacgggattaa

SEQ ID NO: 101843 - DNA, 19 bp, Homo sapiens
  siRNA target sequence for STK38L (NM_015000.1,871-889).
gtttatgtacgggattaaa

SEQ ID NO: 101844 - DNA, 19 bp, Homo sapiens
  siRNA target sequence for STK38L (NM_015000.1,899-917).
caggactgaattttataga

SEQ ID NO: 101845 - DNA, 19 bp, Homo sapiens
  siRNA target sequence for STK38L (NM_015000.1,1062-1080).
cagactggttacaacaaat

SEQ ID NO: 101846 - DNA, 19 bp, Homo sapiens
  siRNA target sequence for STK38L (NM_015000.1,1096-1114).
ctttgggagtgattatgta

SEQ ID NO: 101847 - DNA, 19 bp, Homo sapiens
  siRNA target sequence for STK38L (NM_015000.1,1106-1124).
gattatgtatgaaatgcta

SEQ ID NO: 101848 - DNA, 19 bp, Homo sapiens
  siRNA target sequence for STK38L (NM_015000.1,1186-1204).
ggaaagaaactctggtatt

SEQ ID NO: 101849 - DNA, 19 bp, Homo sapiens
  siRNA target sequence for STK38L (NM_015000.1,1210-1228).
cagaggtacctatatctga

SEQ ID NO: 101850 - DNA, 19 bp, Homo sapiens
  siRNA target sequence for STK38L (NM_015000.1,1233-1251).
gccaaggacttaattctca

SEQ ID NO: 101851 - DNA, 19 bp, Homo sapiens
  siRNA target sequence for STK38L (NM_015000.1,1329-1347).
gtcgactgggagcacataa

SEQ ID NO: 101852 - DNA, 19 bp, Homo sapiens
  siRNA target sequence for STK38L (NM_015000.1,1357-1375).
cagcagcaatccctataga

SEQ ID NO: 101853 - DNA, 19 bp, Homo sapiens
  siRNA target sequence for STK38L (NM_015000.1,1359-1377).
gcagcaatccctatagaaa

SEQ ID NO: 101854 - DNA, 19 bp, Homo sapiens
  siRNA target sequence for STK38L (NM_015000.1,1360-1378).
cagcaatccctatagaaat

SEQ ID NO: 101855 - DNA, 19 bp, Homo sapiens
  siRNA target sequence for STK38L (NM_015000.1,1362-1380).
gcaatccctatagaaatca

SEQ ID NO: 101856 - DNA, 19 bp, Homo sapiens
  siRNA target sequence for STK38L (NM_015000.1,1415-1433).
ccctgaatctgatatttta

SEQ ID NO: 101857 - DNA, 19 bp, Homo sapiens
  siRNA target sequence for STK38L (NM_015000.1,1434-1452).
caaccagtgccaaatacca

SEQ ID NO: 101858 - DNA, 19 bp, Homo sapiens
  siRNA target sequence for STK38L (NM_015000.1,1450-1468).
ccacagaaccggactacaa

SEQ ID NO: 101859 - DNA, 19 bp, Homo sapiens
  siRNA target sequence for STK38L (NM_015000.1,1476-1494).
gactgggtttttctcaatt

SEQ ID NO: 101860 - DNA, 19 bp, Homo sapiens
  siRNA target sequence for STK38L (NM_015000.1,1482-1500).
gtttttctcaattatacct

SEQ ID NO: 101861 - DNA, 19 bp, Homo sapiens
  siRNA target sequence for STK38L (NM_015000.1,1534-1552).
ctatccccacctacatgaa

SEQ ID NO: 101862 - DNA, 19 bp, Homo sapiens
  siRNA target sequence for STK39 (NM_013233.1,433-451).
ggcaagaacgtgtagcaat

SEQ ID NO: 101863 - DNA, 19 bp, Homo sapiens
  siRNA target sequence for STK39 (NM_013233.1,434-452).
gcaagaacgtgtagcaata

SEQ ID NO: 101864 - DNA, 19 bp, Homo sapiens
  siRNA target sequence for STK39 (NM_013233.1,435-453).
caagaacgtgtagcaataa

SEQ ID NO: 101865 - DNA, 19 bp, Homo sapiens
  siRNA target sequence for STK39 (NM_013233.1,447-465).
gcaataaaacggatcaact

SEQ ID NO: 101866 - DNA, 19 bp, Homo sapiens
  siRNA target sequence for STK39 (NM_013233.1,448-466).
caataaaacggatcaactt

SEQ ID NO: 101867 - DNA, 19 bp, Homo sapiens
  siRNA target sequence for STK39 (NM_013233.1,535-553).
ccaacgtagtgacctatta

SEQ ID NO: 101868 - DNA, 19 bp, Homo sapiens
  siRNA target sequence for STK39 (NM_013233.1,545-563).
gacctattacacctctttt

SEQ ID NO: 101869 - DNA, 19 bp, Homo sapiens
  siRNA target sequence for STK39 (NM_013233.1,587-605).
ggtcatgaaattactaagt

SEQ ID NO: 101870 - DNA, 19 bp, Homo sapiens
  siRNA target sequence for STK39 (NM_013233.1,606-624).
ggaggttcaatgttggata

SEQ ID NO: 101871 - DNA, 19 bp, Homo sapiens
  siRNA target sequence for STK39 (NM_013233.1,607-625).
gaggttcaatgttggatat

SEQ ID NO: 101872 - DNA, 19 bp, Homo sapiens
  siRNA target sequence for STK39 (NM_013233.1,679-697).
caataatagcaacaattct

SEQ ID NO: 101873 - DNA, 19 bp, Homo sapiens
  siRNA target sequence for STK39 (NM_013233.1,752-770).
ggatttgaaagctggtaat

SEQ ID NO: 101874 - DNA, 19 bp, Homo sapiens
  siRNA target sequence for STK39 (NM_013233.1,779-797).
gggtgaggatggttcagta

SEQ ID NO: 101875 - DNA, 19 bp, Homo sapiens
  siRNA target sequence for STK39 (NM_013233.1,783-801).
gaggatggttcagtacaaa

SEQ ID NO: 101876 - DNA, 19 bp, Homo sapiens
  siRNA target sequence for STK39 (NM_013233.1,947-965).
gtggagttttggaataact

SEQ ID NO: 101877 - DNA, 19 bp, Homo sapiens
  siRNA target sequence for STK39 (NM_013233.1,982-1000).
caggagcagcgccttatca

SEQ ID NO: 101878 - DNA, 19 bp, Homo sapiens
  siRNA target sequence for STK39 (NM_013233.1,985-1003).
gagcagcgccttatcacaa

SEQ ID NO: 101879 - DNA, 19 bp, Homo sapiens
  siRNA target sequence for STK39 (NM_013233.1,987-1005).
gcagcgccttatcacaaat

SEQ ID NO: 101880 - DNA, 19 bp, Homo sapiens
  siRNA target sequence for STK39 (NM_013233.1,988-1006).
cagcgccttatcacaaata

SEQ ID NO: 101881 - DNA, 19 bp, Homo sapiens
  siRNA target sequence for STK39 (NM_013233.1,992-1010).
gccttatcacaaatatcct

SEQ ID NO: 101882 - DNA, 19 bp, Homo sapiens
  siRNA target sequence for STK39 (NM_013233.1,1001-1019).
caaatatcctcccatgaaa

SEQ ID NO: 101883 - DNA, 19 bp, Homo sapiens
  siRNA target sequence for STK39 (NM_013233.1,1008-1026).
cctcccatgaaagtgttaa

SEQ ID NO: 101884 - DNA, 19 bp, Homo sapiens
  siRNA target sequence for STK39 (NM_013233.1,1094-1112).
gtacggcaagtcctttaga

SEQ ID NO: 101885 - DNA, 19 bp, Homo sapiens
  siRNA target sequence for STK39 (NM_013233.1,1099-1117).
gcaagtcctttagaaaatt

SEQ ID NO: 101886 - DNA, 19 bp, Homo sapiens
  siRNA target sequence for STK39 (NM_013233.1,1223-1241).
gaagctgcttacaagaaca

SEQ ID NO: 101887 - DNA, 19 bp, Homo sapiens
  siRNA target sequence for STK39 (NM_013233.1,1252-1270).
cccaaagagccaaaaaggt

SEQ ID NO: 101888 - DNA, 19 bp, Homo sapiens
  siRNA target sequence for STK39 (NM_013233.1,1253-1271).
ccaaagagccaaaaaggta

SEQ ID NO: 101889 - DNA, 19 bp, Homo sapiens
  siRNA target sequence for STK39 (NM_013233.1,1386-1404).
gaaaagtcacgaagagtaa

SEQ ID NO: 101890 - DNA, 19 bp, Homo sapiens
  siRNA target sequence for STK39 (NM_013233.1,1391-1409).
gtcacgaagagtaaaagaa

SEQ ID NO: 101891 - DNA, 19 bp, Homo sapiens
  siRNA target sequence for STK39 (NM_013233.1,1438-1456).
gcaccatccccgaacaaat

SEQ ID NO: 101892 - DNA, 19 bp, Homo sapiens
  siRNA target sequence for STK39 (NM_013233.1,1441-1459).
ccatccccgaacaaataca

SEQ ID NO: 101893 - DNA, 19 bp, Homo sapiens
  siRNA target sequence for STK39 (NM_013233.1,1484-1502).
gggcccacccaatgctaat

SEQ ID NO: 101894 - DNA, 19 bp, Homo sapiens
  siRNA target sequence for STK39 (NM_013233.1,1486-1504).
gcccacccaatgctaatga

SEQ ID NO: 101895 - DNA, 19 bp, Homo sapiens
  siRNA target sequence for STK39 (NM_013233.1,1487-1505).
cccacccaatgctaatgaa

SEQ ID NO: 101896 - DNA, 19 bp, Homo sapiens
  siRNA target sequence for STK39 (NM_013233.1,1528-1546).
gtgccgtgaacctcgtttt

SEQ ID NO: 101897 - DNA, 19 bp, Homo sapiens
  siRNA target sequence for STK39 (NM_013233.1,1530-1548).
gccgtgaacctcgttttga

SEQ ID NO: 101898 - DNA, 19 bp, Homo sapiens
  siRNA target sequence for STK39 (NM_013233.1,1532-1550).
cgtgaacctcgttttgaga

SEQ ID NO: 101899 - DNA, 19 bp, Homo sapiens
  siRNA target sequence for STK39 (NM_013233.1,1533-1551).
gtgaacctcgttttgagat

SEQ ID NO: 101900 - DNA, 19 bp, Homo sapiens
  siRNA target sequence for STK39 (NM_013233.1,1535-1553).
gaacctcgttttgagatta

SEQ ID NO: 101901 - DNA, 19 bp, Homo sapiens
  siRNA target sequence for STK39 (NM_013233.1,1538-1556).
cctcgttttgagattaaga

SEQ ID NO: 101902 - DNA, 19 bp, Homo sapiens
  siRNA target sequence for STK39 (NM_013233.1,1569-1587).
gaacttaatgacatacgat

SEQ ID NO: 101903 - DNA, 19 bp, Homo sapiens
  siRNA target sequence for STK39 (NM_013233.1,1578-1596).
gacatacgatttgagttta

SEQ ID NO: 101904 - DNA, 19 bp, Homo sapiens
  siRNA target sequence for STK39 (NM_013233.1,1580-1598).
catacgatttgagtttact

SEQ ID NO: 101905 - DNA, 19 bp, Homo sapiens
  siRNA target sequence for STK39 (NM_013233.1,1655-1673).
ggatggtcacgatgtagtt

SEQ ID NO: 101906 - DNA, 19 bp, Homo sapiens
  siRNA target sequence for STK39 (NM_013233.1,1656-1674).
gatggtcacgatgtagtta

SEQ ID NO: 101907 - DNA, 19 bp, Homo sapiens
  siRNA target sequence for STK39 (NM_013233.1,1660-1678).
gtcacgatgtagttatagt

SEQ ID NO: 101908 - DNA, 19 bp, Homo sapiens
  siRNA target sequence for STK39 (NM_013233.1,1760-1778).
gtcggagattcctgatgaa

SEQ ID NO: 101909 - DNA, 19 bp, Homo sapiens
  siRNA target sequence for STK4 (NM_006282.2,159-177).
caaacaaccagaagaagta

SEQ ID NO: 101910 - DNA, 19 bp, Homo sapiens
  siRNA target sequence for STK4 (NM_006282.2,209-227).
cctatggcagcgtatacaa

SEQ ID NO: 101911 - DNA, 19 bp, Homo sapiens
  siRNA target sequence for STK4 (NM_006282.2,210-228).
ctatggcagcgtatacaaa

SEQ ID NO: 101912 - DNA, 19 bp, Homo sapiens
  siRNA target sequence for STK4 (NM_006282.2,214-232).
ggcagcgtatacaaagcta

SEQ ID NO: 101913 - DNA, 19 bp, Homo sapiens
  siRNA target sequence for STK4 (NM_006282.2,215-233).
gcagcgtatacaaagctat

SEQ ID NO: 101914 - DNA, 19 bp, Homo sapiens
  siRNA target sequence for STK4 (NM_006282.2,216-234).
cagcgtatacaaagctatt

SEQ ID NO: 101915 - DNA, 19 bp, Homo sapiens
  siRNA target sequence for STK4 (NM_006282.2,218-236).
gcgtatacaaagctattca

SEQ ID NO: 101916 - DNA, 19 bp, Homo sapiens
  siRNA target sequence for STK4 (NM_006282.2,245-263).
ccggccagattgttgctat

SEQ ID NO: 101917 - DNA, 19 bp, Homo sapiens
  siRNA target sequence for STK4 (NM_006282.2,246-264).
cggccagattgttgctatt

SEQ ID NO: 101918 - DNA, 19 bp, Homo sapiens
  siRNA target sequence for STK4 (NM_006282.2,252-270).
gattgttgctattaagcaa

SEQ ID NO: 101919 - DNA, 19 bp, Homo sapiens
  siRNA target sequence for STK4 (NM_006282.2,288-306).
cctccaggagataatcaaa

SEQ ID NO: 101920 - DNA, 19 bp, Homo sapiens
  siRNA target sequence for STK4 (NM_006282.2,335-353).
gccctcatgtagtcaaata

SEQ ID NO: 101921 - DNA, 19 bp, Homo sapiens
  siRNA target sequence for STK4 (NM_006282.2,377-395).
cagacttatggatcgttat

SEQ ID NO: 101922 - DNA, 19 bp, Homo sapiens
  siRNA target sequence for STK4 (NM_006282.2,408-426).
ggctggttctgtatctgat

SEQ ID NO: 101923 - DNA, 19 bp, Homo sapiens
  siRNA target sequence for STK4 (NM_006282.2,410-428).
ctggttctgtatctgatat

SEQ ID NO: 101924 - DNA, 19 bp, Homo sapiens
  siRNA target sequence for STK4 (NM_006282.2,413-431).
gttctgtatctgatatcat

SEQ ID NO: 101925 - DNA, 19 bp, Homo sapiens
  siRNA target sequence for STK4 (NM_006282.2,418-436).
gtatctgatatcattcgat

SEQ ID NO: 101926 - DNA, 19 bp, Homo sapiens
  siRNA target sequence for STK4 (NM_006282.2,424-442).
gatatcattcgattacgaa

SEQ ID NO: 101927 - DNA, 19 bp, Homo sapiens
  siRNA target sequence for STK4 (NM_006282.2,429-447).
cattcgattacgaaataaa

SEQ ID NO: 101928 - DNA, 19 bp, Homo sapiens
  siRNA target sequence for STK4 (NM_006282.2,433-451).
cgattacgaaataaaacgt

SEQ ID NO: 101929 - DNA, 19 bp, Homo sapiens
  siRNA target sequence for STK4 (NM_006282.2,434-452).
gattacgaaataaaacgtt

SEQ ID NO: 101930 - DNA, 19 bp, Homo sapiens
  siRNA target sequence for STK4 (NM_006282.2,460-478).
gatgaaatagctacaatat

SEQ ID NO: 101931 - DNA, 19 bp, Homo sapiens
  siRNA target sequence for STK4 (NM_006282.2,595-613).
ggggtagcaggtcaactta

SEQ ID NO: 101932 - DNA, 19 bp, Homo sapiens
  siRNA target sequence for STK4 (NM_006282.2,597-615).
ggtagcaggtcaacttaca

SEQ ID NO: 101933 - DNA, 19 bp, Homo sapiens
  siRNA target sequence for STK4 (NM_006282.2,605-623).
gtcaacttacagataccat

SEQ ID NO: 101934 - DNA, 19 bp, Homo sapiens
  siRNA target sequence for STK4 (NM_006282.2,621-639).
catggccaagcggaataca

SEQ ID NO: 101935 - DNA, 19 bp, Homo sapiens
  siRNA target sequence for STK4 (NM_006282.2,673-691).
gtgattcaggaaattggat

SEQ ID NO: 101936 - DNA, 19 bp, Homo sapiens
  siRNA target sequence for STK4 (NM_006282.2,780-798).
gagggcaatcttcatgatt

SEQ ID NO: 101937 - DNA, 19 bp, Homo sapiens
  siRNA target sequence for STK4 (NM_006282.2,792-810).
catgattcctacaaatcct

SEQ ID NO: 101938 - DNA, 19 bp, Homo sapiens
  siRNA target sequence for STK4 (NM_006282.2,834-852).
gctatggtcagataacttt

SEQ ID NO: 101939 - DNA, 19 bp, Homo sapiens
  siRNA target sequence for STK4 (NM_006282.2,862-880).
gtgaaacagtgtcttgtaa

SEQ ID NO: 101940 - DNA, 19 bp, Homo sapiens
  siRNA target sequence for STK4 (NM_006282.2,941-959).
ccaaaggagtgtcaatact

SEQ ID NO: 101941 - DNA, 19 bp, Homo sapiens
  siRNA target sequence for STK4 (NM_006282.2,951-969).
gtcaatactgcgagactta

SEQ ID NO: 101942 - DNA, 19 bp, Homo sapiens
  siRNA target sequence for STK4 (NM_006282.2,953-971).
caatactgcgagacttaat

SEQ ID NO: 101943 - DNA, 19 bp, Homo sapiens
  siRNA target sequence for STK4 (NM_006282.2,1131-1149).
gactgatggagccaatact

SEQ ID NO: 101944 - DNA, 19 bp, Homo sapiens
  siRNA target sequence for STK4 (NM_006282.2,1133-1151).
ctgatggagccaatactat

SEQ ID NO: 101945 - DNA, 19 bp, Homo sapiens
  siRNA target sequence for STK4 (NM_006282.2,1135-1153).
gatggagccaatactatga

SEQ ID NO: 101946 - DNA, 19 bp, Homo sapiens
  siRNA target sequence for STK4 (NM_006282.2,1339-1357).
ggtccactgaaaaattctt

SEQ ID NO: 101947 - DNA, 19 bp, Homo sapiens
  siRNA target sequence for STK4 (NM_006282.2,1381-1399).
ggagactacgagtttctta

SEQ ID NO: 101948 - DNA, 19 bp, Homo sapiens
  siRNA target sequence for STK4 (NM_006282.2,1382-1400).
gagactacgagtttcttaa

SEQ ID NO: 101949 - DNA, 19 bp, Homo sapiens
  siRNA target sequence for STK4 (NM_006282.2,1384-1402).
gactacgagtttcttaaga

SEQ ID NO: 101950 - DNA, 19 bp, Homo sapiens
  siRNA target sequence for STK4 (NM_006282.2,1386-1404).
ctacgagtttcttaagagt

SEQ ID NO: 101951 - DNA, 19 bp, Homo sapiens
  siRNA target sequence for STK6 (NM_003600.2,520-538).
ccagcgcattcctttgcaa

SEQ ID NO: 101952 - DNA, 19 bp, Homo sapiens
  siRNA target sequence for STK6 (NM_003600.2,558-576).
gtcacaagccggttcagaa

SEQ ID NO: 101953 - DNA, 19 bp, Homo sapiens
  siRNA target sequence for STK6 (NM_003600.2,917-935).
caccttcggcatcctaata

SEQ ID NO: 101954 - DNA, 19 bp, Homo sapiens
  siRNA target sequence for STK6 (NM_003600.2,923-941).
cggcatcctaatattctta

SEQ ID NO: 101955 - DNA, 19 bp, Homo sapiens
  siRNA target sequence for STK6 (NM_003600.2,996-1014).
caccacttggaacagttta

SEQ ID NO: 101956 - DNA, 19 bp, Homo sapiens
  siRNA target sequence for STK6 (NM_003600.2,998-1016).
ccacttggaacagtttata

SEQ ID NO: 101957 - DNA, 19 bp, Homo sapiens
  siRNA target sequence for STK6 (NM_003600.2,1098-1116).
gtcattcgaagagagttat

SEQ ID NO: 101958 - DNA, 19 bp, Homo sapiens
  siRNA target sequence for STK6 (NM_003600.2,1377-1395).
gaatatcacgggttgaatt

SEQ ID NO: 101959 - DNA, 19 bp, Homo sapiens
  siRNA target sequence for STK6 (NM_003600.2,1383-1401).
cacgggttgaattcacatt

SEQ ID NO: 101960 - DNA, 19 bp, Homo sapiens
  siRNA target sequence for STK6 (NM_003600.2,1547-1565).
gaatcagctagcaaacagt

SEQ ID NO: 101961 - DNA, 19 bp, Homo sapiens
  siRNA target sequence for SYK (NM_003177.3,246-264).
catgagtgatgggctttat

SEQ ID NO: 101962 - DNA, 19 bp, Homo sapiens
  siRNA target sequence for SYK (NM_003177.3,645-663).
gccttggttccatggaaaa

SEQ ID NO: 101963 - DNA, 19 bp, Homo sapiens
  siRNA target sequence for SYK (NM_003177.3,646-664).
ccttggttccatggaaaaa

SEQ ID NO: 101964 - DNA, 19 bp, Homo sapiens
  siRNA target sequence for SYK (NM_003177.3,693-711).
cctgataggatcaaagaca

SEQ ID NO: 101965 - DNA, 19 bp, Homo sapiens
  siRNA target sequence for SYK (NM_003177.3,827-845).
ccatccccgagggaaagaa

SEQ ID NO: 101966 - DNA, 19 bp, Homo sapiens
  siRNA target sequence for SYK (NM_003177.3,860-878).
ggcagctagtcgagcatta

SEQ ID NO: 101967 - DNA, 19 bp, Homo sapiens
  siRNA target sequence for SYK (NM_003177.3,861-879).
gcagctagtcgagcattat

SEQ ID NO: 101968 - DNA, 19 bp, Homo sapiens
  siRNA target sequence for SYK (NM_003177.3,862-880).
cagctagtcgagcattatt

SEQ ID NO: 101969 - DNA, 19 bp, Homo sapiens
  siRNA target sequence for SYK (NM_003177.3,864-882).
gctagtcgagcattattct

SEQ ID NO: 101970 - DNA, 19 bp, Homo sapiens
  siRNA target sequence for SYK (NM_003177.3,865-883).
ctagtcgagcattattctt

SEQ ID NO: 101971 - DNA, 19 bp, Homo sapiens
  siRNA target sequence for SYK (NM_003177.3,868-886).
gtcgagcattattcttata

SEQ ID NO: 101972 - DNA, 19 bp, Homo sapiens
  siRNA target sequence for SYK (NM_003177.3,873-891).
gcattattcttataaagca

SEQ ID NO: 101973 - DNA, 19 bp, Homo sapiens
  siRNA target sequence for SYK (NM_003177.3,895-913).
ggtttgttaagagttctta

SEQ ID NO: 101974 - DNA, 19 bp, Homo sapiens
  siRNA target sequence for SYK (NM_003177.3,910-928).
cttactgtcccatgtcaaa

SEQ ID NO: 101975 - DNA, 19 bp, Homo sapiens
  siRNA target sequence for SYK (NM_003177.3,936-954).
cacacagggaaatgttaat

SEQ ID NO: 101976 - DNA, 19 bp, Homo sapiens
  siRNA target sequence for SYK (NM_003177.3,1003-1021).
gcgggtggaataatctcaa

SEQ ID NO: 101977 - DNA, 19 bp, Homo sapiens
  siRNA target sequence for SYK (NM_003177.3,1092-1110).
gagtactgtgtcattcaat

SEQ ID NO: 101978 - DNA, 19 bp, Homo sapiens
  siRNA target sequence for SYK (NM_003177.3,1308-1326).
gggctactaccaaatgaaa

SEQ ID NO: 101979 - DNA, 19 bp, Homo sapiens
  siRNA target sequence for SYK (NM_003177.3,1309-1327).
ggctactaccaaatgaaaa

SEQ ID NO: 101980 - DNA, 19 bp, Homo sapiens
  siRNA target sequence for SYK (NM_003177.3,1370-1388).
ccaatgaccccgctcttaa

SEQ ID NO: 101981 - DNA, 19 bp, Homo sapiens
  siRNA target sequence for SYK (NM_003177.3,1371-1389).
caatgaccccgctcttaaa

SEQ ID NO: 101982 - DNA, 19 bp, Homo sapiens
  siRNA target sequence for SYK (NM_003177.3,1379-1397).
ccgctcttaaagatgagtt

SEQ ID NO: 101983 - DNA, 19 bp, Homo sapiens
  siRNA target sequence for SYK (NM_003177.3,1380-1398).
cgctcttaaagatgagtta

SEQ ID NO: 101984 - DNA, 19 bp, Homo sapiens
  siRNA target sequence for SYK (NM_003177.3,1381-1399).
gctcttaaagatgagttat

SEQ ID NO: 101985 - DNA, 19 bp, Homo sapiens
  siRNA target sequence for SYK (NM_003177.3,1382-1400).
ctcttaaagatgagttatt

SEQ ID NO: 101986 - DNA, 19 bp, Homo sapiens
  siRNA target sequence for SYK (NM_003177.3,1501-1519).
gaacttggtcccctcaata

SEQ ID NO: 101987 - DNA, 19 bp, Homo sapiens
  siRNA target sequence for SYK (NM_003177.3,1504-1522).
cttggtcccctcaataagt

SEQ ID NO: 101988 - DNA, 19 bp, Homo sapiens
  siRNA target sequence for SYK (NM_003177.3,1507-1525).
ggtcccctcaataagtatt

SEQ ID NO: 101989 - DNA, 19 bp, Homo sapiens
  siRNA target sequence for SYK (NM_003177.3,1508-1526).
gtcccctcaataagtattt

SEQ ID NO: 101990 - DNA, 19 bp, Homo sapiens
  siRNA target sequence for SYK (NM_003177.3,1768-1786).
ccggaatgcatcaactact

SEQ ID NO: 101991 - DNA, 19 bp, Homo sapiens
  siRNA target sequence for SYK (NM_003177.3,1769-1787).
cggaatgcatcaactacta

SEQ ID NO: 101992 - DNA, 19 bp, Homo sapiens
  siRNA target sequence for SYK (NM_003177.3,1771-1789).
gaatgcatcaactactaca

SEQ ID NO: 101993 - DNA, 19 bp, Homo sapiens
  siRNA target sequence for SYK (NM_003177.3,1860-1878).
gccatatcgagggatgaaa

SEQ ID NO: 101994 - DNA, 19 bp, Homo sapiens
  siRNA target sequence for SYK (NM_003177.3,1883-1901).
gtgaagtcaccgctatgtt

SEQ ID NO: 101995 - DNA, 19 bp, Homo sapiens
  siRNA target sequence for SYK (NM_003177.3,1888-1906).
gtcaccgctatgttagaga

SEQ ID NO: 101996 - DNA, 19 bp, Homo sapiens
  siRNA target sequence for SYK (NM_003177.3,1890-1908).
caccgctatgttagagaaa

SEQ ID NO: 101997 - DNA, 19 bp, Homo sapiens
  siRNA target sequence for SYK (NM_003177.3,1943-1961).
gagagatgtacgatctcat

SEQ ID NO: 101998 - DNA, 19 bp, Homo sapiens
  siRNA target sequence for SYK (NM_003177.3,1973-1991).
ggacatacgatgtggaaaa

SEQ ID NO: 101999 - DNA, 19 bp, Homo sapiens
  siRNA target sequence for SYK (NM_003177.3,2017-2035).
ctgcggctgcgcaattact

SEQ ID NO: 102000 - DNA, 19 bp, Homo sapiens
  siRNA target sequence for SYK (NM_003177.3,2020-2038).
cggctgcgcaattactact

SEQ ID NO: 102001 - DNA, 19 bp, Homo sapiens
  siRNA target sequence for SYK (NM_003177.3,2022-2040).
gctgcgcaattactactat

SEQ ID NO: 102002 - DNA, 19 bp, Homo sapiens
  siRNA target sequence for SYN3 (NM_003490.2,202-220).
ggatccagcctttttagct

SEQ ID NO: 102003 - DNA, 19 bp, Homo sapiens
  siRNA target sequence for SYN3 (NM_003490.2,288-306).
cacgcccattgttcaaaga

SEQ ID NO: 102004 - DNA, 19 bp, Homo sapiens
  siRNA target sequence for SYN3 (NM_003490.2,341-359).
cagactggtcgaagtattt

SEQ ID NO: 102005 - DNA, 19 bp, Homo sapiens
  siRNA target sequence for SYN3 (NM_003490.2,345-363).
ctggtcgaagtatttccat

SEQ ID NO: 102006 - DNA, 19 bp, Homo sapiens
  siRNA target sequence for SYN3 (NM_003490.2,462-480).
catgcaggtcgtgagaaat

SEQ ID NO: 102007 - DNA, 19 bp, Homo sapiens
  siRNA target sequence for SYN3 (NM_003490.2,619-637).
ctctactccgtctacaact

SEQ ID NO: 102008 - DNA, 19 bp, Homo sapiens
  siRNA target sequence for SYN3 (NM_003490.2,706-724).
ccgcttgtggagcaaacat

SEQ ID NO: 102009 - DNA, 19 bp, Homo sapiens
  siRNA target sequence for SYN3 (NM_003490.2,708-726).
gcttgtggagcaaacattt

SEQ ID NO: 102010 - DNA, 19 bp, Homo sapiens
  siRNA target sequence for SYN3 (NM_003490.2,796-814).
gctggaatgggaaagatca

SEQ ID NO: 102011 - DNA, 19 bp, Homo sapiens
  siRNA target sequence for SYN3 (NM_003490.2,912-930).
catccgcatccagaaaatt

SEQ ID NO: 102012 - DNA, 19 bp, Homo sapiens
  siRNA target sequence for SYN3 (NM_003490.2,916-934).
cgcatccagaaaattggat

SEQ ID NO: 102013 - DNA, 19 bp, Homo sapiens
  siRNA target sequence for SYN3 (NM_003490.2,1045-1063).
gacagctgctcggaaatgt

SEQ ID NO: 102014 - DNA, 19 bp, Homo sapiens
  siRNA target sequence for SYN3 (NM_003490.2,1195-1213).
gaccttgttgtctccaaaa

SEQ ID NO: 102015 - DNA, 19 bp, Homo sapiens
  siRNA target sequence for SYN3 (NM_003490.2,1266-1284).
ggctccacagattaaatca

SEQ ID NO: 102016 - DNA, 19 bp, Homo sapiens
  siRNA target sequence for SYN3 (NM_133633.1,1341-1359).
cccacctccgcaagcaaat

SEQ ID NO: 102017 - DNA, 19 bp, Homo sapiens
  siRNA target sequence for SYN3 (NM_133633.1,1343-1361).
cacctccgcaagcaaatct

SEQ ID NO: 102018 - DNA, 19 bp, Homo sapiens
  siRNA target sequence for SYN3 (NM_133633.1,1345-1363).
cctccgcaagcaaatctca

SEQ ID NO: 102019 - DNA, 19 bp, Homo sapiens
  siRNA target sequence for TAP1 (NM_000593.4,757-775).
ccgccttcgttgtcagtta

SEQ ID NO: 102020 - DNA, 19 bp, Homo sapiens
  siRNA target sequence for TAP1 (NM_000593.4,758-776).
cgccttcgttgtcagttat

SEQ ID NO: 102021 - DNA, 19 bp, Homo sapiens
  siRNA target sequence for TAP1 (NM_000593.4,761-779).
cttcgttgtcagttatgca

SEQ ID NO: 102022 - DNA, 19 bp, Homo sapiens
  siRNA target sequence for TAP1 (NM_000593.4,942-960).
ggggagatggccattccat

SEQ ID NO: 102023 - DNA, 19 bp, Homo sapiens
  siRNA target sequence for TAP1 (NM_000593.4,977-995).
cactgactggattctacaa

SEQ ID NO: 102024 - DNA, 19 bp, Homo sapiens
  siRNA target sequence for TAP1 (NM_000593.4,1013-1031).
cttcactcgaaacttaact

SEQ ID NO: 102025 - DNA, 19 bp, Homo sapiens
  siRNA target sequence for TAP1 (NM_000593.4,1077-1095).
ggtgacgggatctataaca

SEQ ID NO: 102026 - DNA, 19 bp, Homo sapiens
  siRNA target sequence for TAP1 (NM_000593.4,1078-1096).
gtgacgggatctataacaa

SEQ ID NO: 102027 - DNA, 19 bp, Homo sapiens
  siRNA target sequence for TAP1 (NM_000593.4,1080-1098).
gacgggatctataacaaca

SEQ ID NO: 102028 - DNA, 19 bp, Homo sapiens
  siRNA target sequence for TAP1 (NM_000593.4,1152-1170).
cgccaggagacggagtttt

SEQ ID NO: 102029 - DNA, 19 bp, Homo sapiens
  siRNA target sequence for TAP1 (NM_000593.4,1153-1171).
gccaggagacggagttttt

SEQ ID NO: 102030 - DNA, 19 bp, Homo sapiens
  siRNA target sequence for TAP1 (NM_000593.4,1182-1200).
cagacaggtaacatcatgt

SEQ ID NO: 102031 - DNA, 19 bp, Homo sapiens
  siRNA target sequence for TAP1 (NM_000593.4,1220-1238).
gtccaccctgagtgattct

SEQ ID NO: 102032 - DNA, 19 bp, Homo sapiens
  siRNA target sequence for TAP1 (NM_000593.4,1457-1475).
gtcggccatgcctacagtt

SEQ ID NO: 102033 - DNA, 19 bp, Homo sapiens
  siRNA target sequence for TAP1 (NM_000593.4,1466-1484).
gcctacagttcgaagcttt

SEQ ID NO: 102034 - DNA, 19 bp, Homo sapiens
  siRNA target sequence for TAP1 (NM_000593.4,1496-1514).
gggcgaagcccagaagttt

SEQ ID NO: 102035 - DNA, 19 bp, Homo sapiens
  siRNA target sequence for TAP1 (NM_000593.4,1497-1515).
ggcgaagcccagaagttta

SEQ ID NO: 102036 - DNA, 19 bp, Homo sapiens
  siRNA target sequence for TAP1 (NM_000593.4,1577-1595).
ctcctggaccactagtatt

SEQ ID NO: 102037 - DNA, 19 bp, Homo sapiens
  siRNA target sequence for TAP1 (NM_000593.4,1670-1688).
gaaccttgtcacatttgtt

SEQ ID NO: 102038 - DNA, 19 bp, Homo sapiens
  siRNA target sequence for TAP1 (NM_000593.4,1758-1776).
gtgggctcctcagagaaaa

SEQ ID NO: 102039 - DNA, 19 bp, Homo sapiens
  siRNA target sequence for TAP1 (NM_000593.4,1821-1839).
ctgttgactcccttacact

SEQ ID NO: 102040 - DNA, 19 bp, Homo sapiens
  siRNA target sequence for TAP1 (NM_000593.4,1882-1900).
caaaccgcccagatgtctt

SEQ ID NO: 102041 - DNA, 19 bp, Homo sapiens
  siRNA target sequence for TAP1 (NM_000593.4,2299-2317).
cgttggcccgagcattgat

SEQ ID NO: 102042 - DNA, 19 bp, Homo sapiens
  siRNA target sequence for TAP1 (NM_000593.4,2319-2337).
cggaaaccgtgtgtactta

SEQ ID NO: 102043 - DNA, 19 bp, Homo sapiens
  siRNA target sequence for TAP1 (NM_000593.4,2320-2338).
ggaaaccgtgtgtacttat

SEQ ID NO: 102044 - DNA, 19 bp, Homo sapiens
  siRNA target sequence for TAP2 (NM_000544.2,139-157).
gtggacgcggctttactgt

SEQ ID NO: 102045 - DNA, 19 bp, Homo sapiens
  siRNA target sequence for TAP2 (NM_000544.2,594-612).
gacattaatccctcactat

SEQ ID NO: 102046 - DNA, 19 bp, Homo sapiens
  siRNA target sequence for TAP2 (NM_000544.2,609-627).
ctattctggtcgtgtgatt

SEQ ID NO: 102047 - DNA, 19 bp, Homo sapiens
  siRNA target sequence for TAP2 (NM_000544.2,746-764).
ccatgtctcgaatcaactt

SEQ ID NO: 102048 - DNA, 19 bp, Homo sapiens
  siRNA target sequence for TAP2 (NM_000544.2,767-785).
ggatccgggagcagctttt

SEQ ID NO: 102049 - DNA, 19 bp, Homo sapiens
  siRNA target sequence for TAP2 (NM_000544.2,862-880).
gataccaccctgatgagta

SEQ ID NO: 102050 - DNA, 19 bp, Homo sapiens
  siRNA target sequence for TAP2 (NM_000544.2,943-961).
ggcttcatgctcagcatat

SEQ ID NO: 102051 - DNA, 19 bp, Homo sapiens
  siRNA target sequence for TAP2 (NM_000544.2,990-1008).
gcacatgcccttcacaata

SEQ ID NO: 102052 - DNA, 19 bp, Homo sapiens
  siRNA target sequence for TAP2 (NM_000544.2,1113-1131).
gcagaccgttcgcagtttt

SEQ ID NO: 102053 - DNA, 19 bp, Homo sapiens
  siRNA target sequence for TAP2 (NM_000544.2,1368-1386).
gaccctggtatacatatat

SEQ ID NO: 102054 - DNA, 19 bp, Homo sapiens
  siRNA target sequence for TAP2 (NM_000544.2,1552-1570).
ctcaaggggctgacgttta

SEQ ID NO: 102055 - DNA, 19 bp, Homo sapiens
  siRNA target sequence for TAP2 (NM_000544.2,1694-1712).
ccatctcacagtatgaaca

SEQ ID NO: 102056 - DNA, 19 bp, Homo sapiens
  siRNA target sequence for TAP2 (NM_000544.2,1768-1786).
ggttctgtgaggaacaaca

SEQ ID NO: 102057 - DNA, 19 bp, Homo sapiens
  siRNA target sequence for TAP2 (NM_000544.2,1774-1792).
gtgaggaacaacattgctt

SEQ ID NO: 102058 - DNA, 19 bp, Homo sapiens
  siRNA target sequence for TAP2 (NM_000544.2,1776-1794).
gaggaacaacattgcttat

SEQ ID NO: 102059 - DNA, 19 bp, Homo sapiens
  siRNA target sequence for TAP2 (NM_000544.2,1805-1823).
gctgcgaagatgataaggt

SEQ ID NO: 102060 - DNA, 19 bp, Homo sapiens
  siRNA target sequence for TAP2 (NM_000544.2,1844-1862).
cccacgcagatgacttcat

SEQ ID NO: 102061 - DNA, 19 bp, Homo sapiens
  siRNA target sequence for TAP2 (NM_000544.2,1866-1884).
ggaaatggagcatggaata

SEQ ID NO: 102062 - DNA, 19 bp, Homo sapiens
  siRNA target sequence for TAP2 (NM_000544.2,1867-1885).
gaaatggagcatggaatat

SEQ ID NO: 102063 - DNA, 19 bp, Homo sapiens
  siRNA target sequence for TAP2 (NM_000544.2,1872-1890).
ggagcatggaatatacaca

SEQ ID NO: 102064 - DNA, 19 bp, Homo sapiens
  siRNA target sequence for TAP2 (NM_000544.2,1983-2001).
cctggatgaggctactagt

SEQ ID NO: 102065 - DNA, 19 bp, Homo sapiens
  siRNA target sequence for TAP2 (NM_000544.2,1994-2012).
ctactagtgccctagatgt

SEQ ID NO: 102066 - DNA, 19 bp, Homo sapiens
  siRNA target sequence for TAP2 (NM_018833.1,2016-2034).
ccctttggaagttcatgat

SEQ ID NO: 102067 - DNA, 19 bp, Homo sapiens
  siRNA target sequence for TARS (NM_152295.3,425-443).
cgagctgagttgaatcctt

SEQ ID NO: 102068 - DNA, 19 bp, Homo sapiens
  siRNA target sequence for TARS (NM_152295.3,445-463).
gcctgaatatatttacaca

SEQ ID NO: 102069 - DNA, 19 bp, Homo sapiens
  siRNA target sequence for TARS (NM_152295.3,462-480).
cacgtcttgagatgtataa

SEQ ID NO: 102070 - DNA, 19 bp, Homo sapiens
  siRNA target sequence for TARS (NM_152295.3,475-493).
gtataatatactaaaagca

SEQ ID NO: 102071 - DNA, 19 bp, Homo sapiens
  siRNA target sequence for TARS (NM_152295.3,569-587).
caggttgatgcggaatctt

SEQ ID NO: 102072 - DNA, 19 bp, Homo sapiens
  siRNA target sequence for TARS (NM_152295.3,575-593).
gatgcggaatcttggaaaa

SEQ ID NO: 102073 - DNA, 19 bp, Homo sapiens
  siRNA target sequence for TARS (NM_152295.3,588-606).
ggaaaactacaccatatca

SEQ ID NO: 102074 - DNA, 19 bp, Homo sapiens
  siRNA target sequence for TARS (NM_152295.3,634-652).
ggccgacaacaccgttatt

SEQ ID NO: 102075 - DNA, 19 bp, Homo sapiens
  siRNA target sequence for TARS (NM_152295.3,637-655).
cgacaacaccgttattgct

SEQ ID NO: 102076 - DNA, 19 bp, Homo sapiens
  siRNA target sequence for TARS (NM_152295.3,638-656).
gacaacaccgttattgcta

SEQ ID NO: 102077 - DNA, 19 bp, Homo sapiens
  siRNA target sequence for TARS (NM_152295.3,643-661).
caccgttattgctaaagta

SEQ ID NO: 102078 - DNA, 19 bp, Homo sapiens
  siRNA target sequence for TARS (NM_152295.3,645-663).
ccgttattgctaaagtaaa

SEQ ID NO: 102079 - DNA, 19 bp, Homo sapiens
  siRNA target sequence for TARS (NM_152295.3,646-664).
cgttattgctaaagtaaat

SEQ ID NO: 102080 - DNA, 19 bp, Homo sapiens
  siRNA target sequence for TARS (NM_152295.3,685-703).
ccgccctctggaagaagat

SEQ ID NO: 102081 - DNA, 19 bp, Homo sapiens
  siRNA target sequence for TARS (NM_152295.3,686-704).
cgccctctggaagaagatt

SEQ ID NO: 102082 - DNA, 19 bp, Homo sapiens
  siRNA target sequence for TARS (NM_152295.3,705-723).
gtaccttggagcttctcaa

SEQ ID NO: 102083 - DNA, 19 bp, Homo sapiens
  siRNA target sequence for TARS (NM_152295.3,708-726).
ccttggagcttctcaagtt

SEQ ID NO: 102084 - DNA, 19 bp, Homo sapiens
  siRNA target sequence for TARS (NM_152295.3,758-776).
cactctagtgctcacataa

SEQ ID NO: 102085 - DNA, 19 bp, Homo sapiens
  siRNA target sequence for TARS (NM_152295.3,795-813).
gagtctatggtggatgttt

SEQ ID NO: 102086 - DNA, 19 bp, Homo sapiens
  siRNA target sequence for TARS (NM_152295.3,797-815).
gtctatggtggatgtttat

SEQ ID NO: 102087 - DNA, 19 bp, Homo sapiens
  siRNA target sequence for TARS (NM_152295.3,872-890).
ggtgtgtctagcaatgatt

SEQ ID NO: 102088 - DNA, 19 bp, Homo sapiens
  siRNA target sequence for TARS (NM_152295.3,873-891).
gtgtgtctagcaatgattt

SEQ ID NO: 102089 - DNA, 19 bp, Homo sapiens
  siRNA target sequence for TARS (NM_152295.3,875-893).
gtgtctagcaatgatttct

SEQ ID NO: 102090 - DNA, 19 bp, Homo sapiens
  siRNA target sequence for TARS (NM_152295.3,877-895).
gtctagcaatgatttctct

SEQ ID NO: 102091 - DNA, 19 bp, Homo sapiens
  siRNA target sequence for TARS (NM_152295.3,899-917).
ctggaggctttgtgtaaga

SEQ ID NO: 102092 - DNA, 19 bp, Homo sapiens
  siRNA target sequence for TARS (NM_152295.3,1000-1018).
caaatgccggatattgaat

SEQ ID NO: 102093 - DNA, 19 bp, Homo sapiens
  siRNA target sequence for TARS (NM_152295.3,1034-1052).
ccaactaccacagtctata

SEQ ID NO: 102094 - DNA, 19 bp, Homo sapiens
  siRNA target sequence for TARS (NM_152295.3,1080-1098).
ggggtcctcatgttagaca

SEQ ID NO: 102095 - DNA, 19 bp, Homo sapiens
  siRNA target sequence for TARS (NM_152295.3,1149-1167).
gggaaggcaaagcagatat

SEQ ID NO: 102096 - DNA, 19 bp, Homo sapiens
  siRNA target sequence for TARS (NM_152295.3,1203-1221).
cagatcctaaaatgttgaa

SEQ ID NO: 102097 - DNA, 19 bp, Homo sapiens
  siRNA target sequence for TARS (NM_152295.3,1208-1226).
cctaaaatgttgaaagagt

SEQ ID NO: 102098 - DNA, 19 bp, Homo sapiens
  siRNA target sequence for TARS (NM_152295.3,1274-1292).
ggcagggaccaagaactat

SEQ ID NO: 102099 - DNA, 19 bp, Homo sapiens
  siRNA target sequence for TARS (NM_152295.3,1275-1293).
gcagggaccaagaactata

SEQ ID NO: 102100 - DNA, 19 bp, Homo sapiens
  siRNA target sequence for TARS (NM_152295.3,1276-1294).
cagggaccaagaactatat

SEQ ID NO: 102101 - DNA, 19 bp, Homo sapiens
  siRNA target sequence for TARS (NM_152295.3,1278-1296).
gggaccaagaactatattt

SEQ ID NO: 102102 - DNA, 19 bp, Homo sapiens
  siRNA target sequence for TARS (NM_152295.3,1335-1353).
caaaaggagcctacattta

SEQ ID NO: 102103 - DNA, 19 bp, Homo sapiens
  siRNA target sequence for TARS (NM_152295.3,1358-1376).
gcacttattgaattcatta

SEQ ID NO: 102104 - DNA, 19 bp, Homo sapiens
  siRNA target sequence for TARS (NM_152295.3,1409-1427).
gtagtcaccccaaacatct

SEQ ID NO: 102105 - DNA, 19 bp, Homo sapiens
  siRNA target sequence for TARS (NM_152295.3,1587-1605).
ctctgcggctagctgattt

SEQ ID NO: 102106 - DNA, 19 bp, Homo sapiens
  siRNA target sequence for TARS (NM_152295.3,1599-1617).
ctgattttggggtacttca

SEQ ID NO: 102107 - DNA, 19 bp, Homo sapiens
  siRNA target sequence for TARS (NM_152295.3,1654-1672).
ccgggtacgaagattccaa

SEQ ID NO: 102108 - DNA, 19 bp, Homo sapiens
  siRNA target sequence for TARS (NM_152295.3,1751-1769).
gtatatagcgtatttggat

SEQ ID NO: 102109 - DNA, 19 bp, Homo sapiens
  siRNA target sequence for TARS (NM_152295.3,1853-1871).
gaaaacagtctgaatgaat

SEQ ID NO: 102110 - DNA, 19 bp, Homo sapiens
  siRNA target sequence for TARS (NM_152295.3,1858-1876).
cagtctgaatgaatttggt

SEQ ID NO: 102111 - DNA, 19 bp, Homo sapiens
  siRNA target sequence for TARS (NM_152295.3,1875-1893).
gtgaaaagtgggagttaaa

SEQ ID NO: 102112 - DNA, 19 bp, Homo sapiens
  siRNA target sequence for TARS (NM_152295.3,1917-1935).
gcccaaagattgacataca

SEQ ID NO: 102113 - DNA, 19 bp, Homo sapiens
  siRNA target sequence for TARS (NM_152295.3,1997-2015).
cccatcagatttaatctta

SEQ ID NO: 102114 - DNA, 19 bp, Homo sapiens
  siRNA target sequence for TARS (NM_152295.3,2099-2117).
gctatcctcacagaaaact

SEQ ID NO: 102115 - DNA, 19 bp, Homo sapiens
  siRNA target sequence for TARS (NM_152295.3,2145-2163).
cccctcgccaggtaatggt

SEQ ID NO: 102116 - DNA, 19 bp, Homo sapiens
  siRNA target sequence for TARS (NM_152295.3,2197-2215).
ccaaaaggtacgacaacaa

SEQ ID NO: 102117 - DNA, 19 bp, Homo sapiens
  siRNA target sequence for TARS (NM_152295.3,2198-2216).
caaaaggtacgacaacaat

SEQ ID NO: 102118 - DNA, 19 bp, Homo sapiens
  siRNA target sequence for TARS (NM_152295.3,2249-2267).
ctggatccaggctgtacat

SEQ ID NO: 102119 - DNA, 19 bp, Homo sapiens
  siRNA target sequence for TARS (NM_152295.3,2252-2270).
gatccaggctgtacattga

SEQ ID NO: 102120 - DNA, 19 bp, Homo sapiens
  siRNA target sequence for TARS (NM_152295.3,2258-2276).
ggctgtacattgaataaaa

SEQ ID NO: 102121 - DNA, 19 bp, Homo sapiens
  siRNA target sequence for TARS (NM_152295.3,2259-2277).
gctgtacattgaataaaaa

SEQ ID NO: 102122 - DNA, 19 bp, Homo sapiens
  siRNA target sequence for TARS (NM_152295.3,2278-2296).
gattcgaaatgcacagtta

SEQ ID NO: 102123 - DNA, 19 bp, Homo sapiens
  siRNA target sequence for TARS (NM_152295.3,2289-2307).
cacagttagcacagtataa

SEQ ID NO: 102124 - DNA, 19 bp, Homo sapiens
  siRNA target sequence for TARS (NM_152295.3,2291-2309).
cagttagcacagtataact

SEQ ID NO: 102125 - DNA, 19 bp, Homo sapiens
  siRNA target sequence for TARS (NM_152295.3,2318-2336).
gttgttggtgaaaaagaga

SEQ ID NO: 102126 - DNA, 19 bp, Homo sapiens
  siRNA target sequence for TARS (NM_152295.3,2361-2379).
gcacaagagacaataaggt

SEQ ID NO: 102127 - DNA, 19 bp, Homo sapiens
  siRNA target sequence for TARS (NM_152295.3,2381-2399).
cacggggaacgcaccattt

SEQ ID NO: 102128 - DNA, 19 bp, Homo sapiens
  siRNA target sequence for TARS (NM_152295.3,2383-2401).
cggggaacgcaccatttct

SEQ ID NO: 102129 - DNA, 19 bp, Homo sapiens
  siRNA target sequence for TARS (NM_152295.3,2385-2403).
gggaacgcaccatttctga

SEQ ID NO: 102130 - DNA, 19 bp, Homo sapiens
  siRNA target sequence for TARS (NM_152295.3,2386-2404).
ggaacgcaccatttctgaa

SEQ ID NO: 102131 - DNA, 19 bp, Homo sapiens
  siRNA target sequence for TARS (NM_152295.3,2387-2405).
gaacgcaccatttctgaaa

SEQ ID NO: 102132 - DNA, 19 bp, Homo sapiens
  siRNA target sequence for TBK1 (NM_013254.2,86-104).
gtggcttttatctgatatt

SEQ ID NO: 102133 - DNA, 19 bp, Homo sapiens
  siRNA target sequence for TBK1 (NM_013254.2,135-153).
cgtggaagacataagaaaa

SEQ ID NO: 102134 - DNA, 19 bp, Homo sapiens
  siRNA target sequence for TBK1 (NM_013254.2,201-219).
cgtccagtggatgttcaaa

SEQ ID NO: 102135 - DNA, 19 bp, Homo sapiens
  siRNA target sequence for TBK1 (NM_013254.2,202-220).
gtccagtggatgttcaaat

SEQ ID NO: 102136 - DNA, 19 bp, Homo sapiens
  siRNA target sequence for TBK1 (NM_013254.2,309-327).
gtacttattatggaatttt

SEQ ID NO: 102137 - DNA, 19 bp, Homo sapiens
  siRNA target sequence for TBK1 (NM_013254.2,336-354).
gggagtttatacactgttt

SEQ ID NO: 102138 - DNA, 19 bp, Homo sapiens
  siRNA target sequence for TBK1 (NM_013254.2,337-355).
ggagtttatacactgtttt

SEQ ID NO: 102139 - DNA, 19 bp, Homo sapiens
  siRNA target sequence for TBK1 (NM_013254.2,340-358).
gtttatacactgttttaga

SEQ ID NO: 102140 - DNA, 19 bp, Homo sapiens
  siRNA target sequence for TBK1 (NM_013254.2,374-392).
ctatggactaccagaatct

SEQ ID NO: 102141 - DNA, 19 bp, Homo sapiens
  siRNA target sequence for TBK1 (NM_013254.2,422-440).
gggtggaatgaatcatcta

SEQ ID NO: 102142 - DNA, 19 bp, Homo sapiens
  siRNA target sequence for TBK1 (NM_013254.2,431-449).
gaatcatctacgagagaat

SEQ ID NO: 102143 - DNA, 19 bp, Homo sapiens
  siRNA target sequence for TBK1 (NM_013254.2,451-469).
gtatagtgcaccgtgatat

SEQ ID NO: 102144 - DNA, 19 bp, Homo sapiens
  siRNA target sequence for TBK1 (NM_013254.2,508-526).
gacagtctgtgtacaaact

SEQ ID NO: 102145 - DNA, 19 bp, Homo sapiens
  siRNA target sequence for TBK1 (NM_013254.2,510-528).
cagtctgtgtacaaactca

SEQ ID NO: 102146 - DNA, 19 bp, Homo sapiens
  siRNA target sequence for TBK1 (NM_013254.2,650-668).
gaaatatggagcaacagtt

SEQ ID NO: 102147 - DNA, 19 bp, Homo sapiens
  siRNA target sequence for TBK1 (NM_013254.2,677-695).
gagcattggggtaacattt

SEQ ID NO: 102148 - DNA, 19 bp, Homo sapiens
  siRNA target sequence for TBK1 (NM_013254.2,735-753).
gaagggcctcgtaggaata

SEQ ID NO: 102149 - DNA, 19 bp, Homo sapiens
  siRNA target sequence for TBK1 (NM_013254.2,739-757).
ggcctcgtaggaataaaga

SEQ ID NO: 102150 - DNA, 19 bp, Homo sapiens
  siRNA target sequence for TBK1 (NM_013254.2,874-892).
ggggtcttcaggttctact

SEQ ID NO: 102151 - DNA, 19 bp, Homo sapiens
  siRNA target sequence for TBK1 (NM_013254.2,983-1001).
ccgaatggtaattcatgtt

SEQ ID NO: 102152 - DNA, 19 bp, Homo sapiens
  siRNA target sequence for TBK1 (NM_013254.2,999-1017).
gttttttcgctacaacaaa

SEQ ID NO: 102153 - DNA, 19 bp, Homo sapiens
  siRNA target sequence for TBK1 (NM_013254.2,1031-1049).
gatttatattcatagctat

SEQ ID NO: 102154 - DNA, 19 bp, Homo sapiens
  siRNA target sequence for TBK1 (NM_013254.2,1045-1063).
gctataatactgctactat

SEQ ID NO: 102155 - DNA, 19 bp, Homo sapiens
  siRNA target sequence for TBK1 (NM_013254.2,1054-1072).
ctgctactatatttcatga

SEQ ID NO: 102156 - DNA, 19 bp, Homo sapiens
  siRNA target sequence for TBK1 (NM_013254.2,1105-1123).
caaatcaagaacttatcta

SEQ ID NO: 102157 - DNA, 19 bp, Homo sapiens
  siRNA target sequence for TBK1 (NM_013254.2,1125-1143).
gaagggcgacgcttagtct

SEQ ID NO: 102158 - DNA, 19 bp, Homo sapiens
  siRNA target sequence for TBK1 (NM_013254.2,1129-1147).
ggcgacgcttagtcttaga

SEQ ID NO: 102159 - DNA, 19 bp, Homo sapiens
  siRNA target sequence for TBK1 (NM_013254.2,1130-1148).
gcgacgcttagtcttagaa

SEQ ID NO: 102160 - DNA, 19 bp, Homo sapiens
  siRNA target sequence for TBK1 (NM_013254.2,1174-1192).
ctaaaactactgaggaaaa

SEQ ID NO: 102161 - DNA, 19 bp, Homo sapiens
  siRNA target sequence for TBK1 (NM_013254.2,1183-1201).
ctgaggaaaaccctatatt

SEQ ID NO: 102162 - DNA, 19 bp, Homo sapiens
  siRNA target sequence for TBK1 (NM_013254.2,1212-1230).
cgggaacctctgaatacca

SEQ ID NO: 102163 - DNA, 19 bp, Homo sapiens
  siRNA target sequence for TBK1 (NM_013254.2,1213-1231).
gggaacctctgaataccat

SEQ ID NO: 102164 - DNA, 19 bp, Homo sapiens
  siRNA target sequence for TBK1 (NM_013254.2,1214-1232).
ggaacctctgaataccata

SEQ ID NO: 102165 - DNA, 19 bp, Homo sapiens
  siRNA target sequence for TBK1 (NM_013254.2,1218-1236).
cctctgaataccataggat

SEQ ID NO: 102166 - DNA, 19 bp, Homo sapiens
  siRNA target sequence for TBK1 (NM_013254.2,1221-1239).
ctgaataccataggattaa

SEQ ID NO: 102167 - DNA, 19 bp, Homo sapiens
  siRNA target sequence for TBK1 (NM_013254.2,1223-1241).
gaataccataggattaata

SEQ ID NO: 102168 - DNA, 19 bp, Homo sapiens
  siRNA target sequence for TBK1 (NM_013254.2,1228-1246).
ccataggattaatatatga

SEQ ID NO: 102169 - DNA, 19 bp, Homo sapiens
  siRNA target sequence for TBK1 (NM_013254.2,1266-1284).
gtacatccacgttatgatt

SEQ ID NO: 102170 - DNA, 19 bp, Homo sapiens
  siRNA target sequence for TBK1 (NM_013254.2,1359-1377).
ctgctttatcaggaattaa

SEQ ID NO: 102171 - DNA, 19 bp, Homo sapiens
  siRNA target sequence for TBK1 (NM_013254.2,1387-1405).
ggatacgatggctgattga

SEQ ID NO: 102172 - DNA, 19 bp, Homo sapiens
  siRNA target sequence for TBK1 (NM_013254.2,1388-1406).
gatacgatggctgattgaa

SEQ ID NO: 102173 - DNA, 19 bp, Homo sapiens
  siRNA target sequence for TBK1 (NM_013254.2,1393-1411).
gatggctgattgaattaat

SEQ ID NO: 102174 - DNA, 19 bp, Homo sapiens
  siRNA target sequence for TBK1 (NM_013254.2,1537-1555).
cggcagagttaggtgaaat

SEQ ID NO: 102175 - DNA, 19 bp, Homo sapiens
  siRNA target sequence for TBK1 (NM_013254.2,1539-1557).
gcagagttaggtgaaattt

SEQ ID NO: 102176 - DNA, 19 bp, Homo sapiens
  siRNA target sequence for TBK1 (NM_013254.2,1558-1576).
cagacatacacaccaaatt

SEQ ID NO: 102177 - DNA, 19 bp, Homo sapiens
  siRNA target sequence for TBK1 (NM_013254.2,1588-1606).
ccagttctcagggaacaat

SEQ ID NO: 102178 - DNA, 19 bp, Homo sapiens
  siRNA target sequence for TBK1 (NM_013254.2,1589-1607).
cagttctcagggaacaata

SEQ ID NO: 102179 - DNA, 19 bp, Homo sapiens
  siRNA target sequence for TBK1 (NM_013254.2,1591-1609).
gttctcagggaacaataga

SEQ ID NO: 102180 - DNA, 19 bp, Homo sapiens
  siRNA target sequence for TBK1 (NM_013254.2,1622-1640).
ggatatcgacagcagatta

SEQ ID NO: 102181 - DNA, 19 bp, Homo sapiens
  siRNA target sequence for TBK1 (NM_013254.2,1623-1641).
gatatcgacagcagattat

SEQ ID NO: 102182 - DNA, 19 bp, Homo sapiens
  siRNA target sequence for TBK1 (NM_013254.2,1719-1737).
caagtcctgttaaattgca

SEQ ID NO: 102183 - DNA, 19 bp, Homo sapiens
  siRNA target sequence for TBK1 (NM_013254.2,1735-1753).
gcatgacagagatttacta

SEQ ID NO: 102184 - DNA, 19 bp, Homo sapiens
  siRNA target sequence for TBK1 (NM_013254.2,1745-1763).
gatttactatcagttcaaa

SEQ ID NO: 102185 - DNA, 19 bp, Homo sapiens
  siRNA target sequence for TBK1 (NM_013254.2,1774-1792).
cagaacgtagattagctta

SEQ ID NO: 102186 - DNA, 19 bp, Homo sapiens
  siRNA target sequence for TBK1 (NM_013254.2,1776-1794).
gaacgtagattagcttata

SEQ ID NO: 102187 - DNA, 19 bp, Homo sapiens
  siRNA target sequence for TBK1 (NM_013254.2,1818-1836).
gataagcaaaaactgtatt

SEQ ID NO: 102188 - DNA, 19 bp, Homo sapiens
  siRNA target sequence for TBK1 (NM_013254.2,1886-1904).
gtatgaggcatttttgaat

SEQ ID NO: 102189 - DNA, 19 bp, Homo sapiens
  siRNA target sequence for TBK1 (NM_013254.2,1938-1956).
cttaggaaacagttattat

SEQ ID NO: 102190 - DNA, 19 bp, Homo sapiens
  siRNA target sequence for TBK1 (NM_013254.2,1949-1967).
gttattatcgctgactaat

SEQ ID NO: 102191 - DNA, 19 bp, Homo sapiens
  siRNA target sequence for TBK1 (NM_013254.2,1957-1975).
cgctgactaatcagtgttt

SEQ ID NO: 102192 - DNA, 19 bp, Homo sapiens
  siRNA target sequence for TBK1 (NM_013254.2,1961-1979).
gactaatcagtgttttgat

SEQ ID NO: 102193 - DNA, 19 bp, Homo sapiens
  siRNA target sequence for TBK1 (NM_013254.2,2073-2091).
cataccatgaccccaattt

SEQ ID NO: 102194 - DNA, 19 bp, Homo sapiens
  siRNA target sequence for TBK1 (NM_013254.2,2086-2104).
caatttatccaagttctaa

SEQ ID NO: 102195 - DNA, 19 bp, Homo sapiens
  siRNA target sequence for TBK1 (NM_013254.2,2200-2218).
ggtttggctctttaaccat

SEQ ID NO: 102196 - DNA, 19 bp, Homo sapiens
  siRNA target sequence for TBK1 (NM_013254.2,2232-2250).
cgcaacgttgactgtcttt

SEQ ID NO: 102197 - DNA, 19 bp, Homo sapiens
  siRNA target sequence for TCEB3L2 (NM_145653.1,1128-1146).
ccgcacagagaaagacaat

SEQ ID NO: 102198 - DNA, 19 bp, Homo sapiens
  siRNA target sequence for TCEB3L2 (NM_145653.1,1283-1301).
gagtagtgaccacgaaaat

SEQ ID NO: 102199 - DNA, 19 bp, Homo sapiens
  siRNA target sequence for TCEB3L2 (NM_145653.1,1331-1349).
gccgacagacaaagatgat

SEQ ID NO: 102200 - DNA, 19 bp, Homo sapiens
  siRNA target sequence for TCEB3L2 (NM_145653.1,1333-1351).
cgacagacaaagatgatct

SEQ ID NO: 102201 - DNA, 19 bp, Homo sapiens
  siRNA target sequence for TCP1 (NM_030752.1,69-87).
gatccgctcccaaaacgtt

SEQ ID NO: 102202 - DNA, 19 bp, Homo sapiens
  siRNA target sequence for TCP1 (NM_030752.1,95-113).
cagcttcgattgccaatat

SEQ ID NO: 102203 - DNA, 19 bp, Homo sapiens
  siRNA target sequence for TCP1 (NM_030752.1,101-119).
cgattgccaatattgtaaa

SEQ ID NO: 102204 - DNA, 19 bp, Homo sapiens
  siRNA target sequence for TCP1 (NM_030752.1,108-126).
caatattgtaaaaagttct

SEQ ID NO: 102205 - DNA, 19 bp, Homo sapiens
  siRNA target sequence for TCP1 (NM_030752.1,130-148).
ggtccagttggcttggata

SEQ ID NO: 102206 - DNA, 19 bp, Homo sapiens
  siRNA target sequence for TCP1 (NM_030752.1,131-149).
gtccagttggcttggataa

SEQ ID NO: 102207 - DNA, 19 bp, Homo sapiens
  siRNA target sequence for TCP1 (NM_030752.1,133-151).
ccagttggcttggataaaa

SEQ ID NO: 102208 - DNA, 19 bp, Homo sapiens
  siRNA target sequence for TCP1 (NM_030752.1,194-212).
gtgcaaccatcctgaagtt

SEQ ID NO: 102209 - DNA, 19 bp, Homo sapiens
  siRNA target sequence for TCP1 (NM_030752.1,859-877).
gcaactggtgccaatgtta

SEQ ID NO: 102210 - DNA, 19 bp, Homo sapiens
  siRNA target sequence for TCP1 (NM_030752.1,863-881).
ctggtgccaatgttattct

SEQ ID NO: 102211 - DNA, 19 bp, Homo sapiens
  siRNA target sequence for TCP1 (NM_030752.1,865-883).
ggtgccaatgttattctaa

SEQ ID NO: 102212 - DNA, 19 bp, Homo sapiens
  siRNA target sequence for TCP1 (NM_030752.1,1129-1147).
cgtacgtctgcatcgatta

SEQ ID NO: 102213 - DNA, 19 bp, Homo sapiens
  siRNA target sequence for TCP1 (NM_030752.1,1130-1148).
gtacgtctgcatcgattat

SEQ ID NO: 102214 - DNA, 19 bp, Homo sapiens
  siRNA target sequence for TCP1 (NM_030752.1,1133-1151).
cgtctgcatcgattatctt

SEQ ID NO: 102215 - DNA, 19 bp, Homo sapiens
  siRNA target sequence for TCP1 (NM_030752.1,1134-1152).
gtctgcatcgattatctta

SEQ ID NO: 102216 - DNA, 19 bp, Homo sapiens
  siRNA target sequence for TCP1 (NM_030752.1,1149-1167).
cttacgtggggcaaatgat

SEQ ID NO: 102217 - DNA, 19 bp, Homo sapiens
  siRNA target sequence for TCP1 (NM_030752.1,1153-1171).
cgtggggcaaatgatttca

SEQ ID NO: 102218 - DNA, 19 bp, Homo sapiens
  siRNA target sequence for TCP1 (NM_030752.1,1154-1172).
gtggggcaaatgatttcat

SEQ ID NO: 102219 - DNA, 19 bp, Homo sapiens
  siRNA target sequence for TCP1 (NM_030752.1,1182-1200).
gatggagcgctctttacat

SEQ ID NO: 102220 - DNA, 19 bp, Homo sapiens
  siRNA target sequence for TCP1 (NM_030752.1,1276-1294).
ctttccatataccttgaaa

SEQ ID NO: 102221 - DNA, 19 bp, Homo sapiens
  siRNA target sequence for TCP1 (NM_030752.1,1326-1344).
gcttgcgattgcagagttt

SEQ ID NO: 102222 - DNA, 19 bp, Homo sapiens
  siRNA target sequence for TCP1 (NM_030752.1,1330-1348).
gcgattgcagagtttgcaa

SEQ ID NO: 102223 - DNA, 19 bp, Homo sapiens
  siRNA target sequence for TCP1 (NM_030752.1,1345-1363).
gcaagatcacttcttgtta

SEQ ID NO: 102224 - DNA, 19 bp, Homo sapiens
  siRNA target sequence for TCP1 (NM_030752.1,1346-1364).
caagatcacttcttgttat

SEQ ID NO: 102225 - DNA, 19 bp, Homo sapiens
  siRNA target sequence for TCP1 (NM_030752.1,1367-1385).
ccaatacactagcagttaa

SEQ ID NO: 102226 - DNA, 19 bp, Homo sapiens
  siRNA target sequence for TCP1 (NM_030752.1,1401-1419).
cacagatctggttgcaaaa

SEQ ID NO: 102227 - DNA, 19 bp, Homo sapiens
  siRNA target sequence for TCP1 (NM_030752.1,1446-1464).
ggttaacccagaacgtaaa

SEQ ID NO: 102228 - DNA, 19 bp, Homo sapiens
  siRNA target sequence for TCP1 (NM_030752.1,1452-1470).
cccagaacgtaaaaatcta

SEQ ID NO: 102229 - DNA, 19 bp, Homo sapiens
  siRNA target sequence for TCP1 (NM_030752.1,1453-1471).
ccagaacgtaaaaatctaa

SEQ ID NO: 102230 - DNA, 19 bp, Homo sapiens
  siRNA target sequence for TCP1 (NM_030752.1,1454-1472).
cagaacgtaaaaatctaaa

SEQ ID NO: 102231 - DNA, 19 bp, Homo sapiens
  siRNA target sequence for TCP1 (NM_030752.1,1499-1517).
gtaaacctcgagacaacaa

SEQ ID NO: 102232 - DNA, 19 bp, Homo sapiens
  siRNA target sequence for TCP1 (NM_030752.1,1527-1545).
ggtgtttgaaccaaccata

SEQ ID NO: 102233 - DNA, 19 bp, Homo sapiens
  siRNA target sequence for TCP1 (NM_030752.1,1537-1555).
ccaaccatagttaaagtta

SEQ ID NO: 102234 - DNA, 19 bp, Homo sapiens
  siRNA target sequence for TCP1 (NM_030752.1,1538-1556).
caaccatagttaaagttaa

SEQ ID NO: 102235 - DNA, 19 bp, Homo sapiens
  siRNA target sequence for TCP1 (NM_030752.1,1542-1560).
catagttaaagttaagagt

SEQ ID NO: 102236 - DNA, 19 bp, Homo sapiens
  siRNA target sequence for TCP1 (NM_030752.1,1583-1601).
caatcaccattcttcgaat

SEQ ID NO: 102237 - DNA, 19 bp, Homo sapiens
  siRNA target sequence for TCP1 (NM_030752.1,1587-1605).
caccattcttcgaattgat

SEQ ID NO: 102238 - DNA, 19 bp, Homo sapiens
  siRNA target sequence for TCP1 (NM_030752.1,1594-1612).
cttcgaattgatgatctta

SEQ ID NO: 102239 - DNA, 19 bp, Homo sapiens
  siRNA target sequence for TCP1 (NM_030752.1,1597-1615).
cgaattgatgatcttatta

SEQ ID NO: 102240 - DNA, 19 bp, Homo sapiens
  siRNA target sequence for TEC (NM_003215.1,271-289).
gggtttattgatgtttcaa

SEQ ID NO: 102241 - DNA, 19 bp, Homo sapiens
  siRNA target sequence for TEC (NM_003215.1,378-396).
cacactttacatttttgca

SEQ ID NO: 102242 - DNA, 19 bp, Homo sapiens
  siRNA target sequence for TEC (NM_003215.1,417-435).
cctgtgggtgaagaagtta

SEQ ID NO: 102243 - DNA, 19 bp, Homo sapiens
  siRNA target sequence for TEC (NM_003215.1,468-486).
gattaaatatcatcctaaa

SEQ ID NO: 102244 - DNA, 19 bp, Homo sapiens
  siRNA target sequence for TEC (NM_003215.1,536-554).
cacccggatgtgaaaaata

SEQ ID NO: 102245 - DNA, 19 bp, Homo sapiens
  siRNA target sequence for TEC (NM_003215.1,666-684).
cgttgtagccatgtatgat

SEQ ID NO: 102246 - DNA, 19 bp, Homo sapiens
  siRNA target sequence for TEC (NM_003215.1,667-685).
gttgtagccatgtatgatt

SEQ ID NO: 102247 - DNA, 19 bp, Homo sapiens
  siRNA target sequence for TEC (NM_003215.1,730-748).
gagtatctcattttagaaa

SEQ ID NO: 102248 - DNA, 19 bp, Homo sapiens
  siRNA target sequence for TEC (NM_003215.1,796-814).
ggatatatcccaagtaatt

SEQ ID NO: 102249 - DNA, 19 bp, Homo sapiens
  siRNA target sequence for TEC (NM_003215.1,797-815).
gatatatcccaagtaatta

SEQ ID NO: 102250 - DNA, 19 bp, Homo sapiens
  siRNA target sequence for TEC (NM_003215.1,816-834).
cgtaacgggaaagaaatca

SEQ ID NO: 102251 - DNA, 19 bp, Homo sapiens
  siRNA target sequence for TEC (NM_003215.1,837-855).
caacttagatcaatatgaa

SEQ ID NO: 102252 - DNA, 19 bp, Homo sapiens
  siRNA target sequence for TEC (NM_003215.1,844-862).
gatcaatatgaatggtatt

SEQ ID NO: 102253 - DNA, 19 bp, Homo sapiens
  siRNA target sequence for TEC (NM_003215.1,847-865).
caatatgaatggtattgca

SEQ ID NO: 102254 - DNA, 19 bp, Homo sapiens
  siRNA target sequence for TEC (NM_003215.1,916-934).
gaaggtggttttatggtaa

SEQ ID NO: 102255 - DNA, 19 bp, Homo sapiens
  siRNA target sequence for TEC (NM_003215.1,957-975).
gtacacagtctccctttat

SEQ ID NO: 102256 - DNA, 19 bp, Homo sapiens
  siRNA target sequence for TEC (NM_003215.1,962-980).
cagtctccctttataccaa

SEQ ID NO: 102257 - DNA, 19 bp, Homo sapiens
  siRNA target sequence for TEC (NM_003215.1,966-984).
ctccctttataccaagttt

SEQ ID NO: 102258 - DNA, 19 bp, Homo sapiens
  siRNA target sequence for TEC (NM_003215.1,1001-1019).
cgggttttaggcattatca

SEQ ID NO: 102259 - DNA, 19 bp, Homo sapiens
  siRNA target sequence for TEC (NM_003215.1,1002-1020).
gggttttaggcattatcat

SEQ ID NO: 102260 - DNA, 19 bp, Homo sapiens
  siRNA target sequence for TEC (NM_003215.1,1003-1021).
ggttttaggcattatcata

SEQ ID NO: 102261 - DNA, 19 bp, Homo sapiens
  siRNA target sequence for TEC (NM_003215.1,1010-1028).
ggcattatcatataaagga

SEQ ID NO: 102262 - DNA, 19 bp, Homo sapiens
  siRNA target sequence for TEC (NM_003215.1,1078-1096).
ggctccattcctgagatta

SEQ ID NO: 102263 - DNA, 19 bp, Homo sapiens
  siRNA target sequence for TEC (NM_003215.1,1079-1097).
gctccattcctgagattat

SEQ ID NO: 102264 - DNA, 19 bp, Homo sapiens
  siRNA target sequence for TEC (NM_003215.1,1080-1098).
ctccattcctgagattatt

SEQ ID NO: 102265 - DNA, 19 bp, Homo sapiens
  siRNA target sequence for TEC (NM_003215.1,1137-1155).
gcttcggtacccagttagt

SEQ ID NO: 102266 - DNA, 19 bp, Homo sapiens
  siRNA target sequence for TEC (NM_003215.1,1184-1202).
caggattcagctatgagaa

SEQ ID NO: 102267 - DNA, 19 bp, Homo sapiens
  siRNA target sequence for TEC (NM_003215.1,1283-1301).
ggcgagcccagtacaaagt

SEQ ID NO: 102268 - DNA, 19 bp, Homo sapiens
  siRNA target sequence for TEC (NM_003215.1,1293-1311).
gtacaaagtcgcaatcaaa

SEQ ID NO: 102269 - DNA, 19 bp, Homo sapiens
  siRNA target sequence for TEC (NM_003215.1,1593-1611).
cagaaattgtctagtaagt

SEQ ID NO: 102270 - DNA, 19 bp, Homo sapiens
  siRNA target sequence for TEC (NM_003215.1,1614-1632).
ggcgggagttgtaaaagta

SEQ ID NO: 102271 - DNA, 19 bp, Homo sapiens
  siRNA target sequence for TEC (NM_003215.1,1615-1633).
gcgggagttgtaaaagtat

SEQ ID NO: 102272 - DNA, 19 bp, Homo sapiens
  siRNA target sequence for TEC (NM_003215.1,1717-1735).
cctgaagtgtttaattaca

SEQ ID NO: 102273 - DNA, 19 bp, Homo sapiens
  siRNA target sequence for TEC (NM_003215.1,1737-1755).
ccgcttcagcagcaaatca

SEQ ID NO: 102274 - DNA, 19 bp, Homo sapiens
  siRNA target sequence for TEC (NM_003215.1,1878-1896).
gaagttggcgtccaactat

SEQ ID NO: 102275 - DNA, 19 bp, Homo sapiens
  siRNA target sequence for TEC (NM_003215.1,1884-1902).
ggcgtccaactatgtgtat

SEQ ID NO: 102276 - DNA, 19 bp, Homo sapiens
  siRNA target sequence for TEC (NM_003215.1,1886-1904).
cgtccaactatgtgtatga

SEQ ID NO: 102277 - DNA, 19 bp, Homo sapiens
  siRNA target sequence for TEC (NM_003215.1,1943-1961).
ggccttctttcgaagatct

SEQ ID NO: 102278 - DNA, 19 bp, Homo sapiens
  siRNA target sequence for TEK (NM_000459.1,154-172).
ctctttagccagcttagtt

SEQ ID NO: 102279 - DNA, 19 bp, Homo sapiens
  siRNA target sequence for TEK (NM_000459.1,235-253).
caattccctacctcttgta

SEQ ID NO: 102280 - DNA, 19 bp, Homo sapiens
  siRNA target sequence for TEK (NM_000459.1,241-259).
cctacctcttgtatctgat

SEQ ID NO: 102281 - DNA, 19 bp, Homo sapiens
  siRNA target sequence for TEK (NM_000459.1,305-323).
gagcccatcaccataggaa

SEQ ID NO: 102282 - DNA, 19 bp, Homo sapiens
  siRNA target sequence for TEK (NM_000459.1,315-333).
ccataggaagggactttga

SEQ ID NO: 102283 - DNA, 19 bp, Homo sapiens
  siRNA target sequence for TEK (NM_000459.1,316-334).
cataggaagggactttgaa

SEQ ID NO: 102284 - DNA, 19 bp, Homo sapiens
  siRNA target sequence for TEK (NM_000459.1,353-371).
caggatccgctggaagtta

SEQ ID NO: 102285 - DNA, 19 bp, Homo sapiens
  siRNA target sequence for TEK (NM_000459.1,355-373).
ggatccgctggaagttact

SEQ ID NO: 102286 - DNA, 19 bp, Homo sapiens
  siRNA target sequence for TEK (NM_000459.1,361-379).
gctggaagttactcaagat

SEQ ID NO: 102287 - DNA, 19 bp, Homo sapiens
  siRNA target sequence for TEK (NM_000459.1,417-435).
gagaaaaggctagtaagat

SEQ ID NO: 102288 - DNA, 19 bp, Homo sapiens
  siRNA target sequence for TEK (NM_000459.1,473-491).
gaggcaatcaggatacgaa

SEQ ID NO: 102289 - DNA, 19 bp, Homo sapiens
  siRNA target sequence for TEK (NM_000459.1,483-501).
ggatacgaaccatgaagat

SEQ ID NO: 102290 - DNA, 19 bp, Homo sapiens
  siRNA target sequence for TEK (NM_000459.1,493-511).
catgaagatgcgtcaacaa

SEQ ID NO: 102291 - DNA, 19 bp, Homo sapiens
  siRNA target sequence for TEK (NM_000459.1,517-535).
cttcctaccagctacttta

SEQ ID NO: 102292 - DNA, 19 bp, Homo sapiens
  siRNA target sequence for TEK (NM_000459.1,520-538).
cctaccagctactttaact

SEQ ID NO: 102293 - DNA, 19 bp, Homo sapiens
  siRNA target sequence for TEK (NM_000459.1,521-539).
ctaccagctactttaacta

SEQ ID NO: 102294 - DNA, 19 bp, Homo sapiens
  siRNA target sequence for TEK (NM_000459.1,524-542).
ccagctactttaactatga

SEQ ID NO: 102295 - DNA, 19 bp, Homo sapiens
  siRNA target sequence for TEK (NM_000459.1,554-572).
ggagataacgtgaacatat

SEQ ID NO: 102296 - DNA, 19 bp, Homo sapiens
  siRNA target sequence for TEK (NM_000459.1,557-575).
gataacgtgaacatatctt

SEQ ID NO: 102297 - DNA, 19 bp, Homo sapiens
  siRNA target sequence for TEK (NM_000459.1,562-580).
cgtgaacatatctttcaaa

SEQ ID NO: 102298 - DNA, 19 bp, Homo sapiens
  siRNA target sequence for TEK (NM_000459.1,568-586).
catatctttcaaaaaggta

SEQ ID NO: 102299 - DNA, 19 bp, Homo sapiens
  siRNA target sequence for TEK (NM_000459.1,583-601).
ggtattgattaaagaagaa

SEQ ID NO: 102300 - DNA, 19 bp, Homo sapiens
  siRNA target sequence for TEK (NM_000459.1,710-728).
gtgtactcggccaggtata

SEQ ID NO: 102301 - DNA, 19 bp, Homo sapiens
  siRNA target sequence for TEK (NM_000459.1,712-730).
gtactcggccaggtatata

SEQ ID NO: 102302 - DNA, 19 bp, Homo sapiens
  siRNA target sequence for TEK (NM_000459.1,766-784).
gatagtccggagatgtgaa

SEQ ID NO: 102303 - DNA, 19 bp, Homo sapiens
  siRNA target sequence for TEK (NM_000459.1,924-942).
cgtttggcagaacttgtaa

SEQ ID NO: 102304 - DNA, 19 bp, Homo sapiens
  siRNA target sequence for TEK (NM_000459.1,959-977).
caagagggatgcaagtctt

SEQ ID NO: 102305 - DNA, 19 bp, Homo sapiens
  siRNA target sequence for TEK (NM_000459.1,966-984).
gatgcaagtcttatgtgtt

SEQ ID NO: 102306 - DNA, 19 bp, Homo sapiens
  siRNA target sequence for TEK (NM_000459.1,1050-1068).
catgccaccctggttttta

SEQ ID NO: 102307 - DNA, 19 bp, Homo sapiens
  siRNA target sequence for TEK (NM_000459.1,1069-1087).
cgggccagattgtaagctt

SEQ ID NO: 102308 - DNA, 19 bp, Homo sapiens
  siRNA target sequence for TEK (NM_000459.1,1070-1088).
gggccagattgtaagctta

SEQ ID NO: 102309 - DNA, 19 bp, Homo sapiens
  siRNA target sequence for TEK (NM_000459.1,1194-1212).
ccccaaagatagtggattt

SEQ ID NO: 102310 - DNA, 19 bp, Homo sapiens
  siRNA target sequence for TEK (NM_000459.1,1214-1232).
ccagatcatatagaagtaa

SEQ ID NO: 102311 - DNA, 19 bp, Homo sapiens
  siRNA target sequence for TEK (NM_000459.1,1272-1290).
ggccgctacctactaatga

SEQ ID NO: 102312 - DNA, 19 bp, Homo sapiens
  siRNA target sequence for TEK (NM_000459.1,1273-1291).
gccgctacctactaatgaa

SEQ ID NO: 102313 - DNA, 19 bp, Homo sapiens
  siRNA target sequence for TEK (NM_000459.1,1275-1293).
cgctacctactaatgaaga

SEQ ID NO: 102314 - DNA, 19 bp, Homo sapiens
  siRNA target sequence for TEK (NM_000459.1,1276-1294).
gctacctactaatgaagaa

SEQ ID NO: 102315 - DNA, 19 bp, Homo sapiens
  siRNA target sequence for TEK (NM_000459.1,1277-1295).
ctacctactaatgaagaaa

SEQ ID NO: 102316 - DNA, 19 bp, Homo sapiens
  siRNA target sequence for TEK (NM_000459.1,1324-1342).
gctccatccaaaagacttt

SEQ ID NO: 102317 - DNA, 19 bp, Homo sapiens
  siRNA target sequence for TEK (NM_000459.1,1345-1363).
ccatacggatcatttctca

SEQ ID NO: 102318 - DNA, 19 bp, Homo sapiens
  siRNA target sequence for TEK (NM_000459.1,1453-1471).
gcccttcaacatttctgtt

SEQ ID NO: 102319 - DNA, 19 bp, Homo sapiens
  siRNA target sequence for TEK (NM_000459.1,1455-1473).
ccttcaacatttctgttaa

SEQ ID NO: 102320 - DNA, 19 bp, Homo sapiens
  siRNA target sequence for TEK (NM_000459.1,1496-1514).
gccccaaacgtgattgaca

SEQ ID NO: 102321 - DNA, 19 bp, Homo sapiens
  siRNA target sequence for TEK (NM_000459.1,1565-1583).
gatggaccaatcaaatcca

SEQ ID NO: 102322 - DNA, 19 bp, Homo sapiens
  siRNA target sequence for TEK (NM_000459.1,1581-1599).
ccaagaagcttctatacaa

SEQ ID NO: 102323 - DNA, 19 bp, Homo sapiens
  siRNA target sequence for TEK (NM_000459.1,1582-1600).
caagaagcttctatacaaa

SEQ ID NO: 102324 - DNA, 19 bp, Homo sapiens
  siRNA target sequence for TEK (NM_000459.1,1597-1615).
caaacccgttaatcactat

SEQ ID NO: 102325 - DNA, 19 bp, Homo sapiens
  siRNA target sequence for TEK (NM_000459.1,1637-1655).
gtgacaaatgagattgtta

SEQ ID NO: 102326 - DNA, 19 bp, Homo sapiens
  siRNA target sequence for TEK (NM_000459.1,1674-1692).
ctcggacagaatatgaact

SEQ ID NO: 102327 - DNA, 19 bp, Homo sapiens
  siRNA target sequence for TEK (NM_000459.1,1752-1770).
gcttcacaacagcttctat

SEQ ID NO: 102328 - DNA, 19 bp, Homo sapiens
  siRNA target sequence for TEK (NM_000459.1,1779-1797).
ctcctccaagaggtctaaa

SEQ ID NO: 102329 - DNA, 19 bp, Homo sapiens
  siRNA target sequence for TEK (NM_000459.1,1782-1800).
ctccaagaggtctaaatct

SEQ ID NO: 102330 - DNA, 19 bp, Homo sapiens
  siRNA target sequence for TEK (NM_000459.1,1793-1811).
ctaaatctcctgcctaaaa

SEQ ID NO: 102331 - DNA, 19 bp, Homo sapiens
  siRNA target sequence for TEK (NM_000459.1,1812-1830).
gtcagaccactctaaattt

SEQ ID NO: 102332 - DNA, 19 bp, Homo sapiens
  siRNA target sequence for TEK (NM_000459.1,1814-1832).
cagaccactctaaatttga

SEQ ID NO: 102333 - DNA, 19 bp, Homo sapiens
  siRNA target sequence for TEK (NM_000459.1,1851-1869).
caagctcggaagatgactt

SEQ ID NO: 102334 - DNA, 19 bp, Homo sapiens
  siRNA target sequence for TEK (NM_000459.1,1854-1872).
gctcggaagatgactttta

SEQ ID NO: 102335 - DNA, 19 bp, Homo sapiens
  siRNA target sequence for TEK (NM_000459.1,1855-1873).
ctcggaagatgacttttat

SEQ ID NO: 102336 - DNA, 19 bp, Homo sapiens
  siRNA target sequence for TEK (NM_000459.1,1890-1908).
ggtctgtgcaaaaaagtga

SEQ ID NO: 102337 - DNA, 19 bp, Homo sapiens
  siRNA target sequence for TEK (NM_000459.1,1891-1909).
gtctgtgcaaaaaagtgat

SEQ ID NO: 102338 - DNA, 19 bp, Homo sapiens
  siRNA target sequence for TEK (NM_000459.1,1944-1962).
cggtgctacttaacaactt

SEQ ID NO: 102339 - DNA, 19 bp, Homo sapiens
  siRNA target sequence for TEK (NM_000459.1,1945-1963).
ggtgctacttaacaactta

SEQ ID NO: 102340 - DNA, 19 bp, Homo sapiens
  siRNA target sequence for TEK (NM_000459.1,2114-2132).
gtgatttcttggacaatat

SEQ ID NO: 102341 - DNA, 19 bp, Homo sapiens
  siRNA target sequence for TEK (NM_000459.1,2138-2156).
ggctattctatttcttcta

SEQ ID NO: 102342 - DNA, 19 bp, Homo sapiens
  siRNA target sequence for TEK (NM_000459.1,2154-2172).
ctattactatccgttacaa

SEQ ID NO: 102343 - DNA, 19 bp, Homo sapiens
  siRNA target sequence for TEK (NM_000459.1,2198-2216).
cacgttgatgtgaagataa

SEQ ID NO: 102344 - DNA, 19 bp, Homo sapiens
  siRNA target sequence for TEK (NM_000459.1,2267-2285).
gcataccaggtggacattt

SEQ ID NO: 102345 - DNA, 19 bp, Homo sapiens
  siRNA target sequence for TEK (NM_000459.1,2268-2286).
cataccaggtggacatttt

SEQ ID NO: 102346 - DNA, 19 bp, Homo sapiens
  siRNA target sequence for TEK (NM_000459.1,2338-2356).
gaccctcccagaatctcaa

SEQ ID NO: 102347 - DNA, 19 bp, Homo sapiens
  siRNA target sequence for TEK (NM_000459.1,2442-2460).
cctttctgatcatattgca

SEQ ID NO: 102348 - DNA, 19 bp, Homo sapiens
  siRNA target sequence for TEK (NM_000459.1,2443-2461).
ctttctgatcatattgcaa

SEQ ID NO: 102349 - DNA, 19 bp, Homo sapiens
  siRNA target sequence for TEK (NM_000459.1,2493-2511).
cccaagccttccaaaacgt

SEQ ID NO: 102350 - DNA, 19 bp, Homo sapiens
  siRNA target sequence for TEK (NM_000459.1,2543-2561).
gggactctggccctaaaca

SEQ ID NO: 102351 - DNA, 19 bp, Homo sapiens
  siRNA target sequence for TEK (NM_000459.1,2575-2593).
caacccagatcctacaatt

SEQ ID NO: 102352 - DNA, 19 bp, Homo sapiens
  siRNA target sequence for TEK (NM_000459.1,2608-2626).
ctggaatgacatcaaattt

SEQ ID NO: 102353 - DNA, 19 bp, Homo sapiens
  siRNA target sequence for TEK (NM_000459.1,2635-2653).
gattggggagggcaatttt

SEQ ID NO: 102354 - DNA, 19 bp, Homo sapiens
  siRNA target sequence for TEK (NM_000459.1,2812-2830).
cttaggagcatgtgaacat

SEQ ID NO: 102355 - DNA, 19 bp, Homo sapiens
  siRNA target sequence for TEK (NM_000459.1,2825-2843).
gaacatcgaggctacttgt

SEQ ID NO: 102356 - DNA, 19 bp, Homo sapiens
  siRNA target sequence for TEK (NM_000459.1,3073-3091).
ctatgtggcaaaaatagca

SEQ ID NO: 102357 - DNA, 19 bp, Homo sapiens
  siRNA target sequence for TEK (NM_000459.1,3163-3181).
ggccatcgagtcactgaat

SEQ ID NO: 102358 - DNA, 19 bp, Homo sapiens
  siRNA target sequence for TEK (NM_000459.1,3164-3182).
gccatcgagtcactgaatt

SEQ ID NO: 102359 - DNA, 19 bp, Homo sapiens
  siRNA target sequence for TEK (NM_000459.1,3165-3183).
ccatcgagtcactgaatta

SEQ ID NO: 102360 - DNA, 19 bp, Homo sapiens
  siRNA target sequence for TEK (NM_000459.1,3169-3187).
cgagtcactgaattacagt

SEQ ID NO: 102361 - DNA, 19 bp, Homo sapiens
  siRNA target sequence for TEK (NM_000459.1,3193-3211).
cacaaccaacagtgatgta

SEQ ID NO: 102362 - DNA, 19 bp, Homo sapiens
  siRNA target sequence for TEK (NM_000459.1,3213-3231).
ggtcctatggtgtgttact

SEQ ID NO: 102363 - DNA, 19 bp, Homo sapiens
  siRNA target sequence for TEK (NM_000459.1,3214-3232).
gtcctatggtgtgttacta

SEQ ID NO: 102364 - DNA, 19 bp, Homo sapiens
  siRNA target sequence for TEK (NM_000459.1,3226-3244).
gttactatgggagattgtt

SEQ ID NO: 102365 - DNA, 19 bp, Homo sapiens
  siRNA target sequence for TEK (NM_000459.1,3325-3343).
gcccctgaactgtgatgat

SEQ ID NO: 102366 - DNA, 19 bp, Homo sapiens
  siRNA target sequence for TEK (NM_000459.1,3341-3359).
gatgaggtgtatgatctaa

SEQ ID NO: 102367 - DNA, 19 bp, Homo sapiens
  siRNA target sequence for TEK (NM_000459.1,3344-3362).
gaggtgtatgatctaatga

SEQ ID NO: 102368 - DNA, 19 bp, Homo sapiens
  siRNA target sequence for TEK (NM_000459.1,3346-3364).
ggtgtatgatctaatgaga

SEQ ID NO: 102369 - DNA, 19 bp, Homo sapiens
  siRNA target sequence for TEK (NM_000459.1,3399-3417).
catttgcccagatattggt

SEQ ID NO: 102370 - DNA, 19 bp, Homo sapiens
  siRNA target sequence for TEK (NM_000459.1,3420-3438).
ccttaaacagaatgttaga

SEQ ID NO: 102371 - DNA, 19 bp, Homo sapiens
  siRNA target sequence for TEK (NM_000459.1,3443-3461).
cgaaagacctacgtgaata

SEQ ID NO: 102372 - DNA, 19 bp, Homo sapiens
  siRNA target sequence for TEK (NM_000459.1,3463-3481).
cacgctttatgagaagttt

SEQ ID NO: 102373 - DNA, 19 bp, Homo sapiens
  siRNA target sequence for TESK1 (NM_006285.1,425-443).
ggcgcgtgtggacgatttt

SEQ ID NO: 102374 - DNA, 19 bp, Homo sapiens
  siRNA target sequence for TESK1 (NM_006285.1,427-445).
cgcgtgtggacgattttca

SEQ ID NO: 102375 - DNA, 19 bp, Homo sapiens
  siRNA target sequence for TESK1 (NM_006285.1,429-447).
cgtgtggacgattttcact

SEQ ID NO: 102376 - DNA, 19 bp, Homo sapiens
  siRNA target sequence for TESK1 (NM_006285.1,651-669).
gctcttacagagtatatga

SEQ ID NO: 102377 - DNA, 19 bp, Homo sapiens
  siRNA target sequence for TESK1 (NM_006285.1,863-881).
cgggctggccgaaaagatt

SEQ ID NO: 102378 - DNA, 19 bp, Homo sapiens
  siRNA target sequence for TESK1 (NM_006285.1,961-979).
ggggtgagctgtatgatga

SEQ ID NO: 102379 - DNA, 19 bp, Homo sapiens
  siRNA target sequence for TESK1 (NM_006285.1,1176-1194).
gcccccttcaccgaaatta

SEQ ID NO: 102380 - DNA, 19 bp, Homo sapiens
  siRNA target sequence for TESK1 (NM_006285.1,1250-1268).
gaccgccctgacacacaat

SEQ ID NO: 102381 - DNA, 19 bp, Homo sapiens
  siRNA target sequence for TESK1 (NM_006285.1,1252-1270).
ccgccctgacacacaatca

SEQ ID NO: 102382 - DNA, 19 bp, Homo sapiens
  siRNA target sequence for TESK1 (NM_006285.1,1801-1819).
caggacccgtcctcaataa

SEQ ID NO: 102383 - DNA, 19 bp, Homo sapiens
  siRNA target sequence for TESK1 (NM_006285.1,1803-1821).
ggacccgtcctcaataaca

SEQ ID NO: 102384 - DNA, 19 bp, Homo sapiens
  siRNA target sequence for TESK1 (NM_006285.1,1804-1822).
gacccgtcctcaataacaa

SEQ ID NO: 102385 - DNA, 19 bp, Homo sapiens
  siRNA target sequence for TESK2 (NM_007170.1,402-420).
cggagcaaacggaattcaa

SEQ ID NO: 102386 - DNA, 19 bp, Homo sapiens
  siRNA target sequence for TESK2 (NM_007170.1,403-421).
ggagcaaacggaattcaat

SEQ ID NO: 102387 - DNA, 19 bp, Homo sapiens
  siRNA target sequence for TESK2 (NM_007170.1,404-422).
gagcaaacggaattcaatt

SEQ ID NO: 102388 - DNA, 19 bp, Homo sapiens
  siRNA target sequence for TESK2 (NM_007170.1,407-425).
caaacggaattcaattgca

SEQ ID NO: 102389 - DNA, 19 bp, Homo sapiens
  siRNA target sequence for TESK2 (NM_007170.1,517-535).
cttcgtatcgagctcttat

SEQ ID NO: 102390 - DNA, 19 bp, Homo sapiens
  siRNA target sequence for TESK2 (NM_007170.1,521-539).
gtatcgagctcttataagt

SEQ ID NO: 102391 - DNA, 19 bp, Homo sapiens
  siRNA target sequence for TESK2 (NM_007170.1,531-549).
cttataagtgccttttcca

SEQ ID NO: 102392 - DNA, 19 bp, Homo sapiens
  siRNA target sequence for TESK2 (NM_007170.1,548-566).
cagactgacgcgtttggat

SEQ ID NO: 102393 - DNA, 19 bp, Homo sapiens
  siRNA target sequence for TESK2 (NM_007170.1,639-657).
caggtgatggctcttaaga

SEQ ID NO: 102394 - DNA, 19 bp, Homo sapiens
  siRNA target sequence for TESK2 (NM_007170.1,670-688).
gcagtaaccgggcaaacat

SEQ ID NO: 102395 - DNA, 19 bp, Homo sapiens
  siRNA target sequence for TESK2 (NM_007170.1,696-714).
gaagtacagctcatgaata

SEQ ID NO: 102396 - DNA, 19 bp, Homo sapiens
  siRNA target sequence for TESK2 (NM_007170.1,726-744).
cccaacatccttaggtata

SEQ ID NO: 102397 - DNA, 19 bp, Homo sapiens
  siRNA target sequence for TESK2 (NM_007170.1,727-745).
ccaacatccttaggtatat

SEQ ID NO: 102398 - DNA, 19 bp, Homo sapiens
  siRNA target sequence for TESK2 (NM_007170.1,867-885).
catcgggacctcacatcta

SEQ ID NO: 102399 - DNA, 19 bp, Homo sapiens
  siRNA target sequence for TESK2 (NM_007170.1,883-901).
ctaagaactgcctgataaa

SEQ ID NO: 102400 - DNA, 19 bp, Homo sapiens
  siRNA target sequence for TESK2 (NM_007170.1,1031-1049).
ccgagatgagccctataat

SEQ ID NO: 102401 - DNA, 19 bp, Homo sapiens
  siRNA target sequence for TESK2 (NM_007170.1,1033-1051).
gagatgagccctataatga

SEQ ID NO: 102402 - DNA, 19 bp, Homo sapiens
  siRNA target sequence for TESK2 (NM_007170.1,1109-1127).
ggccgatccggactatctt

SEQ ID NO: 102403 - DNA, 19 bp, Homo sapiens
  siRNA target sequence for TESK2 (NM_007170.1,1147-1165).
ggctggactatgatgcttt

SEQ ID NO: 102404 - DNA, 19 bp, Homo sapiens
  siRNA target sequence for TESK2 (NM_007170.1,1191-1209).
ccagattttctgcaactta

SEQ ID NO: 102405 - DNA, 19 bp, Homo sapiens
  siRNA target sequence for TESK2 (NM_007170.1,1234-1252).
ccaaactgcgcccatcttt

SEQ ID NO: 102406 - DNA, 19 bp, Homo sapiens
  siRNA target sequence for TESK2 (NM_007170.1,1235-1253).
caaactgcgcccatctttt

SEQ ID NO: 102407 - DNA, 19 bp, Homo sapiens
  siRNA target sequence for TESK2 (NM_007170.1,1381-1399).
gctcactggatgacaagat

SEQ ID NO: 102408 - DNA, 19 bp, Homo sapiens
  siRNA target sequence for TESK2 (NM_007170.1,1489-1507).
gtgtcttggacccatacta

SEQ ID NO: 102409 - DNA, 19 bp, Homo sapiens
  siRNA target sequence for TESK2 (NM_007170.1,1536-1554).
cccaaagtcaaccctttta

SEQ ID NO: 102410 - DNA, 19 bp, Homo sapiens
  siRNA target sequence for TESK2 (NM_007170.1,1579-1597).
gcaagatcaagttttttga

SEQ ID NO: 102411 - DNA, 19 bp, Homo sapiens
  siRNA target sequence for TESK2 (NM_007170.1,1720-1738).
ctggttcgcctgagttctt

SEQ ID NO: 102412 - DNA, 19 bp, Homo sapiens
  siRNA target sequence for TESK2 (NM_007170.1,1768-1786).
gggaagaatcgctatctga

SEQ ID NO: 102413 - DNA, 19 bp, Homo sapiens
  siRNA target sequence for TESK2 (NM_007170.1,1801-1819).
gcctaagtagtctcaagta

SEQ ID NO: 102414 - DNA, 19 bp, Homo sapiens
  siRNA target sequence for TESK2 (NM_007170.1,1803-1821).
ctaagtagtctcaagtaca

SEQ ID NO: 102415 - DNA, 19 bp, Homo sapiens
  siRNA target sequence for TEX14 (NM_031272.2,155-173).
gttcaacttggtaccttaa

SEQ ID NO: 102416 - DNA, 19 bp, Homo sapiens
  siRNA target sequence for TEX14 (NM_031272.2,158-176).
caacttggtaccttaagaa

SEQ ID NO: 102417 - DNA, 19 bp, Homo sapiens
  siRNA target sequence for TEX14 (NM_031272.2,283-301).
gggccaaacagcacttttt

SEQ ID NO: 102418 - DNA, 19 bp, Homo sapiens
  siRNA target sequence for TEX14 (NM_031272.2,309-327).
cgttattgggccttaggaa

SEQ ID NO: 102419 - DNA, 19 bp, Homo sapiens
  siRNA target sequence for TEX14 (NM_031272.2,324-342).
ggaaattcgttgatgttct

SEQ ID NO: 102420 - DNA, 19 bp, Homo sapiens
  siRNA target sequence for TEX14 (NM_031272.2,343-361).
ggtggattatggatcagat

SEQ ID NO: 102421 - DNA, 19 bp, Homo sapiens
  siRNA target sequence for TEX14 (NM_031272.2,407-425).
gcattttcgggcaatcagt

SEQ ID NO: 102422 - DNA, 19 bp, Homo sapiens
  siRNA target sequence for TEX14 (NM_031272.2,416-434).
ggcaatcagtggatcctta

SEQ ID NO: 102423 - DNA, 19 bp, Homo sapiens
  siRNA target sequence for TEX14 (NM_031272.2,482-500).
ggtcaaaacccgaagactt

SEQ ID NO: 102424 - DNA, 19 bp, Homo sapiens
  siRNA target sequence for TEX14 (NM_031272.2,594-612).
cttacgacctcctgaagaa

SEQ ID NO: 102425 - DNA, 19 bp, Homo sapiens
  siRNA target sequence for TEX14 (NM_031272.2,598-616).
cgacctcctgaagaagata

SEQ ID NO: 102426 - DNA, 19 bp, Homo sapiens
  siRNA target sequence for TEX14 (NM_031272.2,687-705).
ctcctaaccgactgcttaa

SEQ ID NO: 102427 - DNA, 19 bp, Homo sapiens
  siRNA target sequence for TEX14 (NM_031272.2,772-790).
gacacagatggcctatcta

SEQ ID NO: 102428 - DNA, 19 bp, Homo sapiens
  siRNA target sequence for TEX14 (NM_031272.2,836-854).
gatgagcccaccttctctt

SEQ ID NO: 102429 - DNA, 19 bp, Homo sapiens
  siRNA target sequence for TEX14 (NM_031272.2,903-921).
gcagggtcacagtgaaaga

SEQ ID NO: 102430 - DNA, 19 bp, Homo sapiens
  siRNA target sequence for TEX14 (NM_031272.2,1014-1032).
cctacttgctacagttgat

SEQ ID NO: 102431 - DNA, 19 bp, Homo sapiens
  siRNA target sequence for TEX14 (NM_031272.2,1073-1091).
gtgtacgagcgcatcacta

SEQ ID NO: 102432 - DNA, 19 bp, Homo sapiens
  siRNA target sequence for TEX14 (NM_031272.2,1233-1251).
gctcctatgctgtccatat

SEQ ID NO: 102433 - DNA, 19 bp, Homo sapiens
  siRNA target sequence for TEX14 (NM_031272.2,1236-1254).
cctatgctgtccatatcat

SEQ ID NO: 102434 - DNA, 19 bp, Homo sapiens
  siRNA target sequence for TEX14 (NM_031272.2,1341-1359).
cccttcctacgcagctata

SEQ ID NO: 102435 - DNA, 19 bp, Homo sapiens
  siRNA target sequence for TEX14 (NM_031272.2,1343-1361).
cttcctacgcagctataca

SEQ ID NO: 102436 - DNA, 19 bp, Homo sapiens
  siRNA target sequence for TEX14 (NM_031272.2,1346-1364).
cctacgcagctatacaact

SEQ ID NO: 102437 - DNA, 19 bp, Homo sapiens
  siRNA target sequence for TEX14 (NM_031272.2,1368-1386).
ccgcaccagaagtgatctt

SEQ ID NO: 102438 - DNA, 19 bp, Homo sapiens
  siRNA target sequence for TEX14 (NM_031272.2,1369-1387).
cgcaccagaagtgatctta

SEQ ID NO: 102439 - DNA, 19 bp, Homo sapiens
  siRNA target sequence for TEX14 (NM_031272.2,1444-1462).
gattttaacagatgacata

SEQ ID NO: 102440 - DNA, 19 bp, Homo sapiens
  siRNA target sequence for TEX14 (NM_031272.2,1474-1492).
cttagatggctcagttgtt

SEQ ID NO: 102441 - DNA, 19 bp, Homo sapiens
  siRNA target sequence for TEX14 (NM_031272.2,1500-1518).
ccgtagtctcggggaatta

SEQ ID NO: 102442 - DNA, 19 bp, Homo sapiens
  siRNA target sequence for TEX14 (NM_031272.2,1501-1519).
cgtagtctcggggaattat

SEQ ID NO: 102443 - DNA, 19 bp, Homo sapiens
  siRNA target sequence for TEX14 (NM_031272.2,1502-1520).
gtagtctcggggaattatt

SEQ ID NO: 102444 - DNA, 19 bp, Homo sapiens
  siRNA target sequence for TEX14 (NM_031272.2,1507-1525).
ctcggggaattatttagaa

SEQ ID NO: 102445 - DNA, 19 bp, Homo sapiens
  siRNA target sequence for TEX14 (NM_031272.2,1532-1550).
gtcaggcttccgaaacctt

SEQ ID NO: 102446 - DNA, 19 bp, Homo sapiens
  siRNA target sequence for TEX14 (NM_031272.2,1536-1554).
ggcttccgaaaccttacta

SEQ ID NO: 102447 - DNA, 19 bp, Homo sapiens
  siRNA target sequence for TEX14 (NM_031272.2,1537-1555).
gcttccgaaaccttactat

SEQ ID NO: 102448 - DNA, 19 bp, Homo sapiens
  siRNA target sequence for TEX14 (NM_031272.2,1542-1560).
cgaaaccttactatgatat

SEQ ID NO: 102449 - DNA, 19 bp, Homo sapiens
  siRNA target sequence for TEX14 (NM_031272.2,1552-1570).
ctatgatattgttaagtca

SEQ ID NO: 102450 - DNA, 19 bp, Homo sapiens
  siRNA target sequence for TEX14 (NM_031272.2,1586-1604).
cagaaagaccgaactatga

SEQ ID NO: 102451 - DNA, 19 bp, Homo sapiens
  siRNA target sequence for TEX14 (NM_031272.2,1599-1617).
ctatgaaccttcaagatat

SEQ ID NO: 102452 - DNA, 19 bp, Homo sapiens
  siRNA target sequence for TEX14 (NM_031272.2,1613-1631).
gatatccggtatattctga

SEQ ID NO: 102453 - DNA, 19 bp, Homo sapiens
  siRNA target sequence for TEX14 (NM_031272.2,1704-1722).
gactccatcccgatgtcaa

SEQ ID NO: 102454 - DNA, 19 bp, Homo sapiens
  siRNA target sequence for TEX14 (NM_031272.2,1709-1727).
catcccgatgtcaatgtct

SEQ ID NO: 102455 - DNA, 19 bp, Homo sapiens
  siRNA target sequence for TEX14 (NM_031272.2,1714-1732).
cgatgtcaatgtctatcta

SEQ ID NO: 102456 - DNA, 19 bp, Homo sapiens
  siRNA target sequence for TEX14 (NM_031272.2,1761-1779).
cacctgacatggaaatcat

SEQ ID NO: 102457 - DNA, 19 bp, Homo sapiens
  siRNA target sequence for TEX14 (NM_031272.2,1819-1837).
ggttcactctttattcact

SEQ ID NO: 102458 - DNA, 19 bp, Homo sapiens
  siRNA target sequence for TEX14 (NM_031272.2,1834-1852).
cactgaggggacactagat

SEQ ID NO: 102459 - DNA, 19 bp, Homo sapiens
  siRNA target sequence for TEX14 (NM_031272.2,1908-1926).
cttgccctgctccatttat

SEQ ID NO: 102460 - DNA, 19 bp, Homo sapiens
  siRNA target sequence for TEX14 (NM_031272.2,1979-1997).
gaaatcaacgagatctact

SEQ ID NO: 102461 - DNA, 19 bp, Homo sapiens
  siRNA target sequence for TEX14 (NM_031272.2,1993-2011).
ctactcaggctgcttgatt

SEQ ID NO: 102462 - DNA, 19 bp, Homo sapiens
  siRNA target sequence for TEX14 (NM_031272.2,2067-2085).
gacctaaccaggtagatga

SEQ ID NO: 102463 - DNA, 19 bp, Homo sapiens
  siRNA target sequence for TEX14 (NM_031272.2,2175-2193).
cagagtactcttttgatga

SEQ ID NO: 102464 - DNA, 19 bp, Homo sapiens
  siRNA target sequence for TEX14 (NM_031272.2,2280-2298).
cgactgaggagtatctcat

SEQ ID NO: 102465 - DNA, 19 bp, Homo sapiens
  siRNA target sequence for TEX14 (NM_031272.2,2288-2306).
gagtatctcatcagtaagt

SEQ ID NO: 102466 - DNA, 19 bp, Homo sapiens
  siRNA target sequence for TEX14 (NM_031272.2,2290-2308).
gtatctcatcagtaagtgt

SEQ ID NO: 102467 - DNA, 19 bp, Homo sapiens
  siRNA target sequence for TEX14 (NM_031272.2,2334-2352).
caataatgcacgagaatga

SEQ ID NO: 102468 - DNA, 19 bp, Homo sapiens
  siRNA target sequence for TEX14 (NM_031272.2,2365-2383).
gaatatcgagcagatatta

SEQ ID NO: 102469 - DNA, 19 bp, Homo sapiens
  siRNA target sequence for TEX14 (NM_031272.2,2371-2389).
cgagcagatattagatgaa

SEQ ID NO: 102470 - DNA, 19 bp, Homo sapiens
  siRNA target sequence for TEX14 (NM_031272.2,2413-2431).
ggaagagcgcatgtcttta

SEQ ID NO: 102471 - DNA, 19 bp, Homo sapiens
  siRNA target sequence for TEX14 (NM_031272.2,2414-2432).
gaagagcgcatgtctttat

SEQ ID NO: 102472 - DNA, 19 bp, Homo sapiens
  siRNA target sequence for TEX14 (NM_031272.2,2434-2452).
ggccacttcaagagagttt

SEQ ID NO: 102473 - DNA, 19 bp, Homo sapiens
  siRNA target sequence for TEX14 (NM_031272.2,2437-2455).
cacttcaagagagtttaca

SEQ ID NO: 102474 - DNA, 19 bp, Homo sapiens
  siRNA target sequence for TEX14 (NM_031272.2,2479-2497).
cgtgggccctccatcttta

SEQ ID NO: 102475 - DNA, 19 bp, Homo sapiens
  siRNA target sequence for TEX14 (NM_031272.2,2480-2498).
gtgggccctccatctttaa

SEQ ID NO: 102476 - DNA, 19 bp, Homo sapiens
  siRNA target sequence for TEX14 (NM_031272.2,2483-2501).
ggccctccatctttaaact

SEQ ID NO: 102477 - DNA, 19 bp, Homo sapiens
  siRNA target sequence for TEX14 (NM_031272.2,2484-2502).
gccctccatctttaaacta

SEQ ID NO: 102478 - DNA, 19 bp, Homo sapiens
  siRNA target sequence for TEX14 (NM_031272.2,2601-2619).
gtgaccctggaaaacagaa

SEQ ID NO: 102479 - DNA, 19 bp, Homo sapiens
  siRNA target sequence for TEX14 (NM_031272.2,2824-2842).
gagtgtggaacctgtttct

SEQ ID NO: 102480 - DNA, 19 bp, Homo sapiens
  siRNA target sequence for TEX14 (NM_031272.2,3054-3072).
cggattggcagcgagttat

SEQ ID NO: 102481 - DNA, 19 bp, Homo sapiens
  siRNA target sequence for TEX14 (NM_031272.2,3055-3073).
ggattggcagcgagttatt

SEQ ID NO: 102482 - DNA, 19 bp, Homo sapiens
  siRNA target sequence for TEX14 (NM_031272.2,3060-3078).
ggcagcgagttattgagta

SEQ ID NO: 102483 - DNA, 19 bp, Homo sapiens
  siRNA target sequence for TEX14 (NM_031272.2,3061-3079).
gcagcgagttattgagtat

SEQ ID NO: 102484 - DNA, 19 bp, Homo sapiens
  siRNA target sequence for TEX14 (NM_031272.2,3065-3083).
cgagttattgagtatcata

SEQ ID NO: 102485 - DNA, 19 bp, Homo sapiens
  siRNA target sequence for TEX14 (NM_031272.2,3076-3094).
gtatcatagggaaaatgat

SEQ ID NO: 102486 - DNA, 19 bp, Homo sapiens
  siRNA target sequence for TEX14 (NM_031272.2,3220-3238).
gcaaccagagcatagtgaa

SEQ ID NO: 102487 - DNA, 19 bp, Homo sapiens
  siRNA target sequence for TEX14 (NM_031272.2,3261-3279).
cattggtggctgtagagaa

SEQ ID NO: 102488 - DNA, 19 bp, Homo sapiens
  siRNA target sequence for TEX14 (NM_031272.2,3350-3368).
gtctctggtgaggaaaagt

SEQ ID NO: 102489 - DNA, 19 bp, Homo sapiens
  siRNA target sequence for TEX14 (NM_031272.2,3409-3427).
gcccaggtctcaatttcaa

SEQ ID NO: 102490 - DNA, 19 bp, Homo sapiens
  siRNA target sequence for TEX14 (NM_031272.2,3504-3522).
cattgacggatattcaaga

SEQ ID NO: 102491 - DNA, 19 bp, Homo sapiens
  siRNA target sequence for TEX14 (NM_031272.2,3518-3536).
caagacctgtctagtatct

SEQ ID NO: 102492 - DNA, 19 bp, Homo sapiens
  siRNA target sequence for TEX14 (NM_031272.2,3526-3544).
gtctagtatctcctatgaa

SEQ ID NO: 102493 - DNA, 19 bp, Homo sapiens
  siRNA target sequence for TEX14 (NM_031272.2,3562-3580).
ggaagcttcatgcaaaaca

SEQ ID NO: 102494 - DNA, 19 bp, Homo sapiens
  siRNA target sequence for TEX14 (NM_031272.2,3625-3643).
cccagggtccgtttcttca

SEQ ID NO: 102495 - DNA, 19 bp, Homo sapiens
  siRNA target sequence for TEX14 (NM_031272.2,3642-3660).
cagctgccagtcagtataa

SEQ ID NO: 102496 - DNA, 19 bp, Homo sapiens
  siRNA target sequence for TEX14 (NM_031272.2,3645-3663).
ctgccagtcagtataaaga

SEQ ID NO: 102497 - DNA, 19 bp, Homo sapiens
  siRNA target sequence for TEX14 (NM_031272.2,3647-3665).
gccagtcagtataaagact

SEQ ID NO: 102498 - DNA, 19 bp, Homo sapiens
  siRNA target sequence for TEX14 (NM_031272.2,3666-3684).
gccttgaaagtatcacatt

SEQ ID NO: 102499 - DNA, 19 bp, Homo sapiens
  siRNA target sequence for TEX14 (NM_031272.2,3675-3693).
gtatcacatttcaggttaa

SEQ ID NO: 102500 - DNA, 19 bp, Homo sapiens
  siRNA target sequence for TEX14 (NM_031272.2,3819-3837).
caagactgactggtcttaa

SEQ ID NO: 102501 - DNA, 19 bp, Homo sapiens
  siRNA target sequence for TEX14 (NM_031272.2,3921-3939).
ggagcctgcctaaagtaga

SEQ ID NO: 102502 - DNA, 19 bp, Homo sapiens
  siRNA target sequence for TEX14 (NM_031272.2,3922-3940).
gagcctgcctaaagtagaa

SEQ ID NO: 102503 - DNA, 19 bp, Homo sapiens
  siRNA target sequence for TEX14 (NM_031272.2,3948-3966).
cacagcatcacattgatga

SEQ ID NO: 102504 - DNA, 19 bp, Homo sapiens
  siRNA target sequence for TEX14 (NM_031272.2,3978-3996).
catctcaggagctacttga

SEQ ID NO: 102505 - DNA, 19 bp, Homo sapiens
  siRNA target sequence for TEX14 (NM_031272.2,3985-4003).
ggagctacttgatgacatt

SEQ ID NO: 102506 - DNA, 19 bp, Homo sapiens
  siRNA target sequence for TEX14 (NM_031272.2,4266-4284).
gctctgaaagggagacaaa

SEQ ID NO: 102507 - DNA, 19 bp, Homo sapiens
  siRNA target sequence for TEX14 (NM_031272.2,4271-4289).
gaaagggagacaaatatca

SEQ ID NO: 102508 - DNA, 19 bp, Homo sapiens
  siRNA target sequence for TEX14 (NM_031272.2,4415-4433).
ctaggttggtccgaatcat

SEQ ID NO: 102509 - DNA, 19 bp, Homo sapiens
  siRNA target sequence for TEX14 (NM_198393.1,3295-3313).
gtccatgcaatcaacttgt

SEQ ID NO: 102510 - DNA, 19 bp, Homo sapiens
  siRNA target sequence for TEX14 (NM_198393.1,3320-3338).
gagtcttctgaggatataa

SEQ ID NO: 102511 - DNA, 19 bp, Homo sapiens
  siRNA target sequence for TEX14 (NM_198393.1,3359-3377).
gacggtgaatatttttact

SEQ ID NO: 102512 - DNA, 19 bp, Homo sapiens
  siRNA target sequence for TEX14 (NM_198393.1,3381-3399).
cgactgctcaagaaaactt

SEQ ID NO: 102513 - DNA, 19 bp, Homo sapiens
  siRNA target sequence for TGFBR1 (NM_004612.1,168-186).
cgacggcgttacagtgttt

SEQ ID NO: 102514 - DNA, 19 bp, Homo sapiens
  siRNA target sequence for TGFBR1 (NM_004612.1,256-274).
gaccacagacaaagttata

SEQ ID NO: 102515 - DNA, 19 bp, Homo sapiens
  siRNA target sequence for TGFBR1 (NM_004612.1,258-276).
ccacagacaaagttataca

SEQ ID NO: 102516 - DNA, 19 bp, Homo sapiens
  siRNA target sequence for TGFBR1 (NM_004612.1,282-300).
gcatgtgtatagctgaaat

SEQ ID NO: 102517 - DNA, 19 bp, Homo sapiens
  siRNA target sequence for TGFBR1 (NM_004612.1,314-332).
cgagataggccgtttgtat

SEQ ID NO: 102518 - DNA, 19 bp, Homo sapiens
  siRNA target sequence for TGFBR1 (NM_004612.1,329-347).
gtatgtgcaccctcttcaa

SEQ ID NO: 102519 - DNA, 19 bp, Homo sapiens
  siRNA target sequence for TGFBR1 (NM_004612.1,353-371).
gggtctgtgactacaacat

SEQ ID NO: 102520 - DNA, 19 bp, Homo sapiens
  siRNA target sequence for TGFBR1 (NM_004612.1,359-377).
gtgactacaacatattgct

SEQ ID NO: 102521 - DNA, 19 bp, Homo sapiens
  siRNA target sequence for TGFBR1 (NM_004612.1,378-396).
gcaatcaggaccattgcaa

SEQ ID NO: 102522 - DNA, 19 bp, Homo sapiens
  siRNA target sequence for TGFBR1 (NM_004612.1,379-397).
caatcaggaccattgcaat

SEQ ID NO: 102523 - DNA, 19 bp, Homo sapiens
  siRNA target sequence for TGFBR1 (NM_004612.1,407-425).
cttccaactactgtaaagt

SEQ ID NO: 102524 - DNA, 19 bp, Homo sapiens
  siRNA target sequence for TGFBR1 (NM_004612.1,410-428).
ccaactactgtaaagtcat

SEQ ID NO: 102525 - DNA, 19 bp, Homo sapiens
  siRNA target sequence for TGFBR1 (NM_004612.1,497-515).
ctcatgttgatggtctata

SEQ ID NO: 102526 - DNA, 19 bp, Homo sapiens
  siRNA target sequence for TGFBR1 (NM_004612.1,520-538).
ccacaaccgcactgtcatt

SEQ ID NO: 102527 - DNA, 19 bp, Homo sapiens
  siRNA target sequence for TGFBR1 (NM_004612.1,570-588).
cattagatcgcccttttat

SEQ ID NO: 102528 - DNA, 19 bp, Homo sapiens
  siRNA target sequence for TGFBR1 (NM_004612.1,597-615).
gtactacgttgaaagactt

SEQ ID NO: 102529 - DNA, 19 bp, Homo sapiens
  siRNA target sequence for TGFBR1 (NM_004612.1,600-618).
ctacgttgaaagacttaat

SEQ ID NO: 102530 - DNA, 19 bp, Homo sapiens
  siRNA target sequence for TGFBR1 (NM_004612.1,603-621).
cgttgaaagacttaattta

SEQ ID NO: 102531 - DNA, 19 bp, Homo sapiens
  siRNA target sequence for TGFBR1 (NM_004612.1,611-629).
gacttaatttatgatatga

SEQ ID NO: 102532 - DNA, 19 bp, Homo sapiens
  siRNA target sequence for TGFBR1 (NM_004612.1,642-660).
ctggctcaggtttaccatt

SEQ ID NO: 102533 - DNA, 19 bp, Homo sapiens
  siRNA target sequence for TGFBR1 (NM_004612.1,672-690).
gaacaattgcgagaactat

SEQ ID NO: 102534 - DNA, 19 bp, Homo sapiens
  siRNA target sequence for TGFBR1 (NM_004612.1,675-693).
caattgcgagaactattgt

SEQ ID NO: 102535 - DNA, 19 bp, Homo sapiens
  siRNA target sequence for TGFBR1 (NM_004612.1,681-699).
cgagaactattgtgttaca

SEQ ID NO: 102536 - DNA, 19 bp, Homo sapiens
  siRNA target sequence for TGFBR1 (NM_004612.1,706-724).
cattggcaaaggtcgattt

SEQ ID NO: 102537 - DNA, 19 bp, Homo sapiens
  siRNA target sequence for TGFBR1 (NM_004612.1,716-734).
ggtcgatttggagaagttt

SEQ ID NO: 102538 - DNA, 19 bp, Homo sapiens
  siRNA target sequence for TGFBR1 (NM_004612.1,813-831).
cagagatttatcaaactgt

SEQ ID NO: 102539 - DNA, 19 bp, Homo sapiens
  siRNA target sequence for TGFBR1 (NM_004612.1,830-848).
gtaatgttacgtcatgaaa

SEQ ID NO: 102540 - DNA, 19 bp, Homo sapiens
  siRNA target sequence for TGFBR1 (NM_004612.1,850-868).
catcctgggatttatagca

SEQ ID NO: 102541 - DNA, 19 bp, Homo sapiens
  siRNA target sequence for TGFBR1 (NM_004612.1,906-924).
ggttggtgtcagattatca

SEQ ID NO: 102542 - DNA, 19 bp, Homo sapiens
  siRNA target sequence for TGFBR1 (NM_004612.1,928-946).
gcatggatccctttttgat

SEQ ID NO: 102543 - DNA, 19 bp, Homo sapiens
  siRNA target sequence for TGFBR1 (NM_004612.1,929-947).
catggatccctttttgatt

SEQ ID NO: 102544 - DNA, 19 bp, Homo sapiens
  siRNA target sequence for TGFBR1 (NM_004612.1,932-950).
ggatccctttttgattact

SEQ ID NO: 102545 - DNA, 19 bp, Homo sapiens
  siRNA target sequence for TGFBR1 (NM_004612.1,1008-1026).
gcggtcttgcccatcttca

SEQ ID NO: 102546 - DNA, 19 bp, Homo sapiens
  siRNA target sequence for TGFBR1 (NM_004612.1,1011-1029).
gtcttgcccatcttcacat

SEQ ID NO: 102547 - DNA, 19 bp, Homo sapiens
  siRNA target sequence for TGFBR1 (NM_004612.1,1136-1154).
ctggcagtaagacatgatt

SEQ ID NO: 102548 - DNA, 19 bp, Homo sapiens
  siRNA target sequence for TGFBR1 (NM_004612.1,1148-1166).
catgattcagccacagata

SEQ ID NO: 102549 - DNA, 19 bp, Homo sapiens
  siRNA target sequence for TGFBR1 (NM_004612.1,1217-1235).
cctgaagttctcgatgatt

SEQ ID NO: 102550 - DNA, 19 bp, Homo sapiens
  siRNA target sequence for TGFBR1 (NM_004612.1,1223-1241).
gttctcgatgattccataa

SEQ ID NO: 102551 - DNA, 19 bp, Homo sapiens
  siRNA target sequence for TGFBR1 (NM_004612.1,1226-1244).
ctcgatgattccataaata

SEQ ID NO: 102552 - DNA, 19 bp, Homo sapiens
  siRNA target sequence for TGFBR1 (NM_004612.1,1268-1286).
cgtgctgacatctatgcaa

SEQ ID NO: 102553 - DNA, 19 bp, Homo sapiens
  siRNA target sequence for TGFBR1 (NM_004612.1,1279-1297).
ctatgcaatgggcttagta

SEQ ID NO: 102554 - DNA, 19 bp, Homo sapiens
  siRNA target sequence for TGFBR1 (NM_004612.1,1291-1309).
cttagtattctgggaaatt

SEQ ID NO: 102555 - DNA, 19 bp, Homo sapiens
  siRNA target sequence for TGFBR1 (NM_004612.1,1324-1342).
cattggtggaattcatgaa

SEQ ID NO: 102556 - DNA, 19 bp, Homo sapiens
  siRNA target sequence for TGFBR1 (NM_004612.1,1377-1395).
ctgacccatcagttgaaga

SEQ ID NO: 102557 - DNA, 19 bp, Homo sapiens
  siRNA target sequence for TGFBR1 (NM_004612.1,1470-1488).
gagtaatggctaaaattat

SEQ ID NO: 102558 - DNA, 19 bp, Homo sapiens
  siRNA target sequence for TGFBR1 (NM_004612.1,1534-1552).
gcggattaagaaaacatta

SEQ ID NO: 102559 - DNA, 19 bp, Homo sapiens
  siRNA target sequence for TGFBR2 (NM_003242.3,416-434).
cgttcagaagtcggttaat

SEQ ID NO: 102560 - DNA, 19 bp, Homo sapiens
  siRNA target sequence for TGFBR2 (NM_003242.3,417-435).
gttcagaagtcggttaata

SEQ ID NO: 102561 - DNA, 19 bp, Homo sapiens
  siRNA target sequence for TGFBR2 (NM_003242.3,427-445).
cggttaataacgacatgat

SEQ ID NO: 102562 - DNA, 19 bp, Homo sapiens
  siRNA target sequence for TGFBR2 (NM_003242.3,458-476).
caacggtgcagtcaagttt

SEQ ID NO: 102563 - DNA, 19 bp, Homo sapiens
  siRNA target sequence for TGFBR2 (NM_003242.3,590-608).
ggctgtatggagaaagaat

SEQ ID NO: 102564 - DNA, 19 bp, Homo sapiens
  siRNA target sequence for TGFBR2 (NM_003242.3,601-619).
gaaagaatgacgagaacat

SEQ ID NO: 102565 - DNA, 19 bp, Homo sapiens
  siRNA target sequence for TGFBR2 (NM_003242.3,650-668).
gctcccctaccatgacttt

SEQ ID NO: 102566 - DNA, 19 bp, Homo sapiens
  siRNA target sequence for TGFBR2 (NM_003242.3,651-669).
ctcccctaccatgacttta

SEQ ID NO: 102567 - DNA, 19 bp, Homo sapiens
  siRNA target sequence for TGFBR2 (NM_003242.3,653-671).
cccctaccatgactttatt

SEQ ID NO: 102568 - DNA, 19 bp, Homo sapiens
  siRNA target sequence for TGFBR2 (NM_003242.3,684-702).
gcttctccaaagtgcatta

SEQ ID NO: 102569 - DNA, 19 bp, Homo sapiens
  siRNA target sequence for TGFBR2 (NM_003242.3,685-703).
cttctccaaagtgcattat

SEQ ID NO: 102570 - DNA, 19 bp, Homo sapiens
  siRNA target sequence for TGFBR2 (NM_003242.3,720-738).
cctggtgagactttcttca

SEQ ID NO: 102571 - DNA, 19 bp, Homo sapiens
  siRNA target sequence for TGFBR2 (NM_003242.3,721-739).
ctggtgagactttcttcat

SEQ ID NO: 102572 - DNA, 19 bp, Homo sapiens
  siRNA target sequence for TGFBR2 (NM_003242.3,723-741).
ggtgagactttcttcatgt

SEQ ID NO: 102573 - DNA, 19 bp, Homo sapiens
  siRNA target sequence for TGFBR2 (NM_003242.3,808-826).
ctgacttgttgctagtcat

SEQ ID NO: 102574 - DNA, 19 bp, Homo sapiens
  siRNA target sequence for TGFBR2 (NM_003242.3,812-830).
cttgttgctagtcatattt

SEQ ID NO: 102575 - DNA, 19 bp, Homo sapiens
  siRNA target sequence for TGFBR2 (NM_003242.3,815-833).
gttgctagtcatatttcaa

SEQ ID NO: 102576 - DNA, 19 bp, Homo sapiens
  siRNA target sequence for TGFBR2 (NM_003242.3,1021-1039).
ccacgtgtgccaacaacat

SEQ ID NO: 102577 - DNA, 19 bp, Homo sapiens
  siRNA target sequence for TGFBR2 (NM_003242.3,1153-1171).
cagtggcagtcaagatctt

SEQ ID NO: 102578 - DNA, 19 bp, Homo sapiens
  siRNA target sequence for TGFBR2 (NM_003242.3,1277-1295).
gacggagttggggaaacaa

SEQ ID NO: 102579 - DNA, 19 bp, Homo sapiens
  siRNA target sequence for TGFBR2 (NM_003242.3,1281-1299).
gagttggggaaacaatact

SEQ ID NO: 102580 - DNA, 19 bp, Homo sapiens
  siRNA target sequence for TGFBR2 (NM_003242.3,1470-1488).
gacctcaagagctccaata

SEQ ID NO: 102581 - DNA, 19 bp, Homo sapiens
  siRNA target sequence for TGFBR2 (NM_003242.3,1483-1501).
ccaatatcctcgtgaagaa

SEQ ID NO: 102582 - DNA, 19 bp, Homo sapiens
  siRNA target sequence for TGFBR2 (NM_003242.3,1623-1641).
ctagaatccaggatgaatt

SEQ ID NO: 102583 - DNA, 19 bp, Homo sapiens
  siRNA target sequence for TGFBR2 (NM_003242.3,1988-2006).
ctgctcggaggagaagatt

SEQ ID NO: 102584 - DNA, 19 bp, Homo sapiens
  siRNA target sequence for TGFBR2 (NM_003242.3,2010-2028).
gaagacggctccctaaaca

SEQ ID NO: 102585 - DNA, 19 bp, Homo sapiens
  siRNA target sequence for TGFBR2 (NM_003242.3,2013-2031).
gacggctccctaaacacta

SEQ ID NO: 102586 - DNA, 19 bp, Homo sapiens
  siRNA target sequence for TIE (NM_005424.2,494-512).
ggtgacaccgctgtacttt

SEQ ID NO: 102587 - DNA, 19 bp, Homo sapiens
  siRNA target sequence for TIE (NM_005424.2,558-576).
gcaacggatcctacttcta

SEQ ID NO: 102588 - DNA, 19 bp, Homo sapiens
  siRNA target sequence for TIE (NM_005424.2,641-659).
ccatcgagcggcatctaca

SEQ ID NO: 102589 - DNA, 19 bp, Homo sapiens
  siRNA target sequence for TIE (NM_005424.2,796-814).
ccatgacggcgaatgtgta

SEQ ID NO: 102590 - DNA, 19 bp, Homo sapiens
  siRNA target sequence for TIE (NM_005424.2,797-815).
catgacggcgaatgtgtat

SEQ ID NO: 102591 - DNA, 19 bp, Homo sapiens
  siRNA target sequence for TIE (NM_005424.2,1149-1167).
cctcagaactggagttcaa

SEQ ID NO: 102592 - DNA, 19 bp, Homo sapiens
  siRNA target sequence for TIE (NM_005424.2,1391-1409).
cgcttcaaggtcaatgtga

SEQ ID NO: 102593 - DNA, 19 bp, Homo sapiens
  siRNA target sequence for TIE (NM_005424.2,1581-1599).
gtgagaacgtgacgttaat

SEQ ID NO: 102594 - DNA, 19 bp, Homo sapiens
  siRNA target sequence for TIE (NM_005424.2,2084-2102).
gctctgcctgggccaatat

SEQ ID NO: 102595 - DNA, 19 bp, Homo sapiens
  siRNA target sequence for TIE (NM_005424.2,2087-2105).
ctgcctgggccaatatcca

SEQ ID NO: 102596 - DNA, 19 bp, Homo sapiens
  siRNA target sequence for TIE (NM_005424.2,2671-2689).
gatgaacgcagccatcaaa

SEQ ID NO: 102597 - DNA, 19 bp, Homo sapiens
  siRNA target sequence for TIE (NM_005424.2,2799-2817).
gtaagaaccgaggttactt

SEQ ID NO: 102598 - DNA, 19 bp, Homo sapiens
  siRNA target sequence for TIE (NM_005424.2,2803-2821).
gaaccgaggttacttgtat

SEQ ID NO: 102599 - DNA, 19 bp, Homo sapiens
  siRNA target sequence for TIE (NM_005424.2,2815-2833).
cttgtatatcgctattgaa

SEQ ID NO: 102600 - DNA, 19 bp, Homo sapiens
  siRNA target sequence for TIE (NM_005424.2,2818-2836).
gtatatcgctattgaatat

SEQ ID NO: 102601 - DNA, 19 bp, Homo sapiens
  siRNA target sequence for TIE (NM_005424.2,3046-3064).
gaacctagcctccaagatt

SEQ ID NO: 102602 - DNA, 19 bp, Homo sapiens
  siRNA target sequence for TIE (NM_005424.2,3081-3099).
ctcggggagaggaggttta

SEQ ID NO: 102603 - DNA, 19 bp, Homo sapiens
  siRNA target sequence for TIE (NM_005424.2,3084-3102).
ggggagaggaggtttatgt

SEQ ID NO: 102604 - DNA, 19 bp, Homo sapiens
  siRNA target sequence for TIE (NM_005424.2,3086-3104).
ggagaggaggtttatgtga

SEQ ID NO: 102605 - DNA, 19 bp, Homo sapiens
  siRNA target sequence for TIE (NM_005424.2,3087-3105).
gagaggaggtttatgtgaa

SEQ ID NO: 102606 - DNA, 19 bp, Homo sapiens
  siRNA target sequence for TIE (NM_005424.2,3203-3221).
cttctttgggagatagtga

SEQ ID NO: 102607 - DNA, 19 bp, Homo sapiens
  siRNA target sequence for TIE (NM_005424.2,3252-3270).
cctgtgccgagctctatga

SEQ ID NO: 102608 - DNA, 19 bp, Homo sapiens
  siRNA target sequence for TIE (NM_005424.2,3258-3276).
ccgagctctatgaaaagct

SEQ ID NO: 102609 - DNA, 19 bp, Homo sapiens
  siRNA target sequence for TIE (NM_005424.2,3306-3324).
gaaactgtgacgatgaagt

SEQ ID NO: 102610 - DNA, 19 bp, Homo sapiens
  siRNA target sequence for TIE (NM_005424.2,3417-3435).
ccaggaaggcctatgtgaa

SEQ ID NO: 102611 - DNA, 19 bp, Homo sapiens
  siRNA target sequence for TIE (NM_005424.2,3443-3461).
ctgtttgagaacttcactt

SEQ ID NO: 102612 - DNA, 19 bp, Homo sapiens
  siRNA target sequence for TIMM44 (NM_006351.2,53-71).
cctcggcagtggaatccaa

SEQ ID NO: 102613 - DNA, 19 bp, Homo sapiens
  siRNA target sequence for TIMM44 (NM_006351.2,54-72).
ctcggcagtggaatccaat

SEQ ID NO: 102614 - DNA, 19 bp, Homo sapiens
  siRNA target sequence for TIMM44 (NM_006351.2,56-74).
cggcagtggaatccaattt

SEQ ID NO: 102615 - DNA, 19 bp, Homo sapiens
  siRNA target sequence for TIMM44 (NM_006351.2,58-76).
gcagtggaatccaatttct

SEQ ID NO: 102616 - DNA, 19 bp, Homo sapiens
  siRNA target sequence for TIMM44 (NM_006351.2,96-114).
catgggtcgacctatcaga

SEQ ID NO: 102617 - DNA, 19 bp, Homo sapiens
  siRNA target sequence for TIMM44 (NM_006351.2,134-152).
gctgccactgtccaaatca

SEQ ID NO: 102618 - DNA, 19 bp, Homo sapiens
  siRNA target sequence for TIMM44 (NM_006351.2,180-198).
ctgtccggcttgctagata

SEQ ID NO: 102619 - DNA, 19 bp, Homo sapiens
  siRNA target sequence for TIMM44 (NM_006351.2,182-200).
gtccggcttgctagataat

SEQ ID NO: 102620 - DNA, 19 bp, Homo sapiens
  siRNA target sequence for TIMM44 (NM_006351.2,184-202).
ccggcttgctagataatgt

SEQ ID NO: 102621 - DNA, 19 bp, Homo sapiens
  siRNA target sequence for TIMM44 (NM_006351.2,195-213).
gataatgtcaaacaagaat

SEQ ID NO: 102622 - DNA, 19 bp, Homo sapiens
  siRNA target sequence for TIMM44 (NM_006351.2,299-317).
ggccagaaggaaatacaaa

SEQ ID NO: 102623 - DNA, 19 bp, Homo sapiens
  siRNA target sequence for TIMM44 (NM_006351.2,397-415).
gccttcacgaagtcagtaa

SEQ ID NO: 102624 - DNA, 19 bp, Homo sapiens
  siRNA target sequence for TIMM44 (NM_006351.2,399-417).
cttcacgaagtcagtaaaa

SEQ ID NO: 102625 - DNA, 19 bp, Homo sapiens
  siRNA target sequence for TIMM44 (NM_006351.2,478-496).
cggccgagtcggtatccaa

SEQ ID NO: 102626 - DNA, 19 bp, Homo sapiens
  siRNA target sequence for TIMM44 (NM_006351.2,479-497).
ggccgagtcggtatccaaa

SEQ ID NO: 102627 - DNA, 19 bp, Homo sapiens
  siRNA target sequence for TIMM44 (NM_006351.2,615-633).
cagcgactccggaagagaa

SEQ ID NO: 102628 - DNA, 19 bp, Homo sapiens
  siRNA target sequence for TIMM44 (NM_006351.2,634-652).
cggagtttgcgggagataa

SEQ ID NO: 102629 - DNA, 19 bp, Homo sapiens
  siRNA target sequence for TIMM44 (NM_006351.2,636-654).
gagtttgcgggagataagt

SEQ ID NO: 102630 - DNA, 19 bp, Homo sapiens
  siRNA target sequence for TIMM44 (NM_006351.2,750-768).
gagaacaacgtggtgttta

SEQ ID NO: 102631 - DNA, 19 bp, Homo sapiens
  siRNA target sequence for TIMM44 (NM_006351.2,771-789).
cggttcttcgagatgaaga

SEQ ID NO: 102632 - DNA, 19 bp, Homo sapiens
  siRNA target sequence for TIMM44 (NM_006351.2,772-790).
ggttcttcgagatgaagat

SEQ ID NO: 102633 - DNA, 19 bp, Homo sapiens
  siRNA target sequence for TIMM44 (NM_006351.2,933-951).
gacaaggaccggtttctga

SEQ ID NO: 102634 - DNA, 19 bp, Homo sapiens
  siRNA target sequence for TIMM44 (NM_006351.2,935-953).
caaggaccggtttctgaaa

SEQ ID NO: 102635 - DNA, 19 bp, Homo sapiens
  siRNA target sequence for TIMM44 (NM_006351.2,939-957).
gaccggtttctgaaacagt

SEQ ID NO: 102636 - DNA, 19 bp, Homo sapiens
  siRNA target sequence for TIMM44 (NM_006351.2,1000-1018).
ctggagagcttgacattct

SEQ ID NO: 102637 - DNA, 19 bp, Homo sapiens
  siRNA target sequence for TIMM44 (NM_006351.2,1019-1037).
caaagactggtgctatgaa

SEQ ID NO: 102638 - DNA, 19 bp, Homo sapiens
  siRNA target sequence for TIMM44 (NM_006351.2,1102-1120).
ctcgcatcctagacattga

SEQ ID NO: 102639 - DNA, 19 bp, Homo sapiens
  siRNA target sequence for TIMM44 (NM_006351.2,1104-1122).
cgcatcctagacattgaca

SEQ ID NO: 102640 - DNA, 19 bp, Homo sapiens
  siRNA target sequence for TK1 (NM_003258.1,135-153).
gccgatgttctcaggaaaa

SEQ ID NO: 102641 - DNA, 19 bp, Homo sapiens
  siRNA target sequence for TK1 (NM_003258.1,529-547).
cgggaagccgcctatacca

SEQ ID NO: 102642 - DNA, 19 bp, Homo sapiens
  siRNA target sequence for TK1 (NM_003258.1,530-548).
gggaagccgcctataccaa

SEQ ID NO: 102643 - DNA, 19 bp, Homo sapiens
  siRNA target sequence for TK1 (NM_003258.1,613-631).
cggctctgctacttcaaga

SEQ ID NO: 102644 - DNA, 19 bp, Homo sapiens
  siRNA target sequence for TK2 (NM_004614.2,464-482).
cctggcctcccgataaaga

SEQ ID NO: 102645 - DNA, 19 bp, Homo sapiens
  siRNA target sequence for TK2 (NM_004614.2,510-528).
ctgtgtcgagggcaatatt

SEQ ID NO: 102646 - DNA, 19 bp, Homo sapiens
  siRNA target sequence for TK2 (NM_004614.2,514-532).
gtcgagggcaatattgcaa

SEQ ID NO: 102647 - DNA, 19 bp, Homo sapiens
  siRNA target sequence for TK2 (NM_004614.2,668-686).
gtcttacgctacagactta

SEQ ID NO: 102648 - DNA, 19 bp, Homo sapiens
  siRNA target sequence for TK2 (NM_004614.2,755-773).
cgattcacagcgcaagata

SEQ ID NO: 102649 - DNA, 19 bp, Homo sapiens
  siRNA target sequence for TK2 (NM_004614.2,781-799).
gtagaaaacctgtatagaa

SEQ ID NO: 102650 - DNA, 19 bp, Homo sapiens
  siRNA target sequence for TK2 (NM_004614.2,812-830).
cagaagtggactatgtagt

SEQ ID NO: 102651 - DNA, 19 bp, Homo sapiens
  siRNA target sequence for TK2 (NM_004614.2,832-850).
ctgtcggaatggtttgact

SEQ ID NO: 102652 - DNA, 19 bp, Homo sapiens
  siRNA target sequence for TK2 (NM_004614.2,868-886).
gacgtgtctgttgatttga

SEQ ID NO: 102653 - DNA, 19 bp, Homo sapiens
  siRNA target sequence for TK2 (NM_004614.2,870-888).
cgtgtctgttgatttgata

SEQ ID NO: 102654 - DNA, 19 bp, Homo sapiens
  siRNA target sequence for TK2 (NM_004614.2,969-987).
ggaatacctggaagcaatt

SEQ ID NO: 102655 - DNA, 19 bp, Homo sapiens
  siRNA target sequence for TK2 (NM_004614.2,1099-1117).
caaaatcgggatcgaatat

SEQ ID NO: 102656 - DNA, 19 bp, Homo sapiens
  siRNA target sequence for TK2 (NM_004614.2,1123-1141).
ccagagaatcggaagcatt

SEQ ID NO: 102657 - DNA, 19 bp, Homo sapiens
  siRNA target sequence for TLK1 (NM_012290.3,202-220).
ccaagaaggcaagagttat

SEQ ID NO: 102658 - DNA, 19 bp, Homo sapiens
  siRNA target sequence for TLK1 (NM_012290.3,203-221).
caagaaggcaagagttatt

SEQ ID NO: 102659 - DNA, 19 bp, Homo sapiens
  siRNA target sequence for TLK1 (NM_012290.3,283-301).
ggagctaaagcctcaacaa

SEQ ID NO: 102660 - DNA, 19 bp, Homo sapiens
  siRNA target sequence for TLK1 (NM_012290.3,336-354).
gggatctttaagtgacaaa

SEQ ID NO: 102661 - DNA, 19 bp, Homo sapiens
  siRNA target sequence for TLK1 (NM_012290.3,431-449).
gtagtcagggaaaaagtat

SEQ ID NO: 102662 - DNA, 19 bp, Homo sapiens
  siRNA target sequence for TLK1 (NM_012290.3,463-481).
cacaaaattagcgactatt

SEQ ID NO: 102663 - DNA, 19 bp, Homo sapiens
  siRNA target sequence for TLK1 (NM_012290.3,465-483).
caaaattagcgactatttt

SEQ ID NO: 102664 - DNA, 19 bp, Homo sapiens
  siRNA target sequence for TLK1 (NM_012290.3,473-491).
gcgactattttgaatacca

SEQ ID NO: 102665 - DNA, 19 bp, Homo sapiens
  siRNA target sequence for TLK1 (NM_012290.3,533-551).
caatccgttctcctcaaaa

SEQ ID NO: 102666 - DNA, 19 bp, Homo sapiens
  siRNA target sequence for TLK1 (NM_012290.3,537-555).
ccgttctcctcaaaattca

SEQ ID NO: 102667 - DNA, 19 bp, Homo sapiens
  siRNA target sequence for TLK1 (NM_012290.3,623-641).
gggaccaccctattgtaca

SEQ ID NO: 102668 - DNA, 19 bp, Homo sapiens
  siRNA target sequence for TLK1 (NM_012290.3,624-642).
ggaccaccctattgtacaa

SEQ ID NO: 102669 - DNA, 19 bp, Homo sapiens
  siRNA target sequence for TLK1 (NM_012290.3,640-658).
caaccaaagcaattatcct

SEQ ID NO: 102670 - DNA, 19 bp, Homo sapiens
  siRNA target sequence for TLK1 (NM_012290.3,687-705).
gctgaaattagcagcatta

SEQ ID NO: 102671 - DNA, 19 bp, Homo sapiens
  siRNA target sequence for TLK1 (NM_012290.3,697-715).
gcagcattagaaagtaata

SEQ ID NO: 102672 - DNA, 19 bp, Homo sapiens
  siRNA target sequence for TLK1 (NM_012290.3,743-761).
gacgtatagatgatttgct

SEQ ID NO: 102673 - DNA, 19 bp, Homo sapiens
  siRNA target sequence for TLK1 (NM_012290.3,780-798).
cagacggcaaatagatgaa

SEQ ID NO: 102674 - DNA, 19 bp, Homo sapiens
  siRNA target sequence for TLK1 (NM_012290.3,934-952).
gggcactttacaacagtta

SEQ ID NO: 102675 - DNA, 19 bp, Homo sapiens
  siRNA target sequence for TLK1 (NM_012290.3,936-954).
gcactttacaacagttaga

SEQ ID NO: 102676 - DNA, 19 bp, Homo sapiens
  siRNA target sequence for TLK1 (NM_012290.3,960-978).
cgcttcatttactgaacaa

SEQ ID NO: 102677 - DNA, 19 bp, Homo sapiens
  siRNA target sequence for TLK1 (NM_012290.3,1080-1098).
caaacctcccacagctaat

SEQ ID NO: 102678 - DNA, 19 bp, Homo sapiens
  siRNA target sequence for TLK1 (NM_012290.3,1088-1106).
ccacagctaataattctca

SEQ ID NO: 102679 - DNA, 19 bp, Homo sapiens
  siRNA target sequence for TLK1 (NM_012290.3,1109-1127).
caccctctaccaattctga

SEQ ID NO: 102680 - DNA, 19 bp, Homo sapiens
  siRNA target sequence for TLK1 (NM_012290.3,1174-1192).
ccctttgttagaccaaatt

SEQ ID NO: 102681 - DNA, 19 bp, Homo sapiens
  siRNA target sequence for TLK1 (NM_012290.3,1175-1193).
cctttgttagaccaaattt

SEQ ID NO: 102682 - DNA, 19 bp, Homo sapiens
  siRNA target sequence for TLK1 (NM_012290.3,1176-1194).
ctttgttagaccaaattta

SEQ ID NO: 102683 - DNA, 19 bp, Homo sapiens
  siRNA target sequence for TLK1 (NM_012290.3,1206-1224).
gactttggcagaatatcat

SEQ ID NO: 102684 - DNA, 19 bp, Homo sapiens
  siRNA target sequence for TLK1 (NM_012290.3,1250-1268).
gactaggacatctcaaaaa

SEQ ID NO: 102685 - DNA, 19 bp, Homo sapiens
  siRNA target sequence for TLK1 (NM_012290.3,1324-1342).
cacatacgtgagctgaaaa

SEQ ID NO: 102686 - DNA, 19 bp, Homo sapiens
  siRNA target sequence for TLK1 (NM_012290.3,1326-1344).
catacgtgagctgaaaaga

SEQ ID NO: 102687 - DNA, 19 bp, Homo sapiens
  siRNA target sequence for TLK1 (NM_012290.3,1371-1389).
caaagatcacccaacatta

SEQ ID NO: 102688 - DNA, 19 bp, Homo sapiens
  siRNA target sequence for TLK1 (NM_012290.3,1378-1396).
cacccaacattaaatgaaa

SEQ ID NO: 102689 - DNA, 19 bp, Homo sapiens
  siRNA target sequence for TLK1 (NM_012290.3,1380-1398).
cccaacattaaatgaaaga

SEQ ID NO: 102690 - DNA, 19 bp, Homo sapiens
  siRNA target sequence for TLK1 (NM_012290.3,1382-1400).
caacattaaatgaaagata

SEQ ID NO: 102691 - DNA, 19 bp, Homo sapiens
  siRNA target sequence for TLK1 (NM_012290.3,1427-1445).
gtggctttagtgaagtgta

SEQ ID NO: 102692 - DNA, 19 bp, Homo sapiens
  siRNA target sequence for TLK1 (NM_012290.3,1429-1447).
ggctttagtgaagtgtata

SEQ ID NO: 102693 - DNA, 19 bp, Homo sapiens
  siRNA target sequence for TLK1 (NM_012290.3,1430-1448).
gctttagtgaagtgtataa

SEQ ID NO: 102694 - DNA, 19 bp, Homo sapiens
  siRNA target sequence for TLK1 (NM_012290.3,1548-1566).
ctgcagagagtatagaata

SEQ ID NO: 102695 - DNA, 19 bp, Homo sapiens
  siRNA target sequence for TLK1 (NM_012290.3,1553-1571).
gagagtatagaatacacaa

SEQ ID NO: 102696 - DNA, 19 bp, Homo sapiens
  siRNA target sequence for TLK1 (NM_012290.3,1616-1634).
ccttggatacagatacgtt

SEQ ID NO: 102697 - DNA, 19 bp, Homo sapiens
  siRNA target sequence for TLK1 (NM_012290.3,1620-1638).
ggatacagatacgttttgt

SEQ ID NO: 102698 - DNA, 19 bp, Homo sapiens
  siRNA target sequence for TLK1 (NM_012290.3,1621-1639).
gatacagatacgttttgta

SEQ ID NO: 102699 - DNA, 19 bp, Homo sapiens
  siRNA target sequence for TLK1 (NM_012290.3,1661-1679).
gcaatgacttggatttcta

SEQ ID NO: 102700 - DNA, 19 bp, Homo sapiens
  siRNA target sequence for TLK1 (NM_012290.3,1666-1684).
gacttggatttctatctga

SEQ ID NO: 102701 - DNA, 19 bp, Homo sapiens
  siRNA target sequence for TLK1 (NM_012290.3,1711-1729).
gaagctcggtctattgtaa

SEQ ID NO: 102702 - DNA, 19 bp, Homo sapiens
  siRNA target sequence for TLK1 (NM_012290.3,1715-1733).
ctcggtctattgtaatgca

SEQ ID NO: 102703 - DNA, 19 bp, Homo sapiens
  siRNA target sequence for TLK1 (NM_012290.3,1751-1769).
gatatctcaatgagatcaa

SEQ ID NO: 102704 - DNA, 19 bp, Homo sapiens
  siRNA target sequence for TLK1 (NM_012290.3,1762-1780).
gagatcaaaccccctatta

SEQ ID NO: 102705 - DNA, 19 bp, Homo sapiens
  siRNA target sequence for TLK1 (NM_012290.3,1767-1785).
caaaccccctattatacat

SEQ ID NO: 102706 - DNA, 19 bp, Homo sapiens
  siRNA target sequence for TLK1 (NM_012290.3,1772-1790).
cccctattatacattatga

SEQ ID NO: 102707 - DNA, 19 bp, Homo sapiens
  siRNA target sequence for TLK1 (NM_012290.3,1775-1793).
ctattatacattatgatct

SEQ ID NO: 102708 - DNA, 19 bp, Homo sapiens
  siRNA target sequence for TLK1 (NM_012290.3,1826-1844).
cagcatgtggtgaaatcaa

SEQ ID NO: 102709 - DNA, 19 bp, Homo sapiens
  siRNA target sequence for TLK1 (NM_012290.3,1859-1877).
gtctgtccaagattatgga

SEQ ID NO: 102710 - DNA, 19 bp, Homo sapiens
  siRNA target sequence for TLK1 (NM_012290.3,1886-1904).
gctatggtgtagatggaat

SEQ ID NO: 102711 - DNA, 19 bp, Homo sapiens
  siRNA target sequence for TLK1 (NM_012290.3,1897-1915).
gatggaatggatctaactt

SEQ ID NO: 102712 - DNA, 19 bp, Homo sapiens
  siRNA target sequence for TLK1 (NM_012290.3,1918-1936).
cagggggcaggcacttact

SEQ ID NO: 102713 - DNA, 19 bp, Homo sapiens
  siRNA target sequence for TLK1 (NM_012290.3,1924-1942).
gcaggcacttactggtatt

SEQ ID NO: 102714 - DNA, 19 bp, Homo sapiens
  siRNA target sequence for TLK1 (NM_012290.3,1925-1943).
caggcacttactggtattt

SEQ ID NO: 102715 - DNA, 19 bp, Homo sapiens
  siRNA target sequence for TLK1 (NM_012290.3,2006-2024).
ggtcggttggagtcatctt

SEQ ID NO: 102716 - DNA, 19 bp, Homo sapiens
  siRNA target sequence for TLK1 (NM_012290.3,2125-2143).
cctgtaaaaccggttgtaa

SEQ ID NO: 102717 - DNA, 19 bp, Homo sapiens
  siRNA target sequence for TLK1 (NM_012290.3,2147-2165).
gtgaagccaaggcatttat

SEQ ID NO: 102718 - DNA, 19 bp, Homo sapiens
  siRNA target sequence for TLK1 (NM_012290.3,2170-2188).
cgctgtttggcatatcgaa

SEQ ID NO: 102719 - DNA, 19 bp, Homo sapiens
  siRNA target sequence for TLK1 (NM_012290.3,2171-2189).
gctgtttggcatatcgaaa

SEQ ID NO: 102720 - DNA, 19 bp, Homo sapiens
  siRNA target sequence for TLK1 (NM_012290.3,2172-2190).
ctgtttggcatatcgaaaa

SEQ ID NO: 102721 - DNA, 19 bp, Homo sapiens
  siRNA target sequence for TLK1 (NM_012290.3,2174-2192).
gtttggcatatcgaaaaga

SEQ ID NO: 102722 - DNA, 19 bp, Homo sapiens
  siRNA target sequence for TLK1 (NM_012290.3,2178-2196).
ggcatatcgaaaagaagat

SEQ ID NO: 102723 - DNA, 19 bp, Homo sapiens
  siRNA target sequence for TLK1 (NM_012290.3,2312-2330).
cttcaagcataattactta

SEQ ID NO: 102724 - DNA, 19 bp, Homo sapiens
  siRNA target sequence for TNK1 (NM_003985.1,168-186).
cagttggcccagttttact

SEQ ID NO: 102725 - DNA, 19 bp, Homo sapiens
  siRNA target sequence for TNK1 (NM_003985.1,315-333).
cgttctgggcctaagtcta

SEQ ID NO: 102726 - DNA, 19 bp, Homo sapiens
  siRNA target sequence for TNK1 (NM_003985.1,316-334).
gttctgggcctaagtctaa

SEQ ID NO: 102727 - DNA, 19 bp, Homo sapiens
  siRNA target sequence for TNK1 (NM_003985.1,321-339).
gggcctaagtctaagaact

SEQ ID NO: 102728 - DNA, 19 bp, Homo sapiens
  siRNA target sequence for TNK1 (NM_003985.1,616-634).
gagaggtatcggtcatgat

SEQ ID NO: 102729 - DNA, 19 bp, Homo sapiens
  siRNA target sequence for TNK1 (NM_003985.1,618-636).
gaggtatcggtcatgatga

SEQ ID NO: 102730 - DNA, 19 bp, Homo sapiens
  siRNA target sequence for TNK1 (NM_003985.1,621-639).
gtatcggtcatgatgaact

SEQ ID NO: 102731 - DNA, 19 bp, Homo sapiens
  siRNA target sequence for TNK1 (NM_003985.1,1025-1043).
ctcggacgtgtggatgttt

SEQ ID NO: 102732 - DNA, 19 bp, Homo sapiens
  siRNA target sequence for TNK1 (NM_003985.1,1209-1227).
gccgaccggcctagctttt

SEQ ID NO: 102733 - DNA, 19 bp, Homo sapiens
  siRNA target sequence for TNK1 (NM_003985.1,2050-2068).
ggcgcatcctggagcatta

SEQ ID NO: 102734 - DNA, 19 bp, Homo sapiens
  siRNA target sequence for TOM1L2 (NM_144678.2,174-192).
gaggattggacgttgaata

SEQ ID NO: 102735 - DNA, 19 bp, Homo sapiens
  siRNA target sequence for TOM1L2 (NM_144678.2,357-375).
gtggccaaccgagatttca

SEQ ID NO: 102736 - DNA, 19 bp, Homo sapiens
  siRNA target sequence for TOM1L2 (NM_144678.2,647-665).
cgtcgttcgaggaaacaca

SEQ ID NO: 102737 - DNA, 19 bp, Homo sapiens
  siRNA target sequence for TOM1L2 (NM_144678.2,648-666).
gtcgttcgaggaaacacaa

SEQ ID NO: 102738 - DNA, 19 bp, Homo sapiens
  siRNA target sequence for TOM1L2 (NM_144678.2,650-668).
cgttcgaggaaacacaaaa

SEQ ID NO: 102739 - DNA, 19 bp, Homo sapiens
  siRNA target sequence for TOM1L2 (NM_144678.2,671-689).
catgtctgagatgttaaca

SEQ ID NO: 102740 - DNA, 19 bp, Homo sapiens
  siRNA target sequence for TOM1L2 (NM_144678.2,1029-1047).
cagcttgcaggcttagact

SEQ ID NO: 102741 - DNA, 19 bp, Homo sapiens
  siRNA target sequence for TOM1L2 (NM_144678.2,1099-1117).
cccgtgacggctttgacat

SEQ ID NO: 102742 - DNA, 19 bp, Homo sapiens
  siRNA target sequence for TOM1L2 (NM_144678.2,1102-1120).
gtgacggctttgacatgtt

SEQ ID NO: 102743 - DNA, 19 bp, Homo sapiens
  siRNA target sequence for TOM1L2 (NM_144678.2,1258-1276).
ctgtcatggacgacattga

SEQ ID NO: 102744 - DNA, 19 bp, Homo sapiens
  siRNA target sequence for TOM1L2 (NM_144678.2,1292-1310).
cgacctgaagggtgatgat

SEQ ID NO: 102745 - DNA, 19 bp, Homo sapiens
  siRNA target sequence for TOM1L2 (NM_144678.2,1316-1334).
ggagggtgtcacaagtgaa

SEQ ID NO: 102746 - DNA, 19 bp, Homo sapiens
  siRNA target sequence for TOM1L2 (NM_144678.2,1327-1345).
caagtgaagagtttgataa

SEQ ID NO: 102747 - DNA, 19 bp, Homo sapiens
  siRNA target sequence for TOPK (NM_018492.2,222-240).
caagacaccaagcaaatta

SEQ ID NO: 102748 - DNA, 19 bp, Homo sapiens
  siRNA target sequence for TOPK (NM_018492.2,318-336).
ctttggtactggggtaaat

SEQ ID NO: 102749 - DNA, 19 bp, Homo sapiens
  siRNA target sequence for TOPK (NM_018492.2,322-340).
ggtactggggtaaatgtgt

SEQ ID NO: 102750 - DNA, 19 bp, Homo sapiens
  siRNA target sequence for TOPK (NM_018492.2,323-341).
gtactggggtaaatgtgta

SEQ ID NO: 102751 - DNA, 19 bp, Homo sapiens
  siRNA target sequence for TOPK (NM_018492.2,328-346).
ggggtaaatgtgtacctaa

SEQ ID NO: 102752 - DNA, 19 bp, Homo sapiens
  siRNA target sequence for TOPK (NM_018492.2,329-347).
gggtaaatgtgtacctaat

SEQ ID NO: 102753 - DNA, 19 bp, Homo sapiens
  siRNA target sequence for TOPK (NM_018492.2,379-397).
ccttgggctgtaaaaaaga

SEQ ID NO: 102754 - DNA, 19 bp, Homo sapiens
  siRNA target sequence for TOPK (NM_018492.2,403-421).
cctatatgtaatgatcatt

SEQ ID NO: 102755 - DNA, 19 bp, Homo sapiens
  siRNA target sequence for TOPK (NM_018492.2,430-448).
gtgtatcaaaagagactaa

SEQ ID NO: 102756 - DNA, 19 bp, Homo sapiens
  siRNA target sequence for TOPK (NM_018492.2,443-461).
gactaatggatgaagctaa

SEQ ID NO: 102757 - DNA, 19 bp, Homo sapiens
  siRNA target sequence for TOPK (NM_018492.2,493-511).
gttggttatcgtgctttta

SEQ ID NO: 102758 - DNA, 19 bp, Homo sapiens
  siRNA target sequence for TOPK (NM_018492.2,527-545).
gcagtctgtgtcttgctat

SEQ ID NO: 102759 - DNA, 19 bp, Homo sapiens
  siRNA target sequence for TOPK (NM_018492.2,554-572).
gaggtgaaaagtctctaaa

SEQ ID NO: 102760 - DNA, 19 bp, Homo sapiens
  siRNA target sequence for TOPK (NM_018492.2,576-594).
cttaatagaagaacgatat

SEQ ID NO: 102761 - DNA, 19 bp, Homo sapiens
  siRNA target sequence for TOPK (NM_018492.2,651-669).
ggcaagagggttaaagtat

SEQ ID NO: 102762 - DNA, 19 bp, Homo sapiens
  siRNA target sequence for TOPK (NM_018492.2,730-748).
ggcgattttgaaacaatta

SEQ ID NO: 102763 - DNA, 19 bp, Homo sapiens
  siRNA target sequence for TOPK (NM_018492.2,802-820).
gaccctgaggcttgttaca

SEQ ID NO: 102764 - DNA, 19 bp, Homo sapiens
  siRNA target sequence for TOPK (NM_018492.2,804-822).
ccctgaggcttgttacatt

SEQ ID NO: 102765 - DNA, 19 bp, Homo sapiens
  siRNA target sequence for TOPK (NM_018492.2,932-950).
cgattccacacattaatct

SEQ ID NO: 102766 - DNA, 19 bp, Homo sapiens
  siRNA target sequence for TOPK (NM_018492.2,933-951).
gattccacacattaatctt

SEQ ID NO: 102767 - DNA, 19 bp, Homo sapiens
  siRNA target sequence for TOPK (NM_018492.2,938-956).
cacacattaatctttcaaa

SEQ ID NO: 102768 - DNA, 19 bp, Homo sapiens
  siRNA target sequence for TOPK (NM_018492.2,1026-1044).
gggaactaggccacctatt

SEQ ID NO: 102769 - DNA, 19 bp, Homo sapiens
  siRNA target sequence for TOPK (NM_018492.2,1034-1052).
ggccacctattaatatgga

SEQ ID NO: 102770 - DNA, 19 bp, Homo sapiens
  siRNA target sequence for TOPK (NM_018492.2,1089-1107).
cttctctgtatgcactaat

SEQ ID NO: 102771 - DNA, 19 bp, Homo sapiens
  siRNA target sequence for TOPK (NM_018492.2,1092-1110).
ctctgtatgcactaatgaa

SEQ ID NO: 102772 - DNA, 19 bp, Homo sapiens
  siRNA target sequence for TOR1B (NM_014506.1,183-201).
cggctacctgtcctacaat

SEQ ID NO: 102773 - DNA, 19 bp, Homo sapiens
  siRNA target sequence for TOR1B (NM_014506.1,260-278).
ctctcaagctggatttgga

SEQ ID NO: 102774 - DNA, 19 bp, Homo sapiens
  siRNA target sequence for TOR1B (NM_014506.1,301-319).
ctagccacggaagtgattt

SEQ ID NO: 102775 - DNA, 19 bp, Homo sapiens
  siRNA target sequence for TOR1B (NM_014506.1,304-322).
gccacggaagtgattttca

SEQ ID NO: 102776 - DNA, 19 bp, Homo sapiens
  siRNA target sequence for TOR1B (NM_014506.1,442-460).
ccaaaaggtctgaagagta

SEQ ID NO: 102777 - DNA, 19 bp, Homo sapiens
  siRNA target sequence for TOR1B (NM_014506.1,562-580).
gcatgtgcgaactctgttt

SEQ ID NO: 102778 - DNA, 19 bp, Homo sapiens
  siRNA target sequence for TOR1B (NM_014506.1,566-584).
gtgcgaactctgttttcat

SEQ ID NO: 102779 - DNA, 19 bp, Homo sapiens
  siRNA target sequence for TOR1B (NM_014506.1,568-586).
gcgaactctgttttcatat

SEQ ID NO: 102780 - DNA, 19 bp, Homo sapiens
  siRNA target sequence for TOR1B (NM_014506.1,569-587).
cgaactctgttttcatatt

SEQ ID NO: 102781 - DNA, 19 bp, Homo sapiens
  siRNA target sequence for TOR1B (NM_014506.1,614-632).
ggatcattgacgcaatcaa

SEQ ID NO: 102782 - DNA, 19 bp, Homo sapiens
  siRNA target sequence for TOR1B (NM_014506.1,624-642).
cgcaatcaagccgtttcta

SEQ ID NO: 102783 - DNA, 19 bp, Homo sapiens
  siRNA target sequence for TOR1B (NM_014506.1,712-730).
ggggaccttataactaaga

SEQ ID NO: 102784 - DNA, 19 bp, Homo sapiens
  siRNA target sequence for TOR1B (NM_014506.1,725-743).
ctaagacggctcttgactt

SEQ ID NO: 102785 - DNA, 19 bp, Homo sapiens
  siRNA target sequence for TOR1B (NM_014506.1,801-819).
gtctgtcggagtcttcaat

SEQ ID NO: 102786 - DNA, 19 bp, Homo sapiens
  siRNA target sequence for TOR1B (NM_014506.1,803-821).
ctgtcggagtcttcaataa

SEQ ID NO: 102787 - DNA, 19 bp, Homo sapiens
  siRNA target sequence for TOR1B (NM_014506.1,805-823).
gtcggagtcttcaataata

SEQ ID NO: 102788 - DNA, 19 bp, Homo sapiens
  siRNA target sequence for TOR1B (NM_014506.1,807-825).
cggagtcttcaataataaa

SEQ ID NO: 102789 - DNA, 19 bp, Homo sapiens
  siRNA target sequence for TOR1B (NM_014506.1,848-866).
gactgatcgacaaaaacct

SEQ ID NO: 102790 - DNA, 19 bp, Homo sapiens
  siRNA target sequence for TOR1B (NM_014506.1,855-873).
cgacaaaaacctcattgat

SEQ ID NO: 102791 - DNA, 19 bp, Homo sapiens
  siRNA target sequence for TOR1B (NM_014506.1,856-874).
gacaaaaacctcattgatt

SEQ ID NO: 102792 - DNA, 19 bp, Homo sapiens
  siRNA target sequence for TOR1B (NM_014506.1,942-960).
ccgtggttctgccatagat

SEQ ID NO: 102793 - DNA, 19 bp, Homo sapiens
  siRNA target sequence for TOR1B (NM_014506.1,950-968).
ctgccatagatgaagacat

SEQ ID NO: 102794 - DNA, 19 bp, Homo sapiens
  siRNA target sequence for TPX2 (NM_012112.4,708-726).
gttaaaagctcttattcct

SEQ ID NO: 102795 - DNA, 19 bp, Homo sapiens
  siRNA target sequence for TPX2 (NM_012112.4,733-751).
ccccctcggatttcatcaa

SEQ ID NO: 102796 - DNA, 19 bp, Homo sapiens
  siRNA target sequence for TPX2 (NM_012112.4,734-752).
cccctcggatttcatcaat

SEQ ID NO: 102797 - DNA, 19 bp, Homo sapiens
  siRNA target sequence for TPX2 (NM_012112.4,735-753).
ccctcggatttcatcaatt

SEQ ID NO: 102798 - DNA, 19 bp, Homo sapiens
  siRNA target sequence for TPX2 (NM_012112.4,813-831).
gccaatttggagaataagt

SEQ ID NO: 102799 - DNA, 19 bp, Homo sapiens
  siRNA target sequence for TPX2 (NM_012112.4,916-934).
ctttgaaaccagttgacaa

SEQ ID NO: 102800 - DNA, 19 bp, Homo sapiens
  siRNA target sequence for TPX2 (NM_012112.4,1129-1147).
gatgtgccactcctgtaat

SEQ ID NO: 102801 - DNA, 19 bp, Homo sapiens
  siRNA target sequence for TPX2 (NM_012112.4,1132-1150).
gtgccactcctgtaatcat

SEQ ID NO: 102802 - DNA, 19 bp, Homo sapiens
  siRNA target sequence for TPX2 (NM_012112.4,1141-1159).
ctgtaatcatcgatgaaat

SEQ ID NO: 102803 - DNA, 19 bp, Homo sapiens
  siRNA target sequence for TPX2 (NM_012112.4,1217-1235).
cagtgctcatcaagatact

SEQ ID NO: 102804 - DNA, 19 bp, Homo sapiens
  siRNA target sequence for TPX2 (NM_012112.4,1262-1280).
gaaagccaagggtagacat

SEQ ID NO: 102805 - DNA, 19 bp, Homo sapiens
  siRNA target sequence for TPX2 (NM_012112.4,1267-1285).
ccaagggtagacatactgt

SEQ ID NO: 102806 - DNA, 19 bp, Homo sapiens
  siRNA target sequence for TPX2 (NM_012112.4,1428-1446).
gggcaacctgtgaagaaat

SEQ ID NO: 102807 - DNA, 19 bp, Homo sapiens
  siRNA target sequence for TPX2 (NM_012112.4,1453-1471).
gccaggtcaccaaatcagt

SEQ ID NO: 102808 - DNA, 19 bp, Homo sapiens
  siRNA target sequence for TPX2 (NM_012112.4,1454-1472).
ccaggtcaccaaatcagtt

SEQ ID NO: 102809 - DNA, 19 bp, Homo sapiens
  siRNA target sequence for TPX2 (NM_012112.4,1486-1504).
gcacagatgagcgaatcaa

SEQ ID NO: 102810 - DNA, 19 bp, Homo sapiens
  siRNA target sequence for TPX2 (NM_012112.4,1489-1507).
cagatgagcgaatcaaaca

SEQ ID NO: 102811 - DNA, 19 bp, Homo sapiens
  siRNA target sequence for TPX2 (NM_012112.4,1513-1531).
ctaagaaccaggaggaata

SEQ ID NO: 102812 - DNA, 19 bp, Homo sapiens
  siRNA target sequence for TPX2 (NM_012112.4,1541-1559).
gaactttacatctgaacta

SEQ ID NO: 102813 - DNA, 19 bp, Homo sapiens
  siRNA target sequence for TPX2 (NM_012112.4,1576-1594).
ctcctgcccgagtgactaa

SEQ ID NO: 102814 - DNA, 19 bp, Homo sapiens
  siRNA target sequence for TPX2 (NM_012112.4,1589-1607).
gactaagggatgtaccatt

SEQ ID NO: 102815 - DNA, 19 bp, Homo sapiens
  siRNA target sequence for TPX2 (NM_012112.4,1603-1621).
ccattgttaagcctttcaa

SEQ ID NO: 102816 - DNA, 19 bp, Homo sapiens
  siRNA target sequence for TPX2 (NM_012112.4,1708-1726).
gaacccctaacagatatca

SEQ ID NO: 102817 - DNA, 19 bp, Homo sapiens
  siRNA target sequence for TPX2 (NM_012112.4,1713-1731).
cctaacagatatcatttga

SEQ ID NO: 102818 - DNA, 19 bp, Homo sapiens
  siRNA target sequence for TPX2 (NM_012112.4,1757-1775).
gttaccctccaaatcttct

SEQ ID NO: 102819 - DNA, 19 bp, Homo sapiens
  siRNA target sequence for TPX2 (NM_012112.4,1878-1896).
ctcgagaaattgcaacaat

SEQ ID NO: 102820 - DNA, 19 bp, Homo sapiens
  siRNA target sequence for TPX2 (NM_012112.4,1943-1961).
gcccatcttgcccaagaaa

SEQ ID NO: 102821 - DNA, 19 bp, Homo sapiens
  siRNA target sequence for TPX2 (NM_012112.4,1982-2000).
cgagcctattggctttgat

SEQ ID NO: 102822 - DNA, 19 bp, Homo sapiens
  siRNA target sequence for TPX2 (NM_012112.4,1983-2001).
gagcctattggctttgatt

SEQ ID NO: 102823 - DNA, 19 bp, Homo sapiens
  siRNA target sequence for TPX2 (NM_012112.4,2025-2043).
gagcgagaatcaaagaaga

SEQ ID NO: 102824 - DNA, 19 bp, Homo sapiens
  siRNA target sequence for TPX2 (NM_012112.4,2077-2095).
gaccttgccctactaagat

SEQ ID NO: 102825 - DNA, 19 bp, Homo sapiens
  siRNA target sequence for TPX2 (NM_012112.4,2079-2097).
ccttgccctactaagattt

SEQ ID NO: 102826 - DNA, 19 bp, Homo sapiens
  siRNA target sequence for TPX2 (NM_012112.4,2080-2098).
cttgccctactaagatttt

SEQ ID NO: 102827 - DNA, 19 bp, Homo sapiens
  siRNA target sequence for TPX2 (NM_012112.4,2083-2101).
gccctactaagattttgga

SEQ ID NO: 102828 - DNA, 19 bp, Homo sapiens
  siRNA target sequence for TPX2 (NM_012112.4,2213-2231).
ggacgaaccggtagtgata

SEQ ID NO: 102829 - DNA, 19 bp, Homo sapiens
  siRNA target sequence for TPX2 (NM_012112.4,2214-2232).
gacgaaccggtagtgataa

SEQ ID NO: 102830 - DNA, 19 bp, Homo sapiens
  siRNA target sequence for TPX2 (NM_012112.4,2216-2234).
cgaaccggtagtgataaaa

SEQ ID NO: 102831 - DNA, 19 bp, Homo sapiens
  siRNA target sequence for TPX2 (NM_012112.4,2236-2254).
ctcaacctgtgccacatta

SEQ ID NO: 102832 - DNA, 19 bp, Homo sapiens
  siRNA target sequence for TPX2 (NM_012112.4,2315-2333).
gtttgattctcgagacaaa

SEQ ID NO: 102833 - DNA, 19 bp, Homo sapiens
  siRNA target sequence for TPX2 (NM_012112.4,2380-2398).
gggaggtgcccaagttcaa

SEQ ID NO: 102834 - DNA, 19 bp, Homo sapiens
  siRNA target sequence for TPX2 (NM_012112.4,2412-2430).
cctcattttgacaccatta

SEQ ID NO: 102835 - DNA, 19 bp, Homo sapiens
  siRNA target sequence for TPX2 (NM_012112.4,2831-2849).
ggtgcataaggcaaatcca

SEQ ID NO: 102836 - DNA, 19 bp, Homo sapiens
  siRNA target sequence for TRA1 (NM_003299.1,230-248).
caaggacggatgatgaagt

SEQ ID NO: 102837 - DNA, 19 bp, Homo sapiens
  siRNA target sequence for TRA1 (NM_003299.1,314-332).
gagagaagtcggaaaagtt

SEQ ID NO: 102838 - DNA, 19 bp, Homo sapiens
  siRNA target sequence for TRA1 (NM_003299.1,334-352).
gccttccaagccgaagtta

SEQ ID NO: 102839 - DNA, 19 bp, Homo sapiens
  siRNA target sequence for TRA1 (NM_003299.1,335-353).
ccttccaagccgaagttaa

SEQ ID NO: 102840 - DNA, 19 bp, Homo sapiens
  siRNA target sequence for TRA1 (NM_003299.1,343-361).
gccgaagttaacagaatga

SEQ ID NO: 102841 - DNA, 19 bp, Homo sapiens
  siRNA target sequence for TRA1 (NM_003299.1,344-362).
ccgaagttaacagaatgat

SEQ ID NO: 102842 - DNA, 19 bp, Homo sapiens
  siRNA target sequence for TRA1 (NM_003299.1,356-374).
gaatgatgaaacttatcat

SEQ ID NO: 102843 - DNA, 19 bp, Homo sapiens
  siRNA target sequence for TRA1 (NM_003299.1,360-378).
gatgaaacttatcatcaat

SEQ ID NO: 102844 - DNA, 19 bp, Homo sapiens
  siRNA target sequence for TRA1 (NM_003299.1,363-381).
gaaacttatcatcaattca

SEQ ID NO: 102845 - DNA, 19 bp, Homo sapiens
  siRNA target sequence for TRA1 (NM_003299.1,431-449).
ctgatgctttagataagat

SEQ ID NO: 102846 - DNA, 19 bp, Homo sapiens
  siRNA target sequence for TRA1 (NM_003299.1,442-460).
gataagataaggctaatat

SEQ ID NO: 102847 - DNA, 19 bp, Homo sapiens
  siRNA target sequence for TRA1 (NM_003299.1,496-514).
gaactaacagtcaaaatta

SEQ ID NO: 102848 - DNA, 19 bp, Homo sapiens
  siRNA target sequence for TRA1 (NM_003299.1,499-517).
ctaacagtcaaaattaagt

SEQ ID NO: 102849 - DNA, 19 bp, Homo sapiens
  siRNA target sequence for TRA1 (NM_003299.1,548-566).
cagacaccggtgtaggaat

SEQ ID NO: 102850 - DNA, 19 bp, Homo sapiens
  siRNA target sequence for TRA1 (NM_003299.1,611-629).
ctgggacaagcgagttttt

SEQ ID NO: 102851 - DNA, 19 bp, Homo sapiens
  siRNA target sequence for TRA1 (NM_003299.1,613-631).
gggacaagcgagtttttaa

SEQ ID NO: 102852 - DNA, 19 bp, Homo sapiens
  siRNA target sequence for TRA1 (NM_003299.1,658-676).
ggccagtcaacttctgaat

SEQ ID NO: 102853 - DNA, 19 bp, Homo sapiens
  siRNA target sequence for TRA1 (NM_003299.1,659-677).
gccagtcaacttctgaatt

SEQ ID NO: 102854 - DNA, 19 bp, Homo sapiens
  siRNA target sequence for TRA1 (NM_003299.1,687-705).
gtttggtgtcggtttctat

SEQ ID NO: 102855 - DNA, 19 bp, Homo sapiens
  siRNA target sequence for TRA1 (NM_003299.1,710-728).
ccttccttgtagcagataa

SEQ ID NO: 102856 - DNA, 19 bp, Homo sapiens
  siRNA target sequence for TRA1 (NM_003299.1,714-732).
ccttgtagcagataaggtt

SEQ ID NO: 102857 - DNA, 19 bp, Homo sapiens
  siRNA target sequence for TRA1 (NM_003299.1,715-733).
cttgtagcagataaggtta

SEQ ID NO: 102858 - DNA, 19 bp, Homo sapiens
  siRNA target sequence for TRA1 (NM_003299.1,721-739).
gcagataaggttattgtca

SEQ ID NO: 102859 - DNA, 19 bp, Homo sapiens
  siRNA target sequence for TRA1 (NM_003299.1,774-792).
ggagtctgactccaatgaa

SEQ ID NO: 102860 - DNA, 19 bp, Homo sapiens
  siRNA target sequence for TRA1 (NM_003299.1,775-793).
gagtctgactccaatgaat

SEQ ID NO: 102861 - DNA, 19 bp, Homo sapiens
  siRNA target sequence for TRA1 (NM_003299.1,777-795).
gtctgactccaatgaattt

SEQ ID NO: 102862 - DNA, 19 bp, Homo sapiens
  siRNA target sequence for TRA1 (NM_003299.1,829-847).
ggacggggaacgacaatta

SEQ ID NO: 102863 - DNA, 19 bp, Homo sapiens
  siRNA target sequence for TRA1 (NM_003299.1,874-892).
gattaccttgaattggata

SEQ ID NO: 102864 - DNA, 19 bp, Homo sapiens
  siRNA target sequence for TRA1 (NM_003299.1,2272-2290).
cttcggtcagggtatcttt

SEQ ID NO: 102865 - DNA, 19 bp, Homo sapiens
  siRNA target sequence for TRA1 (NM_003299.1,2277-2295).
gtcagggtatcttttacca

SEQ ID NO: 102866 - DNA, 19 bp, Homo sapiens
  siRNA target sequence for TRA1 (NM_003299.1,2327-2345).
gaatgcttcgcctcagttt

SEQ ID NO: 102867 - DNA, 19 bp, Homo sapiens
  siRNA target sequence for TRAD (NM_007064.1,314-332).
ccaccaacactcttaagaa

SEQ ID NO: 102868 - DNA, 19 bp, Homo sapiens
  siRNA target sequence for TRAD (NM_007064.1,541-559).
ctcccaccacctatgaaga

SEQ ID NO: 102869 - DNA, 19 bp, Homo sapiens
  siRNA target sequence for TRAD (NM_007064.1,615-633).
gcaggcttccactgaagta

SEQ ID NO: 102870 - DNA, 19 bp, Homo sapiens
  siRNA target sequence for TRAD (NM_007064.1,932-950).
gaggaaaggacaaaatcgt

SEQ ID NO: 102871 - DNA, 19 bp, Homo sapiens
  siRNA target sequence for TRAD (NM_007064.1,948-966).
cgtgtttggaaatattcat

SEQ ID NO: 102872 - DNA, 19 bp, Homo sapiens
  siRNA target sequence for TRAD (NM_007064.1,1000-1018).
gcggaactggaaaagtgta

SEQ ID NO: 102873 - DNA, 19 bp, Homo sapiens
  siRNA target sequence for TRAD (NM_007064.1,1001-1019).
cggaactggaaaagtgtat

SEQ ID NO: 102874 - DNA, 19 bp, Homo sapiens
  siRNA target sequence for TRAD (NM_007064.1,1034-1052).
gattggcacagctctttat

SEQ ID NO: 102875 - DNA, 19 bp, Homo sapiens
  siRNA target sequence for TRAD (NM_007064.1,1072-1090).
cacatctacgtgtggtatt

SEQ ID NO: 102876 - DNA, 19 bp, Homo sapiens
  siRNA target sequence for TRAD (NM_007064.1,1136-1154).
cctactttgaggaggtaaa

SEQ ID NO: 102877 - DNA, 19 bp, Homo sapiens
  siRNA target sequence for TRAD (NM_007064.1,1137-1155).
ctactttgaggaggtaaaa

SEQ ID NO: 102878 - DNA, 19 bp, Homo sapiens
  siRNA target sequence for TRAD (NM_007064.1,1239-1257).
ggacttcctgagatacagt

SEQ ID NO: 102879 - DNA, 19 bp, Homo sapiens
  siRNA target sequence for TRAD (NM_007064.1,1319-1337).
ccaaacgctgcaatgacat

SEQ ID NO: 102880 - DNA, 19 bp, Homo sapiens
  siRNA target sequence for TRAD (NM_007064.1,1441-1459).
cagtcccggaccaaagaga

SEQ ID NO: 102881 - DNA, 19 bp, Homo sapiens
  siRNA target sequence for TRAD (NM_007064.1,1528-1546).
ggctacatgttcaaaagga

SEQ ID NO: 102882 - DNA, 19 bp, Homo sapiens
  siRNA target sequence for TRAD (NM_007064.1,1544-1562).
ggagcatcaagatgaatta

SEQ ID NO: 102883 - DNA, 19 bp, Homo sapiens
  siRNA target sequence for TRAD (NM_007064.1,1547-1565).
gcatcaagatgaattactt

SEQ ID NO: 102884 - DNA, 19 bp, Homo sapiens
  siRNA target sequence for TRAD (NM_007064.1,1587-1605).
caatgatccctgcaagttt

SEQ ID NO: 102885 - DNA, 19 bp, Homo sapiens
  siRNA target sequence for TRAD (NM_007064.1,1598-1616).
gcaagtttgcactcatgaa

SEQ ID NO: 102886 - DNA, 19 bp, Homo sapiens
  siRNA target sequence for TRAD (NM_007064.1,1683-1701).
ggacatcaatcaagtctta

SEQ ID NO: 102887 - DNA, 19 bp, Homo sapiens
  siRNA target sequence for TRAD (NM_007064.1,1702-1720).
gaaacacagcgagactttt

SEQ ID NO: 102888 - DNA, 19 bp, Homo sapiens
  siRNA target sequence for TRAD (NM_007064.1,1731-1749).
gcaatcgcccattgagtat

SEQ ID NO: 102889 - DNA, 19 bp, Homo sapiens
  siRNA target sequence for TRAD (NM_007064.1,1855-1873).
ccaaagggctccagctata

SEQ ID NO: 102890 - DNA, 19 bp, Homo sapiens
  siRNA target sequence for TRAD (NM_007064.1,1856-1874).
caaagggctccagctataa

SEQ ID NO: 102891 - DNA, 19 bp, Homo sapiens
  siRNA target sequence for TRAD (NM_007064.1,1884-1902).
gcctcccctgaagatatct

SEQ ID NO: 102892 - DNA, 19 bp, Homo sapiens
  siRNA target sequence for TRAD (NM_007064.1,1885-1903).
cctcccctgaagatatcta

SEQ ID NO: 102893 - DNA, 19 bp, Homo sapiens
  siRNA target sequence for TRAD (NM_007064.1,1913-1931).
gcagtccagggtttgaata

SEQ ID NO: 102894 - DNA, 19 bp, Homo sapiens
  siRNA target sequence for TRAD (NM_007064.1,1916-1934).
gtccagggtttgaatacca

SEQ ID NO: 102895 - DNA, 19 bp, Homo sapiens
  siRNA target sequence for TRAD (NM_007064.1,1997-2015).
cgtccatggccgtgatcaa

SEQ ID NO: 102896 - DNA, 19 bp, Homo sapiens
  siRNA target sequence for TRAD (NM_007064.1,2000-2018).
ccatggccgtgatcaaaga

SEQ ID NO: 102897 - DNA, 19 bp, Homo sapiens
  siRNA target sequence for TRAD (NM_007064.1,2001-2019).
catggccgtgatcaaagat

SEQ ID NO: 102898 - DNA, 19 bp, Homo sapiens
  siRNA target sequence for TRAD (NM_007064.1,2006-2024).
ccgtgatcaaagattacta

SEQ ID NO: 102899 - DNA, 19 bp, Homo sapiens
  siRNA target sequence for TRAD (NM_007064.1,2007-2025).
cgtgatcaaagattactat

SEQ ID NO: 102900 - DNA, 19 bp, Homo sapiens
  siRNA target sequence for TRAD (NM_007064.1,2204-2222).
gtgacgggagcatcaagaa

SEQ ID NO: 102901 - DNA, 19 bp, Homo sapiens
  siRNA target sequence for TRAD (NM_007064.1,2206-2224).
gacgggagcatcaagaagt

SEQ ID NO: 102902 - DNA, 19 bp, Homo sapiens
  siRNA target sequence for TRAD (NM_007064.1,2209-2227).
gggagcatcaagaagtcat

SEQ ID NO: 102903 - DNA, 19 bp, Homo sapiens
  siRNA target sequence for TRAD (NM_007064.1,2225-2243).
catgttcatggcatactct

SEQ ID NO: 102904 - DNA, 19 bp, Homo sapiens
  siRNA target sequence for TRAD (NM_007064.1,2236-2254).
catactctacgcatgagaa

SEQ ID NO: 102905 - DNA, 19 bp, Homo sapiens
  siRNA target sequence for TRAD (NM_007064.1,2271-2289).
gaacacgggtaaaaatgaa

SEQ ID NO: 102906 - DNA, 19 bp, Homo sapiens
  siRNA target sequence for TRAD (NM_007064.1,2299-2317).
cctcgtaaacccaaggata

SEQ ID NO: 102907 - DNA, 19 bp, Homo sapiens
  siRNA target sequence for TRAD (NM_007064.1,2300-2318).
ctcgtaaacccaaggatat

SEQ ID NO: 102908 - DNA, 19 bp, Homo sapiens
  siRNA target sequence for TRAD (NM_007064.1,2303-2321).
gtaaacccaaggatattct

SEQ ID NO: 102909 - DNA, 19 bp, Homo sapiens
  siRNA target sequence for TRAD (NM_007064.1,2323-2341).
ggcaacaaagtctctgtta

SEQ ID NO: 102910 - DNA, 19 bp, Homo sapiens
  siRNA target sequence for TRAD (NM_007064.1,2325-2343).
caacaaagtctctgttaaa

SEQ ID NO: 102911 - DNA, 19 bp, Homo sapiens
  siRNA target sequence for TRAD (NM_007064.1,2338-2356).
gttaaagagacgaacagtt

SEQ ID NO: 102912 - DNA, 19 bp, Homo sapiens
  siRNA target sequence for TRAD (NM_007064.1,2589-2607).
cacggtctcctcttgtgat

SEQ ID NO: 102913 - DNA, 19 bp, Homo sapiens
  siRNA target sequence for TRAD (NM_007064.1,2683-2701).
gaccacgggaccacatcaa

SEQ ID NO: 102914 - DNA, 19 bp, Homo sapiens
  siRNA target sequence for TRAD (NM_007064.1,2702-2720).
cgtctgcaacagtcaaagt

SEQ ID NO: 102915 - DNA, 19 bp, Homo sapiens
  siRNA target sequence for TRAD (NM_007064.1,2885-2903).
cttcgaccttggacactta

SEQ ID NO: 102916 - DNA, 19 bp, Homo sapiens
  siRNA target sequence for TRAD (NM_007064.1,3006-3024).
gcgacttccagaatatgat

SEQ ID NO: 102917 - DNA, 19 bp, Homo sapiens
  siRNA target sequence for TRAD (NM_007064.1,3098-3116).
gaagaggccgtttctctat

SEQ ID NO: 102918 - DNA, 19 bp, Homo sapiens
  siRNA target sequence for TRAD (NM_007064.1,3103-3121).
ggccgtttctctatagtaa

SEQ ID NO: 102919 - DNA, 19 bp, Homo sapiens
  siRNA target sequence for TRAD (NM_007064.1,3104-3122).
gccgtttctctatagtaaa

SEQ ID NO: 102920 - DNA, 19 bp, Homo sapiens
  siRNA target sequence for TRAD (NM_007064.1,3118-3136).
gtaaagaaatgcattcaca

SEQ ID NO: 102921 - DNA, 19 bp, Homo sapiens
  siRNA target sequence for TRAD (NM_007064.1,3232-3250).
cagcacccccagtacatca

SEQ ID NO: 102922 - DNA, 19 bp, Homo sapiens
  siRNA target sequence for TRAD (NM_007064.1,3316-3334).
cggctcttagactacctta

SEQ ID NO: 102923 - DNA, 19 bp, Homo sapiens
  siRNA target sequence for TRAD (NM_007064.1,3317-3335).
ggctcttagactaccttat

SEQ ID NO: 102924 - DNA, 19 bp, Homo sapiens
  siRNA target sequence for TRAD (NM_007064.1,3319-3337).
ctcttagactaccttatga

SEQ ID NO: 102925 - DNA, 19 bp, Homo sapiens
  siRNA target sequence for TRAD (NM_007064.1,3330-3348).
ccttatgaatcatgatgaa

SEQ ID NO: 102926 - DNA, 19 bp, Homo sapiens
  siRNA target sequence for TRAD (NM_007064.1,3416-3434).
gcagggttgcacatttgga

SEQ ID NO: 102927 - DNA, 19 bp, Homo sapiens
  siRNA target sequence for TRAD (NM_007064.1,3421-3439).
gttgcacatttggacataa

SEQ ID NO: 102928 - DNA, 19 bp, Homo sapiens
  siRNA target sequence for TRAD (NM_007064.1,3479-3497).
ctcgagtgaagctcattga

SEQ ID NO: 102929 - DNA, 19 bp, Homo sapiens
  siRNA target sequence for TRAD (NM_007064.1,3521-3539).
cgggtcacttccacattca

SEQ ID NO: 102930 - DNA, 19 bp, Homo sapiens
  siRNA target sequence for TRAD (NM_007064.1,3620-3638).
gcatcggggttctgacata

SEQ ID NO: 102931 - DNA, 19 bp, Homo sapiens
  siRNA target sequence for TRAD (NM_007064.1,3621-3639).
catcggggttctgacatat

SEQ ID NO: 102932 - DNA, 19 bp, Homo sapiens
  siRNA target sequence for TRAD (NM_007064.1,3626-3644).
gggttctgacatatgtcat

SEQ ID NO: 102933 - DNA, 19 bp, Homo sapiens
  siRNA target sequence for TRAD (NM_007064.1,3685-3703).
gagacatgtatcaacgtat

SEQ ID NO: 102934 - DNA, 19 bp, Homo sapiens
  siRNA target sequence for TRAD (NM_007064.1,3885-3903).
ccgcctagcatgcttcata

SEQ ID NO: 102935 - DNA, 19 bp, Homo sapiens
  siRNA target sequence for TRAD (NM_007064.1,3931-3949).
cggcctattcccaatgtca

SEQ ID NO: 102936 - DNA, 19 bp, Homo sapiens
  siRNA target sequence for TRAD (NM_007064.1,3932-3950).
ggcctattcccaatgtcaa

SEQ ID NO: 102937 - DNA, 19 bp, Homo sapiens
  siRNA target sequence for TRAD (NM_007064.1,3942-3960).
caatgtcaagagctacatt

SEQ ID NO: 102938 - DNA, 19 bp, Homo sapiens
  siRNA target sequence for TRAP1 (NM_016292.1,87-105).
cgggaggaaaaccaattct

SEQ ID NO: 102939 - DNA, 19 bp, Homo sapiens
  siRNA target sequence for TRAP1 (NM_016292.1,212-230).
cccctgcactcgattatca

SEQ ID NO: 102940 - DNA, 19 bp, Homo sapiens
  siRNA target sequence for TRAP1 (NM_016292.1,247-265).
gcagggttccacttccaaa

SEQ ID NO: 102941 - DNA, 19 bp, Homo sapiens
  siRNA target sequence for TRAP1 (NM_016292.1,250-268).
gggttccacttccaaacat

SEQ ID NO: 102942 - DNA, 19 bp, Homo sapiens
  siRNA target sequence for TRAP1 (NM_016292.1,252-270).
gttccacttccaaacatga

SEQ ID NO: 102943 - DNA, 19 bp, Homo sapiens
  siRNA target sequence for TRAP1 (NM_016292.1,255-273).
ccacttccaaacatgagtt

SEQ ID NO: 102944 - DNA, 19 bp, Homo sapiens
  siRNA target sequence for TRAP1 (NM_016292.1,278-296).
gccgagacaaagaagcttt

SEQ ID NO: 102945 - DNA, 19 bp, Homo sapiens
  siRNA target sequence for TRAP1 (NM_016292.1,289-307).
gaagcttttggacattgtt

SEQ ID NO: 102946 - DNA, 19 bp, Homo sapiens
  siRNA target sequence for TRAP1 (NM_016292.1,311-329).
cggtccctgtactcagaaa

SEQ ID NO: 102947 - DNA, 19 bp, Homo sapiens
  siRNA target sequence for TRAP1 (NM_016292.1,315-333).
ccctgtactcagaaaaaga

SEQ ID NO: 102948 - DNA, 19 bp, Homo sapiens
  siRNA target sequence for TRAP1 (NM_016292.1,324-342).
cagaaaaagaggtgtttat

SEQ ID NO: 102949 - DNA, 19 bp, Homo sapiens
  siRNA target sequence for TRAP1 (NM_016292.1,362-380).
gccagcgatgccttggaaa

SEQ ID NO: 102950 - DNA, 19 bp, Homo sapiens
  siRNA target sequence for TRAP1 (NM_016292.1,363-381).
ccagcgatgccttggaaaa

SEQ ID NO: 102951 - DNA, 19 bp, Homo sapiens
  siRNA target sequence for TRAP1 (NM_016292.1,641-659).
gacagagtggaggtctatt

SEQ ID NO: 102952 - DNA, 19 bp, Homo sapiens
  siRNA target sequence for TRAP1 (NM_016292.1,708-726).
gttctggagtgtttgaaat

SEQ ID NO: 102953 - DNA, 19 bp, Homo sapiens
  siRNA target sequence for TRAP1 (NM_016292.1,730-748).
cgaagcttcgggagttaga

SEQ ID NO: 102954 - DNA, 19 bp, Homo sapiens
  siRNA target sequence for TRAP1 (NM_016292.1,731-749).
gaagcttcgggagttagaa

SEQ ID NO: 102955 - DNA, 19 bp, Homo sapiens
  siRNA target sequence for TRAP1 (NM_016292.1,743-761).
gttagaaccgggacaaaaa

SEQ ID NO: 102956 - DNA, 19 bp, Homo sapiens
  siRNA target sequence for TRAP1 (NM_016292.1,818-836).
gatgtggtaacgaagtaca

SEQ ID NO: 102957 - DNA, 19 bp, Homo sapiens
  siRNA target sequence for TRAP1 (NM_016292.1,930-948).
ggcaacatgaggagttcta

SEQ ID NO: 102958 - DNA, 19 bp, Homo sapiens
  siRNA target sequence for TRAP1 (NM_016292.1,980-998).
cgctacaccctgcactata

SEQ ID NO: 102959 - DNA, 19 bp, Homo sapiens
  siRNA target sequence for TRAP1 (NM_016292.1,981-999).
gctacaccctgcactataa

SEQ ID NO: 102960 - DNA, 19 bp, Homo sapiens
  siRNA target sequence for TRAP1 (NM_016292.1,1002-1020).
cggacgcaccgctcaacat

SEQ ID NO: 102961 - DNA, 19 bp, Homo sapiens
  siRNA target sequence for TRAP1 (NM_016292.1,1045-1063).
catgaaaccgtccatgttt

SEQ ID NO: 102962 - DNA, 19 bp, Homo sapiens
  siRNA target sequence for TRAP1 (NM_016292.1,1239-1257).
ggaaactccgggacgtttt

SEQ ID NO: 102963 - DNA, 19 bp, Homo sapiens
  siRNA target sequence for TRAP1 (NM_016292.1,1240-1258).
gaaactccgggacgtttta

SEQ ID NO: 102964 - DNA, 19 bp, Homo sapiens
  siRNA target sequence for TRAP1 (NM_016292.1,1262-1280).
cagaggctgatcaaattct

SEQ ID NO: 102965 - DNA, 19 bp, Homo sapiens
  siRNA target sequence for TRAP1 (NM_016292.1,1266-1284).
ggctgatcaaattcttcat

SEQ ID NO: 102966 - DNA, 19 bp, Homo sapiens
  siRNA target sequence for TRAP1 (NM_016292.1,1279-1297).
cttcattgaccagagtaaa

SEQ ID NO: 102967 - DNA, 19 bp, Homo sapiens
  siRNA target sequence for TRAP1 (NM_016292.1,1312-1330).
gtatgcaaagttttttgaa

SEQ ID NO: 102968 - DNA, 19 bp, Homo sapiens
  siRNA target sequence for TRAP1 (NM_016292.1,1481-1499).
ggcacccgcaacatctact

SEQ ID NO: 102969 - DNA, 19 bp, Homo sapiens
  siRNA target sequence for TRAP1 (NM_016292.1,1616-1634).
caccttcgtgagtttgaca

SEQ ID NO: 102970 - DNA, 19 bp, Homo sapiens
  siRNA target sequence for TRAP1 (NM_016292.1,1650-1668).
ctgtggagacggacatagt

SEQ ID NO: 102971 - DNA, 19 bp, Homo sapiens
  siRNA target sequence for TRAP1 (NM_016292.1,1941-1959).
ccaggcacgcgctcatcaa

SEQ ID NO: 102972 - DNA, 19 bp, Homo sapiens
  siRNA target sequence for TRAP1 (NM_016292.1,1944-1962).
ggcacgcgctcatcaagaa

SEQ ID NO: 102973 - DNA, 19 bp, Homo sapiens
  siRNA target sequence for TRAP1 (NM_016292.1,2003-2021).
ctgctggtggatcagatat

SEQ ID NO: 102974 - DNA, 19 bp, Homo sapiens
  siRNA target sequence for TRAP1 (NM_016292.1,2035-2053).
gattgctgctggacttgtt

SEQ ID NO: 102975 - DNA, 19 bp, Homo sapiens
  siRNA target sequence for TRAP100 (NM_014815.1,157-175).
gaaattctttcctaaagga

SEQ ID NO: 102976 - DNA, 19 bp, Homo sapiens
  siRNA target sequence for TRAP100 (NM_014815.1,174-192).
gagccacctgggatattct

SEQ ID NO: 102977 - DNA, 19 bp, Homo sapiens
  siRNA target sequence for TRAP100 (NM_014815.1,176-194).
gccacctgggatattctca

SEQ ID NO: 102978 - DNA, 19 bp, Homo sapiens
  siRNA target sequence for TRAP100 (NM_014815.1,262-280).
cctgaagtatgccattagt

SEQ ID NO: 102979 - DNA, 19 bp, Homo sapiens
  siRNA target sequence for TRAP100 (NM_014815.1,263-281).
ctgaagtatgccattagtt

SEQ ID NO: 102980 - DNA, 19 bp, Homo sapiens
  siRNA target sequence for TRAP100 (NM_014815.1,284-302).
cagatggtgtcctactctt

SEQ ID NO: 102981 - DNA, 19 bp, Homo sapiens
  siRNA target sequence for TRAP100 (NM_014815.1,305-323).
gtcctcacagccatcagta

SEQ ID NO: 102982 - DNA, 19 bp, Homo sapiens
  siRNA target sequence for TRAP100 (NM_014815.1,408-426).
gcaaagcagaggaatgcat

SEQ ID NO: 102983 - DNA, 19 bp, Homo sapiens
  siRNA target sequence for TRAP100 (NM_014815.1,604-622).
gctgcacatcgccaaacta

SEQ ID NO: 102984 - DNA, 19 bp, Homo sapiens
  siRNA target sequence for TRAP100 (NM_014815.1,642-660).
ctgccatcgagcattctct

SEQ ID NO: 102985 - DNA, 19 bp, Homo sapiens
  siRNA target sequence for TRAP100 (NM_014815.1,939-957).
gcttcgtggggctcattga

SEQ ID NO: 102986 - DNA, 19 bp, Homo sapiens
  siRNA target sequence for TRAP100 (NM_014815.1,1069-1087).
ggatgtcaactgtgctttt

SEQ ID NO: 102987 - DNA, 19 bp, Homo sapiens
  siRNA target sequence for TRAP100 (NM_014815.1,1073-1091).
gtcaactgtgcttttgagt

SEQ ID NO: 102988 - DNA, 19 bp, Homo sapiens
  siRNA target sequence for TRAP100 (NM_014815.1,1244-1262).
cacgcaccccagcagaaat

SEQ ID NO: 102989 - DNA, 19 bp, Homo sapiens
  siRNA target sequence for TRAP100 (NM_014815.1,1255-1273).
gcagaaatcgggagagaat

SEQ ID NO: 102990 - DNA, 19 bp, Homo sapiens
  siRNA target sequence for TRAP100 (NM_014815.1,1311-1329).
cggagcccactgtcacaaa

SEQ ID NO: 102991 - DNA, 19 bp, Homo sapiens
  siRNA target sequence for TRAP100 (NM_014815.1,1346-1364).
gatgcagaccactctaagt

SEQ ID NO: 102992 - DNA, 19 bp, Homo sapiens
  siRNA target sequence for TRAP100 (NM_014815.1,1446-1464).
ctggaaagctgaaatcctt

SEQ ID NO: 102993 - DNA, 19 bp, Homo sapiens
  siRNA target sequence for TRAP100 (NM_014815.1,1486-1504).
gaatgaattcacaacctat

SEQ ID NO: 102994 - DNA, 19 bp, Homo sapiens
  siRNA target sequence for TRAP100 (NM_014815.1,1873-1891).
gtccatccagaaaatcact

SEQ ID NO: 102995 - DNA, 19 bp, Homo sapiens
  siRNA target sequence for TRAP100 (NM_014815.1,1880-1898).
cagaaaatcactgataaca

SEQ ID NO: 102996 - DNA, 19 bp, Homo sapiens
  siRNA target sequence for TRAP100 (NM_014815.1,2009-2027).
ctggcagggccactgttta

SEQ ID NO: 102997 - DNA, 19 bp, Homo sapiens
  siRNA target sequence for TRAP100 (NM_014815.1,2011-2029).
ggcagggccactgtttagt

SEQ ID NO: 102998 - DNA, 19 bp, Homo sapiens
  siRNA target sequence for TRAP100 (NM_014815.1,2013-2031).
cagggccactgtttagtga

SEQ ID NO: 102999 - DNA, 19 bp, Homo sapiens
  siRNA target sequence for TRAP100 (NM_014815.1,2115-2133).
cagccacgcagatcaagtt

SEQ ID NO: 103000 - DNA, 19 bp, Homo sapiens
  siRNA target sequence for TRAP100 (NM_014815.1,2556-2574).
cgtccacccgccagaagaa

SEQ ID NO: 103001 - DNA, 19 bp, Homo sapiens
  siRNA target sequence for TRAP100 (NM_014815.1,2575-2593).
gagacaccgcgaagacatt

SEQ ID NO: 103002 - DNA, 19 bp, Homo sapiens
  siRNA target sequence for TRAP100 (NM_014815.1,2577-2595).
gacaccgcgaagacattga

SEQ ID NO: 103003 - DNA, 19 bp, Homo sapiens
  siRNA target sequence for TRAP100 (NM_014815.1,2647-2665).
gcgactgctgagctctaat

SEQ ID NO: 103004 - DNA, 19 bp, Homo sapiens
  siRNA target sequence for TRAP100 (NM_014815.1,2649-2667).
gactgctgagctctaatga

SEQ ID NO: 103005 - DNA, 19 bp, Homo sapiens
  siRNA target sequence for TRAP100 (NM_014815.1,2669-2687).
gacgatgccaacatccttt

SEQ ID NO: 103006 - DNA, 19 bp, Homo sapiens
  siRNA target sequence for TRAP150 (NM_005119.1,264-282).
gatctcgttctcgttcatt

SEQ ID NO: 103007 - DNA, 19 bp, Homo sapiens
  siRNA target sequence for TRAP150 (NM_005119.1,269-287).
cgttctcgttcattttcga

SEQ ID NO: 103008 - DNA, 19 bp, Homo sapiens
  siRNA target sequence for TRAP150 (NM_005119.1,270-288).
gttctcgttcattttcgaa

SEQ ID NO: 103009 - DNA, 19 bp, Homo sapiens
  siRNA target sequence for TRAP150 (NM_005119.1,360-378).
catattctccagctcataa

SEQ ID NO: 103010 - DNA, 19 bp, Homo sapiens
  siRNA target sequence for TRAP150 (NM_005119.1,465-483).
ggcgtaacagaggctttta

SEQ ID NO: 103011 - DNA, 19 bp, Homo sapiens
  siRNA target sequence for TRAP150 (NM_005119.1,466-484).
gcgtaacagaggcttttat

SEQ ID NO: 103012 - DNA, 19 bp, Homo sapiens
  siRNA target sequence for TRAP150 (NM_005119.1,515-533).
ggaaactaccgctcaaatt

SEQ ID NO: 103013 - DNA, 19 bp, Homo sapiens
  siRNA target sequence for TRAP150 (NM_005119.1,524-542).
cgctcaaattggcagaatt

SEQ ID NO: 103014 - DNA, 19 bp, Homo sapiens
  siRNA target sequence for TRAP150 (NM_005119.1,563-581).
cgtcgaggccgttcaagat

SEQ ID NO: 103015 - DNA, 19 bp, Homo sapiens
  siRNA target sequence for TRAP150 (NM_005119.1,616-634).
gtccaggagccattctaga

SEQ ID NO: 103016 - DNA, 19 bp, Homo sapiens
  siRNA target sequence for TRAP150 (NM_005119.1,694-712).
caaccatagccgagttgaa

SEQ ID NO: 103017 - DNA, 19 bp, Homo sapiens
  siRNA target sequence for TRAP150 (NM_005119.1,697-715).
ccatagccgagttgaatct

SEQ ID NO: 103018 - DNA, 19 bp, Homo sapiens
  siRNA target sequence for TRAP150 (NM_005119.1,698-716).
catagccgagttgaatctt

SEQ ID NO: 103019 - DNA, 19 bp, Homo sapiens
  siRNA target sequence for TRAP150 (NM_005119.1,702-720).
gccgagttgaatcttctaa

SEQ ID NO: 103020 - DNA, 19 bp, Homo sapiens
  siRNA target sequence for TRAP150 (NM_005119.1,827-845).
ggcacctctcaagatacaa

SEQ ID NO: 103021 - DNA, 19 bp, Homo sapiens
  siRNA target sequence for TRAP150 (NM_005119.1,828-846).
gcacctctcaagatacaaa

SEQ ID NO: 103022 - DNA, 19 bp, Homo sapiens
  siRNA target sequence for TRAP150 (NM_005119.1,941-959).
cgaagcccagctctcaaaa

SEQ ID NO: 103023 - DNA, 19 bp, Homo sapiens
  siRNA target sequence for TRAP150 (NM_005119.1,1123-1141).
gtccctgagtccatccaaa

SEQ ID NO: 103024 - DNA, 19 bp, Homo sapiens
  siRNA target sequence for TRAP150 (NM_005119.1,1125-1143).
ccctgagtccatccaaaaa

SEQ ID NO: 103025 - DNA, 19 bp, Homo sapiens
  siRNA target sequence for TRAP150 (NM_005119.1,1127-1145).
ctgagtccatccaaaaaga

SEQ ID NO: 103026 - DNA, 19 bp, Homo sapiens
  siRNA target sequence for TRAP150 (NM_005119.1,1344-1362).
caggcttgggtgatggaaa

SEQ ID NO: 103027 - DNA, 19 bp, Homo sapiens
  siRNA target sequence for TRAP150 (NM_005119.1,1421-1439).
cagtctcccaaaaggtata

SEQ ID NO: 103028 - DNA, 19 bp, Homo sapiens
  siRNA target sequence for TRAP150 (NM_005119.1,1544-1562).
gatgaacccaaatttatgt

SEQ ID NO: 103029 - DNA, 19 bp, Homo sapiens
  siRNA target sequence for TRAP150 (NM_005119.1,1706-1724).
gaagatcggggcaagagaa

SEQ ID NO: 103030 - DNA, 19 bp, Homo sapiens
  siRNA target sequence for TRAP150 (NM_005119.1,1765-1783).
ccgagtgactgcttataaa

SEQ ID NO: 103031 - DNA, 19 bp, Homo sapiens
  siRNA target sequence for TRAP150 (NM_005119.1,1915-1933).
ccggatggactcttttgat

SEQ ID NO: 103032 - DNA, 19 bp, Homo sapiens
  siRNA target sequence for TRAP150 (NM_005119.1,1944-1962).
cacgacccagtggcttatt

SEQ ID NO: 103033 - DNA, 19 bp, Homo sapiens
  siRNA target sequence for TRAP150 (NM_005119.1,1964-1982).
gctcaggaacgcaagcttt

SEQ ID NO: 103034 - DNA, 19 bp, Homo sapiens
  siRNA target sequence for TRAP150 (NM_005119.1,1975-1993).
caagctttgccgagatcta

SEQ ID NO: 103035 - DNA, 19 bp, Homo sapiens
  siRNA target sequence for TRAP150 (NM_005119.1,1986-2004).
gagatctagtccatagcaa

SEQ ID NO: 103036 - DNA, 19 bp, Homo sapiens
  siRNA target sequence for TRAP150 (NM_005119.1,1991-2009).
ctagtccatagcaacaaaa

SEQ ID NO: 103037 - DNA, 19 bp, Homo sapiens
  siRNA target sequence for TRAP150 (NM_005119.1,2064-2082).
gtagcccctcagaactgtt

SEQ ID NO: 103038 - DNA, 19 bp, Homo sapiens
  siRNA target sequence for TRAP150 (NM_005119.1,2075-2093).
gaactgtttgcccaacata

SEQ ID NO: 103039 - DNA, 19 bp, Homo sapiens
  siRNA target sequence for TRAP150 (NM_005119.1,2153-2171).
catgaacgctttactaaat

SEQ ID NO: 103040 - DNA, 19 bp, Homo sapiens
  siRNA target sequence for TRAP150 (NM_005119.1,2240-2258).
gacatttcccccagtacat

SEQ ID NO: 103041 - DNA, 19 bp, Homo sapiens
  siRNA target sequence for TRAP150 (NM_005119.1,2247-2265).
cccccagtacattcagaaa

SEQ ID NO: 103042 - DNA, 19 bp, Homo sapiens
  siRNA target sequence for TRAP150 (NM_005119.1,2248-2266).
ccccagtacattcagaaaa

SEQ ID NO: 103043 - DNA, 19 bp, Homo sapiens
  siRNA target sequence for TRAP150 (NM_005119.1,2396-2414).
cttaaacgaggtaaatcga

SEQ ID NO: 103044 - DNA, 19 bp, Homo sapiens
  siRNA target sequence for TRAP150 (NM_005119.1,2457-2475).
ggtcagctgaaaaaacaga

SEQ ID NO: 103045 - DNA, 19 bp, Homo sapiens
  siRNA target sequence for TRAP150 (NM_005119.1,2557-2575).
gtcatctcactcctacaaa

SEQ ID NO: 103046 - DNA, 19 bp, Homo sapiens
  siRNA target sequence for TRAP150 (NM_005119.1,2616-2634).
gcaccacgggctttgacaa

SEQ ID NO: 103047 - DNA, 19 bp, Homo sapiens
  siRNA target sequence for TRAP150 (NM_005119.1,2617-2635).
caccacgggctttgacaaa

SEQ ID NO: 103048 - DNA, 19 bp, Homo sapiens
  siRNA target sequence for TRAP150 (NM_005119.1,2640-2658).
gactggggaccaaagactt

SEQ ID NO: 103049 - DNA, 19 bp, Homo sapiens
  siRNA target sequence for TRAP150 (NM_005119.1,2686-2704).
cagagctcgaggaaccttt

SEQ ID NO: 103050 - DNA, 19 bp, Homo sapiens
  siRNA target sequence for TRAP150 (NM_005119.1,2690-2708).
gctcgaggaacctttcagt

SEQ ID NO: 103051 - DNA, 19 bp, Homo sapiens
  siRNA target sequence for TRAP150 (NM_005119.1,2691-2709).
ctcgaggaacctttcagtt

SEQ ID NO: 103052 - DNA, 19 bp, Homo sapiens
  siRNA target sequence for TRAP150 (NM_005119.1,2773-2791).
caacgattttcaaaaaaga

SEQ ID NO: 103053 - DNA, 19 bp, Homo sapiens
  siRNA target sequence for TRAP150 (NM_005119.1,2932-2950).
gttcatgttccggaaatca

SEQ ID NO: 103054 - DNA, 19 bp, Homo sapiens
  siRNA target sequence for TRAP150 (NM_005119.1,2935-2953).
catgttccggaaatcaagt

SEQ ID NO: 103055 - DNA, 19 bp, Homo sapiens
  siRNA target sequence for TRAP150 (NM_005119.1,2961-2979).
ccaagtgggcccatgacaa

SEQ ID NO: 103056 - DNA, 19 bp, Homo sapiens
  siRNA target sequence for TRB2 (NM_021643.1,1239-1257).
ggtctacccccatcacaat

SEQ ID NO: 103057 - DNA, 19 bp, Homo sapiens
  siRNA target sequence for TRB2 (NM_021643.1,1249-1267).
catcacaatagcgagatat

SEQ ID NO: 103058 - DNA, 19 bp, Homo sapiens
  siRNA target sequence for TRB2 (NM_021643.1,1268-1286).
gggagatcgcggaacaaaa

SEQ ID NO: 103059 - DNA, 19 bp, Homo sapiens
  siRNA target sequence for TRB2 (NM_021643.1,1282-1300).
caaaacccaggatttcgaa

SEQ ID NO: 103060 - DNA, 19 bp, Homo sapiens
  siRNA target sequence for TRB2 (NM_021643.1,1297-1315).
cgaagagttgtcgtctata

SEQ ID NO: 103061 - DNA, 19 bp, Homo sapiens
  siRNA target sequence for TRB2 (NM_021643.1,1298-1316).
gaagagttgtcgtctataa

SEQ ID NO: 103062 - DNA, 19 bp, Homo sapiens
  siRNA target sequence for TRB2 (NM_021643.1,1301-1319).
gagttgtcgtctataaggt

SEQ ID NO: 103063 - DNA, 19 bp, Homo sapiens
  siRNA target sequence for TRB2 (NM_021643.1,1370-1388).
cccgagactccgaacttgt

SEQ ID NO: 103064 - DNA, 19 bp, Homo sapiens
  siRNA target sequence for TRB2 (NM_021643.1,1387-1405).
gtcgcattgcgtttcttgt

SEQ ID NO: 103065 - DNA, 19 bp, Homo sapiens
  siRNA target sequence for TRB2 (NM_021643.1,1389-1407).
cgcattgcgtttcttgtat

SEQ ID NO: 103066 - DNA, 19 bp, Homo sapiens
  siRNA target sequence for TRB2 (NM_021643.1,1404-1422).
gtatcgggaaatacttatt

SEQ ID NO: 103067 - DNA, 19 bp, Homo sapiens
  siRNA target sequence for TRB2 (NM_021643.1,1487-1505).
gtgtgcaaggtgtttgata

SEQ ID NO: 103068 - DNA, 19 bp, Homo sapiens
  siRNA target sequence for TRB2 (NM_021643.1,1542-1560).
gcctgtctgctcatagtaa

SEQ ID NO: 103069 - DNA, 19 bp, Homo sapiens
  siRNA target sequence for TRB2 (NM_021643.1,1548-1566).
ctgctcatagtaacatcaa

SEQ ID NO: 103070 - DNA, 19 bp, Homo sapiens
  siRNA target sequence for TRB2 (NM_021643.1,1553-1571).
catagtaacatcaaccaaa

SEQ ID NO: 103071 - DNA, 19 bp, Homo sapiens
  siRNA target sequence for TRB2 (NM_021643.1,1609-1627).
gttctttgagcgaagctat

SEQ ID NO: 103072 - DNA, 19 bp, Homo sapiens
  siRNA target sequence for TRB2 (NM_021643.1,1751-1769).
ctcaagctgcggaaattca

SEQ ID NO: 103073 - DNA, 19 bp, Homo sapiens
  siRNA target sequence for TRB2 (NM_021643.1,1756-1774).
gctgcggaaattcatcttt

SEQ ID NO: 103074 - DNA, 19 bp, Homo sapiens
  siRNA target sequence for TRB2 (NM_021643.1,1810-1828).
cctggaagacgcctacatt

SEQ ID NO: 103075 - DNA, 19 bp, Homo sapiens
  siRNA target sequence for TRB2 (NM_021643.1,1829-1847).
ctgcggggagatgatgatt

SEQ ID NO: 103076 - DNA, 19 bp, Homo sapiens
  siRNA target sequence for TRB2 (NM_021643.1,1981-1999).
ccctttccatgacattgaa

SEQ ID NO: 103077 - DNA, 19 bp, Homo sapiens
  siRNA target sequence for TRB2 (NM_021643.1,2025-2043).
ggcgtggccagttcaacat

SEQ ID NO: 103078 - DNA, 19 bp, Homo sapiens
  siRNA target sequence for TRB2 (NM_021643.1,2026-2044).
gcgtggccagttcaacatt

SEQ ID NO: 103079 - DNA, 19 bp, Homo sapiens
  siRNA target sequence for TRB2 (NM_021643.1,2112-2130).
ggctgacctcgcaggaaat

SEQ ID NO: 103080 - DNA, 19 bp, Homo sapiens
  siRNA target sequence for TRB2 (NM_021643.1,2113-2131).
gctgacctcgcaggaaatt

SEQ ID NO: 103081 - DNA, 19 bp, Homo sapiens
  siRNA target sequence for TRB2 (NM_021643.1,2134-2152).
ggaccatccttggttttct

SEQ ID NO: 103082 - DNA, 19 bp, Homo sapiens
  siRNA target sequence for TRB2 (NM_021643.1,2156-2174).
gattttagcgtctcgaatt

SEQ ID NO: 103083 - DNA, 19 bp, Homo sapiens
  siRNA target sequence for TRB2 (NM_021643.1,2164-2182).
cgtctcgaattcagcatat

SEQ ID NO: 103084 - DNA, 19 bp, Homo sapiens
  siRNA target sequence for TRIO (NM_007118.1,73-91).
gctatggatgttttaccaa

SEQ ID NO: 103085 - DNA, 19 bp, Homo sapiens
  siRNA target sequence for TRIO (NM_007118.1,99-117).
ggaaaaagttgcatacctt

SEQ ID NO: 103086 - DNA, 19 bp, Homo sapiens
  siRNA target sequence for TRIO (NM_007118.1,115-133).
ctttcaggtgggagagata

SEQ ID NO: 103087 - DNA, 19 bp, Homo sapiens
  siRNA target sequence for TRIO (NM_007118.1,140-158).
gaggtcccattttaacgtt

SEQ ID NO: 103088 - DNA, 19 bp, Homo sapiens
  siRNA target sequence for TRIO (NM_007118.1,204-222).
gagactcatttcctatcta

SEQ ID NO: 103089 - DNA, 19 bp, Homo sapiens
  siRNA target sequence for TRIO (NM_007118.1,387-405).
gaaacagaggactaatttt

SEQ ID NO: 103090 - DNA, 19 bp, Homo sapiens
  siRNA target sequence for TRIO (NM_007118.1,398-416).
ctaattttggcagttctaa

SEQ ID NO: 103091 - DNA, 19 bp, Homo sapiens
  siRNA target sequence for TRIO (NM_007118.1,429-447).
gacaaatatggtctcttta

SEQ ID NO: 103092 - DNA, 19 bp, Homo sapiens
  siRNA target sequence for TRIO (NM_007118.1,452-470).
gccttaccaaagtagttga

SEQ ID NO: 103093 - DNA, 19 bp, Homo sapiens
  siRNA target sequence for TRIO (NM_007118.1,480-498).
gctaactcctgagtttgat

SEQ ID NO: 103094 - DNA, 19 bp, Homo sapiens
  siRNA target sequence for TRIO (NM_007118.1,516-534).
ccacgaagaatggattgaa

SEQ ID NO: 103095 - DNA, 19 bp, Homo sapiens
  siRNA target sequence for TRIO (NM_007118.1,517-535).
cacgaagaatggattgaaa

SEQ ID NO: 103096 - DNA, 19 bp, Homo sapiens
  siRNA target sequence for TRIO (NM_007118.1,640-658).
gagggggctcggaatatga

SEQ ID NO: 103097 - DNA, 19 bp, Homo sapiens
  siRNA target sequence for TRIO (NM_007118.1,1240-1258).
caccagaaggccgaaaagt

SEQ ID NO: 103098 - DNA, 19 bp, Homo sapiens
  siRNA target sequence for TRIO (NM_007118.1,1242-1260).
ccagaaggccgaaaagtat

SEQ ID NO: 103099 - DNA, 19 bp, Homo sapiens
  siRNA target sequence for TRIO (NM_007118.1,1243-1261).
cagaaggccgaaaagtata

SEQ ID NO: 103100 - DNA, 19 bp, Homo sapiens
  siRNA target sequence for TRIO (NM_007118.1,1269-1287).
cgtggattcatggtgtaaa

SEQ ID NO: 103101 - DNA, 19 bp, Homo sapiens
  siRNA target sequence for TRIO (NM_007118.1,1272-1290).
ggattcatggtgtaaagct

SEQ ID NO: 103102 - DNA, 19 bp, Homo sapiens
  siRNA target sequence for TRIO (NM_007118.1,1342-1360).
catcaccaccagggaatat

SEQ ID NO: 103103 - DNA, 19 bp, Homo sapiens
  siRNA target sequence for TRIO (NM_007118.1,1347-1365).
ccaccagggaatatatgaa

SEQ ID NO: 103104 - DNA, 19 bp, Homo sapiens
  siRNA target sequence for TRIO (NM_007118.1,1350-1368).
ccagggaatatatgaacat

SEQ ID NO: 103105 - DNA, 19 bp, Homo sapiens
  siRNA target sequence for TRIO (NM_007118.1,1403-1421).
ggaagtcgctccttgacaa

SEQ ID NO: 103106 - DNA, 19 bp, Homo sapiens
  siRNA target sequence for TRIO (NM_007118.1,1707-1725).
gcagaaacgtcatgaagat

SEQ ID NO: 103107 - DNA, 19 bp, Homo sapiens
  siRNA target sequence for TRIO (NM_007118.1,1735-1753).
gtggcacagaacacataca

SEQ ID NO: 103108 - DNA, 19 bp, Homo sapiens
  siRNA target sequence for TRIO (NM_007118.1,1752-1770).
caccaatgcggataaatta

SEQ ID NO: 103109 - DNA, 19 bp, Homo sapiens
  siRNA target sequence for TRIO (NM_007118.1,1754-1772).
ccaatgcggataaattact

SEQ ID NO: 103110 - DNA, 19 bp, Homo sapiens
  siRNA target sequence for TRIO (NM_007118.1,1845-1863).
ggaagaccggattcaagat

SEQ ID NO: 103111 - DNA, 19 bp, Homo sapiens
  siRNA target sequence for TRIO (NM_007118.1,1851-1869).
ccggattcaagatttcgtt

SEQ ID NO: 103112 - DNA, 19 bp, Homo sapiens
  siRNA target sequence for TRIO (NM_007118.1,1874-1892).
gtgttgagcagcgaaagat

SEQ ID NO: 103113 - DNA, 19 bp, Homo sapiens
  siRNA target sequence for TRIO (NM_007118.1,2267-2285).
gggacgccatcgacattat

SEQ ID NO: 103114 - DNA, 19 bp, Homo sapiens
  siRNA target sequence for TRIO (NM_007118.1,2269-2287).
gacgccatcgacattatct

SEQ ID NO: 103115 - DNA, 19 bp, Homo sapiens
  siRNA target sequence for TRIO (NM_007118.1,2271-2289).
cgccatcgacattatctca

SEQ ID NO: 103116 - DNA, 19 bp, Homo sapiens
  siRNA target sequence for TRIO (NM_007118.1,2292-2310).
cctcgagtcttggaatgat

SEQ ID NO: 103117 - DNA, 19 bp, Homo sapiens
  siRNA target sequence for TRIO (NM_007118.1,2303-2321).
ggaatgatgagctttctca

SEQ ID NO: 103118 - DNA, 19 bp, Homo sapiens
  siRNA target sequence for TRIO (NM_007118.1,2492-2510).
gtgatagagatgtagacat

SEQ ID NO: 103119 - DNA, 19 bp, Homo sapiens
  siRNA target sequence for TRIO (NM_007118.1,2661-2679).
caacggagagtccatgtta

SEQ ID NO: 103120 - DNA, 19 bp, Homo sapiens
  siRNA target sequence for TRIO (NM_007118.1,2664-2682).
cggagagtccatgttaaat

SEQ ID NO: 103121 - DNA, 19 bp, Homo sapiens
  siRNA target sequence for TRIO (NM_007118.1,2696-2714).
cagccagctcgttacaaga

SEQ ID NO: 103122 - DNA, 19 bp, Homo sapiens
  siRNA target sequence for TRIO (NM_007118.1,2923-2941).
gcctctgtcgctttctaca

SEQ ID NO: 103123 - DNA, 19 bp, Homo sapiens
  siRNA target sequence for TRIO (NM_007118.1,2925-2943).
ctctgtcgctttctacaaa

SEQ ID NO: 103124 - DNA, 19 bp, Homo sapiens
  siRNA target sequence for TRIO (NM_007118.1,2929-2947).
gtcgctttctacaaaacct

SEQ ID NO: 103125 - DNA, 19 bp, Homo sapiens
  siRNA target sequence for TRIO (NM_007118.1,2975-2993).
gcctggaacaggagtacaa

SEQ ID NO: 103126 - DNA, 19 bp, Homo sapiens
  siRNA target sequence for TRIO (NM_007118.1,3052-3070).
cacgtgacgcccatgatca

SEQ ID NO: 103127 - DNA, 19 bp, Homo sapiens
  siRNA target sequence for TRIO (NM_007118.1,3130-3148).
gcagacgtcttcctgaaat

SEQ ID NO: 103128 - DNA, 19 bp, Homo sapiens
  siRNA target sequence for TRIO (NM_007118.1,3131-3149).
cagacgtcttcctgaaata

SEQ ID NO: 103129 - DNA, 19 bp, Homo sapiens
  siRNA target sequence for TRIO (NM_007118.1,3247-3265).
gagaacagggtattgcatt

SEQ ID NO: 103130 - DNA, 19 bp, Homo sapiens
  siRNA target sequence for TRIO (NM_007118.1,3304-3322).
cagtacgtggtctttgaga

SEQ ID NO: 103131 - DNA, 19 bp, Homo sapiens
  siRNA target sequence for TRIO (NM_007118.1,3328-3346).
gccaagcaggctttggaat

SEQ ID NO: 103132 - DNA, 19 bp, Homo sapiens
  siRNA target sequence for TRIO (NM_007118.1,3389-3407).
ccacgggctccagtataca

SEQ ID NO: 103133 - DNA, 19 bp, Homo sapiens
  siRNA target sequence for TRIO (NM_007118.1,3433-3451).
cacgaggagttccagataa

SEQ ID NO: 103134 - DNA, 19 bp, Homo sapiens
  siRNA target sequence for TRIO (NM_007118.1,3473-3491).
gagtgaagctattgataca

SEQ ID NO: 103135 - DNA, 19 bp, Homo sapiens
  siRNA target sequence for TRIO (NM_007118.1,3523-3541).
gcccatgcggcagagataa

SEQ ID NO: 103136 - DNA, 19 bp, Homo sapiens
  siRNA target sequence for TRIO (NM_007118.1,3524-3542).
cccatgcggcagagataaa

SEQ ID NO: 103137 - DNA, 19 bp, Homo sapiens
  siRNA target sequence for TRIO (NM_007118.1,3526-3544).
catgcggcagagataaaaa

SEQ ID NO: 103138 - DNA, 19 bp, Homo sapiens
  siRNA target sequence for TRIO (NM_007118.1,3603-3621).
caggacctctttggaaaaa

SEQ ID NO: 103139 - DNA, 19 bp, Homo sapiens
  siRNA target sequence for TRIO (NM_007118.1,3662-3680).
gtctccagctagatatcat

SEQ ID NO: 103140 - DNA, 19 bp, Homo sapiens
  siRNA target sequence for TRIO (NM_007118.1,3755-3773).
ctgcccgcaggaaagagtt

SEQ ID NO: 103141 - DNA, 19 bp, Homo sapiens
  siRNA target sequence for TRIO (NM_007118.1,3759-3777).
ccgcaggaaagagttcata

SEQ ID NO: 103142 - DNA, 19 bp, Homo sapiens
  siRNA target sequence for TRIO (NM_007118.1,3760-3778).
cgcaggaaagagttcataa

SEQ ID NO: 103143 - DNA, 19 bp, Homo sapiens
  siRNA target sequence for TRIO (NM_007118.1,3761-3779).
gcaggaaagagttcataat

SEQ ID NO: 103144 - DNA, 19 bp, Homo sapiens
  siRNA target sequence for TRIO (NM_007118.1,3782-3800).
ctgagctcattcaaactga

SEQ ID NO: 103145 - DNA, 19 bp, Homo sapiens
  siRNA target sequence for TRIO (NM_007118.1,3784-3802).
gagctcattcaaactgaaa

SEQ ID NO: 103146 - DNA, 19 bp, Homo sapiens
  siRNA target sequence for TRIO (NM_007118.1,3815-3833).
gagacctccgggaatgtat

SEQ ID NO: 103147 - DNA, 19 bp, Homo sapiens
  siRNA target sequence for TRIO (NM_007118.1,3820-3838).
ctccgggaatgtatggata

SEQ ID NO: 103148 - DNA, 19 bp, Homo sapiens
  siRNA target sequence for TRIO (NM_007118.1,3824-3842).
gggaatgtatggatacgta

SEQ ID NO: 103149 - DNA, 19 bp, Homo sapiens
  siRNA target sequence for TRIO (NM_007118.1,3858-3876).
cagtggcgtggaagagatt

SEQ ID NO: 103150 - DNA, 19 bp, Homo sapiens
  siRNA target sequence for TRIO (NM_007118.1,3921-3939).
gcaagaaatctacgaattt

SEQ ID NO: 103151 - DNA, 19 bp, Homo sapiens
  siRNA target sequence for TRIO (NM_007118.1,3925-3943).
gaaatctacgaatttcata

SEQ ID NO: 103152 - DNA, 19 bp, Homo sapiens
  siRNA target sequence for TRIO (NM_007118.1,3933-3951).
cgaatttcataataacata

SEQ ID NO: 103153 - DNA, 19 bp, Homo sapiens
  siRNA target sequence for TRIO (NM_007118.1,3990-4008).
ggatgttggacattgtttt

SEQ ID NO: 103154 - DNA, 19 bp, Homo sapiens
  siRNA target sequence for TRIO (NM_007118.1,4035-4053).
gtatgtcacatattgcaaa

SEQ ID NO: 103155 - DNA, 19 bp, Homo sapiens
  siRNA target sequence for TRIO (NM_007118.1,4063-4081).
gattctactcagctgatat

SEQ ID NO: 103156 - DNA, 19 bp, Homo sapiens
  siRNA target sequence for TRIO (NM_007118.1,4067-4085).
ctactcagctgatattgga

SEQ ID NO: 103157 - DNA, 19 bp, Homo sapiens
  siRNA target sequence for TRIO (NM_007118.1,4084-4102).
gaacatgcagggtcctatt

SEQ ID NO: 103158 - DNA, 19 bp, Homo sapiens
  siRNA target sequence for TRIO (NM_007118.1,4126-4144).
ggattagccaattccattt

SEQ ID NO: 103159 - DNA, 19 bp, Homo sapiens
  siRNA target sequence for TRIO (NM_007118.1,4162-4180).
ccagttcagcgaataacga

SEQ ID NO: 103160 - DNA, 19 bp, Homo sapiens
  siRNA target sequence for TRIO (NM_007118.1,4163-4181).
cagttcagcgaataacgaa

SEQ ID NO: 103161 - DNA, 19 bp, Homo sapiens
  siRNA target sequence for TRIO (NM_007118.1,4371-4389).
gtgggacccaaaaacctta

SEQ ID NO: 103162 - DNA, 19 bp, Homo sapiens
  siRNA target sequence for TRIO (NM_007118.1,4373-4391).
gggacccaaaaaccttaat

SEQ ID NO: 103163 - DNA, 19 bp, Homo sapiens
  siRNA target sequence for TRIO (NM_007118.1,4377-4395).
cccaaaaaccttaattcga

SEQ ID NO: 103164 - DNA, 19 bp, Homo sapiens
  siRNA target sequence for TRIO (NM_007118.1,4378-4396).
ccaaaaaccttaattcgaa

SEQ ID NO: 103165 - DNA, 19 bp, Homo sapiens
  siRNA target sequence for TRIO (NM_007118.1,4512-4530).
gttgggtgtcacagaacat

SEQ ID NO: 103166 - DNA, 19 bp, Homo sapiens
  siRNA target sequence for TRIO (NM_007118.1,4517-4535).
gtgtcacagaacatgttga

SEQ ID NO: 103167 - DNA, 19 bp, Homo sapiens
  siRNA target sequence for TRIO (NM_007118.1,4627-4645).
caggactggataaagcata

SEQ ID NO: 103168 - DNA, 19 bp, Homo sapiens
  siRNA target sequence for TRIO (NM_007118.1,4690-4708).
ctgaaggagcccattcaca

SEQ ID NO: 103169 - DNA, 19 bp, Homo sapiens
  siRNA target sequence for TRIO (NM_007118.1,4784-4802).
gcagccagcctgatacgat

SEQ ID NO: 103170 - DNA, 19 bp, Homo sapiens
  siRNA target sequence for TRIO (NM_007118.1,4789-4807).
cagcctgatacgatttcca

SEQ ID NO: 103171 - DNA, 19 bp, Homo sapiens
  siRNA target sequence for TRIO (NM_007118.1,4832-4850).
cgctggacagcgataagct

SEQ ID NO: 103172 - DNA, 19 bp, Homo sapiens
  siRNA target sequence for TRIO (NM_007118.1,5558-5576).
cctcttctcggttattagt

SEQ ID NO: 103173 - DNA, 19 bp, Homo sapiens
  siRNA target sequence for TRIO (NM_007118.1,5610-5628).
cgagctcgtcagtgcaatt

SEQ ID NO: 103174 - DNA, 19 bp, Homo sapiens
  siRNA target sequence for TRIO (NM_007118.1,5683-5701).
gttgaccagggagatagta

SEQ ID NO: 103175 - DNA, 19 bp, Homo sapiens
  siRNA target sequence for TRIO (NM_007118.1,5712-5730).
cttcaacccttcggataat

SEQ ID NO: 103176 - DNA, 19 bp, Homo sapiens
  siRNA target sequence for TRIO (NM_007118.1,5747-5765).
cctcgcccattgatgagat

SEQ ID NO: 103177 - DNA, 19 bp, Homo sapiens
  siRNA target sequence for TRIO (NM_007118.1,5802-5820).
ctacgttttgcaagaacta

SEQ ID NO: 103178 - DNA, 19 bp, Homo sapiens
  siRNA target sequence for TRIO (NM_007118.1,5937-5955).
cggcaacatccatcagatt

SEQ ID NO: 103179 - DNA, 19 bp, Homo sapiens
  siRNA target sequence for TRIO (NM_007118.1,6019-6037).
ctaggatccctttttgtta

SEQ ID NO: 103180 - DNA, 19 bp, Homo sapiens
  siRNA target sequence for TRIO (NM_007118.1,6023-6041).
gatccctttttgttaaaca

SEQ ID NO: 103181 - DNA, 19 bp, Homo sapiens
  siRNA target sequence for TRIO (NM_007118.1,6057-6075).
catgtacatagcttattgt

SEQ ID NO: 103182 - DNA, 19 bp, Homo sapiens
  siRNA target sequence for TRIO (NM_007118.1,6103-6121).
gtctcagaatacattgata

SEQ ID NO: 103183 - DNA, 19 bp, Homo sapiens
  siRNA target sequence for TRIO (NM_007118.1,6107-6125).
cagaatacattgatacctt

SEQ ID NO: 103184 - DNA, 19 bp, Homo sapiens
  siRNA target sequence for TRIO (NM_007118.1,6122-6140).
ccttttttgaggacttaaa

SEQ ID NO: 103185 - DNA, 19 bp, Homo sapiens
  siRNA target sequence for TRIO (NM_007118.1,6192-6210).
gcagagaatcatgaagtat

SEQ ID NO: 103186 - DNA, 19 bp, Homo sapiens
  siRNA target sequence for TRIO (NM_007118.1,6222-6240).
gaaggacttcctcaagtat

SEQ ID NO: 103187 - DNA, 19 bp, Homo sapiens
  siRNA target sequence for TRIO (NM_007118.1,6226-6244).
gacttcctcaagtattcca

SEQ ID NO: 103188 - DNA, 19 bp, Homo sapiens
  siRNA target sequence for TRIO (NM_007118.1,6308-6326).
ggcggtgcaacgacatgat

SEQ ID NO: 103189 - DNA, 19 bp, Homo sapiens
  siRNA target sequence for TRIO (NM_007118.1,6347-6365).
gattcgacgggaaaatcgt

SEQ ID NO: 103190 - DNA, 19 bp, Homo sapiens
  siRNA target sequence for TRIO (NM_007118.1,6480-6498).
cagcgaaccacttgataaa

SEQ ID NO: 103191 - DNA, 19 bp, Homo sapiens
  siRNA target sequence for TRIO (NM_007118.1,6482-6500).
gcgaaccacttgataaaaa

SEQ ID NO: 103192 - DNA, 19 bp, Homo sapiens
  siRNA target sequence for TRIO (NM_007118.1,6517-6535).
ccgggattcctgtttaaga

SEQ ID NO: 103193 - DNA, 19 bp, Homo sapiens
  siRNA target sequence for TRIO (NM_007118.1,6518-6536).
cgggattcctgtttaagaa

SEQ ID NO: 103194 - DNA, 19 bp, Homo sapiens
  siRNA target sequence for TRIO (NM_007118.1,6655-6673).
ccaagtgtccggcaaactt

SEQ ID NO: 103195 - DNA, 19 bp, Homo sapiens
  siRNA target sequence for TRIO (NM_007118.1,6700-6718).
gaaaaccagcgcaattttt

SEQ ID NO: 103196 - DNA, 19 bp, Homo sapiens
  siRNA target sequence for TRIO (NM_007118.1,7078-7096).
caaggagaggtcgttcaaa

SEQ ID NO: 103197 - DNA, 19 bp, Homo sapiens
  siRNA target sequence for TRIO (NM_007118.1,7082-7100).
gagaggtcgttcaaattct

SEQ ID NO: 103198 - DNA, 19 bp, Homo sapiens
  siRNA target sequence for TRIO (NM_007118.1,7223-7241).
cggacgggactctcaagaa

SEQ ID NO: 103199 - DNA, 19 bp, Homo sapiens
  siRNA target sequence for TRIO (NM_007118.1,7225-7243).
gacgggactctcaagaagt

SEQ ID NO: 103200 - DNA, 19 bp, Homo sapiens
  siRNA target sequence for TRIO (NM_007118.1,7228-7246).
gggactctcaagaagtcaa

SEQ ID NO: 103201 - DNA, 19 bp, Homo sapiens
  siRNA target sequence for TRIO (NM_007118.1,7261-7279).
gcactccgtttaaggaaaa

SEQ ID NO: 103202 - DNA, 19 bp, Homo sapiens
  siRNA target sequence for TRIO (NM_007118.1,7351-7369).
ggactcagcaacaaggtat

SEQ ID NO: 103203 - DNA, 19 bp, Homo sapiens
  siRNA target sequence for TRIO (NM_007118.1,7381-7399).
ctcaatcccaactacattt

SEQ ID NO: 103204 - DNA, 19 bp, Homo sapiens
  siRNA target sequence for TRIO (NM_007118.1,7411-7429).
ccagaattcgtcattccat

SEQ ID NO: 103205 - DNA, 19 bp, Homo sapiens
  siRNA target sequence for TRIO (NM_007118.1,7458-7476).
gaccgttgttcttagatgt

SEQ ID NO: 103206 - DNA, 19 bp, Homo sapiens
  siRNA target sequence for TRIO (NM_007118.1,7629-7647).
cacgtgcatcgctgtcaat

SEQ ID NO: 103207 - DNA, 19 bp, Homo sapiens
  siRNA target sequence for TRIO (NM_007118.1,7634-7652).
gcatcgctgtcaatgacat

SEQ ID NO: 103208 - DNA, 19 bp, Homo sapiens
  siRNA target sequence for TRIO (NM_007118.1,7772-7790).
gcagattctctgtcgttaa

SEQ ID NO: 103209 - DNA, 19 bp, Homo sapiens
  siRNA target sequence for TRIO (NM_007118.1,7779-7797).
ctctgtcgttaagaaatgt

SEQ ID NO: 103210 - DNA, 19 bp, Homo sapiens
  siRNA target sequence for TRIO (NM_007118.1,7816-7834).
cgagcagtggccactaagt

SEQ ID NO: 103211 - DNA, 19 bp, Homo sapiens
  siRNA target sequence for TRIO (NM_007118.1,7820-7838).
cagtggccactaagtttgt

SEQ ID NO: 103212 - DNA, 19 bp, Homo sapiens
  siRNA target sequence for TRIO (NM_007118.1,7921-7939).
ctcctcgacacctttgaga

SEQ ID NO: 103213 - DNA, 19 bp, Homo sapiens
  siRNA target sequence for TRIO (NM_007118.1,8298-8316).
gctcacatacgtacttctt

SEQ ID NO: 103214 - DNA, 19 bp, Homo sapiens
  siRNA target sequence for TRIO (NM_007118.1,8299-8317).
ctcacatacgtacttctta

SEQ ID NO: 103215 - DNA, 19 bp, Homo sapiens
  siRNA target sequence for TRIO (NM_007118.1,8372-8390).
gccgcttagactttagctt

SEQ ID NO: 103216 - DNA, 19 bp, Homo sapiens
  siRNA target sequence for TRIO (NM_007118.1,8387-8405).
gcttcccagatgactactt

SEQ ID NO: 103217 - DNA, 19 bp, Homo sapiens
  siRNA target sequence for TRIO (NM_007118.1,8552-8570).
gactgacttccttcattga

SEQ ID NO: 103218 - DNA, 19 bp, Homo sapiens
  siRNA target sequence for TRIO (NM_007118.1,8596-8614).
cgacctatccgtagcatta

SEQ ID NO: 103219 - DNA, 19 bp, Homo sapiens
  siRNA target sequence for TRIO (NM_007118.1,8597-8615).
gacctatccgtagcattaa

SEQ ID NO: 103220 - DNA, 19 bp, Homo sapiens
  siRNA target sequence for TRIO (NM_007118.1,8599-8617).
cctatccgtagcattaaaa

SEQ ID NO: 103221 - DNA, 19 bp, Homo sapiens
  siRNA target sequence for TRIO (NM_007118.1,8604-8622).
ccgtagcattaaaaacttt

SEQ ID NO: 103222 - DNA, 19 bp, Homo sapiens
  siRNA target sequence for TRIO (NM_007118.1,8631-8649).
caggcttctgcctagagtt

SEQ ID NO: 103223 - DNA, 19 bp, Homo sapiens
  siRNA target sequence for TRIP13 (NM_004237.2,219-237).
gacataaacctgagtgtta

SEQ ID NO: 103224 - DNA, 19 bp, Homo sapiens
  siRNA target sequence for TRIP13 (NM_004237.2,221-239).
cataaacctgagtgttaga

SEQ ID NO: 103225 - DNA, 19 bp, Homo sapiens
  siRNA target sequence for TRIP13 (NM_004237.2,227-245).
cctgagtgttagaaagcta

SEQ ID NO: 103226 - DNA, 19 bp, Homo sapiens
  siRNA target sequence for TRIP13 (NM_004237.2,242-260).
gctactcaacagacataat

SEQ ID NO: 103227 - DNA, 19 bp, Homo sapiens
  siRNA target sequence for TRIP13 (NM_004237.2,288-306).
gagtttgatgaaccttttt

SEQ ID NO: 103228 - DNA, 19 bp, Homo sapiens
  siRNA target sequence for TRIP13 (NM_004237.2,318-336).
gtgcagtctgtgtctatta

SEQ ID NO: 103229 - DNA, 19 bp, Homo sapiens
  siRNA target sequence for TRIP13 (NM_004237.2,517-535).
gggacagcttggtatacga

SEQ ID NO: 103230 - DNA, 19 bp, Homo sapiens
  siRNA target sequence for TRIP13 (NM_004237.2,552-570).
catctcctcgattatgtga

SEQ ID NO: 103231 - DNA, 19 bp, Homo sapiens
  siRNA target sequence for TRIP13 (NM_004237.2,558-576).
ctcgattatgtgatgacaa

SEQ ID NO: 103232 - DNA, 19 bp, Homo sapiens
  siRNA target sequence for TRIP13 (NM_004237.2,569-587).
gatgacaactttactgttt

SEQ ID NO: 103233 - DNA, 19 bp, Homo sapiens
  siRNA target sequence for TRIP13 (NM_004237.2,683-701).
gttagcccagaaattgaca

SEQ ID NO: 103234 - DNA, 19 bp, Homo sapiens
  siRNA target sequence for TRIP13 (NM_004237.2,719-737).
gtaccgatatggccaatta

SEQ ID NO: 103235 - DNA, 19 bp, Homo sapiens
  siRNA target sequence for TRIP13 (NM_004237.2,722-740).
ccgatatggccaattaatt

SEQ ID NO: 103236 - DNA, 19 bp, Homo sapiens
  siRNA target sequence for TRIP13 (NM_004237.2,784-802).
gtggcaagctggtaaccaa

SEQ ID NO: 103237 - DNA, 19 bp, Homo sapiens
  siRNA target sequence for TRIP13 (NM_004237.2,795-813).
gtaaccaagatgtttcaga

SEQ ID NO: 103238 - DNA, 19 bp, Homo sapiens
  siRNA target sequence for TRIP13 (NM_004237.2,848-866).
ggtgttcgtgctgattgat

SEQ ID NO: 103239 - DNA, 19 bp, Homo sapiens
  siRNA target sequence for TRIP13 (NM_004237.2,908-926).
gggcaccgagccatcagat

SEQ ID NO: 103240 - DNA, 19 bp, Homo sapiens
  siRNA target sequence for TRIP13 (NM_004237.2,976-994).
ggcattccaatgttgtgat

SEQ ID NO: 103241 - DNA, 19 bp, Homo sapiens
  siRNA target sequence for TRIP13 (NM_004237.2,977-995).
gcattccaatgttgtgatt

SEQ ID NO: 103242 - DNA, 19 bp, Homo sapiens
  siRNA target sequence for TRIP13 (NM_004237.2,990-1008).
gtgattctgaccacttcta

SEQ ID NO: 103243 - DNA, 19 bp, Homo sapiens
  siRNA target sequence for TRIP13 (NM_004237.2,1100-1118).
ctacctctcttgtttggaa

SEQ ID NO: 103244 - DNA, 19 bp, Homo sapiens
  siRNA target sequence for TRIP13 (NM_004237.2,1169-1187).
ccgagagctagagatgatt

SEQ ID NO: 103245 - DNA, 19 bp, Homo sapiens
  siRNA target sequence for TRIP13 (NM_004237.2,1181-1199).
gatgattggcttcattgaa

SEQ ID NO: 103246 - DNA, 19 bp, Homo sapiens
  siRNA target sequence for TRIP13 (NM_004237.2,1197-1215).
gaaaacaacgtgtcaaaat

SEQ ID NO: 103247 - DNA, 19 bp, Homo sapiens
  siRNA target sequence for TRIP13 (NM_004237.2,1219-1237).
gccttcttttgaatgacat

SEQ ID NO: 103248 - DNA, 19 bp, Homo sapiens
  siRNA target sequence for TRPC4AP (NM_015638.1,168-186).
gcagttcactgagactttt

SEQ ID NO: 103249 - DNA, 19 bp, Homo sapiens
  siRNA target sequence for TRPC4AP (NM_015638.1,258-276).
ccacctccacagtgacttt

SEQ ID NO: 103250 - DNA, 19 bp, Homo sapiens
  siRNA target sequence for TRPC4AP (NM_015638.1,261-279).
cctccacagtgactttgtt

SEQ ID NO: 103251 - DNA, 19 bp, Homo sapiens
  siRNA target sequence for TRPC4AP (NM_015638.1,324-342).
ggaggctatggcatttgtt

SEQ ID NO: 103252 - DNA, 19 bp, Homo sapiens
  siRNA target sequence for TRPC4AP (NM_015638.1,329-347).
ctatggcatttgttactga

SEQ ID NO: 103253 - DNA, 19 bp, Homo sapiens
  siRNA target sequence for TRPC4AP (NM_015638.1,364-382).
caagaaaccacttatccaa

SEQ ID NO: 103254 - DNA, 19 bp, Homo sapiens
  siRNA target sequence for TRPC4AP (NM_015638.1,399-417).
cttgtttggaggtgttgat

SEQ ID NO: 103255 - DNA, 19 bp, Homo sapiens
  siRNA target sequence for TRPC4AP (NM_015638.1,402-420).
gtttggaggtgttgatctt

SEQ ID NO: 103256 - DNA, 19 bp, Homo sapiens
  siRNA target sequence for TRPC4AP (NM_015638.1,407-425).
gaggtgttgatcttcttgt

SEQ ID NO: 103257 - DNA, 19 bp, Homo sapiens
  siRNA target sequence for TRPC4AP (NM_015638.1,410-428).
gtgttgatcttcttgtaga

SEQ ID NO: 103258 - DNA, 19 bp, Homo sapiens
  siRNA target sequence for TRPC4AP (NM_015638.1,418-436).
cttcttgtagaaattctta

SEQ ID NO: 103259 - DNA, 19 bp, Homo sapiens
  siRNA target sequence for TRPC4AP (NM_015638.1,452-470).
ctatccggggacagaaact

SEQ ID NO: 103260 - DNA, 19 bp, Homo sapiens
  siRNA target sequence for TRPC4AP (NM_015638.1,456-474).
ccggggacagaaactgaaa

SEQ ID NO: 103261 - DNA, 19 bp, Homo sapiens
  siRNA target sequence for TRPC4AP (NM_015638.1,457-475).
cggggacagaaactgaaaa

SEQ ID NO: 103262 - DNA, 19 bp, Homo sapiens
  siRNA target sequence for TRPC4AP (NM_015638.1,500-518).
gcttgagtatcctgtataa

SEQ ID NO: 103263 - DNA, 19 bp, Homo sapiens
  siRNA target sequence for TRPC4AP (NM_015638.1,530-548).
gtacagagggagttacaaa

SEQ ID NO: 103264 - DNA, 19 bp, Homo sapiens
  siRNA target sequence for TRPC4AP (NM_015638.1,602-620).
gtaagaagacattcttaca

SEQ ID NO: 103265 - DNA, 19 bp, Homo sapiens
  siRNA target sequence for TRPC4AP (NM_015638.1,623-641).
cagcaaccctcattgaaga

SEQ ID NO: 103266 - DNA, 19 bp, Homo sapiens
  siRNA target sequence for TRPC4AP (NM_015638.1,625-643).
gcaaccctcattgaagata

SEQ ID NO: 103267 - DNA, 19 bp, Homo sapiens
  siRNA target sequence for TRPC4AP (NM_015638.1,660-678).
ggaaatgatccgactagat

SEQ ID NO: 103268 - DNA, 19 bp, Homo sapiens
  siRNA target sequence for TRPC4AP (NM_015638.1,687-705).
caatctgagttccttagta

SEQ ID NO: 103269 - DNA, 19 bp, Homo sapiens
  siRNA target sequence for TRPC4AP (NM_015638.1,693-711).
gagttccttagtatccaat

SEQ ID NO: 103270 - DNA, 19 bp, Homo sapiens
  siRNA target sequence for TRPC4AP (NM_015638.1,698-716).
ccttagtatccaatttcga

SEQ ID NO: 103271 - DNA, 19 bp, Homo sapiens
  siRNA target sequence for TRPC4AP (NM_015638.1,721-739).
cagcagctcgctaatttct

SEQ ID NO: 103272 - DNA, 19 bp, Homo sapiens
  siRNA target sequence for TRPC4AP (NM_015638.1,795-813).
cacgcttcttgccaaaaat

SEQ ID NO: 103273 - DNA, 19 bp, Homo sapiens
  siRNA target sequence for TRPC4AP (NM_015638.1,842-860).
ggccttctgcagctgaaat

SEQ ID NO: 103274 - DNA, 19 bp, Homo sapiens
  siRNA target sequence for TRPC4AP (NM_015638.1,848-866).
ctgcagctgaaatcaatca

SEQ ID NO: 103275 - DNA, 19 bp, Homo sapiens
  siRNA target sequence for TRPC4AP (NM_015638.1,977-995).
ggtacacatggctagacaa

SEQ ID NO: 103276 - DNA, 19 bp, Homo sapiens
  siRNA target sequence for TRPC4AP (NM_015638.1,978-996).
gtacacatggctagacaat

SEQ ID NO: 103277 - DNA, 19 bp, Homo sapiens
  siRNA target sequence for TRPC4AP (NM_015638.1,1128-1146).
gccccagtcaatgaagatt

SEQ ID NO: 103278 - DNA, 19 bp, Homo sapiens
  siRNA target sequence for TRPC4AP (NM_015638.1,1129-1147).
ccccagtcaatgaagatta

SEQ ID NO: 103279 - DNA, 19 bp, Homo sapiens
  siRNA target sequence for TRPC4AP (NM_015638.1,1134-1152).
gtcaatgaagattatgcat

SEQ ID NO: 103280 - DNA, 19 bp, Homo sapiens
  siRNA target sequence for TRPC4AP (NM_015638.1,1149-1167).
gcatgagatcatgtacaaa

SEQ ID NO: 103281 - DNA, 19 bp, Homo sapiens
  siRNA target sequence for TRPC4AP (NM_015638.1,1218-1236).
ccaggttcacagaatgatt

SEQ ID NO: 103282 - DNA, 19 bp, Homo sapiens
  siRNA target sequence for TRPC4AP (NM_015638.1,1351-1369).
ccggacatcaccttgaaga

SEQ ID NO: 103283 - DNA, 19 bp, Homo sapiens
  siRNA target sequence for TRPC4AP (NM_015638.1,1402-1420).
gaccaccacgagaacaagt

SEQ ID NO: 103284 - DNA, 19 bp, Homo sapiens
  siRNA target sequence for TRPC4AP (NM_015638.1,1579-1597).
ccagcagagtcgtctttca

SEQ ID NO: 103285 - DNA, 19 bp, Homo sapiens
  siRNA target sequence for TRPC4AP (NM_015638.1,1585-1603).
gagtcgtctttcaggtttt

SEQ ID NO: 103286 - DNA, 19 bp, Homo sapiens
  siRNA target sequence for TRPC4AP (NM_015638.1,1610-1628).
ctcgggctgtggagagttt

SEQ ID NO: 103287 - DNA, 19 bp, Homo sapiens
  siRNA target sequence for TRPC4AP (NM_015638.1,1646-1664).
cctatgcagaccagatgtt

SEQ ID NO: 103288 - DNA, 19 bp, Homo sapiens
  siRNA target sequence for TRPC4AP (NM_015638.1,1708-1726).
gtggacagcgagtgtaagt

SEQ ID NO: 103289 - DNA, 19 bp, Homo sapiens
  siRNA target sequence for TRPC4AP (NM_015638.1,1711-1729).
gacagcgagtgtaagtcaa

SEQ ID NO: 103290 - DNA, 19 bp, Homo sapiens
  siRNA target sequence for TRPC4AP (NM_015638.1,1789-1807).
gcattcaagagattcaata

SEQ ID NO: 103291 - DNA, 19 bp, Homo sapiens
  siRNA target sequence for TRPC4AP (NM_015638.1,1790-1808).
cattcaagagattcaataa

SEQ ID NO: 103292 - DNA, 19 bp, Homo sapiens
  siRNA target sequence for TRPC4AP (NM_015638.1,1902-1920).
gtccctggaccgatttgaa

SEQ ID NO: 103293 - DNA, 19 bp, Homo sapiens
  siRNA target sequence for TRPC4AP (NM_015638.1,1904-1922).
ccctggaccgatttgaaaa

SEQ ID NO: 103294 - DNA, 19 bp, Homo sapiens
  siRNA target sequence for TRPC4AP (NM_015638.1,1942-1960).
gccgaggtactgtctgaat

SEQ ID NO: 103295 - DNA, 19 bp, Homo sapiens
  siRNA target sequence for TRPC4AP (NM_015638.1,1962-1980).
ccgcctgctcgcctacata

SEQ ID NO: 103296 - DNA, 19 bp, Homo sapiens
  siRNA target sequence for TRPC4AP (NM_015638.1,1963-1981).
cgcctgctcgcctacatat

SEQ ID NO: 103297 - DNA, 19 bp, Homo sapiens
  siRNA target sequence for TRPC4AP (NM_015638.1,2330-2348).
cctctgctctcgttagcta

SEQ ID NO: 103298 - DNA, 19 bp, Homo sapiens
  siRNA target sequence for TRPC4AP (NM_015638.1,2336-2354).
ctctcgttagctacattga

SEQ ID NO: 103299 - DNA, 19 bp, Homo sapiens
  siRNA target sequence for TRPC4AP (NM_015638.1,2359-2377).
ccctacatggacatagaca

SEQ ID NO: 103300 - DNA, 19 bp, Homo sapiens
  siRNA target sequence for TRPM6 (NM_017662.3,263-281).
cgcttgcagtcccagaaat

SEQ ID NO: 103301 - DNA, 19 bp, Homo sapiens
  siRNA target sequence for TRPM6 (NM_017662.3,282-300).
cctggattaaaggagtatt

SEQ ID NO: 103302 - DNA, 19 bp, Homo sapiens
  siRNA target sequence for TRPM6 (NM_017662.3,309-327).
gagaatgtagcacaatcat

SEQ ID NO: 103303 - DNA, 19 bp, Homo sapiens
  siRNA target sequence for TRPM6 (NM_017662.3,367-385).
ccaagtctgccagaattta

SEQ ID NO: 103304 - DNA, 19 bp, Homo sapiens
  siRNA target sequence for TRPM6 (NM_017662.3,368-386).
caagtctgccagaatttaa

SEQ ID NO: 103305 - DNA, 19 bp, Homo sapiens
  siRNA target sequence for TRPM6 (NM_017662.3,371-389).
gtctgccagaatttaatca

SEQ ID NO: 103306 - DNA, 19 bp, Homo sapiens
  siRNA target sequence for TRPM6 (NM_017662.3,418-436).
ccatgctgggatagattat

SEQ ID NO: 103307 - DNA, 19 bp, Homo sapiens
  siRNA target sequence for TRPM6 (NM_017662.3,419-437).
catgctgggatagattatt

SEQ ID NO: 103308 - DNA, 19 bp, Homo sapiens
  siRNA target sequence for TRPM6 (NM_017662.3,515-533).
gatacttttggcacgatta

SEQ ID NO: 103309 - DNA, 19 bp, Homo sapiens
  siRNA target sequence for TRPM6 (NM_017662.3,553-571).
cacccatcatgccaagtat

SEQ ID NO: 103310 - DNA, 19 bp, Homo sapiens
  siRNA target sequence for TRPM6 (NM_017662.3,556-574).
ccatcatgccaagtatatt

SEQ ID NO: 103311 - DNA, 19 bp, Homo sapiens
  siRNA target sequence for TRPM6 (NM_017662.3,563-581).
gccaagtatattagaactt

SEQ ID NO: 103312 - DNA, 19 bp, Homo sapiens
  siRNA target sequence for TRPM6 (NM_017662.3,568-586).
gtatattagaacttcttat

SEQ ID NO: 103313 - DNA, 19 bp, Homo sapiens
  siRNA target sequence for TRPM6 (NM_017662.3,605-623).
ctgttacatttaatgttga

SEQ ID NO: 103314 - DNA, 19 bp, Homo sapiens
  siRNA target sequence for TRPM6 (NM_017662.3,671-689).
ggcatccagaactttacta

SEQ ID NO: 103315 - DNA, 19 bp, Homo sapiens
  siRNA target sequence for TRPM6 (NM_017662.3,672-690).
gcatccagaactttactat

SEQ ID NO: 103316 - DNA, 19 bp, Homo sapiens
  siRNA target sequence for TRPM6 (NM_017662.3,687-705).
ctatgccctctaaatttaa

SEQ ID NO: 103317 - DNA, 19 bp, Homo sapiens
  siRNA target sequence for TRPM6 (NM_017662.3,718-736).
ccaaggtttggttaaagct

SEQ ID NO: 103318 - DNA, 19 bp, Homo sapiens
  siRNA target sequence for TRPM6 (NM_017662.3,750-768).
gagcgtggataataactga

SEQ ID NO: 103319 - DNA, 19 bp, Homo sapiens
  siRNA target sequence for TRPM6 (NM_017662.3,880-898).
gaaccagagagaccttatt

SEQ ID NO: 103320 - DNA, 19 bp, Homo sapiens
  siRNA target sequence for TRPM6 (NM_017662.3,1002-1020).
ccgtgggcaagtatggaaa

SEQ ID NO: 103321 - DNA, 19 bp, Homo sapiens
  siRNA target sequence for TRPM6 (NM_017662.3,1003-1021).
cgtgggcaagtatggaaat

SEQ ID NO: 103322 - DNA, 19 bp, Homo sapiens
  siRNA target sequence for TRPM6 (NM_017662.3,1358-1376).
gttcacagggattgtatta

SEQ ID NO: 103323 - DNA, 19 bp, Homo sapiens
  siRNA target sequence for TRPM6 (NM_017662.3,1365-1383).
gggattgtattaccatatt

SEQ ID NO: 103324 - DNA, 19 bp, Homo sapiens
  siRNA target sequence for TRPM6 (NM_017662.3,1366-1384).
ggattgtattaccatattt

SEQ ID NO: 103325 - DNA, 19 bp, Homo sapiens
  siRNA target sequence for TRPM6 (NM_017662.3,1438-1456).
gctgaagggcacaaattta

SEQ ID NO: 103326 - DNA, 19 bp, Homo sapiens
  siRNA target sequence for TRPM6 (NM_017662.3,1458-1476).
cagcgtcagagcaattaaa

SEQ ID NO: 103327 - DNA, 19 bp, Homo sapiens
  siRNA target sequence for TRPM6 (NM_017662.3,1585-1603).
gatggatcgggtggatttt

SEQ ID NO: 103328 - DNA, 19 bp, Homo sapiens
  siRNA target sequence for TRPM6 (NM_017662.3,1606-1624).
gaagctcttaatagaatat

SEQ ID NO: 103329 - DNA, 19 bp, Homo sapiens
  siRNA target sequence for TRPM6 (NM_017662.3,1630-1648).
gaacctccatcgctttctt

SEQ ID NO: 103330 - DNA, 19 bp, Homo sapiens
  siRNA target sequence for TRPM6 (NM_017662.3,1663-1681).
ggaagagctctacaataca

SEQ ID NO: 103331 - DNA, 19 bp, Homo sapiens
  siRNA target sequence for TRPM6 (NM_017662.3,1745-1763).
ctttcaggctaccgaataa

SEQ ID NO: 103332 - DNA, 19 bp, Homo sapiens
  siRNA target sequence for TRPM6 (NM_017662.3,1749-1767).
caggctaccgaataacctt

SEQ ID NO: 103333 - DNA, 19 bp, Homo sapiens
  siRNA target sequence for TRPM6 (NM_017662.3,1757-1775).
cgaataaccttgattgaca

SEQ ID NO: 103334 - DNA, 19 bp, Homo sapiens
  siRNA target sequence for TRPM6 (NM_017662.3,1758-1776).
gaataaccttgattgacat

SEQ ID NO: 103335 - DNA, 19 bp, Homo sapiens
  siRNA target sequence for TRPM6 (NM_017662.3,1768-1786).
gattgacattggattagta

SEQ ID NO: 103336 - DNA, 19 bp, Homo sapiens
  siRNA target sequence for TRPM6 (NM_017662.3,1779-1797).
gattagtagtagaatacct

SEQ ID NO: 103337 - DNA, 19 bp, Homo sapiens
  siRNA target sequence for TRPM6 (NM_017662.3,1795-1813).
cctcattggtagagcatat

SEQ ID NO: 103338 - DNA, 19 bp, Homo sapiens
  siRNA target sequence for TRPM6 (NM_017662.3,1814-1832).
cgcagcaactacactagaa

SEQ ID NO: 103339 - DNA, 19 bp, Homo sapiens
  siRNA target sequence for TRPM6 (NM_017662.3,1924-1942).
gctgcactcccagttcatt

SEQ ID NO: 103340 - DNA, 19 bp, Homo sapiens
  siRNA target sequence for TRPM6 (NM_017662.3,1925-1943).
ctgcactcccagttcatta

SEQ ID NO: 103341 - DNA, 19 bp, Homo sapiens
  siRNA target sequence for TRPM6 (NM_017662.3,1927-1945).
gcactcccagttcattaga

SEQ ID NO: 103342 - DNA, 19 bp, Homo sapiens
  siRNA target sequence for TRPM6 (NM_017662.3,1928-1946).
cactcccagttcattagaa

SEQ ID NO: 103343 - DNA, 19 bp, Homo sapiens
  siRNA target sequence for TRPM6 (NM_017662.3,2046-2064).
gctttctttacccttacaa

SEQ ID NO: 103344 - DNA, 19 bp, Homo sapiens
  siRNA target sequence for TRPM6 (NM_017662.3,2178-2196).
caatggcccatgaagctaa

SEQ ID NO: 103345 - DNA, 19 bp, Homo sapiens
  siRNA target sequence for TRPM6 (NM_017662.3,2314-2332).
gacgctgttgacgtatgaa

SEQ ID NO: 103346 - DNA, 19 bp, Homo sapiens
  siRNA target sequence for TRPM6 (NM_017662.3,2316-2334).
cgctgttgacgtatgaact

SEQ ID NO: 103347 - DNA, 19 bp, Homo sapiens
  siRNA target sequence for TRPM6 (NM_017662.3,2368-2386).
ggccgtgtcgggaggatta

SEQ ID NO: 103348 - DNA, 19 bp, Homo sapiens
  siRNA target sequence for TRPM6 (NM_017662.3,2371-2389).
cgtgtcgggaggattacga

SEQ ID NO: 103349 - DNA, 19 bp, Homo sapiens
  siRNA target sequence for TRPM6 (NM_017662.3,2381-2399).
ggattacgaccctttgttt

SEQ ID NO: 103350 - DNA, 19 bp, Homo sapiens
  siRNA target sequence for TRPM6 (NM_017662.3,2387-2405).
cgaccctttgtttcacata

SEQ ID NO: 103351 - DNA, 19 bp, Homo sapiens
  siRNA target sequence for TRPM6 (NM_017662.3,2390-2408).
ccctttgtttcacatactt

SEQ ID NO: 103352 - DNA, 19 bp, Homo sapiens
  siRNA target sequence for TRPM6 (NM_017662.3,2555-2573).
cagtcccaggacttccaat

SEQ ID NO: 103353 - DNA, 19 bp, Homo sapiens
  siRNA target sequence for TRPM6 (NM_017662.3,2561-2579).
caggacttccaatttatgt

SEQ ID NO: 103354 - DNA, 19 bp, Homo sapiens
  siRNA target sequence for TRPM6 (NM_017662.3,2596-2614).
gaacgccagcagttccaaa

SEQ ID NO: 103355 - DNA, 19 bp, Homo sapiens
  siRNA target sequence for TRPM6 (NM_017662.3,2619-2637).
gtgcttctgtgaaagagta

SEQ ID NO: 103356 - DNA, 19 bp, Homo sapiens
  siRNA target sequence for TRPM6 (NM_017662.3,2622-2640).
cttctgtgaaagagtatga

SEQ ID NO: 103357 - DNA, 19 bp, Homo sapiens
  siRNA target sequence for TRPM6 (NM_017662.3,2625-2643).
ctgtgaaagagtatgattt

SEQ ID NO: 103358 - DNA, 19 bp, Homo sapiens
  siRNA target sequence for TRPM6 (NM_017662.3,2714-2732).
ccgtggaccaggaaagtct

SEQ ID NO: 103359 - DNA, 19 bp, Homo sapiens
  siRNA target sequence for TRPM6 (NM_017662.3,2715-2733).
cgtggaccaggaaagtcta

SEQ ID NO: 103360 - DNA, 19 bp, Homo sapiens
  siRNA target sequence for TRPM6 (NM_017662.3,2718-2736).
ggaccaggaaagtctatga

SEQ ID NO: 103361 - DNA, 19 bp, Homo sapiens
  siRNA target sequence for TRPM6 (NM_017662.3,2721-2739).
ccaggaaagtctatgagtt

SEQ ID NO: 103362 - DNA, 19 bp, Homo sapiens
  siRNA target sequence for TRPM6 (NM_017662.3,2724-2742).
ggaaagtctatgagttcta

SEQ ID NO: 103363 - DNA, 19 bp, Homo sapiens
  siRNA target sequence for TRPM6 (NM_017662.3,2737-2755).
gttctacagtgctccaatt

SEQ ID NO: 103364 - DNA, 19 bp, Homo sapiens
  siRNA target sequence for TRPM6 (NM_017662.3,2795-2813).
ctcatgctgttcacttaca

SEQ ID NO: 103365 - DNA, 19 bp, Homo sapiens
  siRNA target sequence for TRPM6 (NM_017662.3,2846-2864).
gtgcaggagtggcttgtta

SEQ ID NO: 103366 - DNA, 19 bp, Homo sapiens
  siRNA target sequence for TRPM6 (NM_017662.3,2858-2876).
cttgttagcatttacatct

SEQ ID NO: 103367 - DNA, 19 bp, Homo sapiens
  siRNA target sequence for TRPM6 (NM_017662.3,2925-2943).
ggaagtttacccaaaaggt

SEQ ID NO: 103368 - DNA, 19 bp, Homo sapiens
  siRNA target sequence for TRPM6 (NM_017662.3,2967-2985).
ggaacttaacagaaactgt

SEQ ID NO: 103369 - DNA, 19 bp, Homo sapiens
  siRNA target sequence for TRPM6 (NM_017662.3,3024-3042).
ggggtgaccctccttttca

SEQ ID NO: 103370 - DNA, 19 bp, Homo sapiens
  siRNA target sequence for TRPM6 (NM_017662.3,3026-3044).
ggtgaccctccttttcaca

SEQ ID NO: 103371 - DNA, 19 bp, Homo sapiens
  siRNA target sequence for TRPM6 (NM_017662.3,3061-3079).
ctactgcatagacatcata

SEQ ID NO: 103372 - DNA, 19 bp, Homo sapiens
  siRNA target sequence for TRPM6 (NM_017662.3,3103-3121).
cttctttgctgtgaatcaa

SEQ ID NO: 103373 - DNA, 19 bp, Homo sapiens
  siRNA target sequence for TRPM6 (NM_017662.3,3218-3236).
gcacgcaaggccatccttt

SEQ ID NO: 103374 - DNA, 19 bp, Homo sapiens
  siRNA target sequence for TRPM6 (NM_017662.3,3258-3276).
ggagtctagctcgagatat

SEQ ID NO: 103375 - DNA, 19 bp, Homo sapiens
  siRNA target sequence for TRPM6 (NM_017662.3,3259-3277).
gagtctagctcgagatatt

SEQ ID NO: 103376 - DNA, 19 bp, Homo sapiens
  siRNA target sequence for TRPM6 (NM_017662.3,3263-3281).
ctagctcgagatattgtat

SEQ ID NO: 103377 - DNA, 19 bp, Homo sapiens
  siRNA target sequence for TRPM6 (NM_017662.3,3267-3285).
ctcgagatattgtatttga

SEQ ID NO: 103378 - DNA, 19 bp, Homo sapiens
  siRNA target sequence for TRPM6 (NM_017662.3,3284-3302).
gagccatactggatgatat

SEQ ID NO: 103379 - DNA, 19 bp, Homo sapiens
  siRNA target sequence for TRPM6 (NM_017662.3,3298-3316).
gatatacggagaagtctat

SEQ ID NO: 103380 - DNA, 19 bp, Homo sapiens
  siRNA target sequence for TRPM6 (NM_017662.3,3313-3331).
ctatgctggagaaatagat

SEQ ID NO: 103381 - DNA, 19 bp, Homo sapiens
  siRNA target sequence for TRPM6 (NM_017662.3,3394-3412).
ctacctcttcgtgcaatat

SEQ ID NO: 103382 - DNA, 19 bp, Homo sapiens
  siRNA target sequence for TRPM6 (NM_017662.3,3398-3416).
ctcttcgtgcaatatatca

SEQ ID NO: 103383 - DNA, 19 bp, Homo sapiens
  siRNA target sequence for TRPM6 (NM_017662.3,3437-3455).
gctttcttcaacaacgttt

SEQ ID NO: 103384 - DNA, 19 bp, Homo sapiens
  siRNA target sequence for TRPM6 (NM_017662.3,3445-3463).
caacaacgtttacttagat

SEQ ID NO: 103385 - DNA, 19 bp, Homo sapiens
  siRNA target sequence for TRPM6 (NM_017662.3,3457-3475).
cttagatatggaatccatt

SEQ ID NO: 103386 - DNA, 19 bp, Homo sapiens
  siRNA target sequence for TRPM6 (NM_017662.3,3500-3518).
cgctatcgctacatcatga

SEQ ID NO: 103387 - DNA, 19 bp, Homo sapiens
  siRNA target sequence for TRPM6 (NM_017662.3,3623-3641).
gagggtgacgttggattaa

SEQ ID NO: 103388 - DNA, 19 bp, Homo sapiens
  siRNA target sequence for TRPM6 (NM_017662.3,3625-3643).
gggtgacgttggattaaaa

SEQ ID NO: 103389 - DNA, 19 bp, Homo sapiens
  siRNA target sequence for TRPM6 (NM_017662.3,3627-3645).
gtgacgttggattaaaact

SEQ ID NO: 103390 - DNA, 19 bp, Homo sapiens
  siRNA target sequence for TRPM6 (NM_017662.3,3661-3679).
ggatctgaaaaaacttcat

SEQ ID NO: 103391 - DNA, 19 bp, Homo sapiens
  siRNA target sequence for TRPM6 (NM_017662.3,3689-3707).
gagcagtgcgtggaaaaat

SEQ ID NO: 103392 - DNA, 19 bp, Homo sapiens
  siRNA target sequence for TRPM6 (NM_017662.3,3692-3710).
cagtgcgtggaaaaatact

SEQ ID NO: 103393 - DNA, 19 bp, Homo sapiens
  siRNA target sequence for TRPM6 (NM_017662.3,3721-3739).
gatggaagatgtgaattgt

SEQ ID NO: 103394 - DNA, 19 bp, Homo sapiens
  siRNA target sequence for TRPM6 (NM_017662.3,3738-3756).
gtagttgtgaggaacgaat

SEQ ID NO: 103395 - DNA, 19 bp, Homo sapiens
  siRNA target sequence for TRPM6 (NM_017662.3,3774-3792).
gggttacagagatgtactt

SEQ ID NO: 103396 - DNA, 19 bp, Homo sapiens
  siRNA target sequence for TRPM6 (NM_017662.3,3793-3811).
ccagctgaaagaaatgaat

SEQ ID NO: 103397 - DNA, 19 bp, Homo sapiens
  siRNA target sequence for TRPM6 (NM_017662.3,3891-3909).
ctgtggataccctgaaagt

SEQ ID NO: 103398 - DNA, 19 bp, Homo sapiens
  siRNA target sequence for TRPM6 (NM_017662.3,3953-3971).
gccaagagaaagcattcta

SEQ ID NO: 103399 - DNA, 19 bp, Homo sapiens
  siRNA target sequence for TRPM6 (NM_017662.3,4132-4150).
ggcacttcttgagattaca

SEQ ID NO: 103400 - DNA, 19 bp, Homo sapiens
  siRNA target sequence for TRPM6 (NM_017662.3,4133-4151).
gcacttcttgagattacaa

SEQ ID NO: 103401 - DNA, 19 bp, Homo sapiens
  siRNA target sequence for TRPM6 (NM_017662.3,4136-4154).
cttcttgagattacaaaca

SEQ ID NO: 103402 - DNA, 19 bp, Homo sapiens
  siRNA target sequence for TRPM6 (NM_017662.3,4139-4157).
cttgagattacaaacagta

SEQ ID NO: 103403 - DNA, 19 bp, Homo sapiens
  siRNA target sequence for TRPM6 (NM_017662.3,4142-4160).
gagattacaaacagtaaaa

SEQ ID NO: 103404 - DNA, 19 bp, Homo sapiens
  siRNA target sequence for TRPM6 (NM_017662.3,4144-4162).
gattacaaacagtaaaaga

SEQ ID NO: 103405 - DNA, 19 bp, Homo sapiens
  siRNA target sequence for TRPM6 (NM_017662.3,4165-4183).
ggctacaaatgtaagaaat

SEQ ID NO: 103406 - DNA, 19 bp, Homo sapiens
  siRNA target sequence for TRPM6 (NM_017662.3,4242-4260).
ggcaagcacactcaaagta

SEQ ID NO: 103407 - DNA, 19 bp, Homo sapiens
  siRNA target sequence for TRPM6 (NM_017662.3,4254-4272).
caaagtatggccagtttct

SEQ ID NO: 103408 - DNA, 19 bp, Homo sapiens
  siRNA target sequence for TRPM6 (NM_017662.3,4274-4292).
ctggtcccctctaatctaa

SEQ ID NO: 103409 - DNA, 19 bp, Homo sapiens
  siRNA target sequence for TRPM6 (NM_017662.3,4289-4307).
ctaaagcgagttccttttt

SEQ ID NO: 103410 - DNA, 19 bp, Homo sapiens
  siRNA target sequence for TRPM6 (NM_017662.3,4583-4601).
ggaggtggatatgtaaact

SEQ ID NO: 103411 - DNA, 19 bp, Homo sapiens
  siRNA target sequence for TRPM6 (NM_017662.3,4622-4640).
gaaactggtgtgtttagca

SEQ ID NO: 103412 - DNA, 19 bp, Homo sapiens
  siRNA target sequence for TRPM6 (NM_017662.3,4629-4647).
gtgtgtttagcatcaagaa

SEQ ID NO: 103413 - DNA, 19 bp, Homo sapiens
  siRNA target sequence for TRPM6 (NM_017662.3,4724-4742).
gacagctccctatctgata

SEQ ID NO: 103414 - DNA, 19 bp, Homo sapiens
  siRNA target sequence for TRPM6 (NM_017662.3,4729-4747).
ctccctatctgataactca

SEQ ID NO: 103415 - DNA, 19 bp, Homo sapiens
  siRNA target sequence for TRPM6 (NM_017662.3,4799-4817).
ccaaacacatccttttgga

SEQ ID NO: 103416 - DNA, 19 bp, Homo sapiens
  siRNA target sequence for TRPM6 (NM_017662.3,4804-4822).
cacatccttttggatcaat

SEQ ID NO: 103417 - DNA, 19 bp, Homo sapiens
  siRNA target sequence for TRPM6 (NM_017662.3,4841-4859).
cccttcgctaggagtcata

SEQ ID NO: 103418 - DNA, 19 bp, Homo sapiens
  siRNA target sequence for TRPM6 (NM_017662.3,4843-4861).
cttcgctaggagtcatagt

SEQ ID NO: 103419 - DNA, 19 bp, Homo sapiens
  siRNA target sequence for TRPM6 (NM_017662.3,4846-4864).
cgctaggagtcatagtttt

SEQ ID NO: 103420 - DNA, 19 bp, Homo sapiens
  siRNA target sequence for TRPM6 (NM_017662.3,4847-4865).
gctaggagtcatagtttta

SEQ ID NO: 103421 - DNA, 19 bp, Homo sapiens
  siRNA target sequence for TRPM6 (NM_017662.3,4947-4965).
gggtcaaagcgaaaatgct

SEQ ID NO: 103422 - DNA, 19 bp, Homo sapiens
  siRNA target sequence for TRPM6 (NM_017662.3,4948-4966).
ggtcaaagcgaaaatgcta

SEQ ID NO: 103423 - DNA, 19 bp, Homo sapiens
  siRNA target sequence for TRPM6 (NM_017662.3,5014-5032).
ccaggtgccaatcataaca

SEQ ID NO: 103424 - DNA, 19 bp, Homo sapiens
  siRNA target sequence for TRPM6 (NM_017662.3,5020-5038).
gccaatcataacagtcaat

SEQ ID NO: 103425 - DNA, 19 bp, Homo sapiens
  siRNA target sequence for TRPM6 (NM_017662.3,5142-5160).
caggtgtagaaccttacat

SEQ ID NO: 103426 - DNA, 19 bp, Homo sapiens
  siRNA target sequence for TRPM6 (NM_017662.3,5145-5163).
gtgtagaaccttacataca

SEQ ID NO: 103427 - DNA, 19 bp, Homo sapiens
  siRNA target sequence for TRPM6 (NM_017662.3,5189-5207).
ggacaatgtgctatacaaa

SEQ ID NO: 103428 - DNA, 19 bp, Homo sapiens
  siRNA target sequence for TRPM6 (NM_017662.3,5198-5216).
gctatacaaatcagtgatt

SEQ ID NO: 103429 - DNA, 19 bp, Homo sapiens
  siRNA target sequence for TRPM6 (NM_017662.3,5236-5254).
ggatctcagcaaaaactct

SEQ ID NO: 103430 - DNA, 19 bp, Homo sapiens
  siRNA target sequence for TRPM6 (NM_017662.3,5292-5310).
ccctgctgaaaagttcaat

SEQ ID NO: 103431 - DNA, 19 bp, Homo sapiens
  siRNA target sequence for TRPM6 (NM_017662.3,5296-5314).
gctgaaaagttcaattgga

SEQ ID NO: 103432 - DNA, 19 bp, Homo sapiens
  siRNA target sequence for TRPM6 (NM_017662.3,5304-5322).
gttcaattggagttgacaa

SEQ ID NO: 103433 - DNA, 19 bp, Homo sapiens
  siRNA target sequence for TRPM6 (NM_017662.3,5307-5325).
caattggagttgacaagat

SEQ ID NO: 103434 - DNA, 19 bp, Homo sapiens
  siRNA target sequence for TRPM6 (NM_017662.3,5353-5371).
gcctcaccatcattattca

SEQ ID NO: 103435 - DNA, 19 bp, Homo sapiens
  siRNA target sequence for TRPM6 (NM_017662.3,5480-5498).
cctttaaaccttgataaaa

SEQ ID NO: 103436 - DNA, 19 bp, Homo sapiens
  siRNA target sequence for TRPM6 (NM_017662.3,5520-5538).
gtgggagagcggcaatgat

SEQ ID NO: 103437 - DNA, 19 bp, Homo sapiens
  siRNA target sequence for TRPM6 (NM_017662.3,5529-5547).
cggcaatgatccaggtatt

SEQ ID NO: 103438 - DNA, 19 bp, Homo sapiens
  siRNA target sequence for TRPM6 (NM_017662.3,5531-5549).
gcaatgatccaggtattgt

SEQ ID NO: 103439 - DNA, 19 bp, Homo sapiens
  siRNA target sequence for TRPM6 (NM_017662.3,5572-5590).
cctccgtaaagctatgaga

SEQ ID NO: 103440 - DNA, 19 bp, Homo sapiens
  siRNA target sequence for TRPM6 (NM_017662.3,5607-5625).
ctgaggatgacattctcaa

SEQ ID NO: 103441 - DNA, 19 bp, Homo sapiens
  siRNA target sequence for TRPM6 (NM_017662.3,5641-5659).
cattgtcaagtcctttctt

SEQ ID NO: 103442 - DNA, 19 bp, Homo sapiens
  siRNA target sequence for TRPM6 (NM_017662.3,5669-5687).
gtgcggacatggcataaaa

SEQ ID NO: 103443 - DNA, 19 bp, Homo sapiens
  siRNA target sequence for TRPM6 (NM_017662.3,5672-5690).
cggacatggcataaaatct

SEQ ID NO: 103444 - DNA, 19 bp, Homo sapiens
  siRNA target sequence for TRPM6 (NM_017662.3,5673-5691).
ggacatggcataaaatctt

SEQ ID NO: 103445 - DNA, 19 bp, Homo sapiens
  siRNA target sequence for TRPM6 (NM_017662.3,5719-5737).
cctcagggaaattcaacaa

SEQ ID NO: 103446 - DNA, 19 bp, Homo sapiens
  siRNA target sequence for TRPM6 (NM_017662.3,5744-5762).
gctgctcaaaaattgatct

SEQ ID NO: 103447 - DNA, 19 bp, Homo sapiens
  siRNA target sequence for TRPM6 (NM_017662.3,5745-5763).
ctgctcaaaaattgatcta

SEQ ID NO: 103448 - DNA, 19 bp, Homo sapiens
  siRNA target sequence for TRPM6 (NM_017662.3,5747-5765).
gctcaaaaattgatctata

SEQ ID NO: 103449 - DNA, 19 bp, Homo sapiens
  siRNA target sequence for TRPM6 (NM_017662.3,5750-5768).
caaaaattgatctatacct

SEQ ID NO: 103450 - DNA, 19 bp, Homo sapiens
  siRNA target sequence for TRPM6 (NM_017662.3,5849-5867).
cagtggttgaccattgaga

SEQ ID NO: 103451 - DNA, 19 bp, Homo sapiens
  siRNA target sequence for TRPM6 (NM_017662.3,5853-5871).
ggttgaccattgagaagta

SEQ ID NO: 103452 - DNA, 19 bp, Homo sapiens
  siRNA target sequence for TRPM6 (NM_017662.3,5854-5872).
gttgaccattgagaagtat

SEQ ID NO: 103453 - DNA, 19 bp, Homo sapiens
  siRNA target sequence for TRPM6 (NM_017662.3,5879-5897).
ggggagttccggaagtata

SEQ ID NO: 103454 - DNA, 19 bp, Homo sapiens
  siRNA target sequence for TRPM6 (NM_017662.3,5880-5898).
gggagttccggaagtataa

SEQ ID NO: 103455 - DNA, 19 bp, Homo sapiens
  siRNA target sequence for TRPM6 (NM_017662.3,5882-5900).
gagttccggaagtataaca

SEQ ID NO: 103456 - DNA, 19 bp, Homo sapiens
  siRNA target sequence for TRPM6 (NM_017662.3,5888-5906).
cggaagtataacaacaaca

SEQ ID NO: 103457 - DNA, 19 bp, Homo sapiens
  siRNA target sequence for TRPM6 (NM_017662.3,5961-5979).
ctcactggacctatgagta

SEQ ID NO: 103458 - DNA, 19 bp, Homo sapiens
  siRNA target sequence for TRPM6 (NM_017662.3,6031-6049).
gacagatccatctgttata

SEQ ID NO: 103459 - DNA, 19 bp, Homo sapiens
  siRNA target sequence for TRPM6 (NM_017662.3,6100-6118).
gggggaagatgcaattaga

SEQ ID NO: 103460 - DNA, 19 bp, Homo sapiens
  siRNA target sequence for TRPM6 (NM_017662.3,6190-6208).
ctattcccctgaaaggata

SEQ ID NO: 103461 - DNA, 19 bp, Homo sapiens
  siRNA target sequence for TRPM6 (NM_017662.3,6213-6231).
ccacctttggacttgagat

SEQ ID NO: 103462 - DNA, 19 bp, Homo sapiens
  siRNA target sequence for TRPM6 (NM_017662.3,6261-6279).
caagggagacgggtagaaa

SEQ ID NO: 103463 - DNA, 19 bp, Homo sapiens
  siRNA target sequence for TRPM6 (NM_017662.3,6276-6294).
gaaattccccagaagatga

SEQ ID NO: 103464 - DNA, 19 bp, Homo sapiens
  siRNA target sequence for TRPM7 (NM_017672.2,273-291).
ccaagagggaatgtgtata

SEQ ID NO: 103465 - DNA, 19 bp, Homo sapiens
  siRNA target sequence for TRPM7 (NM_017672.2,330-348).
caggatgtcaaatttgtca

SEQ ID NO: 103466 - DNA, 19 bp, Homo sapiens
  siRNA target sequence for TRPM7 (NM_017672.2,433-451).
gaaattgggtgaccatttt

SEQ ID NO: 103467 - DNA, 19 bp, Homo sapiens
  siRNA target sequence for TRPM7 (NM_017672.2,499-517).
cccaacggatgcttatgga

SEQ ID NO: 103468 - DNA, 19 bp, Homo sapiens
  siRNA target sequence for TRPM7 (NM_017672.2,509-527).
gcttatggagtcataaatt

SEQ ID NO: 103469 - DNA, 19 bp, Homo sapiens
  siRNA target sequence for TRPM7 (NM_017672.2,546-564).
cctacagagctaagtatgt

SEQ ID NO: 103470 - DNA, 19 bp, Homo sapiens
  siRNA target sequence for TRPM7 (NM_017672.2,559-577).
gtatgtgaggctatcatat

SEQ ID NO: 103471 - DNA, 19 bp, Homo sapiens
  siRNA target sequence for TRPM7 (NM_017672.2,563-581).
gtgaggctatcatatgaca

SEQ ID NO: 103472 - DNA, 19 bp, Homo sapiens
  siRNA target sequence for TRPM7 (NM_017672.2,629-647).
gagttacccaaacttgtta

SEQ ID NO: 103473 - DNA, 19 bp, Homo sapiens
  siRNA target sequence for TRPM7 (NM_017672.2,771-789).
caggtgtggcaaaacatgt

SEQ ID NO: 103474 - DNA, 19 bp, Homo sapiens
  siRNA target sequence for TRPM7 (NM_017672.2,817-835).
cagatcatctcgaaagatt

SEQ ID NO: 103475 - DNA, 19 bp, Homo sapiens
  siRNA target sequence for TRPM7 (NM_017672.2,852-870).
ctccatggggagtgattga

SEQ ID NO: 103476 - DNA, 19 bp, Homo sapiens
  siRNA target sequence for TRPM7 (NM_017672.2,854-872).
ccatggggagtgattgaaa

SEQ ID NO: 103477 - DNA, 19 bp, Homo sapiens
  siRNA target sequence for TRPM7 (NM_017672.2,859-877).
gggagtgattgaaaacaga

SEQ ID NO: 103478 - DNA, 19 bp, Homo sapiens
  siRNA target sequence for TRPM7 (NM_017672.2,928-946).
ccccctgagcaaattgaat

SEQ ID NO: 103479 - DNA, 19 bp, Homo sapiens
  siRNA target sequence for TRPM7 (NM_017672.2,931-949).
cctgagcaaattgaatgtt

SEQ ID NO: 103480 - DNA, 19 bp, Homo sapiens
  siRNA target sequence for TRPM7 (NM_017672.2,1132-1150).
cacagttcttgaatacctt

SEQ ID NO: 103481 - DNA, 19 bp, Homo sapiens
  siRNA target sequence for TRPM7 (NM_017672.2,1161-1179).
cccctgttccagtagttgt

SEQ ID NO: 103482 - DNA, 19 bp, Homo sapiens
  siRNA target sequence for TRPM7 (NM_017672.2,1203-1221).
cagatctgctagcgtatat

SEQ ID NO: 103483 - DNA, 19 bp, Homo sapiens
  siRNA target sequence for TRPM7 (NM_017672.2,1214-1232).
gcgtatattcataaacaaa

SEQ ID NO: 103484 - DNA, 19 bp, Homo sapiens
  siRNA target sequence for TRPM7 (NM_017672.2,1259-1277).
gcagcagagcccgatatta

SEQ ID NO: 103485 - DNA, 19 bp, Homo sapiens
  siRNA target sequence for TRPM7 (NM_017672.2,1260-1278).
cagcagagcccgatattat

SEQ ID NO: 103486 - DNA, 19 bp, Homo sapiens
  siRNA target sequence for TRPM7 (NM_017672.2,1265-1283).
gagcccgatattatttcca

SEQ ID NO: 103487 - DNA, 19 bp, Homo sapiens
  siRNA target sequence for TRPM7 (NM_017672.2,1281-1299).
ccactatcaaaaaaacatt

SEQ ID NO: 103488 - DNA, 19 bp, Homo sapiens
  siRNA target sequence for TRPM7 (NM_017672.2,1446-1464).
ctaatgcatctgcatttga

SEQ ID NO: 103489 - DNA, 19 bp, Homo sapiens
  siRNA target sequence for TRPM7 (NM_017672.2,1455-1473).
ctgcatttgaccagcttat

SEQ ID NO: 103490 - DNA, 19 bp, Homo sapiens
  siRNA target sequence for TRPM7 (NM_017672.2,1458-1476).
catttgaccagcttatcct

SEQ ID NO: 103491 - DNA, 19 bp, Homo sapiens
  siRNA target sequence for TRPM7 (NM_017672.2,1479-1497).
cattggcatgggatagagt

SEQ ID NO: 103492 - DNA, 19 bp, Homo sapiens
  siRNA target sequence for TRPM7 (NM_017672.2,1485-1503).
catgggatagagttgacat

SEQ ID NO: 103493 - DNA, 19 bp, Homo sapiens
  siRNA target sequence for TRPM7 (NM_017672.2,1552-1570).
cttggaacaagctatgctt

SEQ ID NO: 103494 - DNA, 19 bp, Homo sapiens
  siRNA target sequence for TRPM7 (NM_017672.2,1575-1593).
ctcttgtaatggatagagt

SEQ ID NO: 103495 - DNA, 19 bp, Homo sapiens
  siRNA target sequence for TRPM7 (NM_017672.2,1622-1640).
ggagtaagcatgcataaat

SEQ ID NO: 103496 - DNA, 19 bp, Homo sapiens
  siRNA target sequence for TRPM7 (NM_017672.2,1623-1641).
gagtaagcatgcataaatt

SEQ ID NO: 103497 - DNA, 19 bp, Homo sapiens
  siRNA target sequence for TRPM7 (NM_017672.2,1633-1651).
gcataaattccttaccatt

SEQ ID NO: 103498 - DNA, 19 bp, Homo sapiens
  siRNA target sequence for TRPM7 (NM_017672.2,1653-1671).
cgagactggaagaacttta

SEQ ID NO: 103499 - DNA, 19 bp, Homo sapiens
  siRNA target sequence for TRPM7 (NM_017672.2,1682-1700).
caaggtccaactaatccaa

SEQ ID NO: 103500 - DNA, 19 bp, Homo sapiens
  siRNA target sequence for TRPM7 (NM_017672.2,1692-1710).
ctaatccaatgctgtttca

SEQ ID NO: 103501 - DNA, 19 bp, Homo sapiens
  siRNA target sequence for TRPM7 (NM_017672.2,1698-1716).
caatgctgtttcatcttgt

SEQ ID NO: 103502 - DNA, 19 bp, Homo sapiens
  siRNA target sequence for TRPM7 (NM_017672.2,1723-1741).
cgtcaaacagggaaatctt

SEQ ID NO: 103503 - DNA, 19 bp, Homo sapiens
  siRNA target sequence for TRPM7 (NM_017672.2,1739-1757).
cttcctccaggatataaga

SEQ ID NO: 103504 - DNA, 19 bp, Homo sapiens
  siRNA target sequence for TRPM7 (NM_017672.2,1776-1794).
gacttgttattgaatatct

SEQ ID NO: 103505 - DNA, 19 bp, Homo sapiens
  siRNA target sequence for TRPM7 (NM_017672.2,1807-1825).
ctacagatgcacctatact

SEQ ID NO: 103506 - DNA, 19 bp, Homo sapiens
  siRNA target sequence for TRPM7 (NM_017672.2,1818-1836).
cctatactaggaaacgttt

SEQ ID NO: 103507 - DNA, 19 bp, Homo sapiens
  siRNA target sequence for TRPM7 (NM_017672.2,1819-1837).
ctatactaggaaacgtttt

SEQ ID NO: 103508 - DNA, 19 bp, Homo sapiens
  siRNA target sequence for TRPM7 (NM_017672.2,1824-1842).
ctaggaaacgttttcgatt

SEQ ID NO: 103509 - DNA, 19 bp, Homo sapiens
  siRNA target sequence for TRPM7 (NM_017672.2,1827-1845).
ggaaacgttttcgattaat

SEQ ID NO: 103510 - DNA, 19 bp, Homo sapiens
  siRNA target sequence for TRPM7 (NM_017672.2,1828-1846).
gaaacgttttcgattaata

SEQ ID NO: 103511 - DNA, 19 bp, Homo sapiens
  siRNA target sequence for TRPM7 (NM_017672.2,1832-1850).
cgttttcgattaatatata

SEQ ID NO: 103512 - DNA, 19 bp, Homo sapiens
  siRNA target sequence for TRPM7 (NM_017672.2,1833-1851).
gttttcgattaatatataa

SEQ ID NO: 103513 - DNA, 19 bp, Homo sapiens
  siRNA target sequence for TRPM7 (NM_017672.2,1871-1889).
cggaggtctggccgaaata

SEQ ID NO: 103514 - DNA, 19 bp, Homo sapiens
  siRNA target sequence for TRPM7 (NM_017672.2,1909-1927).
gttgcgaaagagtcatgaa

SEQ ID NO: 103515 - DNA, 19 bp, Homo sapiens
  siRNA target sequence for TRPM7 (NM_017672.2,1913-1931).
cgaaagagtcatgaatctt

SEQ ID NO: 103516 - DNA, 19 bp, Homo sapiens
  siRNA target sequence for TRPM7 (NM_017672.2,1935-1953).
gcaatagggcagataaaaa

SEQ ID NO: 103517 - DNA, 19 bp, Homo sapiens
  siRNA target sequence for TRPM7 (NM_017672.2,1963-1981).
gaggcataaccatttcatt

SEQ ID NO: 103518 - DNA, 19 bp, Homo sapiens
  siRNA target sequence for TRPM7 (NM_017672.2,1993-2011).
gccctaccgaccaaagatt

SEQ ID NO: 103519 - DNA, 19 bp, Homo sapiens
  siRNA target sequence for TRPM7 (NM_017672.2,1995-2013).
cctaccgaccaaagattga

SEQ ID NO: 103520 - DNA, 19 bp, Homo sapiens
  siRNA target sequence for TRPM7 (NM_017672.2,1996-2014).
ctaccgaccaaagattgat

SEQ ID NO: 103521 - DNA, 19 bp, Homo sapiens
  siRNA target sequence for TRPM7 (NM_017672.2,1999-2017).
ccgaccaaagattgataca

SEQ ID NO: 103522 - DNA, 19 bp, Homo sapiens
  siRNA target sequence for TRPM7 (NM_017672.2,2078-2096).
gaaaccaagcgctttcctt

SEQ ID NO: 103523 - DNA, 19 bp, Homo sapiens
  siRNA target sequence for TRPM7 (NM_017672.2,2094-2112).
cttatccacttaatgaact

SEQ ID NO: 103524 - DNA, 19 bp, Homo sapiens
  siRNA target sequence for TRPM7 (NM_017672.2,2143-2161).
ggtcatggcccgtttttta

SEQ ID NO: 103525 - DNA, 19 bp, Homo sapiens
  siRNA target sequence for TRPM7 (NM_017672.2,2144-2162).
gtcatggcccgttttttat

SEQ ID NO: 103526 - DNA, 19 bp, Homo sapiens
  siRNA target sequence for TRPM7 (NM_017672.2,2165-2183).
caacatggtgaagaatcaa

SEQ ID NO: 103527 - DNA, 19 bp, Homo sapiens
  siRNA target sequence for TRPM7 (NM_017672.2,2177-2195).
gaatcaatggctaaagcat

SEQ ID NO: 103528 - DNA, 19 bp, Homo sapiens
  siRNA target sequence for TRPM7 (NM_017672.2,2181-2199).
caatggctaaagcattagt

SEQ ID NO: 103529 - DNA, 19 bp, Homo sapiens
  siRNA target sequence for TRPM7 (NM_017672.2,2192-2210).
gcattagttgcctgtaaga

SEQ ID NO: 103530 - DNA, 19 bp, Homo sapiens
  siRNA target sequence for TRPM7 (NM_017672.2,2201-2219).
gcctgtaagatctatcgtt

SEQ ID NO: 103531 - DNA, 19 bp, Homo sapiens
  siRNA target sequence for TRPM7 (NM_017672.2,2205-2223).
gtaagatctatcgttcaat

SEQ ID NO: 103532 - DNA, 19 bp, Homo sapiens
  siRNA target sequence for TRPM7 (NM_017672.2,2246-2264).
gacctggtagatgatactt

SEQ ID NO: 103533 - DNA, 19 bp, Homo sapiens
  siRNA target sequence for TRPM7 (NM_017672.2,2251-2269).
ggtagatgatacttcagaa

SEQ ID NO: 103534 - DNA, 19 bp, Homo sapiens
  siRNA target sequence for TRPM7 (NM_017672.2,2270-2288).
gaactaaaacagtattcca

SEQ ID NO: 103535 - DNA, 19 bp, Homo sapiens
  siRNA target sequence for TRPM7 (NM_017672.2,2297-2315).
ggtcagttggccgttgaat

SEQ ID NO: 103536 - DNA, 19 bp, Homo sapiens
  siRNA target sequence for TRPM7 (NM_017672.2,2298-2316).
gtcagttggccgttgaatt

SEQ ID NO: 103537 - DNA, 19 bp, Homo sapiens
  siRNA target sequence for TRPM7 (NM_017672.2,2300-2318).
cagttggccgttgaattat

SEQ ID NO: 103538 - DNA, 19 bp, Homo sapiens
  siRNA target sequence for TRPM7 (NM_017672.2,2305-2323).
ggccgttgaattattagaa

SEQ ID NO: 103539 - DNA, 19 bp, Homo sapiens
  siRNA target sequence for TRPM7 (NM_017672.2,2307-2325).
ccgttgaattattagaaca

SEQ ID NO: 103540 - DNA, 19 bp, Homo sapiens
  siRNA target sequence for TRPM7 (NM_017672.2,2326-2344).
gtccttcagacaagatgaa

SEQ ID NO: 103541 - DNA, 19 bp, Homo sapiens
  siRNA target sequence for TRPM7 (NM_017672.2,2346-2364).
ccatggctatgaaattgct

SEQ ID NO: 103542 - DNA, 19 bp, Homo sapiens
  siRNA target sequence for TRPM7 (NM_017672.2,2352-2370).
ctatgaaattgctcactta

SEQ ID NO: 103543 - DNA, 19 bp, Homo sapiens
  siRNA target sequence for TRPM7 (NM_017672.2,2356-2374).
gaaattgctcacttatgaa

SEQ ID NO: 103544 - DNA, 19 bp, Homo sapiens
  siRNA target sequence for TRPM7 (NM_017672.2,2454-2472).
cacaaatgttgttatctga

SEQ ID NO: 103545 - DNA, 19 bp, Homo sapiens
  siRNA target sequence for TRPM7 (NM_017672.2,2456-2474).
caaatgttgttatctgata

SEQ ID NO: 103546 - DNA, 19 bp, Homo sapiens
  siRNA target sequence for TRPM7 (NM_017672.2,2509-2527).
ctggtacaaggtcatacta

SEQ ID NO: 103547 - DNA, 19 bp, Homo sapiens
  siRNA target sequence for TRPM7 (NM_017672.2,2518-2536).
ggtcatactaagcatttta

SEQ ID NO: 103548 - DNA, 19 bp, Homo sapiens
  siRNA target sequence for TRPM7 (NM_017672.2,2521-2539).
catactaagcattttagtt

SEQ ID NO: 103549 - DNA, 19 bp, Homo sapiens
  siRNA target sequence for TRPM7 (NM_017672.2,2546-2564).
gccatattgctgttagagt

SEQ ID NO: 103550 - DNA, 19 bp, Homo sapiens
  siRNA target sequence for TRPM7 (NM_017672.2,2547-2565).
ccatattgctgttagagta

SEQ ID NO: 103551 - DNA, 19 bp, Homo sapiens
  siRNA target sequence for TRPM7 (NM_017672.2,2548-2566).
catattgctgttagagtat

SEQ ID NO: 103552 - DNA, 19 bp, Homo sapiens
  siRNA target sequence for TRPM7 (NM_017672.2,2555-2573).
ctgttagagtataaaacta

SEQ ID NO: 103553 - DNA, 19 bp, Homo sapiens
  siRNA target sequence for TRPM7 (NM_017672.2,2601-2619).
ctcaagatgctcatcagat

SEQ ID NO: 103554 - DNA, 19 bp, Homo sapiens
  siRNA target sequence for TRPM7 (NM_017672.2,2668-2686).
ccccatggaagtgtttaaa

SEQ ID NO: 103555 - DNA, 19 bp, Homo sapiens
  siRNA target sequence for TRPM7 (NM_017672.2,2690-2708).
gtacggattttggatagta

SEQ ID NO: 103556 - DNA, 19 bp, Homo sapiens
  siRNA target sequence for TRPM7 (NM_017672.2,2694-2712).
ggattttggatagtaatga

SEQ ID NO: 103557 - DNA, 19 bp, Homo sapiens
  siRNA target sequence for TRPM7 (NM_017672.2,2756-2774).
ccaattacgcgaaagtttt

SEQ ID NO: 103558 - DNA, 19 bp, Homo sapiens
  siRNA target sequence for TRPM7 (NM_017672.2,2757-2775).
caattacgcgaaagtttta

SEQ ID NO: 103559 - DNA, 19 bp, Homo sapiens
  siRNA target sequence for TRPM7 (NM_017672.2,2779-2797).
cttttatcatgcaccaatt

SEQ ID NO: 103560 - DNA, 19 bp, Homo sapiens
  siRNA target sequence for TRPM7 (NM_017672.2,2786-2804).
catgcaccaattgtaaaat

SEQ ID NO: 103561 - DNA, 19 bp, Homo sapiens
  siRNA target sequence for TRPM7 (NM_017672.2,2789-2807).
gcaccaattgtaaaattct

SEQ ID NO: 103562 - DNA, 19 bp, Homo sapiens
  siRNA target sequence for TRPM7 (NM_017672.2,2817-2835).
cgttggcatatttaggatt

SEQ ID NO: 103563 - DNA, 19 bp, Homo sapiens
  siRNA target sequence for TRPM7 (NM_017672.2,2872-2890).
ggaacagttaccttcagtt

SEQ ID NO: 103564 - DNA, 19 bp, Homo sapiens
  siRNA target sequence for TRPM7 (NM_017672.2,2888-2906).
gttcaagaatggattgtta

SEQ ID NO: 103565 - DNA, 19 bp, Homo sapiens
  siRNA target sequence for TRPM7 (NM_017672.2,2935-2953).
gaaagtccgtgagatcttt

SEQ ID NO: 103566 - DNA, 19 bp, Homo sapiens
  siRNA target sequence for TRPM7 (NM_017672.2,2980-2998).
gaagattaaagtatggttt

SEQ ID NO: 103567 - DNA, 19 bp, Homo sapiens
  siRNA target sequence for TRPM7 (NM_017672.2,3018-3036).
gtgatacaattgccataat

SEQ ID NO: 103568 - DNA, 19 bp, Homo sapiens
  siRNA target sequence for TRPM7 (NM_017672.2,3024-3042).
caattgccataatttcttt

SEQ ID NO: 103569 - DNA, 19 bp, Homo sapiens
  siRNA target sequence for TRPM7 (NM_017672.2,3046-3064).
cattggatttggactaaga

SEQ ID NO: 103570 - DNA, 19 bp, Homo sapiens
  siRNA target sequence for TRPM7 (NM_017672.2,3063-3081).
gatttggagcaaaatggaa

SEQ ID NO: 103571 - DNA, 19 bp, Homo sapiens
  siRNA target sequence for TRPM7 (NM_017672.2,3116-3134).
gctggaagattaatttact

SEQ ID NO: 103572 - DNA, 19 bp, Homo sapiens
  siRNA target sequence for TRPM7 (NM_017672.2,3229-3247).
ggccaatatgttctacatt

SEQ ID NO: 103573 - DNA, 19 bp, Homo sapiens
  siRNA target sequence for TRPM7 (NM_017672.2,3232-3250).
caatatgttctacattgta

SEQ ID NO: 103574 - DNA, 19 bp, Homo sapiens
  siRNA target sequence for TRPM7 (NM_017672.2,3253-3271).
gattatggctcttgtatta

SEQ ID NO: 103575 - DNA, 19 bp, Homo sapiens
  siRNA target sequence for TRPM7 (NM_017672.2,3259-3277).
ggctcttgtattacttagt

SEQ ID NO: 103576 - DNA, 19 bp, Homo sapiens
  siRNA target sequence for TRPM7 (NM_017672.2,3260-3278).
gctcttgtattacttagtt

SEQ ID NO: 103577 - DNA, 19 bp, Homo sapiens
  siRNA target sequence for TRPM7 (NM_017672.2,3288-3306).
ccagaaaggcaatacttta

SEQ ID NO: 103578 - DNA, 19 bp, Homo sapiens
  siRNA target sequence for TRPM7 (NM_017672.2,3330-3348).
ctcttgctaaagatatagt

SEQ ID NO: 103579 - DNA, 19 bp, Homo sapiens
  siRNA target sequence for TRPM7 (NM_017672.2,3353-3371).
cacccatactggatgattt

SEQ ID NO: 103580 - DNA, 19 bp, Homo sapiens
  siRNA target sequence for TRPM7 (NM_017672.2,3355-3373).
cccatactggatgattttt

SEQ ID NO: 103581 - DNA, 19 bp, Homo sapiens
  siRNA target sequence for TRPM7 (NM_017672.2,3445-3463).
gacgtggttgactccattt

SEQ ID NO: 103582 - DNA, 19 bp, Homo sapiens
  siRNA target sequence for TRPM7 (NM_017672.2,3475-3493).
ctacctctttgtacagtat

SEQ ID NO: 103583 - DNA, 19 bp, Homo sapiens
  siRNA target sequence for TRPM7 (NM_017672.2,3488-3506).
cagtatatcattatggtta

SEQ ID NO: 103584 - DNA, 19 bp, Homo sapiens
  siRNA target sequence for TRPM7 (NM_017672.2,3542-3560).
caagtgaaggcaatttcca

SEQ ID NO: 103585 - DNA, 19 bp, Homo sapiens
  siRNA target sequence for TRPM7 (NM_017672.2,3571-3589).
gaagtaccagcgttatcat

SEQ ID NO: 103586 - DNA, 19 bp, Homo sapiens
  siRNA target sequence for TRPM7 (NM_017672.2,3624-3642).
ctcctccacttatcattct

SEQ ID NO: 103587 - DNA, 19 bp, Homo sapiens
  siRNA target sequence for TRPM7 (NM_017672.2,3626-3644).
cctccacttatcattctta

SEQ ID NO: 103588 - DNA, 19 bp, Homo sapiens
  siRNA target sequence for TRPM7 (NM_017672.2,3697-3715).
gacttccgatggaccaaaa

SEQ ID NO: 103589 - DNA, 19 bp, Homo sapiens
  siRNA target sequence for TRPM7 (NM_017672.2,3699-3717).
cttccgatggaccaaaact

SEQ ID NO: 103590 - DNA, 19 bp, Homo sapiens
  siRNA target sequence for TRPM7 (NM_017672.2,3814-3832).
gagtgaagagagaattcgt

SEQ ID NO: 103591 - DNA, 19 bp, Homo sapiens
  siRNA target sequence for TRPM7 (NM_017672.2,3823-3841).
gagaattcgtgtcactttt

SEQ ID NO: 103592 - DNA, 19 bp, Homo sapiens
  siRNA target sequence for TRPM7 (NM_017672.2,3825-3843).
gaattcgtgtcacttttga

SEQ ID NO: 103593 - DNA, 19 bp, Homo sapiens
  siRNA target sequence for TRPM7 (NM_017672.2,3859-3877).
gtgcattcagattaaagaa

SEQ ID NO: 103594 - DNA, 19 bp, Homo sapiens
  siRNA target sequence for TRPM7 (NM_017672.2,3881-3899).
ggagatcgtgtcaactaca

SEQ ID NO: 103595 - DNA, 19 bp, Homo sapiens
  siRNA target sequence for TRPM7 (NM_017672.2,3882-3900).
gagatcgtgtcaactacat

SEQ ID NO: 103596 - DNA, 19 bp, Homo sapiens
  siRNA target sequence for TRPM7 (NM_017672.2,3884-3902).
gatcgtgtcaactacataa

SEQ ID NO: 103597 - DNA, 19 bp, Homo sapiens
  siRNA target sequence for TRPM7 (NM_017672.2,3887-3905).
cgtgtcaactacataaaaa

SEQ ID NO: 103598 - DNA, 19 bp, Homo sapiens
  siRNA target sequence for TRPM7 (NM_017672.2,3906-3924).
gatcattacaatcattaga

SEQ ID NO: 103599 - DNA, 19 bp, Homo sapiens
  siRNA target sequence for TRPM7 (NM_017672.2,3935-3953).
ggccatttgcaagatcttt

SEQ ID NO: 103600 - DNA, 19 bp, Homo sapiens
  siRNA target sequence for TRPM7 (NM_017672.2,3956-3974).
gccctgacggtagatacat

SEQ ID NO: 103601 - DNA, 19 bp, Homo sapiens
  siRNA target sequence for TRPM7 (NM_017672.2,4000-4018).
gtcggaagctagcaaagtt

SEQ ID NO: 103602 - DNA, 19 bp, Homo sapiens
  siRNA target sequence for TRPM7 (NM_017672.2,4004-4022).
gaagctagcaaagttcata

SEQ ID NO: 103603 - DNA, 19 bp, Homo sapiens
  siRNA target sequence for TRPM7 (NM_017672.2,4050-4068).
ccaaacacttggctcaaaa

SEQ ID NO: 103604 - DNA, 19 bp, Homo sapiens
  siRNA target sequence for TRPM7 (NM_017672.2,4057-4075).
cttggctcaaaaccttatt

SEQ ID NO: 103605 - DNA, 19 bp, Homo sapiens
  siRNA target sequence for TRPM7 (NM_017672.2,4060-4078).
ggctcaaaaccttattgat

SEQ ID NO: 103606 - DNA, 19 bp, Homo sapiens
  siRNA target sequence for TRPM7 (NM_017672.2,4062-4080).
ctcaaaaccttattgatga

SEQ ID NO: 103607 - DNA, 19 bp, Homo sapiens
  siRNA target sequence for TRPM7 (NM_017672.2,4105-4123).
gaaaaagcatggtgttgta

SEQ ID NO: 103608 - DNA, 19 bp, Homo sapiens
  siRNA target sequence for TRPM7 (NM_017672.2,4157-4175).
cttgaaagtaataatcctt

SEQ ID NO: 103609 - DNA, 19 bp, Homo sapiens
  siRNA target sequence for TRPM7 (NM_017672.2,4208-4226).
gatccccagtgtaatatat

SEQ ID NO: 103610 - DNA, 19 bp, Homo sapiens
  siRNA target sequence for TRPM7 (NM_017672.2,4250-4268).
ccccagagaaaagaattta

SEQ ID NO: 103611 - DNA, 19 bp, Homo sapiens
  siRNA target sequence for TRPM7 (NM_017672.2,4349-4367).
ggggtagaactcttaaaaa

SEQ ID NO: 103612 - DNA, 19 bp, Homo sapiens
  siRNA target sequence for TRPM7 (NM_017672.2,4420-4438).
gtcatccccaccaaccaaa

SEQ ID NO: 103613 - DNA, 19 bp, Homo sapiens
  siRNA target sequence for TRPM7 (NM_017672.2,4579-4597).
ggatttacagaggtttaaa

SEQ ID NO: 103614 - DNA, 19 bp, Homo sapiens
  siRNA target sequence for TRPM7 (NM_017672.2,4707-4725).
ctgttcattcaaaacaaga

SEQ ID NO: 103615 - DNA, 19 bp, Homo sapiens
  siRNA target sequence for TRPM7 (NM_017672.2,4750-4768).
cgaagacactcatgaagta

SEQ ID NO: 103616 - DNA, 19 bp, Homo sapiens
  siRNA target sequence for TRPM7 (NM_017672.2,4754-4772).
gacactcatgaagtagatt

SEQ ID NO: 103617 - DNA, 19 bp, Homo sapiens
  siRNA target sequence for TRPM7 (NM_017672.2,4782-4800).
ctttaataccggtttggtt

SEQ ID NO: 103618 - DNA, 19 bp, Homo sapiens
  siRNA target sequence for TRPM7 (NM_017672.2,4874-4892).
ccagctatggatacaaatt

SEQ ID NO: 103619 - DNA, 19 bp, Homo sapiens
  siRNA target sequence for TRPM7 (NM_017672.2,4875-4893).
cagctatggatacaaatta

SEQ ID NO: 103620 - DNA, 19 bp, Homo sapiens
  siRNA target sequence for TRPM7 (NM_017672.2,4878-4896).
ctatggatacaaattacta

SEQ ID NO: 103621 - DNA, 19 bp, Homo sapiens
  siRNA target sequence for TRPM7 (NM_017672.2,4910-4928).
gaaagaaataacttgatga

SEQ ID NO: 103622 - DNA, 19 bp, Homo sapiens
  siRNA target sequence for TRPM7 (NM_017672.2,4972-4990).
ggagcctgtcacagtgtat

SEQ ID NO: 103623 - DNA, 19 bp, Homo sapiens
  siRNA target sequence for TRPM7 (NM_017672.2,4976-4994).
cctgtcacagtgtatcgtt

SEQ ID NO: 103624 - DNA, 19 bp, Homo sapiens
  siRNA target sequence for TRPM7 (NM_017672.2,4977-4995).
ctgtcacagtgtatcgttt

SEQ ID NO: 103625 - DNA, 19 bp, Homo sapiens
  siRNA target sequence for TRPM7 (NM_017672.2,5002-5020).
gagttcacccaacatacta

SEQ ID NO: 103626 - DNA, 19 bp, Homo sapiens
  siRNA target sequence for TRPM7 (NM_017672.2,5004-5022).
gttcacccaacatactaaa

SEQ ID NO: 103627 - DNA, 19 bp, Homo sapiens
  siRNA target sequence for TRPM7 (NM_017672.2,5056-5074).
ctgtgccaaaatagagttt

SEQ ID NO: 103628 - DNA, 19 bp, Homo sapiens
  siRNA target sequence for TRPM7 (NM_017672.2,5089-5107).
gatgggaggaggtttacga

SEQ ID NO: 103629 - DNA, 19 bp, Homo sapiens
  siRNA target sequence for TRPM7 (NM_017672.2,5125-5143).
gtgtacctggtcagaacat

SEQ ID NO: 103630 - DNA, 19 bp, Homo sapiens
  siRNA target sequence for TRPM7 (NM_017672.2,5150-5168).
ctcaaatcagggcatcttt

SEQ ID NO: 103631 - DNA, 19 bp, Homo sapiens
  siRNA target sequence for TRPM7 (NM_017672.2,5152-5170).
caaatcagggcatctttat

SEQ ID NO: 103632 - DNA, 19 bp, Homo sapiens
  siRNA target sequence for TRPM7 (NM_017672.2,5159-5177).
gggcatctttatattatca

SEQ ID NO: 103633 - DNA, 19 bp, Homo sapiens
  siRNA target sequence for TRPM7 (NM_017672.2,5274-5292).
cagcacaaaagcttacgtt

SEQ ID NO: 103634 - DNA, 19 bp, Homo sapiens
  siRNA target sequence for TRPM7 (NM_017672.2,5284-5302).
gcttacgtttgcctttaat

SEQ ID NO: 103635 - DNA, 19 bp, Homo sapiens
  siRNA target sequence for TRPM7 (NM_017672.2,5289-5307).
cgtttgcctttaatcaaat

SEQ ID NO: 103636 - DNA, 19 bp, Homo sapiens
  siRNA target sequence for TRPM7 (NM_017672.2,5312-5330).
cccaaatccataccatatt

SEQ ID NO: 103637 - DNA, 19 bp, Homo sapiens
  siRNA target sequence for TRPM7 (NM_017672.2,5314-5332).
caaatccataccatattct

SEQ ID NO: 103638 - DNA, 19 bp, Homo sapiens
  siRNA target sequence for TRPM7 (NM_017672.2,5387-5405).
gctgtggaagaatgtatga

SEQ ID NO: 103639 - DNA, 19 bp, Homo sapiens
  siRNA target sequence for TRPM7 (NM_017672.2,5438-5456).
ggagatgagattattccaa

SEQ ID NO: 103640 - DNA, 19 bp, Homo sapiens
  siRNA target sequence for TRPM7 (NM_017672.2,5444-5462).
gagattattccaactaata

SEQ ID NO: 103641 - DNA, 19 bp, Homo sapiens
  siRNA target sequence for TRPM7 (NM_017672.2,5446-5464).
gattattccaactaatact

SEQ ID NO: 103642 - DNA, 19 bp, Homo sapiens
  siRNA target sequence for TRPM7 (NM_017672.2,5457-5475).
ctaatactctggaagagat

SEQ ID NO: 103643 - DNA, 19 bp, Homo sapiens
  siRNA target sequence for TRPM7 (NM_017672.2,5491-5509).
ccactggacttacgaatat

SEQ ID NO: 103644 - DNA, 19 bp, Homo sapiens
  siRNA target sequence for TRPM7 (NM_017672.2,5492-5510).
cactggacttacgaatata

SEQ ID NO: 103645 - DNA, 19 bp, Homo sapiens
  siRNA target sequence for TRPM7 (NM_017672.2,5494-5512).
ctggacttacgaatataca

SEQ ID NO: 103646 - DNA, 19 bp, Homo sapiens
  siRNA target sequence for TRPM7 (NM_017672.2,5497-5515).
gacttacgaatatacaaga

SEQ ID NO: 103647 - DNA, 19 bp, Homo sapiens
  siRNA target sequence for TRPM7 (NM_017672.2,5519-5537).
gagttactggtacttgatt

SEQ ID NO: 103648 - DNA, 19 bp, Homo sapiens
  siRNA target sequence for TRPM7 (NM_017672.2,5560-5578).
gactgacccatctgtgata

SEQ ID NO: 103649 - DNA, 19 bp, Homo sapiens
  siRNA target sequence for TRPM7 (NM_017672.2,5588-5606).
gaaaagagatcctgtgata

SEQ ID NO: 103650 - DNA, 19 bp, Homo sapiens
  siRNA target sequence for TRPM7 (NM_017672.2,5593-5611).
gagatcctgtgatatggtt

SEQ ID NO: 103651 - DNA, 19 bp, Homo sapiens
  siRNA target sequence for TRPM7 (NM_017672.2,5676-5694).
cttgctgtagaaagcttaa

SEQ ID NO: 103652 - DNA, 19 bp, Homo sapiens
  siRNA target sequence for TRPM7 (NM_017672.2,5679-5697).
gctgtagaaagcttaaact

SEQ ID NO: 103653 - DNA, 19 bp, Homo sapiens
  siRNA target sequence for TRPM7 (NM_017672.2,5717-5735).
gattatacgcctgataaaa

SEQ ID NO: 103654 - DNA, 19 bp, Homo sapiens
  siRNA target sequence for TRPM7 (NM_017672.2,5724-5742).
cgcctgataaaattatatt

SEQ ID NO: 103655 - DNA, 19 bp, Homo sapiens
  siRNA target sequence for TRPM7 (NM_017672.2,5747-5765).
caggatgagccttcagatt

SEQ ID NO: 103656 - DNA, 19 bp, Homo sapiens
  siRNA target sequence for TRPM7 (NM_017672.2,5755-5773).
gccttcagatttgaatctt

SEQ ID NO: 103657 - DNA, 19 bp, Homo sapiens
  siRNA target sequence for TRPM7 (NM_017672.2,5757-5775).
cttcagatttgaatcttca

SEQ ID NO: 103658 - DNA, 19 bp, Homo sapiens
  siRNA target sequence for TTBK2 (NM_173500.2,464-482).
catgctcaccagggaaaat

SEQ ID NO: 103659 - DNA, 19 bp, Homo sapiens
  siRNA target sequence for TTBK2 (NM_173500.2,562-580).
gaaagaccatgtttgtaga

SEQ ID NO: 103660 - DNA, 19 bp, Homo sapiens
  siRNA target sequence for TTBK2 (NM_173500.2,566-584).
gaccatgtttgtagattta

SEQ ID NO: 103661 - DNA, 19 bp, Homo sapiens
  siRNA target sequence for TTBK2 (NM_173500.2,594-612).
ggaggaatgatcgattcaa

SEQ ID NO: 103662 - DNA, 19 bp, Homo sapiens
  siRNA target sequence for TTBK2 (NM_173500.2,597-615).
ggaatgatcgattcaacta

SEQ ID NO: 103663 - DNA, 19 bp, Homo sapiens
  siRNA target sequence for TTBK2 (NM_173500.2,598-616).
gaatgatcgattcaactat

SEQ ID NO: 103664 - DNA, 19 bp, Homo sapiens
  siRNA target sequence for TTBK2 (NM_173500.2,665-683).
cagtcccgaggcacattca

SEQ ID NO: 103665 - DNA, 19 bp, Homo sapiens
  siRNA target sequence for TTBK2 (NM_173500.2,674-692).
ggcacattcaccattagta

SEQ ID NO: 103666 - DNA, 19 bp, Homo sapiens
  siRNA target sequence for TTBK2 (NM_173500.2,785-803).
gctatgggtcgctttccta

SEQ ID NO: 103667 - DNA, 19 bp, Homo sapiens
  siRNA target sequence for TTBK2 (NM_173500.2,790-808).
gggtcgctttcctagtaca

SEQ ID NO: 103668 - DNA, 19 bp, Homo sapiens
  siRNA target sequence for TTBK2 (NM_173500.2,791-809).
ggtcgctttcctagtacat

SEQ ID NO: 103669 - DNA, 19 bp, Homo sapiens
  siRNA target sequence for TTBK2 (NM_173500.2,794-812).
cgctttcctagtacatgta

SEQ ID NO: 103670 - DNA, 19 bp, Homo sapiens
  siRNA target sequence for TTBK2 (NM_173500.2,800-818).
cctagtacatgtaggaaat

SEQ ID NO: 103671 - DNA, 19 bp, Homo sapiens
  siRNA target sequence for TTBK2 (NM_173500.2,836-854).
ggcttggctcgacaattta

SEQ ID NO: 103672 - DNA, 19 bp, Homo sapiens
  siRNA target sequence for TTBK2 (NM_173500.2,841-859).
ggctcgacaatttaccaat

SEQ ID NO: 103673 - DNA, 19 bp, Homo sapiens
  siRNA target sequence for TTBK2 (NM_173500.2,905-923).
gggacagttcgttatgcat

SEQ ID NO: 103674 - DNA, 19 bp, Homo sapiens
  siRNA target sequence for TTBK2 (NM_173500.2,909-927).
cagttcgttatgcatcaat

SEQ ID NO: 103675 - DNA, 19 bp, Homo sapiens
  siRNA target sequence for TTBK2 (NM_173500.2,911-929).
gttcgttatgcatcaatca

SEQ ID NO: 103676 - DNA, 19 bp, Homo sapiens
  siRNA target sequence for TTBK2 (NM_173500.2,972-990).
ggtccttattctacatgtt

SEQ ID NO: 103677 - DNA, 19 bp, Homo sapiens
  siRNA target sequence for TTBK2 (NM_173500.2,1050-1068).
gctctattaaggagagata

SEQ ID NO: 103678 - DNA, 19 bp, Homo sapiens
  siRNA target sequence for TTBK2 (NM_173500.2,1051-1069).
ctctattaaggagagatat

SEQ ID NO: 103679 - DNA, 19 bp, Homo sapiens
  siRNA target sequence for TTBK2 (NM_173500.2,1053-1071).
ctattaaggagagatatga

SEQ ID NO: 103680 - DNA, 19 bp, Homo sapiens
  siRNA target sequence for TTBK2 (NM_173500.2,1070-1088).
gaccacaggctcatgttga

SEQ ID NO: 103681 - DNA, 19 bp, Homo sapiens
  siRNA target sequence for TTBK2 (NM_173500.2,1114-1132).
ctttctagaccatatctct

SEQ ID NO: 103682 - DNA, 19 bp, Homo sapiens
  siRNA target sequence for TTBK2 (NM_173500.2,1118-1136).
ctagaccatatctcttctt

SEQ ID NO: 103683 - DNA, 19 bp, Homo sapiens
  siRNA target sequence for TTBK2 (NM_173500.2,2444-2462).
cttacatccgtgtttgaca

SEQ ID NO: 103684 - DNA, 19 bp, Homo sapiens
  siRNA target sequence for TTBK2 (NM_173500.2,2451-2469).
ccgtgtttgacaatagcat

SEQ ID NO: 103685 - DNA, 19 bp, Homo sapiens
  siRNA target sequence for TTBK2 (NM_173500.2,2459-2477).
gacaatagcatcaagactt

SEQ ID NO: 103686 - DNA, 19 bp, Homo sapiens
  siRNA target sequence for TTBK2 (NM_173500.2,2461-2479).
caatagcatcaagactttt

SEQ ID NO: 103687 - DNA, 19 bp, Homo sapiens
  siRNA target sequence for TTBK2 (NM_173500.2,2470-2488).
caagacttttggagtaatt

SEQ ID NO: 103688 - DNA, 19 bp, Homo sapiens
  siRNA target sequence for TTBK2 (NM_173500.2,2489-2507).
gagagtgacccttttgact

SEQ ID NO: 103689 - DNA, 19 bp, Homo sapiens
  siRNA target sequence for TTBK2 (NM_173500.2,2534-2552).
ctaacaaccaccactactt

SEQ ID NO: 103690 - DNA, 19 bp, Homo sapiens
  siRNA target sequence for TTBK2 (NM_173500.2,2578-2596).
cttgacccctgctgcaatt

SEQ ID NO: 103691 - DNA, 19 bp, Homo sapiens
  siRNA target sequence for TTBK2 (NM_173500.2,2581-2599).
gacccctgctgcaattgga

SEQ ID NO: 103692 - DNA, 19 bp, Homo sapiens
  siRNA target sequence for TTBK2 (NM_173500.2,2629-2647).
cttgcttcgagaaaataca

SEQ ID NO: 103693 - DNA, 19 bp, Homo sapiens
  siRNA target sequence for TTBK2 (NM_173500.2,2702-2720).
ggtgtgtcaccagataaat

SEQ ID NO: 103694 - DNA, 19 bp, Homo sapiens
  siRNA target sequence for TTBK2 (NM_173500.2,2848-2866).
ggcaaatggtcttctcaat

SEQ ID NO: 103695 - DNA, 19 bp, Homo sapiens
  siRNA target sequence for TTBK2 (NM_173500.2,2875-2893).
ccttgggtcaccaattcgt

SEQ ID NO: 103696 - DNA, 19 bp, Homo sapiens
  siRNA target sequence for TTBK2 (NM_173500.2,2891-2909).
cgtgtccgctcagagatta

SEQ ID NO: 103697 - DNA, 19 bp, Homo sapiens
  siRNA target sequence for TTBK2 (NM_173500.2,2933-2951).
ctggtgcgaaagttacgtt

SEQ ID NO: 103698 - DNA, 19 bp, Homo sapiens
  siRNA target sequence for TTBK2 (NM_173500.2,2938-2956).
gcgaaagttacgttccatt

SEQ ID NO: 103699 - DNA, 19 bp, Homo sapiens
  siRNA target sequence for TTBK2 (NM_173500.2,3211-3229).
cagcaatggatttatagct

SEQ ID NO: 103700 - DNA, 19 bp, Homo sapiens
  siRNA target sequence for TTBK2 (NM_173500.2,3219-3237).
gatttatagctgttaacct

SEQ ID NO: 103701 - DNA, 19 bp, Homo sapiens
  siRNA target sequence for TTBK2 (NM_173500.2,3240-3258).
gctcttgcaagcaagaaat

SEQ ID NO: 103702 - DNA, 19 bp, Homo sapiens
  siRNA target sequence for TTBK2 (NM_173500.2,3293-3311).
caggaccttcaggatttta

SEQ ID NO: 103703 - DNA, 19 bp, Homo sapiens
  siRNA target sequence for TTBK2 (NM_173500.2,3322-3340).
ggctgtaggacataaaaca

SEQ ID NO: 103704 - DNA, 19 bp, Homo sapiens
  siRNA target sequence for TTBK2 (NM_173500.2,3361-3379).
ggagcctgaagtacttcaa

SEQ ID NO: 103705 - DNA, 19 bp, Homo sapiens
  siRNA target sequence for TTBK2 (NM_173500.2,3388-3406).
ggcatcacctcaagatgaa

SEQ ID NO: 103706 - DNA, 19 bp, Homo sapiens
  siRNA target sequence for TTBK2 (NM_173500.2,3389-3407).
gcatcacctcaagatgaaa

SEQ ID NO: 103707 - DNA, 19 bp, Homo sapiens
  siRNA target sequence for TTBK2 (NM_173500.2,3427-3445).
ggcagaaaatgatcattta

SEQ ID NO: 103708 - DNA, 19 bp, Homo sapiens
  siRNA target sequence for TTBK2 (NM_173500.2,3566-3584).
gcgacgcccacaagtctaa

SEQ ID NO: 103709 - DNA, 19 bp, Homo sapiens
  siRNA target sequence for TTBK2 (NM_173500.2,3567-3585).
cgacgcccacaagtctaat

SEQ ID NO: 103710 - DNA, 19 bp, Homo sapiens
  siRNA target sequence for TTBK2 (NM_173500.2,3605-3623).
ccccttacagcgattacaa

SEQ ID NO: 103711 - DNA, 19 bp, Homo sapiens
  siRNA target sequence for TTBK2 (NM_173500.2,3606-3624).
cccttacagcgattacaat

SEQ ID NO: 103712 - DNA, 19 bp, Homo sapiens
  siRNA target sequence for TTBK2 (NM_173500.2,3810-3828).
ggcttcagatagatcacat

SEQ ID NO: 103713 - DNA, 19 bp, Homo sapiens
  siRNA target sequence for TTBK2 (NM_173500.2,3826-3844).
cattggtcatgacatgtta

SEQ ID NO: 103714 - DNA, 19 bp, Homo sapiens
  siRNA target sequence for TTBK2 (NM_173500.2,3836-3854).
gacatgttacccaacatta

SEQ ID NO: 103715 - DNA, 19 bp, Homo sapiens
  siRNA target sequence for TTBK2 (NM_173500.2,3964-3982).
ccttttagagtcagataat

SEQ ID NO: 103716 - DNA, 19 bp, Homo sapiens
  siRNA target sequence for TTBK2 (NM_173500.2,3999-4017).
gtagagggcagcattgtat

SEQ ID NO: 103717 - DNA, 19 bp, Homo sapiens
  siRNA target sequence for TTBK2 (NM_173500.2,4060-4078).
ggatcactcagctactact

SEQ ID NO: 103718 - DNA, 19 bp, Homo sapiens
  siRNA target sequence for TTBK2 (NM_173500.2,4082-4100).
cctcttgatgtgacaaaaa

SEQ ID NO: 103719 - DNA, 19 bp, Homo sapiens
  siRNA target sequence for TTBK2 (NM_173500.2,4117-4135).
ggtgccaaatcaagacaaa

SEQ ID NO: 103720 - DNA, 19 bp, Homo sapiens
  siRNA target sequence for TTBK2 (NM_173500.2,4118-4136).
gtgccaaatcaagacaaaa

SEQ ID NO: 103721 - DNA, 19 bp, Homo sapiens
  siRNA target sequence for TTBK2 (NM_173500.2,4298-4316).
ggagacctctctacttttt

SEQ ID NO: 103722 - DNA, 19 bp, Homo sapiens
  siRNA target sequence for TTBK2 (NM_173500.2,4299-4317).
gagacctctctactttttt

SEQ ID NO: 103723 - DNA, 19 bp, Homo sapiens
  siRNA target sequence for TTBK2 (NM_173500.2,4397-4415).
gccccaacccggaaggata

SEQ ID NO: 103724 - DNA, 19 bp, Homo sapiens
  siRNA target sequence for TTBK2 (NM_173500.2,4398-4416).
ccccaacccggaaggatat

SEQ ID NO: 103725 - DNA, 19 bp, Homo sapiens
  siRNA target sequence for TTBK2 (NM_173500.2,4417-4435).
ggttaggtcatcctttgta

SEQ ID NO: 103726 - DNA, 19 bp, Homo sapiens
  siRNA target sequence for TTBK2 (NM_173500.2,4418-4436).
gttaggtcatcctttgtaa

SEQ ID NO: 103727 - DNA, 19 bp, Homo sapiens
  siRNA target sequence for TTBK2 (NM_173500.2,4444-4462).
cagccgaatccctgtttta

SEQ ID NO: 103728 - DNA, 19 bp, Homo sapiens
  siRNA target sequence for TTBK2 (NM_173500.2,4447-4465).
ccgaatccctgttttagca

SEQ ID NO: 103729 - DNA, 19 bp, Homo sapiens
  siRNA target sequence for TTBK2 (NM_173500.2,4466-4484).
caagagatagactcaactt

SEQ ID NO: 103730 - DNA, 19 bp, Homo sapiens
  siRNA target sequence for TTBK2 (NM_173500.2,4601-4619).
ctctcaagtgcctctgata

SEQ ID NO: 103731 - DNA, 19 bp, Homo sapiens
  siRNA target sequence for TTBK2 (NM_173500.2,4605-4623).
caagtgcctctgataaatt

SEQ ID NO: 103732 - DNA, 19 bp, Homo sapiens
  siRNA target sequence for TTBK2 (NM_173500.2,4673-4691).
gtgctcactcccttttcaa

SEQ ID NO: 103733 - DNA, 19 bp, Homo sapiens
  siRNA target sequence for TTBK2 (NM_173500.2,4719-4737).
ggtcagctgaagatagctt

SEQ ID NO: 103734 - DNA, 19 bp, Homo sapiens
  siRNA target sequence for TTBK2 (NM_173500.2,4720-4738).
gtcagctgaagatagcttt

SEQ ID NO: 103735 - DNA, 19 bp, Homo sapiens
  siRNA target sequence for TTBK2 (NM_173500.2,4808-4826).
caggtcaatagctcaactt

SEQ ID NO: 103736 - DNA, 19 bp, Homo sapiens
  siRNA target sequence for TTBK2 (NM_173500.2,4867-4885).
cacgaggcctggagtagaa

SEQ ID NO: 103737 - DNA, 19 bp, Homo sapiens
  siRNA target sequence for TTBK2 (NM_173500.2,4886-4904).
gccaggctacgcagatata

SEQ ID NO: 103738 - DNA, 19 bp, Homo sapiens
  siRNA target sequence for TTBK2 (NM_173500.2,4887-4905).
ccaggctacgcagatataa

SEQ ID NO: 103739 - DNA, 19 bp, Homo sapiens
  siRNA target sequence for TTBK2 (NM_173500.2,4888-4906).
caggctacgcagatataaa

SEQ ID NO: 103740 - DNA, 19 bp, Homo sapiens
  siRNA target sequence for TTBK2 (NM_173500.2,4890-4908).
ggctacgcagatataaagt

SEQ ID NO: 103741 - DNA, 19 bp, Homo sapiens
  siRNA target sequence for TTBK2 (NM_173500.2,4945-4963).
ccgcctggcccaaattctt

SEQ ID NO: 103742 - DNA, 19 bp, Homo sapiens
  siRNA target sequence for TTBK2 (NM_173500.2,4947-4965).
gcctggcccaaattcttca

SEQ ID NO: 103743 - DNA, 19 bp, Homo sapiens
  siRNA target sequence for TTBK2 (NM_173500.2,4948-4966).
cctggcccaaattcttcaa

SEQ ID NO: 103744 - DNA, 19 bp, Homo sapiens
  siRNA target sequence for TTC12 (NM_017868.2,73-91).
gtggatgaaatctccaatt

SEQ ID NO: 103745 - DNA, 19 bp, Homo sapiens
  siRNA target sequence for TTC12 (NM_017868.2,117-135).
cccagttgtgcaacagaaa

SEQ ID NO: 103746 - DNA, 19 bp, Homo sapiens
  siRNA target sequence for TTC12 (NM_017868.2,197-215).
gcaggaccaccttgaacaa

SEQ ID NO: 103747 - DNA, 19 bp, Homo sapiens
  siRNA target sequence for TTC12 (NM_017868.2,206-224).
ccttgaacaagactatgat

SEQ ID NO: 103748 - DNA, 19 bp, Homo sapiens
  siRNA target sequence for TTC12 (NM_017868.2,339-357).
cttggcggatgccctaaaa

SEQ ID NO: 103749 - DNA, 19 bp, Homo sapiens
  siRNA target sequence for TTC12 (NM_017868.2,344-362).
cggatgccctaaaagaaaa

SEQ ID NO: 103750 - DNA, 19 bp, Homo sapiens
  siRNA target sequence for TTC12 (NM_017868.2,463-481).
cgagcccaggcttatatga

SEQ ID NO: 103751 - DNA, 19 bp, Homo sapiens
  siRNA target sequence for TTC12 (NM_017868.2,522-540).
ggctctcaagtgtgatgaa

SEQ ID NO: 103752 - DNA, 19 bp, Homo sapiens
  siRNA target sequence for TTC12 (NM_017868.2,523-541).
gctctcaagtgtgatgaaa

SEQ ID NO: 103753 - DNA, 19 bp, Homo sapiens
  siRNA target sequence for TTC12 (NM_017868.2,601-619).
gtgtctagagagtgttata

SEQ ID NO: 103754 - DNA, 19 bp, Homo sapiens
  siRNA target sequence for TTC12 (NM_017868.2,649-667).
caaacccaggtgaaaggtt

SEQ ID NO: 103755 - DNA, 19 bp, Homo sapiens
  siRNA target sequence for TTC12 (NM_017868.2,660-678).
gaaaggttacctgaatcaa

SEQ ID NO: 103756 - DNA, 19 bp, Homo sapiens
  siRNA target sequence for TTC12 (NM_017868.2,665-683).
gttacctgaatcaagtaga

SEQ ID NO: 103757 - DNA, 19 bp, Homo sapiens
  siRNA target sequence for TTC12 (NM_017868.2,793-811).
gaccagatccccttgttct

SEQ ID NO: 103758 - DNA, 19 bp, Homo sapiens
  siRNA target sequence for TTC12 (NM_017868.2,852-870).
gtgcacagaacaaacttta

SEQ ID NO: 103759 - DNA, 19 bp, Homo sapiens
  siRNA target sequence for TTC12 (NM_017868.2,854-872).
gcacagaacaaactttatt

SEQ ID NO: 103760 - DNA, 19 bp, Homo sapiens
  siRNA target sequence for TTC12 (NM_017868.2,880-898).
cacaatggatttagtatca

SEQ ID NO: 103761 - DNA, 19 bp, Homo sapiens
  siRNA target sequence for TTC12 (NM_017868.2,1142-1160).
gcggacggagcctgatcat

SEQ ID NO: 103762 - DNA, 19 bp, Homo sapiens
  siRNA target sequence for TTC12 (NM_017868.2,1145-1163).
gacggagcctgatcatcaa

SEQ ID NO: 103763 - DNA, 19 bp, Homo sapiens
  siRNA target sequence for TTC12 (NM_017868.2,1167-1185).
ccttgacctgaccagatta

SEQ ID NO: 103764 - DNA, 19 bp, Homo sapiens
  siRNA target sequence for TTC12 (NM_017868.2,1173-1191).
cctgaccagattattggaa

SEQ ID NO: 103765 - DNA, 19 bp, Homo sapiens
  siRNA target sequence for TTC12 (NM_017868.2,1319-1337).
cactcacaggcgttctgaa

SEQ ID NO: 103766 - DNA, 19 bp, Homo sapiens
  siRNA target sequence for TTC12 (NM_017868.2,1498-1516).
ctgttcagagaggttatct

SEQ ID NO: 103767 - DNA, 19 bp, Homo sapiens
  siRNA target sequence for TTC12 (NM_017868.2,1520-1538).
cactcctgggactcatgat

SEQ ID NO: 103768 - DNA, 19 bp, Homo sapiens
  siRNA target sequence for TTC12 (NM_017868.2,1522-1540).
ctcctgggactcatgatga

SEQ ID NO: 103769 - DNA, 19 bp, Homo sapiens
  siRNA target sequence for TTC12 (NM_017868.2,1592-1610).
gcagaaggtgcctgtcttt

SEQ ID NO: 103770 - DNA, 19 bp, Homo sapiens
  siRNA target sequence for TTC12 (NM_017868.2,1595-1613).
gaaggtgcctgtctttact

SEQ ID NO: 103771 - DNA, 19 bp, Homo sapiens
  siRNA target sequence for TTC12 (NM_017868.2,1676-1694).
cctctctgaaaattgttga

SEQ ID NO: 103772 - DNA, 19 bp, Homo sapiens
  siRNA target sequence for TTC12 (NM_017868.2,1705-1723).
cgagcaggagtggtaaaga

SEQ ID NO: 103773 - DNA, 19 bp, Homo sapiens
  siRNA target sequence for TTC12 (NM_017868.2,1755-1773).
gactgcatcacgttatgct

SEQ ID NO: 103774 - DNA, 19 bp, Homo sapiens
  siRNA target sequence for TTC12 (NM_017868.2,1757-1775).
ctgcatcacgttatgctat

SEQ ID NO: 103775 - DNA, 19 bp, Homo sapiens
  siRNA target sequence for TTC12 (NM_017868.2,1759-1777).
gcatcacgttatgctataa

SEQ ID NO: 103776 - DNA, 19 bp, Homo sapiens
  siRNA target sequence for TTC12 (NM_017868.2,1760-1778).
catcacgttatgctataaa

SEQ ID NO: 103777 - DNA, 19 bp, Homo sapiens
  siRNA target sequence for TTC12 (NM_017868.2,1783-1801).
ctagctatctgcacgaata

SEQ ID NO: 103778 - DNA, 19 bp, Homo sapiens
  siRNA target sequence for TTC12 (NM_017868.2,1786-1804).
gctatctgcacgaatagtt

SEQ ID NO: 103779 - DNA, 19 bp, Homo sapiens
  siRNA target sequence for TTC12 (NM_017868.2,1787-1805).
ctatctgcacgaatagtta

SEQ ID NO: 103780 - DNA, 19 bp, Homo sapiens
  siRNA target sequence for TTC12 (NM_017868.2,1791-1809).
ctgcacgaatagttatcat

SEQ ID NO: 103781 - DNA, 19 bp, Homo sapiens
  siRNA target sequence for TTC12 (NM_017868.2,1793-1811).
gcacgaatagttatcatga

SEQ ID NO: 103782 - DNA, 19 bp, Homo sapiens
  siRNA target sequence for TTC12 (NM_017868.2,1794-1812).
cacgaatagttatcatgaa

SEQ ID NO: 103783 - DNA, 19 bp, Homo sapiens
  siRNA target sequence for TTC12 (NM_017868.2,1813-1831).
gctcgggaagaagtaataa

SEQ ID NO: 103784 - DNA, 19 bp, Homo sapiens
  siRNA target sequence for TTC12 (NM_017868.2,1942-1960).
gcgtcttccctgctaaaga

SEQ ID NO: 103785 - DNA, 19 bp, Homo sapiens
  siRNA target sequence for TTC12 (NM_017868.2,1971-1989).
gcaggtcttgttaaagctt

SEQ ID NO: 103786 - DNA, 19 bp, Homo sapiens
  siRNA target sequence for TTK (NM_003318.3,77-95).
ggaatccgaggatttaagt

SEQ ID NO: 103787 - DNA, 19 bp, Homo sapiens
  siRNA target sequence for TTK (NM_003318.3,98-116).
cagagaattgacaattgat

SEQ ID NO: 103788 - DNA, 19 bp, Homo sapiens
  siRNA target sequence for TTK (NM_003318.3,128-146).
caaagtgagagacattaaa

SEQ ID NO: 103789 - DNA, 19 bp, Homo sapiens
  siRNA target sequence for TTK (NM_003318.3,165-183).
gaccttactgatgaactaa

SEQ ID NO: 103790 - DNA, 19 bp, Homo sapiens
  siRNA target sequence for TTK (NM_003318.3,174-192).
gatgaactaagcttgaata

SEQ ID NO: 103791 - DNA, 19 bp, Homo sapiens
  siRNA target sequence for TTK (NM_003318.3,201-219).
gctgatactacagataact

SEQ ID NO: 103792 - DNA, 19 bp, Homo sapiens
  siRNA target sequence for TTK (NM_003318.3,213-231).
gataactcgggaactgtta

SEQ ID NO: 103793 - DNA, 19 bp, Homo sapiens
  siRNA target sequence for TTK (NM_003318.3,228-246).
gttaaccaaattatgatga

SEQ ID NO: 103794 - DNA, 19 bp, Homo sapiens
  siRNA target sequence for TTK (NM_003318.3,259-277).
cagaggactggttgagttt

SEQ ID NO: 103795 - DNA, 19 bp, Homo sapiens
  siRNA target sequence for TTK (NM_003318.3,299-317).
cagtgttccgctaagtgat

SEQ ID NO: 103796 - DNA, 19 bp, Homo sapiens
  siRNA target sequence for TTK (NM_003318.3,307-325).
cgctaagtgatgctctttt

SEQ ID NO: 103797 - DNA, 19 bp, Homo sapiens
  siRNA target sequence for TTK (NM_003318.3,365-383).
gcttcccccagataaatat

SEQ ID NO: 103798 - DNA, 19 bp, Homo sapiens
  siRNA target sequence for TTK (NM_003318.3,395-413).
gagttttgctagaattcaa

SEQ ID NO: 103799 - DNA, 19 bp, Homo sapiens
  siRNA target sequence for TTK (NM_003318.3,456-474).
gcacgtgactactttcaaa

SEQ ID NO: 103800 - DNA, 19 bp, Homo sapiens
  siRNA target sequence for TTK (NM_003318.3,457-475).
cacgtgactactttcaaat

SEQ ID NO: 103801 - DNA, 19 bp, Homo sapiens
  siRNA target sequence for TTK (NM_003318.3,536-554).
gtcacaaggtaatgtcaaa

SEQ ID NO: 103802 - DNA, 19 bp, Homo sapiens
  siRNA target sequence for TTK (NM_003318.3,591-609).
ggagcagtaccactagaaa

SEQ ID NO: 103803 - DNA, 19 bp, Homo sapiens
  siRNA target sequence for TTK (NM_003318.3,592-610).
gagcagtaccactagaaat

SEQ ID NO: 103804 - DNA, 19 bp, Homo sapiens
  siRNA target sequence for TTK (NM_003318.3,622-640).
ccctgcggaatttaaacct

SEQ ID NO: 103805 - DNA, 19 bp, Homo sapiens
  siRNA target sequence for TTK (NM_003318.3,628-646).
ggaatttaaacctccaaaa

SEQ ID NO: 103806 - DNA, 19 bp, Homo sapiens
  siRNA target sequence for TTK (NM_003318.3,722-740).
cggttcacttgggcattta

SEQ ID NO: 103807 - DNA, 19 bp, Homo sapiens
  siRNA target sequence for TTK (NM_003318.3,732-750).
gggcatttacagaatagga

SEQ ID NO: 103808 - DNA, 19 bp, Homo sapiens
  siRNA target sequence for TTK (NM_003318.3,766-784).
ccagaggacagactactaa

SEQ ID NO: 103809 - DNA, 19 bp, Homo sapiens
  siRNA target sequence for TTK (NM_003318.3,767-785).
cagaggacagactactaaa

SEQ ID NO: 103810 - DNA, 19 bp, Homo sapiens
  siRNA target sequence for TTK (NM_003318.3,806-824).
gaacatgccaccacaagat

SEQ ID NO: 103811 - DNA, 19 bp, Homo sapiens
  siRNA target sequence for TTK (NM_003318.3,840-858).
cggaattcattgagacaaa

SEQ ID NO: 103812 - DNA, 19 bp, Homo sapiens
  siRNA target sequence for TTK (NM_003318.3,847-865).
cattgagacaaactaacaa

SEQ ID NO: 103813 - DNA, 19 bp, Homo sapiens
  siRNA target sequence for TTK (NM_003318.3,873-891).
cagtcatgcccatttggaa

SEQ ID NO: 103814 - DNA, 19 bp, Homo sapiens
  siRNA target sequence for TTK (NM_003318.3,897-915).
ccagttaaccttctaaata

SEQ ID NO: 103815 - DNA, 19 bp, Homo sapiens
  siRNA target sequence for TTK (NM_003318.3,916-934).
gcccagattgtgatgtgaa

SEQ ID NO: 103816 - DNA, 19 bp, Homo sapiens
  siRNA target sequence for TTK (NM_003318.3,932-950).
gaagacagatgattcagtt

SEQ ID NO: 103817 - DNA, 19 bp, Homo sapiens
  siRNA target sequence for TTK (NM_003318.3,935-953).
gacagatgattcagttgta

SEQ ID NO: 103818 - DNA, 19 bp, Homo sapiens
  siRNA target sequence for TTK (NM_003318.3,946-964).
cagttgtaccttgttttat

SEQ ID NO: 103819 - DNA, 19 bp, Homo sapiens
  siRNA target sequence for TTK (NM_003318.3,948-966).
gttgtaccttgttttatga

SEQ ID NO: 103820 - DNA, 19 bp, Homo sapiens
  siRNA target sequence for TTK (NM_003318.3,1111-1129).
ctgaacttattattactga

SEQ ID NO: 103821 - DNA, 19 bp, Homo sapiens
  siRNA target sequence for TTK (NM_003318.3,1224-1242).
cagaaacagtggcaatcta

SEQ ID NO: 103822 - DNA, 19 bp, Homo sapiens
  siRNA target sequence for TTK (NM_003318.3,1303-1321).
cggagttagcccgaaaagt

SEQ ID NO: 103823 - DNA, 19 bp, Homo sapiens
  siRNA target sequence for TTK (NM_003318.3,1307-1325).
gttagcccgaaaagttaat

SEQ ID NO: 103824 - DNA, 19 bp, Homo sapiens
  siRNA target sequence for TTK (NM_003318.3,1312-1330).
cccgaaaagttaatacaga

SEQ ID NO: 103825 - DNA, 19 bp, Homo sapiens
  siRNA target sequence for TTK (NM_003318.3,1356-1374).
cctgtcttttcagtttcaa

SEQ ID NO: 103826 - DNA, 19 bp, Homo sapiens
  siRNA target sequence for TTK (NM_003318.3,1384-1402).
caccaatatcaacatctaa

SEQ ID NO: 103827 - DNA, 19 bp, Homo sapiens
  siRNA target sequence for TTK (NM_003318.3,1405-1423).
ggtttgacccaaaatctat

SEQ ID NO: 103828 - DNA, 19 bp, Homo sapiens
  siRNA target sequence for TTK (NM_003318.3,1441-1459).
gcaataccttggatgatta

SEQ ID NO: 103829 - DNA, 19 bp, Homo sapiens
  siRNA target sequence for TTK (NM_003318.3,1479-1497).
ccagttgtaaagaatgact

SEQ ID NO: 103830 - DNA, 19 bp, Homo sapiens
  siRNA target sequence for TTK (NM_003318.3,1503-1521).
cctgcttgtcagttgtcaa

SEQ ID NO: 103831 - DNA, 19 bp, Homo sapiens
  siRNA target sequence for TTK (NM_003318.3,1572-1590).
gccactccacttcaaaatt

SEQ ID NO: 103832 - DNA, 19 bp, Homo sapiens
  siRNA target sequence for TTK (NM_003318.3,1573-1591).
ccactccacttcaaaattt

SEQ ID NO: 103833 - DNA, 19 bp, Homo sapiens
  siRNA target sequence for TTK (NM_003318.3,1574-1592).
cactccacttcaaaattta

SEQ ID NO: 103834 - DNA, 19 bp, Homo sapiens
  siRNA target sequence for TTK (NM_003318.3,1576-1594).
ctccacttcaaaatttaca

SEQ ID NO: 103835 - DNA, 19 bp, Homo sapiens
  siRNA target sequence for TTK (NM_003318.3,1678-1696).
gttcaagcaaggtatttca

SEQ ID NO: 103836 - DNA, 19 bp, Homo sapiens
  siRNA target sequence for TTK (NM_003318.3,1770-1788).
gatagttaccggaacgaaa

SEQ ID NO: 103837 - DNA, 19 bp, Homo sapiens
  siRNA target sequence for TTK (NM_003318.3,1778-1796).
ccggaacgaaatagcttat

SEQ ID NO: 103838 - DNA, 19 bp, Homo sapiens
  siRNA target sequence for TTK (NM_003318.3,1779-1797).
cggaacgaaatagcttatt

SEQ ID NO: 103839 - DNA, 19 bp, Homo sapiens
  siRNA target sequence for TTK (NM_003318.3,1780-1798).
ggaacgaaatagcttattt

SEQ ID NO: 103840 - DNA, 19 bp, Homo sapiens
  siRNA target sequence for TTK (NM_003318.3,1826-1844).
gatcatccgactttatgat

SEQ ID NO: 103841 - DNA, 19 bp, Homo sapiens
  siRNA target sequence for TTK (NM_003318.3,1829-1847).
catccgactttatgattat

SEQ ID NO: 103842 - DNA, 19 bp, Homo sapiens
  siRNA target sequence for TTK (NM_003318.3,1832-1850).
ccgactttatgattatgaa

SEQ ID NO: 103843 - DNA, 19 bp, Homo sapiens
  siRNA target sequence for TTK (NM_003318.3,1833-1851).
cgactttatgattatgaaa

SEQ ID NO: 103844 - DNA, 19 bp, Homo sapiens
  siRNA target sequence for TTK (NM_003318.3,1855-1873).
cggaccagtacatctacat

SEQ ID NO: 103845 - DNA, 19 bp, Homo sapiens
  siRNA target sequence for TTK (NM_003318.3,1860-1878).
cagtacatctacatggtaa

SEQ ID NO: 103846 - DNA, 19 bp, Homo sapiens
  siRNA target sequence for TTK (NM_003318.3,1935-1953).
ccatgggaacgcaagagtt

SEQ ID NO: 103847 - DNA, 19 bp, Homo sapiens
  siRNA target sequence for TTK (NM_003318.3,1973-1991).
ggcagttcacacaatccat

SEQ ID NO: 103848 - DNA, 19 bp, Homo sapiens
  siRNA target sequence for TTK (NM_003318.3,1988-2006).
ccatcaacatggcattgtt

SEQ ID NO: 103849 - DNA, 19 bp, Homo sapiens
  siRNA target sequence for TTK (NM_003318.3,2036-2054).
gatagttgatggaatgcta

SEQ ID NO: 103850 - DNA, 19 bp, Homo sapiens
  siRNA target sequence for TTK (NM_003318.3,2043-2061).
gatggaatgctaaagctaa

SEQ ID NO: 103851 - DNA, 19 bp, Homo sapiens
  siRNA target sequence for TTK (NM_003318.3,2047-2065).
gaatgctaaagctaattga

SEQ ID NO: 103852 - DNA, 19 bp, Homo sapiens
  siRNA target sequence for TTK (NM_003318.3,2072-2090).
gattgcaaaccaaatgcaa

SEQ ID NO: 103853 - DNA, 19 bp, Homo sapiens
  siRNA target sequence for TTK (NM_003318.3,2081-2099).
ccaaatgcaaccagataca

SEQ ID NO: 103854 - DNA, 19 bp, Homo sapiens
  siRNA target sequence for TTK (NM_003318.3,2094-2112).
gatacaacaagtgttgtta

SEQ ID NO: 103855 - DNA, 19 bp, Homo sapiens
  siRNA target sequence for TTK (NM_003318.3,2119-2137).
ctcaggttggcacagttaa

SEQ ID NO: 103856 - DNA, 19 bp, Homo sapiens
  siRNA target sequence for TTK (NM_003318.3,2124-2142).
gttggcacagttaattata

SEQ ID NO: 103857 - DNA, 19 bp, Homo sapiens
  siRNA target sequence for TTK (NM_003318.3,2146-2164).
caccagaagcaatcaaaga

SEQ ID NO: 103858 - DNA, 19 bp, Homo sapiens
  siRNA target sequence for TTK (NM_003318.3,2188-2206).
ggaaatctaagtcaaagat

SEQ ID NO: 103859 - DNA, 19 bp, Homo sapiens
  siRNA target sequence for TTK (NM_003318.3,2204-2222).
gataagccccaaaagtgat

SEQ ID NO: 103860 - DNA, 19 bp, Homo sapiens
  siRNA target sequence for TTK (NM_003318.3,2271-2289).
ccatttcagcagataatta

SEQ ID NO: 103861 - DNA, 19 bp, Homo sapiens
  siRNA target sequence for TTK (NM_003318.3,2311-2329).
ccataattgatcctaatca

SEQ ID NO: 103862 - DNA, 19 bp, Homo sapiens
  siRNA target sequence for TTK (NM_003318.3,2344-2362).
ccgatattccagagaaaga

SEQ ID NO: 103863 - DNA, 19 bp, Homo sapiens
  siRNA target sequence for TTK (NM_003318.3,2345-2363).
cgatattccagagaaagat

SEQ ID NO: 103864 - DNA, 19 bp, Homo sapiens
  siRNA target sequence for TTK (NM_003318.3,2367-2385).
caagatgtgttaaagtgtt

SEQ ID NO: 103865 - DNA, 19 bp, Homo sapiens
  siRNA target sequence for TTK (NM_003318.3,2397-2415).
gacccaaaacagaggatat

SEQ ID NO: 103866 - DNA, 19 bp, Homo sapiens
  siRNA target sequence for TTK (NM_003318.3,2400-2418).
ccaaaacagaggatatcca

SEQ ID NO: 103867 - DNA, 19 bp, Homo sapiens
  siRNA target sequence for TTK (NM_003318.3,2458-2476).
ctcatccagttaaccaaat

SEQ ID NO: 103868 - DNA, 19 bp, Homo sapiens
  siRNA target sequence for TTK (NM_003318.3,2516-2534).
ccaacttgttggtctgaat

SEQ ID NO: 103869 - DNA, 19 bp, Homo sapiens
  siRNA target sequence for TTN (NM_003319.2,244-262).
gtttacgcagccgttacaa

SEQ ID NO: 103870 - DNA, 19 bp, Homo sapiens
  siRNA target sequence for TTN (NM_003319.2,280-298).
gggtagtaccgcaaccttt

SEQ ID NO: 103871 - DNA, 19 bp, Homo sapiens
  siRNA target sequence for TTN (NM_003319.2,326-344).
cctgaggtgagctggttta

SEQ ID NO: 103872 - DNA, 19 bp, Homo sapiens
  siRNA target sequence for TTN (NM_003319.2,380-398).
ggcgtgcagatctccttta

SEQ ID NO: 103873 - DNA, 19 bp, Homo sapiens
  siRNA target sequence for TTN (NM_003319.2,639-657).
gggatggagccgaaatcca

SEQ ID NO: 103874 - DNA, 19 bp, Homo sapiens
  siRNA target sequence for TTN (NM_003319.2,692-710).
gacctctacagcttactga

SEQ ID NO: 103875 - DNA, 19 bp, Homo sapiens
  siRNA target sequence for TTN (NM_003319.2,777-795).
ctacttcgactgctgaatt

SEQ ID NO: 103876 - DNA, 19 bp, Homo sapiens
  siRNA target sequence for TTN (NM_003319.2,780-798).
cttcgactgctgaattact

SEQ ID NO: 103877 - DNA, 19 bp, Homo sapiens
  siRNA target sequence for TTN (NM_003319.2,875-893).
caaacccgaattgaaaaga

SEQ ID NO: 103878 - DNA, 19 bp, Homo sapiens
  siRNA target sequence for TTN (NM_003319.2,880-898).
ccgaattgaaaagaagatt

SEQ ID NO: 103879 - DNA, 19 bp, Homo sapiens
  siRNA target sequence for TTN (NM_003319.2,905-923).
cactttgatgccagatcaa

SEQ ID NO: 103880 - DNA, 19 bp, Homo sapiens
  siRNA target sequence for TTN (NM_003319.2,911-929).
gatgccagatcaattgcaa

SEQ ID NO: 103881 - DNA, 19 bp, Homo sapiens
  siRNA target sequence for TTN (NM_003319.2,930-948).
cagttgagatggtcataga

SEQ ID NO: 103882 - DNA, 19 bp, Homo sapiens
  siRNA target sequence for TTN (NM_003319.2,962-980).
caacagctgccacataaaa

SEQ ID NO: 103883 - DNA, 19 bp, Homo sapiens
  siRNA target sequence for TTN (NM_003319.2,1066-1084).
gtccccatcgcccataaga

SEQ ID NO: 103884 - DNA, 19 bp, Homo sapiens
  siRNA target sequence for TTN (NM_003319.2,1068-1086).
ccccatcgcccataagaca

SEQ ID NO: 103885 - DNA, 19 bp, Homo sapiens
  siRNA target sequence for TTN (NM_003319.2,1458-1476).
gtgctaaagaggtgaaaca

SEQ ID NO: 103886 - DNA, 19 bp, Homo sapiens
  siRNA target sequence for TTN (NM_003319.2,1642-1660).
gactgctgtaactaaggta

SEQ ID NO: 103887 - DNA, 19 bp, Homo sapiens
  siRNA target sequence for TTN (NM_003319.2,1647-1665).
ctgtaactaaggtagtagt

SEQ ID NO: 103888 - DNA, 19 bp, Homo sapiens
  siRNA target sequence for TTN (NM_003319.2,1735-1753).
gcagatgcacgtaactcat

SEQ ID NO: 103889 - DNA, 19 bp, Homo sapiens
  siRNA target sequence for TTN (NM_003319.2,1745-1763).
gtaactcatgagcagataa

SEQ ID NO: 103890 - DNA, 19 bp, Homo sapiens
  siRNA target sequence for TTN (NM_003319.2,1749-1767).
ctcatgagcagataagaaa

SEQ ID NO: 103891 - DNA, 19 bp, Homo sapiens
  siRNA target sequence for TTN (NM_003319.2,1787-1805).
gtaccaaaggtagtaattt

SEQ ID NO: 103892 - DNA, 19 bp, Homo sapiens
  siRNA target sequence for TTN (NM_003319.2,1970-1988).
ggtagagaaggcattacta

SEQ ID NO: 103893 - DNA, 19 bp, Homo sapiens
  siRNA target sequence for TTN (NM_003319.2,2102-2120).
ctgagaactagagaaacta

SEQ ID NO: 103894 - DNA, 19 bp, Homo sapiens
  siRNA target sequence for TTN (NM_003319.2,2122-2140).
ggctactagacaagaacaa

SEQ ID NO: 103895 - DNA, 19 bp, Homo sapiens
  siRNA target sequence for TTN (NM_003319.2,2124-2142).
ctactagacaagaacaaat

SEQ ID NO: 103896 - DNA, 19 bp, Homo sapiens
  siRNA target sequence for TTN (NM_003319.2,2127-2145).
ctagacaagaacaaatcca

SEQ ID NO: 103897 - DNA, 19 bp, Homo sapiens
  siRNA target sequence for TTN (NM_003319.2,2157-2175).
gaaaggtggacgttggaaa

SEQ ID NO: 103898 - DNA, 19 bp, Homo sapiens
  siRNA target sequence for TTN (NM_003319.2,2247-2265).
ggcatcttgaagaatccta

SEQ ID NO: 103899 - DNA, 19 bp, Homo sapiens
  siRNA target sequence for TTN (NM_003319.2,2248-2266).
gcatcttgaagaatcctat

SEQ ID NO: 103900 - DNA, 19 bp, Homo sapiens
  siRNA target sequence for TTN (NM_003319.2,2280-2298).
ctttggagtacggatataa

SEQ ID NO: 103901 - DNA, 19 bp, Homo sapiens
  siRNA target sequence for TTN (NM_003319.2,2284-2302).
ggagtacggatataaggaa

SEQ ID NO: 103902 - DNA, 19 bp, Homo sapiens
  siRNA target sequence for TTN (NM_003319.2,2356-2374).
ccacgttgtccctaaagca

SEQ ID NO: 103903 - DNA, 19 bp, Homo sapiens
  siRNA target sequence for TTN (NM_003319.2,2372-2390).
gcagtcaagcctagagtaa

SEQ ID NO: 103904 - DNA, 19 bp, Homo sapiens
  siRNA target sequence for TTN (NM_003319.2,2434-2452).
gggaatgcacatatcatca

SEQ ID NO: 103905 - DNA, 19 bp, Homo sapiens
  siRNA target sequence for TTN (NM_003319.2,2520-2538).
ctagccctcactttactgt

SEQ ID NO: 103906 - DNA, 19 bp, Homo sapiens
  siRNA target sequence for TTN (NM_003319.2,2556-2574).
ctaagacagaacatggata

SEQ ID NO: 103907 - DNA, 19 bp, Homo sapiens
  siRNA target sequence for TTN (NM_003319.2,2595-2613).
gtgctattgccacattaca

SEQ ID NO: 103908 - DNA, 19 bp, Homo sapiens
  siRNA target sequence for TTN (NM_003319.2,2618-2636).
gagttgtcagccacatctt

SEQ ID NO: 103909 - DNA, 19 bp, Homo sapiens
  siRNA target sequence for TTN (NM_003319.2,2680-2698).
gcccagtgagactagagta

SEQ ID NO: 103910 - DNA, 19 bp, Homo sapiens
  siRNA target sequence for TTN (NM_003319.2,2734-2752).
cgctgacacaccagatact

SEQ ID NO: 103911 - DNA, 19 bp, Homo sapiens
  siRNA target sequence for TTN (NM_003319.2,2818-2836).
ccgtgaagagcgctttgaa

SEQ ID NO: 103912 - DNA, 19 bp, Homo sapiens
  siRNA target sequence for TTN (NM_003319.2,2846-2864).
ggacgcgaagccaaggtaa

SEQ ID NO: 103913 - DNA, 19 bp, Homo sapiens
  siRNA target sequence for TTN (NM_003319.2,2879-2897).
gtaccagcacctgttgaaa

SEQ ID NO: 103914 - DNA, 19 bp, Homo sapiens
  siRNA target sequence for TTN (NM_003319.2,2916-2934).
ctttggtctcgggcttaaa

SEQ ID NO: 103915 - DNA, 19 bp, Homo sapiens
  siRNA target sequence for TTN (NM_003319.2,3018-3036).
gggaagactaccaaatcga

SEQ ID NO: 103916 - DNA, 19 bp, Homo sapiens
  siRNA target sequence for TTN (NM_003319.2,3019-3037).
ggaagactaccaaatcgaa

SEQ ID NO: 103917 - DNA, 19 bp, Homo sapiens
  siRNA target sequence for TTN (NM_003319.2,3061-3079).
cttccagagtggaattgct

SEQ ID NO: 103918 - DNA, 19 bp, Homo sapiens
  siRNA target sequence for TTN (NM_003319.2,3071-3089).
ggaattgctcgtcttatga

SEQ ID NO: 103919 - DNA, 19 bp, Homo sapiens
  siRNA target sequence for TTN (NM_003319.2,3072-3090).
gaattgctcgtcttatgat

SEQ ID NO: 103920 - DNA, 19 bp, Homo sapiens
  siRNA target sequence for TTN (NM_003319.2,3181-3199).
gcaggtgtcagaagaattt

SEQ ID NO: 103921 - DNA, 19 bp, Homo sapiens
  siRNA target sequence for TTN (NM_003319.2,3213-3231).
cagccgtgactgagaaatt

SEQ ID NO: 103922 - DNA, 19 bp, Homo sapiens
  siRNA target sequence for TTN (NM_003319.2,3215-3233).
gccgtgactgagaaattta

SEQ ID NO: 103923 - DNA, 19 bp, Homo sapiens
  siRNA target sequence for TTN (NM_003319.2,3217-3235).
cgtgactgagaaatttact

SEQ ID NO: 103924 - DNA, 19 bp, Homo sapiens
  siRNA target sequence for TTN (NM_003319.2,3266-3284).
gatgtggttatgactgata

SEQ ID NO: 103925 - DNA, 19 bp, Homo sapiens
  siRNA target sequence for TTN (NM_003319.2,3269-3287).
gtggttatgactgatacta

SEQ ID NO: 103926 - DNA, 19 bp, Homo sapiens
  siRNA target sequence for TTN (NM_003319.2,3374-3392).
gggagcgtggtgtttggat

SEQ ID NO: 103927 - DNA, 19 bp, Homo sapiens
  siRNA target sequence for TTN (NM_003319.2,3449-3467).
ctaaccactggatacagat

SEQ ID NO: 103928 - DNA, 19 bp, Homo sapiens
  siRNA target sequence for TTN (NM_003319.2,3458-3476).
ggatacagatacaaagtga

SEQ ID NO: 103929 - DNA, 19 bp, Homo sapiens
  siRNA target sequence for TTN (NM_003319.2,3497-3515).
gaatgcaagctggtgattt

SEQ ID NO: 103930 - DNA, 19 bp, Homo sapiens
  siRNA target sequence for TTN (NM_003319.2,3537-3555).
ctggagaatacactattgt

SEQ ID NO: 103931 - DNA, 19 bp, Homo sapiens
  siRNA target sequence for TTN (NM_003319.2,3540-3558).
gagaatacactattgttgt

SEQ ID NO: 103932 - DNA, 19 bp, Homo sapiens
  siRNA target sequence for TTN (NM_003319.2,3549-3567).
ctattgttgttcgcaataa

SEQ ID NO: 103933 - DNA, 19 bp, Homo sapiens
  siRNA target sequence for TTN (NM_003319.2,3562-3580).
caataagcatggagaaact

SEQ ID NO: 103934 - DNA, 19 bp, Homo sapiens
  siRNA target sequence for TTN (NM_003319.2,3701-3719).
gcacctggatttgtatact

SEQ ID NO: 103935 - DNA, 19 bp, Homo sapiens
  siRNA target sequence for TTN (NM_003319.2,3831-3849).
cctttgaagagagacttat

SEQ ID NO: 103936 - DNA, 19 bp, Homo sapiens
  siRNA target sequence for TTN (NM_003319.2,4005-4023).
gtgtcacttttcattgcaa

SEQ ID NO: 103937 - DNA, 19 bp, Homo sapiens
  siRNA target sequence for TTN (NM_003319.2,4024-4042).
gatgtctggatatccatta

SEQ ID NO: 103938 - DNA, 19 bp, Homo sapiens
  siRNA target sequence for TTN (NM_003319.2,4048-4066).
gattgcttggtacaaagat

SEQ ID NO: 103939 - DNA, 19 bp, Homo sapiens
  siRNA target sequence for TTN (NM_003319.2,4092-4110).
gataccaaatggactttct

SEQ ID NO: 103940 - DNA, 19 bp, Homo sapiens
  siRNA target sequence for TTN (NM_003319.2,4132-4150).
gcgtatacctgttgttctt

SEQ ID NO: 103941 - DNA, 19 bp, Homo sapiens
  siRNA target sequence for TTN (NM_003319.2,4173-4191).
ctgcatttgccagcaatat

SEQ ID NO: 103942 - DNA, 19 bp, Homo sapiens
  siRNA target sequence for TTN (NM_003319.2,4175-4193).
gcatttgccagcaatatta

SEQ ID NO: 103943 - DNA, 19 bp, Homo sapiens
  siRNA target sequence for TTN (NM_003319.2,4181-4199).
gccagcaatattaaaggaa

SEQ ID NO: 103944 - DNA, 19 bp, Homo sapiens
  siRNA target sequence for TTN (NM_003319.2,4209-4227).
gctcagggaaattgtatgt

SEQ ID NO: 103945 - DNA, 19 bp, Homo sapiens
  siRNA target sequence for TTN (NM_003319.2,4244-4262).
cttggagctccgacttaca

SEQ ID NO: 103946 - DNA, 19 bp, Homo sapiens
  siRNA target sequence for TTN (NM_003319.2,4422-4440).
cagatgagtcacaacttga

SEQ ID NO: 103947 - DNA, 19 bp, Homo sapiens
  siRNA target sequence for TTN (NM_003319.2,4431-4449).
cacaacttgagagactata

SEQ ID NO: 103948 - DNA, 19 bp, Homo sapiens
  siRNA target sequence for TTN (NM_003319.2,4503-4521).
ctgccagatttgacttaaa

SEQ ID NO: 103949 - DNA, 19 bp, Homo sapiens
  siRNA target sequence for TTN (NM_003319.2,4506-4524).
ccagatttgacttaaaggt

SEQ ID NO: 103950 - DNA, 19 bp, Homo sapiens
  siRNA target sequence for TTN (NM_003319.2,4507-4525).
cagatttgacttaaaggtt

SEQ ID NO: 103951 - DNA, 19 bp, Homo sapiens
  siRNA target sequence for TTN (NM_003319.2,4570-4588).
gcaaattgtcaatgactat

SEQ ID NO: 103952 - DNA, 19 bp, Homo sapiens
  siRNA target sequence for TTN (NM_003319.2,4571-4589).
caaattgtcaatgactata

SEQ ID NO: 103953 - DNA, 19 bp, Homo sapiens
  siRNA target sequence for TTN (NM_003319.2,4613-4631).
gatggtactcaatcactaa

SEQ ID NO: 103954 - DNA, 19 bp, Homo sapiens
  siRNA target sequence for TTN (NM_003319.2,4616-4634).
ggtactcaatcactaatta

SEQ ID NO: 103955 - DNA, 19 bp, Homo sapiens
  siRNA target sequence for TTN (NM_003319.2,4690-4708).
ggcaggcagatcttcaatt

SEQ ID NO: 103956 - DNA, 19 bp, Homo sapiens
  siRNA target sequence for TTN (NM_003319.2,4744-4762).
ggtaaaaccgatgtttgta

SEQ ID NO: 103957 - DNA, 19 bp, Homo sapiens
  siRNA target sequence for TTN (NM_003319.2,4793-4811).
ggttcccgacttgaaatga

SEQ ID NO: 103958 - DNA, 19 bp, Homo sapiens
  siRNA target sequence for TTN (NM_003319.2,4794-4812).
gttcccgacttgaaatgaa

SEQ ID NO: 103959 - DNA, 19 bp, Homo sapiens
  siRNA target sequence for TTN (NM_003319.2,4799-4817).
cgacttgaaatgaaagtca

SEQ ID NO: 103960 - DNA, 19 bp, Homo sapiens
  siRNA target sequence for TTN (NM_003319.2,4831-4849).
ccccaaccctgacattgta

SEQ ID NO: 103961 - DNA, 19 bp, Homo sapiens
  siRNA target sequence for TTN (NM_003319.2,4832-4850).
cccaaccctgacattgtat

SEQ ID NO: 103962 - DNA, 19 bp, Homo sapiens
  siRNA target sequence for TTN (NM_003319.2,4867-4885).
catcattgtgcctcataaa

SEQ ID NO: 103963 - DNA, 19 bp, Homo sapiens
  siRNA target sequence for TTN (NM_003319.2,4916-4934).
ggagaagctgcccttaaaa

SEQ ID NO: 103964 - DNA, 19 bp, Homo sapiens
  siRNA target sequence for TTN (NM_003319.2,4917-4935).
gagaagctgcccttaaaat

SEQ ID NO: 103965 - DNA, 19 bp, Homo sapiens
  siRNA target sequence for TTN (NM_003319.2,4922-4940).
gctgcccttaaaatcgatt

SEQ ID NO: 103966 - DNA, 19 bp, Homo sapiens
  siRNA target sequence for TTN (NM_003319.2,4942-4960).
cactgtcagccaagattct

SEQ ID NO: 103967 - DNA, 19 bp, Homo sapiens
  siRNA target sequence for TTN (NM_003319.2,4952-4970).
caagattctgcctggtata

SEQ ID NO: 103968 - DNA, 19 bp, Homo sapiens
  siRNA target sequence for TTN (NM_003319.2,4966-4984).
gtatactgcgactgctatt

SEQ ID NO: 103969 - DNA, 19 bp, Homo sapiens
  siRNA target sequence for TTN (NM_003319.2,5004-5022).
ctacaagatgcaaagtaaa

SEQ ID NO: 103970 - DNA, 19 bp, Homo sapiens
  siRNA target sequence for TTN (NM_003319.2,5007-5025).
caagatgcaaagtaaatgt

SEQ ID NO: 103971 - DNA, 19 bp, Homo sapiens
  siRNA target sequence for TTN (NM_003319.2,5068-5086).
catcccacgggggacatat

SEQ ID NO: 103972 - DNA, 19 bp, Homo sapiens
  siRNA target sequence for TTN (NM_003319.2,5160-5178).
gtgatctctatgacaaaga

SEQ ID NO: 103973 - DNA, 19 bp, Homo sapiens
  siRNA target sequence for TTN (NM_003319.2,5210-5228).
ctcacttccttaagactta

SEQ ID NO: 103974 - DNA, 19 bp, Homo sapiens
  siRNA target sequence for TTN (NM_003319.2,5328-5346).
ccaacaggctccgtatgat

SEQ ID NO: 103975 - DNA, 19 bp, Homo sapiens
  siRNA target sequence for TTN (NM_003319.2,5334-5352).
ggctccgtatgatcaatga

SEQ ID NO: 103976 - DNA, 19 bp, Homo sapiens
  siRNA target sequence for TTN (NM_003319.2,5335-5353).
gctccgtatgatcaatgaa

SEQ ID NO: 103977 - DNA, 19 bp, Homo sapiens
  siRNA target sequence for TTN (NM_003319.2,5372-5390).
gattatggcgttgcatatt

SEQ ID NO: 103978 - DNA, 19 bp, Homo sapiens
  siRNA target sequence for TTN (NM_003319.2,5396-5414).
gacagtggtatcattactt

SEQ ID NO: 103979 - DNA, 19 bp, Homo sapiens
  siRNA target sequence for TTN (NM_003319.2,5420-5438).
gccactaacaaatatggaa

SEQ ID NO: 103980 - DNA, 19 bp, Homo sapiens
  siRNA target sequence for TTN (NM_003319.2,5446-5464).
cacatctgctacccttatt

SEQ ID NO: 103981 - DNA, 19 bp, Homo sapiens
  siRNA target sequence for TTN (NM_003319.2,5448-5466).
catctgctacccttattgt

SEQ ID NO: 103982 - DNA, 19 bp, Homo sapiens
  siRNA target sequence for TTN (NM_003319.2,5514-5532).
ggaaaggcttacagagaat

SEQ ID NO: 103983 - DNA, 19 bp, Homo sapiens
  siRNA target sequence for TTN (NM_003319.2,5564-5582).
gcacttacaggtgtaacaa

SEQ ID NO: 103984 - DNA, 19 bp, Homo sapiens
  siRNA target sequence for TTN (NM_003319.2,5600-5618).
caaaagccagacattgtct

SEQ ID NO: 103985 - DNA, 19 bp, Homo sapiens
  siRNA target sequence for TTN (NM_003319.2,5623-5641).
cccagagccagttagagta

SEQ ID NO: 103986 - DNA, 19 bp, Homo sapiens
  siRNA target sequence for TTN (NM_003319.2,5722-5740).
gctcatccgcaaaagcaaa

SEQ ID NO: 103987 - DNA, 19 bp, Homo sapiens
  siRNA target sequence for TTN (NM_003319.2,5743-5761).
gttcagagttcgctatgat

SEQ ID NO: 103988 - DNA, 19 bp, Homo sapiens
  siRNA target sequence for TTN (NM_003319.2,5753-5771).
cgctatgatggtatccatt

SEQ ID NO: 103989 - DNA, 19 bp, Homo sapiens
  siRNA target sequence for TTN (NM_003319.2,5754-5772).
gctatgatggtatccatta

SEQ ID NO: 103990 - DNA, 19 bp, Homo sapiens
  siRNA target sequence for TTN (NM_003319.2,5777-5795).
gacatcgtggactgcaaat

SEQ ID NO: 103991 - DNA, 19 bp, Homo sapiens
  siRNA target sequence for TTN (NM_003319.2,5818-5836).
ggtcaccgcggaaaatcct

SEQ ID NO: 103992 - DNA, 19 bp, Homo sapiens
  siRNA target sequence for TTN (NM_003319.2,5841-5859).
gtgtgatagagcataaagt

SEQ ID NO: 103993 - DNA, 19 bp, Homo sapiens
  siRNA target sequence for TTN (NM_003319.2,5925-5943).
ctgagtttcacgtacatga

SEQ ID NO: 103994 - DNA, 19 bp, Homo sapiens
  siRNA target sequence for TTN (NM_003319.2,6032-6050).
gaaagaattacccatgaaa

SEQ ID NO: 103995 - DNA, 19 bp, Homo sapiens
  siRNA target sequence for TTN (NM_003319.2,6036-6054).
gaattacccatgaaaaagt

SEQ ID NO: 103996 - DNA, 19 bp, Homo sapiens
  siRNA target sequence for TTN (NM_003319.2,6067-6085).
ggaagagctgcgcagtaaa

SEQ ID NO: 103997 - DNA, 19 bp, Homo sapiens
  siRNA target sequence for TTN (NM_003319.2,6068-6086).
gaagagctgcgcagtaaat

SEQ ID NO: 103998 - DNA, 19 bp, Homo sapiens
  siRNA target sequence for TTN (NM_003319.2,6147-6165).
gaaagaaggatgaatccta

SEQ ID NO: 103999 - DNA, 19 bp, Homo sapiens
  siRNA target sequence for TTN (NM_003319.2,6202-6220).
ccactggaccaaagagtta

SEQ ID NO: 104000 - DNA, 19 bp, Homo sapiens
  siRNA target sequence for TTN (NM_003319.2,6203-6221).
cactggaccaaagagttaa

SEQ ID NO: 104001 - DNA, 19 bp, Homo sapiens
  siRNA target sequence for TTN (NM_003319.2,6205-6223).
ctggaccaaagagttaact

SEQ ID NO: 104002 - DNA, 19 bp, Homo sapiens
  siRNA target sequence for TTN (NM_003319.2,6207-6225).
ggaccaaagagttaactga

SEQ ID NO: 104003 - DNA, 19 bp, Homo sapiens
  siRNA target sequence for TTN (NM_003319.2,6208-6226).
gaccaaagagttaactgaa

SEQ ID NO: 104004 - DNA, 19 bp, Homo sapiens
  siRNA target sequence for TTN (NM_003319.2,6262-6280).
cacgattccaacttttaaa

SEQ ID NO: 104005 - DNA, 19 bp, Homo sapiens
  siRNA target sequence for TTN (NM_003319.2,6406-6424).
cgaatgtgaatggtacaaa

SEQ ID NO: 104006 - DNA, 19 bp, Homo sapiens
  siRNA target sequence for TTN (NM_003319.2,6418-6436).
gtacaaaaatggtgtcaaa

SEQ ID NO: 104007 - DNA, 19 bp, Homo sapiens
  siRNA target sequence for TTN (NM_003319.2,6443-6461).
cggtctgaccggatctact

SEQ ID NO: 104008 - DNA, 19 bp, Homo sapiens
  siRNA target sequence for TTN (NM_003319.2,6462-6480).
ggtactggcccgaagacaa

SEQ ID NO: 104009 - DNA, 19 bp, Homo sapiens
  siRNA target sequence for TTN (NM_003319.2,6463-6481).
gtactggcccgaagacaat

SEQ ID NO: 104010 - DNA, 19 bp, Homo sapiens
  siRNA target sequence for TTN (NM_003319.2,6471-6489).
ccgaagacaatgtttgtga

SEQ ID NO: 104011 - DNA, 19 bp, Homo sapiens
  siRNA target sequence for TTN (NM_003319.2,6472-6490).
cgaagacaatgtttgtgaa

SEQ ID NO: 104012 - DNA, 19 bp, Homo sapiens
  siRNA target sequence for TTN (NM_003319.2,6482-6500).
gtttgtgaattggtcataa

SEQ ID NO: 104013 - DNA, 19 bp, Homo sapiens
  siRNA target sequence for TTN (NM_003319.2,6486-6504).
gtgaattggtcataagaga

SEQ ID NO: 104014 - DNA, 19 bp, Homo sapiens
  siRNA target sequence for TTN (NM_003319.2,6522-6540).
ctgccagcatcatggtaaa

SEQ ID NO: 104015 - DNA, 19 bp, Homo sapiens
  siRNA target sequence for TTN (NM_003319.2,6568-6586).
cagtcacgcattcttactt

SEQ ID NO: 104016 - DNA, 19 bp, Homo sapiens
  siRNA target sequence for TTN (NM_003319.2,6570-6588).
gtcacgcattcttacttgt

SEQ ID NO: 104017 - DNA, 19 bp, Homo sapiens
  siRNA target sequence for TTN (NM_003319.2,6593-6611).
gccaagcaattgatcactt

SEQ ID NO: 104018 - DNA, 19 bp, Homo sapiens
  siRNA target sequence for TTN (NM_003319.2,6598-6616).
gcaattgatcactttcaca

SEQ ID NO: 104019 - DNA, 19 bp, Homo sapiens
  siRNA target sequence for TTN (NM_003319.2,6607-6625).
cactttcacacaggaatta

SEQ ID NO: 104020 - DNA, 19 bp, Homo sapiens
  siRNA target sequence for TTN (NM_003319.2,6778-6796).
ctccatactgaccattgat

SEQ ID NO: 104021 - DNA, 19 bp, Homo sapiens
  siRNA target sequence for TTN (NM_003319.2,6822-6840).
gtgtacttgtggaagatga

SEQ ID NO: 104022 - DNA, 19 bp, Homo sapiens
  siRNA target sequence for TTN (NM_003319.2,6852-6870).
cgactgctaaacttattgt

SEQ ID NO: 104023 - DNA, 19 bp, Homo sapiens
  siRNA target sequence for TTN (NM_003319.2,6938-6956).
gaattagagtgcattgtat

SEQ ID NO: 104024 - DNA, 19 bp, Homo sapiens
  siRNA target sequence for TTN (NM_003319.2,7013-7031).
ggcaaatatacaattacat

SEQ ID NO: 104025 - DNA, 19 bp, Homo sapiens
  siRNA target sequence for TTN (NM_003319.2,7056-7074).
cggtcaaggatgtaaccaa

SEQ ID NO: 104026 - DNA, 19 bp, Homo sapiens
  siRNA target sequence for TTN (NM_003319.2,7085-7103).
ggagaatacagctttgtca

SEQ ID NO: 104027 - DNA, 19 bp, Homo sapiens
  siRNA target sequence for TTN (NM_003319.2,7205-7223).
cagcttgaagttaaagtct

SEQ ID NO: 104028 - DNA, 19 bp, Homo sapiens
  siRNA target sequence for TTN (NM_003319.2,7275-7293).
ccagtgacagggttcacat

SEQ ID NO: 104029 - DNA, 19 bp, Homo sapiens
  siRNA target sequence for TTN (NM_003319.2,7282-7300).
cagggttcacattgtgata

SEQ ID NO: 104030 - DNA, 19 bp, Homo sapiens
  siRNA target sequence for TTN (NM_003319.2,7297-7315).
gatagacaaacaatctcat

SEQ ID NO: 104031 - DNA, 19 bp, Homo sapiens
  siRNA target sequence for TTN (NM_003319.2,7397-7415).
gggcgtgtctctgtctata

SEQ ID NO: 104032 - DNA, 19 bp, Homo sapiens
  siRNA target sequence for TTN (NM_003319.2,7399-7417).
gcgtgtctctgtctatagt

SEQ ID NO: 104033 - DNA, 19 bp, Homo sapiens
  siRNA target sequence for TTN (NM_003319.2,7426-7444).
gataacacctctaaaagat

SEQ ID NO: 104034 - DNA, 19 bp, Homo sapiens
  siRNA target sequence for TTN (NM_003319.2,7499-7517).
gatgtgacttctgttaagt

SEQ ID NO: 104035 - DNA, 19 bp, Homo sapiens
  siRNA target sequence for TTN (NM_003319.2,7516-7534).
gtggtacttaaatgatgaa

SEQ ID NO: 104036 - DNA, 19 bp, Homo sapiens
  siRNA target sequence for TTN (NM_003319.2,7553-7571).
cgtgtacaggccattgtga

SEQ ID NO: 104037 - DNA, 19 bp, Homo sapiens
  siRNA target sequence for TTN (NM_003319.2,7563-7581).
ccattgtgaaaggtactaa

SEQ ID NO: 104038 - DNA, 19 bp, Homo sapiens
  siRNA target sequence for TTN (NM_003319.2,7564-7582).
cattgtgaaaggtactaaa

SEQ ID NO: 104039 - DNA, 19 bp, Homo sapiens
  siRNA target sequence for TTN (NM_003319.2,7614-7632).
cagacgaaggaccttacaa

SEQ ID NO: 104040 - DNA, 19 bp, Homo sapiens
  siRNA target sequence for TTN (NM_003319.2,7623-7641).
gaccttacaagctgatagt

SEQ ID NO: 104041 - DNA, 19 bp, Homo sapiens
  siRNA target sequence for TTN (NM_003319.2,7636-7654).
gatagttggcagagttgaa

SEQ ID NO: 104042 - DNA, 19 bp, Homo sapiens
  siRNA target sequence for TTN (NM_003319.2,7647-7665).
gagttgaaaccaactgtaa

SEQ ID NO: 104043 - DNA, 19 bp, Homo sapiens
  siRNA target sequence for TTN (NM_003319.2,7652-7670).
gaaaccaactgtaatctct

SEQ ID NO: 104044 - DNA, 19 bp, Homo sapiens
  siRNA target sequence for TTN (NM_003319.2,7662-7680).
gtaatctctctgtagaaaa

SEQ ID NO: 104045 - DNA, 19 bp, Homo sapiens
  siRNA target sequence for TTN (NM_003319.2,7753-7771).
gtcccactctggaattgat

SEQ ID NO: 104046 - DNA, 19 bp, Homo sapiens
  siRNA target sequence for TTN (NM_003319.2,7755-7773).
cccactctggaattgatgt

SEQ ID NO: 104047 - DNA, 19 bp, Homo sapiens
  siRNA target sequence for TTN (NM_003319.2,7769-7787).
gatgtcctgtggaatttta

SEQ ID NO: 104048 - DNA, 19 bp, Homo sapiens
  siRNA target sequence for TTN (NM_003319.2,7796-7814).
gaaatcaagcccagttcta

SEQ ID NO: 104049 - DNA, 19 bp, Homo sapiens
  siRNA target sequence for TTN (NM_003319.2,7804-7822).
gcccagttctaaatataaa

SEQ ID NO: 104050 - DNA, 19 bp, Homo sapiens
  siRNA target sequence for TTN (NM_003319.2,7893-7911).
cattttacgcgggagaaaa

SEQ ID NO: 104051 - DNA, 19 bp, Homo sapiens
  siRNA target sequence for TTN (NM_003319.2,8060-8078).
ctaccactgactaacaaca

SEQ ID NO: 104052 - DNA, 19 bp, Homo sapiens
  siRNA target sequence for TTN (NM_003319.2,8124-8142).
ccaccaaattagatgacat

SEQ ID NO: 104053 - DNA, 19 bp, Homo sapiens
  siRNA target sequence for TTN (NM_003319.2,8181-8199).
ctgccaaactcaaagttga

SEQ ID NO: 104054 - DNA, 19 bp, Homo sapiens
  siRNA target sequence for TTN (NM_003319.2,8294-8312).
ggtgtccagtggatcaaaa

SEQ ID NO: 104055 - DNA, 19 bp, Homo sapiens
  siRNA target sequence for TTN (NM_003319.2,8295-8313).
gtgtccagtggatcaaaaa

SEQ ID NO: 104056 - DNA, 19 bp, Homo sapiens
  siRNA target sequence for TTN (NM_003319.2,8459-8477).
gtggagactgtcaagatca

SEQ ID NO: 104057 - DNA, 19 bp, Homo sapiens
  siRNA target sequence for TTN (NM_003319.2,8464-8482).
gactgtcaagatcattaaa

SEQ ID NO: 104058 - DNA, 19 bp, Homo sapiens
  siRNA target sequence for TTN (NM_003319.2,8522-8540).
gcctttgaagttagtgttt

SEQ ID NO: 104059 - DNA, 19 bp, Homo sapiens
  siRNA target sequence for TTN (NM_003319.2,8550-8568).
ctgttccagtaaaatggtt

SEQ ID NO: 104060 - DNA, 19 bp, Homo sapiens
  siRNA target sequence for TTN (NM_003319.2,8555-8573).
ccagtaaaatggttccata

SEQ ID NO: 104061 - DNA, 19 bp, Homo sapiens
  siRNA target sequence for TTN (NM_003319.2,8558-8576).
gtaaaatggttccataaga

SEQ ID NO: 104062 - DNA, 19 bp, Homo sapiens
  siRNA target sequence for TTN (NM_003319.2,8569-8587).
ccataagagtgtggaaatt

SEQ ID NO: 104063 - DNA, 19 bp, Homo sapiens
  siRNA target sequence for TTN (NM_003319.2,8720-8738).
gtggagacattacatatta

SEQ ID NO: 104064 - DNA, 19 bp, Homo sapiens
  siRNA target sequence for TTN (NM_003319.2,8723-8741).
gagacattacatattacaa

SEQ ID NO: 104065 - DNA, 19 bp, Homo sapiens
  siRNA target sequence for TTN (NM_003319.2,8761-8779).
ggtgcctgagaccaaaact

SEQ ID NO: 104066 - DNA, 19 bp, Homo sapiens
  siRNA target sequence for TTN (NM_003319.2,8919-8937).
cagaggactcggcagaata

SEQ ID NO: 104067 - DNA, 19 bp, Homo sapiens
  siRNA target sequence for TTN (NM_003319.2,8921-8939).
gaggactcggcagaataca

SEQ ID NO: 104068 - DNA, 19 bp, Homo sapiens
  siRNA target sequence for TTN (NM_003319.2,8979-8997).
cagtcaccccaatcatgat

SEQ ID NO: 104069 - DNA, 19 bp, Homo sapiens
  siRNA target sequence for TTN (NM_003319.2,8981-8999).
gtcaccccaatcatgatta

SEQ ID NO: 104070 - DNA, 19 bp, Homo sapiens
  siRNA target sequence for TTN (NM_003319.2,8983-9001).
caccccaatcatgattact

SEQ ID NO: 104071 - DNA, 19 bp, Homo sapiens
  siRNA target sequence for TTN (NM_003319.2,9016-9034).
catcaacgctgaagaaaaa

SEQ ID NO: 104072 - DNA, 19 bp, Homo sapiens
  siRNA target sequence for TTN (NM_003319.2,9073-9091).
catctcttacaaatggtta

SEQ ID NO: 104073 - DNA, 19 bp, Homo sapiens
  siRNA target sequence for TTN (NM_003319.2,9078-9096).
cttacaaatggttaaagaa

SEQ ID NO: 104074 - DNA, 19 bp, Homo sapiens
  siRNA target sequence for TTN (NM_003319.2,9124-9142).
gtgccagatgagaaccaaa

SEQ ID NO: 104075 - DNA, 19 bp, Homo sapiens
  siRNA target sequence for TTN (NM_003319.2,9245-9263).
gaagctcgtcatatagaat

SEQ ID NO: 104076 - DNA, 19 bp, Homo sapiens
  siRNA target sequence for TTN (NM_003319.2,9248-9266).
gctcgtcatatagaattta

SEQ ID NO: 104077 - DNA, 19 bp, Homo sapiens
  siRNA target sequence for TTN (NM_003319.2,9252-9270).
gtcatatagaatttaggaa

SEQ ID NO: 104078 - DNA, 19 bp, Homo sapiens
  siRNA target sequence for TTN (NM_003319.2,9301-9319).
gaagcgagccatgtttgaa

SEQ ID NO: 104079 - DNA, 19 bp, Homo sapiens
  siRNA target sequence for TTN (NM_003319.2,9304-9322).
gcgagccatgtttgaatgt

SEQ ID NO: 104080 - DNA, 19 bp, Homo sapiens
  siRNA target sequence for TTN (NM_003319.2,9524-9542).
gttcgcatccgaagtatta

SEQ ID NO: 104081 - DNA, 19 bp, Homo sapiens
  siRNA target sequence for TTN (NM_003319.2,9527-9545).
cgcatccgaagtattaaaa

SEQ ID NO: 104082 - DNA, 19 bp, Homo sapiens
  siRNA target sequence for TTN (NM_003319.2,9569-9587).
cagcgtgctgttgttgaat

SEQ ID NO: 104083 - DNA, 19 bp, Homo sapiens
  siRNA target sequence for TTN (NM_003319.2,9643-9661).
caatttccaagttcaagaa

SEQ ID NO: 104084 - DNA, 19 bp, Homo sapiens
  siRNA target sequence for TTN (NM_003319.2,9653-9671).
gttcaagaacgacacaaat

SEQ ID NO: 104085 - DNA, 19 bp, Homo sapiens
  siRNA target sequence for TTN (NM_003319.2,9684-9702).
gaagaatccaccgaatgtt

SEQ ID NO: 104086 - DNA, 19 bp, Homo sapiens
  siRNA target sequence for TTN (NM_003319.2,9763-9781).
gagttctgtcactctctat

SEQ ID NO: 104087 - DNA, 19 bp, Homo sapiens
  siRNA target sequence for TTN (NM_003319.2,9854-9872).
cgcttctgtgccgtgatat

SEQ ID NO: 104088 - DNA, 19 bp, Homo sapiens
  siRNA target sequence for TTN (NM_003319.2,9876-9894).
gaagaccacagcccaaaat

SEQ ID NO: 104089 - DNA, 19 bp, Homo sapiens
  siRNA target sequence for TTN (NM_003319.2,9937-9955).
gtgcaaatttcttcatgat

SEQ ID NO: 104090 - DNA, 19 bp, Homo sapiens
  siRNA target sequence for TTN (NM_003319.2,9967-9985).
cacgcttttgctaattgaa

SEQ ID NO: 104091 - DNA, 19 bp, Homo sapiens
  siRNA target sequence for TTN (NM_003319.2,9995-10013).
gaggatgcggcagtctata

SEQ ID NO: 104092 - DNA, 19 bp, Homo sapiens
  siRNA target sequence for TTN (NM_003319.2,9998-10016).
gatgcggcagtctatacct

SEQ ID NO: 104093 - DNA, 19 bp, Homo sapiens
  siRNA target sequence for TTN (NM_003319.2,10017-10035).
gtgaagccaagaatgacta

SEQ ID NO: 104094 - DNA, 19 bp, Homo sapiens
  siRNA target sequence for TTN (NM_003319.2,10161-10179).
ggcagccagcccgttttca

SEQ ID NO: 104095 - DNA, 19 bp, Homo sapiens
  siRNA target sequence for TTN (NM_003319.2,10162-10180).
gcagccagcccgttttcaa

SEQ ID NO: 104096 - DNA, 19 bp, Homo sapiens
  siRNA target sequence for TTN (NM_003319.2,10186-10204).
ggtttctggaacagatcta

SEQ ID NO: 104097 - DNA, 19 bp, Homo sapiens
  siRNA target sequence for TTN (NM_003319.2,10187-10205).
gtttctggaacagatctaa

SEQ ID NO: 104098 - DNA, 19 bp, Homo sapiens
  siRNA target sequence for TTN (NM_003319.2,10241-10259).
ccatctcggttctttagaa

SEQ ID NO: 104099 - DNA, 19 bp, Homo sapiens
  siRNA target sequence for TTN (NM_003319.2,10242-10260).
catctcggttctttagaat

SEQ ID NO: 104100 - DNA, 19 bp, Homo sapiens
  siRNA target sequence for TTN (NM_003319.2,10252-10270).
ctttagaatgactcaattt

SEQ ID NO: 104101 - DNA, 19 bp, Homo sapiens
  siRNA target sequence for TTN (NM_003319.2,10257-10275).
gaatgactcaatttgaaga

SEQ ID NO: 104102 - DNA, 19 bp, Homo sapiens
  siRNA target sequence for TTN (NM_003319.2,10263-10281).
ctcaatttgaagacactta

SEQ ID NO: 104103 - DNA, 19 bp, Homo sapiens
  siRNA target sequence for TTN (NM_003319.2,10276-10294).
cacttatcaactggaaatt

SEQ ID NO: 104104 - DNA, 19 bp, Homo sapiens
  siRNA target sequence for TTN (NM_003319.2,10327-10345).
cacgtttgttgctagtaat

SEQ ID NO: 104105 - DNA, 19 bp, Homo sapiens
  siRNA target sequence for TTN (NM_003319.2,10330-10348).
gtttgttgctagtaatgct

SEQ ID NO: 104106 - DNA, 19 bp, Homo sapiens
  siRNA target sequence for TTN (NM_003319.2,10346-10364).
gctgtaggccaagtatcaa

SEQ ID NO: 104107 - DNA, 19 bp, Homo sapiens
  siRNA target sequence for TTN (NM_003319.2,10487-10505).
catagcgccgaacttcaat

SEQ ID NO: 104108 - DNA, 19 bp, Homo sapiens
  siRNA target sequence for TTN (NM_003319.2,10492-10510).
cgccgaacttcaattatct

SEQ ID NO: 104109 - DNA, 19 bp, Homo sapiens
  siRNA target sequence for TTN (NM_003319.2,10493-10511).
gccgaacttcaattatcta

SEQ ID NO: 104110 - DNA, 19 bp, Homo sapiens
  siRNA target sequence for TTN (NM_003319.2,10494-10512).
ccgaacttcaattatctaa

SEQ ID NO: 104111 - DNA, 19 bp, Homo sapiens
  siRNA target sequence for TTN (NM_003319.2,10495-10513).
cgaacttcaattatctaaa

SEQ ID NO: 104112 - DNA, 19 bp, Homo sapiens
  siRNA target sequence for TTN (NM_003319.2,10584-10602).
gcactggcccaattttcat

SEQ ID NO: 104113 - DNA, 19 bp, Homo sapiens
  siRNA target sequence for TTN (NM_003319.2,10603-10621).
caaagaagtgtcaaatgct

SEQ ID NO: 104114 - DNA, 19 bp, Homo sapiens
  siRNA target sequence for TTN (NM_003319.2,10610-10628).
gtgtcaaatgctgatataa

SEQ ID NO: 104115 - DNA, 19 bp, Homo sapiens
  siRNA target sequence for TTN (NM_003319.2,10640-10658).
gtggctacactgtctgtaa

SEQ ID NO: 104116 - DNA, 19 bp, Homo sapiens
  siRNA target sequence for TTN (NM_003319.2,10642-10660).
ggctacactgtctgtaact

SEQ ID NO: 104117 - DNA, 19 bp, Homo sapiens
  siRNA target sequence for TTN (NM_003319.2,10644-10662).
ctacactgtctgtaactgt

SEQ ID NO: 104118 - DNA, 19 bp, Homo sapiens
  siRNA target sequence for TTN (NM_003319.2,10718-10736).
ccttctgctgactacaaat

SEQ ID NO: 104119 - DNA, 19 bp, Homo sapiens
  siRNA target sequence for TTN (NM_003319.2,10793-10811).
gagggagagtatacatgta

SEQ ID NO: 104120 - DNA, 19 bp, Homo sapiens
  siRNA target sequence for TTN (NM_003319.2,10806-10824).
catgtatggccagtaatga

SEQ ID NO: 104121 - DNA, 19 bp, Homo sapiens
  siRNA target sequence for TTN (NM_003319.2,10809-10827).
gtatggccagtaatgacta

SEQ ID NO: 104122 - DNA, 19 bp, Homo sapiens
  siRNA target sequence for TTN (NM_003319.2,10877-10895).
ggtcacaaagacactgaaa

SEQ ID NO: 104123 - DNA, 19 bp, Homo sapiens
  siRNA target sequence for TTN (NM_003319.2,10941-10959).
gtcctcctcacttccttaa

SEQ ID NO: 104124 - DNA, 19 bp, Homo sapiens
  siRNA target sequence for TTN (NM_003319.2,10944-10962).
ctcctcacttccttaagga

SEQ ID NO: 104125 - DNA, 19 bp, Homo sapiens
  siRNA target sequence for TTN (NM_003319.2,10949-10967).
cacttccttaaggagttaa

SEQ ID NO: 104126 - DNA, 19 bp, Homo sapiens
  siRNA target sequence for TTN (NM_003319.2,10991-11009).
cttcctgccatctttgagt

SEQ ID NO: 104127 - DNA, 19 bp, Homo sapiens
  siRNA target sequence for TTN (NM_003319.2,11039-11057).
gttacatggttcaaagaaa

SEQ ID NO: 104128 - DNA, 19 bp, Homo sapiens
  siRNA target sequence for TTN (NM_003319.2,11063-11081).
cagctttgcaccagtgttt

SEQ ID NO: 104129 - DNA, 19 bp, Homo sapiens
  siRNA target sequence for TTN (NM_003319.2,11065-11083).
gctttgcaccagtgtttat

SEQ ID NO: 104130 - DNA, 19 bp, Homo sapiens
  siRNA target sequence for TTN (NM_003319.2,11073-11091).
ccagtgtttattacactat

SEQ ID NO: 104131 - DNA, 19 bp, Homo sapiens
  siRNA target sequence for TTN (NM_003319.2,11147-11165).
gacagtggcctctatatct

SEQ ID NO: 104132 - DNA, 19 bp, Homo sapiens
  siRNA target sequence for TTN (NM_003319.2,11151-11169).
gtggcctctatatctgtaa

SEQ ID NO: 104133 - DNA, 19 bp, Homo sapiens
  siRNA target sequence for TTN (NM_003319.2,11341-11359).
ggaaattgcaacgtttgta

SEQ ID NO: 104134 - DNA, 19 bp, Homo sapiens
  siRNA target sequence for TTN (NM_003319.2,11412-11430).
cttatgagcatattgctaa

SEQ ID NO: 104135 - DNA, 19 bp, Homo sapiens
  siRNA target sequence for TTN (NM_003319.2,11461-11479).
gggagctcaggaattgcaa

SEQ ID NO: 104136 - DNA, 19 bp, Homo sapiens
  siRNA target sequence for TTN (NM_003319.2,11468-11486).
caggaattgcaatccattt

SEQ ID NO: 104137 - DNA, 19 bp, Homo sapiens
  siRNA target sequence for TTN (NM_003319.2,11517-11535).
ccagggaatttctttgcat

SEQ ID NO: 104138 - DNA, 19 bp, Homo sapiens
  siRNA target sequence for TTN (NM_003319.2,11655-11673).
cacaggcagttctatcaga

SEQ ID NO: 104139 - DNA, 19 bp, Homo sapiens
  siRNA target sequence for TTN (NM_003319.2,11697-11715).
ccatgtccatagaacaaat

SEQ ID NO: 104140 - DNA, 19 bp, Homo sapiens
  siRNA target sequence for TTN (NM_003319.2,11704-11722).
catagaacaaattaattca

SEQ ID NO: 104141 - DNA, 19 bp, Homo sapiens
  siRNA target sequence for TTN (NM_003319.2,11789-11807).
gaacctccaatgcattctt

SEQ ID NO: 104142 - DNA, 19 bp, Homo sapiens
  siRNA target sequence for TTN (NM_003319.2,11906-11924).
caaagtgcgctcatcttga

SEQ ID NO: 104143 - DNA, 19 bp, Homo sapiens
  siRNA target sequence for TTN (NM_003319.2,11977-11995).
gatctctcaggtaaactat

SEQ ID NO: 104144 - DNA, 19 bp, Homo sapiens
  siRNA target sequence for TTN (NM_003319.2,12033-12051).
gaggtaaaattttgataga

SEQ ID NO: 104145 - DNA, 19 bp, Homo sapiens
  siRNA target sequence for TTN (NM_003319.2,12101-12119).
gaggaaggcaagtccttaa

SEQ ID NO: 104146 - DNA, 19 bp, Homo sapiens
  siRNA target sequence for TTN (NM_003319.2,12103-12121).
ggaaggcaagtccttaaga

SEQ ID NO: 104147 - DNA, 19 bp, Homo sapiens
  siRNA target sequence for TTN (NM_003319.2,12125-12143).
ccactagcacttgaagaaa

SEQ ID NO: 104148 - DNA, 19 bp, Homo sapiens
  siRNA target sequence for TTN (NM_003319.2,12145-12163).
gcaggtactgctcaaagaa

SEQ ID NO: 104149 - DNA, 19 bp, Homo sapiens
  siRNA target sequence for TTN (NM_003319.2,12187-12205).
gcccccagaccaaatcatt

SEQ ID NO: 104150 - DNA, 19 bp, Homo sapiens
  siRNA target sequence for TTN (NM_003319.2,12216-12234).
gagagcccgtggcaataaa

SEQ ID NO: 104151 - DNA, 19 bp, Homo sapiens
  siRNA target sequence for TTN (NM_003319.2,12220-12238).
gcccgtggcaataaagaaa

SEQ ID NO: 104152 - DNA, 19 bp, Homo sapiens
  siRNA target sequence for TTN (NM_003319.2,12413-12431).
gtcgaggctgtaaacatca

SEQ ID NO: 104153 - DNA, 19 bp, Homo sapiens
  siRNA target sequence for TTN (NM_003319.2,12454-12472).
gtgcatgtaccttgttact

SEQ ID NO: 104154 - DNA, 19 bp, Homo sapiens
  siRNA target sequence for TTN (NM_003319.2,12474-12492).
cggcaaagtctgtaacaga

SEQ ID NO: 104155 - DNA, 19 bp, Homo sapiens
  siRNA target sequence for TTN (NM_003319.2,12481-12499).
gtctgtaacagaagaagta

SEQ ID NO: 104156 - DNA, 19 bp, Homo sapiens
  siRNA target sequence for TTN (NM_003319.2,12532-12550).
ggctaacctgaaaatggaa

SEQ ID NO: 104157 - DNA, 19 bp, Homo sapiens
  siRNA target sequence for TTN (NM_003319.2,12556-12574).
ggatgctttgtgtgctatt

SEQ ID NO: 104158 - DNA, 19 bp, Homo sapiens
  siRNA target sequence for TTN (NM_003319.2,12557-12575).
gatgctttgtgtgctatta

SEQ ID NO: 104159 - DNA, 19 bp, Homo sapiens
  siRNA target sequence for TTN (NM_003319.2,12600-12618).
cagctgagggtcctagaat

SEQ ID NO: 104160 - DNA, 19 bp, Homo sapiens
  siRNA target sequence for TTN (NM_003319.2,12603-12621).
ctgagggtcctagaattca

SEQ ID NO: 104161 - DNA, 19 bp, Homo sapiens
  siRNA target sequence for TTN (NM_003319.2,12622-12640).
gcaaggagccaaaacaagt

SEQ ID NO: 104162 - DNA, 19 bp, Homo sapiens
  siRNA target sequence for TTN (NM_003319.2,12676-12694).
gaaggttgaacccattact

SEQ ID NO: 104163 - DNA, 19 bp, Homo sapiens
  siRNA target sequence for TTN (NM_003319.2,12731-12749).
gaagaggtcagttatttta

SEQ ID NO: 104164 - DNA, 19 bp, Homo sapiens
  siRNA target sequence for TTN (NM_003319.2,12752-12770).
gtgcaaagtagggttaaat

SEQ ID NO: 104165 - DNA, 19 bp, Homo sapiens
  siRNA target sequence for TTN (NM_003319.2,12817-12835).
ctctgacgaaaaacaagat

SEQ ID NO: 104166 - DNA, 19 bp, Homo sapiens
  siRNA target sequence for TTN (NM_003319.2,12833-12851).
gatgagagtctgaaaccat

SEQ ID NO: 104167 - DNA, 19 bp, Homo sapiens
  siRNA target sequence for TTN (NM_003319.2,12893-12911).
gaggttgctacagtaaaga

SEQ ID NO: 104168 - DNA, 19 bp, Homo sapiens
  siRNA target sequence for TTN (NM_003319.2,12895-12913).
ggttgctacagtaaagata

SEQ ID NO: 104169 - DNA, 19 bp, Homo sapiens
  siRNA target sequence for TTN (NM_003319.2,12920-12938).
gctgagggtggcttaatca

SEQ ID NO: 104170 - DNA, 19 bp, Homo sapiens
  siRNA target sequence for TTN (NM_003319.2,12921-12939).
ctgagggtggcttaatcaa

SEQ ID NO: 104171 - DNA, 19 bp, Homo sapiens
  siRNA target sequence for TTN (NM_003319.2,12943-12961).
ggatggccccatgatacat

SEQ ID NO: 104172 - DNA, 19 bp, Homo sapiens
  siRNA target sequence for TTN (NM_003319.2,12952-12970).
catgatacatacaccttta

SEQ ID NO: 104173 - DNA, 19 bp, Homo sapiens
  siRNA target sequence for TTN (NM_003319.2,12965-12983).
cctttagtggacactgttt

SEQ ID NO: 104174 - DNA, 19 bp, Homo sapiens
  siRNA target sequence for TTN (NM_003319.2,13004-13022).
cacctcacaacatccataa

SEQ ID NO: 104175 - DNA, 19 bp, Homo sapiens
  siRNA target sequence for TTN (NM_003319.2,13014-13032).
catccataacaaatgctaa

SEQ ID NO: 104176 - DNA, 19 bp, Homo sapiens
  siRNA target sequence for TTN (NM_003319.2,13064-13082).
gtgccttcagatgaaaagt

SEQ ID NO: 104177 - DNA, 19 bp, Homo sapiens
  siRNA target sequence for TTN (NM_003319.2,13081-13099).
gttcaagtgtttacaagat

SEQ ID NO: 104178 - DNA, 19 bp, Homo sapiens
  siRNA target sequence for TTN (NM_003319.2,13113-13131).
cgctagtcatcgacaaagt

SEQ ID NO: 104179 - DNA, 19 bp, Homo sapiens
  siRNA target sequence for TTN (NM_003319.2,13114-13132).
gctagtcatcgacaaagta

SEQ ID NO: 104180 - DNA, 19 bp, Homo sapiens
  siRNA target sequence for TTN (NM_003319.2,13115-13133).
ctagtcatcgacaaagtaa

SEQ ID NO: 104181 - DNA, 19 bp, Homo sapiens
  siRNA target sequence for TTN (NM_003319.2,13118-13136).
gtcatcgacaaagtaaata

SEQ ID NO: 104182 - DNA, 19 bp, Homo sapiens
  siRNA target sequence for TTN (NM_003319.2,13145-13163).
catcaaggagagtatgtct

SEQ ID NO: 104183 - DNA, 19 bp, Homo sapiens
  siRNA target sequence for TTN (NM_003319.2,13202-13220).
gccaaactcactgtagtaa

SEQ ID NO: 104184 - DNA, 19 bp, Homo sapiens
  siRNA target sequence for TTN (NM_003319.2,13203-13221).
ccaaactcactgtagtaaa

SEQ ID NO: 104185 - DNA, 19 bp, Homo sapiens
  siRNA target sequence for TTN (NM_003319.2,13274-13292).
ggccacctagccaaattca

SEQ ID NO: 104186 - DNA, 19 bp, Homo sapiens
  siRNA target sequence for TTN (NM_003319.2,13319-13337).
gtccggttccagtggttta

SEQ ID NO: 104187 - DNA, 19 bp, Homo sapiens
  siRNA target sequence for TTN (NM_003319.2,13343-13361).
ggccgagaaatttatgaga

SEQ ID NO: 104188 - DNA, 19 bp, Homo sapiens
  siRNA target sequence for TTN (NM_003319.2,13364-13382).
gacaagtgttctattcgat

SEQ ID NO: 104189 - DNA, 19 bp, Homo sapiens
  siRNA target sequence for TTN (NM_003319.2,13369-13387).
gtgttctattcgatcttca

SEQ ID NO: 104190 - DNA, 19 bp, Homo sapiens
  siRNA target sequence for TTN (NM_003319.2,13371-13389).
gttctattcgatcttcaaa

SEQ ID NO: 104191 - DNA, 19 bp, Homo sapiens
  siRNA target sequence for TTN (NM_003319.2,13374-13392).
ctattcgatcttcaaagta

SEQ ID NO: 104192 - DNA, 19 bp, Homo sapiens
  siRNA target sequence for TTN (NM_003319.2,13427-13445).
gttgactgcggcgagtata

SEQ ID NO: 104193 - DNA, 19 bp, Homo sapiens
  siRNA target sequence for TTN (NM_003319.2,13430-13448).
gactgcggcgagtatacat

SEQ ID NO: 104194 - DNA, 19 bp, Homo sapiens
  siRNA target sequence for TTN (NM_003319.2,13435-13453).
cggcgagtatacatgcaaa

SEQ ID NO: 104195 - DNA, 19 bp, Homo sapiens
  siRNA target sequence for TTN (NM_003319.2,13449-13467).
gcaaagcttccaatgagta

SEQ ID NO: 104196 - DNA, 19 bp, Homo sapiens
  siRNA target sequence for TTN (NM_003319.2,13450-13468).
caaagcttccaatgagtat

SEQ ID NO: 104197 - DNA, 19 bp, Homo sapiens
  siRNA target sequence for TTN (NM_003319.2,13480-13498).
ctgtacagccacactaact

SEQ ID NO: 104198 - DNA, 19 bp, Homo sapiens
  siRNA target sequence for TTN (NM_003319.2,13522-13540).
gaaagttcgcaaattactt

SEQ ID NO: 104199 - DNA, 19 bp, Homo sapiens
  siRNA target sequence for TTN (NM_003319.2,13574-13592).
gttctgaaaagcgttctaa

SEQ ID NO: 104200 - DNA, 19 bp, Homo sapiens
  siRNA target sequence for TTN (NM_003319.2,13616-13634).
cctaaagtagaacctaaaa

SEQ ID NO: 104201 - DNA, 19 bp, Homo sapiens
  siRNA target sequence for TTN (NM_003319.2,13696-13714).
ggttgaagtacctactgtt

SEQ ID NO: 104202 - DNA, 19 bp, Homo sapiens
  siRNA target sequence for TTN (NM_003319.2,13785-13803).
cacctgaaccgaaaccaaa

SEQ ID NO: 104203 - DNA, 19 bp, Homo sapiens
  siRNA target sequence for TTN (NM_003319.2,13804-13822).
gcccgaagcagaagtgaaa

SEQ ID NO: 104204 - DNA, 19 bp, Homo sapiens
  siRNA target sequence for TTN (NM_003319.2,13861-13879).
catcgctgccccagtaaca

SEQ ID NO: 104205 - DNA, 19 bp, Homo sapiens
  siRNA target sequence for TTN (NM_003319.2,13936-13954).
gccaaaaggtcctatcaaa

SEQ ID NO: 104206 - DNA, 19 bp, Homo sapiens
  siRNA target sequence for TTN (NM_003319.2,13969-13987).
gactccttcaccaatagaa

SEQ ID NO: 104207 - DNA, 19 bp, Homo sapiens
  siRNA target sequence for TTN (NM_003319.2,13988-14006).
gccgaaaggagaaagttaa

SEQ ID NO: 104208 - DNA, 19 bp, Homo sapiens
  siRNA target sequence for TTN (NM_003319.2,14046-14064).
cgttcacctaccagctaaa

SEQ ID NO: 104209 - DNA, 19 bp, Homo sapiens
  siRNA target sequence for TTN (NM_003319.2,14067-14085).
ctgtgccactgaagtttgt

SEQ ID NO: 104210 - DNA, 19 bp, Homo sapiens
  siRNA target sequence for TTN (NM_003319.2,14101-14119).
catcatcttgacagaatca

SEQ ID NO: 104211 - DNA, 19 bp, Homo sapiens
  siRNA target sequence for TTN (NM_003319.2,14161-14179).
cccttccactgcaattaca

SEQ ID NO: 104212 - DNA, 19 bp, Homo sapiens
  siRNA target sequence for TTN (NM_003319.2,14162-14180).
ccttccactgcaattacaa

SEQ ID NO: 104213 - DNA, 19 bp, Homo sapiens
  siRNA target sequence for TTN (NM_003319.2,14185-14203).
gatgaaagacggtagcaat

SEQ ID NO: 104214 - DNA, 19 bp, Homo sapiens
  siRNA target sequence for TTN (NM_003319.2,14214-14232).
gtcccaagcacaggtttat

SEQ ID NO: 104215 - DNA, 19 bp, Homo sapiens
  siRNA target sequence for TTN (NM_003319.2,14218-14236).
caagcacaggtttattgca

SEQ ID NO: 104216 - DNA, 19 bp, Homo sapiens
  siRNA target sequence for TTN (NM_003319.2,14329-14347).
gacctccacggctaaactt

SEQ ID NO: 104217 - DNA, 19 bp, Homo sapiens
  siRNA target sequence for TTN (NM_003319.2,14334-14352).
ccacggctaaacttgttgt

SEQ ID NO: 104218 - DNA, 19 bp, Homo sapiens
  siRNA target sequence for TTN (NM_003319.2,14335-14353).
cacggctaaacttgttgta

SEQ ID NO: 104219 - DNA, 19 bp, Homo sapiens
  siRNA target sequence for TTN (NM_003319.2,14337-14355).
cggctaaacttgttgtaga

SEQ ID NO: 104220 - DNA, 19 bp, Homo sapiens
  siRNA target sequence for TTN (NM_003319.2,14338-14356).
ggctaaacttgttgtagaa

SEQ ID NO: 104221 - DNA, 19 bp, Homo sapiens
  siRNA target sequence for TTN (NM_003319.2,14411-14429).
ggacagccattgtacttga

SEQ ID NO: 104222 - DNA, 19 bp, Homo sapiens
  siRNA target sequence for TTN (NM_003319.2,14428-14446).
gagctgcgagttaaacaaa

SEQ ID NO: 104223 - DNA, 19 bp, Homo sapiens
  siRNA target sequence for TTN (NM_003319.2,14430-14448).
gctgcgagttaaacaaaga

SEQ ID NO: 104224 - DNA, 19 bp, Homo sapiens
  siRNA target sequence for TTN (NM_003319.2,14611-14629).
gtgttcatcttgcgtaaaa

SEQ ID NO: 104225 - DNA, 19 bp, Homo sapiens
  siRNA target sequence for TTN (NM_003319.2,14613-14631).
gttcatcttgcgtaaaagt

SEQ ID NO: 104226 - DNA, 19 bp, Homo sapiens
  siRNA target sequence for TTN (NM_003319.2,14616-14634).
catcttgcgtaaaagtagt

SEQ ID NO: 104227 - DNA, 19 bp, Homo sapiens
  siRNA target sequence for TTN (NM_003319.2,14619-14637).
cttgcgtaaaagtagtaga

SEQ ID NO: 104228 - DNA, 19 bp, Homo sapiens
  siRNA target sequence for TTN (NM_003319.2,14622-14640).
gcgtaaaagtagtagaagt

SEQ ID NO: 104229 - DNA, 19 bp, Homo sapiens
  siRNA target sequence for TTN (NM_003319.2,14653-14671).
gctggtgaaacctatacga

SEQ ID NO: 104230 - DNA, 19 bp, Homo sapiens
  siRNA target sequence for TTN (NM_003319.2,14688-14706).
ccaaggggacagctatttt

SEQ ID NO: 104231 - DNA, 19 bp, Homo sapiens
  siRNA target sequence for TTN (NM_003319.2,14699-14717).
gctatttttgcctgtgata

SEQ ID NO: 104232 - DNA, 19 bp, Homo sapiens
  siRNA target sequence for TTN (NM_003319.2,14700-14718).
ctatttttgcctgtgatat

SEQ ID NO: 104233 - DNA, 19 bp, Homo sapiens
  siRNA target sequence for TTN (NM_003319.2,14745-14763).
ggttcaaaggatatgatga

SEQ ID NO: 104234 - DNA, 19 bp, Homo sapiens
  siRNA target sequence for TTN (NM_003319.2,14771-14789).
gcggaaccaaatgataaga

SEQ ID NO: 104235 - DNA, 19 bp, Homo sapiens
  siRNA target sequence for TTN (NM_003319.2,14773-14791).
ggaaccaaatgataagact

SEQ ID NO: 104236 - DNA, 19 bp, Homo sapiens
  siRNA target sequence for TTN (NM_003319.2,14910-14928).
gagagcgtgaagttgaact

SEQ ID NO: 104237 - DNA, 19 bp, Homo sapiens
  siRNA target sequence for TTN (NM_003319.2,14921-14939).
gttgaactgcttaaaccaa

SEQ ID NO: 104238 - DNA, 19 bp, Homo sapiens
  siRNA target sequence for TTN (NM_003319.2,14937-14955).
caatagaggacgttaccat

SEQ ID NO: 104239 - DNA, 19 bp, Homo sapiens
  siRNA target sequence for TTN (NM_003319.2,14945-14963).
gacgttaccatttatgaga

SEQ ID NO: 104240 - DNA, 19 bp, Homo sapiens
  siRNA target sequence for TTN (NM_003319.2,15044-15062).
ccctcacctacttgtgaaa

SEQ ID NO: 104241 - DNA, 19 bp, Homo sapiens
  siRNA target sequence for TTN (NM_003319.2,15048-15066).
cacctacttgtgaaatcaa

SEQ ID NO: 104242 - DNA, 19 bp, Homo sapiens
  siRNA target sequence for TTN (NM_003319.2,15077-15095).
ggaaaacgcttcttaactt

SEQ ID NO: 104243 - DNA, 19 bp, Homo sapiens
  siRNA target sequence for TTN (NM_003319.2,15133-15151).
ctaccaggcccttaatgca

SEQ ID NO: 104244 - DNA, 19 bp, Homo sapiens
  siRNA target sequence for TTN (NM_003319.2,15137-15155).
caggcccttaatgcaatta

SEQ ID NO: 104245 - DNA, 19 bp, Homo sapiens
  siRNA target sequence for TTN (NM_003319.2,15232-15250).
gcgacaggctcgattcgaa

SEQ ID NO: 104246 - DNA, 19 bp, Homo sapiens
  siRNA target sequence for TTN (NM_003319.2,15233-15251).
cgacaggctcgattcgaat

SEQ ID NO: 104247 - DNA, 19 bp, Homo sapiens
  siRNA target sequence for TTN (NM_003319.2,15259-15277).
cacccgagaggcaaatgtt

SEQ ID NO: 104248 - DNA, 19 bp, Homo sapiens
  siRNA target sequence for TTN (NM_003319.2,15261-15279).
cccgagaggcaaatgttat

SEQ ID NO: 104249 - DNA, 19 bp, Homo sapiens
  siRNA target sequence for TTN (NM_003319.2,15262-15280).
ccgagaggcaaatgttata

SEQ ID NO: 104250 - DNA, 19 bp, Homo sapiens
  siRNA target sequence for TTN (NM_003319.2,15263-15281).
cgagaggcaaatgttatat

SEQ ID NO: 104251 - DNA, 19 bp, Homo sapiens
  siRNA target sequence for TTN (NM_003319.2,15282-15300).
ggtccaaaggacctgatat

SEQ ID NO: 104252 - DNA, 19 bp, Homo sapiens
  siRNA target sequence for TTN (NM_003319.2,15307-15325).
gtcatctgacaaatttgat

SEQ ID NO: 104253 - DNA, 19 bp, Homo sapiens
  siRNA target sequence for TTN (NM_003319.2,15312-15330).
ctgacaaatttgatatcat

SEQ ID NO: 104254 - DNA, 19 bp, Homo sapiens
  siRNA target sequence for TTN (NM_003319.2,15377-15395).
gatgatgaaggggtctata

SEQ ID NO: 104255 - DNA, 19 bp, Homo sapiens
  siRNA target sequence for TTN (NM_003319.2,15430-15448).
gttgtttgtcacaggtata

SEQ ID NO: 104256 - DNA, 19 bp, Homo sapiens
  siRNA target sequence for TTN (NM_003319.2,15433-15451).
gtttgtcacaggtataaga

SEQ ID NO: 104257 - DNA, 19 bp, Homo sapiens
  siRNA target sequence for TTN (NM_003319.2,15460-15478).
catgtcacctcttgaagat

SEQ ID NO: 104258 - DNA, 19 bp, Homo sapiens
  siRNA target sequence for TTN (NM_003319.2,15463-15481).
gtcacctcttgaagatcaa

SEQ ID NO: 104259 - DNA, 19 bp, Homo sapiens
  siRNA target sequence for TTN (NM_003319.2,15501-15519).
cagcaacttttgtttgtga

SEQ ID NO: 104260 - DNA, 19 bp, Homo sapiens
  siRNA target sequence for TTN (NM_003319.2,15539-15557).
catgtagtctggttcaaaa

SEQ ID NO: 104261 - DNA, 19 bp, Homo sapiens
  siRNA target sequence for TTN (NM_003319.2,15571-15589).
ccatacaagcagaacagta

SEQ ID NO: 104262 - DNA, 19 bp, Homo sapiens
  siRNA target sequence for TTN (NM_003319.2,15724-15742).
cttcactgtgaaattacat

SEQ ID NO: 104263 - DNA, 19 bp, Homo sapiens
  siRNA target sequence for TTN (NM_003319.2,15733-15751).
gaaattacatgacaaaact

SEQ ID NO: 104264 - DNA, 19 bp, Homo sapiens
  siRNA target sequence for TTN (NM_003319.2,15755-15773).
gtggagaaggatgagatta

SEQ ID NO: 104265 - DNA, 19 bp, Homo sapiens
  siRNA target sequence for TTN (NM_003319.2,15757-15775).
ggagaaggatgagattact

SEQ ID NO: 104266 - DNA, 19 bp, Homo sapiens
  siRNA target sequence for TTN (NM_003319.2,15836-15854).
gtcccttcacccaaatatt

SEQ ID NO: 104267 - DNA, 19 bp, Homo sapiens
  siRNA target sequence for TTN (NM_003319.2,15843-15861).
cacccaaatattctatcaa

SEQ ID NO: 104268 - DNA, 19 bp, Homo sapiens
  siRNA target sequence for TTN (NM_003319.2,15892-15910).
caaaaaggcggaccttaaa

SEQ ID NO: 104269 - DNA, 19 bp, Homo sapiens
  siRNA target sequence for TTN (NM_003319.2,15898-15916).
ggcggaccttaaagataaa

SEQ ID NO: 104270 - DNA, 19 bp, Homo sapiens
  siRNA target sequence for TTN (NM_003319.2,15951-15969).
ccaaggcaaatgttactgt

SEQ ID NO: 104271 - DNA, 19 bp, Homo sapiens
  siRNA target sequence for TTN (NM_003319.2,15966-15984).
ctgttgaggctcgactaat

SEQ ID NO: 104272 - DNA, 19 bp, Homo sapiens
  siRNA target sequence for TTN (NM_003319.2,15968-15986).
gttgaggctcgactaataa

SEQ ID NO: 104273 - DNA, 19 bp, Homo sapiens
  siRNA target sequence for TTN (NM_003319.2,16026-16044).
gtgaaacagcccactttga

SEQ ID NO: 104274 - DNA, 19 bp, Homo sapiens
  siRNA target sequence for TTN (NM_003319.2,16035-16053).
cccactttgaaattgaact

SEQ ID NO: 104275 - DNA, 19 bp, Homo sapiens
  siRNA target sequence for TTN (NM_003319.2,16201-16219).
ggctgctaatgccaaatct

SEQ ID NO: 104276 - DNA, 19 bp, Homo sapiens
  siRNA target sequence for TTN (NM_003319.2,16241-16259).
gaattgcctcttatcttca

SEQ ID NO: 104277 - DNA, 19 bp, Homo sapiens
  siRNA target sequence for TTN (NM_003319.2,16266-16284).
ctctcagtgatgttaaagt

SEQ ID NO: 104278 - DNA, 19 bp, Homo sapiens
  siRNA target sequence for TTN (NM_003319.2,16379-16397).
gacagatttgagcttataa

SEQ ID NO: 104279 - DNA, 19 bp, Homo sapiens
  siRNA target sequence for TTN (NM_003319.2,16383-16401).
gatttgagcttataaagga

SEQ ID NO: 104280 - DNA, 19 bp, Homo sapiens
  siRNA target sequence for TTN (NM_003319.2,16481-16499).
cacacaagtggcaaactga

SEQ ID NO: 104281 - DNA, 19 bp, Homo sapiens
  siRNA target sequence for TTN (NM_003319.2,16485-16503).
caagtggcaaactgatcat

SEQ ID NO: 104282 - DNA, 19 bp, Homo sapiens
  siRNA target sequence for TTN (NM_003319.2,16505-16523).
gaaggaatccggctcaaat

SEQ ID NO: 104283 - DNA, 19 bp, Homo sapiens
  siRNA target sequence for TTN (NM_003319.2,16509-16527).
gaatccggctcaaattcct

SEQ ID NO: 104284 - DNA, 19 bp, Homo sapiens
  siRNA target sequence for TTN (NM_003319.2,16531-16549).
ccctctcaaagatgtaact

SEQ ID NO: 104285 - DNA, 19 bp, Homo sapiens
  siRNA target sequence for TTN (NM_003319.2,16583-16601).
gagttatctcatgataaca

SEQ ID NO: 104286 - DNA, 19 bp, Homo sapiens
  siRNA target sequence for TTN (NM_003319.2,16604-16622).
cgagttaaatggttcaaga

SEQ ID NO: 104287 - DNA, 19 bp, Homo sapiens
  siRNA target sequence for TTN (NM_003319.2,16641-16659).
ccaccaggtcggtctcaat

SEQ ID NO: 104288 - DNA, 19 bp, Homo sapiens
  siRNA target sequence for TTN (NM_003319.2,16645-16663).
caggtcggtctcaatgcaa

SEQ ID NO: 104289 - DNA, 19 bp, Homo sapiens
  siRNA target sequence for TTN (NM_003319.2,16677-16695).
ctcattcgatcacattcaa

SEQ ID NO: 104290 - DNA, 19 bp, Homo sapiens
  siRNA target sequence for TTN (NM_003319.2,16689-16707).
cattcaaagacctgtctat

SEQ ID NO: 104291 - DNA, 19 bp, Homo sapiens
  siRNA target sequence for TTN (NM_003319.2,16709-16727).
gatgacacctcccaaatta

SEQ ID NO: 104292 - DNA, 19 bp, Homo sapiens
  siRNA target sequence for TTN (NM_003319.2,16714-16732).
cacctcccaaattagagta

SEQ ID NO: 104293 - DNA, 19 bp, Homo sapiens
  siRNA target sequence for TTN (NM_003319.2,16743-16761).
ggatgagttcagaagctaa

SEQ ID NO: 104294 - DNA, 19 bp, Homo sapiens
  siRNA target sequence for TTN (NM_003319.2,16772-16790).
cttgagggagacccatatt

SEQ ID NO: 104295 - DNA, 19 bp, Homo sapiens
  siRNA target sequence for TTN (NM_003319.2,16777-16795).
gggagacccatattttaca

SEQ ID NO: 104296 - DNA, 19 bp, Homo sapiens
  siRNA target sequence for TTN (NM_003319.2,16820-16838).
gtagagaaagatgaagtta

SEQ ID NO: 104297 - DNA, 19 bp, Homo sapiens
  siRNA target sequence for TTN (NM_003319.2,16841-16859).
ctacagtgtgaaattagca

SEQ ID NO: 104298 - DNA, 19 bp, Homo sapiens
  siRNA target sequence for TTN (NM_003319.2,16937-16955).
ggcaagaaacgcatgctaa

SEQ ID NO: 104299 - DNA, 19 bp, Homo sapiens
  siRNA target sequence for TTN (NM_003319.2,16942-16960).
gaaacgcatgctaatccta

SEQ ID NO: 104300 - DNA, 19 bp, Homo sapiens
  siRNA target sequence for TTN (NM_003319.2,17035-17053).
cattgaggatcgggaaatt

SEQ ID NO: 104301 - DNA, 19 bp, Homo sapiens
  siRNA target sequence for TTN (NM_003319.2,17105-17123).
cgctttgaaaccgaaatct

SEQ ID NO: 104302 - DNA, 19 bp, Homo sapiens
  siRNA target sequence for TTN (NM_003319.2,17138-17156).
cacgccaactggaaactca

SEQ ID NO: 104303 - DNA, 19 bp, Homo sapiens
  siRNA target sequence for TTN (NM_003319.2,17178-17196).
cacctgattgtgaaattaa

SEQ ID NO: 104304 - DNA, 19 bp, Homo sapiens
  siRNA target sequence for TTN (NM_003319.2,17289-17307).
gtgcccacctccgagttaa

SEQ ID NO: 104305 - DNA, 19 bp, Homo sapiens
  siRNA target sequence for TTN (NM_003319.2,17321-17339).
ggtcttctgaggcctttaa

SEQ ID NO: 104306 - DNA, 19 bp, Homo sapiens
  siRNA target sequence for TTN (NM_003319.2,17384-17402).
gagctctcctacgaagata

SEQ ID NO: 104307 - DNA, 19 bp, Homo sapiens
  siRNA target sequence for TTN (NM_003319.2,17405-17423).
ccagtggaatggtatctca

SEQ ID NO: 104308 - DNA, 19 bp, Homo sapiens
  siRNA target sequence for TTN (NM_003319.2,17416-17434).
gtatctcaaagggaagaaa

SEQ ID NO: 104309 - DNA, 19 bp, Homo sapiens
  siRNA target sequence for TTN (NM_003319.2,17452-17470).
ggtggtcccacgttcagaa

SEQ ID NO: 104310 - DNA, 19 bp, Homo sapiens
  siRNA target sequence for TTN (NM_003319.2,17494-17512).
gagggatgtaaagttagaa

SEQ ID NO: 104311 - DNA, 19 bp, Homo sapiens
  siRNA target sequence for TTN (NM_003319.2,17555-17573).
cacgccaacctctttgtga

SEQ ID NO: 104312 - DNA, 19 bp, Homo sapiens
  siRNA target sequence for TTN (NM_003319.2,17557-17575).
cgccaacctctttgtgaaa

SEQ ID NO: 104313 - DNA, 19 bp, Homo sapiens
  siRNA target sequence for TTN (NM_003319.2,17576-17594).
gaacccccagttgaattca

SEQ ID NO: 104314 - DNA, 19 bp, Homo sapiens
  siRNA target sequence for TTN (NM_003319.2,17693-17711).
gggacagaaatcctcaaaa

SEQ ID NO: 104315 - DNA, 19 bp, Homo sapiens
  siRNA target sequence for TTN (NM_003319.2,17740-17758).
cagggtcagaaaacttgtt

SEQ ID NO: 104316 - DNA, 19 bp, Homo sapiens
  siRNA target sequence for TTN (NM_003319.2,17743-17761).
ggtcagaaaacttgttata

SEQ ID NO: 104317 - DNA, 19 bp, Homo sapiens
  siRNA target sequence for TTN (NM_003319.2,17790-17808).
catacacttgtgatgctaa

SEQ ID NO: 104318 - DNA, 19 bp, Homo sapiens
  siRNA target sequence for TTN (NM_003319.2,17801-17819).
gatgctaaggattttaaga

SEQ ID NO: 104319 - DNA, 19 bp, Homo sapiens
  siRNA target sequence for TTN (NM_003319.2,17804-17822).
gctaaggattttaagactt

SEQ ID NO: 104320 - DNA, 19 bp, Homo sapiens
  siRNA target sequence for TTN (NM_003319.2,17820-17838).
cttcctgtaacctgaatgt

SEQ ID NO: 104321 - DNA, 19 bp, Homo sapiens
  siRNA target sequence for TTN (NM_003319.2,17843-17861).
cctcctcatgtggaattct

SEQ ID NO: 104322 - DNA, 19 bp, Homo sapiens
  siRNA target sequence for TTN (NM_003319.2,17868-17886).
cactcaccgaccttcaagt

SEQ ID NO: 104323 - DNA, 19 bp, Homo sapiens
  siRNA target sequence for TTN (NM_003319.2,17872-17890).
caccgaccttcaagttaga

SEQ ID NO: 104324 - DNA, 19 bp, Homo sapiens
  siRNA target sequence for TTN (NM_003319.2,17874-17892).
ccgaccttcaagttagaga

SEQ ID NO: 104325 - DNA, 19 bp, Homo sapiens
  siRNA target sequence for TTN (NM_003319.2,17875-17893).
cgaccttcaagttagagaa

SEQ ID NO: 104326 - DNA, 19 bp, Homo sapiens
  siRNA target sequence for TTN (NM_003319.2,17906-17924).
cgatttgagtgtgaacttt

SEQ ID NO: 104327 - DNA, 19 bp, Homo sapiens
  siRNA target sequence for TTN (NM_003319.2,17916-17934).
gtgaactttcccgagaaaa

SEQ ID NO: 104328 - DNA, 19 bp, Homo sapiens
  siRNA target sequence for TTN (NM_003319.2,17921-17939).
ctttcccgagaaaatgcta

SEQ ID NO: 104329 - DNA, 19 bp, Homo sapiens
  siRNA target sequence for TTN (NM_003319.2,17936-17954).
gctaaggttaagtggttta

SEQ ID NO: 104330 - DNA, 19 bp, Homo sapiens
  siRNA target sequence for TTN (NM_003319.2,17941-17959).
ggttaagtggtttaaagat

SEQ ID NO: 104331 - DNA, 19 bp, Homo sapiens
  siRNA target sequence for TTN (NM_003319.2,18006-18024).
gagcagtgcgcattcttgt

SEQ ID NO: 104332 - DNA, 19 bp, Homo sapiens
  siRNA target sequence for TTN (NM_003319.2,18009-18027).
cagtgcgcattcttgtcat

SEQ ID NO: 104333 - DNA, 19 bp, Homo sapiens
  siRNA target sequence for TTN (NM_003319.2,18113-18131).
gaagaagctgtctttacca

SEQ ID NO: 104334 - DNA, 19 bp, Homo sapiens
  siRNA target sequence for TTN (NM_003319.2,18137-18155).
cttgccaacattgaagtta

SEQ ID NO: 104335 - DNA, 19 bp, Homo sapiens
  siRNA target sequence for TTN (NM_003319.2,18141-18159).
ccaacattgaagttagtga

SEQ ID NO: 104336 - DNA, 19 bp, Homo sapiens
  siRNA target sequence for TTN (NM_003319.2,18142-18160).
caacattgaagttagtgaa

SEQ ID NO: 104337 - DNA, 19 bp, Homo sapiens
  siRNA target sequence for TTN (NM_003319.2,18197-18215).
cctggcgcagaagtgattt

SEQ ID NO: 104338 - DNA, 19 bp, Homo sapiens
  siRNA target sequence for TTN (NM_003319.2,18200-18218).
ggcgcagaagtgatttggt

SEQ ID NO: 104339 - DNA, 19 bp, Homo sapiens
  siRNA target sequence for TTN (NM_003319.2,18203-18221).
gcagaagtgatttggtata

SEQ ID NO: 104340 - DNA, 19 bp, Homo sapiens
  siRNA target sequence for TTN (NM_003319.2,18204-18222).
cagaagtgatttggtataa

SEQ ID NO: 104341 - DNA, 19 bp, Homo sapiens
  siRNA target sequence for TTN (NM_003319.2,18282-18300).
gaatcctggtcattcagaa

SEQ ID NO: 104342 - DNA, 19 bp, Homo sapiens
  siRNA target sequence for TTN (NM_003319.2,18350-18368).
cgaaccgatggcaaagtca

SEQ ID NO: 104343 - DNA, 19 bp, Homo sapiens
  siRNA target sequence for TTN (NM_003319.2,18351-18369).
gaaccgatggcaaagtcaa

SEQ ID NO: 104344 - DNA, 19 bp, Homo sapiens
  siRNA target sequence for TTN (NM_003319.2,18354-18372).
ccgatggcaaagtcaaagt

SEQ ID NO: 104345 - DNA, 19 bp, Homo sapiens
  siRNA target sequence for TTN (NM_003319.2,18355-18373).
cgatggcaaagtcaaagta

SEQ ID NO: 104346 - DNA, 19 bp, Homo sapiens
  siRNA target sequence for TTN (NM_003319.2,18440-18458).
gaatttgtctgctctatat

SEQ ID NO: 104347 - DNA, 19 bp, Homo sapiens
  siRNA target sequence for TTN (NM_003319.2,18547-18565).
gagggtcctagttgtgaaa

SEQ ID NO: 104348 - DNA, 19 bp, Homo sapiens
  siRNA target sequence for TTN (NM_003319.2,18550-18568).
ggtcctagttgtgaaagat

SEQ ID NO: 104349 - DNA, 19 bp, Homo sapiens
  siRNA target sequence for TTN (NM_003319.2,18562-18580).
gaaagatgccacattacaa

SEQ ID NO: 104350 - DNA, 19 bp, Homo sapiens
  siRNA target sequence for TTN (NM_003319.2,18627-18645).
ctcacttgacagtcattga

SEQ ID NO: 104351 - DNA, 19 bp, Homo sapiens
  siRNA target sequence for TTN (NM_003319.2,18629-18647).
cacttgacagtcattgaaa

SEQ ID NO: 104352 - DNA, 19 bp, Homo sapiens
  siRNA target sequence for TTN (NM_003319.2,18654-18672).
ggatcgtagttcctcttaa

SEQ ID NO: 104353 - DNA, 19 bp, Homo sapiens
  siRNA target sequence for TTN (NM_003319.2,18678-18696).
cccgggtgaaggaacaaca

SEQ ID NO: 104354 - DNA, 19 bp, Homo sapiens
  siRNA target sequence for TTN (NM_003319.2,18709-18727).
caactgtgaagtcaatact

SEQ ID NO: 104355 - DNA, 19 bp, Homo sapiens
  siRNA target sequence for TTN (NM_003319.2,18731-18749).
ggtgccaaagccaaatggt

SEQ ID NO: 104356 - DNA, 19 bp, Homo sapiens
  siRNA target sequence for TTN (NM_003319.2,18732-18750).
gtgccaaagccaaatggtt

SEQ ID NO: 104357 - DNA, 19 bp, Homo sapiens
  siRNA target sequence for TTN (NM_003319.2,18809-18827).
gtctacaccctcagaatta

SEQ ID NO: 104358 - DNA, 19 bp, Homo sapiens
  siRNA target sequence for TTN (NM_003319.2,18842-18860).
gatgaccaagccaactata

SEQ ID NO: 104359 - DNA, 19 bp, Homo sapiens
  siRNA target sequence for TTN (NM_003319.2,18848-18866).
caagccaactataatgtgt

SEQ ID NO: 104360 - DNA, 19 bp, Homo sapiens
  siRNA target sequence for TTN (NM_003319.2,18900-18918).
gtgcagccaatctaatagt

SEQ ID NO: 104361 - DNA, 19 bp, Homo sapiens
  siRNA target sequence for TTN (NM_003319.2,18903-18921).
cagccaatctaatagtaga

SEQ ID NO: 104362 - DNA, 19 bp, Homo sapiens
  siRNA target sequence for TTN (NM_003319.2,18925-18943).
ggaagaccttaggattgtt

SEQ ID NO: 104363 - DNA, 19 bp, Homo sapiens
  siRNA target sequence for TTN (NM_003319.2,18936-18954).
ggattgttgagcctcttaa

SEQ ID NO: 104364 - DNA, 19 bp, Homo sapiens
  siRNA target sequence for TTN (NM_003319.2,18937-18955).
gattgttgagcctcttaaa

SEQ ID NO: 104365 - DNA, 19 bp, Homo sapiens
  siRNA target sequence for TTN (NM_003319.2,19000-19018).
ggtgaatcgtctcaatgta

SEQ ID NO: 104366 - DNA, 19 bp, Homo sapiens
  siRNA target sequence for TTN (NM_003319.2,19001-19019).
gtgaatcgtctcaatgtaa

SEQ ID NO: 104367 - DNA, 19 bp, Homo sapiens
  siRNA target sequence for TTN (NM_003319.2,19003-19021).
gaatcgtctcaatgtaaca

SEQ ID NO: 104368 - DNA, 19 bp, Homo sapiens
  siRNA target sequence for TTN (NM_003319.2,19060-19078).
caaccgtgtctcatacaga

SEQ ID NO: 104369 - DNA, 19 bp, Homo sapiens
  siRNA target sequence for TTN (NM_003319.2,19067-19085).
gtctcatacagagttgata

SEQ ID NO: 104370 - DNA, 19 bp, Homo sapiens
  siRNA target sequence for TTN (NM_003319.2,19071-19089).
catacagagttgataagta

SEQ ID NO: 104371 - DNA, 19 bp, Homo sapiens
  siRNA target sequence for TTN (NM_003319.2,19125-19143).
cagatgaaggtgaatacat

SEQ ID NO: 104372 - DNA, 19 bp, Homo sapiens
  siRNA target sequence for TTN (NM_003319.2,19145-19163).
gtcactgctggacaagata

SEQ ID NO: 104373 - DNA, 19 bp, Homo sapiens
  siRNA target sequence for TTN (NM_003319.2,19173-19191).
ctgagcttctcatcataga

SEQ ID NO: 104374 - DNA, 19 bp, Homo sapiens
  siRNA target sequence for TTN (NM_003319.2,19356-19374).
gtatacacagactcattat

SEQ ID NO: 104375 - DNA, 19 bp, Homo sapiens
  siRNA target sequence for TTN (NM_003319.2,19363-19381).
cagactcattataaaagat

SEQ ID NO: 104376 - DNA, 19 bp, Homo sapiens
  siRNA target sequence for TTN (NM_003319.2,19429-19447).
gaagtctcgtgctagactt

SEQ ID NO: 104377 - DNA, 19 bp, Homo sapiens
  siRNA target sequence for TTN (NM_003319.2,19434-19452).
ctcgtgctagactttttgt

SEQ ID NO: 104378 - DNA, 19 bp, Homo sapiens
  siRNA target sequence for TTN (NM_003319.2,19477-19495).
caggcctccacaagatatt

SEQ ID NO: 104379 - DNA, 19 bp, Homo sapiens
  siRNA target sequence for TTN (NM_003319.2,19553-19571).
gaagtccaatggctaagaa

SEQ ID NO: 104380 - DNA, 19 bp, Homo sapiens
  siRNA target sequence for TTN (NM_003319.2,19595-19613).
gataaacaccagatgatga

SEQ ID NO: 104381 - DNA, 19 bp, Homo sapiens
  siRNA target sequence for TTN (NM_003319.2,19624-19642).
gatacatcgactacagatt

SEQ ID NO: 104382 - DNA, 19 bp, Homo sapiens
  siRNA target sequence for TTN (NM_003319.2,19632-19650).
gactacagatttgtgatat

SEQ ID NO: 104383 - DNA, 19 bp, Homo sapiens
  siRNA target sequence for TTN (NM_003319.2,19658-19676).
cgtgaccagggtgaataca

SEQ ID NO: 104384 - DNA, 19 bp, Homo sapiens
  siRNA target sequence for TTN (NM_003319.2,19701-19719).
ccagagctaagcttgaact

SEQ ID NO: 104385 - DNA, 19 bp, Homo sapiens
  siRNA target sequence for TTN (NM_003319.2,19838-19856).
gaaaatgaacctttatcta

SEQ ID NO: 104386 - DNA, 19 bp, Homo sapiens
  siRNA target sequence for TTN (NM_003319.2,19877-19895).
gctgaacaaacttctttca

SEQ ID NO: 104387 - DNA, 19 bp, Homo sapiens
  siRNA target sequence for TTN (NM_003319.2,19921-19939).
caaagggaggtataaaatt

SEQ ID NO: 104388 - DNA, 19 bp, Homo sapiens
  siRNA target sequence for TTN (NM_003319.2,20001-20019).
ctgggccagtacgtaactt

SEQ ID NO: 104389 - DNA, 19 bp, Homo sapiens
  siRNA target sequence for TTN (NM_003319.2,20004-20022).
ggccagtacgtaacttaga

SEQ ID NO: 104390 - DNA, 19 bp, Homo sapiens
  siRNA target sequence for TTN (NM_003319.2,20005-20023).
gccagtacgtaacttagaa

SEQ ID NO: 104391 - DNA, 19 bp, Homo sapiens
  siRNA target sequence for TTN (NM_003319.2,20007-20025).
cagtacgtaacttagaagt

SEQ ID NO: 104392 - DNA, 19 bp, Homo sapiens
  siRNA target sequence for TTN (NM_003319.2,20089-20107).
caaaatcataggttacgtt

SEQ ID NO: 104393 - DNA, 19 bp, Homo sapiens
  siRNA target sequence for TTN (NM_003319.2,20095-20113).
cataggttacgttgttgaa

SEQ ID NO: 104394 - DNA, 19 bp, Homo sapiens
  siRNA target sequence for TTN (NM_003319.2,20219-20237).
cgtgtgagtgcaagaaaca

SEQ ID NO: 104395 - DNA, 19 bp, Homo sapiens
  siRNA target sequence for TTN (NM_003319.2,20254-20272).
gccagtagaaactgacaat

SEQ ID NO: 104396 - DNA, 19 bp, Homo sapiens
  siRNA target sequence for TTN (NM_003319.2,20329-20347).
cactgatgtgaatcgattt

SEQ ID NO: 104397 - DNA, 19 bp, Homo sapiens
  siRNA target sequence for TTN (NM_003319.2,20365-20383).
ggaaccaccagagtatgat

SEQ ID NO: 104398 - DNA, 19 bp, Homo sapiens
  siRNA target sequence for TTN (NM_003319.2,20388-20406).
gtgctgagatcacaaacta

SEQ ID NO: 104399 - DNA, 19 bp, Homo sapiens
  siRNA target sequence for TTN (NM_003319.2,20398-20416).
cacaaactacgtcattgaa

SEQ ID NO: 104400 - DNA, 19 bp, Homo sapiens
  siRNA target sequence for TTN (NM_003319.2,20400-20418).
caaactacgtcattgaatt

SEQ ID NO: 104401 - DNA, 19 bp, Homo sapiens
  siRNA target sequence for TTN (NM_003319.2,20473-20491).
cctgtctgcaactgttact

SEQ ID NO: 104402 - DNA, 19 bp, Homo sapiens
  siRNA target sequence for TTN (NM_003319.2,20521-20539).
ccgagtgagagcccaaaat

SEQ ID NO: 104403 - DNA, 19 bp, Homo sapiens
  siRNA target sequence for TTN (NM_003319.2,20525-20543).
gtgagagcccaaaatcgaa

SEQ ID NO: 104404 - DNA, 19 bp, Homo sapiens
  siRNA target sequence for TTN (NM_003319.2,20569-20587).
cacacccttcgtcaaagtt

SEQ ID NO: 104405 - DNA, 19 bp, Homo sapiens
  siRNA target sequence for TTN (NM_003319.2,20604-20622).
gaccaagtcctcctgtaaa

SEQ ID NO: 104406 - DNA, 19 bp, Homo sapiens
  siRNA target sequence for TTN (NM_003319.2,20694-20712).
gcccaatattaggctatat

SEQ ID NO: 104407 - DNA, 19 bp, Homo sapiens
  siRNA target sequence for TTN (NM_003319.2,20695-20713).
cccaatattaggctatata

SEQ ID NO: 104408 - DNA, 19 bp, Homo sapiens
  siRNA target sequence for TTN (NM_003319.2,20696-20714).
ccaatattaggctatataa

SEQ ID NO: 104409 - DNA, 19 bp, Homo sapiens
  siRNA target sequence for TTN (NM_003319.2,20745-20763).
ggattcgttgcaatatgaa

SEQ ID NO: 104410 - DNA, 19 bp, Homo sapiens
  siRNA target sequence for TTN (NM_003319.2,20746-20764).
gattcgttgcaatatgaaa

SEQ ID NO: 104411 - DNA, 19 bp, Homo sapiens
  siRNA target sequence for TTN (NM_003319.2,20751-20769).
gttgcaatatgaaacttgt

SEQ ID NO: 104412 - DNA, 19 bp, Homo sapiens
  siRNA target sequence for TTN (NM_003319.2,20884-20902).
caccgctgacgatgcattt

SEQ ID NO: 104413 - DNA, 19 bp, Homo sapiens
  siRNA target sequence for TTN (NM_003319.2,20886-20904).
ccgctgacgatgcatttgt

SEQ ID NO: 104414 - DNA, 19 bp, Homo sapiens
  siRNA target sequence for TTN (NM_003319.2,20887-20905).
cgctgacgatgcatttgtt

SEQ ID NO: 104415 - DNA, 19 bp, Homo sapiens
  siRNA target sequence for TTN (NM_003319.2,20889-20907).
ctgacgatgcatttgttga

SEQ ID NO: 104416 - DNA, 19 bp, Homo sapiens
  siRNA target sequence for TTN (NM_003319.2,20903-20921).
gttgaaccaacaatggatt

SEQ ID NO: 104417 - DNA, 19 bp, Homo sapiens
  siRNA target sequence for TTN (NM_003319.2,20948-20966).
gttattgtcccaaatccta

SEQ ID NO: 104418 - DNA, 19 bp, Homo sapiens
  siRNA target sequence for TTN (NM_003319.2,20971-20989).
gatcctggttccaagtaca

SEQ ID NO: 104419 - DNA, 19 bp, Homo sapiens
  siRNA target sequence for TTN (NM_003319.2,20981-20999).
ccaagtacaggctatccaa

SEQ ID NO: 104420 - DNA, 19 bp, Homo sapiens
  siRNA target sequence for TTN (NM_003319.2,21042-21060).
caggggaccgggtgaaaat

SEQ ID NO: 104421 - DNA, 19 bp, Homo sapiens
  siRNA target sequence for TTN (NM_003319.2,21075-21093).
cctatgccgaacttgtcat

SEQ ID NO: 104422 - DNA, 19 bp, Homo sapiens
  siRNA target sequence for TTN (NM_003319.2,21076-21094).
ctatgccgaacttgtcatt

SEQ ID NO: 104423 - DNA, 19 bp, Homo sapiens
  siRNA target sequence for TTN (NM_003319.2,21108-21126).
gttcagacaagggcattta

SEQ ID NO: 104424 - DNA, 19 bp, Homo sapiens
  siRNA target sequence for TTN (NM_003319.2,21120-21138).
gcatttatacactgaaatt

SEQ ID NO: 104425 - DNA, 19 bp, Homo sapiens
  siRNA target sequence for TTN (NM_003319.2,21198-21216).
gtgcacccaaagaattgaa

SEQ ID NO: 104426 - DNA, 19 bp, Homo sapiens
  siRNA target sequence for TTN (NM_003319.2,21200-21218).
gcacccaaagaattgaaat

SEQ ID NO: 104427 - DNA, 19 bp, Homo sapiens
  siRNA target sequence for TTN (NM_003319.2,21201-21219).
cacccaaagaattgaaatt

SEQ ID NO: 104428 - DNA, 19 bp, Homo sapiens
  siRNA target sequence for TTN (NM_003319.2,21235-21253).
ggactcagtacatttgact

SEQ ID NO: 104429 - DNA, 19 bp, Homo sapiens
  siRNA target sequence for TTN (NM_003319.2,21256-21274).
ggaaccacctgatgatgat

SEQ ID NO: 104430 - DNA, 19 bp, Homo sapiens
  siRNA target sequence for TTN (NM_003319.2,21322-21340).
ccggaaaacatggactaaa

SEQ ID NO: 104431 - DNA, 19 bp, Homo sapiens
  siRNA target sequence for TTN (NM_003319.2,21324-21342).
ggaaaacatggactaaagt

SEQ ID NO: 104432 - DNA, 19 bp, Homo sapiens
  siRNA target sequence for TTN (NM_003319.2,21349-21367).
ctttgtgactgatctagaa

SEQ ID NO: 104433 - DNA, 19 bp, Homo sapiens
  siRNA target sequence for TTN (NM_003319.2,21413-21431).
gtttgtgctcgtaacaaat

SEQ ID NO: 104434 - DNA, 19 bp, Homo sapiens
  siRNA target sequence for TTN (NM_003319.2,21497-21515).
gacccaccagagaatgtta

SEQ ID NO: 104435 - DNA, 19 bp, Homo sapiens
  siRNA target sequence for TTN (NM_003319.2,21524-21542).
gatcgaacagccaatagca

SEQ ID NO: 104436 - DNA, 19 bp, Homo sapiens
  siRNA target sequence for TTN (NM_003319.2,21531-21549).
cagccaatagcatcttctt

SEQ ID NO: 104437 - DNA, 19 bp, Homo sapiens
  siRNA target sequence for TTN (NM_003319.2,21533-21551).
gccaatagcatcttcttaa

SEQ ID NO: 104438 - DNA, 19 bp, Homo sapiens
  siRNA target sequence for TTN (NM_003319.2,21578-21596).
ggttcacgcatcaaaggat

SEQ ID NO: 104439 - DNA, 19 bp, Homo sapiens
  siRNA target sequence for TTN (NM_003319.2,21579-21597).
gttcacgcatcaaaggata

SEQ ID NO: 104440 - DNA, 19 bp, Homo sapiens
  siRNA target sequence for TTN (NM_003319.2,21585-21603).
gcatcaaaggatatatagt

SEQ ID NO: 104441 - DNA, 19 bp, Homo sapiens
  siRNA target sequence for TTN (NM_003319.2,21710-21728).
cgcgtgaaggccttaaaca

SEQ ID NO: 104442 - DNA, 19 bp, Homo sapiens
  siRNA target sequence for TTN (NM_003319.2,21821-21839).
cttgctggtctcactgtaa

SEQ ID NO: 104443 - DNA, 19 bp, Homo sapiens
  siRNA target sequence for TTN (NM_003319.2,21876-21894).
ccggaaaacctgaacctaa

SEQ ID NO: 104444 - DNA, 19 bp, Homo sapiens
  siRNA target sequence for TTN (NM_003319.2,21929-21947).
caggacaaaagaattacca

SEQ ID NO: 104445 - DNA, 19 bp, Homo sapiens
  siRNA target sequence for TTN (NM_003319.2,21939-21957).
gaattaccattgaaaatgt

SEQ ID NO: 104446 - DNA, 19 bp, Homo sapiens
  siRNA target sequence for TTN (NM_003319.2,21974-21992).
gtgactattgttgatagta

SEQ ID NO: 104447 - DNA, 19 bp, Homo sapiens
  siRNA target sequence for TTN (NM_003319.2,21999-22017).
gtgacactggcacatatat

SEQ ID NO: 104448 - DNA, 19 bp, Homo sapiens
  siRNA target sequence for TTN (NM_003319.2,22060-22078).
ggaagtgaacgtcttagat

SEQ ID NO: 104449 - DNA, 19 bp, Homo sapiens
  siRNA target sequence for TTN (NM_003319.2,22061-22079).
gaagtgaacgtcttagata

SEQ ID NO: 104450 - DNA, 19 bp, Homo sapiens
  siRNA target sequence for TTN (NM_003319.2,22099-22117).
ctttgacatcacagatgta

SEQ ID NO: 104451 - DNA, 19 bp, Homo sapiens
  siRNA target sequence for TTN (NM_003319.2,22105-22123).
catcacagatgtaaccaat

SEQ ID NO: 104452 - DNA, 19 bp, Homo sapiens
  siRNA target sequence for TTN (NM_003319.2,22192-22210).
ggagagacgagcaactgat

SEQ ID NO: 104453 - DNA, 19 bp, Homo sapiens
  siRNA target sequence for TTN (NM_003319.2,22195-22213).
gagacgagcaactgatagt

SEQ ID NO: 104454 - DNA, 19 bp, Homo sapiens
  siRNA target sequence for TTN (NM_003319.2,22197-22215).
gacgagcaactgatagtga

SEQ ID NO: 104455 - DNA, 19 bp, Homo sapiens
  siRNA target sequence for TTN (NM_003319.2,22236-22254).
ccaccgtcaaggatacaaa

SEQ ID NO: 104456 - DNA, 19 bp, Homo sapiens
  siRNA target sequence for TTN (NM_003319.2,22239-22257).
ccgtcaaggatacaaactt

SEQ ID NO: 104457 - DNA, 19 bp, Homo sapiens
  siRNA target sequence for TTN (NM_003319.2,22266-22284).
ccaaattaatccccaataa

SEQ ID NO: 104458 - DNA, 19 bp, Homo sapiens
  siRNA target sequence for TTN (NM_003319.2,22267-22285).
caaattaatccccaataaa

SEQ ID NO: 104459 - DNA, 19 bp, Homo sapiens
  siRNA target sequence for TTN (NM_003319.2,22278-22296).
ccaataaagagtacatctt

SEQ ID NO: 104460 - DNA, 19 bp, Homo sapiens
  siRNA target sequence for TTN (NM_003319.2,22347-22365).
ctccaataacagccaaata

SEQ ID NO: 104461 - DNA, 19 bp, Homo sapiens
  siRNA target sequence for TTN (NM_003319.2,22394-22412).
cgcctagaaccttctgata

SEQ ID NO: 104462 - DNA, 19 bp, Homo sapiens
  siRNA target sequence for TTN (NM_003319.2,22395-22413).
gcctagaaccttctgatat

SEQ ID NO: 104463 - DNA, 19 bp, Homo sapiens
  siRNA target sequence for TTN (NM_003319.2,22397-22415).
ctagaaccttctgatatca

SEQ ID NO: 104464 - DNA, 19 bp, Homo sapiens
  siRNA target sequence for TTN (NM_003319.2,22400-22418).
gaaccttctgatatcacta

SEQ ID NO: 104465 - DNA, 19 bp, Homo sapiens
  siRNA target sequence for TTN (NM_003319.2,22404-22422).
cttctgatatcactaaaga

SEQ ID NO: 104466 - DNA, 19 bp, Homo sapiens
  siRNA target sequence for TTN (NM_003319.2,22441-22459).
gtgtgagccagatgatgat

SEQ ID NO: 104467 - DNA, 19 bp, Homo sapiens
  siRNA target sequence for TTN (NM_003319.2,22479-22497).
gatactgggttgaaagact

SEQ ID NO: 104468 - DNA, 19 bp, Homo sapiens
  siRNA target sequence for TTN (NM_003319.2,22518-22536).
gggttagatgcaataagat

SEQ ID NO: 104469 - DNA, 19 bp, Homo sapiens
  siRNA target sequence for TTN (NM_003319.2,22560-22578).
gagtgaaaggtctcactaa

SEQ ID NO: 104470 - DNA, 19 bp, Homo sapiens
  siRNA target sequence for TTN (NM_003319.2,22562-22580).
gtgaaaggtctcactaata

SEQ ID NO: 104471 - DNA, 19 bp, Homo sapiens
  siRNA target sequence for TTN (NM_003319.2,22599-22617).
gtgtgttggctgaaaatct

SEQ ID NO: 104472 - DNA, 19 bp, Homo sapiens
  siRNA target sequence for TTN (NM_003319.2,22644-22662).
caactgaaccaatcttaat

SEQ ID NO: 104473 - DNA, 19 bp, Homo sapiens
  siRNA target sequence for TTN (NM_003319.2,22647-22665).
ctgaaccaatcttaataaa

SEQ ID NO: 104474 - DNA, 19 bp, Homo sapiens
  siRNA target sequence for TTN (NM_003319.2,22719-22737).
gcaaaacatcagtaaggtt

SEQ ID NO: 104475 - DNA, 19 bp, Homo sapiens
  siRNA target sequence for TTN (NM_003319.2,22767-22785).
gtgcaaagattgagtctta

SEQ ID NO: 104476 - DNA, 19 bp, Homo sapiens
  siRNA target sequence for TTN (NM_003319.2,22798-22816).
gctgaagactggaacagat

SEQ ID NO: 104477 - DNA, 19 bp, Homo sapiens
  siRNA target sequence for TTN (NM_003319.2,22958-22976).
ctttgccgggagaagctat

SEQ ID NO: 104478 - DNA, 19 bp, Homo sapiens
  siRNA target sequence for TTN (NM_003319.2,22963-22981).
ccgggagaagctatatcct

SEQ ID NO: 104479 - DNA, 19 bp, Homo sapiens
  siRNA target sequence for TTN (NM_003319.2,22989-23007).
caccacgctggcttgaagt

SEQ ID NO: 104480 - DNA, 19 bp, Homo sapiens
  siRNA target sequence for TTN (NM_003319.2,22991-23009).
ccacgctggcttgaagtta

SEQ ID NO: 104481 - DNA, 19 bp, Homo sapiens
  siRNA target sequence for TTN (NM_003319.2,22995-23013).
gctggcttgaagttattaa

SEQ ID NO: 104482 - DNA, 19 bp, Homo sapiens
  siRNA target sequence for TTN (NM_003319.2,23043-23061).
ggacagttcctgagaaaga

SEQ ID NO: 104483 - DNA, 19 bp, Homo sapiens
  siRNA target sequence for TTN (NM_003319.2,23112-23130).
gaaaaggctggcaaacagt

SEQ ID NO: 104484 - DNA, 19 bp, Homo sapiens
  siRNA target sequence for TTN (NM_003319.2,23173-23191).
gactgagggctctttatat

SEQ ID NO: 104485 - DNA, 19 bp, Homo sapiens
  siRNA target sequence for TTN (NM_003319.2,23229-23247).
gcgactacaccgaaattga

SEQ ID NO: 104486 - DNA, 19 bp, Homo sapiens
  siRNA target sequence for TTN (NM_003319.2,23324-23342).
cgacatgttgacctaaagt

SEQ ID NO: 104487 - DNA, 19 bp, Homo sapiens
  siRNA target sequence for TTN (NM_003319.2,23370-23388).
gaccaatacagagatatgt

SEQ ID NO: 104488 - DNA, 19 bp, Homo sapiens
  siRNA target sequence for TTN (NM_003319.2,23372-23390).
ccaatacagagatatgtca

SEQ ID NO: 104489 - DNA, 19 bp, Homo sapiens
  siRNA target sequence for TTN (NM_003319.2,23382-23400).
gatatgtcattgagaagaa

SEQ ID NO: 104490 - DNA, 19 bp, Homo sapiens
  siRNA target sequence for TTN (NM_003319.2,23441-23459).
gcaggacctgactgtaact

SEQ ID NO: 104491 - DNA, 19 bp, Homo sapiens
  siRNA target sequence for TTN (NM_003319.2,23450-23468).
gactgtaacttcagagtaa

SEQ ID NO: 104492 - DNA, 19 bp, Homo sapiens
  siRNA target sequence for TTN (NM_003319.2,23454-23472).
gtaacttcagagtaactga

SEQ ID NO: 104493 - DNA, 19 bp, Homo sapiens
  siRNA target sequence for TTN (NM_003319.2,23503-23521).
ggttcgggctgaaaatgaa

SEQ ID NO: 104494 - DNA, 19 bp, Homo sapiens
  siRNA target sequence for TTN (NM_003319.2,23548-23566).
cacagaaatcctatccatt

SEQ ID NO: 104495 - DNA, 19 bp, Homo sapiens
  siRNA target sequence for TTN (NM_003319.2,23669-23687).
ggaagtcctatcataggat

SEQ ID NO: 104496 - DNA, 19 bp, Homo sapiens
  siRNA target sequence for TTN (NM_003319.2,23670-23688).
gaagtcctatcataggata

SEQ ID NO: 104497 - DNA, 19 bp, Homo sapiens
  siRNA target sequence for TTN (NM_003319.2,23708-23726).
gtaggcactgagaaatgga

SEQ ID NO: 104498 - DNA, 19 bp, Homo sapiens
  siRNA target sequence for TTN (NM_003319.2,23719-23737).
gaaatggatgagagttaat

SEQ ID NO: 104499 - DNA, 19 bp, Homo sapiens
  siRNA target sequence for TTN (NM_003319.2,23732-23750).
gttaattctcgcccaataa

SEQ ID NO: 104500 - DNA, 19 bp, Homo sapiens
  siRNA target sequence for TTN (NM_003319.2,23834-23852).
gtcagcgagccatctgaaa

SEQ ID NO: 104501 - DNA, 19 bp, Homo sapiens
  siRNA target sequence for TTN (NM_003319.2,23839-23857).
cgagccatctgaaatctct

SEQ ID NO: 104502 - DNA, 19 bp, Homo sapiens
  siRNA target sequence for TTN (NM_003319.2,23905-23923).
ggagactcatgacattatt

SEQ ID NO: 104503 - DNA, 19 bp, Homo sapiens
  siRNA target sequence for TTN (NM_003319.2,23971-23989).
cccagttccaactgttagt

SEQ ID NO: 104504 - DNA, 19 bp, Homo sapiens
  siRNA target sequence for TTN (NM_003319.2,23972-23990).
ccagttccaactgttagtt

SEQ ID NO: 104505 - DNA, 19 bp, Homo sapiens
  siRNA target sequence for TTN (NM_003319.2,23982-24000).
ctgttagttggcataaaga

SEQ ID NO: 104506 - DNA, 19 bp, Homo sapiens
  siRNA target sequence for TTN (NM_003319.2,24017-24035).
gcaagtgatagattaacaa

SEQ ID NO: 104507 - DNA, 19 bp, Homo sapiens
  siRNA target sequence for TTN (NM_003319.2,24018-24036).
caagtgatagattaacaat

SEQ ID NO: 104508 - DNA, 19 bp, Homo sapiens
  siRNA target sequence for TTN (NM_003319.2,24083-24101).
cgtgcagatgccggaattt

SEQ ID NO: 104509 - DNA, 19 bp, Homo sapiens
  siRNA target sequence for TTN (NM_003319.2,24084-24102).
gtgcagatgccggaattta

SEQ ID NO: 104510 - DNA, 19 bp, Homo sapiens
  siRNA target sequence for TTN (NM_003319.2,24086-24104).
gcagatgccggaatttata

SEQ ID NO: 104511 - DNA, 19 bp, Homo sapiens
  siRNA target sequence for TTN (NM_003319.2,24089-24107).
gatgccggaatttatacca

SEQ ID NO: 104512 - DNA, 19 bp, Homo sapiens
  siRNA target sequence for TTN (NM_003319.2,24092-24110).
gccggaatttataccatta

SEQ ID NO: 104513 - DNA, 19 bp, Homo sapiens
  siRNA target sequence for TTN (NM_003319.2,24105-24123).
ccattacactggagaataa

SEQ ID NO: 104514 - DNA, 19 bp, Homo sapiens
  siRNA target sequence for TTN (NM_003319.2,24132-24150).
cagcaacagcctcaatcaa

SEQ ID NO: 104515 - DNA, 19 bp, Homo sapiens
  siRNA target sequence for TTN (NM_003319.2,24138-24156).
cagcctcaatcaatgtcaa

SEQ ID NO: 104516 - DNA, 19 bp, Homo sapiens
  siRNA target sequence for TTN (NM_003319.2,24170-24188).
cctggaccatgcaaagata

SEQ ID NO: 104517 - DNA, 19 bp, Homo sapiens
  siRNA target sequence for TTN (NM_003319.2,24252-24270).
gtggaaccccaattcttca

SEQ ID NO: 104518 - DNA, 19 bp, Homo sapiens
  siRNA target sequence for TTN (NM_003319.2,24254-24272).
ggaaccccaattcttcatt

SEQ ID NO: 104519 - DNA, 19 bp, Homo sapiens
  siRNA target sequence for TTN (NM_003319.2,24255-24273).
gaaccccaattcttcatta

SEQ ID NO: 104520 - DNA, 19 bp, Homo sapiens
  siRNA target sequence for TTN (NM_003319.2,24294-24312).
ctgggaggagaacatatat

SEQ ID NO: 104521 - DNA, 19 bp, Homo sapiens
  siRNA target sequence for TTN (NM_003319.2,24352-24370).
gaaggatctcataccaaat

SEQ ID NO: 104522 - DNA, 19 bp, Homo sapiens
  siRNA target sequence for TTN (NM_003319.2,24387-24405).
gtgttaaagcagtcaacaa

SEQ ID NO: 104523 - DNA, 19 bp, Homo sapiens
  siRNA target sequence for TTN (NM_003319.2,24407-24425).
gttggtggaggagaatata

SEQ ID NO: 104524 - DNA, 19 bp, Homo sapiens
  siRNA target sequence for TTN (NM_003319.2,24469-24487).
ccctgatccacctgtagat

SEQ ID NO: 104525 - DNA, 19 bp, Homo sapiens
  siRNA target sequence for TTN (NM_003319.2,24507-24525).
cagcggaggcaatgactat

SEQ ID NO: 104526 - DNA, 19 bp, Homo sapiens
  siRNA target sequence for TTN (NM_003319.2,24509-24527).
gcggaggcaatgactatta

SEQ ID NO: 104527 - DNA, 19 bp, Homo sapiens
  siRNA target sequence for TTN (NM_003319.2,24511-24529).
ggaggcaatgactattaca

SEQ ID NO: 104528 - DNA, 19 bp, Homo sapiens
  siRNA target sequence for TTN (NM_003319.2,24571-24589).
ctacatcatagagaagatt

SEQ ID NO: 104529 - DNA, 19 bp, Homo sapiens
  siRNA target sequence for TTN (NM_003319.2,24632-24650).
gtaccaatcctgacctata

SEQ ID NO: 104530 - DNA, 19 bp, Homo sapiens
  siRNA target sequence for TTN (NM_003319.2,24668-24686).
gaggggaaagagtaccaat

SEQ ID NO: 104531 - DNA, 19 bp, Homo sapiens
  siRNA target sequence for TTN (NM_003319.2,24733-24751).
ggctactcctccaaccaaa

SEQ ID NO: 104532 - DNA, 19 bp, Homo sapiens
  siRNA target sequence for TTN (NM_003319.2,24789-24807).
gaacaagcctagaagtgaa

SEQ ID NO: 104533 - DNA, 19 bp, Homo sapiens
  siRNA target sequence for TTN (NM_003319.2,24846-24864).
gatcaccttacccaactat

SEQ ID NO: 104534 - DNA, 19 bp, Homo sapiens
  siRNA target sequence for TTN (NM_003319.2,24856-24874).
cccaactattacatggata

SEQ ID NO: 104535 - DNA, 19 bp, Homo sapiens
  siRNA target sequence for TTN (NM_003319.2,24861-24879).
ctattacatggataaagga

SEQ ID NO: 104536 - DNA, 19 bp, Homo sapiens
  siRNA target sequence for TTN (NM_003319.2,24984-25002).
cacagcgtttgagtattga

SEQ ID NO: 104537 - DNA, 19 bp, Homo sapiens
  siRNA target sequence for TTN (NM_003319.2,24986-25004).
cagcgtttgagtattgaca

SEQ ID NO: 104538 - DNA, 19 bp, Homo sapiens
  siRNA target sequence for TTN (NM_003319.2,25027-25045).
gctacgcgtccgagattct

SEQ ID NO: 104539 - DNA, 19 bp, Homo sapiens
  siRNA target sequence for TTN (NM_003319.2,25052-25070).
cctgaccatggtctgtata

SEQ ID NO: 104540 - DNA, 19 bp, Homo sapiens
  siRNA target sequence for TTN (NM_003319.2,25066-25084).
gtatatgatcaaagttgaa

SEQ ID NO: 104541 - DNA, 19 bp, Homo sapiens
  siRNA target sequence for TTN (NM_003319.2,25134-25152).
caccgggaccaccaatcaa

SEQ ID NO: 104542 - DNA, 19 bp, Homo sapiens
  siRNA target sequence for TTN (NM_003319.2,25136-25154).
ccgggaccaccaatcaact

SEQ ID NO: 104543 - DNA, 19 bp, Homo sapiens
  siRNA target sequence for TTN (NM_003319.2,25137-25155).
cgggaccaccaatcaactt

SEQ ID NO: 104544 - DNA, 19 bp, Homo sapiens
  siRNA target sequence for TTN (NM_003319.2,25138-25156).
gggaccaccaatcaacttt

SEQ ID NO: 104545 - DNA, 19 bp, Homo sapiens
  siRNA target sequence for TTN (NM_003319.2,25198-25216).
ggaaccaccccttgatgat

SEQ ID NO: 104546 - DNA, 19 bp, Homo sapiens
  siRNA target sequence for TTN (NM_003319.2,25220-25238).
ggcagtgaaatcataaact

SEQ ID NO: 104547 - DNA, 19 bp, Homo sapiens
  siRNA target sequence for TTN (NM_003319.2,25221-25239).
gcagtgaaatcataaacta

SEQ ID NO: 104548 - DNA, 19 bp, Homo sapiens
  siRNA target sequence for TTN (NM_003319.2,25282-25300).
gattgttgtcacttcaaca

SEQ ID NO: 104549 - DNA, 19 bp, Homo sapiens
  siRNA target sequence for TTN (NM_003319.2,25291-25309).
cacttcaacacttagacat

SEQ ID NO: 104550 - DNA, 19 bp, Homo sapiens
  siRNA target sequence for TTN (NM_003319.2,25388-25406).
ggtccaccatgtgtttcaa

SEQ ID NO: 104551 - DNA, 19 bp, Homo sapiens
  siRNA target sequence for TTN (NM_003319.2,25469-25487).
gatgttaccagcaacagta

SEQ ID NO: 104552 - DNA, 19 bp, Homo sapiens
  siRNA target sequence for TTN (NM_003319.2,25489-25507).
gctagtgaaatggaatgaa

SEQ ID NO: 104553 - DNA, 19 bp, Homo sapiens
  siRNA target sequence for TTN (NM_003319.2,25676-25694).
gctggacctggaaagttca

SEQ ID NO: 104554 - DNA, 19 bp, Homo sapiens
  siRNA target sequence for TTN (NM_003319.2,25766-25784).
gacacaagctctacaacta

SEQ ID NO: 104555 - DNA, 19 bp, Homo sapiens
  siRNA target sequence for TTN (NM_003319.2,25770-25788).
caagctctacaactattga

SEQ ID NO: 104556 - DNA, 19 bp, Homo sapiens
  siRNA target sequence for TTN (NM_003319.2,25773-25791).
gctctacaactattgaact

SEQ ID NO: 104557 - DNA, 19 bp, Homo sapiens
  siRNA target sequence for TTN (NM_003319.2,25797-25815).
gggaacccccagctttcaa

SEQ ID NO: 104558 - DNA, 19 bp, Homo sapiens
  siRNA target sequence for TTN (NM_003319.2,25852-25870).
gcagttggttggcacaaat

SEQ ID NO: 104559 - DNA, 19 bp, Homo sapiens
  siRNA target sequence for TTN (NM_003319.2,25855-25873).
gttggttggcacaaatgaa

SEQ ID NO: 104560 - DNA, 19 bp, Homo sapiens
  siRNA target sequence for TTN (NM_003319.2,25908-25926).
gtcagtacaccgtcaaaga

SEQ ID NO: 104561 - DNA, 19 bp, Homo sapiens
  siRNA target sequence for TTN (NM_003319.2,25910-25928).
cagtacaccgtcaaagaaa

SEQ ID NO: 104562 - DNA, 19 bp, Homo sapiens
  siRNA target sequence for TTN (NM_003319.2,25936-25954).
gggtgctgattacaaactt

SEQ ID NO: 104563 - DNA, 19 bp, Homo sapiens
  siRNA target sequence for TTN (NM_003319.2,26058-26076).
ctgtcaagggtggaataca

SEQ ID NO: 104564 - DNA, 19 bp, Homo sapiens
  siRNA target sequence for TTN (NM_003319.2,26121-26139).
gtcgccctgtacctacaaa

SEQ ID NO: 104565 - DNA, 19 bp, Homo sapiens
  siRNA target sequence for TTN (NM_003319.2,26167-26185).
ggataaagaccgtgttgta

SEQ ID NO: 104566 - DNA, 19 bp, Homo sapiens
  siRNA target sequence for TTN (NM_003319.2,26168-26186).
gataaagaccgtgttgtaa

SEQ ID NO: 104567 - DNA, 19 bp, Homo sapiens
  siRNA target sequence for TTN (NM_003319.2,26174-26192).
gaccgtgttgtaatagaca

SEQ ID NO: 104568 - DNA, 19 bp, Homo sapiens
  siRNA target sequence for TTN (NM_003319.2,26189-26207).
gacaacgttggaaccaaat

SEQ ID NO: 104569 - DNA, 19 bp, Homo sapiens
  siRNA target sequence for TTN (NM_003319.2,26191-26209).
caacgttggaaccaaatct

SEQ ID NO: 104570 - DNA, 19 bp, Homo sapiens
  siRNA target sequence for TTN (NM_003319.2,26194-26212).
cgttggaaccaaatctgaa

SEQ ID NO: 104571 - DNA, 19 bp, Homo sapiens
  siRNA target sequence for TTN (NM_003319.2,26198-26216).
ggaaccaaatctgaactaa

SEQ ID NO: 104572 - DNA, 19 bp, Homo sapiens
  siRNA target sequence for TTN (NM_003319.2,26199-26217).
gaaccaaatctgaactaat

SEQ ID NO: 104573 - DNA, 19 bp, Homo sapiens
  siRNA target sequence for TTN (NM_003319.2,26240-26258).
gaccatggcagatatgtga

SEQ ID NO: 104574 - DNA, 19 bp, Homo sapiens
  siRNA target sequence for TTN (NM_003319.2,26294-26312).
gcagccagggtagaagttt

SEQ ID NO: 104575 - DNA, 19 bp, Homo sapiens
  siRNA target sequence for TTN (NM_003319.2,26301-26319).
gggtagaagtttttgatgt

SEQ ID NO: 104576 - DNA, 19 bp, Homo sapiens
  siRNA target sequence for TTN (NM_003319.2,26322-26340).
ctggtccagttcttgactt

SEQ ID NO: 104577 - DNA, 19 bp, Homo sapiens
  siRNA target sequence for TTN (NM_003319.2,26336-26354).
gacttaaaacctgttgtaa

SEQ ID NO: 104578 - DNA, 19 bp, Homo sapiens
  siRNA target sequence for TTN (NM_003319.2,26361-26379).
gaaaaatgtgtctacttaa

SEQ ID NO: 104579 - DNA, 19 bp, Homo sapiens
  siRNA target sequence for TTN (NM_003319.2,26441-26459).
gatgccaagatgcatactt

SEQ ID NO: 104580 - DNA, 19 bp, Homo sapiens
  siRNA target sequence for TTN (NM_003319.2,26474-26492).
gagactgagagatctaaat

SEQ ID NO: 104581 - DNA, 19 bp, Homo sapiens
  siRNA target sequence for TTN (NM_003319.2,26622-26640).
ctccagagaggctcacata

SEQ ID NO: 104582 - DNA, 19 bp, Homo sapiens
  siRNA target sequence for TTN (NM_003319.2,26624-26642).
ccagagaggctcacataca

SEQ ID NO: 104583 - DNA, 19 bp, Homo sapiens
  siRNA target sequence for TTN (NM_003319.2,26650-26668).
gacaaagtccactatcaca

SEQ ID NO: 104584 - DNA, 19 bp, Homo sapiens
  siRNA target sequence for TTN (NM_003319.2,26700-26718).
gcagtcccatccaaggata

SEQ ID NO: 104585 - DNA, 19 bp, Homo sapiens
  siRNA target sequence for TTN (NM_003319.2,26701-26719).
cagtcccatccaaggatat

SEQ ID NO: 104586 - DNA, 19 bp, Homo sapiens
  siRNA target sequence for TTN (NM_003319.2,26705-26723).
cccatccaaggatatatca

SEQ ID NO: 104587 - DNA, 19 bp, Homo sapiens
  siRNA target sequence for TTN (NM_003319.2,26706-26724).
ccatccaaggatatatcat

SEQ ID NO: 104588 - DNA, 19 bp, Homo sapiens
  siRNA target sequence for TTN (NM_003319.2,26707-26725).
catccaaggatatatcatt

SEQ ID NO: 104589 - DNA, 19 bp, Homo sapiens
  siRNA target sequence for TTN (NM_003319.2,26750-26768).
gactttgaaagagttaaca

SEQ ID NO: 104590 - DNA, 19 bp, Homo sapiens
  siRNA target sequence for TTN (NM_003319.2,26871-26889).
catccctacctcttaatgt

SEQ ID NO: 104591 - DNA, 19 bp, Homo sapiens
  siRNA target sequence for TTN (NM_003319.2,26939-26957).
gttcgaggagacactatca

SEQ ID NO: 104592 - DNA, 19 bp, Homo sapiens
  siRNA target sequence for TTN (NM_003319.2,27003-27021).
gccttccaatgcctaagat

SEQ ID NO: 104593 - DNA, 19 bp, Homo sapiens
  siRNA target sequence for TTN (NM_003319.2,27027-27045).
ggtccaaaaatgaaactgt

SEQ ID NO: 104594 - DNA, 19 bp, Homo sapiens
  siRNA target sequence for TTN (NM_003319.2,27028-27046).
gtccaaaaatgaaactgta

SEQ ID NO: 104595 - DNA, 19 bp, Homo sapiens
  siRNA target sequence for TTN (NM_003319.2,27142-27160).
ggacaaaggcacttacaca

SEQ ID NO: 104596 - DNA, 19 bp, Homo sapiens
  siRNA target sequence for TTN (NM_003319.2,27195-27213).
gaaatgttcacgttgaagt

SEQ ID NO: 104597 - DNA, 19 bp, Homo sapiens
  siRNA target sequence for TTN (NM_003319.2,27263-27281).
gctgaatcttgctacttga

SEQ ID NO: 104598 - DNA, 19 bp, Homo sapiens
  siRNA target sequence for TTN (NM_003319.2,27266-27284).
gaatcttgctacttgacat

SEQ ID NO: 104599 - DNA, 19 bp, Homo sapiens
  siRNA target sequence for TTN (NM_003319.2,27285-27303).
gggatgcccctcttgataa

SEQ ID NO: 104600 - DNA, 19 bp, Homo sapiens
  siRNA target sequence for TTN (NM_003319.2,27312-27330).
gtgaaatcacccattatgt

SEQ ID NO: 104601 - DNA, 19 bp, Homo sapiens
  siRNA target sequence for TTN (NM_003319.2,27314-27332).
gaaatcacccattatgtta

SEQ ID NO: 104602 - DNA, 19 bp, Homo sapiens
  siRNA target sequence for TTN (NM_003319.2,27321-27339).
cccattatgttattgacaa

SEQ ID NO: 104603 - DNA, 19 bp, Homo sapiens
  siRNA target sequence for TTN (NM_003319.2,27382-27400).
caacactgctgtagagaaa

SEQ ID NO: 104604 - DNA, 19 bp, Homo sapiens
  siRNA target sequence for TTN (NM_003319.2,27425-27443).
cccaatggtcagtatgagt

SEQ ID NO: 104605 - DNA, 19 bp, Homo sapiens
  siRNA target sequence for TTN (NM_003319.2,27426-27444).
ccaatggtcagtatgagtt

SEQ ID NO: 104606 - DNA, 19 bp, Homo sapiens
  siRNA target sequence for TTN (NM_003319.2,27479-27497).
gatgagtgcaaatcagata

SEQ ID NO: 104607 - DNA, 19 bp, Homo sapiens
  siRNA target sequence for TTN (NM_003319.2,27558-27576).
cacgcaccaaaggatcaat

SEQ ID NO: 104608 - DNA, 19 bp, Homo sapiens
  siRNA target sequence for TTN (NM_003319.2,27674-27692).
gttagccgagcaccaataa

SEQ ID NO: 104609 - DNA, 19 bp, Homo sapiens
  siRNA target sequence for TTN (NM_003319.2,27678-27696).
gccgagcaccaataaccaa

SEQ ID NO: 104610 - DNA, 19 bp, Homo sapiens
  siRNA target sequence for TTN (NM_003319.2,27706-27724).
gaaaggcgtggaatttaat

SEQ ID NO: 104611 - DNA, 19 bp, Homo sapiens
  siRNA target sequence for TTN (NM_003319.2,27855-27873).
cttcttgcccagaagttaa

SEQ ID NO: 104612 - DNA, 19 bp, Homo sapiens
  siRNA target sequence for TTN (NM_003319.2,27892-27910).
catctcactaggatggaaa

SEQ ID NO: 104613 - DNA, 19 bp, Homo sapiens
  siRNA target sequence for TTN (NM_003319.2,27907-27925).
gaaacctccagccaaagat

SEQ ID NO: 104614 - DNA, 19 bp, Homo sapiens
  siRNA target sequence for TTN (NM_003319.2,27933-27951).
gcccaatcaaaggatacat

SEQ ID NO: 104615 - DNA, 19 bp, Homo sapiens
  siRNA target sequence for TTN (NM_003319.2,28097-28115).
gaatctgaaccaagtgata

SEQ ID NO: 104616 - DNA, 19 bp, Homo sapiens
  siRNA target sequence for TTN (NM_003319.2,28124-28142).
gagatccctgccactgata

SEQ ID NO: 104617 - DNA, 19 bp, Homo sapiens
  siRNA target sequence for TTN (NM_003319.2,28126-28144).
gatccctgccactgatatt

SEQ ID NO: 104618 - DNA, 19 bp, Homo sapiens
  siRNA target sequence for TTN (NM_003319.2,28148-28166).
gaggaaccagaagttttca

SEQ ID NO: 104619 - DNA, 19 bp, Homo sapiens
  siRNA target sequence for TTN (NM_003319.2,28181-28199).
caggactgtctggtttgta

SEQ ID NO: 104620 - DNA, 19 bp, Homo sapiens
  siRNA target sequence for TTN (NM_003319.2,28183-28201).
ggactgtctggtttgtaaa

SEQ ID NO: 104621 - DNA, 19 bp, Homo sapiens
  siRNA target sequence for TTN (NM_003319.2,28202-28220).
gctggctcacagattagga

SEQ ID NO: 104622 - DNA, 19 bp, Homo sapiens
  siRNA target sequence for TTN (NM_003319.2,28237-28255).
gggacgcccaacaccaaaa

SEQ ID NO: 104623 - DNA, 19 bp, Homo sapiens
  siRNA target sequence for TTN (NM_003319.2,28238-28256).
ggacgcccaacaccaaaat

SEQ ID NO: 104624 - DNA, 19 bp, Homo sapiens
  siRNA target sequence for TTN (NM_003319.2,28241-28259).
cgcccaacaccaaaatcat

SEQ ID NO: 104625 - DNA, 19 bp, Homo sapiens
  siRNA target sequence for TTN (NM_003319.2,28297-28315).
ggatggagttcatgacata

SEQ ID NO: 104626 - DNA, 19 bp, Homo sapiens
  siRNA target sequence for TTN (NM_003319.2,28369-28387).
ggagtgtaaacgatctcat

SEQ ID NO: 104627 - DNA, 19 bp, Homo sapiens
  siRNA target sequence for TTN (NM_003319.2,28370-28388).
gagtgtaaacgatctcata

SEQ ID NO: 104628 - DNA, 19 bp, Homo sapiens
  siRNA target sequence for TTN (NM_003319.2,28380-28398).
gatctcatacaggcaaata

SEQ ID NO: 104629 - DNA, 19 bp, Homo sapiens
  siRNA target sequence for TTN (NM_003319.2,28399-28417).
cagcatcacagccaagaat

SEQ ID NO: 104630 - DNA, 19 bp, Homo sapiens
  siRNA target sequence for TTN (NM_003319.2,28434-28452).
ctgcaaattgcagagttaa

SEQ ID NO: 104631 - DNA, 19 bp, Homo sapiens
  siRNA target sequence for TTN (NM_003319.2,28437-28455).
caaattgcagagttaaagt

SEQ ID NO: 104632 - DNA, 19 bp, Homo sapiens
  siRNA target sequence for TTN (NM_003319.2,28467-28485).
caggcccacccaaagatct

SEQ ID NO: 104633 - DNA, 19 bp, Homo sapiens
  siRNA target sequence for TTN (NM_003319.2,28484-28502).
ctgaaagtcagtgatatca

SEQ ID NO: 104634 - DNA, 19 bp, Homo sapiens
  siRNA target sequence for TTN (NM_003319.2,28507-28525).
gggtagttgcagactttca

SEQ ID NO: 104635 - DNA, 19 bp, Homo sapiens
  siRNA target sequence for TTN (NM_003319.2,28626-28644).
gtggaagcaccacatttgt

SEQ ID NO: 104636 - DNA, 19 bp, Homo sapiens
  siRNA target sequence for TTN (NM_003319.2,28743-28761).
ctgccagagatccgatata

SEQ ID NO: 104637 - DNA, 19 bp, Homo sapiens
  siRNA target sequence for TTN (NM_003319.2,28764-28782).
ctcctgatcctcctattaa

SEQ ID NO: 104638 - DNA, 19 bp, Homo sapiens
  siRNA target sequence for TTN (NM_003319.2,28769-28787).
gatcctcctattaaactca

SEQ ID NO: 104639 - DNA, 19 bp, Homo sapiens
  siRNA target sequence for TTN (NM_003319.2,28827-28845).
ggaaacccccgaagaatga

SEQ ID NO: 104640 - DNA, 19 bp, Homo sapiens
  siRNA target sequence for TTN (NM_003319.2,28828-28846).
gaaacccccgaagaatgat

SEQ ID NO: 104641 - DNA, 19 bp, Homo sapiens
  siRNA target sequence for TTN (NM_003319.2,28855-28873).
ccctgttacccactatatt

SEQ ID NO: 104642 - DNA, 19 bp, Homo sapiens
  siRNA target sequence for TTN (NM_003319.2,28857-28875).
ctgttacccactatattgt

SEQ ID NO: 104643 - DNA, 19 bp, Homo sapiens
  siRNA target sequence for TTN (NM_003319.2,28916-28934).
gcctggaggcagtgcaata

SEQ ID NO: 104644 - DNA, 19 bp, Homo sapiens
  siRNA target sequence for TTN (NM_003319.2,28943-28961).
gtggaagaactgcaattta

SEQ ID NO: 104645 - DNA, 19 bp, Homo sapiens
  siRNA target sequence for TTN (NM_003319.2,29053-29071).
gccctgtgactgtcaaaga

SEQ ID NO: 104646 - DNA, 19 bp, Homo sapiens
  siRNA target sequence for TTN (NM_003319.2,29073-29091).
cagacatgccaccatcaat

SEQ ID NO: 104647 - DNA, 19 bp, Homo sapiens
  siRNA target sequence for TTN (NM_003319.2,29081-29099).
ccaccatcaattgatctaa

SEQ ID NO: 104648 - DNA, 19 bp, Homo sapiens
  siRNA target sequence for TTN (NM_003319.2,29082-29100).
caccatcaattgatctaaa

SEQ ID NO: 104649 - DNA, 19 bp, Homo sapiens
  siRNA target sequence for TTN (NM_003319.2,29085-29103).
catcaattgatctaaaaga

SEQ ID NO: 104650 - DNA, 19 bp, Homo sapiens
  siRNA target sequence for TTN (NM_003319.2,29088-29106).
caattgatctaaaagaatt

SEQ ID NO: 104651 - DNA, 19 bp, Homo sapiens
  siRNA target sequence for TTN (NM_003319.2,29137-29155).
cattgtggccaaaattaaa

SEQ ID NO: 104652 - DNA, 19 bp, Homo sapiens
  siRNA target sequence for TTN (NM_003319.2,29159-29177).
gtgccattcccgacactaa

SEQ ID NO: 104653 - DNA, 19 bp, Homo sapiens
  siRNA target sequence for TTN (NM_003319.2,29168-29186).
ccgacactaacctggttta

SEQ ID NO: 104654 - DNA, 19 bp, Homo sapiens
  siRNA target sequence for TTN (NM_003319.2,29169-29187).
cgacactaacctggtttaa

SEQ ID NO: 104655 - DNA, 19 bp, Homo sapiens
  siRNA target sequence for TTN (NM_003319.2,29170-29188).
gacactaacctggtttaaa

SEQ ID NO: 104656 - DNA, 19 bp, Homo sapiens
  siRNA target sequence for TTN (NM_003319.2,29195-29213).
ccaaagaagcctgataaca

SEQ ID NO: 104657 - DNA, 19 bp, Homo sapiens
  siRNA target sequence for TTN (NM_003319.2,29216-29234).
gaacctgttctctatgaca

SEQ ID NO: 104658 - DNA, 19 bp, Homo sapiens
  siRNA target sequence for TTN (NM_003319.2,29295-29313).
ggagtgacactggcttata

SEQ ID NO: 104659 - DNA, 19 bp, Homo sapiens
  siRNA target sequence for TTN (NM_003319.2,29296-29314).
gagtgacactggcttatat

SEQ ID NO: 104660 - DNA, 19 bp, Homo sapiens
  siRNA target sequence for TTN (NM_003319.2,29300-29318).
gacactggcttatatacca

SEQ ID NO: 104661 - DNA, 19 bp, Homo sapiens
  siRNA target sequence for TTN (NM_003319.2,29423-29441).
gcagatcaaatgacactat

SEQ ID NO: 104662 - DNA, 19 bp, Homo sapiens
  siRNA target sequence for TTN (NM_003319.2,29445-29463).
ggtttccacctaaagatga

SEQ ID NO: 104663 - DNA, 19 bp, Homo sapiens
  siRNA target sequence for TTN (NM_003319.2,29556-29574).
cgtacacgattcccaaatt

SEQ ID NO: 104664 - DNA, 19 bp, Homo sapiens
  siRNA target sequence for TTN (NM_003319.2,29575-29593).
gctagaaggccatgaatat

SEQ ID NO: 104665 - DNA, 19 bp, Homo sapiens
  siRNA target sequence for TTN (NM_003319.2,29600-29618).
cgaatcatggcccagaata

SEQ ID NO: 104666 - DNA, 19 bp, Homo sapiens
  siRNA target sequence for TTN (NM_003319.2,29605-29623).
catggcccagaataaatat

SEQ ID NO: 104667 - DNA, 19 bp, Homo sapiens
  siRNA target sequence for TTN (NM_003319.2,29684-29702).
ggagcaccagataaaccaa

SEQ ID NO: 104668 - DNA, 19 bp, Homo sapiens
  siRNA target sequence for TTN (NM_003319.2,29826-29844).
gagttaaccgagatcctat

SEQ ID NO: 104669 - DNA, 19 bp, Homo sapiens
  siRNA target sequence for TTN (NM_003319.2,29840-29858).
cctatcaaagccatgactt

SEQ ID NO: 104670 - DNA, 19 bp, Homo sapiens
  siRNA target sequence for TTN (NM_003319.2,29851-29869).
catgactttgggtgtttct

SEQ ID NO: 104671 - DNA, 19 bp, Homo sapiens
  siRNA target sequence for TTN (NM_003319.2,29861-29879).
ggtgtttcttataaagtga

SEQ ID NO: 104672 - DNA, 19 bp, Homo sapiens
  siRNA target sequence for TTN (NM_003319.2,29891-29909).
gaaggttccgactatcaat

SEQ ID NO: 104673 - DNA, 19 bp, Homo sapiens
  siRNA target sequence for TTN (NM_003319.2,29902-29920).
ctatcaattccgggtatat

SEQ ID NO: 104674 - DNA, 19 bp, Homo sapiens
  siRNA target sequence for TTN (NM_003319.2,29906-29924).
caattccgggtatatgcaa

SEQ ID NO: 104675 - DNA, 19 bp, Homo sapiens
  siRNA target sequence for TTN (NM_003319.2,29911-29929).
ccgggtatatgcaatcaat

SEQ ID NO: 104676 - DNA, 19 bp, Homo sapiens
  siRNA target sequence for TTN (NM_003319.2,29965-29983).
cccagcgactgctagagat

SEQ ID NO: 104677 - DNA, 19 bp, Homo sapiens
  siRNA target sequence for TTN (NM_003319.2,29970-29988).
cgactgctagagatccaat

SEQ ID NO: 104678 - DNA, 19 bp, Homo sapiens
  siRNA target sequence for TTN (NM_003319.2,29971-29989).
gactgctagagatccaatt

SEQ ID NO: 104679 - DNA, 19 bp, Homo sapiens
  siRNA target sequence for TTN (NM_003319.2,30017-30035).
gtgacagattggactaaat

SEQ ID NO: 104680 - DNA, 19 bp, Homo sapiens
  siRNA target sequence for TTN (NM_003319.2,30019-30037).
gacagattggactaaatca

SEQ ID NO: 104681 - DNA, 19 bp, Homo sapiens
  siRNA target sequence for TTN (NM_003319.2,30052-30070).
gtggtctcccccactaaaa

SEQ ID NO: 104682 - DNA, 19 bp, Homo sapiens
  siRNA target sequence for TTN (NM_003319.2,30054-30072).
ggtctcccccactaaaaga

SEQ ID NO: 104683 - DNA, 19 bp, Homo sapiens
  siRNA target sequence for TTN (NM_003319.2,30090-30108).
ctggatacatcgttgaata

SEQ ID NO: 104684 - DNA, 19 bp, Homo sapiens
  siRNA target sequence for TTN (NM_003319.2,30092-30110).
ggatacatcgttgaatata

SEQ ID NO: 104685 - DNA, 19 bp, Homo sapiens
  siRNA target sequence for TTN (NM_003319.2,30190-30208).
ggaaggagcattctacaaa

SEQ ID NO: 104686 - DNA, 19 bp, Homo sapiens
  siRNA target sequence for TTN (NM_003319.2,30194-30212).
ggagcattctacaaattta

SEQ ID NO: 104687 - DNA, 19 bp, Homo sapiens
  siRNA target sequence for TTN (NM_003319.2,30277-30295).
gaaggacagacttgtttca

SEQ ID NO: 104688 - DNA, 19 bp, Homo sapiens
  siRNA target sequence for TTN (NM_003319.2,30311-30329).
gatgccagtgtcagagata

SEQ ID NO: 104689 - DNA, 19 bp, Homo sapiens
  siRNA target sequence for TTN (NM_003319.2,30314-30332).
gccagtgtcagagatagaa

SEQ ID NO: 104690 - DNA, 19 bp, Homo sapiens
  siRNA target sequence for TTN (NM_003319.2,30318-30336).
gtgtcagagatagaattgt

SEQ ID NO: 104691 - DNA, 19 bp, Homo sapiens
  siRNA target sequence for TTN (NM_003319.2,30348-30366).
gaggggtgatccgaatcat

SEQ ID NO: 104692 - DNA, 19 bp, Homo sapiens
  siRNA target sequence for TTN (NM_003319.2,30359-30377).
cgaatcattgcctatgtgt

SEQ ID NO: 104693 - DNA, 19 bp, Homo sapiens
  siRNA target sequence for TTN (NM_003319.2,30496-30514).
ccatcaaggcgtctattct

SEQ ID NO: 104694 - DNA, 19 bp, Homo sapiens
  siRNA target sequence for TTN (NM_003319.2,30550-30568).
gacaattattgttgatgta

SEQ ID NO: 104695 - DNA, 19 bp, Homo sapiens
  siRNA target sequence for TTN (NM_003319.2,30586-30604).
cgttggaacaccattccta

SEQ ID NO: 104696 - DNA, 19 bp, Homo sapiens
  siRNA target sequence for TTN (NM_003319.2,30688-30706).
cattgaaaagcgtgaatct

SEQ ID NO: 104697 - DNA, 19 bp, Homo sapiens
  siRNA target sequence for TTN (NM_003319.2,30740-30758).
gttacccgacaaaatgcta

SEQ ID NO: 104698 - DNA, 19 bp, Homo sapiens
  siRNA target sequence for TTN (NM_003319.2,30796-30814).
ccgaattgcggctgaaaat

SEQ ID NO: 104699 - DNA, 19 bp, Homo sapiens
  siRNA target sequence for TTN (NM_003319.2,30797-30815).
cgaattgcggctgaaaata

SEQ ID NO: 104700 - DNA, 19 bp, Homo sapiens
  siRNA target sequence for TTN (NM_003319.2,30862-30880).
cagagagccaataactgta

SEQ ID NO: 104701 - DNA, 19 bp, Homo sapiens
  siRNA target sequence for TTN (NM_003319.2,30914-30932).
gttactaaaaatactgtaa

SEQ ID NO: 104702 - DNA, 19 bp, Homo sapiens
  siRNA target sequence for TTN (NM_003319.2,30942-30960).
ggaatcctcctaagtatga

SEQ ID NO: 104703 - DNA, 19 bp, Homo sapiens
  siRNA target sequence for TTN (NM_003319.2,30943-30961).
gaatcctcctaagtatgat

SEQ ID NO: 104704 - DNA, 19 bp, Homo sapiens
  siRNA target sequence for TTN (NM_003319.2,30962-30980).
ggtgggtcagaaattatta

SEQ ID NO: 104705 - DNA, 19 bp, Homo sapiens
  siRNA target sequence for TTN (NM_003319.2,31013-31031).
gagaagttccacaaagtta

SEQ ID NO: 104706 - DNA, 19 bp, Homo sapiens
  siRNA target sequence for TTN (NM_003319.2,31018-31036).
gttccacaaagttacaaat

SEQ ID NO: 104707 - DNA, 19 bp, Homo sapiens
  siRNA target sequence for TTN (NM_003319.2,31121-31139).
gttggacaaggcaaaccat

SEQ ID NO: 104708 - DNA, 19 bp, Homo sapiens
  siRNA target sequence for TTN (NM_003319.2,31127-31145).
caaggcaaaccatcatttt

SEQ ID NO: 104709 - DNA, 19 bp, Homo sapiens
  siRNA target sequence for TTN (NM_003319.2,31140-31158).
cattttgcaccaaaccaat

SEQ ID NO: 104710 - DNA, 19 bp, Homo sapiens
  siRNA target sequence for TTN (NM_003319.2,31193-31211).
cacctcgacttcagagata

SEQ ID NO: 104711 - DNA, 19 bp, Homo sapiens
  siRNA target sequence for TTN (NM_003319.2,31316-31334).
gatgatcgcactcatataa

SEQ ID NO: 104712 - DNA, 19 bp, Homo sapiens
  siRNA target sequence for TTN (NM_003319.2,31319-31337).
gatcgcactcatataaaga

SEQ ID NO: 104713 - DNA, 19 bp, Homo sapiens
  siRNA target sequence for TTN (NM_003319.2,31322-31340).
cgcactcatataaagacta

SEQ ID NO: 104714 - DNA, 19 bp, Homo sapiens
  siRNA target sequence for TTN (NM_003319.2,31347-31365).
caacacttgctttagagaa

SEQ ID NO: 104715 - DNA, 19 bp, Homo sapiens
  siRNA target sequence for TTN (NM_003319.2,31350-31368).
cacttgctttagagaagat

SEQ ID NO: 104716 - DNA, 19 bp, Homo sapiens
  siRNA target sequence for TTN (NM_003319.2,31352-31370).
cttgctttagagaagatca

SEQ ID NO: 104717 - DNA, 19 bp, Homo sapiens
  siRNA target sequence for TTN (NM_003319.2,31369-31387).
caaggccaaacgttcagat

SEQ ID NO: 104718 - DNA, 19 bp, Homo sapiens
  siRNA target sequence for TTN (NM_003319.2,31417-31435).
cagtacaggctctaggaaa

SEQ ID NO: 104719 - DNA, 19 bp, Homo sapiens
  siRNA target sequence for TTN (NM_003319.2,31476-31494).
cagtaggaccagttagttt

SEQ ID NO: 104720 - DNA, 19 bp, Homo sapiens
  siRNA target sequence for TTN (NM_003319.2,31618-31636).
gacatctgcaagtgctaaa

SEQ ID NO: 104721 - DNA, 19 bp, Homo sapiens
  siRNA target sequence for TTN (NM_003319.2,31644-31662).
gcaaagtttctaaactact

SEQ ID NO: 104722 - DNA, 19 bp, Homo sapiens
  siRNA target sequence for TTN (NM_003319.2,31773-31791).
cacctgatcagccaattgt

SEQ ID NO: 104723 - DNA, 19 bp, Homo sapiens
  siRNA target sequence for TTN (NM_003319.2,31783-31801).
gccaattgttacagaagtt

SEQ ID NO: 104724 - DNA, 19 bp, Homo sapiens
  siRNA target sequence for TTN (NM_003319.2,31803-31821).
ccaaagactctgcattagt

SEQ ID NO: 104725 - DNA, 19 bp, Homo sapiens
  siRNA target sequence for TTN (NM_003319.2,31804-31822).
caaagactctgcattagta

SEQ ID NO: 104726 - DNA, 19 bp, Homo sapiens
  siRNA target sequence for TTN (NM_003319.2,31814-31832).
gcattagtaacctggaata

SEQ ID NO: 104727 - DNA, 19 bp, Homo sapiens
  siRNA target sequence for TTN (NM_003319.2,31815-31833).
cattagtaacctggaataa

SEQ ID NO: 104728 - DNA, 19 bp, Homo sapiens
  siRNA target sequence for TTN (NM_003319.2,31883-31901).
gaaactatgtctaaacgat

SEQ ID NO: 104729 - DNA, 19 bp, Homo sapiens
  siRNA target sequence for TTN (NM_003319.2,31899-31917).
gatgggctagagttaccaa

SEQ ID NO: 104730 - DNA, 19 bp, Homo sapiens
  siRNA target sequence for TTN (NM_003319.2,31903-31921).
ggctagagttaccaaagat

SEQ ID NO: 104731 - DNA, 19 bp, Homo sapiens
  siRNA target sequence for TTN (NM_003319.2,31948-31966).
ggttcctgatcttctagaa

SEQ ID NO: 104732 - DNA, 19 bp, Homo sapiens
  siRNA target sequence for TTN (NM_003319.2,32048-32066).
gctaaagatccaattgcta

SEQ ID NO: 104733 - DNA, 19 bp, Homo sapiens
  siRNA target sequence for TTN (NM_003319.2,32049-32067).
ctaaagatccaattgctaa

SEQ ID NO: 104734 - DNA, 19 bp, Homo sapiens
  siRNA target sequence for TTN (NM_003319.2,32079-32097).
ctgttaatcctgaagcaat

SEQ ID NO: 104735 - DNA, 19 bp, Homo sapiens
  siRNA target sequence for TTN (NM_003319.2,32087-32105).
cctgaagcaatagatacaa

SEQ ID NO: 104736 - DNA, 19 bp, Homo sapiens
  siRNA target sequence for TTN (NM_003319.2,32110-32128).
caattcagtcgatctaact

SEQ ID NO: 104737 - DNA, 19 bp, Homo sapiens
  siRNA target sequence for TTN (NM_003319.2,32131-32149).
gcagccaccacgtcatgat

SEQ ID NO: 104738 - DNA, 19 bp, Homo sapiens
  siRNA target sequence for TTN (NM_003319.2,32161-32179).
gattctgggttatattgtt

SEQ ID NO: 104739 - DNA, 19 bp, Homo sapiens
  siRNA target sequence for TTN (NM_003319.2,32233-32251).
gtcatgtcctgaaactaaa

SEQ ID NO: 104740 - DNA, 19 bp, Homo sapiens
  siRNA target sequence for TTN (NM_003319.2,32241-32259).
ctgaaactaaatataaagt

SEQ ID NO: 104741 - DNA, 19 bp, Homo sapiens
  siRNA target sequence for TTN (NM_003319.2,32270-32288).
cgggacggtcaaacctata

SEQ ID NO: 104742 - DNA, 19 bp, Homo sapiens
  siRNA target sequence for TTN (NM_003319.2,32271-32289).
gggacggtcaaacctataa

SEQ ID NO: 104743 - DNA, 19 bp, Homo sapiens
  siRNA target sequence for TTN (NM_003319.2,32273-32291).
gacggtcaaacctataagt

SEQ ID NO: 104744 - DNA, 19 bp, Homo sapiens
  siRNA target sequence for TTN (NM_003319.2,32275-32293).
cggtcaaacctataagttt

SEQ ID NO: 104745 - DNA, 19 bp, Homo sapiens
  siRNA target sequence for TTN (NM_003319.2,32284-32302).
ctataagtttagagtgtta

SEQ ID NO: 104746 - DNA, 19 bp, Homo sapiens
  siRNA target sequence for TTN (NM_003319.2,32342-32360).
ccggagccagtcctagtaa

SEQ ID NO: 104747 - DNA, 19 bp, Homo sapiens
  siRNA target sequence for TTN (NM_003319.2,32376-32394).
cccctgagttgattcttga

SEQ ID NO: 104748 - DNA, 19 bp, Homo sapiens
  siRNA target sequence for TTN (NM_003319.2,32409-32427).
gagaacaacacattaaagt

SEQ ID NO: 104749 - DNA, 19 bp, Homo sapiens
  siRNA target sequence for TTN (NM_003319.2,32514-32532).
ctaaagcaagaattgatgt

SEQ ID NO: 104750 - DNA, 19 bp, Homo sapiens
  siRNA target sequence for TTN (NM_003319.2,32540-32558).
gttggtagcaagcttgaaa

SEQ ID NO: 104751 - DNA, 19 bp, Homo sapiens
  siRNA target sequence for TTN (NM_003319.2,32548-32566).
caagcttgaaattcgtaat

SEQ ID NO: 104752 - DNA, 19 bp, Homo sapiens
  siRNA target sequence for TTN (NM_003319.2,32551-32569).
gcttgaaattcgtaatgct

SEQ ID NO: 104753 - DNA, 19 bp, Homo sapiens
  siRNA target sequence for TTN (NM_003319.2,32572-32590).
ccatgaagatggtggaatt

SEQ ID NO: 104754 - DNA, 19 bp, Homo sapiens
  siRNA target sequence for TTN (NM_003319.2,32608-32626).
gaatccagctggttcaaaa

SEQ ID NO: 104755 - DNA, 19 bp, Homo sapiens
  siRNA target sequence for TTN (NM_003319.2,32628-32646).
ctgtctcagtaaaagtact

SEQ ID NO: 104756 - DNA, 19 bp, Homo sapiens
  siRNA target sequence for TTN (NM_003319.2,32634-32652).
cagtaaaagtacttgtatt

SEQ ID NO: 104757 - DNA, 19 bp, Homo sapiens
  siRNA target sequence for TTN (NM_003319.2,32678-32696).
ctggaagtcagtgaaatta

SEQ ID NO: 104758 - DNA, 19 bp, Homo sapiens
  siRNA target sequence for TTN (NM_003319.2,32734-32752).
ggatgatggtggttctgtt

SEQ ID NO: 104759 - DNA, 19 bp, Homo sapiens
  siRNA target sequence for TTN (NM_003319.2,32830-32848).
gagtcacttcgctaagcat

SEQ ID NO: 104760 - DNA, 19 bp, Homo sapiens
  siRNA target sequence for TTN (NM_003319.2,32836-32854).
cttcgctaagcatctgaat

SEQ ID NO: 104761 - DNA, 19 bp, Homo sapiens
  siRNA target sequence for TTN (NM_003319.2,32896-32914).
gtatggacgtggtcctttt

SEQ ID NO: 104762 - DNA, 19 bp, Homo sapiens
  siRNA target sequence for TTN (NM_003319.2,32901-32919).
gacgtggtccttttgttga

SEQ ID NO: 104763 - DNA, 19 bp, Homo sapiens
  siRNA target sequence for TTN (NM_003319.2,32903-32921).
cgtggtccttttgttgaaa

SEQ ID NO: 104764 - DNA, 19 bp, Homo sapiens
  siRNA target sequence for TTN (NM_003319.2,33008-33026).
gtctccctagtctggaata

SEQ ID NO: 104765 - DNA, 19 bp, Homo sapiens
  siRNA target sequence for TTN (NM_003319.2,33086-33104).
ggcacccaggactggatta

SEQ ID NO: 104766 - DNA, 19 bp, Homo sapiens
  siRNA target sequence for TTN (NM_003319.2,33088-33106).
cacccaggactggattaaa

SEQ ID NO: 104767 - DNA, 19 bp, Homo sapiens
  siRNA target sequence for TTN (NM_003319.2,33090-33108).
cccaggactggattaaatt

SEQ ID NO: 104768 - DNA, 19 bp, Homo sapiens
  siRNA target sequence for TTN (NM_003319.2,33136-33154).
ggttactggactacaacaa

SEQ ID NO: 104769 - DNA, 19 bp, Homo sapiens
  siRNA target sequence for TTN (NM_003319.2,33149-33167).
caacaaggaaagacctata

SEQ ID NO: 104770 - DNA, 19 bp, Homo sapiens
  siRNA target sequence for TTN (NM_003319.2,33162-33180).
cctatagattccgtgtaaa

SEQ ID NO: 104771 - DNA, 19 bp, Homo sapiens
  siRNA target sequence for TTN (NM_003319.2,33163-33181).
ctatagattccgtgtaaaa

SEQ ID NO: 104772 - DNA, 19 bp, Homo sapiens
  siRNA target sequence for TTN (NM_003319.2,33204-33222).
gtctccctgacacaactat

SEQ ID NO: 104773 - DNA, 19 bp, Homo sapiens
  siRNA target sequence for TTN (NM_003319.2,33214-33232).
cacaactatcccgatagaa

SEQ ID NO: 104774 - DNA, 19 bp, Homo sapiens
  siRNA target sequence for TTN (NM_003319.2,33219-33237).
ctatcccgatagaatgtca

SEQ ID NO: 104775 - DNA, 19 bp, Homo sapiens
  siRNA target sequence for TTN (NM_003319.2,33223-33241).
cccgatagaatgtcaagaa

SEQ ID NO: 104776 - DNA, 19 bp, Homo sapiens
  siRNA target sequence for TTN (NM_003319.2,33224-33242).
ccgatagaatgtcaagaaa

SEQ ID NO: 104777 - DNA, 19 bp, Homo sapiens
  siRNA target sequence for TTN (NM_003319.2,33225-33243).
cgatagaatgtcaagaaaa

SEQ ID NO: 104778 - DNA, 19 bp, Homo sapiens
  siRNA target sequence for TTN (NM_003319.2,33255-33273).
catccgtggagctagatgt

SEQ ID NO: 104779 - DNA, 19 bp, Homo sapiens
  siRNA target sequence for TTN (NM_003319.2,33258-33276).
ccgtggagctagatgtgaa

SEQ ID NO: 104780 - DNA, 19 bp, Homo sapiens
  siRNA target sequence for TTN (NM_003319.2,33259-33277).
cgtggagctagatgtgaaa

SEQ ID NO: 104781 - DNA, 19 bp, Homo sapiens
  siRNA target sequence for TTN (NM_003319.2,33260-33278).
gtggagctagatgtgaaat

SEQ ID NO: 104782 - DNA, 19 bp, Homo sapiens
  siRNA target sequence for TTN (NM_003319.2,33262-33280).
ggagctagatgtgaaatta

SEQ ID NO: 104783 - DNA, 19 bp, Homo sapiens
  siRNA target sequence for TTN (NM_003319.2,33369-33387).
ccgatgggagtgagattaa

SEQ ID NO: 104784 - DNA, 19 bp, Homo sapiens
  siRNA target sequence for TTN (NM_003319.2,33370-33388).
cgatgggagtgagattaaa

SEQ ID NO: 104785 - DNA, 19 bp, Homo sapiens
  siRNA target sequence for TTN (NM_003319.2,33371-33389).
gatgggagtgagattaaaa

SEQ ID NO: 104786 - DNA, 19 bp, Homo sapiens
  siRNA target sequence for TTN (NM_003319.2,33407-33425).
gttgaaacagacaacttct

SEQ ID NO: 104787 - DNA, 19 bp, Homo sapiens
  siRNA target sequence for TTN (NM_003319.2,33426-33444).
catcagtacttaccattaa

SEQ ID NO: 104788 - DNA, 19 bp, Homo sapiens
  siRNA target sequence for TTN (NM_003319.2,33429-33447).
cagtacttaccattaagaa

SEQ ID NO: 104789 - DNA, 19 bp, Homo sapiens
  siRNA target sequence for TTN (NM_003319.2,33431-33449).
gtacttaccattaagaact

SEQ ID NO: 104790 - DNA, 19 bp, Homo sapiens
  siRNA target sequence for TTN (NM_003319.2,33517-33535).
cgtacatcttactgttctt

SEQ ID NO: 104791 - DNA, 19 bp, Homo sapiens
  siRNA target sequence for TTN (NM_003319.2,33584-33602).
cctgaacacatgactatct

SEQ ID NO: 104792 - DNA, 19 bp, Homo sapiens
  siRNA target sequence for TTN (NM_003319.2,33633-33651).
gccctgtgataaattatat

SEQ ID NO: 104793 - DNA, 19 bp, Homo sapiens
  siRNA target sequence for TTN (NM_003319.2,33699-33717).
ccggaagcagtaagacaaa

SEQ ID NO: 104794 - DNA, 19 bp, Homo sapiens
  siRNA target sequence for TTN (NM_003319.2,33734-33752).
ctgcagaagggctgtgaat

SEQ ID NO: 104795 - DNA, 19 bp, Homo sapiens
  siRNA target sequence for TTN (NM_003319.2,33807-33825).
ccacacctactgttgctaa

SEQ ID NO: 104796 - DNA, 19 bp, Homo sapiens
  siRNA target sequence for TTN (NM_003319.2,33812-33830).
cctactgttgctaagcata

SEQ ID NO: 104797 - DNA, 19 bp, Homo sapiens
  siRNA target sequence for TTN (NM_003319.2,33813-33831).
ctactgttgctaagcataa

SEQ ID NO: 104798 - DNA, 19 bp, Homo sapiens
  siRNA target sequence for TTN (NM_003319.2,33855-33873).
gtaaaccagtggttactga

SEQ ID NO: 104799 - DNA, 19 bp, Homo sapiens
  siRNA target sequence for TTN (NM_003319.2,33860-33878).
ccagtggttactgacatta

SEQ ID NO: 104800 - DNA, 19 bp, Homo sapiens
  siRNA target sequence for TTN (NM_003319.2,33903-33921).
ggaccctgccaaaatctga

SEQ ID NO: 104801 - DNA, 19 bp, Homo sapiens
  siRNA target sequence for TTN (NM_003319.2,33933-33951).
caataactggctactatat

SEQ ID NO: 104802 - DNA, 19 bp, Homo sapiens
  siRNA target sequence for TTN (NM_003319.2,33952-33970).
ggaacgtcgagaagtaact

SEQ ID NO: 104803 - DNA, 19 bp, Homo sapiens
  siRNA target sequence for TTN (NM_003319.2,33999-34017).
ctatcgctgacctgaagtt

SEQ ID NO: 104804 - DNA, 19 bp, Homo sapiens
  siRNA target sequence for TTN (NM_003319.2,34020-34038).
gagtgactggactctatga

SEQ ID NO: 104805 - DNA, 19 bp, Homo sapiens
  siRNA target sequence for TTN (NM_003319.2,34040-34058).
ggaaatacatatgagttta

SEQ ID NO: 104806 - DNA, 19 bp, Homo sapiens
  siRNA target sequence for TTN (NM_003319.2,34047-34065).
catatgagtttagagtttt

SEQ ID NO: 104807 - DNA, 19 bp, Homo sapiens
  siRNA target sequence for TTN (NM_003319.2,34079-34097).
gcaggactaagcaaaccat

SEQ ID NO: 104808 - DNA, 19 bp, Homo sapiens
  siRNA target sequence for TTN (NM_003319.2,34098-34116).
ccccaagttctgatccaat

SEQ ID NO: 104809 - DNA, 19 bp, Homo sapiens
  siRNA target sequence for TTN (NM_003319.2,34099-34117).
cccaagttctgatccaata

SEQ ID NO: 104810 - DNA, 19 bp, Homo sapiens
  siRNA target sequence for TTN (NM_003319.2,34100-34118).
ccaagttctgatccaataa

SEQ ID NO: 104811 - DNA, 19 bp, Homo sapiens
  siRNA target sequence for TTN (NM_003319.2,34145-34163).
ggaccacctattaatccta

SEQ ID NO: 104812 - DNA, 19 bp, Homo sapiens
  siRNA target sequence for TTN (NM_003319.2,34146-34164).
gaccacctattaatcctaa

SEQ ID NO: 104813 - DNA, 19 bp, Homo sapiens
  siRNA target sequence for TTN (NM_003319.2,34230-34248).
gccccattctaggatatgt

SEQ ID NO: 104814 - DNA, 19 bp, Homo sapiens
  siRNA target sequence for TTN (NM_003319.2,34231-34249).
ccccattctaggatatgta

SEQ ID NO: 104815 - DNA, 19 bp, Homo sapiens
  siRNA target sequence for TTN (NM_003319.2,34242-34260).
gatatgtagtggaatgtca

SEQ ID NO: 104816 - DNA, 19 bp, Homo sapiens
  siRNA target sequence for TTN (NM_003319.2,34274-34292).
gcacaatggaacaggatta

SEQ ID NO: 104817 - DNA, 19 bp, Homo sapiens
  siRNA target sequence for TTN (NM_003319.2,34326-34344).
gggtacctggactaattga

SEQ ID NO: 104818 - DNA, 19 bp, Homo sapiens
  siRNA target sequence for TTN (NM_003319.2,34327-34345).
ggtacctggactaattgaa

SEQ ID NO: 104819 - DNA, 19 bp, Homo sapiens
  siRNA target sequence for TTN (NM_003319.2,34352-34370).
gagtacagattccgtataa

SEQ ID NO: 104820 - DNA, 19 bp, Homo sapiens
  siRNA target sequence for TTN (NM_003319.2,34363-34381).
ccgtataaaggcagctaat

SEQ ID NO: 104821 - DNA, 19 bp, Homo sapiens
  siRNA target sequence for TTN (NM_003319.2,34364-34382).
cgtataaaggcagctaata

SEQ ID NO: 104822 - DNA, 19 bp, Homo sapiens
  siRNA target sequence for TTN (NM_003319.2,34365-34383).
gtataaaggcagctaatat

SEQ ID NO: 104823 - DNA, 19 bp, Homo sapiens
  siRNA target sequence for TTN (NM_003319.2,34393-34411).
gggtgagccaagagaacta

SEQ ID NO: 104824 - DNA, 19 bp, Homo sapiens
  siRNA target sequence for TTN (NM_003319.2,34466-34484).
gttacttgtcgtgatgtta

SEQ ID NO: 104825 - DNA, 19 bp, Homo sapiens
  siRNA target sequence for TTN (NM_003319.2,34501-34519).
ccaaactatccgcattcta

SEQ ID NO: 104826 - DNA, 19 bp, Homo sapiens
  siRNA target sequence for TTN (NM_003319.2,34513-34531).
cattctagctcgagtcaaa

SEQ ID NO: 104827 - DNA, 19 bp, Homo sapiens
  siRNA target sequence for TTN (NM_003319.2,34549-34567).
cataacttggactaaggaa

SEQ ID NO: 104828 - DNA, 19 bp, Homo sapiens
  siRNA target sequence for TTN (NM_003319.2,34574-34592).
gtattggtccgagaaaaga

SEQ ID NO: 104829 - DNA, 19 bp, Homo sapiens
  siRNA target sequence for TTN (NM_003319.2,34617-34635).
ctcgtgttgagttacaaat

SEQ ID NO: 104830 - DNA, 19 bp, Homo sapiens
  siRNA target sequence for TTN (NM_003319.2,34619-34637).
cgtgttgagttacaaatta

SEQ ID NO: 104831 - DNA, 19 bp, Homo sapiens
  siRNA target sequence for TTN (NM_003319.2,34655-34673).
gatcatggcaagtatatca

SEQ ID NO: 104832 - DNA, 19 bp, Homo sapiens
  siRNA target sequence for TTN (NM_003319.2,34658-34676).
catggcaagtatatcatct

SEQ ID NO: 104833 - DNA, 19 bp, Homo sapiens
  siRNA target sequence for TTN (NM_003319.2,34703-34721).
caaggttcagccatcgtta

SEQ ID NO: 104834 - DNA, 19 bp, Homo sapiens
  siRNA target sequence for TTN (NM_003319.2,34707-34725).
gttcagccatcgttaacgt

SEQ ID NO: 104835 - DNA, 19 bp, Homo sapiens
  siRNA target sequence for TTN (NM_003319.2,34739-34757).
gggccttgccagaatttga

SEQ ID NO: 104836 - DNA, 19 bp, Homo sapiens
  siRNA target sequence for TTN (NM_003319.2,34759-34777).
ggttaccaatgtaaccaaa

SEQ ID NO: 104837 - DNA, 19 bp, Homo sapiens
  siRNA target sequence for TTN (NM_003319.2,34844-34862).
gtagaatatcgcaaaccaa

SEQ ID NO: 104838 - DNA, 19 bp, Homo sapiens
  siRNA target sequence for TTN (NM_003319.2,34864-34882).
ccagaaaggctggtcaatt

SEQ ID NO: 104839 - DNA, 19 bp, Homo sapiens
  siRNA target sequence for TTN (NM_003319.2,34867-34885).
gaaaggctggtcaattgtt

SEQ ID NO: 104840 - DNA, 19 bp, Homo sapiens
  siRNA target sequence for TTN (NM_003319.2,34890-34908).
cagatgtcactaaacgatt

SEQ ID NO: 104841 - DNA, 19 bp, Homo sapiens
  siRNA target sequence for TTN (NM_003319.2,34895-34913).
gtcactaaacgattaatca

SEQ ID NO: 104842 - DNA, 19 bp, Homo sapiens
  siRNA target sequence for TTN (NM_003319.2,34921-34939).
ccttttagccaacaatgaa

SEQ ID NO: 104843 - DNA, 19 bp, Homo sapiens
  siRNA target sequence for TTN (NM_003319.2,34922-34940).
cttttagccaacaatgaat

SEQ ID NO: 104844 - DNA, 19 bp, Homo sapiens
  siRNA target sequence for TTN (NM_003319.2,34928-34946).
gccaacaatgaatactatt

SEQ ID NO: 104845 - DNA, 19 bp, Homo sapiens
  siRNA target sequence for TTN (NM_003319.2,34929-34947).
ccaacaatgaatactattt

SEQ ID NO: 104846 - DNA, 19 bp, Homo sapiens
  siRNA target sequence for TTN (NM_003319.2,34976-34994).
gttgggccaaccatcgaaa

SEQ ID NO: 104847 - DNA, 19 bp, Homo sapiens
  siRNA target sequence for TTN (NM_003319.2,34979-34997).
gggccaaccatcgaaacaa

SEQ ID NO: 104848 - DNA, 19 bp, Homo sapiens
  siRNA target sequence for TTN (NM_003319.2,35001-35019).
ctcccattctggctattaa

SEQ ID NO: 104849 - DNA, 19 bp, Homo sapiens
  siRNA target sequence for TTN (NM_003319.2,35012-35030).
gctattaaccctattgaca

SEQ ID NO: 104850 - DNA, 19 bp, Homo sapiens
  siRNA target sequence for TTN (NM_003319.2,35031-35049).
gaccaggtgagcctgaaaa

SEQ ID NO: 104851 - DNA, 19 bp, Homo sapiens
  siRNA target sequence for TTN (NM_003319.2,35050-35068).
ccttcacattgcagataaa

SEQ ID NO: 104852 - DNA, 19 bp, Homo sapiens
  siRNA target sequence for TTN (NM_003319.2,35092-35110).
gtggcggaggcctgactat

SEQ ID NO: 104853 - DNA, 19 bp, Homo sapiens
  siRNA target sequence for TTN (NM_003319.2,35094-35112).
ggcggaggcctgactatga

SEQ ID NO: 104854 - DNA, 19 bp, Homo sapiens
  siRNA target sequence for TTN (NM_003319.2,35095-35113).
gcggaggcctgactatgat

SEQ ID NO: 104855 - DNA, 19 bp, Homo sapiens
  siRNA target sequence for TTN (NM_003319.2,35114-35132).
ggtggcagtccaaatctgt

SEQ ID NO: 104856 - DNA, 19 bp, Homo sapiens
  siRNA target sequence for TTN (NM_003319.2,35118-35136).
gcagtccaaatctgtcata

SEQ ID NO: 104857 - DNA, 19 bp, Homo sapiens
  siRNA target sequence for TTN (NM_003319.2,35163-35181).
ccgatgactgggaaagagt

SEQ ID NO: 104858 - DNA, 19 bp, Homo sapiens
  siRNA target sequence for TTN (NM_003319.2,35215-35233).
ggttgacagatgtgttgaa

SEQ ID NO: 104859 - DNA, 19 bp, Homo sapiens
  siRNA target sequence for TTN (NM_003319.2,35231-35249).
gaaaaccagatttatgagt

SEQ ID NO: 104860 - DNA, 19 bp, Homo sapiens
  siRNA target sequence for TTN (NM_003319.2,35246-35264).
gagttcagagtgcaaacaa

SEQ ID NO: 104861 - DNA, 19 bp, Homo sapiens
  siRNA target sequence for TTN (NM_003319.2,35251-35269).
cagagtgcaaacaaagaat

SEQ ID NO: 104862 - DNA, 19 bp, Homo sapiens
  siRNA target sequence for TTN (NM_003319.2,35323-35341).
cttacaaaaaccagtactt

SEQ ID NO: 104863 - DNA, 19 bp, Homo sapiens
  siRNA target sequence for TTN (NM_003319.2,35333-35351).
ccagtacttgatctgaaat

SEQ ID NO: 104864 - DNA, 19 bp, Homo sapiens
  siRNA target sequence for TTN (NM_003319.2,35334-35352).
cagtacttgatctgaaatt

SEQ ID NO: 104865 - DNA, 19 bp, Homo sapiens
  siRNA target sequence for TTN (NM_003319.2,35336-35354).
gtacttgatctgaaattaa

SEQ ID NO: 104866 - DNA, 19 bp, Homo sapiens
  siRNA target sequence for TTN (NM_003319.2,35403-35421).
gggttagaggcaaaccatt

SEQ ID NO: 104867 - DNA, 19 bp, Homo sapiens
  siRNA target sequence for TTN (NM_003319.2,35446-35464).
caaagacgctacagactta

SEQ ID NO: 104868 - DNA, 19 bp, Homo sapiens
  siRNA target sequence for TTN (NM_003319.2,35450-35468).
gacgctacagacttaacaa

SEQ ID NO: 104869 - DNA, 19 bp, Homo sapiens
  siRNA target sequence for TTN (NM_003319.2,35452-35470).
cgctacagacttaacaaga

SEQ ID NO: 104870 - DNA, 19 bp, Homo sapiens
  siRNA target sequence for TTN (NM_003319.2,35453-35471).
gctacagacttaacaagat

SEQ ID NO: 104871 - DNA, 19 bp, Homo sapiens
  siRNA target sequence for TTN (NM_003319.2,35472-35490).
caccaagggtcaagattga

SEQ ID NO: 104872 - DNA, 19 bp, Homo sapiens
  siRNA target sequence for TTN (NM_003319.2,35489-35507).
gatacccgtgctgattcat

SEQ ID NO: 104873 - DNA, 19 bp, Homo sapiens
  siRNA target sequence for TTN (NM_003319.2,35493-35511).
cccgtgctgattcatctaa

SEQ ID NO: 104874 - DNA, 19 bp, Homo sapiens
  siRNA target sequence for TTN (NM_003319.2,35494-35512).
ccgtgctgattcatctaaa

SEQ ID NO: 104875 - DNA, 19 bp, Homo sapiens
  siRNA target sequence for TTN (NM_003319.2,35495-35513).
cgtgctgattcatctaaat

SEQ ID NO: 104876 - DNA, 19 bp, Homo sapiens
  siRNA target sequence for TTN (NM_003319.2,35496-35514).
gtgctgattcatctaaatt

SEQ ID NO: 104877 - DNA, 19 bp, Homo sapiens
  siRNA target sequence for TTN (NM_003319.2,35534-35552).
cgaagtgatgggggtaaat

SEQ ID NO: 104878 - DNA, 19 bp, Homo sapiens
  siRNA target sequence for TTN (NM_003319.2,35538-35556).
gtgatgggggtaaatatgt

SEQ ID NO: 104879 - DNA, 19 bp, Homo sapiens
  siRNA target sequence for TTN (NM_003319.2,35543-35561).
gggggtaaatatgtagtta

SEQ ID NO: 104880 - DNA, 19 bp, Homo sapiens
  siRNA target sequence for TTN (NM_003319.2,35555-35573).
gtagttacggcaactaaca

SEQ ID NO: 104881 - DNA, 19 bp, Homo sapiens
  siRNA target sequence for TTN (NM_003319.2,35598-35616).
ccactgtcaatgttttaga

SEQ ID NO: 104882 - DNA, 19 bp, Homo sapiens
  siRNA target sequence for TTN (NM_003319.2,35599-35617).
cactgtcaatgttttagat

SEQ ID NO: 104883 - DNA, 19 bp, Homo sapiens
  siRNA target sequence for TTN (NM_003319.2,35622-35640).
ctggtcctgtgagaaatct

SEQ ID NO: 104884 - DNA, 19 bp, Homo sapiens
  siRNA target sequence for TTN (NM_003319.2,35659-35677).
cagtgataggtgtactgtt

SEQ ID NO: 104885 - DNA, 19 bp, Homo sapiens
  siRNA target sequence for TTN (NM_003319.2,35755-35773).
ggtttggtctacctattct

SEQ ID NO: 104886 - DNA, 19 bp, Homo sapiens
  siRNA target sequence for TTN (NM_003319.2,35785-35803).
gacacctggtactacagta

SEQ ID NO: 104887 - DNA, 19 bp, Homo sapiens
  siRNA target sequence for TTN (NM_003319.2,35799-35817).
cagtaacacgtctcataga

SEQ ID NO: 104888 - DNA, 19 bp, Homo sapiens
  siRNA target sequence for TTN (NM_003319.2,35838-35856).
gagtccgtgcagaaaataa

SEQ ID NO: 104889 - DNA, 19 bp, Homo sapiens
  siRNA target sequence for TTN (NM_003319.2,35867-35885).
gggcctccaacagaaagta

SEQ ID NO: 104890 - DNA, 19 bp, Homo sapiens
  siRNA target sequence for TTN (NM_003319.2,35888-35906).
ccagtcatagccaaaacca

SEQ ID NO: 104891 - DNA, 19 bp, Homo sapiens
  siRNA target sequence for TTN (NM_003319.2,35889-35907).
cagtcatagccaaaaccaa

SEQ ID NO: 104892 - DNA, 19 bp, Homo sapiens
  siRNA target sequence for TTN (NM_003319.2,35893-35911).
catagccaaaaccaagtat

SEQ ID NO: 104893 - DNA, 19 bp, Homo sapiens
  siRNA target sequence for TTN (NM_003319.2,35934-35952).
ccccagaagtcactaaagt

SEQ ID NO: 104894 - DNA, 19 bp, Homo sapiens
  siRNA target sequence for TTN (NM_003319.2,35935-35953).
cccagaagtcactaaagta

SEQ ID NO: 104895 - DNA, 19 bp, Homo sapiens
  siRNA target sequence for TTN (NM_003319.2,35936-35954).
ccagaagtcactaaagtaa

SEQ ID NO: 104896 - DNA, 19 bp, Homo sapiens
  siRNA target sequence for TTN (NM_003319.2,36082-36100).
ccctgagagacgtatgaaa

SEQ ID NO: 104897 - DNA, 19 bp, Homo sapiens
  siRNA target sequence for TTN (NM_003319.2,36084-36102).
ctgagagacgtatgaaagt

SEQ ID NO: 104898 - DNA, 19 bp, Homo sapiens
  siRNA target sequence for TTN (NM_003319.2,36136-36154).
ccgtgtcaaggcagaaaat

SEQ ID NO: 104899 - DNA, 19 bp, Homo sapiens
  siRNA target sequence for TTN (NM_003319.2,36189-36207).
gaccggtggtggcaaaaga

SEQ ID NO: 104900 - DNA, 19 bp, Homo sapiens
  siRNA target sequence for TTN (NM_003319.2,36222-36240).
ctggtccaccaaccaattt

SEQ ID NO: 104901 - DNA, 19 bp, Homo sapiens
  siRNA target sequence for TTN (NM_003319.2,36247-36265).
ggttgatacaaccaaacat

SEQ ID NO: 104902 - DNA, 19 bp, Homo sapiens
  siRNA target sequence for TTN (NM_003319.2,36258-36276).
ccaaacattccataactct

SEQ ID NO: 104903 - DNA, 19 bp, Homo sapiens
  siRNA target sequence for TTN (NM_003319.2,36259-36277).
caaacattccataactctt

SEQ ID NO: 104904 - DNA, 19 bp, Homo sapiens
  siRNA target sequence for TTN (NM_003319.2,36280-36298).
gtggggaaaaccagtctat

SEQ ID NO: 104905 - DNA, 19 bp, Homo sapiens
  siRNA target sequence for TTN (NM_003319.2,36305-36323).
ggtgcaccgatcattggat

SEQ ID NO: 104906 - DNA, 19 bp, Homo sapiens
  siRNA target sequence for TTN (NM_003319.2,36306-36324).
gtgcaccgatcattggata

SEQ ID NO: 104907 - DNA, 19 bp, Homo sapiens
  siRNA target sequence for TTN (NM_003319.2,36309-36327).
caccgatcattggatatgt

SEQ ID NO: 104908 - DNA, 19 bp, Homo sapiens
  siRNA target sequence for TTN (NM_003319.2,36312-36330).
cgatcattggatatgttgt

SEQ ID NO: 104909 - DNA, 19 bp, Homo sapiens
  siRNA target sequence for TTN (NM_003319.2,36373-36391).
ctggaaacggtgtaatgct

SEQ ID NO: 104910 - DNA, 19 bp, Homo sapiens
  siRNA target sequence for TTN (NM_003319.2,36398-36416).
cagcttgtacgcaaggaat

SEQ ID NO: 104911 - DNA, 19 bp, Homo sapiens
  siRNA target sequence for TTN (NM_003319.2,36401-36419).
cttgtacgcaaggaattca

SEQ ID NO: 104912 - DNA, 19 bp, Homo sapiens
  siRNA target sequence for TTN (NM_003319.2,36407-36425).
cgcaaggaattcactgtta

SEQ ID NO: 104913 - DNA, 19 bp, Homo sapiens
  siRNA target sequence for TTN (NM_003319.2,36422-36440).
gttaccagcttggatgaaa

SEQ ID NO: 104914 - DNA, 19 bp, Homo sapiens
  siRNA target sequence for TTN (NM_003319.2,36459-36477).
gggtgtgtgcccaaaacca

SEQ ID NO: 104915 - DNA, 19 bp, Homo sapiens
  siRNA target sequence for TTN (NM_003319.2,36469-36487).
ccaaaaccaagttggtatt

SEQ ID NO: 104916 - DNA, 19 bp, Homo sapiens
  siRNA target sequence for TTN (NM_003319.2,36540-36558).
ctccggagattgatttgga

SEQ ID NO: 104917 - DNA, 19 bp, Homo sapiens
  siRNA target sequence for TTN (NM_003319.2,36599-36617).
cctattcgtctctttgcta

SEQ ID NO: 104918 - DNA, 19 bp, Homo sapiens
  siRNA target sequence for TTN (NM_003319.2,36600-36618).
ctattcgtctctttgctat

SEQ ID NO: 104919 - DNA, 19 bp, Homo sapiens
  siRNA target sequence for TTN (NM_003319.2,36627-36645).
gacgaccagcccctaaagt

SEQ ID NO: 104920 - DNA, 19 bp, Homo sapiens
  siRNA target sequence for TTN (NM_003319.2,36629-36647).
cgaccagcccctaaagtca

SEQ ID NO: 104921 - DNA, 19 bp, Homo sapiens
  siRNA target sequence for TTN (NM_003319.2,36652-36670).
gcgaaaagttggcattgat

SEQ ID NO: 104922 - DNA, 19 bp, Homo sapiens
  siRNA target sequence for TTN (NM_003319.2,36718-36736).
ccttgtcatccccaattct

SEQ ID NO: 104923 - DNA, 19 bp, Homo sapiens
  siRNA target sequence for TTN (NM_003319.2,36719-36737).
cttgtcatccccaattcta

SEQ ID NO: 104924 - DNA, 19 bp, Homo sapiens
  siRNA target sequence for TTN (NM_003319.2,36788-36806).
gaaaaggctgtattcgtaa

SEQ ID NO: 104925 - DNA, 19 bp, Homo sapiens
  siRNA target sequence for TTN (NM_003319.2,36794-36812).
gctgtattcgtaaatgtca

SEQ ID NO: 104926 - DNA, 19 bp, Homo sapiens
  siRNA target sequence for TTN (NM_003319.2,36802-36820).
cgtaaatgtcagagtatta

SEQ ID NO: 104927 - DNA, 19 bp, Homo sapiens
  siRNA target sequence for TTN (NM_003319.2,36830-36848).
gggcctgtgtctgatttaa

SEQ ID NO: 104928 - DNA, 19 bp, Homo sapiens
  siRNA target sequence for TTN (NM_003319.2,36911-36929).
gggagccaagtgacacatt

SEQ ID NO: 104929 - DNA, 19 bp, Homo sapiens
  siRNA target sequence for TTN (NM_003319.2,36912-36930).
ggagccaagtgacacatta

SEQ ID NO: 104930 - DNA, 19 bp, Homo sapiens
  siRNA target sequence for TTN (NM_003319.2,36913-36931).
gagccaagtgacacattat

SEQ ID NO: 104931 - DNA, 19 bp, Homo sapiens
  siRNA target sequence for TTN (NM_003319.2,36915-36933).
gccaagtgacacattatat

SEQ ID NO: 104932 - DNA, 19 bp, Homo sapiens
  siRNA target sequence for TTN (NM_003319.2,36970-36988).
gaccgttaccccagaagtt

SEQ ID NO: 104933 - DNA, 19 bp, Homo sapiens
  siRNA target sequence for TTN (NM_003319.2,36996-37014).
caagcttccatgtaaccaa

SEQ ID NO: 104934 - DNA, 19 bp, Homo sapiens
  siRNA target sequence for TTN (NM_003319.2,37000-37018).
cttccatgtaaccaatctt

SEQ ID NO: 104935 - DNA, 19 bp, Homo sapiens
  siRNA target sequence for TTN (NM_003319.2,37022-37040).
cctgggaatgagtattact

SEQ ID NO: 104936 - DNA, 19 bp, Homo sapiens
  siRNA target sequence for TTN (NM_003319.2,37023-37041).
ctgggaatgagtattactt

SEQ ID NO: 104937 - DNA, 19 bp, Homo sapiens
  siRNA target sequence for TTN (NM_003319.2,37031-37049).
gagtattacttcagagtaa

SEQ ID NO: 104938 - DNA, 19 bp, Homo sapiens
  siRNA target sequence for TTN (NM_003319.2,37069-37087).
ccctggcgtcccaacagat

SEQ ID NO: 104939 - DNA, 19 bp, Homo sapiens
  siRNA target sequence for TTN (NM_003319.2,37127-37145).
ccggatcccccaaggaaat

SEQ ID NO: 104940 - DNA, 19 bp, Homo sapiens
  siRNA target sequence for TTN (NM_003319.2,37128-37146).
cggatcccccaaggaaatt

SEQ ID NO: 104941 - DNA, 19 bp, Homo sapiens
  siRNA target sequence for TTN (NM_003319.2,37129-37147).
ggatcccccaaggaaatta

SEQ ID NO: 104942 - DNA, 19 bp, Homo sapiens
  siRNA target sequence for TTN (NM_003319.2,37202-37220).
cgtgatggaggtgctaaaa

SEQ ID NO: 104943 - DNA, 19 bp, Homo sapiens
  siRNA target sequence for TTN (NM_003319.2,37223-37241).
gatggctacatcactagtt

SEQ ID NO: 104944 - DNA, 19 bp, Homo sapiens
  siRNA target sequence for TTN (NM_003319.2,37279-37297).
gtactcagtggtaaaagat

SEQ ID NO: 104945 - DNA, 19 bp, Homo sapiens
  siRNA target sequence for TTN (NM_003319.2,37439-37457).
cttatgccagagcaaataa

SEQ ID NO: 104946 - DNA, 19 bp, Homo sapiens
  siRNA target sequence for TTN (NM_003319.2,37445-37463).
ccagagcaaataactatca

SEQ ID NO: 104947 - DNA, 19 bp, Homo sapiens
  siRNA target sequence for TTN (NM_003319.2,37446-37464).
cagagcaaataactatcaa

SEQ ID NO: 104948 - DNA, 19 bp, Homo sapiens
  siRNA target sequence for TTN (NM_003319.2,37487-37505).
gaagcccatgtgtatggaa

SEQ ID NO: 104949 - DNA, 19 bp, Homo sapiens
  siRNA target sequence for TTN (NM_003319.2,37564-37582).
cctggcagtgcataaagca

SEQ ID NO: 104950 - DNA, 19 bp, Homo sapiens
  siRNA target sequence for TTN (NM_003319.2,37593-37611).
caattctgatcataaaaga

SEQ ID NO: 104951 - DNA, 19 bp, Homo sapiens
  siRNA target sequence for TTN (NM_003319.2,37713-37731).
cccctcagcctccatttga

SEQ ID NO: 104952 - DNA, 19 bp, Homo sapiens
  siRNA target sequence for TTN (NM_003319.2,37720-37738).
gcctccatttgacatttct

SEQ ID NO: 104953 - DNA, 19 bp, Homo sapiens
  siRNA target sequence for TTN (NM_003319.2,37817-37835).
gtggagaagtgtgatgtaa

SEQ ID NO: 104954 - DNA, 19 bp, Homo sapiens
  siRNA target sequence for TTN (NM_003319.2,37859-37877).
ctagcttcagtcacaaaaa

SEQ ID NO: 104955 - DNA, 19 bp, Homo sapiens
  siRNA target sequence for TTN (NM_003319.2,38039-38057).
gtcaacaaggactgtattt

SEQ ID NO: 104956 - DNA, 19 bp, Homo sapiens
  siRNA target sequence for TTN (NM_003319.2,38170-38188).
ccggtcaactgaatatcct

SEQ ID NO: 104957 - DNA, 19 bp, Homo sapiens
  siRNA target sequence for TTN (NM_003319.2,38171-38189).
cggtcaactgaatatcctt

SEQ ID NO: 104958 - DNA, 19 bp, Homo sapiens
  siRNA target sequence for TTN (NM_003319.2,38201-38219).
gtagaaggtcttgagtatt

SEQ ID NO: 104959 - DNA, 19 bp, Homo sapiens
  siRNA target sequence for TTN (NM_003319.2,38226-38244).
gaatctatgccctaaacaa

SEQ ID NO: 104960 - DNA, 19 bp, Homo sapiens
  siRNA target sequence for TTN (NM_003319.2,38333-38351).
gtcaccaagagtactgtat

SEQ ID NO: 104961 - DNA, 19 bp, Homo sapiens
  siRNA target sequence for TTN (NM_003319.2,38335-38353).
caccaagagtactgtatct

SEQ ID NO: 104962 - DNA, 19 bp, Homo sapiens
  siRNA target sequence for TTN (NM_003319.2,38337-38355).
ccaagagtactgtatctct

SEQ ID NO: 104963 - DNA, 19 bp, Homo sapiens
  siRNA target sequence for TTN (NM_003319.2,38359-38377).
ctgggctcgtccaaagcat

SEQ ID NO: 104964 - DNA, 19 bp, Homo sapiens
  siRNA target sequence for TTN (NM_003319.2,38407-38425).
cgtagaagcttgcaaactt

SEQ ID NO: 104965 - DNA, 19 bp, Homo sapiens
  siRNA target sequence for TTN (NM_003319.2,38487-38505).
cagctactggcctagaaga

SEQ ID NO: 104966 - DNA, 19 bp, Homo sapiens
  siRNA target sequence for TTN (NM_003319.2,38534-38552).
gccaggaccgcggtaaaca

SEQ ID NO: 104967 - DNA, 19 bp, Homo sapiens
  siRNA target sequence for TTN (NM_003319.2,38535-38553).
ccaggaccgcggtaaacat

SEQ ID NO: 104968 - DNA, 19 bp, Homo sapiens
  siRNA target sequence for TTN (NM_003319.2,38536-38554).
caggaccgcggtaaacatt

SEQ ID NO: 104969 - DNA, 19 bp, Homo sapiens
  siRNA target sequence for TTN (NM_003319.2,38551-38569).
cattagcccaccttctgaa

SEQ ID NO: 104970 - DNA, 19 bp, Homo sapiens
  siRNA target sequence for TTN (NM_003319.2,38623-38641).
gagtgtggctatgaaatct

SEQ ID NO: 104971 - DNA, 19 bp, Homo sapiens
  siRNA target sequence for TTN (NM_003319.2,38625-38643).
gtgtggctatgaaatcttt

SEQ ID NO: 104972 - DNA, 19 bp, Homo sapiens
  siRNA target sequence for TTN (NM_003319.2,38671-38689).
ctgcttggatgctactgtt

SEQ ID NO: 104973 - DNA, 19 bp, Homo sapiens
  siRNA target sequence for TTN (NM_003319.2,38673-38691).
gcttggatgctactgtttt

SEQ ID NO: 104974 - DNA, 19 bp, Homo sapiens
  siRNA target sequence for TTN (NM_003319.2,38699-38717).
ccgatgccaacagtttctt

SEQ ID NO: 104975 - DNA, 19 bp, Homo sapiens
  siRNA target sequence for TTN (NM_003319.2,38704-38722).
gccaacagtttcttggaaa

SEQ ID NO: 104976 - DNA, 19 bp, Homo sapiens
  siRNA target sequence for TTN (NM_003319.2,38859-38877).
ctaaatcagccaccattaa

SEQ ID NO: 104977 - DNA, 19 bp, Homo sapiens
  siRNA target sequence for TTN (NM_003319.2,38868-38886).
ccaccattaagcttaaagt

SEQ ID NO: 104978 - DNA, 19 bp, Homo sapiens
  siRNA target sequence for TTN (NM_003319.2,38878-38896).
gcttaaagtgttagataaa

SEQ ID NO: 104979 - DNA, 19 bp, Homo sapiens
  siRNA target sequence for TTN (NM_003319.2,38959-38977).
ggaaccgcctcttgaagat

SEQ ID NO: 104980 - DNA, 19 bp, Homo sapiens
  siRNA target sequence for TTN (NM_003319.2,39070-39088).
ctgcagcgtggagaaactt

SEQ ID NO: 104981 - DNA, 19 bp, Homo sapiens
  siRNA target sequence for TTN (NM_003319.2,39075-39093).
gcgtggagaaacttataga

SEQ ID NO: 104982 - DNA, 19 bp, Homo sapiens
  siRNA target sequence for TTN (NM_003319.2,39112-39130).
ccgtatttgtgctgaaaat

SEQ ID NO: 104983 - DNA, 19 bp, Homo sapiens
  siRNA target sequence for TTN (NM_003319.2,39282-39300).
cacccatcactggctattt

SEQ ID NO: 104984 - DNA, 19 bp, Homo sapiens
  siRNA target sequence for TTN (NM_003319.2,39333-39351).
ggactaaggtcaacagaaa

SEQ ID NO: 104985 - DNA, 19 bp, Homo sapiens
  siRNA target sequence for TTN (NM_003319.2,39353-39371).
cctattatagaaagaacat

SEQ ID NO: 104986 - DNA, 19 bp, Homo sapiens
  siRNA target sequence for TTN (NM_003319.2,39392-39410).
gaaggtaccgaatatgagt

SEQ ID NO: 104987 - DNA, 19 bp, Homo sapiens
  siRNA target sequence for TTN (NM_003319.2,39409-39427).
gttccgtgttacagctata

SEQ ID NO: 104988 - DNA, 19 bp, Homo sapiens
  siRNA target sequence for TTN (NM_003319.2,39412-39430).
ccgtgttacagctataaat

SEQ ID NO: 104989 - DNA, 19 bp, Homo sapiens
  siRNA target sequence for TTN (NM_003319.2,39413-39431).
cgtgttacagctataaata

SEQ ID NO: 104990 - DNA, 19 bp, Homo sapiens
  siRNA target sequence for TTN (NM_003319.2,39506-39524).
ccggctttccctaaagtat

SEQ ID NO: 104991 - DNA, 19 bp, Homo sapiens
  siRNA target sequence for TTN (NM_003319.2,39515-39533).
cctaaagtatatgatacaa

SEQ ID NO: 104992 - DNA, 19 bp, Homo sapiens
  siRNA target sequence for TTN (NM_003319.2,39536-39554).
cgcagctctgtgagtctat

SEQ ID NO: 104993 - DNA, 19 bp, Homo sapiens
  siRNA target sequence for TTN (NM_003319.2,39596-39614).
ggttatctcgttgaagtaa

SEQ ID NO: 104994 - DNA, 19 bp, Homo sapiens
  siRNA target sequence for TTN (NM_003319.2,39597-39615).
gttatctcgttgaagtaaa

SEQ ID NO: 104995 - DNA, 19 bp, Homo sapiens
  siRNA target sequence for TTN (NM_003319.2,39617-39635).
cgggctgactccgataact

SEQ ID NO: 104996 - DNA, 19 bp, Homo sapiens
  siRNA target sequence for TTN (NM_003319.2,39643-39661).
gtgcaacttaccacagaat

SEQ ID NO: 104997 - DNA, 19 bp, Homo sapiens
  siRNA target sequence for TTN (NM_003319.2,39694-39712).
gatggaagacacacaatat

SEQ ID NO: 104998 - DNA, 19 bp, Homo sapiens
  siRNA target sequence for TTN (NM_003319.2,39718-39736).
ccgtgtgtatgccgttaat

SEQ ID NO: 104999 - DNA, 19 bp, Homo sapiens
  siRNA target sequence for TTN (NM_003319.2,39719-39737).
cgtgtgtatgccgttaata

SEQ ID NO: 105000 - DNA, 19 bp, Homo sapiens
  siRNA target sequence for TTN (NM_003319.2,39720-39738).
gtgtgtatgccgttaataa

SEQ ID NO: 105001 - DNA, 19 bp, Homo sapiens
  siRNA target sequence for TTN (NM_003319.2,39724-39742).
gtatgccgttaataagatt

SEQ ID NO: 105002 - DNA, 19 bp, Homo sapiens
  siRNA target sequence for TTN (NM_003319.2,39728-39746).
gccgttaataagattggat

SEQ ID NO: 105003 - DNA, 19 bp, Homo sapiens
  siRNA target sequence for TTN (NM_003319.2,39756-39774).
ccagtgatgtgccagataa

SEQ ID NO: 105004 - DNA, 19 bp, Homo sapiens
  siRNA target sequence for TTN (NM_003319.2,39757-39775).
cagtgatgtgccagataaa

SEQ ID NO: 105005 - DNA, 19 bp, Homo sapiens
  siRNA target sequence for TTN (NM_003319.2,39784-39802).
caaggacatcttaattcca

SEQ ID NO: 105006 - DNA, 19 bp, Homo sapiens
  siRNA target sequence for TTN (NM_003319.2,39812-39830).
gaacttgatgcggacttaa

SEQ ID NO: 105007 - DNA, 19 bp, Homo sapiens
  siRNA target sequence for TTN (NM_003319.2,39815-39833).
cttgatgcggacttaagga

SEQ ID NO: 105008 - DNA, 19 bp, Homo sapiens
  siRNA target sequence for TTN (NM_003319.2,39848-39866).
cgtgctggagttactatga

SEQ ID NO: 105009 - DNA, 19 bp, Homo sapiens
  siRNA target sequence for TTN (NM_003319.2,39855-39873).
gagttactatgagactata

SEQ ID NO: 105010 - DNA, 19 bp, Homo sapiens
  siRNA target sequence for TTN (NM_003319.2,39888-39906).
gacgcccacctccaaagat

SEQ ID NO: 105011 - DNA, 19 bp, Homo sapiens
  siRNA target sequence for TTN (NM_003319.2,39893-39911).
ccacctccaaagattactt

SEQ ID NO: 105012 - DNA, 19 bp, Homo sapiens
  siRNA target sequence for TTN (NM_003319.2,39904-39922).
gattacttggtctaaacca

SEQ ID NO: 105013 - DNA, 19 bp, Homo sapiens
  siRNA target sequence for TTN (NM_003319.2,39915-39933).
ctaaaccaaatgtcaatct

SEQ ID NO: 105014 - DNA, 19 bp, Homo sapiens
  siRNA target sequence for TTN (NM_003319.2,39955-39973).
cataaagtcaactgacttt

SEQ ID NO: 105015 - DNA, 19 bp, Homo sapiens
  siRNA target sequence for TTN (NM_003319.2,40049-40067).
ggtaaaaaggaatatacca

SEQ ID NO: 105016 - DNA, 19 bp, Homo sapiens
  siRNA target sequence for TTN (NM_003319.2,40050-40068).
gtaaaaaggaatataccat

SEQ ID NO: 105017 - DNA, 19 bp, Homo sapiens
  siRNA target sequence for TTN (NM_003319.2,40100-40118).
cctgtcaatgtgactgtta

SEQ ID NO: 105018 - DNA, 19 bp, Homo sapiens
  siRNA target sequence for TTN (NM_003319.2,40175-40193).
ggaagccccatcataaact

SEQ ID NO: 105019 - DNA, 19 bp, Homo sapiens
  siRNA target sequence for TTN (NM_003319.2,40176-40194).
gaagccccatcataaacta

SEQ ID NO: 105020 - DNA, 19 bp, Homo sapiens
  siRNA target sequence for TTN (NM_003319.2,40179-40197).
gccccatcataaactatgt

SEQ ID NO: 105021 - DNA, 19 bp, Homo sapiens
  siRNA target sequence for TTN (NM_003319.2,40211-40229).
gatgcagagaggaaatcct

SEQ ID NO: 105022 - DNA, 19 bp, Homo sapiens
  siRNA target sequence for TTN (NM_003319.2,40355-40373).
cgtgatgctgtcaaagctt

SEQ ID NO: 105023 - DNA, 19 bp, Homo sapiens
  siRNA target sequence for TTN (NM_003319.2,40389-40407).
cagttgtggacctgaaagt

SEQ ID NO: 105024 - DNA, 19 bp, Homo sapiens
  siRNA target sequence for TTN (NM_003319.2,40402-40420).
gaaagtgaggtctgtatct

SEQ ID NO: 105025 - DNA, 19 bp, Homo sapiens
  siRNA target sequence for TTN (NM_003319.2,40467-40485).
gaagtcggattattggata

SEQ ID NO: 105026 - DNA, 19 bp, Homo sapiens
  siRNA target sequence for TTN (NM_003319.2,40473-40491).
ggattattggatatgtagt

SEQ ID NO: 105027 - DNA, 19 bp, Homo sapiens
  siRNA target sequence for TTN (NM_003319.2,40520-40538).
caacgagttatgaaatcct

SEQ ID NO: 105028 - DNA, 19 bp, Homo sapiens
  siRNA target sequence for TTN (NM_003319.2,40523-40541).
cgagttatgaaatccttaa

SEQ ID NO: 105029 - DNA, 19 bp, Homo sapiens
  siRNA target sequence for TTN (NM_003319.2,40622-40640).
ggaaccccaagcgaaatca

SEQ ID NO: 105030 - DNA, 19 bp, Homo sapiens
  siRNA target sequence for TTN (NM_003319.2,40667-40685).
gctcctgatcttgacttaa

SEQ ID NO: 105031 - DNA, 19 bp, Homo sapiens
  siRNA target sequence for TTN (NM_003319.2,40668-40686).
ctcctgatcttgacttaaa

SEQ ID NO: 105032 - DNA, 19 bp, Homo sapiens
  siRNA target sequence for TTN (NM_003319.2,40702-40720).
gtgctacttggctaaagaa

SEQ ID NO: 105033 - DNA, 19 bp, Homo sapiens
  siRNA target sequence for TTN (NM_003319.2,40725-40743).
gcaacttccggcttaagat

SEQ ID NO: 105034 - DNA, 19 bp, Homo sapiens
  siRNA target sequence for TTN (NM_003319.2,40734-40752).
ggcttaagatccccataaa

SEQ ID NO: 105035 - DNA, 19 bp, Homo sapiens
  siRNA target sequence for TTN (NM_003319.2,40735-40753).
gcttaagatccccataaaa

SEQ ID NO: 105036 - DNA, 19 bp, Homo sapiens
  siRNA target sequence for TTN (NM_003319.2,40826-40844).
gagtcatctgcggttaaca

SEQ ID NO: 105037 - DNA, 19 bp, Homo sapiens
  siRNA target sequence for TTN (NM_003319.2,40828-40846).
gtcatctgcggttaacaca

SEQ ID NO: 105038 - DNA, 19 bp, Homo sapiens
  siRNA target sequence for TTN (NM_003319.2,40835-40853).
gcggttaacacaactctta

SEQ ID NO: 105039 - DNA, 19 bp, Homo sapiens
  siRNA target sequence for TTN (NM_003319.2,40836-40854).
cggttaacacaactcttat

SEQ ID NO: 105040 - DNA, 19 bp, Homo sapiens
  siRNA target sequence for TTN (NM_003319.2,40837-40855).
ggttaacacaactcttata

SEQ ID NO: 105041 - DNA, 19 bp, Homo sapiens
  siRNA target sequence for TTN (NM_003319.2,40856-40874).
gtgtacgattgccaaaaat

SEQ ID NO: 105042 - DNA, 19 bp, Homo sapiens
  siRNA target sequence for TTN (NM_003319.2,40861-40879).
cgattgccaaaaatctgat

SEQ ID NO: 105043 - DNA, 19 bp, Homo sapiens
  siRNA target sequence for TTN (NM_003319.2,40929-40947).
gaactatctccataaaggt

SEQ ID NO: 105044 - DNA, 19 bp, Homo sapiens
  siRNA target sequence for TTN (NM_003319.2,41020-41038).
gtgggctcctccaaaggat

SEQ ID NO: 105045 - DNA, 19 bp, Homo sapiens
  siRNA target sequence for TTN (NM_003319.2,41058-41076).
ccaactatatcctagagaa

SEQ ID NO: 105046 - DNA, 19 bp, Homo sapiens
  siRNA target sequence for TTN (NM_003319.2,41150-41168).
cttcatgagggcatggaat

SEQ ID NO: 105047 - DNA, 19 bp, Homo sapiens
  siRNA target sequence for TTN (NM_003319.2,41176-41194).
cagggtcagtgccgaaaat

SEQ ID NO: 105048 - DNA, 19 bp, Homo sapiens
  siRNA target sequence for TTN (NM_003319.2,41204-41222).
gtaggggaaggcctgaaat

SEQ ID NO: 105049 - DNA, 19 bp, Homo sapiens
  siRNA target sequence for TTN (NM_003319.2,41238-41256).
cgagacatccatttgatgt

SEQ ID NO: 105050 - DNA, 19 bp, Homo sapiens
  siRNA target sequence for TTN (NM_003319.2,41293-41311).
cagacacgattcagtatct

SEQ ID NO: 105051 - DNA, 19 bp, Homo sapiens
  siRNA target sequence for TTN (NM_003319.2,41295-41313).
gacacgattcagtatctct

SEQ ID NO: 105052 - DNA, 19 bp, Homo sapiens
  siRNA target sequence for TTN (NM_003319.2,41297-41315).
cacgattcagtatctctaa

SEQ ID NO: 105053 - DNA, 19 bp, Homo sapiens
  siRNA target sequence for TTN (NM_003319.2,41299-41317).
cgattcagtatctctaact

SEQ ID NO: 105054 - DNA, 19 bp, Homo sapiens
  siRNA target sequence for TTN (NM_003319.2,41320-41338).
gactgaccccaagaaaact

SEQ ID NO: 105055 - DNA, 19 bp, Homo sapiens
  siRNA target sequence for TTN (NM_003319.2,41349-41367).
caattacagggtatcatct

SEQ ID NO: 105056 - DNA, 19 bp, Homo sapiens
  siRNA target sequence for TTN (NM_003319.2,41358-41376).
ggtatcatctcgagttcaa

SEQ ID NO: 105057 - DNA, 19 bp, Homo sapiens
  siRNA target sequence for TTN (NM_003319.2,41434-41452).
ctttaaagtgacaggatta

SEQ ID NO: 105058 - DNA, 19 bp, Homo sapiens
  siRNA target sequence for TTN (NM_003319.2,41476-41494).
ccgagttatggcaatcaat

SEQ ID NO: 105059 - DNA, 19 bp, Homo sapiens
  siRNA target sequence for TTN (NM_003319.2,41477-41495).
cgagttatggcaatcaatt

SEQ ID NO: 105060 - DNA, 19 bp, Homo sapiens
  siRNA target sequence for TTN (NM_003319.2,41478-41496).
gagttatggcaatcaattt

SEQ ID NO: 105061 - DNA, 19 bp, Homo sapiens
  siRNA target sequence for TTN (NM_003319.2,41630-41648).
gacggtggtcataagttaa

SEQ ID NO: 105062 - DNA, 19 bp, Homo sapiens
  siRNA target sequence for TTN (NM_003319.2,41639-41657).
cataagttaactggatata

SEQ ID NO: 105063 - DNA, 19 bp, Homo sapiens
  siRNA target sequence for TTN (NM_003319.2,41672-41690).
gatctaccttcgaagtctt

SEQ ID NO: 105064 - DNA, 19 bp, Homo sapiens
  siRNA target sequence for TTN (NM_003319.2,41733-41751).
ctgtaactgaccttgttga

SEQ ID NO: 105065 - DNA, 19 bp, Homo sapiens
  siRNA target sequence for TTN (NM_003319.2,41906-41924).
gcaggggataccattgttt

SEQ ID NO: 105066 - DNA, 19 bp, Homo sapiens
  siRNA target sequence for TTN (NM_003319.2,41987-42005).
gacattagaccatcagata

SEQ ID NO: 105067 - DNA, 19 bp, Homo sapiens
  siRNA target sequence for TTN (NM_003319.2,42033-42051).
cttccatgcttactatcaa

SEQ ID NO: 105068 - DNA, 19 bp, Homo sapiens
  siRNA target sequence for TTN (NM_003319.2,42037-42055).
catgcttactatcaagtat

SEQ ID NO: 105069 - DNA, 19 bp, Homo sapiens
  siRNA target sequence for TTN (NM_003319.2,42052-42070).
gtatgccactagaaaagat

SEQ ID NO: 105070 - DNA, 19 bp, Homo sapiens
  siRNA target sequence for TTN (NM_003319.2,42068-42086).
gatgcgggtgaatatacca

SEQ ID NO: 105071 - DNA, 19 bp, Homo sapiens
  siRNA target sequence for TTN (NM_003319.2,42111-42129).
cgaaggtggaacatgtgaa

SEQ ID NO: 105072 - DNA, 19 bp, Homo sapiens
  siRNA target sequence for TTN (NM_003319.2,42130-42148).
ggtaacagtccttgatgta

SEQ ID NO: 105073 - DNA, 19 bp, Homo sapiens
  siRNA target sequence for TTN (NM_003319.2,42155-42173).
cccccaggtcctgttgaaa

SEQ ID NO: 105074 - DNA, 19 bp, Homo sapiens
  siRNA target sequence for TTN (NM_003319.2,42156-42174).
ccccaggtcctgttgaaat

SEQ ID NO: 105075 - DNA, 19 bp, Homo sapiens
  siRNA target sequence for TTN (NM_003319.2,42161-42179).
ggtcctgttgaaatcagta

SEQ ID NO: 105076 - DNA, 19 bp, Homo sapiens
  siRNA target sequence for TTN (NM_003319.2,42230-42248).
ggcggctcaccaattaagt

SEQ ID NO: 105077 - DNA, 19 bp, Homo sapiens
  siRNA target sequence for TTN (NM_003319.2,42237-42255).
caccaattaagtcctatat

SEQ ID NO: 105078 - DNA, 19 bp, Homo sapiens
  siRNA target sequence for TTN (NM_003319.2,42240-42258).
caattaagtcctatatact

SEQ ID NO: 105079 - DNA, 19 bp, Homo sapiens
  siRNA target sequence for TTN (NM_003319.2,42267-42285).
gagaaaccagccgactttt

SEQ ID NO: 105080 - DNA, 19 bp, Homo sapiens
  siRNA target sequence for TTN (NM_003319.2,42338-42356).
cttatccaaggaaatgagt

SEQ ID NO: 105081 - DNA, 19 bp, Homo sapiens
  siRNA target sequence for TTN (NM_003319.2,42407-42425).
cagtctgaacctgtcaaaa

SEQ ID NO: 105082 - DNA, 19 bp, Homo sapiens
  siRNA target sequence for TTN (NM_003319.2,42464-42482).
ccagaggtatcaaatgtca

SEQ ID NO: 105083 - DNA, 19 bp, Homo sapiens
  siRNA target sequence for TTN (NM_003319.2,42470-42488).
gtatcaaatgtcactaaga

SEQ ID NO: 105084 - DNA, 19 bp, Homo sapiens
  siRNA target sequence for TTN (NM_003319.2,42534-42552).
gcgaaattacaggatatca

SEQ ID NO: 105085 - DNA, 19 bp, Homo sapiens
  siRNA target sequence for TTN (NM_003319.2,42535-42553).
cgaaattacaggatatcat

SEQ ID NO: 105086 - DNA, 19 bp, Homo sapiens
  siRNA target sequence for TTN (NM_003319.2,42580-42598).
gcgatgggtgagagcaata

SEQ ID NO: 105087 - DNA, 19 bp, Homo sapiens
  siRNA target sequence for TTN (NM_003319.2,42581-42599).
cgatgggtgagagcaataa

SEQ ID NO: 105088 - DNA, 19 bp, Homo sapiens
  siRNA target sequence for TTN (NM_003319.2,42582-42600).
gatgggtgagagcaataaa

SEQ ID NO: 105089 - DNA, 19 bp, Homo sapiens
  siRNA target sequence for TTN (NM_003319.2,42613-42631).
cgatctcaggtgcaaagta

SEQ ID NO: 105090 - DNA, 19 bp, Homo sapiens
  siRNA target sequence for TTN (NM_003319.2,42727-42745).
gatgaaagatgcagcatat

SEQ ID NO: 105091 - DNA, 19 bp, Homo sapiens
  siRNA target sequence for TTN (NM_003319.2,42767-42785).
ccgcatgtcactgatacta

SEQ ID NO: 105092 - DNA, 19 bp, Homo sapiens
  siRNA target sequence for TTN (NM_003319.2,42810-42828).
ggggcaagcctcattatga

SEQ ID NO: 105093 - DNA, 19 bp, Homo sapiens
  siRNA target sequence for TTN (NM_003319.2,42811-42829).
gggcaagcctcattatgat

SEQ ID NO: 105094 - DNA, 19 bp, Homo sapiens
  siRNA target sequence for TTN (NM_003319.2,42876-42894).
gagacgaggcctggataaa

SEQ ID NO: 105095 - DNA, 19 bp, Homo sapiens
  siRNA target sequence for TTN (NM_003319.2,42880-42898).
cgaggcctggataaaagat

SEQ ID NO: 105096 - DNA, 19 bp, Homo sapiens
  siRNA target sequence for TTN (NM_003319.2,42903-42921).
caggaaccgccctcagaat

SEQ ID NO: 105097 - DNA, 19 bp, Homo sapiens
  siRNA target sequence for TTN (NM_003319.2,43048-43066).
ggctcctgattttgaacta

SEQ ID NO: 105098 - DNA, 19 bp, Homo sapiens
  siRNA target sequence for TTN (NM_003319.2,43072-43090).
cgagcttcgaagaacactt

SEQ ID NO: 105099 - DNA, 19 bp, Homo sapiens
  siRNA target sequence for TTN (NM_003319.2,43075-43093).
gcttcgaagaacacttgtt

SEQ ID NO: 105100 - DNA, 19 bp, Homo sapiens
  siRNA target sequence for TTN (NM_003319.2,43079-43097).
cgaagaacacttgttgtta

SEQ ID NO: 105101 - DNA, 19 bp, Homo sapiens
  siRNA target sequence for TTN (NM_003319.2,43101-43119).
caggactcagtattaggat

SEQ ID NO: 105102 - DNA, 19 bp, Homo sapiens
  siRNA target sequence for TTN (NM_003319.2,43154-43172).
gtgacatggaccaaagata

SEQ ID NO: 105103 - DNA, 19 bp, Homo sapiens
  siRNA target sequence for TTN (NM_003319.2,43161-43179).
ggaccaaagataacatcaa

SEQ ID NO: 105104 - DNA, 19 bp, Homo sapiens
  siRNA target sequence for TTN (NM_003319.2,43190-43208).
cgagccaacattgaaaata

SEQ ID NO: 105105 - DNA, 19 bp, Homo sapiens
  siRNA target sequence for TTN (NM_003319.2,43202-43220).
gaaaatacggaatcattta

SEQ ID NO: 105106 - DNA, 19 bp, Homo sapiens
  siRNA target sequence for TTN (NM_003319.2,43226-43244).
ctgattatcccagaatgta

SEQ ID NO: 105107 - DNA, 19 bp, Homo sapiens
  siRNA target sequence for TTN (NM_003319.2,43234-43252).
cccagaatgtaacagatat

SEQ ID NO: 105108 - DNA, 19 bp, Homo sapiens
  siRNA target sequence for TTN (NM_003319.2,43248-43266).
gatatgataccggtaaatt

SEQ ID NO: 105109 - DNA, 19 bp, Homo sapiens
  siRNA target sequence for TTN (NM_003319.2,43355-43373).
cggcctacagacatcacaa

SEQ ID NO: 105110 - DNA, 19 bp, Homo sapiens
  siRNA target sequence for TTN (NM_003319.2,43393-43411).
ctgggacctccctctgata

SEQ ID NO: 105111 - DNA, 19 bp, Homo sapiens
  siRNA target sequence for TTN (NM_003319.2,43395-43413).
gggacctccctctgataga

SEQ ID NO: 105112 - DNA, 19 bp, Homo sapiens
  siRNA target sequence for TTN (NM_003319.2,43412-43430).
gatggaggctcacgtataa

SEQ ID NO: 105113 - DNA, 19 bp, Homo sapiens
  siRNA target sequence for TTN (NM_003319.2,43415-43433).
ggaggctcacgtataacaa

SEQ ID NO: 105114 - DNA, 19 bp, Homo sapiens
  siRNA target sequence for TTN (NM_003319.2,43416-43434).
gaggctcacgtataacaaa

SEQ ID NO: 105115 - DNA, 19 bp, Homo sapiens
  siRNA target sequence for TTN (NM_003319.2,43418-43436).
ggctcacgtataacaaact

SEQ ID NO: 105116 - DNA, 19 bp, Homo sapiens
  siRNA target sequence for TTN (NM_003319.2,43419-43437).
gctcacgtataacaaacta

SEQ ID NO: 105117 - DNA, 19 bp, Homo sapiens
  siRNA target sequence for TTN (NM_003319.2,43422-43440).
cacgtataacaaactacat

SEQ ID NO: 105118 - DNA, 19 bp, Homo sapiens
  siRNA target sequence for TTN (NM_003319.2,43454-43472).
gaagcaacacggaaatctt

SEQ ID NO: 105119 - DNA, 19 bp, Homo sapiens
  siRNA target sequence for TTN (NM_003319.2,43457-43475).
gcaacacggaaatcttatt

SEQ ID NO: 105120 - DNA, 19 bp, Homo sapiens
  siRNA target sequence for TTN (NM_003319.2,43631-43649).
ccaccagacagccttaaca

SEQ ID NO: 105121 - DNA, 19 bp, Homo sapiens
  siRNA target sequence for TTN (NM_003319.2,43635-43653).
cagacagccttaacatcat

SEQ ID NO: 105122 - DNA, 19 bp, Homo sapiens
  siRNA target sequence for TTN (NM_003319.2,43760-43778).
cagtggacccacatcacaa

SEQ ID NO: 105123 - DNA, 19 bp, Homo sapiens
  siRNA target sequence for TTN (NM_003319.2,43780-43798).
cgtgaaagggttagaatgt

SEQ ID NO: 105124 - DNA, 19 bp, Homo sapiens
  siRNA target sequence for TTN (NM_003319.2,43864-43882).
gagaagtgcccctagagaa

SEQ ID NO: 105125 - DNA, 19 bp, Homo sapiens
  siRNA target sequence for TTN (NM_003319.2,43933-43951).
ccgtggcatctatcagaaa

SEQ ID NO: 105126 - DNA, 19 bp, Homo sapiens
  siRNA target sequence for TTN (NM_003319.2,43935-43953).
gtggcatctatcagaaact

SEQ ID NO: 105127 - DNA, 19 bp, Homo sapiens
  siRNA target sequence for TTN (NM_003319.2,43962-43980).
ccaaagctggtgacaacat

SEQ ID NO: 105128 - DNA, 19 bp, Homo sapiens
  siRNA target sequence for TTN (NM_003319.2,44058-44076).
cacagagagttaattttga

SEQ ID NO: 105129 - DNA, 19 bp, Homo sapiens
  siRNA target sequence for TTN (NM_003319.2,44080-44098).
cacagcgacttcaaccatt

SEQ ID NO: 105130 - DNA, 19 bp, Homo sapiens
  siRNA target sequence for TTN (NM_003319.2,44082-44100).
cagcgacttcaaccatttt

SEQ ID NO: 105131 - DNA, 19 bp, Homo sapiens
  siRNA target sequence for TTN (NM_003319.2,44084-44102).
gcgacttcaaccattttaa

SEQ ID NO: 105132 - DNA, 19 bp, Homo sapiens
  siRNA target sequence for TTN (NM_003319.2,44126-44144).
gatagtgggccctatccat

SEQ ID NO: 105133 - DNA, 19 bp, Homo sapiens
  siRNA target sequence for TTN (NM_003319.2,44166-44184).
gagaggttggtgatgtcat

SEQ ID NO: 105134 - DNA, 19 bp, Homo sapiens
  siRNA target sequence for TTN (NM_003319.2,44214-44232).
cacctactggaccaatcaa

SEQ ID NO: 105135 - DNA, 19 bp, Homo sapiens
  siRNA target sequence for TTN (NM_003319.2,44287-44305).
cgatggtggtgtaccaata

SEQ ID NO: 105136 - DNA, 19 bp, Homo sapiens
  siRNA target sequence for TTN (NM_003319.2,44327-44345).
cggcagactgacagtacta

SEQ ID NO: 105137 - DNA, 19 bp, Homo sapiens
  siRNA target sequence for TTN (NM_003319.2,44340-44358).
gtactacctgggttgagtt

SEQ ID NO: 105138 - DNA, 19 bp, Homo sapiens
  siRNA target sequence for TTN (NM_003319.2,44356-44374).
gttagcaaccaccgttata

SEQ ID NO: 105139 - DNA, 19 bp, Homo sapiens
  siRNA target sequence for TTN (NM_003319.2,44360-44378).
gcaaccaccgttatacgta

SEQ ID NO: 105140 - DNA, 19 bp, Homo sapiens
  siRNA target sequence for TTN (NM_003319.2,44368-44386).
cgttatacgtactacctat

SEQ ID NO: 105141 - DNA, 19 bp, Homo sapiens
  siRNA target sequence for TTN (NM_003319.2,44369-44387).
gttatacgtactacctata

SEQ ID NO: 105142 - DNA, 19 bp, Homo sapiens
  siRNA target sequence for TTN (NM_003319.2,44395-44413).
ccgccttactactggatta

SEQ ID NO: 105143 - DNA, 19 bp, Homo sapiens
  siRNA target sequence for TTN (NM_003319.2,44397-44415).
gccttactactggattaga

SEQ ID NO: 105144 - DNA, 19 bp, Homo sapiens
  siRNA target sequence for TTN (NM_003319.2,44403-44421).
ctactggattagagtatca

SEQ ID NO: 105145 - DNA, 19 bp, Homo sapiens
  siRNA target sequence for TTN (NM_003319.2,44406-44424).
ctggattagagtatcagtt

SEQ ID NO: 105146 - DNA, 19 bp, Homo sapiens
  siRNA target sequence for TTN (NM_003319.2,44483-44501).
gttgccaactatccattta

SEQ ID NO: 105147 - DNA, 19 bp, Homo sapiens
  siRNA target sequence for TTN (NM_003319.2,44487-44505).
ccaactatccatttaaggt

SEQ ID NO: 105148 - DNA, 19 bp, Homo sapiens
  siRNA target sequence for TTN (NM_003319.2,44488-44506).
caactatccatttaaggtt

SEQ ID NO: 105149 - DNA, 19 bp, Homo sapiens
  siRNA target sequence for TTN (NM_003319.2,44537-44555).
gcagttaccaaggattcaa

SEQ ID NO: 105150 - DNA, 19 bp, Homo sapiens
  siRNA target sequence for TTN (NM_003319.2,44596-44614).
ccccattttaggatatcat

SEQ ID NO: 105151 - DNA, 19 bp, Homo sapiens
  siRNA target sequence for TTN (NM_003319.2,44598-44616).
ccattttaggatatcatgt

SEQ ID NO: 105152 - DNA, 19 bp, Homo sapiens
  siRNA target sequence for TTN (NM_003319.2,44599-44617).
cattttaggatatcatgtt

SEQ ID NO: 105153 - DNA, 19 bp, Homo sapiens
  siRNA target sequence for TTN (NM_003319.2,44607-44625).
gatatcatgttgaaagaaa

SEQ ID NO: 105154 - DNA, 19 bp, Homo sapiens
  siRNA target sequence for TTN (NM_003319.2,44622-44640).
gaaaagaacgaaatggtat

SEQ ID NO: 105155 - DNA, 19 bp, Homo sapiens
  siRNA target sequence for TTN (NM_003319.2,44627-44645).
gaacgaaatggtattctct

SEQ ID NO: 105156 - DNA, 19 bp, Homo sapiens
  siRNA target sequence for TTN (NM_003319.2,44669-44687).
gtaccaggcaacattttca

SEQ ID NO: 105157 - DNA, 19 bp, Homo sapiens
  siRNA target sequence for TTN (NM_003319.2,44686-44704).
caaatcaagtggacttaca

SEQ ID NO: 105158 - DNA, 19 bp, Homo sapiens
  siRNA target sequence for TTN (NM_003319.2,44694-44712).
gtggacttacagatggtat

SEQ ID NO: 105159 - DNA, 19 bp, Homo sapiens
  siRNA target sequence for TTN (NM_003319.2,44727-44745).
gggtgattgcagaaaacat

SEQ ID NO: 105160 - DNA, 19 bp, Homo sapiens
  siRNA target sequence for TTN (NM_003319.2,44766-44784).
gcaagccatcagaacctat

SEQ ID NO: 105161 - DNA, 19 bp, Homo sapiens
  siRNA target sequence for TTN (NM_003319.2,44800-44818).
cattgacccacctggaaaa

SEQ ID NO: 105162 - DNA, 19 bp, Homo sapiens
  siRNA target sequence for TTN (NM_003319.2,44843-44861).
cacacagtaacacttaaat

SEQ ID NO: 105163 - DNA, 19 bp, Homo sapiens
  siRNA target sequence for TTN (NM_003319.2,44863-44881).
ggctaagcctgaatatact

SEQ ID NO: 105164 - DNA, 19 bp, Homo sapiens
  siRNA target sequence for TTN (NM_003319.2,44898-44916).
ccagttatatcgttgaaaa

SEQ ID NO: 105165 - DNA, 19 bp, Homo sapiens
  siRNA target sequence for TTN (NM_003319.2,44982-45000).
cagtcagtggcctaacaga

SEQ ID NO: 105166 - DNA, 19 bp, Homo sapiens
  siRNA target sequence for TTN (NM_003319.2,44986-45004).
cagtggcctaacagaagat

SEQ ID NO: 105167 - DNA, 19 bp, Homo sapiens
  siRNA target sequence for TTN (NM_003319.2,44999-45017).
gaagatgctgcatatgaat

SEQ ID NO: 105168 - DNA, 19 bp, Homo sapiens
  siRNA target sequence for TTN (NM_003319.2,45019-45037).
ccgtgtgatcgccaaaaat

SEQ ID NO: 105169 - DNA, 19 bp, Homo sapiens
  siRNA target sequence for TTN (NM_003319.2,45067-45085).
gccatctgatgctatcact

SEQ ID NO: 105170 - DNA, 19 bp, Homo sapiens
  siRNA target sequence for TTN (NM_003319.2,45068-45086).
ccatctgatgctatcactt

SEQ ID NO: 105171 - DNA, 19 bp, Homo sapiens
  siRNA target sequence for TTN (NM_003319.2,45082-45100).
cacttgcagggatgatgtt

SEQ ID NO: 105172 - DNA, 19 bp, Homo sapiens
  siRNA target sequence for TTN (NM_003319.2,45098-45116).
gttgaggcaccaaagataa

SEQ ID NO: 105173 - DNA, 19 bp, Homo sapiens
  siRNA target sequence for TTN (NM_003319.2,45139-45157).
cacggttatattaaaagca

SEQ ID NO: 105174 - DNA, 19 bp, Homo sapiens
  siRNA target sequence for TTN (NM_003319.2,45331-45349).
ccttacagcgactaatcct

SEQ ID NO: 105175 - DNA, 19 bp, Homo sapiens
  siRNA target sequence for TTN (NM_003319.2,45348-45366).
ctggtggctttgctaaaca

SEQ ID NO: 105176 - DNA, 19 bp, Homo sapiens
  siRNA target sequence for TTN (NM_003319.2,45350-45368).
ggtggctttgctaaacaca

SEQ ID NO: 105177 - DNA, 19 bp, Homo sapiens
  siRNA target sequence for TTN (NM_003319.2,45480-45498).
gaggtgccaaaattgatca

SEQ ID NO: 105178 - DNA, 19 bp, Homo sapiens
  siRNA target sequence for TTN (NM_003319.2,45526-45544).
cagattggcatggacaaat

SEQ ID NO: 105179 - DNA, 19 bp, Homo sapiens
  siRNA target sequence for TTN (NM_003319.2,45552-45570).
cagaagtccaagtaacaaa

SEQ ID NO: 105180 - DNA, 19 bp, Homo sapiens
  siRNA target sequence for TTN (NM_003319.2,45557-45575).
gtccaagtaacaaagctaa

SEQ ID NO: 105181 - DNA, 19 bp, Homo sapiens
  siRNA target sequence for TTN (NM_003319.2,45567-45585).
caaagctaaaggtcactaa

SEQ ID NO: 105182 - DNA, 19 bp, Homo sapiens
  siRNA target sequence for TTN (NM_003319.2,45572-45590).
ctaaaggtcactaaactct

SEQ ID NO: 105183 - DNA, 19 bp, Homo sapiens
  siRNA target sequence for TTN (NM_003319.2,45668-45686).
gtgcttgcagtgaatcctt

SEQ ID NO: 105184 - DNA, 19 bp, Homo sapiens
  siRNA target sequence for TTN (NM_003319.2,45712-45730).
ccctgaagtgacaactatt

SEQ ID NO: 105185 - DNA, 19 bp, Homo sapiens
  siRNA target sequence for TTN (NM_003319.2,45713-45731).
cctgaagtgacaactatta

SEQ ID NO: 105186 - DNA, 19 bp, Homo sapiens
  siRNA target sequence for TTN (NM_003319.2,45716-45734).
gaagtgacaactattacta

SEQ ID NO: 105187 - DNA, 19 bp, Homo sapiens
  siRNA target sequence for TTN (NM_003319.2,45780-45798).
gaagtgaaatcatcaatta

SEQ ID NO: 105188 - DNA, 19 bp, Homo sapiens
  siRNA target sequence for TTN (NM_003319.2,45805-45823).
ggaacggcgtgataaagct

SEQ ID NO: 105189 - DNA, 19 bp, Homo sapiens
  siRNA target sequence for TTN (NM_003319.2,45821-45839).
gctggccaacgctggatta

SEQ ID NO: 105190 - DNA, 19 bp, Homo sapiens
  siRNA target sequence for TTN (NM_003319.2,45822-45840).
ctggccaacgctggattaa

SEQ ID NO: 105191 - DNA, 19 bp, Homo sapiens
  siRNA target sequence for TTN (NM_003319.2,45824-45842).
ggccaacgctggattaaat

SEQ ID NO: 105192 - DNA, 19 bp, Homo sapiens
  siRNA target sequence for TTN (NM_003319.2,45827-45845).
caacgctggattaaatgca

SEQ ID NO: 105193 - DNA, 19 bp, Homo sapiens
  siRNA target sequence for TTN (NM_003319.2,45954-45972).
gtcctaccagtccatttta

SEQ ID NO: 105194 - DNA, 19 bp, Homo sapiens
  siRNA target sequence for TTN (NM_003319.2,45978-45996).
cttgtgacactgtgtttaa

SEQ ID NO: 105195 - DNA, 19 bp, Homo sapiens
  siRNA target sequence for TTN (NM_003319.2,46016-46034).
ccacgtgttctggatacaa

SEQ ID NO: 105196 - DNA, 19 bp, Homo sapiens
  siRNA target sequence for TTN (NM_003319.2,46045-46063).
catttcaatcgcttggaat

SEQ ID NO: 105197 - DNA, 19 bp, Homo sapiens
  siRNA target sequence for TTN (NM_003319.2,46056-46074).
cttggaataaacctatcta

SEQ ID NO: 105198 - DNA, 19 bp, Homo sapiens
  siRNA target sequence for TTN (NM_003319.2,46163-46181).
ctcaaggcaacttcgtata

SEQ ID NO: 105199 - DNA, 19 bp, Homo sapiens
  siRNA target sequence for TTN (NM_003319.2,46165-46183).
caaggcaacttcgtatact

SEQ ID NO: 105200 - DNA, 19 bp, Homo sapiens
  siRNA target sequence for TTN (NM_003319.2,46169-46187).
gcaacttcgtatactatca

SEQ ID NO: 105201 - DNA, 19 bp, Homo sapiens
  siRNA target sequence for TTN (NM_003319.2,46197-46215).
cagagaatcaggaatataa

SEQ ID NO: 105202 - DNA, 19 bp, Homo sapiens
  siRNA target sequence for TTN (NM_003319.2,46219-46237).
ccgcatctatgccatgaat

SEQ ID NO: 105203 - DNA, 19 bp, Homo sapiens
  siRNA target sequence for TTN (NM_003319.2,46220-46238).
cgcatctatgccatgaatt

SEQ ID NO: 105204 - DNA, 19 bp, Homo sapiens
  siRNA target sequence for TTN (NM_003319.2,46325-46343).
gacctgcgcaaagttgtta

SEQ ID NO: 105205 - DNA, 19 bp, Homo sapiens
  siRNA target sequence for TTN (NM_003319.2,46327-46345).
cctgcgcaaagttgttact

SEQ ID NO: 105206 - DNA, 19 bp, Homo sapiens
  siRNA target sequence for TTN (NM_003319.2,46328-46346).
ctgcgcaaagttgttacta

SEQ ID NO: 105207 - DNA, 19 bp, Homo sapiens
  siRNA target sequence for TTN (NM_003319.2,46331-46349).
cgcaaagttgttactataa

SEQ ID NO: 105208 - DNA, 19 bp, Homo sapiens
  siRNA target sequence for TTN (NM_003319.2,46359-46377).
gcaccctgagactttttgt

SEQ ID NO: 105209 - DNA, 19 bp, Homo sapiens
  siRNA target sequence for TTN (NM_003319.2,46360-46378).
caccctgagactttttgtt

SEQ ID NO: 105210 - DNA, 19 bp, Homo sapiens
  siRNA target sequence for TTN (NM_003319.2,46420-46438).
ggaccatggagaatcttta

SEQ ID NO: 105211 - DNA, 19 bp, Homo sapiens
  siRNA target sequence for TTN (NM_003319.2,46467-46485).
cttacaccctgcttattgt

SEQ ID NO: 105212 - DNA, 19 bp, Homo sapiens
  siRNA target sequence for TTN (NM_003319.2,46500-46518).
gatttgacagtggcaaata

SEQ ID NO: 105213 - DNA, 19 bp, Homo sapiens
  siRNA target sequence for TTN (NM_003319.2,46552-46570).
gtctgcatttgtcaatgtt

SEQ ID NO: 105214 - DNA, 19 bp, Homo sapiens
  siRNA target sequence for TTN (NM_003319.2,46660-46678).
ccttgatggaggttcaaaa

SEQ ID NO: 105215 - DNA, 19 bp, Homo sapiens
  siRNA target sequence for TTN (NM_003319.2,46694-46712).
gttgaaaagcgggaatcaa

SEQ ID NO: 105216 - DNA, 19 bp, Homo sapiens
  siRNA target sequence for TTN (NM_003319.2,46697-46715).
gaaaagcgggaatcaacaa

SEQ ID NO: 105217 - DNA, 19 bp, Homo sapiens
  siRNA target sequence for TTN (NM_003319.2,46784-46802).
ggctgtagctactatttca

SEQ ID NO: 105218 - DNA, 19 bp, Homo sapiens
  siRNA target sequence for TTN (NM_003319.2,46906-46924).
ggatgtcacaagaaatagt

SEQ ID NO: 105219 - DNA, 19 bp, Homo sapiens
  siRNA target sequence for TTN (NM_003319.2,46966-46984).
ccgaattctaggctacatt

SEQ ID NO: 105220 - DNA, 19 bp, Homo sapiens
  siRNA target sequence for TTN (NM_003319.2,47048-47066).
gccactatcactggattaa

SEQ ID NO: 105221 - DNA, 19 bp, Homo sapiens
  siRNA target sequence for TTN (NM_003319.2,47116-47134).
catcagtgatcctagacaa

SEQ ID NO: 105222 - DNA, 19 bp, Homo sapiens
  siRNA target sequence for TTN (NM_003319.2,47145-47163).
cagtgatcgccaaagatct

SEQ ID NO: 105223 - DNA, 19 bp, Homo sapiens
  siRNA target sequence for TTN (NM_003319.2,47179-47197).
cttcaaactcctgttcaat

SEQ ID NO: 105224 - DNA, 19 bp, Homo sapiens
  siRNA target sequence for TTN (NM_003319.2,47296-47314).
gaagcagacaactagagta

SEQ ID NO: 105225 - DNA, 19 bp, Homo sapiens
  siRNA target sequence for TTN (NM_003319.2,47299-47317).
gcagacaactagagtaaat

SEQ ID NO: 105226 - DNA, 19 bp, Homo sapiens
  siRNA target sequence for TTN (NM_003319.2,47323-47341).
gagcacagaaaataattca

SEQ ID NO: 105227 - DNA, 19 bp, Homo sapiens
  siRNA target sequence for TTN (NM_003319.2,47340-47358).
cactactgacaataaagga

SEQ ID NO: 105228 - DNA, 19 bp, Homo sapiens
  siRNA target sequence for TTN (NM_003319.2,47356-47374).
ggacgcctgccgagaagat

SEQ ID NO: 105229 - DNA, 19 bp, Homo sapiens
  siRNA target sequence for TTN (NM_003319.2,47379-47397).
gccattatgtggttaaact

SEQ ID NO: 105230 - DNA, 19 bp, Homo sapiens
  siRNA target sequence for TTN (NM_003319.2,47387-47405).
gtggttaaactgactaact

SEQ ID NO: 105231 - DNA, 19 bp, Homo sapiens
  siRNA target sequence for TTN (NM_003319.2,47389-47407).
ggttaaactgactaactca

SEQ ID NO: 105232 - DNA, 19 bp, Homo sapiens
  siRNA target sequence for TTN (NM_003319.2,47406-47424).
cagctggtgaagctattga

SEQ ID NO: 105233 - DNA, 19 bp, Homo sapiens
  siRNA target sequence for TTN (NM_003319.2,47460-47478).
ctccaactggaccagttaa

SEQ ID NO: 105234 - DNA, 19 bp, Homo sapiens
  siRNA target sequence for TTN (NM_003319.2,47462-47480).
ccaactggaccagttaaaa

SEQ ID NO: 105235 - DNA, 19 bp, Homo sapiens
  siRNA target sequence for TTN (NM_003319.2,47489-47507).
gtgacagctgatagtatta

SEQ ID NO: 105236 - DNA, 19 bp, Homo sapiens
  siRNA target sequence for TTN (NM_003319.2,47491-47509).
gacagctgatagtattact

SEQ ID NO: 105237 - DNA, 19 bp, Homo sapiens
  siRNA target sequence for TTN (NM_003319.2,47493-47511).
cagctgatagtattactct

SEQ ID NO: 105238 - DNA, 19 bp, Homo sapiens
  siRNA target sequence for TTN (NM_003319.2,47537-47555).
ggtggaagttctatcaata

SEQ ID NO: 105239 - DNA, 19 bp, Homo sapiens
  siRNA target sequence for TTN (NM_003319.2,47538-47556).
gtggaagttctatcaataa

SEQ ID NO: 105240 - DNA, 19 bp, Homo sapiens
  siRNA target sequence for TTN (NM_003319.2,47584-47602).
cacaaccacctggcaaatt

SEQ ID NO: 105241 - DNA, 19 bp, Homo sapiens
  siRNA target sequence for TTN (NM_003319.2,47701-47719).
gagtacctacctcaattca

SEQ ID NO: 105242 - DNA, 19 bp, Homo sapiens
  siRNA target sequence for TTN (NM_003319.2,47703-47721).
gtacctacctcaattcaga

SEQ ID NO: 105243 - DNA, 19 bp, Homo sapiens
  siRNA target sequence for TTN (NM_003319.2,47713-47731).
caattcagagcctactgta

SEQ ID NO: 105244 - DNA, 19 bp, Homo sapiens
  siRNA target sequence for TTN (NM_003319.2,47722-47740).
gcctactgtagcccaatat

SEQ ID NO: 105245 - DNA, 19 bp, Homo sapiens
  siRNA target sequence for TTN (NM_003319.2,47727-47745).
ctgtagcccaatatccatt

SEQ ID NO: 105246 - DNA, 19 bp, Homo sapiens
  siRNA target sequence for TTN (NM_003319.2,47733-47751).
cccaatatccattcaaagt

SEQ ID NO: 105247 - DNA, 19 bp, Homo sapiens
  siRNA target sequence for TTN (NM_003319.2,47734-47752).
ccaatatccattcaaagtt

SEQ ID NO: 105248 - DNA, 19 bp, Homo sapiens
  siRNA target sequence for TTN (NM_003319.2,47800-47818).
catggaagtacaatggaat

SEQ ID NO: 105249 - DNA, 19 bp, Homo sapiens
  siRNA target sequence for TTN (NM_003319.2,47858-47876).
catctagaacgcaaggaaa

SEQ ID NO: 105250 - DNA, 19 bp, Homo sapiens
  siRNA target sequence for TTN (NM_003319.2,47883-47901).
gcatcctctgggttaagtt

SEQ ID NO: 105251 - DNA, 19 bp, Homo sapiens
  siRNA target sequence for TTN (NM_003319.2,47918-47936).
cctcaaaccaagtttaaga

SEQ ID NO: 105252 - DNA, 19 bp, Homo sapiens
  siRNA target sequence for TTN (NM_003319.2,48002-48020).
ggcaagccgagtaaagtat

SEQ ID NO: 105253 - DNA, 19 bp, Homo sapiens
  siRNA target sequence for TTN (NM_003319.2,48004-48022).
caagccgagtaaagtatca

SEQ ID NO: 105254 - DNA, 19 bp, Homo sapiens
  siRNA target sequence for TTN (NM_003319.2,48007-48025).
gccgagtaaagtatcagaa

SEQ ID NO: 105255 - DNA, 19 bp, Homo sapiens
  siRNA target sequence for TTN (NM_003319.2,48008-48026).
ccgagtaaagtatcagaat

SEQ ID NO: 105256 - DNA, 19 bp, Homo sapiens
  siRNA target sequence for TTN (NM_003319.2,48034-48052).
ggctcgtgacccatgtgat

SEQ ID NO: 105257 - DNA, 19 bp, Homo sapiens
  siRNA target sequence for TTN (NM_003319.2,48060-48078).
gacggccagaggcaatcat

SEQ ID NO: 105258 - DNA, 19 bp, Homo sapiens
  siRNA target sequence for TTN (NM_003319.2,48063-48081).
ggccagaggcaatcattgt

SEQ ID NO: 105259 - DNA, 19 bp, Homo sapiens
  siRNA target sequence for TTN (NM_003319.2,48215-48233).
gacactcattttgaagtaa

SEQ ID NO: 105260 - DNA, 19 bp, Homo sapiens
  siRNA target sequence for TTN (NM_003319.2,48234-48252).
ctggcctagttgaagatca

SEQ ID NO: 105261 - DNA, 19 bp, Homo sapiens
  siRNA target sequence for TTN (NM_003319.2,48285-48303).
ccgcaggagtgtttagtga

SEQ ID NO: 105262 - DNA, 19 bp, Homo sapiens
  siRNA target sequence for TTN (NM_003319.2,48295-48313).
gtttagtgagccttcagaa

SEQ ID NO: 105263 - DNA, 19 bp, Homo sapiens
  siRNA target sequence for TTN (NM_003319.2,48343-48361).
ggtagatccaccacgaata

SEQ ID NO: 105264 - DNA, 19 bp, Homo sapiens
  siRNA target sequence for TTN (NM_003319.2,48344-48362).
gtagatccaccacgaataa

SEQ ID NO: 105265 - DNA, 19 bp, Homo sapiens
  siRNA target sequence for TTN (NM_003319.2,48347-48365).
gatccaccacgaataagta

SEQ ID NO: 105266 - DNA, 19 bp, Homo sapiens
  siRNA target sequence for TTN (NM_003319.2,48363-48381).
gtatggatccaaaatacaa

SEQ ID NO: 105267 - DNA, 19 bp, Homo sapiens
  siRNA target sequence for TTN (NM_003319.2,48395-48413).
gttcatgctggtgaatcat

SEQ ID NO: 105268 - DNA, 19 bp, Homo sapiens
  siRNA target sequence for TTN (NM_003319.2,48398-48416).
catgctggtgaatcattca

SEQ ID NO: 105269 - DNA, 19 bp, Homo sapiens
  siRNA target sequence for TTN (NM_003319.2,48415-48433).
caaggttgatgcagatatt

SEQ ID NO: 105270 - DNA, 19 bp, Homo sapiens
  siRNA target sequence for TTN (NM_003319.2,48454-48472).
cattcagtggataaaaggt

SEQ ID NO: 105271 - DNA, 19 bp, Homo sapiens
  siRNA target sequence for TTN (NM_003319.2,48486-48504).
caaacacagctcgattaga

SEQ ID NO: 105272 - DNA, 19 bp, Homo sapiens
  siRNA target sequence for TTN (NM_003319.2,48490-48508).
cacagctcgattagaaata

SEQ ID NO: 105273 - DNA, 19 bp, Homo sapiens
  siRNA target sequence for TTN (NM_003319.2,48492-48510).
cagctcgattagaaataaa

SEQ ID NO: 105274 - DNA, 19 bp, Homo sapiens
  siRNA target sequence for TTN (NM_003319.2,48524-48542).
gccaccagtctcagtgtaa

SEQ ID NO: 105275 - DNA, 19 bp, Homo sapiens
  siRNA target sequence for TTN (NM_003319.2,48525-48543).
ccaccagtctcagtgtaaa

SEQ ID NO: 105276 - DNA, 19 bp, Homo sapiens
  siRNA target sequence for TTN (NM_003319.2,48526-48544).
caccagtctcagtgtaaaa

SEQ ID NO: 105277 - DNA, 19 bp, Homo sapiens
  siRNA target sequence for TTN (NM_003319.2,48554-48572).
cgtgtcgacagtggaaatt

SEQ ID NO: 105278 - DNA, 19 bp, Homo sapiens
  siRNA target sequence for TTN (NM_003319.2,48555-48573).
gtgtcgacagtggaaatta

SEQ ID NO: 105279 - DNA, 19 bp, Homo sapiens
  siRNA target sequence for TTN (NM_003319.2,48651-48669).
ctgaaggacctgttgttat

SEQ ID NO: 105280 - DNA, 19 bp, Homo sapiens
  siRNA target sequence for TTN (NM_003319.2,48764-48782).
gaaaccagccgcttagttt

SEQ ID NO: 105281 - DNA, 19 bp, Homo sapiens
  siRNA target sequence for TTN (NM_003319.2,48817-48835).
ctgcaaggttactaagctt

SEQ ID NO: 105282 - DNA, 19 bp, Homo sapiens
  siRNA target sequence for TTN (NM_003319.2,48823-48841).
ggttactaagcttcttgaa

SEQ ID NO: 105283 - DNA, 19 bp, Homo sapiens
  siRNA target sequence for TTN (NM_003319.2,48914-48932).
gtagttgccaagaatccat

SEQ ID NO: 105284 - DNA, 19 bp, Homo sapiens
  siRNA target sequence for TTN (NM_003319.2,48983-49001).
gactcaatgattgttgtat

SEQ ID NO: 105285 - DNA, 19 bp, Homo sapiens
  siRNA target sequence for TTN (NM_003319.2,49003-49021).
ggaaagaccagcatctgat

SEQ ID NO: 105286 - DNA, 19 bp, Homo sapiens
  siRNA target sequence for TTN (NM_003319.2,49109-49127).
gagttgcgcctgagagtaa

SEQ ID NO: 105287 - DNA, 19 bp, Homo sapiens
  siRNA target sequence for TTN (NM_003319.2,49111-49129).
gttgcgcctgagagtaact

SEQ ID NO: 105288 - DNA, 19 bp, Homo sapiens
  siRNA target sequence for TTN (NM_003319.2,49120-49138).
gagagtaactggactcata

SEQ ID NO: 105289 - DNA, 19 bp, Homo sapiens
  siRNA target sequence for TTN (NM_003319.2,49122-49140).
gagtaactggactcataga

SEQ ID NO: 105290 - DNA, 19 bp, Homo sapiens
  siRNA target sequence for TTN (NM_003319.2,49135-49153).
catagaaaatcacgattat

SEQ ID NO: 105291 - DNA, 19 bp, Homo sapiens
  siRNA target sequence for TTN (NM_003319.2,49139-49157).
gaaaatcacgattatgagt

SEQ ID NO: 105292 - DNA, 19 bp, Homo sapiens
  siRNA target sequence for TTN (NM_003319.2,49201-49219).
ccctccttctgcttaccaa

SEQ ID NO: 105293 - DNA, 19 bp, Homo sapiens
  siRNA target sequence for TTN (NM_003319.2,49203-49221).
ctccttctgcttaccaaaa

SEQ ID NO: 105294 - DNA, 19 bp, Homo sapiens
  siRNA target sequence for TTN (NM_003319.2,49419-49437).
caaacatagaagtagagaa

SEQ ID NO: 105295 - DNA, 19 bp, Homo sapiens
  siRNA target sequence for TTN (NM_003319.2,49465-49483).
ccgtatctgtgctattaat

SEQ ID NO: 105296 - DNA, 19 bp, Homo sapiens
  siRNA target sequence for TTN (NM_003319.2,49471-49489).
ctgtgctattaataaagct

SEQ ID NO: 105297 - DNA, 19 bp, Homo sapiens
  siRNA target sequence for TTN (NM_003319.2,49508-49526).
gacgtccctggacctatta

SEQ ID NO: 105298 - DNA, 19 bp, Homo sapiens
  siRNA target sequence for TTN (NM_003319.2,49510-49528).
cgtccctggacctattata

SEQ ID NO: 105299 - DNA, 19 bp, Homo sapiens
  siRNA target sequence for TTN (NM_003319.2,49521-49539).
ctattatagttgaagaaaa

SEQ ID NO: 105300 - DNA, 19 bp, Homo sapiens
  siRNA target sequence for TTN (NM_003319.2,49548-49566).
caccagacattgatcttga

SEQ ID NO: 105301 - DNA, 19 bp, Homo sapiens
  siRNA target sequence for TTN (NM_003319.2,49559-49577).
gatcttgacctagaactaa

SEQ ID NO: 105302 - DNA, 19 bp, Homo sapiens
  siRNA target sequence for TTN (NM_003319.2,49565-49583).
gacctagaactaaggaaaa

SEQ ID NO: 105303 - DNA, 19 bp, Homo sapiens
  siRNA target sequence for TTN (NM_003319.2,49598-49616).
gcaggtggctccttaaggt

SEQ ID NO: 105304 - DNA, 19 bp, Homo sapiens
  siRNA target sequence for TTN (NM_003319.2,49599-49617).
caggtggctccttaaggtt

SEQ ID NO: 105305 - DNA, 19 bp, Homo sapiens
  siRNA target sequence for TTN (NM_003319.2,49601-49619).
ggtggctccttaaggttat

SEQ ID NO: 105306 - DNA, 19 bp, Homo sapiens
  siRNA target sequence for TTN (NM_003319.2,49602-49620).
gtggctccttaaggttatt

SEQ ID NO: 105307 - DNA, 19 bp, Homo sapiens
  siRNA target sequence for TTN (NM_003319.2,49605-49623).
gctccttaaggttatttgt

SEQ ID NO: 105308 - DNA, 19 bp, Homo sapiens
  siRNA target sequence for TTN (NM_003319.2,49614-49632).
ggttatttgttcctataaa

SEQ ID NO: 105309 - DNA, 19 bp, Homo sapiens
  siRNA target sequence for TTN (NM_003319.2,49637-49655).
cgtcctacaccagaagtta

SEQ ID NO: 105310 - DNA, 19 bp, Homo sapiens
  siRNA target sequence for TTN (NM_003319.2,49681-49699).
ccgagatgcagctataatt

SEQ ID NO: 105311 - DNA, 19 bp, Homo sapiens
  siRNA target sequence for TTN (NM_003319.2,49683-49701).
gagatgcagctataattga

SEQ ID NO: 105312 - DNA, 19 bp, Homo sapiens
  siRNA target sequence for TTN (NM_003319.2,49744-49762).
ccgatatgatagtggaaaa

SEQ ID NO: 105313 - DNA, 19 bp, Homo sapiens
  siRNA target sequence for TTN (NM_003319.2,49745-49763).
cgatatgatagtggaaaat

SEQ ID NO: 105314 - DNA, 19 bp, Homo sapiens
  siRNA target sequence for TTN (NM_003319.2,49839-49857).
cacctgttaacctgaaagt

SEQ ID NO: 105315 - DNA, 19 bp, Homo sapiens
  siRNA target sequence for TTN (NM_003319.2,49874-49892).
gactcagtatcaattacat

SEQ ID NO: 105316 - DNA, 19 bp, Homo sapiens
  siRNA target sequence for TTN (NM_003319.2,49906-49924).
gttggatgggggatccaaa

SEQ ID NO: 105317 - DNA, 19 bp, Homo sapiens
  siRNA target sequence for TTN (NM_003319.2,49909-49927).
ggatgggggatccaaaata

SEQ ID NO: 105318 - DNA, 19 bp, Homo sapiens
  siRNA target sequence for TTN (NM_003319.2,49973-49991).
gctgctgttgtaactaact

SEQ ID NO: 105319 - DNA, 19 bp, Homo sapiens
  siRNA target sequence for TTN (NM_003319.2,50027-50045).
gaaggttgcagttattact

SEQ ID NO: 105320 - DNA, 19 bp, Homo sapiens
  siRNA target sequence for TTN (NM_003319.2,50030-50048).
ggttgcagttattacttta

SEQ ID NO: 105321 - DNA, 19 bp, Homo sapiens
  siRNA target sequence for TTN (NM_003319.2,50089-50107).
ccagactgctgatccaatt

SEQ ID NO: 105322 - DNA, 19 bp, Homo sapiens
  siRNA target sequence for TTN (NM_003319.2,50090-50108).
cagactgctgatccaatta

SEQ ID NO: 105323 - DNA, 19 bp, Homo sapiens
  siRNA target sequence for TTN (NM_003319.2,50094-50112).
ctgctgatccaattaaggt

SEQ ID NO: 105324 - DNA, 19 bp, Homo sapiens
  siRNA target sequence for TTN (NM_003319.2,50173-50191).
ctctctgagttggacaaaa

SEQ ID NO: 105325 - DNA, 19 bp, Homo sapiens
  siRNA target sequence for TTN (NM_003319.2,50207-50225).
ggcagtaaaatcattcagt

SEQ ID NO: 105326 - DNA, 19 bp, Homo sapiens
  siRNA target sequence for TTN (NM_003319.2,50243-50261).
gctaaacacagtgagaaat

SEQ ID NO: 105327 - DNA, 19 bp, Homo sapiens
  siRNA target sequence for TTN (NM_003319.2,50265-50283).
cagagtgtgctcgagtaaa

SEQ ID NO: 105328 - DNA, 19 bp, Homo sapiens
  siRNA target sequence for TTN (NM_003319.2,50267-50285).
gagtgtgctcgagtaaagt

SEQ ID NO: 105329 - DNA, 19 bp, Homo sapiens
  siRNA target sequence for TTN (NM_003319.2,50269-50287).
gtgtgctcgagtaaagtct

SEQ ID NO: 105330 - DNA, 19 bp, Homo sapiens
  siRNA target sequence for TTN (NM_003319.2,50284-50302).
gtctcttcaggcagtaatt

SEQ ID NO: 105331 - DNA, 19 bp, Homo sapiens
  siRNA target sequence for TTN (NM_003319.2,50288-50306).
cttcaggcagtaattacca

SEQ ID NO: 105332 - DNA, 19 bp, Homo sapiens
  siRNA target sequence for TTN (NM_003319.2,50313-50331).
ctcaaggggaagaatatct

SEQ ID NO: 105333 - DNA, 19 bp, Homo sapiens
  siRNA target sequence for TTN (NM_003319.2,50337-50355).
gagttgttgctgtaaatga

SEQ ID NO: 105334 - DNA, 19 bp, Homo sapiens
  siRNA target sequence for TTN (NM_003319.2,50400-50418).
ccaaagatctggtaattga

SEQ ID NO: 105335 - DNA, 19 bp, Homo sapiens
  siRNA target sequence for TTN (NM_003319.2,50432-50450).
cctgcattcagtagttaca

SEQ ID NO: 105336 - DNA, 19 bp, Homo sapiens
  siRNA target sequence for TTN (NM_003319.2,50453-50471).
gtacaggttggccaagatt

SEQ ID NO: 105337 - DNA, 19 bp, Homo sapiens
  siRNA target sequence for TTN (NM_003319.2,50498-50516).
cgtcctaagccaaccatta

SEQ ID NO: 105338 - DNA, 19 bp, Homo sapiens
  siRNA target sequence for TTN (NM_003319.2,50501-50519).
cctaagccaaccattacct

SEQ ID NO: 105339 - DNA, 19 bp, Homo sapiens
  siRNA target sequence for TTN (NM_003319.2,50582-50600).
ctcaccacactcagtatta

SEQ ID NO: 105340 - DNA, 19 bp, Homo sapiens
  siRNA target sequence for TTN (NM_003319.2,50584-50602).
caccacactcagtattaaa

SEQ ID NO: 105341 - DNA, 19 bp, Homo sapiens
  siRNA target sequence for TTN (NM_003319.2,50638-50656).
cacagttgccaatgttgtt

SEQ ID NO: 105342 - DNA, 19 bp, Homo sapiens
  siRNA target sequence for TTN (NM_003319.2,50665-50683).
gacagcatccatcgaaatt

SEQ ID NO: 105343 - DNA, 19 bp, Homo sapiens
  siRNA target sequence for TTN (NM_003319.2,50669-50687).
gcatccatcgaaattgtaa

SEQ ID NO: 105344 - DNA, 19 bp, Homo sapiens
  siRNA target sequence for TTN (NM_003319.2,50674-50692).
catcgaaattgtaactcta

SEQ ID NO: 105345 - DNA, 19 bp, Homo sapiens
  siRNA target sequence for TTN (NM_003319.2,50677-50695).
cgaaattgtaactctagat

SEQ ID NO: 105346 - DNA, 19 bp, Homo sapiens
  siRNA target sequence for TTN (NM_003319.2,50732-50750).
gacgtcagtgctgaaagta

SEQ ID NO: 105347 - DNA, 19 bp, Homo sapiens
  siRNA target sequence for TTN (NM_003319.2,50734-50752).
cgtcagtgctgaaagtatt

SEQ ID NO: 105348 - DNA, 19 bp, Homo sapiens
  siRNA target sequence for TTN (NM_003319.2,50737-50755).
cagtgctgaaagtattaca

SEQ ID NO: 105349 - DNA, 19 bp, Homo sapiens
  siRNA target sequence for TTN (NM_003319.2,50760-50778).
cttggaaccctccattata

SEQ ID NO: 105350 - DNA, 19 bp, Homo sapiens
  siRNA target sequence for TTN (NM_003319.2,50855-50873).
gctactgttgctagaacta

SEQ ID NO: 105351 - DNA, 19 bp, Homo sapiens
  siRNA target sequence for TTN (NM_003319.2,50891-50909).
ctgaaaactggtacagaat

SEQ ID NO: 105352 - DNA, 19 bp, Homo sapiens
  siRNA target sequence for TTN (NM_003319.2,50898-50916).
ctggtacagaataccaatt

SEQ ID NO: 105353 - DNA, 19 bp, Homo sapiens
  siRNA target sequence for TTN (NM_003319.2,50900-50918).
ggtacagaataccaattta

SEQ ID NO: 105354 - DNA, 19 bp, Homo sapiens
  siRNA target sequence for TTN (NM_003319.2,50956-50974).
cttagagtctgatccaatt

SEQ ID NO: 105355 - DNA, 19 bp, Homo sapiens
  siRNA target sequence for TTN (NM_003319.2,50979-50997).
ctcaatatccctacaaaga

SEQ ID NO: 105356 - DNA, 19 bp, Homo sapiens
  siRNA target sequence for TTN (NM_003319.2,51004-51022).
ccctccaggtacaccattt

SEQ ID NO: 105357 - DNA, 19 bp, Homo sapiens
  siRNA target sequence for TTN (NM_003319.2,51084-51102).
gaagccccgtcataggtta

SEQ ID NO: 105358 - DNA, 19 bp, Homo sapiens
  siRNA target sequence for TTN (NM_003319.2,51145-51163).
ggtcaacaaaactattatt

SEQ ID NO: 105359 - DNA, 19 bp, Homo sapiens
  siRNA target sequence for TTN (NM_003319.2,51178-51196).
caaagcacagaatcttgaa

SEQ ID NO: 105360 - DNA, 19 bp, Homo sapiens
  siRNA target sequence for TTN (NM_003319.2,51258-51276).
gcaagaattctgaatgcta

SEQ ID NO: 105361 - DNA, 19 bp, Homo sapiens
  siRNA target sequence for TTN (NM_003319.2,51262-51280).
gaattctgaatgctatgta

SEQ ID NO: 105362 - DNA, 19 bp, Homo sapiens
  siRNA target sequence for TTN (NM_003319.2,51306-51324).
gaaccccagaaccaataat

SEQ ID NO: 105363 - DNA, 19 bp, Homo sapiens
  siRNA target sequence for TTN (NM_003319.2,51309-51327).
ccccagaaccaataatggt

SEQ ID NO: 105364 - DNA, 19 bp, Homo sapiens
  siRNA target sequence for TTN (NM_003319.2,51310-51328).
cccagaaccaataatggtt

SEQ ID NO: 105365 - DNA, 19 bp, Homo sapiens
  siRNA target sequence for TTN (NM_003319.2,51312-51330).
cagaaccaataatggttaa

SEQ ID NO: 105366 - DNA, 19 bp, Homo sapiens
  siRNA target sequence for TTN (NM_003319.2,51455-51473).
gtcattgaaactcaattta

SEQ ID NO: 105367 - DNA, 19 bp, Homo sapiens
  siRNA target sequence for TTN (NM_003319.2,51478-51496).
gtcaggtcttactgaagat

SEQ ID NO: 105368 - DNA, 19 bp, Homo sapiens
  siRNA target sequence for TTN (NM_003319.2,51557-51575).
gacagtactggaccaataa

SEQ ID NO: 105369 - DNA, 19 bp, Homo sapiens
  siRNA target sequence for TTN (NM_003319.2,51559-51577).
cagtactggaccaataact

SEQ ID NO: 105370 - DNA, 19 bp, Homo sapiens
  siRNA target sequence for TTN (NM_003319.2,51589-51607).
ggttgaactcccaagaatt

SEQ ID NO: 105371 - DNA, 19 bp, Homo sapiens
  siRNA target sequence for TTN (NM_003319.2,51593-51611).
gaactcccaagaatttcaa

SEQ ID NO: 105372 - DNA, 19 bp, Homo sapiens
  siRNA target sequence for TTN (NM_003319.2,51627-51645).
gagacacaattgtggtaaa

SEQ ID NO: 105373 - DNA, 19 bp, Homo sapiens
  siRNA target sequence for TTN (NM_003319.2,51689-51707).
cccctacctaccattgagt

SEQ ID NO: 105374 - DNA, 19 bp, Homo sapiens
  siRNA target sequence for TTN (NM_003319.2,51695-51713).
cctaccattgagtggttaa

SEQ ID NO: 105375 - DNA, 19 bp, Homo sapiens
  siRNA target sequence for TTN (NM_003319.2,51738-51756).
ctgctagatgtgaaataaa

SEQ ID NO: 105376 - DNA, 19 bp, Homo sapiens
  siRNA target sequence for TTN (NM_003319.2,51834-51852).
ccaatgttgcaggttctaa

SEQ ID NO: 105377 - DNA, 19 bp, Homo sapiens
  siRNA target sequence for TTN (NM_003319.2,51951-51969).
ggtctccaccacttcaaga

SEQ ID NO: 105378 - DNA, 19 bp, Homo sapiens
  siRNA target sequence for TTN (NM_003319.2,51982-52000).
catttctcactatgttgtt

SEQ ID NO: 105379 - DNA, 19 bp, Homo sapiens
  siRNA target sequence for TTN (NM_003319.2,51987-52005).
ctcactatgttgttgaaaa

SEQ ID NO: 105380 - DNA, 19 bp, Homo sapiens
  siRNA target sequence for TTN (NM_003319.2,52147-52165).
ggaatctgcaccagtacta

SEQ ID NO: 105381 - DNA, 19 bp, Homo sapiens
  siRNA target sequence for TTN (NM_003319.2,52148-52166).
gaatctgcaccagtactaa

SEQ ID NO: 105382 - DNA, 19 bp, Homo sapiens
  siRNA target sequence for TTN (NM_003319.2,52154-52172).
gcaccagtactaatgaaaa

SEQ ID NO: 105383 - DNA, 19 bp, Homo sapiens
  siRNA target sequence for TTN (NM_003319.2,52248-52266).
ggaaccgtccagatagtga

SEQ ID NO: 105384 - DNA, 19 bp, Homo sapiens
  siRNA target sequence for TTN (NM_003319.2,52249-52267).
gaaccgtccagatagtgat

SEQ ID NO: 105385 - DNA, 19 bp, Homo sapiens
  siRNA target sequence for TTN (NM_003319.2,52275-52293).
gtgagattattggttacat

SEQ ID NO: 105386 - DNA, 19 bp, Homo sapiens
  siRNA target sequence for TTN (NM_003319.2,52314-52332).
gtggcattcgatggataaa

SEQ ID NO: 105387 - DNA, 19 bp, Homo sapiens
  siRNA target sequence for TTN (NM_003319.2,52316-52334).
ggcattcgatggataaaat

SEQ ID NO: 105388 - DNA, 19 bp, Homo sapiens
  siRNA target sequence for TTN (NM_003319.2,52318-52336).
cattcgatggataaaatgt

SEQ ID NO: 105389 - DNA, 19 bp, Homo sapiens
  siRNA target sequence for TTN (NM_003319.2,52322-52340).
cgatggataaaatgtaata

SEQ ID NO: 105390 - DNA, 19 bp, Homo sapiens
  siRNA target sequence for TTN (NM_003319.2,52353-52371).
cagatttgcgtctaagagt

SEQ ID NO: 105391 - DNA, 19 bp, Homo sapiens
  siRNA target sequence for TTN (NM_003319.2,52364-52382).
ctaagagtgacaggattaa

SEQ ID NO: 105392 - DNA, 19 bp, Homo sapiens
  siRNA target sequence for TTN (NM_003319.2,52388-52406).
gatcatgagtatgaattca

SEQ ID NO: 105393 - DNA, 19 bp, Homo sapiens
  siRNA target sequence for TTN (NM_003319.2,52446-52464).
gtccagctacagtttatta

SEQ ID NO: 105394 - DNA, 19 bp, Homo sapiens
  siRNA target sequence for TTN (NM_003319.2,52471-52489).
ctgtgatcctgtgttcaaa

SEQ ID NO: 105395 - DNA, 19 bp, Homo sapiens
  siRNA target sequence for TTN (NM_003319.2,52549-52567).
ctggggtaaacccatctat

SEQ ID NO: 105396 - DNA, 19 bp, Homo sapiens
  siRNA target sequence for TTN (NM_003319.2,52551-52569).
ggggtaaacccatctatga

SEQ ID NO: 105397 - DNA, 19 bp, Homo sapiens
  siRNA target sequence for TTN (NM_003319.2,52585-52603).
cttgggatatgtagtagaa

SEQ ID NO: 105398 - DNA, 19 bp, Homo sapiens
  siRNA target sequence for TTN (NM_003319.2,52654-52672).
cctgagagtcactcgattt

SEQ ID NO: 105399 - DNA, 19 bp, Homo sapiens
  siRNA target sequence for TTN (NM_003319.2,52657-52675).
gagagtcactcgatttgaa

SEQ ID NO: 105400 - DNA, 19 bp, Homo sapiens
  siRNA target sequence for TTN (NM_003319.2,52663-52681).
cactcgatttgaaatttca

SEQ ID NO: 105401 - DNA, 19 bp, Homo sapiens
  siRNA target sequence for TTN (NM_003319.2,52687-52705).
cactgaacaccaagagtat

SEQ ID NO: 105402 - DNA, 19 bp, Homo sapiens
  siRNA target sequence for TTN (NM_003319.2,52689-52707).
ctgaacaccaagagtataa

SEQ ID NO: 105403 - DNA, 19 bp, Homo sapiens
  siRNA target sequence for TTN (NM_003319.2,52691-52709).
gaacaccaagagtataaaa

SEQ ID NO: 105404 - DNA, 19 bp, Homo sapiens
  siRNA target sequence for TTN (NM_003319.2,52713-52731).
gagtctgtgccctcaacaa

SEQ ID NO: 105405 - DNA, 19 bp, Homo sapiens
  siRNA target sequence for TTN (NM_003319.2,52808-52826).
cttgactccgaattaagaa

SEQ ID NO: 105406 - DNA, 19 bp, Homo sapiens
  siRNA target sequence for TTN (NM_003319.2,52815-52833).
ccgaattaagaaaaggaat

SEQ ID NO: 105407 - DNA, 19 bp, Homo sapiens
  siRNA target sequence for TTN (NM_003319.2,52848-52866).
gtggatctgccagaattca

SEQ ID NO: 105408 - DNA, 19 bp, Homo sapiens
  siRNA target sequence for TTN (NM_003319.2,52886-52904).
ccaacgcctgagatcactt

SEQ ID NO: 105409 - DNA, 19 bp, Homo sapiens
  siRNA target sequence for TTN (NM_003319.2,52927-52945).
cacagataaggtccaaatt

SEQ ID NO: 105410 - DNA, 19 bp, Homo sapiens
  siRNA target sequence for TTN (NM_003319.2,52931-52949).
gataaggtccaaattgaaa

SEQ ID NO: 105411 - DNA, 19 bp, Homo sapiens
  siRNA target sequence for TTN (NM_003319.2,52955-52973).
gtaaactatacccaactat

SEQ ID NO: 105412 - DNA, 19 bp, Homo sapiens
  siRNA target sequence for TTN (NM_003319.2,53079-53097).
caggaccaccacagaattt

SEQ ID NO: 105413 - DNA, 19 bp, Homo sapiens
  siRNA target sequence for TTN (NM_003319.2,53162-53180).
ggggcaaaggtcaagaact

SEQ ID NO: 105414 - DNA, 19 bp, Homo sapiens
  siRNA target sequence for TTN (NM_003319.2,53163-53181).
gggcaaaggtcaagaacta

SEQ ID NO: 105415 - DNA, 19 bp, Homo sapiens
  siRNA target sequence for TTN (NM_003319.2,53164-53182).
ggcaaaggtcaagaactat

SEQ ID NO: 105416 - DNA, 19 bp, Homo sapiens
  siRNA target sequence for TTN (NM_003319.2,53170-53188).
ggtcaagaactatgtgatt

SEQ ID NO: 105417 - DNA, 19 bp, Homo sapiens
  siRNA target sequence for TTN (NM_003319.2,53293-53311).
cagagtcatggctgaaaat

SEQ ID NO: 105418 - DNA, 19 bp, Homo sapiens
  siRNA target sequence for TTN (NM_003319.2,53376-53394).
caccaggaaaggttacact

SEQ ID NO: 105419 - DNA, 19 bp, Homo sapiens
  siRNA target sequence for TTN (NM_003319.2,53407-53425).
ccagaccagtgcatcactt

SEQ ID NO: 105420 - DNA, 19 bp, Homo sapiens
  siRNA target sequence for TTN (NM_003319.2,53408-53426).
cagaccagtgcatcactta

SEQ ID NO: 105421 - DNA, 19 bp, Homo sapiens
  siRNA target sequence for TTN (NM_003319.2,53464-53482).
cctggggtacgttgttgaa

SEQ ID NO: 105422 - DNA, 19 bp, Homo sapiens
  siRNA target sequence for TTN (NM_003319.2,53465-53483).
ctggggtacgttgttgaaa

SEQ ID NO: 105423 - DNA, 19 bp, Homo sapiens
  siRNA target sequence for TTN (NM_003319.2,53469-53487).
ggtacgttgttgaaatgca

SEQ ID NO: 105424 - DNA, 19 bp, Homo sapiens
  siRNA target sequence for TTN (NM_003319.2,53512-53530).
cattgtggctgaatccaaa

SEQ ID NO: 105425 - DNA, 19 bp, Homo sapiens
  siRNA target sequence for TTN (NM_003319.2,53531-53549).
gtctgtaatgcagttgtta

SEQ ID NO: 105426 - DNA, 19 bp, Homo sapiens
  siRNA target sequence for TTN (NM_003319.2,53559-53577).
gttctggacaagaatatca

SEQ ID NO: 105427 - DNA, 19 bp, Homo sapiens
  siRNA target sequence for TTN (NM_003319.2,53581-53599).
ccgtgtcaaggcttataat

SEQ ID NO: 105428 - DNA, 19 bp, Homo sapiens
  siRNA target sequence for TTN (NM_003319.2,53656-53674).
gactatacagcctagttta

SEQ ID NO: 105429 - DNA, 19 bp, Homo sapiens
  siRNA target sequence for TTN (NM_003319.2,53666-53684).
cctagtttaaagttaccat

SEQ ID NO: 105430 - DNA, 19 bp, Homo sapiens
  siRNA target sequence for TTN (NM_003319.2,53677-53695).
gttaccatttaacacatat

SEQ ID NO: 105431 - DNA, 19 bp, Homo sapiens
  siRNA target sequence for TTN (NM_003319.2,53742-53760).
gccgaccaagacctaacat

SEQ ID NO: 105432 - DNA, 19 bp, Homo sapiens
  siRNA target sequence for TTN (NM_003319.2,53743-53761).
ccgaccaagacctaacatt

SEQ ID NO: 105433 - DNA, 19 bp, Homo sapiens
  siRNA target sequence for TTN (NM_003319.2,53758-53776).
catttcttgggtcaaagat

SEQ ID NO: 105434 - DNA, 19 bp, Homo sapiens
  siRNA target sequence for TTN (NM_003319.2,53777-53795).
ggtgagcctcttaaacaga

SEQ ID NO: 105435 - DNA, 19 bp, Homo sapiens
  siRNA target sequence for TTN (NM_003319.2,53794-53812).
gacaacaagagtaaacgtt

SEQ ID NO: 105436 - DNA, 19 bp, Homo sapiens
  siRNA target sequence for TTN (NM_003319.2,53878-53896).
caccgtaacggcaacaaat

SEQ ID NO: 105437 - DNA, 19 bp, Homo sapiens
  siRNA target sequence for TTN (NM_003319.2,53881-53899).
cgtaacggcaacaaatagt

SEQ ID NO: 105438 - DNA, 19 bp, Homo sapiens
  siRNA target sequence for TTN (NM_003319.2,53923-53941).
cagtgttatcgttttagaa

SEQ ID NO: 105439 - DNA, 19 bp, Homo sapiens
  siRNA target sequence for TTN (NM_003319.2,53962-53980).
cccagttcggtttgatgaa

SEQ ID NO: 105440 - DNA, 19 bp, Homo sapiens
  siRNA target sequence for TTN (NM_003319.2,53964-53982).
cagttcggtttgatgaagt

SEQ ID NO: 105441 - DNA, 19 bp, Homo sapiens
  siRNA target sequence for TTN (NM_003319.2,53985-54003).
gtgcagactttgtagtcat

SEQ ID NO: 105442 - DNA, 19 bp, Homo sapiens
  siRNA target sequence for TTN (NM_003319.2,53987-54005).
gcagactttgtagtcatat

SEQ ID NO: 105443 - DNA, 19 bp, Homo sapiens
  siRNA target sequence for TTN (NM_003319.2,53990-54008).
gactttgtagtcatatctt

SEQ ID NO: 105444 - DNA, 19 bp, Homo sapiens
  siRNA target sequence for TTN (NM_003319.2,54010-54028).
ggaacctccagcctatact

SEQ ID NO: 105445 - DNA, 19 bp, Homo sapiens
  siRNA target sequence for TTN (NM_003319.2,54146-54164).
ggcacggagtaccagttta

SEQ ID NO: 105446 - DNA, 19 bp, Homo sapiens
  siRNA target sequence for TTN (NM_003319.2,54148-54166).
cacggagtaccagtttaga

SEQ ID NO: 105447 - DNA, 19 bp, Homo sapiens
  siRNA target sequence for TTN (NM_003319.2,54151-54169).
ggagtaccagtttagaatt

SEQ ID NO: 105448 - DNA, 19 bp, Homo sapiens
  siRNA target sequence for TTN (NM_003319.2,54210-54228).
ctaaggcagttattgtaca

SEQ ID NO: 105449 - DNA, 19 bp, Homo sapiens
  siRNA target sequence for TTN (NM_003319.2,54345-54363).
gctaccatcttgaacagaa

SEQ ID NO: 105450 - DNA, 19 bp, Homo sapiens
  siRNA target sequence for TTN (NM_003319.2,54346-54364).
ctaccatcttgaacagaaa

SEQ ID NO: 105451 - DNA, 19 bp, Homo sapiens
  siRNA target sequence for TTN (NM_003319.2,54404-54422).
cccattcaggacaccaaat

SEQ ID NO: 105452 - DNA, 19 bp, Homo sapiens
  siRNA target sequence for TTN (NM_003319.2,54413-54431).
gacaccaaattcaaaacaa

SEQ ID NO: 105453 - DNA, 19 bp, Homo sapiens
  siRNA target sequence for TTN (NM_003319.2,54447-54465).
gccttgagtatgagttcaa

SEQ ID NO: 105454 - DNA, 19 bp, Homo sapiens
  siRNA target sequence for TTN (NM_003319.2,54494-54512).
ggcaagcctagcaaagtgt

SEQ ID NO: 105455 - DNA, 19 bp, Homo sapiens
  siRNA target sequence for TTN (NM_003319.2,54686-54704).
gccagctttaccaacgtat

SEQ ID NO: 105456 - DNA, 19 bp, Homo sapiens
  siRNA target sequence for TTN (NM_003319.2,54688-54706).
cagctttaccaacgtatta

SEQ ID NO: 105457 - DNA, 19 bp, Homo sapiens
  siRNA target sequence for TTN (NM_003319.2,54690-54708).
gctttaccaacgtattaga

SEQ ID NO: 105458 - DNA, 19 bp, Homo sapiens
  siRNA target sequence for TTN (NM_003319.2,54691-54709).
ctttaccaacgtattagaa

SEQ ID NO: 105459 - DNA, 19 bp, Homo sapiens
  siRNA target sequence for TTN (NM_003319.2,54720-54738).
cagtgagtggacttgtaga

SEQ ID NO: 105460 - DNA, 19 bp, Homo sapiens
  siRNA target sequence for TTN (NM_003319.2,54855-54873).
ctctggatccaaaatataa

SEQ ID NO: 105461 - DNA, 19 bp, Homo sapiens
  siRNA target sequence for TTN (NM_003319.2,54925-54943).
ccgtggcaaacctatacct

SEQ ID NO: 105462 - DNA, 19 bp, Homo sapiens
  siRNA target sequence for TTN (NM_003319.2,54986-55004).
gctgctagaatggaaatta

SEQ ID NO: 105463 - DNA, 19 bp, Homo sapiens
  siRNA target sequence for TTN (NM_003319.2,54989-55007).
gctagaatggaaattaaat

SEQ ID NO: 105464 - DNA, 19 bp, Homo sapiens
  siRNA target sequence for TTN (NM_003319.2,55050-55068).
ggactgatggaggacaata

SEQ ID NO: 105465 - DNA, 19 bp, Homo sapiens
  siRNA target sequence for TTN (NM_003319.2,55051-55069).
gactgatggaggacaatat

SEQ ID NO: 105466 - DNA, 19 bp, Homo sapiens
  siRNA target sequence for TTN (NM_003319.2,55053-55071).
ctgatggaggacaatatat

SEQ ID NO: 105467 - DNA, 19 bp, Homo sapiens
  siRNA target sequence for TTN (NM_003319.2,55058-55076).
ggaggacaatatattctga

SEQ ID NO: 105468 - DNA, 19 bp, Homo sapiens
  siRNA target sequence for TTN (NM_003319.2,55062-55080).
gacaatatattctgaaact

SEQ ID NO: 105469 - DNA, 19 bp, Homo sapiens
  siRNA target sequence for TTN (NM_003319.2,55083-55101).
gcaatgttggtggtacaaa

SEQ ID NO: 105470 - DNA, 19 bp, Homo sapiens
  siRNA target sequence for TTN (NM_003319.2,55088-55106).
gttggtggtacaaagtcta

SEQ ID NO: 105471 - DNA, 19 bp, Homo sapiens
  siRNA target sequence for TTN (NM_003319.2,55104-55122).
ctatacccatcactgtaaa

SEQ ID NO: 105472 - DNA, 19 bp, Homo sapiens
  siRNA target sequence for TTN (NM_003319.2,55172-55190).
gttactgcggaaaaatgtt

SEQ ID NO: 105473 - DNA, 19 bp, Homo sapiens
  siRNA target sequence for TTN (NM_003319.2,55213-55231).
gcaagatggtggtgctaat

SEQ ID NO: 105474 - DNA, 19 bp, Homo sapiens
  siRNA target sequence for TTN (NM_003319.2,55221-55239).
gtggtgctaatatttcaca

SEQ ID NO: 105475 - DNA, 19 bp, Homo sapiens
  siRNA target sequence for TTN (NM_003319.2,55226-55244).
gctaatatttcacattaca

SEQ ID NO: 105476 - DNA, 19 bp, Homo sapiens
  siRNA target sequence for TTN (NM_003319.2,55298-55316).
gtacaggcccttaactaca

SEQ ID NO: 105477 - DNA, 19 bp, Homo sapiens
  siRNA target sequence for TTN (NM_003319.2,55303-55321).
ggcccttaactacaaagtt

SEQ ID NO: 105478 - DNA, 19 bp, Homo sapiens
  siRNA target sequence for TTN (NM_003319.2,55405-55423).
gcctgttacggcctgtaat

SEQ ID NO: 105479 - DNA, 19 bp, Homo sapiens
  siRNA target sequence for TTN (NM_003319.2,55409-55427).
gttacggcctgtaatcctt

SEQ ID NO: 105480 - DNA, 19 bp, Homo sapiens
  siRNA target sequence for TTN (NM_003319.2,55413-55431).
cggcctgtaatccttataa

SEQ ID NO: 105481 - DNA, 19 bp, Homo sapiens
  siRNA target sequence for TTN (NM_003319.2,55466-55484).
gcaatcaccaaagattcta

SEQ ID NO: 105482 - DNA, 19 bp, Homo sapiens
  siRNA target sequence for TTN (NM_003319.2,55467-55485).
caatcaccaaagattctat

SEQ ID NO: 105483 - DNA, 19 bp, Homo sapiens
  siRNA target sequence for TTN (NM_003319.2,55478-55496).
gattctatggtagtaacat

SEQ ID NO: 105484 - DNA, 19 bp, Homo sapiens
  siRNA target sequence for TTN (NM_003319.2,55513-55531).
cgacggaggtaccgaaatt

SEQ ID NO: 105485 - DNA, 19 bp, Homo sapiens
  siRNA target sequence for TTN (NM_003319.2,55525-55543).
cgaaattgagggctacatt

SEQ ID NO: 105486 - DNA, 19 bp, Homo sapiens
  siRNA target sequence for TTN (NM_003319.2,55532-55550).
gagggctacattcttgaaa

SEQ ID NO: 105487 - DNA, 19 bp, Homo sapiens
  siRNA target sequence for TTN (NM_003319.2,55691-55709).
cctagtgagccatctgttt

SEQ ID NO: 105488 - DNA, 19 bp, Homo sapiens
  siRNA target sequence for TTN (NM_003319.2,55692-55710).
ctagtgagccatctgtttt

SEQ ID NO: 105489 - DNA, 19 bp, Homo sapiens
  siRNA target sequence for TTN (NM_003319.2,55743-55761).
gtcccccaagcaatccaaa

SEQ ID NO: 105490 - DNA, 19 bp, Homo sapiens
  siRNA target sequence for TTN (NM_003319.2,55746-55764).
ccccaagcaatccaaaagt

SEQ ID NO: 105491 - DNA, 19 bp, Homo sapiens
  siRNA target sequence for TTN (NM_003319.2,55796-55814).
gcatggagtaagccaattt

SEQ ID NO: 105492 - DNA, 19 bp, Homo sapiens
  siRNA target sequence for TTN (NM_003319.2,55800-55818).
ggagtaagccaatttatga

SEQ ID NO: 105493 - DNA, 19 bp, Homo sapiens
  siRNA target sequence for TTN (NM_003319.2,55801-55819).
gagtaagccaatttatgat

SEQ ID NO: 105494 - DNA, 19 bp, Homo sapiens
  siRNA target sequence for TTN (NM_003319.2,55859-55877).
gaagctgctgcggatgaat

SEQ ID NO: 105495 - DNA, 19 bp, Homo sapiens
  siRNA target sequence for TTN (NM_003319.2,55890-55908).
ctccaccaacaggattaca

SEQ ID NO: 105496 - DNA, 19 bp, Homo sapiens
  siRNA target sequence for TTN (NM_003319.2,55921-55939).
cacagtgaccaagcttaaa

SEQ ID NO: 105497 - DNA, 19 bp, Homo sapiens
  siRNA target sequence for TTN (NM_003319.2,55923-55941).
cagtgaccaagcttaaaga

SEQ ID NO: 105498 - DNA, 19 bp, Homo sapiens
  siRNA target sequence for TTN (NM_003319.2,56089-56107).
gcgtgcaagtgctacttta

SEQ ID NO: 105499 - DNA, 19 bp, Homo sapiens
  siRNA target sequence for TTN (NM_003319.2,56097-56115).
gtgctactttacgcttatt

SEQ ID NO: 105500 - DNA, 19 bp, Homo sapiens
  siRNA target sequence for TTN (NM_003319.2,56100-56118).
ctactttacgcttatttgt

SEQ ID NO: 105501 - DNA, 19 bp, Homo sapiens
  siRNA target sequence for TTN (NM_003319.2,56108-56126).
cgcttatttgtcactatca

SEQ ID NO: 105502 - DNA, 19 bp, Homo sapiens
  siRNA target sequence for TTN (NM_003319.2,56109-56127).
gcttatttgtcactatcaa

SEQ ID NO: 105503 - DNA, 19 bp, Homo sapiens
  siRNA target sequence for TTN (NM_003319.2,56132-56150).
cgaccagaacccgaagtta

SEQ ID NO: 105504 - DNA, 19 bp, Homo sapiens
  siRNA target sequence for TTN (NM_003319.2,56195-56213).
gaggtgaccagctcattta

SEQ ID NO: 105505 - DNA, 19 bp, Homo sapiens
  siRNA target sequence for TTN (NM_003319.2,56197-56215).
ggtgaccagctcatttaca

SEQ ID NO: 105506 - DNA, 19 bp, Homo sapiens
  siRNA target sequence for TTN (NM_003319.2,56202-56220).
ccagctcatttacaatgtt

SEQ ID NO: 105507 - DNA, 19 bp, Homo sapiens
  siRNA target sequence for TTN (NM_003319.2,56218-56236).
gttggtgattgataatgtt

SEQ ID NO: 105508 - DNA, 19 bp, Homo sapiens
  siRNA target sequence for TTN (NM_003319.2,56253-56271).
gtcggtataatctgacatt

SEQ ID NO: 105509 - DNA, 19 bp, Homo sapiens
  siRNA target sequence for TTN (NM_003319.2,56256-56274).
ggtataatctgacattaga

SEQ ID NO: 105510 - DNA, 19 bp, Homo sapiens
  siRNA target sequence for TTN (NM_003319.2,56257-56275).
gtataatctgacattagaa

SEQ ID NO: 105511 - DNA, 19 bp, Homo sapiens
  siRNA target sequence for TTN (NM_003319.2,56336-56354).
cctgtgaatttgaccataa

SEQ ID NO: 105512 - DNA, 19 bp, Homo sapiens
  siRNA target sequence for TTN (NM_003319.2,56385-56403).
cctgggaaccaccacttat

SEQ ID NO: 105513 - DNA, 19 bp, Homo sapiens
  siRNA target sequence for TTN (NM_003319.2,56386-56404).
ctgggaaccaccacttatt

SEQ ID NO: 105514 - DNA, 19 bp, Homo sapiens
  siRNA target sequence for TTN (NM_003319.2,56435-56453).
gtcgaaaaacgagaaacta

SEQ ID NO: 105515 - DNA, 19 bp, Homo sapiens
  siRNA target sequence for TTN (NM_003319.2,56463-56481).
cctatgctaccattacaaa

SEQ ID NO: 105516 - DNA, 19 bp, Homo sapiens
  siRNA target sequence for TTN (NM_003319.2,56464-56482).
ctatgctaccattacaaat

SEQ ID NO: 105517 - DNA, 19 bp, Homo sapiens
  siRNA target sequence for TTN (NM_003319.2,56468-56486).
gctaccattacaaataatt

SEQ ID NO: 105518 - DNA, 19 bp, Homo sapiens
  siRNA target sequence for TTN (NM_003319.2,56522-56540).
gaaggatgttcttactact

SEQ ID NO: 105519 - DNA, 19 bp, Homo sapiens
  siRNA target sequence for TTN (NM_003319.2,56542-56560).
ccgagtcttggcttccaat

SEQ ID NO: 105520 - DNA, 19 bp, Homo sapiens
  siRNA target sequence for TTN (NM_003319.2,56589-56607).
caacagaacccgttaaagt

SEQ ID NO: 105521 - DNA, 19 bp, Homo sapiens
  siRNA target sequence for TTN (NM_003319.2,56631-56649).
gaagagtaactcttgttga

SEQ ID NO: 105522 - DNA, 19 bp, Homo sapiens
  siRNA target sequence for TTN (NM_003319.2,56645-56663).
gttgatgtgacccgtaata

SEQ ID NO: 105523 - DNA, 19 bp, Homo sapiens
  siRNA target sequence for TTN (NM_003319.2,56655-56673).
cccgtaatacagctacaat

SEQ ID NO: 105524 - DNA, 19 bp, Homo sapiens
  siRNA target sequence for TTN (NM_003319.2,56657-56675).
cgtaatacagctacaatta

SEQ ID NO: 105525 - DNA, 19 bp, Homo sapiens
  siRNA target sequence for TTN (NM_003319.2,56658-56676).
gtaatacagctacaattaa

SEQ ID NO: 105526 - DNA, 19 bp, Homo sapiens
  siRNA target sequence for TTN (NM_003319.2,56715-56733).
ctggttatgtggttgaaat

SEQ ID NO: 105527 - DNA, 19 bp, Homo sapiens
  siRNA target sequence for TTN (NM_003319.2,56718-56736).
gttatgtggttgaaatgca

SEQ ID NO: 105528 - DNA, 19 bp, Homo sapiens
  siRNA target sequence for TTN (NM_003319.2,56725-56743).
ggttgaaatgcagactaaa

SEQ ID NO: 105529 - DNA, 19 bp, Homo sapiens
  siRNA target sequence for TTN (NM_003319.2,56735-56753).
cagactaaagggagtgaaa

SEQ ID NO: 105530 - DNA, 19 bp, Homo sapiens
  siRNA target sequence for TTN (NM_003319.2,56760-56778).
gcacctgcacacaagttaa

SEQ ID NO: 105531 - DNA, 19 bp, Homo sapiens
  siRNA target sequence for TTN (NM_003319.2,56779-56797).
gactctagaagcaactata

SEQ ID NO: 105532 - DNA, 19 bp, Homo sapiens
  siRNA target sequence for TTN (NM_003319.2,56808-56826).
ctgcaggagaagagtatgt

SEQ ID NO: 105533 - DNA, 19 bp, Homo sapiens
  siRNA target sequence for TTN (NM_003319.2,56810-56828).
gcaggagaagagtatgtct

SEQ ID NO: 105534 - DNA, 19 bp, Homo sapiens
  siRNA target sequence for TTN (NM_003319.2,56832-56850).
gggtagctgcagttaacga

SEQ ID NO: 105535 - DNA, 19 bp, Homo sapiens
  siRNA target sequence for TTN (NM_003319.2,56833-56851).
ggtagctgcagttaacgaa

SEQ ID NO: 105536 - DNA, 19 bp, Homo sapiens
  siRNA target sequence for TTN (NM_003319.2,56834-56852).
gtagctgcagttaacgaaa

SEQ ID NO: 105537 - DNA, 19 bp, Homo sapiens
  siRNA target sequence for TTN (NM_003319.2,56879-56897).
ggagtgccagtaattgcaa

SEQ ID NO: 105538 - DNA, 19 bp, Homo sapiens
  siRNA target sequence for TTN (NM_003319.2,56921-56939).
gttgagcttcctttccata

SEQ ID NO: 105539 - DNA, 19 bp, Homo sapiens
  siRNA target sequence for TTN (NM_003319.2,56944-56962).
caatgtaaaggctagagaa

SEQ ID NO: 105540 - DNA, 19 bp, Homo sapiens
  siRNA target sequence for TTN (NM_003319.2,56971-56989).
gattgatgtgccattcaaa

SEQ ID NO: 105541 - DNA, 19 bp, Homo sapiens
  siRNA target sequence for TTN (NM_003319.2,57026-57044).
ggtcagactcttaaagaga

SEQ ID NO: 105542 - DNA, 19 bp, Homo sapiens
  siRNA target sequence for TTN (NM_003319.2,57043-57061).
gacaactagagtcaatgtt

SEQ ID NO: 105543 - DNA, 19 bp, Homo sapiens
  siRNA target sequence for TTN (NM_003319.2,57073-57091).
gactgtaacatcactatct

SEQ ID NO: 105544 - DNA, 19 bp, Homo sapiens
  siRNA target sequence for TTN (NM_003319.2,57077-57095).
gtaacatcactatctatta

SEQ ID NO: 105545 - DNA, 19 bp, Homo sapiens
  siRNA target sequence for TTN (NM_003319.2,57147-57165).
gtgctggatccataacagt

SEQ ID NO: 105546 - DNA, 19 bp, Homo sapiens
  siRNA target sequence for TTN (NM_003319.2,57153-57171).
gatccataacagttcctat

SEQ ID NO: 105547 - DNA, 19 bp, Homo sapiens
  siRNA target sequence for TTN (NM_003319.2,57200-57218).
cctccaggtcctatacgta

SEQ ID NO: 105548 - DNA, 19 bp, Homo sapiens
  siRNA target sequence for TTN (NM_003319.2,57201-57219).
ctccaggtcctatacgtat

SEQ ID NO: 105549 - DNA, 19 bp, Homo sapiens
  siRNA target sequence for TTN (NM_003319.2,57204-57222).
caggtcctatacgtattga

SEQ ID NO: 105550 - DNA, 19 bp, Homo sapiens
  siRNA target sequence for TTN (NM_003319.2,57215-57233).
cgtattgatgaggttagtt

SEQ ID NO: 105551 - DNA, 19 bp, Homo sapiens
  siRNA target sequence for TTN (NM_003319.2,57231-57249).
gttgtgacagcataaccat

SEQ ID NO: 105552 - DNA, 19 bp, Homo sapiens
  siRNA target sequence for TTN (NM_003319.2,57330-57348).
catggcacatagtttcaca

SEQ ID NO: 105553 - DNA, 19 bp, Homo sapiens
  siRNA target sequence for TTN (NM_003319.2,57360-57378).
gaacatccattaaaatagt

SEQ ID NO: 105554 - DNA, 19 bp, Homo sapiens
  siRNA target sequence for TTN (NM_003319.2,57385-57403).
gacaacaggaagtgagtat

SEQ ID NO: 105555 - DNA, 19 bp, Homo sapiens
  siRNA target sequence for TTN (NM_003319.2,57439-57457).
gagctcctacagtgaatct

SEQ ID NO: 105556 - DNA, 19 bp, Homo sapiens
  siRNA target sequence for TTN (NM_003319.2,57464-57482).
gttgttgcagagtatccat

SEQ ID NO: 105557 - DNA, 19 bp, Homo sapiens
  siRNA target sequence for TTN (NM_003319.2,57498-57516).
ctcctggtactcctaaagt

SEQ ID NO: 105558 - DNA, 19 bp, Homo sapiens
  siRNA target sequence for TTN (NM_003319.2,57501-57519).
ctggtactcctaaagttgt

SEQ ID NO: 105559 - DNA, 19 bp, Homo sapiens
  siRNA target sequence for TTN (NM_003319.2,57518-57536).
gtgcatgccacaaaatcta

SEQ ID NO: 105560 - DNA, 19 bp, Homo sapiens
  siRNA target sequence for TTN (NM_003319.2,57549-57567).
cctggcaagtgccagttaa

SEQ ID NO: 105561 - DNA, 19 bp, Homo sapiens
  siRNA target sequence for TTN (NM_003319.2,57550-57568).
ctggcaagtgccagttaat

SEQ ID NO: 105562 - DNA, 19 bp, Homo sapiens
  siRNA target sequence for TTN (NM_003319.2,57590-57608).
ggctatcatcttgagtata

SEQ ID NO: 105563 - DNA, 19 bp, Homo sapiens
  siRNA target sequence for TTN (NM_003319.2,57611-57629).
gaaagaagcagcattcttt

SEQ ID NO: 105564 - DNA, 19 bp, Homo sapiens
  siRNA target sequence for TTN (NM_003319.2,57689-57707).
gaaggactgatgtatgagt

SEQ ID NO: 105565 - DNA, 19 bp, Homo sapiens
  siRNA target sequence for TTN (NM_003319.2,57700-57718).
gtatgagtatcgtgtatat

SEQ ID NO: 105566 - DNA, 19 bp, Homo sapiens
  siRNA target sequence for TTN (NM_003319.2,57800-57818).
caacctgaagtcacaaata

SEQ ID NO: 105567 - DNA, 19 bp, Homo sapiens
  siRNA target sequence for TTN (NM_003319.2,57835-57853).
gtcacttaaatggtctaaa

SEQ ID NO: 105568 - DNA, 19 bp, Homo sapiens
  siRNA target sequence for TTN (NM_003319.2,57873-57891).
ctaagatcacaggatacat

SEQ ID NO: 105569 - DNA, 19 bp, Homo sapiens
  siRNA target sequence for TTN (NM_003319.2,57922-57940).
gtggctgaagtgcaattat

SEQ ID NO: 105570 - DNA, 19 bp, Homo sapiens
  siRNA target sequence for TTN (NM_003319.2,57925-57943).
gctgaagtgcaattatact

SEQ ID NO: 105571 - DNA, 19 bp, Homo sapiens
  siRNA target sequence for TTN (NM_003319.2,57926-57944).
ctgaagtgcaattatacta

SEQ ID NO: 105572 - DNA, 19 bp, Homo sapiens
  siRNA target sequence for TTN (NM_003319.2,57942-57960).
ctaatatacaagaaacata

SEQ ID NO: 105573 - DNA, 19 bp, Homo sapiens
  siRNA target sequence for TTN (NM_003319.2,57957-57975).
catactttgaagtaactga

SEQ ID NO: 105574 - DNA, 19 bp, Homo sapiens
  siRNA target sequence for TTN (NM_003319.2,57981-57999).
ctgaagatcagcgttatga

SEQ ID NO: 105575 - DNA, 19 bp, Homo sapiens
  siRNA target sequence for TTN (NM_003319.2,57983-58001).
gaagatcagcgttatgaat

SEQ ID NO: 105576 - DNA, 19 bp, Homo sapiens
  siRNA target sequence for TTN (NM_003319.2,58062-58080).
ctattatagttaaagatga

SEQ ID NO: 105577 - DNA, 19 bp, Homo sapiens
  siRNA target sequence for TTN (NM_003319.2,58095-58113).
gagttatgatggatgtcaa

SEQ ID NO: 105578 - DNA, 19 bp, Homo sapiens
  siRNA target sequence for TTN (NM_003319.2,58111-58129).
caagttccgagacgttatt

SEQ ID NO: 105579 - DNA, 19 bp, Homo sapiens
  siRNA target sequence for TTN (NM_003319.2,58114-58132).
gttccgagacgttattgtt

SEQ ID NO: 105580 - DNA, 19 bp, Homo sapiens
  siRNA target sequence for TTN (NM_003319.2,58119-58137).
gagacgttattgttgtcaa

SEQ ID NO: 105581 - DNA, 19 bp, Homo sapiens
  siRNA target sequence for TTN (NM_003319.2,58143-58161).
gagaggtccttaagataaa

SEQ ID NO: 105582 - DNA, 19 bp, Homo sapiens
  siRNA target sequence for TTN (NM_003319.2,58176-58194).
ggcgacctctgccagtaat

SEQ ID NO: 105583 - DNA, 19 bp, Homo sapiens
  siRNA target sequence for TTN (NM_003319.2,58198-58216).
ctgggccaaggatggtata

SEQ ID NO: 105584 - DNA, 19 bp, Homo sapiens
  siRNA target sequence for TTN (NM_003319.2,58202-58220).
gccaaggatggtatagaaa

SEQ ID NO: 105585 - DNA, 19 bp, Homo sapiens
  siRNA target sequence for TTN (NM_003319.2,58203-58221).
ccaaggatggtatagaaat

SEQ ID NO: 105586 - DNA, 19 bp, Homo sapiens
  siRNA target sequence for TTN (NM_003319.2,58230-58248).
gagcaagaacagaaatcat

SEQ ID NO: 105587 - DNA, 19 bp, Homo sapiens
  siRNA target sequence for TTN (NM_003319.2,58232-58250).
gcaagaacagaaatcatct

SEQ ID NO: 105588 - DNA, 19 bp, Homo sapiens
  siRNA target sequence for TTN (NM_003319.2,58246-58264).
catctcaacagacaatcat

SEQ ID NO: 105589 - DNA, 19 bp, Homo sapiens
  siRNA target sequence for TTN (NM_003319.2,58258-58276).
caatcatactttgttaaca

SEQ ID NO: 105590 - DNA, 19 bp, Homo sapiens
  siRNA target sequence for TTN (NM_003319.2,58305-58323).
ggcaatatgtactaacact

SEQ ID NO: 105591 - DNA, 19 bp, Homo sapiens
  siRNA target sequence for TTN (NM_003319.2,58343-58361).
cggtctgtggccgttaatt

SEQ ID NO: 105592 - DNA, 19 bp, Homo sapiens
  siRNA target sequence for TTN (NM_003319.2,58351-58369).
ggccgttaattgcaaagta

SEQ ID NO: 105593 - DNA, 19 bp, Homo sapiens
  siRNA target sequence for TTN (NM_003319.2,58353-58371).
ccgttaattgcaaagtact

SEQ ID NO: 105594 - DNA, 19 bp, Homo sapiens
  siRNA target sequence for TTN (NM_003319.2,58354-58372).
cgttaattgcaaagtactt

SEQ ID NO: 105595 - DNA, 19 bp, Homo sapiens
  siRNA target sequence for TTN (NM_003319.2,58388-58406).
ccagcaggaccacttgaaa

SEQ ID NO: 105596 - DNA, 19 bp, Homo sapiens
  siRNA target sequence for TTN (NM_003319.2,58469-58487).
gcagatatcgactattaca

SEQ ID NO: 105597 - DNA, 19 bp, Homo sapiens
  siRNA target sequence for TTN (NM_003319.2,58470-58488).
cagatatcgactattacat

SEQ ID NO: 105598 - DNA, 19 bp, Homo sapiens
  siRNA target sequence for TTN (NM_003319.2,58478-58496).
gactattacatcgtagaaa

SEQ ID NO: 105599 - DNA, 19 bp, Homo sapiens
  siRNA target sequence for TTN (NM_003319.2,58480-58498).
ctattacatcgtagaaaaa

SEQ ID NO: 105600 - DNA, 19 bp, Homo sapiens
  siRNA target sequence for TTN (NM_003319.2,58489-58507).
cgtagaaaaacgtgaaaca

SEQ ID NO: 105601 - DNA, 19 bp, Homo sapiens
  siRNA target sequence for TTN (NM_003319.2,58511-58529).
caccttgcatggacaatat

SEQ ID NO: 105602 - DNA, 19 bp, Homo sapiens
  siRNA target sequence for TTN (NM_003319.2,58557-58575).
gtaaagtaaccaagttact

SEQ ID NO: 105603 - DNA, 19 bp, Homo sapiens
  siRNA target sequence for TTN (NM_003319.2,58636-58654).
cctagagagtgtagctata

SEQ ID NO: 105604 - DNA, 19 bp, Homo sapiens
  siRNA target sequence for TTN (NM_003319.2,58690-58708).
cacgtctttggaaattact

SEQ ID NO: 105605 - DNA, 19 bp, Homo sapiens
  siRNA target sequence for TTN (NM_003319.2,58753-58771).
gagtgatggaggtagtgaa

SEQ ID NO: 105606 - DNA, 19 bp, Homo sapiens
  siRNA target sequence for TTN (NM_003319.2,58871-58889).
cttcgggaaggatgtgaat

SEQ ID NO: 105607 - DNA, 19 bp, Homo sapiens
  siRNA target sequence for TTN (NM_003319.2,58940-58958).
gaaacctctcccttaatta

SEQ ID NO: 105608 - DNA, 19 bp, Homo sapiens
  siRNA target sequence for TTN (NM_003319.2,58989-59007).
ctccatccaaacccaaaat

SEQ ID NO: 105609 - DNA, 19 bp, Homo sapiens
  siRNA target sequence for TTN (NM_003319.2,59014-59032).
ctcaggcaagacaactata

SEQ ID NO: 105610 - DNA, 19 bp, Homo sapiens
  siRNA target sequence for TTN (NM_003319.2,59018-59036).
ggcaagacaactataacta

SEQ ID NO: 105611 - DNA, 19 bp, Homo sapiens
  siRNA target sequence for TTN (NM_003319.2,59019-59037).
gcaagacaactataactat

SEQ ID NO: 105612 - DNA, 19 bp, Homo sapiens
  siRNA target sequence for TTN (NM_003319.2,59043-59061).
gggttaagccgctgtttga

SEQ ID NO: 105613 - DNA, 19 bp, Homo sapiens
  siRNA target sequence for TTN (NM_003319.2,59044-59062).
ggttaagccgctgtttgat

SEQ ID NO: 105614 - DNA, 19 bp, Homo sapiens
  siRNA target sequence for TTN (NM_003319.2,59073-59091).
cgataactggatatactgt

SEQ ID NO: 105615 - DNA, 19 bp, Homo sapiens
  siRNA target sequence for TTN (NM_003319.2,59082-59100).
gatatactgtagaatacaa

SEQ ID NO: 105616 - DNA, 19 bp, Homo sapiens
  siRNA target sequence for TTN (NM_003319.2,59404-59422).
cactgacctccgtactaga

SEQ ID NO: 105617 - DNA, 19 bp, Homo sapiens
  siRNA target sequence for TTN (NM_003319.2,59410-59428).
cctccgtactagagcttat

SEQ ID NO: 105618 - DNA, 19 bp, Homo sapiens
  siRNA target sequence for TTN (NM_003319.2,59413-59431).
ccgtactagagcttatgtt

SEQ ID NO: 105619 - DNA, 19 bp, Homo sapiens
  siRNA target sequence for TTN (NM_003319.2,59497-59515).
cacattaacaattcagaat

SEQ ID NO: 105620 - DNA, 19 bp, Homo sapiens
  siRNA target sequence for TTN (NM_003319.2,59529-59547).
cttcactgaccttagttgt

SEQ ID NO: 105621 - DNA, 19 bp, Homo sapiens
  siRNA target sequence for TTN (NM_003319.2,59532-59550).
cactgaccttagttgtcaa

SEQ ID NO: 105622 - DNA, 19 bp, Homo sapiens
  siRNA target sequence for TTN (NM_003319.2,59581-59599).
cattactgtgcaagatgta

SEQ ID NO: 105623 - DNA, 19 bp, Homo sapiens
  siRNA target sequence for TTN (NM_003319.2,59625-59643).
gggatgttcctgaaaacga

SEQ ID NO: 105624 - DNA, 19 bp, Homo sapiens
  siRNA target sequence for TTN (NM_003319.2,59659-59677).
gaagaattaccacatagaa

SEQ ID NO: 105625 - DNA, 19 bp, Homo sapiens
  siRNA target sequence for TTN (NM_003319.2,59709-59727).
ctgtgaccaacaactgtaa

SEQ ID NO: 105626 - DNA, 19 bp, Homo sapiens
  siRNA target sequence for TTN (NM_003319.2,59729-59747).
cgcctctcctacaaagtta

SEQ ID NO: 105627 - DNA, 19 bp, Homo sapiens
  siRNA target sequence for TTN (NM_003319.2,59734-59752).
ctcctacaaagttaccaat

SEQ ID NO: 105628 - DNA, 19 bp, Homo sapiens
  siRNA target sequence for TTN (NM_003319.2,59736-59754).
cctacaaagttaccaattt

SEQ ID NO: 105629 - DNA, 19 bp, Homo sapiens
  siRNA target sequence for TTN (NM_003319.2,59873-59891).
cttggagtaacaagtatat

SEQ ID NO: 105630 - DNA, 19 bp, Homo sapiens
  siRNA target sequence for TTN (NM_003319.2,59876-59894).
ggagtaacaagtatatcca

SEQ ID NO: 105631 - DNA, 19 bp, Homo sapiens
  siRNA target sequence for TTN (NM_003319.2,59877-59895).
gagtaacaagtatatccaa

SEQ ID NO: 105632 - DNA, 19 bp, Homo sapiens
  siRNA target sequence for TTN (NM_003319.2,59916-59934).
ggctgaagcctgaacatga

SEQ ID NO: 105633 - DNA, 19 bp, Homo sapiens
  siRNA target sequence for TTN (NM_003319.2,59917-59935).
gctgaagcctgaacatgat

SEQ ID NO: 105634 - DNA, 19 bp, Homo sapiens
  siRNA target sequence for TTN (NM_003319.2,59984-60002).
cagaaaaactgggttaaat

SEQ ID NO: 105635 - DNA, 19 bp, Homo sapiens
  siRNA target sequence for TTN (NM_003319.2,60045-60063).
gagagaattctgaatactt

SEQ ID NO: 105636 - DNA, 19 bp, Homo sapiens
  siRNA target sequence for TTN (NM_003319.2,60146-60164).
gaaccacctgaaattgata

SEQ ID NO: 105637 - DNA, 19 bp, Homo sapiens
  siRNA target sequence for TTN (NM_003319.2,60201-60219).
ctggttcaaaccttaaagt

SEQ ID NO: 105638 - DNA, 19 bp, Homo sapiens
  siRNA target sequence for TTN (NM_003319.2,60204-60222).
gttcaaaccttaaagttga

SEQ ID NO: 105639 - DNA, 19 bp, Homo sapiens
  siRNA target sequence for TTN (NM_003319.2,60207-60225).
caaaccttaaagttgacat

SEQ ID NO: 105640 - DNA, 19 bp, Homo sapiens
  siRNA target sequence for TTN (NM_003319.2,60281-60299).
cttaaggcaaccatgagat

SEQ ID NO: 105641 - DNA, 19 bp, Homo sapiens
  siRNA target sequence for TTN (NM_003319.2,60286-60304).
ggcaaccatgagatttaat

SEQ ID NO: 105642 - DNA, 19 bp, Homo sapiens
  siRNA target sequence for TTN (NM_003319.2,60287-60305).
gcaaccatgagatttaata

SEQ ID NO: 105643 - DNA, 19 bp, Homo sapiens
  siRNA target sequence for TTN (NM_003319.2,60295-60313).
gagatttaataccgaaatt

SEQ ID NO: 105644 - DNA, 19 bp, Homo sapiens
  siRNA target sequence for TTN (NM_003319.2,60391-60409).
ctccagtggtacaaccaaa

SEQ ID NO: 105645 - DNA, 19 bp, Homo sapiens
  siRNA target sequence for TTN (NM_003319.2,60396-60414).
gtggtacaaccaaagcttt

SEQ ID NO: 105646 - DNA, 19 bp, Homo sapiens
  siRNA target sequence for TTN (NM_003319.2,60399-60417).
gtacaaccaaagctttcat

SEQ ID NO: 105647 - DNA, 19 bp, Homo sapiens
  siRNA target sequence for TTN (NM_003319.2,60517-60535).
gtatgacggtggaagtcaa

SEQ ID NO: 105648 - DNA, 19 bp, Homo sapiens
  siRNA target sequence for TTN (NM_003319.2,60531-60549).
gtcaagttaccaactacat

SEQ ID NO: 105649 - DNA, 19 bp, Homo sapiens
  siRNA target sequence for TTN (NM_003319.2,60688-60706).
cagtgatcatatagattca

SEQ ID NO: 105650 - DNA, 19 bp, Homo sapiens
  siRNA target sequence for TTN (NM_003319.2,60753-60771).
ctacaccatgggtcactaa

SEQ ID NO: 105651 - DNA, 19 bp, Homo sapiens
  siRNA target sequence for TTN (NM_003319.2,60756-60774).
caccatgggtcactaatgt

SEQ ID NO: 105652 - DNA, 19 bp, Homo sapiens
  siRNA target sequence for TTN (NM_003319.2,60758-60776).
ccatgggtcactaatgtta

SEQ ID NO: 105653 - DNA, 19 bp, Homo sapiens
  siRNA target sequence for TTN (NM_003319.2,60801-60819).
ggcatgaaccagtgtcaaa

SEQ ID NO: 105654 - DNA, 19 bp, Homo sapiens
  siRNA target sequence for TTN (NM_003319.2,60802-60820).
gcatgaaccagtgtcaaat

SEQ ID NO: 105655 - DNA, 19 bp, Homo sapiens
  siRNA target sequence for TTN (NM_003319.2,60904-60922).
ccgcacaactcacttcaaa

SEQ ID NO: 105656 - DNA, 19 bp, Homo sapiens
  siRNA target sequence for TTN (NM_003319.2,60930-60948).
caatcagtgctggacttat

SEQ ID NO: 105657 - DNA, 19 bp, Homo sapiens
  siRNA target sequence for TTN (NM_003319.2,60934-60952).
cagtgctggacttatttat

SEQ ID NO: 105658 - DNA, 19 bp, Homo sapiens
  siRNA target sequence for TTN (NM_003319.2,60936-60954).
gtgctggacttatttatga

SEQ ID NO: 105659 - DNA, 19 bp, Homo sapiens
  siRNA target sequence for TTN (NM_003319.2,60938-60956).
gctggacttatttatgaat

SEQ ID NO: 105660 - DNA, 19 bp, Homo sapiens
  siRNA target sequence for TTN (NM_003319.2,60941-60959).
ggacttatttatgaattca

SEQ ID NO: 105661 - DNA, 19 bp, Homo sapiens
  siRNA target sequence for TTN (NM_003319.2,60980-60998).
gctggagttggaaaaccta

SEQ ID NO: 105662 - DNA, 19 bp, Homo sapiens
  siRNA target sequence for TTN (NM_003319.2,61052-61070).
gttcgtatcactgatattt

SEQ ID NO: 105663 - DNA, 19 bp, Homo sapiens
  siRNA target sequence for TTN (NM_003319.2,61055-61073).
cgtatcactgatatttcaa

SEQ ID NO: 105664 - DNA, 19 bp, Homo sapiens
  siRNA target sequence for TTN (NM_003319.2,61096-61114).
gcaacaaccagctttcgat

SEQ ID NO: 105665 - DNA, 19 bp, Homo sapiens
  siRNA target sequence for TTN (NM_003319.2,61111-61129).
cgatggaggtagcaagatt

SEQ ID NO: 105666 - DNA, 19 bp, Homo sapiens
  siRNA target sequence for TTN (NM_003319.2,61180-61198).
ggccagcttcaccaatgtt

SEQ ID NO: 105667 - DNA, 19 bp, Homo sapiens
  siRNA target sequence for TTN (NM_003319.2,61181-61199).
gccagcttcaccaatgtta

SEQ ID NO: 105668 - DNA, 19 bp, Homo sapiens
  siRNA target sequence for TTN (NM_003319.2,61185-61203).
gcttcaccaatgttactga

SEQ ID NO: 105669 - DNA, 19 bp, Homo sapiens
  siRNA target sequence for TTN (NM_003319.2,61230-61248).
ctcagaattcccagtatga

SEQ ID NO: 105670 - DNA, 19 bp, Homo sapiens
  siRNA target sequence for TTN (NM_003319.2,61247-61265).
gaattccgtgtctttgcta

SEQ ID NO: 105671 - DNA, 19 bp, Homo sapiens
  siRNA target sequence for TTN (NM_003319.2,61271-61289).
gctgttggttccattagca

SEQ ID NO: 105672 - DNA, 19 bp, Homo sapiens
  siRNA target sequence for TTN (NM_003319.2,61277-61295).
ggttccattagcaatccat

SEQ ID NO: 105673 - DNA, 19 bp, Homo sapiens
  siRNA target sequence for TTN (NM_003319.2,61300-61318).
ggttgtagggcccattact

SEQ ID NO: 105674 - DNA, 19 bp, Homo sapiens
  siRNA target sequence for TTN (NM_003319.2,61301-61319).
gttgtagggcccattactt

SEQ ID NO: 105675 - DNA, 19 bp, Homo sapiens
  siRNA target sequence for TTN (NM_003319.2,61310-61328).
cccattacttgcatcgatt

SEQ ID NO: 105676 - DNA, 19 bp, Homo sapiens
  siRNA target sequence for TTN (NM_003319.2,61425-61443).
gcaaacctgcgcctactat

SEQ ID NO: 105677 - DNA, 19 bp, Homo sapiens
  siRNA target sequence for TTN (NM_003319.2,61436-61454).
cctactattgagtggtata

SEQ ID NO: 105678 - DNA, 19 bp, Homo sapiens
  siRNA target sequence for TTN (NM_003319.2,61437-61455).
ctactattgagtggtataa

SEQ ID NO: 105679 - DNA, 19 bp, Homo sapiens
  siRNA target sequence for TTN (NM_003319.2,61484-61502).
ctggtgtgtgttgaaaata

SEQ ID NO: 105680 - DNA, 19 bp, Homo sapiens
  siRNA target sequence for TTN (NM_003319.2,61503-61521).
ccacggacctcgcatctat

SEQ ID NO: 105681 - DNA, 19 bp, Homo sapiens
  siRNA target sequence for TTN (NM_003319.2,61504-61522).
cacggacctcgcatctata

SEQ ID NO: 105682 - DNA, 19 bp, Homo sapiens
  siRNA target sequence for TTN (NM_003319.2,61506-61524).
cggacctcgcatctatact

SEQ ID NO: 105683 - DNA, 19 bp, Homo sapiens
  siRNA target sequence for TTN (NM_003319.2,61508-61526).
gacctcgcatctatactca

SEQ ID NO: 105684 - DNA, 19 bp, Homo sapiens
  siRNA target sequence for TTN (NM_003319.2,61513-61531).
cgcatctatactcatcaaa

SEQ ID NO: 105685 - DNA, 19 bp, Homo sapiens
  siRNA target sequence for TTN (NM_003319.2,61532-61550).
gatgccgatcgccttaata

SEQ ID NO: 105686 - DNA, 19 bp, Homo sapiens
  siRNA target sequence for TTN (NM_003319.2,61543-61561).
ccttaatagtggatgctat

SEQ ID NO: 105687 - DNA, 19 bp, Homo sapiens
  siRNA target sequence for TTN (NM_003319.2,61599-61617).
ccaccatcagagtacagat

SEQ ID NO: 105688 - DNA, 19 bp, Homo sapiens
  siRNA target sequence for TTN (NM_003319.2,61635-61653).
cacctggtggaccaattga

SEQ ID NO: 105689 - DNA, 19 bp, Homo sapiens
  siRNA target sequence for TTN (NM_003319.2,61637-61655).
cctggtggaccaattgaat

SEQ ID NO: 105690 - DNA, 19 bp, Homo sapiens
  siRNA target sequence for TTN (NM_003319.2,61638-61656).
ctggtggaccaattgaatt

SEQ ID NO: 105691 - DNA, 19 bp, Homo sapiens
  siRNA target sequence for TTN (NM_003319.2,61640-61658).
ggtggaccaattgaattta

SEQ ID NO: 105692 - DNA, 19 bp, Homo sapiens
  siRNA target sequence for TTN (NM_003319.2,61662-61680).
ctgtaactgctgagaagat

SEQ ID NO: 105693 - DNA, 19 bp, Homo sapiens
  siRNA target sequence for TTN (NM_003319.2,61771-61789).
gtctatggtgtctgaacat

SEQ ID NO: 105694 - DNA, 19 bp, Homo sapiens
  siRNA target sequence for TTN (NM_003319.2,61777-61795).
ggtgtctgaacatttggaa

SEQ ID NO: 105695 - DNA, 19 bp, Homo sapiens
  siRNA target sequence for TTN (NM_003319.2,61792-61810).
ggaagagtgcatcattaca

SEQ ID NO: 105696 - DNA, 19 bp, Homo sapiens
  siRNA target sequence for TTN (NM_003319.2,61793-61811).
gaagagtgcatcattacaa

SEQ ID NO: 105697 - DNA, 19 bp, Homo sapiens
  siRNA target sequence for TTN (NM_003319.2,61848-61866).
gggtccgagccgtgaacaa

SEQ ID NO: 105698 - DNA, 19 bp, Homo sapiens
  siRNA target sequence for TTN (NM_003319.2,61849-61867).
ggtccgagccgtgaacaaa

SEQ ID NO: 105699 - DNA, 19 bp, Homo sapiens
  siRNA target sequence for TTN (NM_003319.2,61850-61868).
gtccgagccgtgaacaaat

SEQ ID NO: 105700 - DNA, 19 bp, Homo sapiens
  siRNA target sequence for TTN (NM_003319.2,61907-61925).
gccaagaacgcatttgtta

SEQ ID NO: 105701 - DNA, 19 bp, Homo sapiens
  siRNA target sequence for TTN (NM_003319.2,61909-61927).
caagaacgcatttgttaca

SEQ ID NO: 105702 - DNA, 19 bp, Homo sapiens
  siRNA target sequence for TTN (NM_003319.2,62003-62021).
gcagatggcggtagtgata

SEQ ID NO: 105703 - DNA, 19 bp, Homo sapiens
  siRNA target sequence for TTN (NM_003319.2,62004-62022).
cagatggcggtagtgatat

SEQ ID NO: 105704 - DNA, 19 bp, Homo sapiens
  siRNA target sequence for TTN (NM_003319.2,62006-62024).
gatggcggtagtgatataa

SEQ ID NO: 105705 - DNA, 19 bp, Homo sapiens
  siRNA target sequence for TTN (NM_003319.2,62059-62077).
cctaggatggtttaaagta

SEQ ID NO: 105706 - DNA, 19 bp, Homo sapiens
  siRNA target sequence for TTN (NM_003319.2,62063-62081).
ggatggtttaaagtactaa

SEQ ID NO: 105707 - DNA, 19 bp, Homo sapiens
  siRNA target sequence for TTN (NM_003319.2,62067-62085).
ggtttaaagtactaaaaga

SEQ ID NO: 105708 - DNA, 19 bp, Homo sapiens
  siRNA target sequence for TTN (NM_003319.2,62098-62116).
caccagacaaaaagtaaca

SEQ ID NO: 105709 - DNA, 19 bp, Homo sapiens
  siRNA target sequence for TTN (NM_003319.2,62135-62153).
gactatcaatacagagttt

SEQ ID NO: 105710 - DNA, 19 bp, Homo sapiens
  siRNA target sequence for TTN (NM_003319.2,62234-62252).
ggtccacctgctaagataa

SEQ ID NO: 105711 - DNA, 19 bp, Homo sapiens
  siRNA target sequence for TTN (NM_003319.2,62248-62266).
gataagaatcgcagattca

SEQ ID NO: 105712 - DNA, 19 bp, Homo sapiens
  siRNA target sequence for TTN (NM_003319.2,62293-62311).
gagtaagcctgtctatgat

SEQ ID NO: 105713 - DNA, 19 bp, Homo sapiens
  siRNA target sequence for TTN (NM_003319.2,62322-62340).
ctgttactgggtatgttgt

SEQ ID NO: 105714 - DNA, 19 bp, Homo sapiens
  siRNA target sequence for TTN (NM_003319.2,62330-62348).
gggtatgttgtcgagataa

SEQ ID NO: 105715 - DNA, 19 bp, Homo sapiens
  siRNA target sequence for TTN (NM_003319.2,62395-62413).
ggtcagaactacagaatat

SEQ ID NO: 105716 - DNA, 19 bp, Homo sapiens
  siRNA target sequence for TTN (NM_003319.2,62406-62424).
cagaatatgtggtatccaa

SEQ ID NO: 105717 - DNA, 19 bp, Homo sapiens
  siRNA target sequence for TTN (NM_003319.2,62453-62471).
cgggtatctgctgtaaact

SEQ ID NO: 105718 - DNA, 19 bp, Homo sapiens
  siRNA target sequence for TTN (NM_003319.2,62478-62496).
gacaaggagaacctataga

SEQ ID NO: 105719 - DNA, 19 bp, Homo sapiens
  siRNA target sequence for TTN (NM_003319.2,62507-62525).
cctgtacaagctaaagata

SEQ ID NO: 105720 - DNA, 19 bp, Homo sapiens
  siRNA target sequence for TTN (NM_003319.2,62552-62570).
gatgtggctctcagaactt

SEQ ID NO: 105721 - DNA, 19 bp, Homo sapiens
  siRNA target sequence for TTN (NM_003319.2,62729-62747).
caagttactcgcaatgata

SEQ ID NO: 105722 - DNA, 19 bp, Homo sapiens
  siRNA target sequence for TTN (NM_003319.2,62783-62801).
ggtgaacctaagtcttcaa

SEQ ID NO: 105723 - DNA, 19 bp, Homo sapiens
  siRNA target sequence for TTN (NM_003319.2,62838-62856).
gccagaaactacaggttaa

SEQ ID NO: 105724 - DNA, 19 bp, Homo sapiens
  siRNA target sequence for TTN (NM_003319.2,62842-62860).
gaaactacaggttaaacat

SEQ ID NO: 105725 - DNA, 19 bp, Homo sapiens
  siRNA target sequence for TTN (NM_003319.2,62889-62907).
gggatcctcctctcattga

SEQ ID NO: 105726 - DNA, 19 bp, Homo sapiens
  siRNA target sequence for TTN (NM_003319.2,62909-62927).
ggaggatctccaataatta

SEQ ID NO: 105727 - DNA, 19 bp, Homo sapiens
  siRNA target sequence for TTN (NM_003319.2,62910-62928).
gaggatctccaataattaa

SEQ ID NO: 105728 - DNA, 19 bp, Homo sapiens
  siRNA target sequence for TTN (NM_003319.2,62918-62936).
ccaataattaattatgtca

SEQ ID NO: 105729 - DNA, 19 bp, Homo sapiens
  siRNA target sequence for TTN (NM_003319.2,62968-62986).
gtctgtcgtgtcacacaaa

SEQ ID NO: 105730 - DNA, 19 bp, Homo sapiens
  siRNA target sequence for TTN (NM_003319.2,63074-63092).
ggggaaccctgtgaaacta

SEQ ID NO: 105731 - DNA, 19 bp, Homo sapiens
  siRNA target sequence for TTN (NM_003319.2,63126-63144).
ctatacgtgatctctcaat

SEQ ID NO: 105732 - DNA, 19 bp, Homo sapiens
  siRNA target sequence for TTN (NM_003319.2,63134-63152).
gatctctcaatgaaagact

SEQ ID NO: 105733 - DNA, 19 bp, Homo sapiens
  siRNA target sequence for TTN (NM_003319.2,63208-63226).
cgtcatcacagaatatgtt

SEQ ID NO: 105734 - DNA, 19 bp, Homo sapiens
  siRNA target sequence for TTN (NM_003319.2,63259-63277).
gtcccacgctggcataagt

SEQ ID NO: 105735 - DNA, 19 bp, Homo sapiens
  siRNA target sequence for TTN (NM_003319.2,63261-63279).
cccacgctggcataagtaa

SEQ ID NO: 105736 - DNA, 19 bp, Homo sapiens
  siRNA target sequence for TTN (NM_003319.2,63263-63281).
cacgctggcataagtaaga

SEQ ID NO: 105737 - DNA, 19 bp, Homo sapiens
  siRNA target sequence for TTN (NM_003319.2,63265-63283).
cgctggcataagtaagaca

SEQ ID NO: 105738 - DNA, 19 bp, Homo sapiens
  siRNA target sequence for TTN (NM_003319.2,63266-63284).
gctggcataagtaagacat

SEQ ID NO: 105739 - DNA, 19 bp, Homo sapiens
  siRNA target sequence for TTN (NM_003319.2,63276-63294).
gtaagacatgtgaaattga

SEQ ID NO: 105740 - DNA, 19 bp, Homo sapiens
  siRNA target sequence for TTN (NM_003319.2,63361-63379).
gagtgatcctgtcactatt

SEQ ID NO: 105741 - DNA, 19 bp, Homo sapiens
  siRNA target sequence for TTN (NM_003319.2,63373-63391).
cactattgggccaattaca

SEQ ID NO: 105742 - DNA, 19 bp, Homo sapiens
  siRNA target sequence for TTN (NM_003319.2,63375-63393).
ctattgggccaattacagt

SEQ ID NO: 105743 - DNA, 19 bp, Homo sapiens
  siRNA target sequence for TTN (NM_003319.2,63382-63400).
gccaattacagtgaaagaa

SEQ ID NO: 105744 - DNA, 19 bp, Homo sapiens
  siRNA target sequence for TTN (NM_003319.2,63469-63487).
caatgtgcaccttgaatta

SEQ ID NO: 105745 - DNA, 19 bp, Homo sapiens
  siRNA target sequence for TTN (NM_003319.2,63473-63491).
gtgcaccttgaattacctt

SEQ ID NO: 105746 - DNA, 19 bp, Homo sapiens
  siRNA target sequence for TTN (NM_003319.2,63475-63493).
gcaccttgaattaccttat

SEQ ID NO: 105747 - DNA, 19 bp, Homo sapiens
  siRNA target sequence for TTN (NM_003319.2,63476-63494).
caccttgaattaccttata

SEQ ID NO: 105748 - DNA, 19 bp, Homo sapiens
  siRNA target sequence for TTN (NM_003319.2,63503-63521).
cccaaaccatccatcagtt

SEQ ID NO: 105749 - DNA, 19 bp, Homo sapiens
  siRNA target sequence for TTN (NM_003319.2,63514-63532).
catcagttggctgaaagat

SEQ ID NO: 105750 - DNA, 19 bp, Homo sapiens
  siRNA target sequence for TTN (NM_003319.2,63554-63572).
gaatttgttcgcttcagta

SEQ ID NO: 105751 - DNA, 19 bp, Homo sapiens
  siRNA target sequence for TTN (NM_003319.2,63619-63637).
gcatggaggaaaatacact

SEQ ID NO: 105752 - DNA, 19 bp, Homo sapiens
  siRNA target sequence for TTN (NM_003319.2,63690-63708).
cccttggcccaccatcaaa

SEQ ID NO: 105753 - DNA, 19 bp, Homo sapiens
  siRNA target sequence for TTN (NM_003319.2,63711-63729).
ccaaaggacccattcgatt

SEQ ID NO: 105754 - DNA, 19 bp, Homo sapiens
  siRNA target sequence for TTN (NM_003319.2,63717-63735).
gacccattcgatttgatga

SEQ ID NO: 105755 - DNA, 19 bp, Homo sapiens
  siRNA target sequence for TTN (NM_003319.2,63719-63737).
cccattcgatttgatgaaa

SEQ ID NO: 105756 - DNA, 19 bp, Homo sapiens
  siRNA target sequence for TTN (NM_003319.2,63766-63784).
ggatgtacctgaagataat

SEQ ID NO: 105757 - DNA, 19 bp, Homo sapiens
  siRNA target sequence for TTN (NM_003319.2,63814-63832).
cgagaagcgggaaacttca

SEQ ID NO: 105758 - DNA, 19 bp, Homo sapiens
  siRNA target sequence for TTN (NM_003319.2,63820-63838).
gcgggaaacttcacaaact

SEQ ID NO: 105759 - DNA, 19 bp, Homo sapiens
  siRNA target sequence for TTN (NM_003319.2,63863-63881).
gttgccagaacgactttca

SEQ ID NO: 105760 - DNA, 19 bp, Homo sapiens
  siRNA target sequence for TTN (NM_003319.2,63876-63894).
ctttcaaagttcctaatct

SEQ ID NO: 105761 - DNA, 19 bp, Homo sapiens
  siRNA target sequence for TTN (NM_003319.2,63956-63974).
ccacttgtctcaagcatta

SEQ ID NO: 105762 - DNA, 19 bp, Homo sapiens
  siRNA target sequence for TTN (NM_003319.2,64062-64080).
gggatgctccagtttatga

SEQ ID NO: 105763 - DNA, 19 bp, Homo sapiens
  siRNA target sequence for TTN (NM_003319.2,64063-64081).
ggatgctccagtttatgat

SEQ ID NO: 105764 - DNA, 19 bp, Homo sapiens
  siRNA target sequence for TTN (NM_003319.2,64213-64231).
ccaattccgtgtatatgct

SEQ ID NO: 105765 - DNA, 19 bp, Homo sapiens
  siRNA target sequence for TTN (NM_003319.2,64257-64275).
ctagtgacccaagcaaatt

SEQ ID NO: 105766 - DNA, 19 bp, Homo sapiens
  siRNA target sequence for TTN (NM_003319.2,64262-64280).
gacccaagcaaatttacct

SEQ ID NO: 105767 - DNA, 19 bp, Homo sapiens
  siRNA target sequence for TTN (NM_003319.2,64334-64352).
cgggaaaccatcacactta

SEQ ID NO: 105768 - DNA, 19 bp, Homo sapiens
  siRNA target sequence for TTN (NM_003319.2,64387-64405).
gattgtgggctatagcatt

SEQ ID NO: 105769 - DNA, 19 bp, Homo sapiens
  siRNA target sequence for TTN (NM_003319.2,64432-64450).
ggtgagatgcaactttact

SEQ ID NO: 105770 - DNA, 19 bp, Homo sapiens
  siRNA target sequence for TTN (NM_003319.2,64460-64478).
gaatgtcagtacacagtta

SEQ ID NO: 105771 - DNA, 19 bp, Homo sapiens
  siRNA target sequence for TTN (NM_003319.2,64490-64508).
cctggggatcgctatgagt

SEQ ID NO: 105772 - DNA, 19 bp, Homo sapiens
  siRNA target sequence for TTN (NM_003319.2,64491-64509).
ctggggatcgctatgagtt

SEQ ID NO: 105773 - DNA, 19 bp, Homo sapiens
  siRNA target sequence for TTN (NM_003319.2,64499-64517).
cgctatgagttcagaataa

SEQ ID NO: 105774 - DNA, 19 bp, Homo sapiens
  siRNA target sequence for TTN (NM_003319.2,64524-64542).
gaaatgctgttggaactat

SEQ ID NO: 105775 - DNA, 19 bp, Homo sapiens
  siRNA target sequence for TTN (NM_003319.2,64607-64625).
gagtttggccctgaatact

SEQ ID NO: 105776 - DNA, 19 bp, Homo sapiens
  siRNA target sequence for TTN (NM_003319.2,64609-64627).
gtttggccctgaatacttt

SEQ ID NO: 105777 - DNA, 19 bp, Homo sapiens
  siRNA target sequence for TTN (NM_003319.2,64628-64646).
gatggtctcattattaagt

SEQ ID NO: 105778 - DNA, 19 bp, Homo sapiens
  siRNA target sequence for TTN (NM_003319.2,64648-64666).
cggagagagccttagaatt

SEQ ID NO: 105779 - DNA, 19 bp, Homo sapiens
  siRNA target sequence for TTN (NM_003319.2,64688-64706).
ccagtgcctcgagtaactt

SEQ ID NO: 105780 - DNA, 19 bp, Homo sapiens
  siRNA target sequence for TTN (NM_003319.2,64718-64736).
ggagtggaaatcgaaaaga

SEQ ID NO: 105781 - DNA, 19 bp, Homo sapiens
  siRNA target sequence for TTN (NM_003319.2,64767-64785).
gatccaccagcctatttgt

SEQ ID NO: 105782 - DNA, 19 bp, Homo sapiens
  siRNA target sequence for TTN (NM_003319.2,64771-64789).
caccagcctatttgttaga

SEQ ID NO: 105783 - DNA, 19 bp, Homo sapiens
  siRNA target sequence for TTN (NM_003319.2,64800-64818).
gggaccatcgtggtgtata

SEQ ID NO: 105784 - DNA, 19 bp, Homo sapiens
  siRNA target sequence for TTN (NM_003319.2,64802-64820).
gaccatcgtggtgtataca

SEQ ID NO: 105785 - DNA, 19 bp, Homo sapiens
  siRNA target sequence for TTN (NM_003319.2,64819-64837).
cacagtggaagccaaaaat

SEQ ID NO: 105786 - DNA, 19 bp, Homo sapiens
  siRNA target sequence for TTN (NM_003319.2,64898-64916).
gttgggccaataagattca

SEQ ID NO: 105787 - DNA, 19 bp, Homo sapiens
  siRNA target sequence for TTN (NM_003319.2,64948-64966).
gtgggatgccccactcaat

SEQ ID NO: 105788 - DNA, 19 bp, Homo sapiens
  siRNA target sequence for TTN (NM_003319.2,64979-64997).
cccataacccactacatca

SEQ ID NO: 105789 - DNA, 19 bp, Homo sapiens
  siRNA target sequence for TTN (NM_003319.2,64981-64999).
cataacccactacatcatt

SEQ ID NO: 105790 - DNA, 19 bp, Homo sapiens
  siRNA target sequence for TTN (NM_003319.2,65019-65037).
gacttgcctgggcactaat

SEQ ID NO: 105791 - DNA, 19 bp, Homo sapiens
  siRNA target sequence for TTN (NM_003319.2,65028-65046).
gggcactaattgaggataa

SEQ ID NO: 105792 - DNA, 19 bp, Homo sapiens
  siRNA target sequence for TTN (NM_003319.2,65065-65083).
cactgccattaaactaata

SEQ ID NO: 105793 - DNA, 19 bp, Homo sapiens
  siRNA target sequence for TTN (NM_003319.2,65108-65126).
gtttctgcagttaacaagt

SEQ ID NO: 105794 - DNA, 19 bp, Homo sapiens
  siRNA target sequence for TTN (NM_003319.2,65132-65150).
gttggcaggccacttgatt

SEQ ID NO: 105795 - DNA, 19 bp, Homo sapiens
  siRNA target sequence for TTN (NM_003319.2,65136-65154).
gcaggccacttgattctga

SEQ ID NO: 105796 - DNA, 19 bp, Homo sapiens
  siRNA target sequence for TTN (NM_003319.2,65161-65179).
ggttgctcaaatacaatat

SEQ ID NO: 105797 - DNA, 19 bp, Homo sapiens
  siRNA target sequence for TTN (NM_003319.2,65166-65184).
ctcaaatacaatatactgt

SEQ ID NO: 105798 - DNA, 19 bp, Homo sapiens
  siRNA target sequence for TTN (NM_003319.2,65268-65286).
gtggcagtgaaattcaaca

SEQ ID NO: 105799 - DNA, 19 bp, Homo sapiens
  siRNA target sequence for TTN (NM_003319.2,65316-65334).
gcacaagatgggtaaaagt

SEQ ID NO: 105800 - DNA, 19 bp, Homo sapiens
  siRNA target sequence for TTN (NM_003319.2,65345-65363).
cgaccaatctctgaaacaa

SEQ ID NO: 105801 - DNA, 19 bp, Homo sapiens
  siRNA target sequence for TTN (NM_003319.2,65383-65401).
gacagaaggcaatgagtat

SEQ ID NO: 105802 - DNA, 19 bp, Homo sapiens
  siRNA target sequence for TTN (NM_003319.2,65385-65403).
cagaaggcaatgagtatga

SEQ ID NO: 105803 - DNA, 19 bp, Homo sapiens
  siRNA target sequence for TTN (NM_003319.2,65450-65468).
ggcatctcaagactcatta

SEQ ID NO: 105804 - DNA, 19 bp, Homo sapiens
  siRNA target sequence for TTN (NM_003319.2,65451-65469).
gcatctcaagactcattaa

SEQ ID NO: 105805 - DNA, 19 bp, Homo sapiens
  siRNA target sequence for TTN (NM_003319.2,65452-65470).
catctcaagactcattaaa

SEQ ID NO: 105806 - DNA, 19 bp, Homo sapiens
  siRNA target sequence for TTN (NM_003319.2,65499-65517).
ctcccacagtggtcaaagt

SEQ ID NO: 105807 - DNA, 19 bp, Homo sapiens
  siRNA target sequence for TTN (NM_003319.2,65501-65519).
cccacagtggtcaaagtaa

SEQ ID NO: 105808 - DNA, 19 bp, Homo sapiens
  siRNA target sequence for TTN (NM_003319.2,65503-65521).
cacagtggtcaaagtaaca

SEQ ID NO: 105809 - DNA, 19 bp, Homo sapiens
  siRNA target sequence for TTN (NM_003319.2,65593-65611).
gtatattattgaaatgtgt

SEQ ID NO: 105810 - DNA, 19 bp, Homo sapiens
  siRNA target sequence for TTN (NM_003319.2,65690-65708).
gcaggtgaagaatacaaat

SEQ ID NO: 105811 - DNA, 19 bp, Homo sapiens
  siRNA target sequence for TTN (NM_003319.2,65710-65728).
ccgagttagtgctatcaat

SEQ ID NO: 105812 - DNA, 19 bp, Homo sapiens
  siRNA target sequence for TTN (NM_003319.2,65790-65808).
cagctcctgagttagacat

SEQ ID NO: 105813 - DNA, 19 bp, Homo sapiens
  siRNA target sequence for TTN (NM_003319.2,65806-65824).
catagatgcaaacttcaaa

SEQ ID NO: 105814 - DNA, 19 bp, Homo sapiens
  siRNA target sequence for TTN (NM_003319.2,65850-65868).
ccagtattcgcctcttcat

SEQ ID NO: 105815 - DNA, 19 bp, Homo sapiens
  siRNA target sequence for TTN (NM_003319.2,65933-65951).
cgggctgatatccatacaa

SEQ ID NO: 105816 - DNA, 19 bp, Homo sapiens
  siRNA target sequence for TTN (NM_003319.2,65935-65953).
ggctgatatccatacaaca

SEQ ID NO: 105817 - DNA, 19 bp, Homo sapiens
  siRNA target sequence for TTN (NM_003319.2,66003-66021).
ggaaatatacccttactgt

SEQ ID NO: 105818 - DNA, 19 bp, Homo sapiens
  siRNA target sequence for TTN (NM_003319.2,66028-66046).
caacagtggtagtaagtca

SEQ ID NO: 105819 - DNA, 19 bp, Homo sapiens
  siRNA target sequence for TTN (NM_003319.2,66035-66053).
ggtagtaagtcaatcacat

SEQ ID NO: 105820 - DNA, 19 bp, Homo sapiens
  siRNA target sequence for TTN (NM_003319.2,66036-66054).
gtagtaagtcaatcacatt

SEQ ID NO: 105821 - DNA, 19 bp, Homo sapiens
  siRNA target sequence for TTN (NM_003319.2,66090-66108).
gcccaattaccttcaaaga

SEQ ID NO: 105822 - DNA, 19 bp, Homo sapiens
  siRNA target sequence for TTN (NM_003319.2,66117-66135).
ggggatctgctacattgat

SEQ ID NO: 105823 - DNA, 19 bp, Homo sapiens
  siRNA target sequence for TTN (NM_003319.2,66119-66137).
ggatctgctacattgatgt

SEQ ID NO: 105824 - DNA, 19 bp, Homo sapiens
  siRNA target sequence for TTN (NM_003319.2,66157-66175).
cggtggtgcccgaatccat

SEQ ID NO: 105825 - DNA, 19 bp, Homo sapiens
  siRNA target sequence for TTN (NM_003319.2,66161-66179).
ggtgcccgaatccatcatt

SEQ ID NO: 105826 - DNA, 19 bp, Homo sapiens
  siRNA target sequence for TTN (NM_003319.2,66162-66180).
gtgcccgaatccatcatta

SEQ ID NO: 105827 - DNA, 19 bp, Homo sapiens
  siRNA target sequence for TTN (NM_003319.2,66165-66183).
cccgaatccatcattatgt

SEQ ID NO: 105828 - DNA, 19 bp, Homo sapiens
  siRNA target sequence for TTN (NM_003319.2,66207-66225).
gccgtagttggcaggttat

SEQ ID NO: 105829 - DNA, 19 bp, Homo sapiens
  siRNA target sequence for TTN (NM_003319.2,66209-66227).
cgtagttggcaggttatca

SEQ ID NO: 105830 - DNA, 19 bp, Homo sapiens
  siRNA target sequence for TTN (NM_003319.2,66237-66255).
gcactcgtcagatcttcaa

SEQ ID NO: 105831 - DNA, 19 bp, Homo sapiens
  siRNA target sequence for TTN (NM_003319.2,66271-66289).
cgaaggtgttccgtactat

SEQ ID NO: 105832 - DNA, 19 bp, Homo sapiens
  siRNA target sequence for TTN (NM_003319.2,66375-66393).
cacctaggagacttgatgt

SEQ ID NO: 105833 - DNA, 19 bp, Homo sapiens
  siRNA target sequence for TTN (NM_003319.2,66386-66404).
cttgatgttgttgatacta

SEQ ID NO: 105834 - DNA, 19 bp, Homo sapiens
  siRNA target sequence for TTN (NM_003319.2,66392-66410).
gttgttgatactagcaaat

SEQ ID NO: 105835 - DNA, 19 bp, Homo sapiens
  siRNA target sequence for TTN (NM_003319.2,66406-66424).
caaatcctccgcagtctta

SEQ ID NO: 105836 - DNA, 19 bp, Homo sapiens
  siRNA target sequence for TTN (NM_003319.2,66421-66439).
cttagcttggcttaaacct

SEQ ID NO: 105837 - DNA, 19 bp, Homo sapiens
  siRNA target sequence for TTN (NM_003319.2,66526-66544).
caaacagctaactttcaca

SEQ ID NO: 105838 - DNA, 19 bp, Homo sapiens
  siRNA target sequence for TTN (NM_003319.2,66550-66568).
gcgtcttgttgagaaaact

SEQ ID NO: 105839 - DNA, 19 bp, Homo sapiens
  siRNA target sequence for TTN (NM_003319.2,66617-66635).
cccagagaagccttctctt

SEQ ID NO: 105840 - DNA, 19 bp, Homo sapiens
  siRNA target sequence for TTN (NM_003319.2,66674-66692).
gacctcactggaattacca

SEQ ID NO: 105841 - DNA, 19 bp, Homo sapiens
  siRNA target sequence for TTN (NM_003319.2,66676-66694).
cctcactggaattaccaat

SEQ ID NO: 105842 - DNA, 19 bp, Homo sapiens
  siRNA target sequence for TTN (NM_003319.2,66684-66702).
gaattaccaatcagcttat

SEQ ID NO: 105843 - DNA, 19 bp, Homo sapiens
  siRNA target sequence for TTN (NM_003319.2,66730-66748).
cattgacgtaccaatcagt

SEQ ID NO: 105844 - DNA, 19 bp, Homo sapiens
  siRNA target sequence for TTN (NM_003319.2,66809-66827).
cgagtgagcattacaacaa

SEQ ID NO: 105845 - DNA, 19 bp, Homo sapiens
  siRNA target sequence for TTN (NM_003319.2,66870-66888).
gtgactctggaagatactt

SEQ ID NO: 105846 - DNA, 19 bp, Homo sapiens
  siRNA target sequence for TTN (NM_003319.2,66908-66926).
gctggtgttaaaacattta

SEQ ID NO: 105847 - DNA, 19 bp, Homo sapiens
  siRNA target sequence for TTN (NM_003319.2,67012-67030).
gtcatggggagaacctaaa

SEQ ID NO: 105848 - DNA, 19 bp, Homo sapiens
  siRNA target sequence for TTN (NM_003319.2,67041-67059).
gcactgaaattactaatta

SEQ ID NO: 105849 - DNA, 19 bp, Homo sapiens
  siRNA target sequence for TTN (NM_003319.2,67072-67090).
gcgtgaatcgggtacaaca

SEQ ID NO: 105850 - DNA, 19 bp, Homo sapiens
  siRNA target sequence for TTN (NM_003319.2,67091-67109).
gcttggcagcttgtcaatt

SEQ ID NO: 105851 - DNA, 19 bp, Homo sapiens
  siRNA target sequence for TTN (NM_003319.2,67115-67133).
gtcaagcgcactcaaatta

SEQ ID NO: 105852 - DNA, 19 bp, Homo sapiens
  siRNA target sequence for TTN (NM_003319.2,67117-67135).
caagcgcactcaaattaaa

SEQ ID NO: 105853 - DNA, 19 bp, Homo sapiens
  siRNA target sequence for TTN (NM_003319.2,67121-67139).
cgcactcaaattaaagtca

SEQ ID NO: 105854 - DNA, 19 bp, Homo sapiens
  siRNA target sequence for TTN (NM_003319.2,67294-67312).
caatgccatgtctattcgt

SEQ ID NO: 105855 - DNA, 19 bp, Homo sapiens
  siRNA target sequence for TTN (NM_003319.2,67369-67387).
gaaagaacgtaatacaatt

SEQ ID NO: 105856 - DNA, 19 bp, Homo sapiens
  siRNA target sequence for TTN (NM_003319.2,67373-67391).
gaacgtaatacaattcttt

SEQ ID NO: 105857 - DNA, 19 bp, Homo sapiens
  siRNA target sequence for TTN (NM_003319.2,67383-67401).
caattctttgggtgaaaga

SEQ ID NO: 105858 - DNA, 19 bp, Homo sapiens
  siRNA target sequence for TTN (NM_003319.2,67416-67434).
gcttagagtgcaactacaa

SEQ ID NO: 105859 - DNA, 19 bp, Homo sapiens
  siRNA target sequence for TTN (NM_003319.2,67417-67435).
cttagagtgcaactacaaa

SEQ ID NO: 105860 - DNA, 19 bp, Homo sapiens
  siRNA target sequence for TTN (NM_003319.2,67421-67439).
gagtgcaactacaaagtaa

SEQ ID NO: 105861 - DNA, 19 bp, Homo sapiens
  siRNA target sequence for TTN (NM_003319.2,67471-67489).
cagaacttatgcactcaat

SEQ ID NO: 105862 - DNA, 19 bp, Homo sapiens
  siRNA target sequence for TTN (NM_003319.2,67507-67525).
ggccagcgaagcttcaaga

SEQ ID NO: 105863 - DNA, 19 bp, Homo sapiens
  siRNA target sequence for TTN (NM_003319.2,67513-67531).
cgaagcttcaagacctata

SEQ ID NO: 105864 - DNA, 19 bp, Homo sapiens
  siRNA target sequence for TTN (NM_003319.2,67524-67542).
gacctataatggctcaaaa

SEQ ID NO: 105865 - DNA, 19 bp, Homo sapiens
  siRNA target sequence for TTN (NM_003319.2,67534-67552).
ggctcaaaatccagttgat

SEQ ID NO: 105866 - DNA, 19 bp, Homo sapiens
  siRNA target sequence for TTN (NM_003319.2,67573-67591).
gacagatgtcacaagatca

SEQ ID NO: 105867 - DNA, 19 bp, Homo sapiens
  siRNA target sequence for TTN (NM_003319.2,67580-67598).
gtcacaagatcaacagtat

SEQ ID NO: 105868 - DNA, 19 bp, Homo sapiens
  siRNA target sequence for TTN (NM_003319.2,67702-67720).
gtgcaactacaccattgta

SEQ ID NO: 105869 - DNA, 19 bp, Homo sapiens
  siRNA target sequence for TTN (NM_003319.2,67705-67723).
caactacaccattgtatct

SEQ ID NO: 105870 - DNA, 19 bp, Homo sapiens
  siRNA target sequence for TTN (NM_003319.2,67789-67807).
gaatgcagcaggcgtaatt

SEQ ID NO: 105871 - DNA, 19 bp, Homo sapiens
  siRNA target sequence for TTN (NM_003319.2,67793-67811).
gcagcaggcgtaattagca

SEQ ID NO: 105872 - DNA, 19 bp, Homo sapiens
  siRNA target sequence for TTN (NM_003319.2,67794-67812).
cagcaggcgtaattagcaa

SEQ ID NO: 105873 - DNA, 19 bp, Homo sapiens
  siRNA target sequence for TTN (NM_003319.2,67835-67853).
gtcacttgccgagatgaat

SEQ ID NO: 105874 - DNA, 19 bp, Homo sapiens
  siRNA target sequence for TTN (NM_003319.2,67914-67932).
caggttctgatcttgttct

SEQ ID NO: 105875 - DNA, 19 bp, Homo sapiens
  siRNA target sequence for TTN (NM_003319.2,67993-68011).
gctagatctctgtgaaaaa

SEQ ID NO: 105876 - DNA, 19 bp, Homo sapiens
  siRNA target sequence for TTN (NM_003319.2,68171-68189).
ctcaccgtcagcagagtaa

SEQ ID NO: 105877 - DNA, 19 bp, Homo sapiens
  siRNA target sequence for TTN (NM_003319.2,68173-68191).
caccgtcagcagagtaaca

SEQ ID NO: 105878 - DNA, 19 bp, Homo sapiens
  siRNA target sequence for TTN (NM_003319.2,68231-68249).
gacggaggagcagaaatca

SEQ ID NO: 105879 - DNA, 19 bp, Homo sapiens
  siRNA target sequence for TTN (NM_003319.2,68283-68301).
ggctcaactgggtgattgt

SEQ ID NO: 105880 - DNA, 19 bp, Homo sapiens
  siRNA target sequence for TTN (NM_003319.2,68284-68302).
gctcaactgggtgattgtt

SEQ ID NO: 105881 - DNA, 19 bp, Homo sapiens
  siRNA target sequence for TTN (NM_003319.2,68340-68358).
ggctcatcaagaacaatga

SEQ ID NO: 105882 - DNA, 19 bp, Homo sapiens
  siRNA target sequence for TTN (NM_003319.2,68372-68390).
gtgagggcagtaaacaaat

SEQ ID NO: 105883 - DNA, 19 bp, Homo sapiens
  siRNA target sequence for TTN (NM_003319.2,68420-68438).
ccaattgtagccagaaact

SEQ ID NO: 105884 - DNA, 19 bp, Homo sapiens
  siRNA target sequence for TTN (NM_003319.2,68429-68447).
gccagaaactcattcacta

SEQ ID NO: 105885 - DNA, 19 bp, Homo sapiens
  siRNA target sequence for TTN (NM_003319.2,68461-68479).
cggcatacctgaagaagtt

SEQ ID NO: 105886 - DNA, 19 bp, Homo sapiens
  siRNA target sequence for TTN (NM_003319.2,68486-68504).
ggcaaagagcatatcatca

SEQ ID NO: 105887 - DNA, 19 bp, Homo sapiens
  siRNA target sequence for TTN (NM_003319.2,68503-68521).
cattcagtggacaaaacct

SEQ ID NO: 105888 - DNA, 19 bp, Homo sapiens
  siRNA target sequence for TTN (NM_003319.2,68509-68527).
gtggacaaaacctgaatct

SEQ ID NO: 105889 - DNA, 19 bp, Homo sapiens
  siRNA target sequence for TTN (NM_003319.2,68589-68607).
ggacacgtgtcaacaaaga

SEQ ID NO: 105890 - DNA, 19 bp, Homo sapiens
  siRNA target sequence for TTN (NM_003319.2,68592-68610).
cacgtgtcaacaaagacta

SEQ ID NO: 105891 - DNA, 19 bp, Homo sapiens
  siRNA target sequence for TTN (NM_003319.2,68606-68624).
gactatgtggtgtatgata

SEQ ID NO: 105892 - DNA, 19 bp, Homo sapiens
  siRNA target sequence for TTN (NM_003319.2,68644-68662).
cctgatggagggttgtgat

SEQ ID NO: 105893 - DNA, 19 bp, Homo sapiens
  siRNA target sequence for TTN (NM_003319.2,68645-68663).
ctgatggagggttgtgatt

SEQ ID NO: 105894 - DNA, 19 bp, Homo sapiens
  siRNA target sequence for TTN (NM_003319.2,68671-68689).
ccgggtgaccgcagtgaat

SEQ ID NO: 105895 - DNA, 19 bp, Homo sapiens
  siRNA target sequence for TTN (NM_003319.2,68712-68730).
gcgaagcttccaacttcat

SEQ ID NO: 105896 - DNA, 19 bp, Homo sapiens
  siRNA target sequence for TTN (NM_003319.2,68717-68735).
gcttccaacttcatctcat

SEQ ID NO: 105897 - DNA, 19 bp, Homo sapiens
  siRNA target sequence for TTN (NM_003319.2,68783-68801).
gtggataccaccaaacaca

SEQ ID NO: 105898 - DNA, 19 bp, Homo sapiens
  siRNA target sequence for TTN (NM_003319.2,68841-68859).
gtactgacattgtaggata

SEQ ID NO: 105899 - DNA, 19 bp, Homo sapiens
  siRNA target sequence for TTN (NM_003319.2,68844-68862).
ctgacattgtaggatatgt

SEQ ID NO: 105900 - DNA, 19 bp, Homo sapiens
  siRNA target sequence for TTN (NM_003319.2,68895-68913).
ggtaccgagtgcataccaa

SEQ ID NO: 105901 - DNA, 19 bp, Homo sapiens
  siRNA target sequence for TTN (NM_003319.2,68896-68914).
gtaccgagtgcataccaat

SEQ ID NO: 105902 - DNA, 19 bp, Homo sapiens
  siRNA target sequence for TTN (NM_003319.2,68905-68923).
gcataccaatgccacaata

SEQ ID NO: 105903 - DNA, 19 bp, Homo sapiens
  siRNA target sequence for TTN (NM_003319.2,68910-68928).
ccaatgccacaataagaaa

SEQ ID NO: 105904 - DNA, 19 bp, Homo sapiens
  siRNA target sequence for TTN (NM_003319.2,69009-69027).
gcgaatacagcgaatcaat

SEQ ID NO: 105905 - DNA, 19 bp, Homo sapiens
  siRNA target sequence for TTN (NM_003319.2,69010-69028).
cgaatacagcgaatcaatt

SEQ ID NO: 105906 - DNA, 19 bp, Homo sapiens
  siRNA target sequence for TTN (NM_003319.2,69040-69058).
gcccgtggaaagaatagaa

SEQ ID NO: 105907 - DNA, 19 bp, Homo sapiens
  siRNA target sequence for TTN (NM_003319.2,69074-69092).
cttgcagatgatctaaaga

SEQ ID NO: 105908 - DNA, 19 bp, Homo sapiens
  siRNA target sequence for TTN (NM_003319.2,69221-69239).
gagagctactcattgctaa

SEQ ID NO: 105909 - DNA, 19 bp, Homo sapiens
  siRNA target sequence for TTN (NM_003319.2,69225-69243).
gctactcattgctaatagt

SEQ ID NO: 105910 - DNA, 19 bp, Homo sapiens
  siRNA target sequence for TTN (NM_003319.2,69257-69275).
cggtacgatgctggaaaat

SEQ ID NO: 105911 - DNA, 19 bp, Homo sapiens
  siRNA target sequence for TTN (NM_003319.2,69258-69276).
ggtacgatgctggaaaata

SEQ ID NO: 105912 - DNA, 19 bp, Homo sapiens
  siRNA target sequence for TTN (NM_003319.2,69315-69333).
caacagtccttgttaaagt

SEQ ID NO: 105913 - DNA, 19 bp, Homo sapiens
  siRNA target sequence for TTN (NM_003319.2,69318-69336).
cagtccttgttaaagtcta

SEQ ID NO: 105914 - DNA, 19 bp, Homo sapiens
  siRNA target sequence for TTN (NM_003319.2,69354-69372).
gtccttcagtgaaagttaa

SEQ ID NO: 105915 - DNA, 19 bp, Homo sapiens
  siRNA target sequence for TTN (NM_003319.2,69373-69391).
ggaagtatcaagagattct

SEQ ID NO: 105916 - DNA, 19 bp, Homo sapiens
  siRNA target sequence for TTN (NM_003319.2,69381-69399).
caagagattctgtgactat

SEQ ID NO: 105917 - DNA, 19 bp, Homo sapiens
  siRNA target sequence for TTN (NM_003319.2,69386-69404).
gattctgtgactataactt

SEQ ID NO: 105918 - DNA, 19 bp, Homo sapiens
  siRNA target sequence for TTN (NM_003319.2,69406-69424).
ggaaattcccacgattgat

SEQ ID NO: 105919 - DNA, 19 bp, Homo sapiens
  siRNA target sequence for TTN (NM_003319.2,69432-69450).
ctccagtcaacaattacat

SEQ ID NO: 105920 - DNA, 19 bp, Homo sapiens
  siRNA target sequence for TTN (NM_003319.2,69468-69486).
ctgctatgagagcattcaa

SEQ ID NO: 105921 - DNA, 19 bp, Homo sapiens
  siRNA target sequence for TTN (NM_003319.2,69505-69523).
cagcaagacactttacaga

SEQ ID NO: 105922 - DNA, 19 bp, Homo sapiens
  siRNA target sequence for TTN (NM_003319.2,69539-69557).
gaaggaaccatgtactatt

SEQ ID NO: 105923 - DNA, 19 bp, Homo sapiens
  siRNA target sequence for TTN (NM_003319.2,69561-69579).
gagtgctgccagaaaatat

SEQ ID NO: 105924 - DNA, 19 bp, Homo sapiens
  siRNA target sequence for TTN (NM_003319.2,69586-69604).
cattggagaaccttgtgaa

SEQ ID NO: 105925 - DNA, 19 bp, Homo sapiens
  siRNA target sequence for TTN (NM_003319.2,69659-69677).
gtggtcgatgtcaccaaat

SEQ ID NO: 105926 - DNA, 19 bp, Homo sapiens
  siRNA target sequence for TTN (NM_003319.2,69662-69680).
gtcgatgtcaccaaatcca

SEQ ID NO: 105927 - DNA, 19 bp, Homo sapiens
  siRNA target sequence for TTN (NM_003319.2,69723-69741).
gccgactcactggatatgt

SEQ ID NO: 105928 - DNA, 19 bp, Homo sapiens
  siRNA target sequence for TTN (NM_003319.2,69726-69744).
gactcactggatatgttct

SEQ ID NO: 105929 - DNA, 19 bp, Homo sapiens
  siRNA target sequence for TTN (NM_003319.2,69839-69857).
gaacaatacttatttagaa

SEQ ID NO: 105930 - DNA, 19 bp, Homo sapiens
  siRNA target sequence for TTN (NM_003319.2,69904-69922).
cacagccgtgactgtacaa

SEQ ID NO: 105931 - DNA, 19 bp, Homo sapiens
  siRNA target sequence for TTN (NM_003319.2,69937-69955).
gccaacaatcgatctttct

SEQ ID NO: 105932 - DNA, 19 bp, Homo sapiens
  siRNA target sequence for TTN (NM_003319.2,69938-69956).
ccaacaatcgatctttcta

SEQ ID NO: 105933 - DNA, 19 bp, Homo sapiens
  siRNA target sequence for TTN (NM_003319.2,69998-70016).
gtagagctggtgataccta

SEQ ID NO: 105934 - DNA, 19 bp, Homo sapiens
  siRNA target sequence for TTN (NM_003319.2,70047-70065).
ggttctttgctggttctaa

SEQ ID NO: 105935 - DNA, 19 bp, Homo sapiens
  siRNA target sequence for TTN (NM_003319.2,70058-70076).
ggttctaaactgagagaat

SEQ ID NO: 105936 - DNA, 19 bp, Homo sapiens
  siRNA target sequence for TTN (NM_003319.2,70062-70080).
ctaaactgagagaatcaga

SEQ ID NO: 105937 - DNA, 19 bp, Homo sapiens
  siRNA target sequence for TTN (NM_003319.2,70081-70099).
gcgtgtcacagttgaaact

SEQ ID NO: 105938 - DNA, 19 bp, Homo sapiens
  siRNA target sequence for TTN (NM_003319.2,70089-70107).
cagttgaaactcacactaa

SEQ ID NO: 105939 - DNA, 19 bp, Homo sapiens
  siRNA target sequence for TTN (NM_003319.2,70098-70116).
ctcacactaaagtagctaa

SEQ ID NO: 105940 - DNA, 19 bp, Homo sapiens
  siRNA target sequence for TTN (NM_003319.2,70130-70148).
gaaaccactatcagagata

SEQ ID NO: 105941 - DNA, 19 bp, Homo sapiens
  siRNA target sequence for TTN (NM_003319.2,70174-70192).
gaatgttaccggaactact

SEQ ID NO: 105942 - DNA, 19 bp, Homo sapiens
  siRNA target sequence for TTN (NM_003319.2,70196-70214).
gaaaccattaaagttatca

SEQ ID NO: 105943 - DNA, 19 bp, Homo sapiens
  siRNA target sequence for TTN (NM_003319.2,70239-70257).
caggacctattaagattga

SEQ ID NO: 105944 - DNA, 19 bp, Homo sapiens
  siRNA target sequence for TTN (NM_003319.2,70242-70260).
gacctattaagattgatga

SEQ ID NO: 105945 - DNA, 19 bp, Homo sapiens
  siRNA target sequence for TTN (NM_003319.2,70259-70277).
gaaattgatgctacatcaa

SEQ ID NO: 105946 - DNA, 19 bp, Homo sapiens
  siRNA target sequence for TTN (NM_003319.2,70265-70283).
gatgctacatcaattacca

SEQ ID NO: 105947 - DNA, 19 bp, Homo sapiens
  siRNA target sequence for TTN (NM_003319.2,70287-70305).
cctgggaaccacctgaatt

SEQ ID NO: 105948 - DNA, 19 bp, Homo sapiens
  siRNA target sequence for TTN (NM_003319.2,70290-70308).
gggaaccacctgaattgga

SEQ ID NO: 105949 - DNA, 19 bp, Homo sapiens
  siRNA target sequence for TTN (NM_003319.2,70369-70387).
gctgcccgtttctgaatca

SEQ ID NO: 105950 - DNA, 19 bp, Homo sapiens
  siRNA target sequence for TTN (NM_003319.2,70388-70406).
gtgactaggtccacgttta

SEQ ID NO: 105951 - DNA, 19 bp, Homo sapiens
  siRNA target sequence for TTN (NM_003319.2,70418-70436).
ctcaccgaaggaaatgagt

SEQ ID NO: 105952 - DNA, 19 bp, Homo sapiens
  siRNA target sequence for TTN (NM_003319.2,70487-70505).
cagtctgaggtcatagagt

SEQ ID NO: 105953 - DNA, 19 bp, Homo sapiens
  siRNA target sequence for TTN (NM_003319.2,70510-70528).
cagcagcatccgtattcct

SEQ ID NO: 105954 - DNA, 19 bp, Homo sapiens
  siRNA target sequence for TTN (NM_003319.2,70527-70545).
ctggacccccagaaacatt

SEQ ID NO: 105955 - DNA, 19 bp, Homo sapiens
  siRNA target sequence for TTN (NM_003319.2,70530-70548).
gacccccagaaacattaca

SEQ ID NO: 105956 - DNA, 19 bp, Homo sapiens
  siRNA target sequence for TTN (NM_003319.2,70532-70550).
cccccagaaacattacaga

SEQ ID NO: 105957 - DNA, 19 bp, Homo sapiens
  siRNA target sequence for TTN (NM_003319.2,70533-70551).
ccccagaaacattacagat

SEQ ID NO: 105958 - DNA, 19 bp, Homo sapiens
  siRNA target sequence for TTN (NM_003319.2,70565-70583).
cgtgatggcatgacactta

SEQ ID NO: 105959 - DNA, 19 bp, Homo sapiens
  siRNA target sequence for TTN (NM_003319.2,70614-70632).
cccaagtgactggatatat

SEQ ID NO: 105960 - DNA, 19 bp, Homo sapiens
  siRNA target sequence for TTN (NM_003319.2,70661-70679).
cgatgggtccgtgtaaata

SEQ ID NO: 105961 - DNA, 19 bp, Homo sapiens
  siRNA target sequence for TTN (NM_003319.2,70666-70684).
ggtccgtgtaaataaagta

SEQ ID NO: 105962 - DNA, 19 bp, Homo sapiens
  siRNA target sequence for TTN (NM_003319.2,70717-70735).
ccttactgaaggcttagaa

SEQ ID NO: 105963 - DNA, 19 bp, Homo sapiens
  siRNA target sequence for TTN (NM_003319.2,70744-70762).
ccgtgtcacagccattaat

SEQ ID NO: 105964 - DNA, 19 bp, Homo sapiens
  siRNA target sequence for TTN (NM_003319.2,70748-70766).
gtcacagccattaatgcaa

SEQ ID NO: 105965 - DNA, 19 bp, Homo sapiens
  siRNA target sequence for TTN (NM_003319.2,70804-70822).
cgttgccatggatccaatt

SEQ ID NO: 105966 - DNA, 19 bp, Homo sapiens
  siRNA target sequence for TTN (NM_003319.2,70926-70944).
caggctacttgattgaaat

SEQ ID NO: 105967 - DNA, 19 bp, Homo sapiens
  siRNA target sequence for TTN (NM_003319.2,70929-70947).
gctacttgattgaaatgca

SEQ ID NO: 105968 - DNA, 19 bp, Homo sapiens
  siRNA target sequence for TTN (NM_003319.2,70930-70948).
ctacttgattgaaatgcaa

SEQ ID NO: 105969 - DNA, 19 bp, Homo sapiens
  siRNA target sequence for TTN (NM_003319.2,70961-70979).
catgaatggaccaagtgta

SEQ ID NO: 105970 - DNA, 19 bp, Homo sapiens
  siRNA target sequence for TTN (NM_003319.2,70981-70999).
caccactccaaccaagatt

SEQ ID NO: 105971 - DNA, 19 bp, Homo sapiens
  siRNA target sequence for TTN (NM_003319.2,70993-71011).
caagattcgagagtatact

SEQ ID NO: 105972 - DNA, 19 bp, Homo sapiens
  siRNA target sequence for TTN (NM_003319.2,70996-71014).
gattcgagagtatactcta

SEQ ID NO: 105973 - DNA, 19 bp, Homo sapiens
  siRNA target sequence for TTN (NM_003319.2,71001-71019).
gagagtatactctaacaca

SEQ ID NO: 105974 - DNA, 19 bp, Homo sapiens
  siRNA target sequence for TTN (NM_003319.2,71047-71065).
ccgcgtcctagcttgtaat

SEQ ID NO: 105975 - DNA, 19 bp, Homo sapiens
  siRNA target sequence for TTN (NM_003319.2,71183-71201).
ggtggcgtcatcagactta

SEQ ID NO: 105976 - DNA, 19 bp, Homo sapiens
  siRNA target sequence for TTN (NM_003319.2,71187-71205).
gcgtcatcagacttaccat

SEQ ID NO: 105977 - DNA, 19 bp, Homo sapiens
  siRNA target sequence for TTN (NM_003319.2,71188-71206).
cgtcatcagacttaccata

SEQ ID NO: 105978 - DNA, 19 bp, Homo sapiens
  siRNA target sequence for TTN (NM_003319.2,71202-71220).
ccataccaatcaaaggaaa

SEQ ID NO: 105979 - DNA, 19 bp, Homo sapiens
  siRNA target sequence for TTN (NM_003319.2,71248-71266).
ggaaggccaggatattagt

SEQ ID NO: 105980 - DNA, 19 bp, Homo sapiens
  siRNA target sequence for TTN (NM_003319.2,71275-71293).
catgattgcaacatctgaa

SEQ ID NO: 105981 - DNA, 19 bp, Homo sapiens
  siRNA target sequence for TTN (NM_003319.2,71295-71313).
cacacactgagcttgtgat

SEQ ID NO: 105982 - DNA, 19 bp, Homo sapiens
  siRNA target sequence for TTN (NM_003319.2,71329-71347).
gggtgattctggcacttat

SEQ ID NO: 105983 - DNA, 19 bp, Homo sapiens
  siRNA target sequence for TTN (NM_003319.2,71543-71561).
cctaaagccgcctggtata

SEQ ID NO: 105984 - DNA, 19 bp, Homo sapiens
  siRNA target sequence for TTN (NM_003319.2,71551-71569).
cgcctggtataccattgat

SEQ ID NO: 105985 - DNA, 19 bp, Homo sapiens
  siRNA target sequence for TTN (NM_003319.2,71552-71570).
gcctggtataccattgatt

SEQ ID NO: 105986 - DNA, 19 bp, Homo sapiens
  siRNA target sequence for TTN (NM_003319.2,71572-71590).
cagagtccgaggtacatct

SEQ ID NO: 105987 - DNA, 19 bp, Homo sapiens
  siRNA target sequence for TTN (NM_003319.2,71634-71652).
gtgtttcagcagaaaacca

SEQ ID NO: 105988 - DNA, 19 bp, Homo sapiens
  siRNA target sequence for TTN (NM_003319.2,71664-71682).
gcaaacccttgaaatctga

SEQ ID NO: 105989 - DNA, 19 bp, Homo sapiens
  siRNA target sequence for TTN (NM_003319.2,71683-71701).
ggaaccagtcacaccaaaa

SEQ ID NO: 105990 - DNA, 19 bp, Homo sapiens
  siRNA target sequence for TTN (NM_003319.2,71747-71765).
ctcgatgtaaccaagagtt

SEQ ID NO: 105991 - DNA, 19 bp, Homo sapiens
  siRNA target sequence for TTN (NM_003319.2,71757-71775).
ccaagagttctgttagctt

SEQ ID NO: 105992 - DNA, 19 bp, Homo sapiens
  siRNA target sequence for TTN (NM_003319.2,71918-71936).
cccgatgctgagtatcagt

SEQ ID NO: 105993 - DNA, 19 bp, Homo sapiens
  siRNA target sequence for TTN (NM_003319.2,71938-71956).
ccgcatcatcgcacagaat

SEQ ID NO: 105994 - DNA, 19 bp, Homo sapiens
  siRNA target sequence for TTN (NM_003319.2,71940-71958).
gcatcatcgcacagaatga

SEQ ID NO: 105995 - DNA, 19 bp, Homo sapiens
  siRNA target sequence for TTN (NM_003319.2,71974-71992).
gaccagccctgcttctgaa

SEQ ID NO: 105996 - DNA, 19 bp, Homo sapiens
  siRNA target sequence for TTN (NM_003319.2,71988-72006).
ctgaaccagttgtttgcaa

SEQ ID NO: 105997 - DNA, 19 bp, Homo sapiens
  siRNA target sequence for TTN (NM_003319.2,72038-72056).
gaacttgagattctttcaa

SEQ ID NO: 105998 - DNA, 19 bp, Homo sapiens
  siRNA target sequence for TTN (NM_003319.2,72182-72200).
cgtattaaggacaagcaat

SEQ ID NO: 105999 - DNA, 19 bp, Homo sapiens
  siRNA target sequence for TTN (NM_003319.2,72193-72211).
caagcaattcacaatagga

SEQ ID NO: 106000 - DNA, 19 bp, Homo sapiens
  siRNA target sequence for TTN (NM_003319.2,72220-72238).
ggaagctactgagtatgaa

SEQ ID NO: 106001 - DNA, 19 bp, Homo sapiens
  siRNA target sequence for TTN (NM_003319.2,72282-72300).
gcagaactgctatgtctat

SEQ ID NO: 106002 - DNA, 19 bp, Homo sapiens
  siRNA target sequence for TTN (NM_003319.2,72285-72303).
gaactgctatgtctataaa

SEQ ID NO: 106003 - DNA, 19 bp, Homo sapiens
  siRNA target sequence for TTN (NM_003319.2,72290-72308).
gctatgtctataaagacta

SEQ ID NO: 106004 - DNA, 19 bp, Homo sapiens
  siRNA target sequence for TTN (NM_003319.2,72291-72309).
ctatgtctataaagactaa

SEQ ID NO: 106005 - DNA, 19 bp, Homo sapiens
  siRNA target sequence for TTN (NM_003319.2,72419-72437).
gacattaaatggtacagat

SEQ ID NO: 106006 - DNA, 19 bp, Homo sapiens
  siRNA target sequence for TTN (NM_003319.2,72429-72447).
ggtacagatttggtaaaga

SEQ ID NO: 106007 - DNA, 19 bp, Homo sapiens
  siRNA target sequence for TTN (NM_003319.2,72485-72503).
ggacgcacacacactctta

SEQ ID NO: 106008 - DNA, 19 bp, Homo sapiens
  siRNA target sequence for TTN (NM_003319.2,72496-72514).
cactcttacagtaatgaca

SEQ ID NO: 106009 - DNA, 19 bp, Homo sapiens
  siRNA target sequence for TTN (NM_003319.2,72621-72639).
ctggttacccactgaaaga

SEQ ID NO: 106010 - DNA, 19 bp, Homo sapiens
  siRNA target sequence for TTN (NM_003319.2,72623-72641).
ggttacccactgaaagaga

SEQ ID NO: 106011 - DNA, 19 bp, Homo sapiens
  siRNA target sequence for TTN (NM_003319.2,72624-72642).
gttacccactgaaagagaa

SEQ ID NO: 106012 - DNA, 19 bp, Homo sapiens
  siRNA target sequence for TTN (NM_003319.2,72629-72647).
ccactgaaagagaaatatt

SEQ ID NO: 106013 - DNA, 19 bp, Homo sapiens
  siRNA target sequence for TTN (NM_003319.2,72666-72684).
cacttcggcttcatgttat

SEQ ID NO: 106014 - DNA, 19 bp, Homo sapiens
  siRNA target sequence for TTN (NM_003319.2,72668-72686).
cttcggcttcatgttatgt

SEQ ID NO: 106015 - DNA, 19 bp, Homo sapiens
  siRNA target sequence for TTN (NM_003319.2,72672-72690).
ggcttcatgttatgtacat

SEQ ID NO: 106016 - DNA, 19 bp, Homo sapiens
  siRNA target sequence for TTN (NM_003319.2,72717-72735).
ggttccatggtcagaaact

SEQ ID NO: 106017 - DNA, 19 bp, Homo sapiens
  siRNA target sequence for TTN (NM_003319.2,72764-72782).
gaaaacactgagcactata

SEQ ID NO: 106018 - DNA, 19 bp, Homo sapiens
  siRNA target sequence for TTN (NM_003319.2,72799-72817).
gaatgtccaacgtaagact

SEQ ID NO: 106019 - DNA, 19 bp, Homo sapiens
  siRNA target sequence for TTN (NM_003319.2,72836-72854).
gtccagctcagcaatgttt

SEQ ID NO: 106020 - DNA, 19 bp, Homo sapiens
  siRNA target sequence for TTN (NM_003319.2,72871-72889).
catccttgatgtggaaata

SEQ ID NO: 106021 - DNA, 19 bp, Homo sapiens
  siRNA target sequence for TTN (NM_003319.2,72908-72926).
cctacaggaccaattgtga

SEQ ID NO: 106022 - DNA, 19 bp, Homo sapiens
  siRNA target sequence for TTN (NM_003319.2,72923-72941).
gtgatcgaagctctattga

SEQ ID NO: 106023 - DNA, 19 bp, Homo sapiens
  siRNA target sequence for TTN (NM_003319.2,72929-72947).
gaagctctattgaagaact

SEQ ID NO: 106024 - DNA, 19 bp, Homo sapiens
  siRNA target sequence for TTN (NM_003319.2,72988-73006).
ctcctggatcaccaactat

SEQ ID NO: 106025 - DNA, 19 bp, Homo sapiens
  siRNA target sequence for TTN (NM_003319.2,72990-73008).
cctggatcaccaactatgt

SEQ ID NO: 106026 - DNA, 19 bp, Homo sapiens
  siRNA target sequence for TTN (NM_003319.2,73035-73053).
gggctgaatggcaattggt

SEQ ID NO: 106027 - DNA, 19 bp, Homo sapiens
  siRNA target sequence for TTN (NM_003319.2,73170-73188).
cctcagttgtgatcattaa

SEQ ID NO: 106028 - DNA, 19 bp, Homo sapiens
  siRNA target sequence for TTN (NM_003319.2,73212-73230).
ctcctggcaaaccaactat

SEQ ID NO: 106029 - DNA, 19 bp, Homo sapiens
  siRNA target sequence for TTN (NM_003319.2,73214-73232).
cctggcaaaccaactatta

SEQ ID NO: 106030 - DNA, 19 bp, Homo sapiens
  siRNA target sequence for TTN (NM_003319.2,73290-73308).
gtgcaaagattagaaatta

SEQ ID NO: 106031 - DNA, 19 bp, Homo sapiens
  siRNA target sequence for TTN (NM_003319.2,73322-73340).
cgtgagaagaagcagaata

SEQ ID NO: 106032 - DNA, 19 bp, Homo sapiens
  siRNA target sequence for TTN (NM_003319.2,73397-73415).
cttattgaaggtcttgaat

SEQ ID NO: 106033 - DNA, 19 bp, Homo sapiens
  siRNA target sequence for TTN (NM_003319.2,73417-73435).
cgagtttcgtgtgaaatgt

SEQ ID NO: 106034 - DNA, 19 bp, Homo sapiens
  siRNA target sequence for TTN (NM_003319.2,73425-73443).
gtgtgaaatgtgaaaatct

SEQ ID NO: 106035 - DNA, 19 bp, Homo sapiens
  siRNA target sequence for TTN (NM_003319.2,73480-73498).
catcactcccaaatctgat

SEQ ID NO: 106036 - DNA, 19 bp, Homo sapiens
  siRNA target sequence for TTN (NM_003319.2,73587-73605).
ctggtcatccaaaacctat

SEQ ID NO: 106037 - DNA, 19 bp, Homo sapiens
  siRNA target sequence for TTN (NM_003319.2,73595-73613).
ccaaaacctatcgtcaaat

SEQ ID NO: 106038 - DNA, 19 bp, Homo sapiens
  siRNA target sequence for TTN (NM_003319.2,73685-73703).
caccagctcatcattgcaa

SEQ ID NO: 106039 - DNA, 19 bp, Homo sapiens
  siRNA target sequence for TTN (NM_003319.2,73793-73811).
gttccagctaagatacact

SEQ ID NO: 106040 - DNA, 19 bp, Homo sapiens
  siRNA target sequence for TTN (NM_003319.2,73799-73817).
gctaagatacacttaccta

SEQ ID NO: 106041 - DNA, 19 bp, Homo sapiens
  siRNA target sequence for TTN (NM_003319.2,73810-73828).
cttacctaaaactcttgaa

SEQ ID NO: 106042 - DNA, 19 bp, Homo sapiens
  siRNA target sequence for TTN (NM_003319.2,73922-73940).
ggacaagatctcattgaca

SEQ ID NO: 106043 - DNA, 19 bp, Homo sapiens
  siRNA target sequence for TTN (NM_003319.2,73955-73973).
caagttattgtcacaagat

SEQ ID NO: 106044 - DNA, 19 bp, Homo sapiens
  siRNA target sequence for TTN (NM_003319.2,74010-74028).
gaaaagatgctggtttcta

SEQ ID NO: 106045 - DNA, 19 bp, Homo sapiens
  siRNA target sequence for TTN (NM_003319.2,74026-74044).
ctatgtggtctgtgctaaa

SEQ ID NO: 106046 - DNA, 19 bp, Homo sapiens
  siRNA target sequence for TTN (NM_003319.2,74105-74123).
cccagaggagtcaaagtta

SEQ ID NO: 106047 - DNA, 19 bp, Homo sapiens
  siRNA target sequence for TTN (NM_003319.2,74109-74127).
gaggagtcaaagttagtga

SEQ ID NO: 106048 - DNA, 19 bp, Homo sapiens
  siRNA target sequence for TTN (NM_003319.2,74216-74234).
gcaactactgcagaaagat

SEQ ID NO: 106049 - DNA, 19 bp, Homo sapiens
  siRNA target sequence for TTN (NM_003319.2,74251-74269).
ggcccgagaaacacgttat

SEQ ID NO: 106050 - DNA, 19 bp, Homo sapiens
  siRNA target sequence for TTN (NM_003319.2,74252-74270).
gcccgagaaacacgttata

SEQ ID NO: 106051 - DNA, 19 bp, Homo sapiens
  siRNA target sequence for TTN (NM_003319.2,74262-74280).
cacgttataccgtgatcaa

SEQ ID NO: 106052 - DNA, 19 bp, Homo sapiens
  siRNA target sequence for TTN (NM_003319.2,74264-74282).
cgttataccgtgatcaact

SEQ ID NO: 106053 - DNA, 19 bp, Homo sapiens
  siRNA target sequence for TTN (NM_003319.2,74265-74283).
gttataccgtgatcaactt

SEQ ID NO: 106054 - DNA, 19 bp, Homo sapiens
  siRNA target sequence for TTN (NM_003319.2,74272-74290).
cgtgatcaacttatttgga

SEQ ID NO: 106055 - DNA, 19 bp, Homo sapiens
  siRNA target sequence for TTN (NM_003319.2,74302-74320).
ccagttccgggtaatagct

SEQ ID NO: 106056 - DNA, 19 bp, Homo sapiens
  siRNA target sequence for TTN (NM_003319.2,74308-74326).
ccgggtaatagctgaaaat

SEQ ID NO: 106057 - DNA, 19 bp, Homo sapiens
  siRNA target sequence for TTN (NM_003319.2,74386-74404).
gaccagagctatgaactat

SEQ ID NO: 106058 - DNA, 19 bp, Homo sapiens
  siRNA target sequence for TTN (NM_003319.2,74388-74406).
ccagagctatgaactatga

SEQ ID NO: 106059 - DNA, 19 bp, Homo sapiens
  siRNA target sequence for TTN (NM_003319.2,74427-74445).
gggaagtctccatgactaa

SEQ ID NO: 106060 - DNA, 19 bp, Homo sapiens
  siRNA target sequence for TTN (NM_003319.2,74432-74450).
gtctccatgactaaagcat

SEQ ID NO: 106061 - DNA, 19 bp, Homo sapiens
  siRNA target sequence for TTN (NM_003319.2,74457-74475).
cttcaaccaaggaactcta

SEQ ID NO: 106062 - DNA, 19 bp, Homo sapiens
  siRNA target sequence for TTN (NM_003319.2,74468-74486).
gaactctatgagaaatata

SEQ ID NO: 106063 - DNA, 19 bp, Homo sapiens
  siRNA target sequence for TTN (NM_003319.2,74504-74522).
gggcgtggtgagtttggaa

SEQ ID NO: 106064 - DNA, 19 bp, Homo sapiens
  siRNA target sequence for TTN (NM_003319.2,74505-74523).
ggcgtggtgagtttggaat

SEQ ID NO: 106065 - DNA, 19 bp, Homo sapiens
  siRNA target sequence for TTN (NM_003319.2,74506-74524).
gcgtggtgagtttggaatt

SEQ ID NO: 106066 - DNA, 19 bp, Homo sapiens
  siRNA target sequence for TTN (NM_003319.2,74589-74607).
ggactgatcaggttttggt

SEQ ID NO: 106067 - DNA, 19 bp, Homo sapiens
  siRNA target sequence for TTN (NM_003319.2,74590-74608).
gactgatcaggttttggta

SEQ ID NO: 106068 - DNA, 19 bp, Homo sapiens
  siRNA target sequence for TTN (NM_003319.2,74693-74711).
gttatgatctttgagttta

SEQ ID NO: 106069 - DNA, 19 bp, Homo sapiens
  siRNA target sequence for TTN (NM_003319.2,74698-74716).
gatctttgagtttatatca

SEQ ID NO: 106070 - DNA, 19 bp, Homo sapiens
  siRNA target sequence for TTN (NM_003319.2,74797-74815).
ctgtgaagcacttcagttt

SEQ ID NO: 106071 - DNA, 19 bp, Homo sapiens
  siRNA target sequence for TTN (NM_003319.2,74804-74822).
gcacttcagtttttacaca

SEQ ID NO: 106072 - DNA, 19 bp, Homo sapiens
  siRNA target sequence for TTN (NM_003319.2,74936-74954).
gacaacttcaggcttctat

SEQ ID NO: 106073 - DNA, 19 bp, Homo sapiens
  siRNA target sequence for TTN (NM_003319.2,74941-74959).
cttcaggcttctattcact

SEQ ID NO: 106074 - DNA, 19 bp, Homo sapiens
  siRNA target sequence for TTN (NM_003319.2,75027-75045).
cacttggaacactggtata

SEQ ID NO: 106075 - DNA, 19 bp, Homo sapiens
  siRNA target sequence for TTN (NM_003319.2,75036-75054).
cactggtatatgtgctatt

SEQ ID NO: 106076 - DNA, 19 bp, Homo sapiens
  siRNA target sequence for TTN (NM_003319.2,75073-75091).
cctggctgaaactaaccaa

SEQ ID NO: 106077 - DNA, 19 bp, Homo sapiens
  siRNA target sequence for TTN (NM_003319.2,75126-75144).
ctttcgatgaggaagcatt

SEQ ID NO: 106078 - DNA, 19 bp, Homo sapiens
  siRNA target sequence for TTN (NM_003319.2,75140-75158).
gcattcaaagagattagca

SEQ ID NO: 106079 - DNA, 19 bp, Homo sapiens
  siRNA target sequence for TTN (NM_003319.2,75141-75159).
cattcaaagagattagcat

SEQ ID NO: 106080 - DNA, 19 bp, Homo sapiens
  siRNA target sequence for TTN (NM_003319.2,75156-75174).
gcattgaagccatggattt

SEQ ID NO: 106081 - DNA, 19 bp, Homo sapiens
  siRNA target sequence for TTN (NM_003319.2,75176-75194).
gttgaccggttgttagtga

SEQ ID NO: 106082 - DNA, 19 bp, Homo sapiens
  siRNA target sequence for TTN (NM_003319.2,75182-75200).
cggttgttagtgaaagaga

SEQ ID NO: 106083 - DNA, 19 bp, Homo sapiens
  siRNA target sequence for TTN (NM_003319.2,75266-75284).
gtcagtactaaagttatca

SEQ ID NO: 106084 - DNA, 19 bp, Homo sapiens
  siRNA target sequence for TTN (NM_003319.2,75268-75286).
cagtactaaagttatcaga

SEQ ID NO: 106085 - DNA, 19 bp, Homo sapiens
  siRNA target sequence for TTN (NM_003319.2,75361-75379).
ctcctgtggtggtgcaatt

SEQ ID NO: 106086 - DNA, 19 bp, Homo sapiens
  siRNA target sequence for TTN (NM_003319.2,75364-75382).
ctgtggtggtgcaattcga

SEQ ID NO: 106087 - DNA, 19 bp, Homo sapiens
  siRNA target sequence for TTN (NM_003319.2,75395-75413).
gtgagtgttgctaaagtta

SEQ ID NO: 106088 - DNA, 19 bp, Homo sapiens
  siRNA target sequence for TTN (NM_003319.2,75397-75415).
gagtgttgctaaagttaaa

SEQ ID NO: 106089 - DNA, 19 bp, Homo sapiens
  siRNA target sequence for TTN (NM_003319.2,75437-75455).
ccagtttctgggcagataa

SEQ ID NO: 106090 - DNA, 19 bp, Homo sapiens
  siRNA target sequence for TTN (NM_003319.2,75526-75544).
ccaagtgacttggtacttt

SEQ ID NO: 106091 - DNA, 19 bp, Homo sapiens
  siRNA target sequence for TTN (NM_003319.2,75601-75619).
ggccatcctctatgtcaaa

SEQ ID NO: 106092 - DNA, 19 bp, Homo sapiens
  siRNA target sequence for TTN (NM_003319.2,75614-75632).
gtcaaagacattaccaaat

SEQ ID NO: 106093 - DNA, 19 bp, Homo sapiens
  siRNA target sequence for TTN (NM_003319.2,75635-75653).
gatgatggtacctacagat

SEQ ID NO: 106094 - DNA, 19 bp, Homo sapiens
  siRNA target sequence for TTN (NM_003319.2,75645-75663).
cctacagatgcaaagtagt

SEQ ID NO: 106095 - DNA, 19 bp, Homo sapiens
  siRNA target sequence for TTN (NM_003319.2,75649-75667).
cagatgcaaagtagtcaat

SEQ ID NO: 106096 - DNA, 19 bp, Homo sapiens
  siRNA target sequence for TTN (NM_003319.2,75654-75672).
gcaaagtagtcaatgacta

SEQ ID NO: 106097 - DNA, 19 bp, Homo sapiens
  siRNA target sequence for TTN (NM_003319.2,75655-75673).
caaagtagtcaatgactat

SEQ ID NO: 106098 - DNA, 19 bp, Homo sapiens
  siRNA target sequence for TTN (NM_003319.2,75684-75702).
gttcttatgcagagctatt

SEQ ID NO: 106099 - DNA, 19 bp, Homo sapiens
  siRNA target sequence for TTN (NM_003319.2,75738-75756).
gccgtagaaccatgaagaa

SEQ ID NO: 106100 - DNA, 19 bp, Homo sapiens
  siRNA target sequence for TTN (NM_003319.2,75739-75757).
ccgtagaaccatgaagaaa

SEQ ID NO: 106101 - DNA, 19 bp, Homo sapiens
  siRNA target sequence for TTN (NM_003319.2,75740-75758).
cgtagaaccatgaagaaaa

SEQ ID NO: 106102 - DNA, 19 bp, Homo sapiens
  siRNA target sequence for TTN (NM_003319.2,75791-75809).
gaaaggccaccagaattta

SEQ ID NO: 106103 - DNA, 19 bp, Homo sapiens
  siRNA target sequence for TTN (NM_003319.2,75812-75830).
ctgcctctctataataaga

SEQ ID NO: 106104 - DNA, 19 bp, Homo sapiens
  siRNA target sequence for TTN (NM_003319.2,75834-75852).
cttatgtaggtgaaaatgt

SEQ ID NO: 106105 - DNA, 19 bp, Homo sapiens
  siRNA target sequence for TTN (NM_003319.2,75851-75869).
gtccggtttggagtaacta

SEQ ID NO: 106106 - DNA, 19 bp, Homo sapiens
  siRNA target sequence for TTN (NM_003319.2,75853-75871).
ccggtttggagtaactata

SEQ ID NO: 106107 - DNA, 19 bp, Homo sapiens
  siRNA target sequence for TTN (NM_003319.2,75854-75872).
cggtttggagtaactataa

SEQ ID NO: 106108 - DNA, 19 bp, Homo sapiens
  siRNA target sequence for TTN (NM_003319.2,75878-75896).
cacccagagcctcatgtaa

SEQ ID NO: 106109 - DNA, 19 bp, Homo sapiens
  siRNA target sequence for TTN (NM_003319.2,75880-75898).
cccagagcctcatgtaaca

SEQ ID NO: 106110 - DNA, 19 bp, Homo sapiens
  siRNA target sequence for TTN (NM_003319.2,75881-75899).
ccagagcctcatgtaacat

SEQ ID NO: 106111 - DNA, 19 bp, Homo sapiens
  siRNA target sequence for TTN (NM_003319.2,75886-75904).
gcctcatgtaacatggtat

SEQ ID NO: 106112 - DNA, 19 bp, Homo sapiens
  siRNA target sequence for TTN (NM_003319.2,75887-75905).
cctcatgtaacatggtata

SEQ ID NO: 106113 - DNA, 19 bp, Homo sapiens
  siRNA target sequence for TTN (NM_003319.2,75888-75906).
ctcatgtaacatggtataa

SEQ ID NO: 106114 - DNA, 19 bp, Homo sapiens
  siRNA target sequence for TTN (NM_003319.2,75901-75919).
gtataaatcaggtcagaaa

SEQ ID NO: 106115 - DNA, 19 bp, Homo sapiens
  siRNA target sequence for TTN (NM_003319.2,75960-75978).
cagacaagggtctttacca

SEQ ID NO: 106116 - DNA, 19 bp, Homo sapiens
  siRNA target sequence for TTN (NM_003319.2,75964-75982).
caagggtctttaccaatta

SEQ ID NO: 106117 - DNA, 19 bp, Homo sapiens
  siRNA target sequence for TTN (NM_003319.2,75988-76006).
caacagtgtcactacagat

SEQ ID NO: 106118 - DNA, 19 bp, Homo sapiens
  siRNA target sequence for TTN (NM_003319.2,75991-76009).
cagtgtcactacagatgat

SEQ ID NO: 106119 - DNA, 19 bp, Homo sapiens
  siRNA target sequence for TTN (NM_003319.2,76094-76112).
ccaacagatagtaccttaa

SEQ ID NO: 106120 - DNA, 19 bp, Homo sapiens
  siRNA target sequence for TTN (NM_003319.2,76113-76131).
gacccatgttcaaaaggtt

SEQ ID NO: 106121 - DNA, 19 bp, Homo sapiens
  siRNA target sequence for TTN (NM_003319.2,76192-76210).
catccccccaccaacatta

SEQ ID NO: 106122 - DNA, 19 bp, Homo sapiens
  siRNA target sequence for TTN (NM_003319.2,76237-76255).
gtccctcgggcctaacatt

SEQ ID NO: 106123 - DNA, 19 bp, Homo sapiens
  siRNA target sequence for TTN (NM_003319.2,76239-76257).
ccctcgggcctaacattga

SEQ ID NO: 106124 - DNA, 19 bp, Homo sapiens
  siRNA target sequence for TTN (NM_003319.2,76241-76259).
ctcgggcctaacattgaaa

SEQ ID NO: 106125 - DNA, 19 bp, Homo sapiens
  siRNA target sequence for TTN (NM_003319.2,76243-76261).
cgggcctaacattgaaatt

SEQ ID NO: 106126 - DNA, 19 bp, Homo sapiens
  siRNA target sequence for TTN (NM_003319.2,76244-76262).
gggcctaacattgaaatta

SEQ ID NO: 106127 - DNA, 19 bp, Homo sapiens
  siRNA target sequence for TTN (NM_003319.2,76248-76266).
ctaacattgaaattatcca

SEQ ID NO: 106128 - DNA, 19 bp, Homo sapiens
  siRNA target sequence for TTN (NM_003319.2,76264-76282).
ccatgaaggcttggattat

SEQ ID NO: 106129 - DNA, 19 bp, Homo sapiens
  siRNA target sequence for TTN (NM_003319.2,76265-76283).
catgaaggcttggattatt

SEQ ID NO: 106130 - DNA, 19 bp, Homo sapiens
  siRNA target sequence for TTN (NM_003319.2,76313-76331).
gaagacacgggttattata

SEQ ID NO: 106131 - DNA, 19 bp, Homo sapiens
  siRNA target sequence for TTN (NM_003319.2,76368-76386).
gccaggctcacctacaagt

SEQ ID NO: 106132 - DNA, 19 bp, Homo sapiens
  siRNA target sequence for TTN (NM_003319.2,76388-76406).
gaacgcctgaggtacaaga

SEQ ID NO: 106133 - DNA, 19 bp, Homo sapiens
  siRNA target sequence for TTN (NM_003319.2,76398-76416).
ggtacaagaaacaggaatt

SEQ ID NO: 106134 - DNA, 19 bp, Homo sapiens
  siRNA target sequence for TTN (NM_003319.2,76439-76457).
cgacacgtacaaaaacaaa

SEQ ID NO: 106135 - DNA, 19 bp, Homo sapiens
  siRNA target sequence for TTN (NM_003319.2,76467-76485).
ccctcagaatggctgaaat

SEQ ID NO: 106136 - DNA, 19 bp, Homo sapiens
  siRNA target sequence for TTN (NM_003319.2,76590-76608).
gggaattcagacttgagat

SEQ ID NO: 106137 - DNA, 19 bp, Homo sapiens
  siRNA target sequence for TTN (NM_003319.2,76655-76673).
ccagagccacgcaagtata

SEQ ID NO: 106138 - DNA, 19 bp, Homo sapiens
  siRNA target sequence for TTN (NM_003319.2,76656-76674).
cagagccacgcaagtataa

SEQ ID NO: 106139 - DNA, 19 bp, Homo sapiens
  siRNA target sequence for TTN (NM_003319.2,76669-76687).
gtataagcagactaccata

SEQ ID NO: 106140 - DNA, 19 bp, Homo sapiens
  siRNA target sequence for TTN (NM_003319.2,76718-76736).
cccatgtctgacatgaagt

SEQ ID NO: 106141 - DNA, 19 bp, Homo sapiens
  siRNA target sequence for TTN (NM_003319.2,76725-76743).
ctgacatgaagtggtataa

SEQ ID NO: 106142 - DNA, 19 bp, Homo sapiens
  siRNA target sequence for TTN (NM_003319.2,76732-76750).
gaagtggtataaaaagata

SEQ ID NO: 106143 - DNA, 19 bp, Homo sapiens
  siRNA target sequence for TTN (NM_003319.2,76747-76765).
gatacgtgatcagtatgaa

SEQ ID NO: 106144 - DNA, 19 bp, Homo sapiens
  siRNA target sequence for TTN (NM_003319.2,76808-76826).
cgcatccgcctttcaagat

SEQ ID NO: 106145 - DNA, 19 bp, Homo sapiens
  siRNA target sequence for TTN (NM_003319.2,76821-76839).
caagatgggaacagttcta

SEQ ID NO: 106146 - DNA, 19 bp, Homo sapiens
  siRNA target sequence for TTN (NM_003319.2,76824-76842).
gatgggaacagttctatgt

SEQ ID NO: 106147 - DNA, 19 bp, Homo sapiens
  siRNA target sequence for TTN (NM_003319.2,76846-76864).
gcctcttccacgcattaca

SEQ ID NO: 106148 - DNA, 19 bp, Homo sapiens
  siRNA target sequence for TTN (NM_003319.2,76853-76871).
ccacgcattacagatcaat

SEQ ID NO: 106149 - DNA, 19 bp, Homo sapiens
  siRNA target sequence for TTN (NM_003319.2,76854-76872).
cacgcattacagatcaata

SEQ ID NO: 106150 - DNA, 19 bp, Homo sapiens
  siRNA target sequence for TTN (NM_003319.2,76856-76874).
cgcattacagatcaataca

SEQ ID NO: 106151 - DNA, 19 bp, Homo sapiens
  siRNA target sequence for TTN (NM_003319.2,76877-76895).
cctaaatggcgtattccta

SEQ ID NO: 106152 - DNA, 19 bp, Homo sapiens
  siRNA target sequence for TTN (NM_003319.2,76946-76964).
ccttctcctgattatgact

SEQ ID NO: 106153 - DNA, 19 bp, Homo sapiens
  siRNA target sequence for TTN (NM_003319.2,76999-77017).
catctctgatgaagaatta

SEQ ID NO: 106154 - DNA, 19 bp, Homo sapiens
  siRNA target sequence for TTN (NM_003319.2,77023-77041).
ccccattgatgactactta

SEQ ID NO: 106155 - DNA, 19 bp, Homo sapiens
  siRNA target sequence for TTN (NM_003319.2,77067-77085).
ggctgcgtcttgaagaaga

SEQ ID NO: 106156 - DNA, 19 bp, Homo sapiens
  siRNA target sequence for TTN (NM_003319.2,77086-77104).
gcttgagttaggtttttca

SEQ ID NO: 106157 - DNA, 19 bp, Homo sapiens
  siRNA target sequence for TTN (NM_003319.2,77129-77147).
ccacactttgagctttcta

SEQ ID NO: 106158 - DNA, 19 bp, Homo sapiens
  siRNA target sequence for TTN (NM_003319.2,77203-77221).
cttcaggtattcaacctat

SEQ ID NO: 106159 - DNA, 19 bp, Homo sapiens
  siRNA target sequence for TTN (NM_003319.2,77208-77226).
ggtattcaacctatcacat

SEQ ID NO: 106160 - DNA, 19 bp, Homo sapiens
  siRNA target sequence for TTN (NM_003319.2,77237-77255).
gctgaagctagtacaagtt

SEQ ID NO: 106161 - DNA, 19 bp, Homo sapiens
  siRNA target sequence for TTN (NM_003319.2,77238-77256).
ctgaagctagtacaagtta

SEQ ID NO: 106162 - DNA, 19 bp, Homo sapiens
  siRNA target sequence for TTN (NM_003319.2,77371-77389).
gcatctctcagaatacaaa

SEQ ID NO: 106163 - DNA, 19 bp, Homo sapiens
  siRNA target sequence for TTN (NM_003319.2,77431-77449).
gaaatcaaggcgacaaaga

SEQ ID NO: 106164 - DNA, 19 bp, Homo sapiens
  siRNA target sequence for TTN (NM_003319.2,77476-77494).
ggaagaatacgaaatctca

SEQ ID NO: 106165 - DNA, 19 bp, Homo sapiens
  siRNA target sequence for TTN (NM_003319.2,77477-77495).
gaagaatacgaaatctcaa

SEQ ID NO: 106166 - DNA, 19 bp, Homo sapiens
  siRNA target sequence for TTN (NM_003319.2,77518-77536).
ctcatctgcgtctagacta

SEQ ID NO: 106167 - DNA, 19 bp, Homo sapiens
  siRNA target sequence for TTN (NM_003319.2,77551-77569).
ctccctgtctccaacttat

SEQ ID NO: 106168 - DNA, 19 bp, Homo sapiens
  siRNA target sequence for TTN (NM_003319.2,77561-77579).
ccaacttatattgagttaa

SEQ ID NO: 106169 - DNA, 19 bp, Homo sapiens
  siRNA target sequence for TTN (NM_003319.2,77707-77725).
gagatcactctcgagattt

SEQ ID NO: 106170 - DNA, 19 bp, Homo sapiens
  siRNA target sequence for TTN (NM_003319.2,77709-77727).
gatcactctcgagatttga

SEQ ID NO: 106171 - DNA, 19 bp, Homo sapiens
  siRNA target sequence for TTN (NM_003319.2,77730-77748).
ggtctgcaagatttgatat

SEQ ID NO: 106172 - DNA, 19 bp, Homo sapiens
  siRNA target sequence for TTN (NM_003319.2,77755-77773).
caggtatgagtccatgaaa

SEQ ID NO: 106173 - DNA, 19 bp, Homo sapiens
  siRNA target sequence for TTN (NM_003319.2,77845-77863).
ccatgcccctcgaatcaca

SEQ ID NO: 106174 - DNA, 19 bp, Homo sapiens
  siRNA target sequence for TTN (NM_003319.2,77853-77871).
ctcgaatcacactgagaat

SEQ ID NO: 106175 - DNA, 19 bp, Homo sapiens
  siRNA target sequence for TTN (NM_003319.2,77895-77913).
gccaaaatacacgttttat

SEQ ID NO: 106176 - DNA, 19 bp, Homo sapiens
  siRNA target sequence for TTN (NM_003319.2,77932-77950).
gccaactgccgaggttaaa

SEQ ID NO: 106177 - DNA, 19 bp, Homo sapiens
  siRNA target sequence for TTN (NM_003319.2,77933-77951).
ccaactgccgaggttaaat

SEQ ID NO: 106178 - DNA, 19 bp, Homo sapiens
  siRNA target sequence for TTN (NM_003319.2,77937-77955).
ctgccgaggttaaatggta

SEQ ID NO: 106179 - DNA, 19 bp, Homo sapiens
  siRNA target sequence for TTN (NM_003319.2,78068-78086).
gctgtgtgcaccaactaca

SEQ ID NO: 106180 - DNA, 19 bp, Homo sapiens
  siRNA target sequence for TTN (NM_003319.2,78088-78106).
gggcgaagcttctgactat

SEQ ID NO: 106181 - DNA, 19 bp, Homo sapiens
  siRNA target sequence for TTN (NM_003319.2,78092-78110).
gaagcttctgactatgcaa

SEQ ID NO: 106182 - DNA, 19 bp, Homo sapiens
  siRNA target sequence for TTN (NM_003319.2,78119-78137).
gtgacaggaggggattata

SEQ ID NO: 106183 - DNA, 19 bp, Homo sapiens
  siRNA target sequence for TTN (NM_003319.2,78131-78149).
gattataccacctatgctt

SEQ ID NO: 106184 - DNA, 19 bp, Homo sapiens
  siRNA target sequence for TTN (NM_003319.2,78167-78185).
gaggtccccagatctgttt

SEQ ID NO: 106185 - DNA, 19 bp, Homo sapiens
  siRNA target sequence for TTN (NM_003319.2,78209-78227).
gcgtatgctgtttcatcat

SEQ ID NO: 106186 - DNA, 19 bp, Homo sapiens
  siRNA target sequence for TTN (NM_003319.2,78210-78228).
cgtatgctgtttcatcatt

SEQ ID NO: 106187 - DNA, 19 bp, Homo sapiens
  siRNA target sequence for TTN (NM_003319.2,78215-78233).
gctgtttcatcatttaaga

SEQ ID NO: 106188 - DNA, 19 bp, Homo sapiens
  siRNA target sequence for TTN (NM_003319.2,78303-78321).
gtctctcctcatatgaaca

SEQ ID NO: 106189 - DNA, 19 bp, Homo sapiens
  siRNA target sequence for TTN (NM_003319.2,78454-78472).
gggcgagtctgcaaggttt

SEQ ID NO: 106190 - DNA, 19 bp, Homo sapiens
  siRNA target sequence for TTN (NM_003319.2,78455-78473).
ggcgagtctgcaaggtttt

SEQ ID NO: 106191 - DNA, 19 bp, Homo sapiens
  siRNA target sequence for TTN (NM_003319.2,78457-78475).
cgagtctgcaaggttttct

SEQ ID NO: 106192 - DNA, 19 bp, Homo sapiens
  siRNA target sequence for TTN (NM_003319.2,78559-78577).
gaccaccacaaagtacaaa

SEQ ID NO: 106193 - DNA, 19 bp, Homo sapiens
  siRNA target sequence for TTN (NM_003319.2,78562-78580).
caccacaaagtacaaatca

SEQ ID NO: 106194 - DNA, 19 bp, Homo sapiens
  siRNA target sequence for TTN (NM_003319.2,78606-78624).
cttccgatgagggcaatta

SEQ ID NO: 106195 - DNA, 19 bp, Homo sapiens
  siRNA target sequence for TTN (NM_003319.2,78908-78926).
gcagaagcttctaaagaga

SEQ ID NO: 106196 - DNA, 19 bp, Homo sapiens
  siRNA target sequence for TTN (NM_003319.2,78914-78932).
gcttctaaagagattgcaa

SEQ ID NO: 106197 - DNA, 19 bp, Homo sapiens
  siRNA target sequence for TTN (NM_003319.2,78976-78994).
ggtcacctggtataaagat

SEQ ID NO: 106198 - DNA, 19 bp, Homo sapiens
  siRNA target sequence for TTN (NM_003319.2,79016-79034).
gggcatttccagtttcatt

SEQ ID NO: 106199 - DNA, 19 bp, Homo sapiens
  siRNA target sequence for TTN (NM_003319.2,79046-79064).
ggtacctatgagctcaaaa

SEQ ID NO: 106200 - DNA, 19 bp, Homo sapiens
  siRNA target sequence for TTN (NM_003319.2,79047-79065).
gtacctatgagctcaaaat

SEQ ID NO: 106201 - DNA, 19 bp, Homo sapiens
  siRNA target sequence for TTN (NM_003319.2,79050-79068).
cctatgagctcaaaatcaa

SEQ ID NO: 106202 - DNA, 19 bp, Homo sapiens
  siRNA target sequence for TTN (NM_003319.2,79121-79139).
ggtggaacgtctaaaacca

SEQ ID NO: 106203 - DNA, 19 bp, Homo sapiens
  siRNA target sequence for TTN (NM_003319.2,79128-79146).
cgtctaaaaccaacttaca

SEQ ID NO: 106204 - DNA, 19 bp, Homo sapiens
  siRNA target sequence for TTN (NM_003319.2,79153-79171).
ggggcaagcctttaagagt

SEQ ID NO: 106205 - DNA, 19 bp, Homo sapiens
  siRNA target sequence for TTN (NM_003319.2,79377-79395).
ctgccatctggacaaaaga

SEQ ID NO: 106206 - DNA, 19 bp, Homo sapiens
  siRNA target sequence for TTN (NM_003319.2,79410-79428).
cacaaggaggtaaatataa

SEQ ID NO: 106207 - DNA, 19 bp, Homo sapiens
  siRNA target sequence for TTN (NM_003319.2,79444-79462).
gggagggttcttcttagaa

SEQ ID NO: 106208 - DNA, 19 bp, Homo sapiens
  siRNA target sequence for TTN (NM_003319.2,79479-79497).
cttctgacagtggacttta

SEQ ID NO: 106209 - DNA, 19 bp, Homo sapiens
  siRNA target sequence for TTN (NM_003319.2,79529-79547).
gtgtcctctagctgcaaat

SEQ ID NO: 106210 - DNA, 19 bp, Homo sapiens
  siRNA target sequence for TTN (NM_003319.2,79531-79549).
gtcctctagctgcaaatta

SEQ ID NO: 106211 - DNA, 19 bp, Homo sapiens
  siRNA target sequence for TTN (NM_003319.2,79536-79554).
ctagctgcaaattaacaat

SEQ ID NO: 106212 - DNA, 19 bp, Homo sapiens
  siRNA target sequence for TTN (NM_003319.2,79661-79679).
ctaaggtctgaagaaatta

SEQ ID NO: 106213 - DNA, 19 bp, Homo sapiens
  siRNA target sequence for TTN (NM_003319.2,79691-79709).
gcaaaatctcaagaaaagt

SEQ ID NO: 106214 - DNA, 19 bp, Homo sapiens
  siRNA target sequence for TTN (NM_003319.2,79795-79813).
ccatgaggaaatcactaaa

SEQ ID NO: 106215 - DNA, 19 bp, Homo sapiens
  siRNA target sequence for TTN (NM_003319.2,79837-79855).
cagaactcatgctgagatt

SEQ ID NO: 106216 - DNA, 19 bp, Homo sapiens
  siRNA target sequence for TTN (NM_003319.2,79839-79857).
gaactcatgctgagattaa

SEQ ID NO: 106217 - DNA, 19 bp, Homo sapiens
  siRNA target sequence for TTN (NM_003319.2,79869-79887).
ctcagatgagcataaacga

SEQ ID NO: 106218 - DNA, 19 bp, Homo sapiens
  siRNA target sequence for TTN (NM_003319.2,79879-79897).
cataaacgaaggtcaaaga

SEQ ID NO: 106219 - DNA, 19 bp, Homo sapiens
  siRNA target sequence for TTN (NM_003319.2,79920-79938).
ctggtgccactgatgtgaa

SEQ ID NO: 106220 - DNA, 19 bp, Homo sapiens
  siRNA target sequence for TTN (NM_003319.2,79922-79940).
ggtgccactgatgtgaaat

SEQ ID NO: 106221 - DNA, 19 bp, Homo sapiens
  siRNA target sequence for TTN (NM_003319.2,80055-80073).
cctgcataagcaaaaccaa

SEQ ID NO: 106222 - DNA, 19 bp, Homo sapiens
  siRNA target sequence for TTN (NM_003319.2,80084-80102).
gtcaagtgtcagtatgatt

SEQ ID NO: 106223 - DNA, 19 bp, Homo sapiens
  siRNA target sequence for TTN (NM_003319.2,80143-80161).
ctcacagcctagatctcaa

SEQ ID NO: 106224 - DNA, 19 bp, Homo sapiens
  siRNA target sequence for TTN (NM_003319.2,80149-80167).
gcctagatctcaaaatatt

SEQ ID NO: 106225 - DNA, 19 bp, Homo sapiens
  siRNA target sequence for TTN (NM_003319.2,80208-80226).
gcgagccatcccctgaaat

SEQ ID NO: 106226 - DNA, 19 bp, Homo sapiens
  siRNA target sequence for TTN (NM_003319.2,80212-80230).
gccatcccctgaaatcgaa

SEQ ID NO: 106227 - DNA, 19 bp, Homo sapiens
  siRNA target sequence for TTN (NM_003319.2,80213-80231).
ccatcccctgaaatcgaat

SEQ ID NO: 106228 - DNA, 19 bp, Homo sapiens
  siRNA target sequence for TTN (NM_003319.2,80217-80235).
cccctgaaatcgaatggtt

SEQ ID NO: 106229 - DNA, 19 bp, Homo sapiens
  siRNA target sequence for TTN (NM_003319.2,80245-80263).
cctgccaatttctatttct

SEQ ID NO: 106230 - DNA, 19 bp, Homo sapiens
  siRNA target sequence for TTN (NM_003319.2,80248-80266).
gccaatttctatttcttca

SEQ ID NO: 106231 - DNA, 19 bp, Homo sapiens
  siRNA target sequence for TTN (NM_003319.2,80280-80298).
gccgctccagaaatgtata

SEQ ID NO: 106232 - DNA, 19 bp, Homo sapiens
  siRNA target sequence for TTN (NM_003319.2,80282-80300).
cgctccagaaatgtatact

SEQ ID NO: 106233 - DNA, 19 bp, Homo sapiens
  siRNA target sequence for TTN (NM_003319.2,80302-80320).
ccttgaaatccgaaatgca

SEQ ID NO: 106234 - DNA, 19 bp, Homo sapiens
  siRNA target sequence for TTN (NM_003319.2,80303-80321).
cttgaaatccgaaatgcat

SEQ ID NO: 106235 - DNA, 19 bp, Homo sapiens
  siRNA target sequence for TTN (NM_003319.2,80379-80397).
cagctacagcttccttaat

SEQ ID NO: 106236 - DNA, 19 bp, Homo sapiens
  siRNA target sequence for TTN (NM_003319.2,80431-80449).
ggtagtattgagaacaagt

SEQ ID NO: 106237 - DNA, 19 bp, Homo sapiens
  siRNA target sequence for TTN (NM_003319.2,80478-80496).
cgtctcagtcagtccaaat

SEQ ID NO: 106238 - DNA, 19 bp, Homo sapiens
  siRNA target sequence for TTN (NM_003319.2,80605-80623).
gcaagagtcctttgtagaa

SEQ ID NO: 106239 - DNA, 19 bp, Homo sapiens
  siRNA target sequence for TTN (NM_003319.2,80606-80624).
caagagtcctttgtagaaa

SEQ ID NO: 106240 - DNA, 19 bp, Homo sapiens
  siRNA target sequence for TTN (NM_003319.2,80635-80653).
cagctttatgggaatatct

SEQ ID NO: 106241 - DNA, 19 bp, Homo sapiens
  siRNA target sequence for TTN (NM_003319.2,80638-80656).
ctttatgggaatatctaat

SEQ ID NO: 106242 - DNA, 19 bp, Homo sapiens
  siRNA target sequence for TTN (NM_003319.2,80644-80662).
gggaatatctaatatgaca

SEQ ID NO: 106243 - DNA, 19 bp, Homo sapiens
  siRNA target sequence for TTN (NM_003319.2,80668-80686).
ggaaagctcaactagtaaa

SEQ ID NO: 106244 - DNA, 19 bp, Homo sapiens
  siRNA target sequence for TTN (NM_003319.2,80674-80692).
ctcaactagtaaaatgctt

SEQ ID NO: 106245 - DNA, 19 bp, Homo sapiens
  siRNA target sequence for TTN (NM_003319.2,80706-80724).
gaggaattccgcctaaaat

SEQ ID NO: 106246 - DNA, 19 bp, Homo sapiens
  siRNA target sequence for TTN (NM_003319.2,80726-80744).
gaagctcttccatctgata

SEQ ID NO: 106247 - DNA, 19 bp, Homo sapiens
  siRNA target sequence for TTN (NM_003319.2,80795-80813).
gagcctaccccagaagtaa

SEQ ID NO: 106248 - DNA, 19 bp, Homo sapiens
  siRNA target sequence for TTN (NM_003319.2,80797-80815).
gcctaccccagaagtaaca

SEQ ID NO: 106249 - DNA, 19 bp, Homo sapiens
  siRNA target sequence for TTN (NM_003319.2,80798-80816).
cctaccccagaagtaacat

SEQ ID NO: 106250 - DNA, 19 bp, Homo sapiens
  siRNA target sequence for TTN (NM_003319.2,80885-80903).
ctgacaaccctgatcatca

SEQ ID NO: 106251 - DNA, 19 bp, Homo sapiens
  siRNA target sequence for TTN (NM_003319.2,80899-80917).
catcatggacgtacagaaa

SEQ ID NO: 106252 - DNA, 19 bp, Homo sapiens
  siRNA target sequence for TTN (NM_003319.2,80902-80920).
catggacgtacagaaacaa

SEQ ID NO: 106253 - DNA, 19 bp, Homo sapiens
  siRNA target sequence for TTN (NM_003319.2,80918-80936).
caagatggtggactttata

SEQ ID NO: 106254 - DNA, 19 bp, Homo sapiens
  siRNA target sequence for TTN (NM_003319.2,80938-80956).
cctgagtttagggaatgaa

SEQ ID NO: 106255 - DNA, 19 bp, Homo sapiens
  siRNA target sequence for TTN (NM_003319.2,80972-80990).
gccactgtgaatatacata

SEQ ID NO: 106256 - DNA, 19 bp, Homo sapiens
  siRNA target sequence for TTN (NM_133378.1,1986-2004).
ccacacaacaagatcaaat

SEQ ID NO: 106257 - DNA, 19 bp, Homo sapiens
  siRNA target sequence for TTN (NM_133378.1,1997-2015).
gatcaaatgcacctaagtt

SEQ ID NO: 106258 - DNA, 19 bp, Homo sapiens
  siRNA target sequence for TTN (NM_133378.1,13645-13663).
ggcatatccaccaaccttt

SEQ ID NO: 106259 - DNA, 19 bp, Homo sapiens
  siRNA target sequence for TTN (NM_133378.1,13697-13715).
ggtaaggcagccaagttca

SEQ ID NO: 106260 - DNA, 19 bp, Homo sapiens
  siRNA target sequence for TTN (NM_133378.1,13698-13716).
gtaaggcagccaagttcat

SEQ ID NO: 106261 - DNA, 19 bp, Homo sapiens
  siRNA target sequence for TTN (NM_133378.1,13797-13815).
ggatttccgacgcagaaaa

SEQ ID NO: 106262 - DNA, 19 bp, Homo sapiens
  siRNA target sequence for TTN (NM_133378.1,13803-13821).
ccgacgcagaaaacaaaca

SEQ ID NO: 106263 - DNA, 19 bp, Homo sapiens
  siRNA target sequence for TTN (NM_133378.1,13840-13858).
ccttaccattcaagataga

SEQ ID NO: 106264 - DNA, 19 bp, Homo sapiens
  siRNA target sequence for TTN (NM_133378.1,13850-13868).
caagatagaggagtttatt

SEQ ID NO: 106265 - DNA, 19 bp, Homo sapiens
  siRNA target sequence for TTN (NM_133378.1,13853-13871).
gatagaggagtttattctt

SEQ ID NO: 106266 - DNA, 19 bp, Homo sapiens
  siRNA target sequence for TTN (NM_133378.1,13907-13925).
caagcagagttgatcatca

SEQ ID NO: 106267 - DNA, 19 bp, Homo sapiens
  siRNA target sequence for TTN (NM_133378.1,13959-13977).
ctgtgcagtccgctatcaa

SEQ ID NO: 106268 - DNA, 19 bp, Homo sapiens
  siRNA target sequence for TTN (NM_133378.1,13961-13979).
gtgcagtccgctatcaata

SEQ ID NO: 106269 - DNA, 19 bp, Homo sapiens
  siRNA target sequence for TTN (NM_133378.1,13964-13982).
cagtccgctatcaataaga

SEQ ID NO: 106270 - DNA, 19 bp, Homo sapiens
  siRNA target sequence for TTN (NM_133378.1,14054-14072).
ctccccccagggaaagatt

SEQ ID NO: 106271 - DNA, 19 bp, Homo sapiens
  siRNA target sequence for TTN (NM_133378.1,14060-14078).
ccagggaaagattataaga

SEQ ID NO: 106272 - DNA, 19 bp, Homo sapiens
  siRNA target sequence for TTN (NM_133378.1,14265-14283).
cagcacgcctccattgcaa

SEQ ID NO: 106273 - DNA, 19 bp, Homo sapiens
  siRNA target sequence for TTN (NM_133378.1,14302-14320).
gatccaggttacttggttt

SEQ ID NO: 106274 - DNA, 19 bp, Homo sapiens
  siRNA target sequence for TTN (NM_133378.1,14346-14364).
gtaacacagtccgaatgta

SEQ ID NO: 106275 - DNA, 19 bp, Homo sapiens
  siRNA target sequence for TTN (NM_133378.1,14354-14372).
gtccgaatgtattttgtca

SEQ ID NO: 106276 - DNA, 19 bp, Homo sapiens
  siRNA target sequence for TTN (NM_133378.1,14356-14374).
ccgaatgtattttgtcaat

SEQ ID NO: 106277 - DNA, 19 bp, Homo sapiens
  siRNA target sequence for TTN (NM_133378.1,14357-14375).
cgaatgtattttgtcaatt

SEQ ID NO: 106278 - DNA, 19 bp, Homo sapiens
  siRNA target sequence for TTN (NM_133378.1,14378-14396).
gaggctatacttgatatta

SEQ ID NO: 106279 - DNA, 19 bp, Homo sapiens
  siRNA target sequence for TTN (NM_133378.1,14414-14432).
gacagtgggagttactcat

SEQ ID NO: 106280 - DNA, 19 bp, Homo sapiens
  siRNA target sequence for TTN (NM_133378.1,14428-14446).
ctcatgtgaagcagtgaat

SEQ ID NO: 106281 - DNA, 19 bp, Homo sapiens
  siRNA target sequence for TTN (NM_133378.1,14463-14481).
gctgcagtactgaaatagt

SEQ ID NO: 106282 - DNA, 19 bp, Homo sapiens
  siRNA target sequence for TTN (NM_133378.1,14464-14482).
ctgcagtactgaaatagtt

SEQ ID NO: 106283 - DNA, 19 bp, Homo sapiens
  siRNA target sequence for TTN (NM_133378.1,14469-14487).
gtactgaaatagttatcaa

SEQ ID NO: 106284 - DNA, 19 bp, Homo sapiens
  siRNA target sequence for TTN (NM_133378.1,14489-14507).
gaacctccttctttcatca

SEQ ID NO: 106285 - DNA, 19 bp, Homo sapiens
  siRNA target sequence for TTN (NM_133378.1,14566-14584).
ctcaggcactggaccattt

SEQ ID NO: 106286 - DNA, 19 bp, Homo sapiens
  siRNA target sequence for TTN (NM_133378.1,14592-14610).
gctggttcaaagacaagaa

SEQ ID NO: 106287 - DNA, 19 bp, Homo sapiens
  siRNA target sequence for TTN (NM_133378.1,14668-14686).
ggagatcttttcgtttaat

SEQ ID NO: 106288 - DNA, 19 bp, Homo sapiens
  siRNA target sequence for TTN (NM_133378.1,14669-14687).
gagatcttttcgtttaata

SEQ ID NO: 106289 - DNA, 19 bp, Homo sapiens
  siRNA target sequence for TTN (NM_133378.1,14691-14709).
cagatgttggtgaatatga

SEQ ID NO: 106290 - DNA, 19 bp, Homo sapiens
  siRNA target sequence for TTN (NM_133378.1,14745-14763).
gcatggcaacccacttact

SEQ ID NO: 106291 - DNA, 19 bp, Homo sapiens
  siRNA target sequence for TTN (NM_133378.1,14749-14767).
ggcaacccacttactcaaa

SEQ ID NO: 106292 - DNA, 19 bp, Homo sapiens
  siRNA target sequence for TTN (NM_133378.1,14768-14786).
gaacctccaacctttgtaa

SEQ ID NO: 106293 - DNA, 19 bp, Homo sapiens
  siRNA target sequence for TTN (NM_133378.1,14772-14790).
ctccaacctttgtaaagaa

SEQ ID NO: 106294 - DNA, 19 bp, Homo sapiens
  siRNA target sequence for TTN (NM_133378.1,14933-14951).
ggtgttgcagtcttgataa

SEQ ID NO: 106295 - DNA, 19 bp, Homo sapiens
  siRNA target sequence for TTN (NM_133378.1,14944-14962).
cttgataatccctgatgtt

SEQ ID NO: 106296 - DNA, 19 bp, Homo sapiens
  siRNA target sequence for TTN (NM_133378.1,14988-15006).
cgtgcctggctgaaaatga

SEQ ID NO: 106297 - DNA, 19 bp, Homo sapiens
  siRNA target sequence for TTN (NM_133378.1,15024-15042).
ctgttggggaattaatagt

SEQ ID NO: 106298 - DNA, 19 bp, Homo sapiens
  siRNA target sequence for TTN (NM_133378.1,15026-15044).
gttggggaattaatagtta

SEQ ID NO: 106299 - DNA, 19 bp, Homo sapiens
  siRNA target sequence for TTN (NM_133378.1,15170-15188).
cccttggtcgccagtaaaa

SEQ ID NO: 106300 - DNA, 19 bp, Homo sapiens
  siRNA target sequence for TTN (NM_133378.1,15171-15189).
ccttggtcgccagtaaaaa

SEQ ID NO: 106301 - DNA, 19 bp, Homo sapiens
  siRNA target sequence for TTN (NM_133378.1,15172-15190).
cttggtcgccagtaaaaaa

SEQ ID NO: 106302 - DNA, 19 bp, Homo sapiens
  siRNA target sequence for TTN (NM_133378.1,15248-15266).
cacgacagtggccaataca

SEQ ID NO: 106303 - DNA, 19 bp, Homo sapiens
  siRNA target sequence for TTN (NM_133378.1,15250-15268).
cgacagtggccaatacaca

SEQ ID NO: 106304 - DNA, 19 bp, Homo sapiens
  siRNA target sequence for TTN (NM_133378.1,15251-15269).
gacagtggccaatacacat

SEQ ID NO: 106305 - DNA, 19 bp, Homo sapiens
  siRNA target sequence for TTN (NM_133378.1,15329-15347).
cgagacattgctccatttt

SEQ ID NO: 106306 - DNA, 19 bp, Homo sapiens
  siRNA target sequence for TTN (NM_133378.1,15364-15382).
caacgtggatagtgttgtt

SEQ ID NO: 106307 - DNA, 19 bp, Homo sapiens
  siRNA target sequence for TTN (NM_133378.1,15367-15385).
cgtggatagtgttgttaat

SEQ ID NO: 106308 - DNA, 19 bp, Homo sapiens
  siRNA target sequence for TTN (NM_133378.1,15371-15389).
gatagtgttgttaatggta

SEQ ID NO: 106309 - DNA, 19 bp, Homo sapiens
  siRNA target sequence for TTN (NM_133378.1,15464-15482).
gctgcttctgacagataca

SEQ ID NO: 106310 - DNA, 19 bp, Homo sapiens
  siRNA target sequence for TTN (NM_133378.1,15477-15495).
gatacaggatagcatttgt

SEQ ID NO: 106311 - DNA, 19 bp, Homo sapiens
  siRNA target sequence for TTN (NM_133378.1,15617-15635).
ccacccagttttgtaacta

SEQ ID NO: 106312 - DNA, 19 bp, Homo sapiens
  siRNA target sequence for TTN (NM_133378.1,15639-15657).
ccggctcaaaggatgttct

SEQ ID NO: 106313 - DNA, 19 bp, Homo sapiens
  siRNA target sequence for TTN (NM_133378.1,15707-15725).
ctcacaatcagatggttta

SEQ ID NO: 106314 - DNA, 19 bp, Homo sapiens
  siRNA target sequence for TTN (NM_133378.1,15749-15767).
ggtggaagctgctatatta

SEQ ID NO: 106315 - DNA, 19 bp, Homo sapiens
  siRNA target sequence for TTN (NM_133378.1,15752-15770).
ggaagctgctatattacca

SEQ ID NO: 106316 - DNA, 19 bp, Homo sapiens
  siRNA target sequence for TTN (NM_133378.1,15786-15804).
gttccctggaactctattt

SEQ ID NO: 106317 - DNA, 19 bp, Homo sapiens
  siRNA target sequence for TTN (NM_133378.1,15789-15807).
ccctggaactctatttagt

SEQ ID NO: 106318 - DNA, 19 bp, Homo sapiens
  siRNA target sequence for TTN (NM_133378.1,15818-15836).
gattcgggcacgtacacat

SEQ ID NO: 106319 - DNA, 19 bp, Homo sapiens
  siRNA target sequence for TTN (NM_133378.1,15825-15843).
gcacgtacacatgtaaagt

SEQ ID NO: 106320 - DNA, 19 bp, Homo sapiens
  siRNA target sequence for TTN (NM_133378.1,15955-15973).
ccagctagcctgcaaagta

SEQ ID NO: 106321 - DNA, 19 bp, Homo sapiens
  siRNA target sequence for TTN (NM_133378.1,15956-15974).
cagctagcctgcaaagtaa

SEQ ID NO: 106322 - DNA, 19 bp, Homo sapiens
  siRNA target sequence for TTN (NM_133378.1,15958-15976).
gctagcctgcaaagtaact

SEQ ID NO: 106323 - DNA, 19 bp, Homo sapiens
  siRNA target sequence for TTN (NM_133378.1,15975-15993).
ctggtacccctccaattaa

SEQ ID NO: 106324 - DNA, 19 bp, Homo sapiens
  siRNA target sequence for TTN (NM_133378.1,15978-15996).
gtacccctccaattaaaat

SEQ ID NO: 106325 - DNA, 19 bp, Homo sapiens
  siRNA target sequence for TTN (NM_133378.1,15983-16001).
cctccaattaaaataacat

SEQ ID NO: 106326 - DNA, 19 bp, Homo sapiens
  siRNA target sequence for TTN (NM_133378.1,16057-16075).
ggagtctactgcagttcta

SEQ ID NO: 106327 - DNA, 19 bp, Homo sapiens
  siRNA target sequence for TTN (NM_133378.1,16058-16076).
gagtctactgcagttctaa

SEQ ID NO: 106328 - DNA, 19 bp, Homo sapiens
  siRNA target sequence for TTN (NM_133378.1,16096-16114).
cgaagacagtggtgaatat

SEQ ID NO: 106329 - DNA, 19 bp, Homo sapiens
  siRNA target sequence for TTN (NM_133378.1,16155-16173).
gtagcattgtaatagtcaa

SEQ ID NO: 106330 - DNA, 19 bp, Homo sapiens
  siRNA target sequence for TTN (NM_133378.1,16195-16213).
ggaatttaagccaattgaa

SEQ ID NO: 106331 - DNA, 19 bp, Homo sapiens
  siRNA target sequence for TTN (NM_133378.1,16257-16275).
gcactcctccctttgagat

SEQ ID NO: 106332 - DNA, 19 bp, Homo sapiens
  siRNA target sequence for TTN (NM_133378.1,16262-16280).
cctccctttgagatcactt

SEQ ID NO: 106333 - DNA, 19 bp, Homo sapiens
  siRNA target sequence for TTN (NM_133378.1,16281-16299).
ggttcaaagataacacaat

SEQ ID NO: 106334 - DNA, 19 bp, Homo sapiens
  siRNA target sequence for TTN (NM_133378.1,16301-16319).
ctgcgaagtggtagaaagt

SEQ ID NO: 106335 - DNA, 19 bp, Homo sapiens
  siRNA target sequence for TTN (NM_133378.1,16303-16321).
gcgaagtggtagaaagtat

SEQ ID NO: 106336 - DNA, 19 bp, Homo sapiens
  siRNA target sequence for TTN (NM_133378.1,16304-16322).
cgaagtggtagaaagtata

SEQ ID NO: 106337 - DNA, 19 bp, Homo sapiens
  siRNA target sequence for TTN (NM_133378.1,16310-16328).
ggtagaaagtataagactt

SEQ ID NO: 106338 - DNA, 19 bp, Homo sapiens
  siRNA target sequence for TTN (NM_133378.1,16311-16329).
gtagaaagtataagacttt

SEQ ID NO: 106339 - DNA, 19 bp, Homo sapiens
  siRNA target sequence for TTN (NM_133378.1,16351-16369).
cctgcagatcctcaagttt

SEQ ID NO: 106340 - DNA, 19 bp, Homo sapiens
  siRNA target sequence for TTN (NM_133378.1,16454-16472).
gaacccccatccttcataa

SEQ ID NO: 106341 - DNA, 19 bp, Homo sapiens
  siRNA target sequence for TTN (NM_133378.1,16551-16569).
cggtgacttggctaaaaga

SEQ ID NO: 106342 - DNA, 19 bp, Homo sapiens
  siRNA target sequence for TTN (NM_133378.1,16582-16600).
cactgaagacgataatata

SEQ ID NO: 106343 - DNA, 19 bp, Homo sapiens
  siRNA target sequence for TTN (NM_133378.1,16586-16604).
gaagacgataatataagaa

SEQ ID NO: 106344 - DNA, 19 bp, Homo sapiens
  siRNA target sequence for TTN (NM_133378.1,16713-16731).
ctgcattactctcagtaaa

SEQ ID NO: 106345 - DNA, 19 bp, Homo sapiens
  siRNA target sequence for TTN (NM_133378.1,16750-16768).
cgaggaagctgtgtctata

SEQ ID NO: 106346 - DNA, 19 bp, Homo sapiens
  siRNA target sequence for TTN (NM_133378.1,16753-16771).
ggaagctgtgtctatagat

SEQ ID NO: 106347 - DNA, 19 bp, Homo sapiens
  siRNA target sequence for TTN (NM_133378.1,16788-16806).
cagccactttgcaggttaa

SEQ ID NO: 106348 - DNA, 19 bp, Homo sapiens
  siRNA target sequence for TTN (NM_133378.1,16791-16809).
ccactttgcaggttaaatt

SEQ ID NO: 106349 - DNA, 19 bp, Homo sapiens
  siRNA target sequence for TTN (NM_133378.1,16823-16841).
gagattacagccaaatggt

SEQ ID NO: 106350 - DNA, 19 bp, Homo sapiens
  siRNA target sequence for TTN (NM_133378.1,16825-16843).
gattacagccaaatggttt

SEQ ID NO: 106351 - DNA, 19 bp, Homo sapiens
  siRNA target sequence for TTN (NM_133378.1,16861-16879).
gaccctgggctcaaaatat

SEQ ID NO: 106352 - DNA, 19 bp, Homo sapiens
  siRNA target sequence for TTN (NM_133378.1,16863-16881).
ccctgggctcaaaatataa

SEQ ID NO: 106353 - DNA, 19 bp, Homo sapiens
  siRNA target sequence for TTN (NM_133378.1,16893-16911).
ctgatacagtctcaatact

SEQ ID NO: 106354 - DNA, 19 bp, Homo sapiens
  siRNA target sequence for TTN (NM_133378.1,16895-16913).
gatacagtctcaatactga

SEQ ID NO: 106355 - DNA, 19 bp, Homo sapiens
  siRNA target sequence for TTN (NM_133378.1,16901-16919).
gtctcaatactgaagatta

SEQ ID NO: 106356 - DNA, 19 bp, Homo sapiens
  siRNA target sequence for TTN (NM_133378.1,16903-16921).
ctcaatactgaagattatt

SEQ ID NO: 106357 - DNA, 19 bp, Homo sapiens
  siRNA target sequence for TTN (NM_133378.1,16957-16975).
cgaggtccaaaatgatgtt

SEQ ID NO: 106358 - DNA, 19 bp, Homo sapiens
  siRNA target sequence for TTN (NM_133378.1,16986-17004).
gctgcaaggctagaattaa

SEQ ID NO: 106359 - DNA, 19 bp, Homo sapiens
  siRNA target sequence for TTN (NM_133378.1,16989-17007).
gcaaggctagaattaatgt

SEQ ID NO: 106360 - DNA, 19 bp, Homo sapiens
  siRNA target sequence for TTN (NM_133378.1,16990-17008).
caaggctagaattaatgta

SEQ ID NO: 106361 - DNA, 19 bp, Homo sapiens
  siRNA target sequence for TTN (NM_133378.1,17077-17095).
cattgatttagaatgtata

SEQ ID NO: 106362 - DNA, 19 bp, Homo sapiens
  siRNA target sequence for TTN (NM_133378.1,17102-17120).
gggtcacatcccataagca

SEQ ID NO: 106363 - DNA, 19 bp, Homo sapiens
  siRNA target sequence for TTN (NM_133378.1,17103-17121).
ggtcacatcccataagcat

SEQ ID NO: 106364 - DNA, 19 bp, Homo sapiens
  siRNA target sequence for TTN (NM_133378.1,17241-17259).
cttgttctgccacaaataa

SEQ ID NO: 106365 - DNA, 19 bp, Homo sapiens
  siRNA target sequence for TTN (NM_133378.1,17296-17314).
caaagaacccccttacttt

SEQ ID NO: 106366 - DNA, 19 bp, Homo sapiens
  siRNA target sequence for TTN (NM_133378.1,17336-17354).
gatgtcaatcccaacacaa

SEQ ID NO: 106367 - DNA, 19 bp, Homo sapiens
  siRNA target sequence for TTN (NM_133378.1,17347-17365).
caacacaagggtacagtta

SEQ ID NO: 106368 - DNA, 19 bp, Homo sapiens
  siRNA target sequence for TTN (NM_133378.1,17503-17521).
cgattctggaacctacatt

SEQ ID NO: 106369 - DNA, 19 bp, Homo sapiens
  siRNA target sequence for TTN (NM_133378.1,17523-17541).
gccaactaagcaatgatgt

SEQ ID NO: 106370 - DNA, 19 bp, Homo sapiens
  siRNA target sequence for TTN (NM_133378.1,17524-17542).
ccaactaagcaatgatgtt

SEQ ID NO: 106371 - DNA, 19 bp, Homo sapiens
  siRNA target sequence for TTN (NM_133378.1,17556-17574).
gcaaagccactctctttgt

SEQ ID NO: 106372 - DNA, 19 bp, Homo sapiens
  siRNA target sequence for TTN (NM_133378.1,17582-17600).
cctcctcaattcattaaga

SEQ ID NO: 106373 - DNA, 19 bp, Homo sapiens
  siRNA target sequence for TTN (NM_133378.1,17599-17617).
gaagcccagtccagtctta

SEQ ID NO: 106374 - DNA, 19 bp, Homo sapiens
  siRNA target sequence for TTN (NM_133378.1,17677-17695).
ccgagtgtcttggtatcta

SEQ ID NO: 106375 - DNA, 19 bp, Homo sapiens
  siRNA target sequence for TTN (NM_133378.1,17689-17707).
gtatctagacgggaatgaa

SEQ ID NO: 106376 - DNA, 19 bp, Homo sapiens
  siRNA target sequence for TTN (NM_133378.1,17693-17711).
ctagacgggaatgaaataa

SEQ ID NO: 106377 - DNA, 19 bp, Homo sapiens
  siRNA target sequence for TTN (NM_133378.1,17769-17787).
ctggtgccagggtagaaaa

SEQ ID NO: 106378 - DNA, 19 bp, Homo sapiens
  siRNA target sequence for TTN (NM_133378.1,17771-17789).
ggtgccagggtagaaaata

SEQ ID NO: 106379 - DNA, 19 bp, Homo sapiens
  siRNA target sequence for TTN (NM_133378.1,17830-17848).
ggcgagctgcagcattgaa

SEQ ID NO: 106380 - DNA, 19 bp, Homo sapiens
  siRNA target sequence for TTN (NM_133378.1,17832-17850).
cgagctgcagcattgaact

SEQ ID NO: 106381 - DNA, 19 bp, Homo sapiens
  siRNA target sequence for TTN (NM_133378.1,17838-17856).
gcagcattgaactcaaagt

SEQ ID NO: 106382 - DNA, 19 bp, Homo sapiens
  siRNA target sequence for TTN (NM_133378.1,17841-17859).
gcattgaactcaaagtgaa

SEQ ID NO: 106383 - DNA, 19 bp, Homo sapiens
  siRNA target sequence for TTN (NM_133378.1,17891-17909).
cctgtggaggtagtaaaat

SEQ ID NO: 106384 - DNA, 19 bp, Homo sapiens
  siRNA target sequence for TTN (NM_133378.1,17892-17910).
ctgtggaggtagtaaaata

SEQ ID NO: 106385 - DNA, 19 bp, Homo sapiens
  siRNA target sequence for TTN (NM_133378.1,17894-17912).
gtggaggtagtaaaatata

SEQ ID NO: 106386 - DNA, 19 bp, Homo sapiens
  siRNA target sequence for TTN (NM_133378.1,17896-17914).
ggaggtagtaaaatatagt

SEQ ID NO: 106387 - DNA, 19 bp, Homo sapiens
  siRNA target sequence for TTN (NM_133378.1,17921-17939).
gagctggagtgtgaagtta

SEQ ID NO: 106388 - DNA, 19 bp, Homo sapiens
  siRNA target sequence for TTN (NM_133378.1,17974-17992).
gaataacagggaaattcga

SEQ ID NO: 106389 - DNA, 19 bp, Homo sapiens
  siRNA target sequence for TTN (NM_133378.1,17994-18012).
gcagcaaaaaatacacatt

SEQ ID NO: 106390 - DNA, 19 bp, Homo sapiens
  siRNA target sequence for TTN (NM_133378.1,18016-18034).
cgacagagtgtctgtgttt

SEQ ID NO: 106391 - DNA, 19 bp, Homo sapiens
  siRNA target sequence for TTN (NM_133378.1,18021-18039).
gagtgtctgtgtttaacct

SEQ ID NO: 106392 - DNA, 19 bp, Homo sapiens
  siRNA target sequence for TTN (NM_133378.1,18029-18047).
gtgtttaacctccatataa

SEQ ID NO: 106393 - DNA, 19 bp, Homo sapiens
  siRNA target sequence for TTN (NM_133378.1,18073-18091).
ggaataccagtgcattgta

SEQ ID NO: 106394 - DNA, 19 bp, Homo sapiens
  siRNA target sequence for TTN (NM_133378.1,18082-18100).
gtgcattgtatccaatgaa

SEQ ID NO: 106395 - DNA, 19 bp, Homo sapiens
  siRNA target sequence for TTN (NM_133378.1,18109-18127).
ctgctcatgcagtactaga

SEQ ID NO: 106396 - DNA, 19 bp, Homo sapiens
  siRNA target sequence for TTN (NM_133378.1,18221-18239).
ggttctcctcctatttcta

SEQ ID NO: 106397 - DNA, 19 bp, Homo sapiens
  siRNA target sequence for TTN (NM_133378.1,18227-18245).
cctcctatttctataacct

SEQ ID NO: 106398 - DNA, 19 bp, Homo sapiens
  siRNA target sequence for TTN (NM_133378.1,18243-18261).
cctggctaaaggatgatca

SEQ ID NO: 106399 - DNA, 19 bp, Homo sapiens
  siRNA target sequence for TTN (NM_133378.1,18308-18326).
gtggccacacttcaaatca

SEQ ID NO: 106400 - DNA, 19 bp, Homo sapiens
  siRNA target sequence for TTN (NM_133378.1,18310-18328).
ggccacacttcaaatcaga

SEQ ID NO: 106401 - DNA, 19 bp, Homo sapiens
  siRNA target sequence for TTN (NM_133378.1,18423-18441).
cagctcaaatcgtagagaa

SEQ ID NO: 106402 - DNA, 19 bp, Homo sapiens
  siRNA target sequence for TTN (NM_133378.1,18439-18457).
gaaagctaaatcagttgat

SEQ ID NO: 106403 - DNA, 19 bp, Homo sapiens
  siRNA target sequence for TTN (NM_133378.1,18443-18461).
gctaaatcagttgatgtta

SEQ ID NO: 106404 - DNA, 19 bp, Homo sapiens
  siRNA target sequence for TTN (NM_133378.1,18526-18544).
gcttaaagacgggaaacaa

SEQ ID NO: 106405 - DNA, 19 bp, Homo sapiens
  siRNA target sequence for TTN (NM_133378.1,18558-18576).
gatacttttcaatgagttt

SEQ ID NO: 106406 - DNA, 19 bp, Homo sapiens
  siRNA target sequence for TTN (NM_133378.1,18590-18608).
gccagttttagaattcagt

SEQ ID NO: 106407 - DNA, 19 bp, Homo sapiens
  siRNA target sequence for TTN (NM_133378.1,18600-18618).
gaattcagtcagtaatgaa

SEQ ID NO: 106408 - DNA, 19 bp, Homo sapiens
  siRNA target sequence for TTN (NM_133378.1,18627-18645).
gcggtcagtacactttcaa

SEQ ID NO: 106409 - DNA, 19 bp, Homo sapiens
  siRNA target sequence for TTN (NM_133378.1,18690-18708).
gagtgctagatcaaaatat

SEQ ID NO: 106410 - DNA, 19 bp, Homo sapiens
  siRNA target sequence for TTN (NM_133378.1,18694-18712).
gctagatcaaaatattcct

SEQ ID NO: 106411 - DNA, 19 bp, Homo sapiens
  siRNA target sequence for TTN (NM_133378.1,18735-18753).
ccaaaatggataaagttct

SEQ ID NO: 106412 - DNA, 19 bp, Homo sapiens
  siRNA target sequence for TTN (NM_133378.1,18778-18796).
caaggtgtctggttcactt

SEQ ID NO: 106413 - DNA, 19 bp, Homo sapiens
  siRNA target sequence for TTN (NM_133378.1,18908-18926).
gaagatactgcaaattaca

SEQ ID NO: 106414 - DNA, 19 bp, Homo sapiens
  siRNA target sequence for TTN (NM_133378.1,18959-18977).
gcatgcagtggcatcttaa

SEQ ID NO: 106415 - DNA, 19 bp, Homo sapiens
  siRNA target sequence for TTN (NM_133378.1,18963-18981).
gcagtggcatcttaactgt

SEQ ID NO: 106416 - DNA, 19 bp, Homo sapiens
  siRNA target sequence for TTN (NM_133378.1,18990-19008).
caccaagcttcctagtgaa

SEQ ID NO: 106417 - DNA, 19 bp, Homo sapiens
  siRNA target sequence for TTN (NM_133378.1,19045-19063).
ggaatttaaggcaatacta

SEQ ID NO: 106418 - DNA, 19 bp, Homo sapiens
  siRNA target sequence for TTN (NM_133378.1,19112-19130).
cttgtctcaggtcctaaat

SEQ ID NO: 106419 - DNA, 19 bp, Homo sapiens
  siRNA target sequence for TTN (NM_133378.1,19119-19137).
caggtcctaaatgtttcat

SEQ ID NO: 106420 - DNA, 19 bp, Homo sapiens
  siRNA target sequence for TTN (NM_133378.1,19148-19166).
gggtcgactagcttcttaa

SEQ ID NO: 106421 - DNA, 19 bp, Homo sapiens
  siRNA target sequence for TTN (NM_133378.1,19149-19167).
ggtcgactagcttcttaaa

SEQ ID NO: 106422 - DNA, 19 bp, Homo sapiens
  siRNA target sequence for TTN (NM_133378.1,19150-19168).
gtcgactagcttcttaaat

SEQ ID NO: 106423 - DNA, 19 bp, Homo sapiens
  siRNA target sequence for TTN (NM_133378.1,19152-19170).
cgactagcttcttaaatct

SEQ ID NO: 106424 - DNA, 19 bp, Homo sapiens
  siRNA target sequence for TTN (NM_133378.1,19155-19173).
ctagcttcttaaatctcta

SEQ ID NO: 106425 - DNA, 19 bp, Homo sapiens
  siRNA target sequence for TTN (NM_133378.1,19226-19244).
gttggtagcgactcttgta

SEQ ID NO: 106426 - DNA, 19 bp, Homo sapiens
  siRNA target sequence for TTN (NM_133378.1,19229-19247).
ggtagcgactcttgtacta

SEQ ID NO: 106427 - DNA, 19 bp, Homo sapiens
  siRNA target sequence for TTN (NM_133378.1,19319-19337).
gactcttcacgacttgaat

SEQ ID NO: 106428 - DNA, 19 bp, Homo sapiens
  siRNA target sequence for TTN (NM_133378.1,19323-19341).
cttcacgacttgaatgcaa

SEQ ID NO: 106429 - DNA, 19 bp, Homo sapiens
  siRNA target sequence for TTN (NM_133378.1,19346-19364).
gctggatccccagaaatca

SEQ ID NO: 106430 - DNA, 19 bp, Homo sapiens
  siRNA target sequence for TTN (NM_133378.1,19394-19412).
cttccagccagtgataagt

SEQ ID NO: 106431 - DNA, 19 bp, Homo sapiens
  siRNA target sequence for TTN (NM_133378.1,19397-19415).
ccagccagtgataagtaca

SEQ ID NO: 106432 - DNA, 19 bp, Homo sapiens
  siRNA target sequence for TTN (NM_133378.1,19400-19418).
gccagtgataagtacagaa

SEQ ID NO: 106433 - DNA, 19 bp, Homo sapiens
  siRNA target sequence for TTN (NM_133378.1,19401-19419).
ccagtgataagtacagaat

SEQ ID NO: 106434 - DNA, 19 bp, Homo sapiens
  siRNA target sequence for TTN (NM_133378.1,19434-19452).
cagtggccgtcatacagat

SEQ ID NO: 106435 - DNA, 19 bp, Homo sapiens
  siRNA target sequence for TTN (NM_133378.1,19440-19458).
ccgtcatacagatgaacaa

SEQ ID NO: 106436 - DNA, 19 bp, Homo sapiens
  siRNA target sequence for TTN (NM_133378.1,19441-19459).
cgtcatacagatgaacaat

SEQ ID NO: 106437 - DNA, 19 bp, Homo sapiens
  siRNA target sequence for TTN (NM_133378.1,19471-19489).
ggacagtggagatttcatt

SEQ ID NO: 106438 - DNA, 19 bp, Homo sapiens
  siRNA target sequence for TTN (NM_133378.1,19472-19490).
gacagtggagatttcattt

SEQ ID NO: 106439 - DNA, 19 bp, Homo sapiens
  siRNA target sequence for TTN (NM_133378.1,19521-19539).
gctgcagtaccaaggttat

SEQ ID NO: 106440 - DNA, 19 bp, Homo sapiens
  siRNA target sequence for TTN (NM_133378.1,19524-19542).
gcagtaccaaggttatagt

SEQ ID NO: 106441 - DNA, 19 bp, Homo sapiens
  siRNA target sequence for TTN (NM_133378.1,19525-19543).
cagtaccaaggttatagta

SEQ ID NO: 106442 - DNA, 19 bp, Homo sapiens
  siRNA target sequence for TTN (NM_133378.1,19527-19545).
gtaccaaggttatagtaaa

SEQ ID NO: 106443 - DNA, 19 bp, Homo sapiens
  siRNA target sequence for TTN (NM_133378.1,19563-19581).
gcagcttccctcctatagt

SEQ ID NO: 106444 - DNA, 19 bp, Homo sapiens
  siRNA target sequence for TTN (NM_133378.1,19564-19582).
cagcttccctcctatagta

SEQ ID NO: 106445 - DNA, 19 bp, Homo sapiens
  siRNA target sequence for TTN (NM_133378.1,19566-19584).
gcttccctcctatagtaga

SEQ ID NO: 106446 - DNA, 19 bp, Homo sapiens
  siRNA target sequence for TTN (NM_133378.1,19567-19585).
cttccctcctatagtagaa

SEQ ID NO: 106447 - DNA, 19 bp, Homo sapiens
  siRNA target sequence for TTN (NM_133378.1,19598-19616).
gctgaagtcagtcttgaat

SEQ ID NO: 106448 - DNA, 19 bp, Homo sapiens
  siRNA target sequence for TTN (NM_133378.1,19638-19656).
cgtttgaggtggtatggta

SEQ ID NO: 106449 - DNA, 19 bp, Homo sapiens
  siRNA target sequence for TTN (NM_133378.1,19646-19664).
gtggtatggtacaaagaca

SEQ ID NO: 106450 - DNA, 19 bp, Homo sapiens
  siRNA target sequence for TTN (NM_133378.1,19714-19732).
ccacacaagtattcacatt

SEQ ID NO: 106451 - DNA, 19 bp, Homo sapiens
  siRNA target sequence for TTN (NM_133378.1,19749-19767).
cagacatcggtgaatacca

SEQ ID NO: 106452 - DNA, 19 bp, Homo sapiens
  siRNA target sequence for TTN (NM_133378.1,19800-19818).
cttgtgtttgtactgtaaa

SEQ ID NO: 106453 - DNA, 19 bp, Homo sapiens
  siRNA target sequence for TTN (NM_133378.1,19836-19854).
gatttgtctccaaactgaa

SEQ ID NO: 106454 - DNA, 19 bp, Homo sapiens
  siRNA target sequence for TTN (NM_133378.1,19872-19890).
ccggagagcctgctgaatt

SEQ ID NO: 106455 - DNA, 19 bp, Homo sapiens
  siRNA target sequence for TTN (NM_133378.1,19873-19891).
cggagagcctgctgaatta

SEQ ID NO: 106456 - DNA, 19 bp, Homo sapiens
  siRNA target sequence for TTN (NM_133378.1,20000-20018).
gcaactctacagtttgcaa

SEQ ID NO: 106457 - DNA, 19 bp, Homo sapiens
  siRNA target sequence for TTN (NM_133378.1,20001-20019).
caactctacagtttgcaaa

SEQ ID NO: 106458 - DNA, 19 bp, Homo sapiens
  siRNA target sequence for TTN (NM_133378.1,20091-20109).
ccacactgatggtcttaga

SEQ ID NO: 106459 - DNA, 19 bp, Homo sapiens
  siRNA target sequence for TTN (NM_133378.1,20104-20122).
cttagagcccgcagtcatt

SEQ ID NO: 106460 - DNA, 19 bp, Homo sapiens
  siRNA target sequence for TTN (NM_133378.1,20195-20213).
ccggaactctctgttgaat

SEQ ID NO: 106461 - DNA, 19 bp, Homo sapiens
  siRNA target sequence for TTN (NM_133378.1,20252-20270).
cacaaatttagcttctaca

SEQ ID NO: 106462 - DNA, 19 bp, Homo sapiens
  siRNA target sequence for TTN (NM_133378.1,20309-20327).
caagatgcaggcacataca

SEQ ID NO: 106463 - DNA, 19 bp, Homo sapiens
  siRNA target sequence for TTN (NM_133378.1,20365-20383).
cacagctgtggttgatgtt

SEQ ID NO: 106464 - DNA, 19 bp, Homo sapiens
  siRNA target sequence for TTN (NM_133378.1,20451-20469).
cttgcatcttggaatgcaa

SEQ ID NO: 106465 - DNA, 19 bp, Homo sapiens
  siRNA target sequence for TTN (NM_133378.1,20467-20485).
caaagtagctggatcatca

SEQ ID NO: 106466 - DNA, 19 bp, Homo sapiens
  siRNA target sequence for TTN (NM_133378.1,20478-20496).
gatcatcacctatttcagt

SEQ ID NO: 106467 - DNA, 19 bp, Homo sapiens
  siRNA target sequence for TTN (NM_133378.1,20502-20520).
ggtttcatgagaaaaccaa

SEQ ID NO: 106468 - DNA, 19 bp, Homo sapiens
  siRNA target sequence for TTN (NM_133378.1,20566-20584).
ctgcacattgcagttgaat

SEQ ID NO: 106469 - DNA, 19 bp, Homo sapiens
  siRNA target sequence for TTN (NM_133378.1,20633-20651).
gtcgctgggtctgatgaat

SEQ ID NO: 106470 - DNA, 19 bp, Homo sapiens
  siRNA target sequence for TTN (NM_133378.1,20652-20670).
gtcgtgcagtgctaactgt

SEQ ID NO: 106471 - DNA, 19 bp, Homo sapiens
  siRNA target sequence for TTN (NM_133378.1,20675-20693).
gaaccaccctcttttgtga

SEQ ID NO: 106472 - DNA, 19 bp, Homo sapiens
  siRNA target sequence for TTN (NM_133378.1,20700-20718).
ctgaacctttggaagtact

SEQ ID NO: 106473 - DNA, 19 bp, Homo sapiens
  siRNA target sequence for TTN (NM_133378.1,20717-20735).
ctaccaggcaaaaatgtaa

SEQ ID NO: 106474 - DNA, 19 bp, Homo sapiens
  siRNA target sequence for TTN (NM_133378.1,20757-20775).
gaacccctccattcaaagt

SEQ ID NO: 106475 - DNA, 19 bp, Homo sapiens
  siRNA target sequence for TTN (NM_133378.1,20785-20803).
cagaggtgccagagaacta

SEQ ID NO: 106476 - DNA, 19 bp, Homo sapiens
  siRNA target sequence for TTN (NM_133378.1,20790-20808).
gtgccagagaactagtgaa

SEQ ID NO: 106477 - DNA, 19 bp, Homo sapiens
  siRNA target sequence for TTN (NM_133378.1,20810-20828).
ggagaccggtgcaacatct

SEQ ID NO: 106478 - DNA, 19 bp, Homo sapiens
  siRNA target sequence for TTN (NM_133378.1,20811-20829).
gagaccggtgcaacatcta

SEQ ID NO: 106479 - DNA, 19 bp, Homo sapiens
  siRNA target sequence for TTN (NM_133378.1,20813-20831).
gaccggtgcaacatctatt

SEQ ID NO: 106480 - DNA, 19 bp, Homo sapiens
  siRNA target sequence for TTN (NM_133378.1,20817-20835).
ggtgcaacatctattttga

SEQ ID NO: 106481 - DNA, 19 bp, Homo sapiens
  siRNA target sequence for TTN (NM_133378.1,20845-20863).
ggcagaactggaattattt

SEQ ID NO: 106482 - DNA, 19 bp, Homo sapiens
  siRNA target sequence for TTN (NM_133378.1,20931-20949).
gcactacccgtctctttgt

SEQ ID NO: 106483 - DNA, 19 bp, Homo sapiens
  siRNA target sequence for TTN (NM_133378.1,20934-20952).
ctacccgtctctttgtgaa

SEQ ID NO: 106484 - DNA, 19 bp, Homo sapiens
  siRNA target sequence for TTN (NM_133378.1,20971-20989).
gaagagattaagtgatcat

SEQ ID NO: 106485 - DNA, 19 bp, Homo sapiens
  siRNA target sequence for TTN (NM_133378.1,20974-20992).
gagattaagtgatcattct

SEQ ID NO: 106486 - DNA, 19 bp, Homo sapiens
  siRNA target sequence for TTN (NM_133378.1,20976-20994).
gattaagtgatcattctgt

SEQ ID NO: 106487 - DNA, 19 bp, Homo sapiens
  siRNA target sequence for TTN (NM_133378.1,21025-21043).
cacctacactggaacactt

SEQ ID NO: 106488 - DNA, 19 bp, Homo sapiens
  siRNA target sequence for TTN (NM_133378.1,21169-21187).
gtattcctgcgagattgaa

SEQ ID NO: 106489 - DNA, 19 bp, Homo sapiens
  siRNA target sequence for TTN (NM_133378.1,21216-21234).
ctctggtatctacattaga

SEQ ID NO: 106490 - DNA, 19 bp, Homo sapiens
  siRNA target sequence for TTN (NM_133378.1,21233-21251).
gaaccgccttattttgtta

SEQ ID NO: 106491 - DNA, 19 bp, Homo sapiens
  siRNA target sequence for TTN (NM_133378.1,21311-21329).
gctgggacaccagaaatta

SEQ ID NO: 106492 - DNA, 19 bp, Homo sapiens
  siRNA target sequence for TTN (NM_133378.1,21315-21333).
ggacaccagaaattacagt

SEQ ID NO: 106493 - DNA, 19 bp, Homo sapiens
  siRNA target sequence for TTN (NM_133378.1,21362-21380).
cggccaactcctgaataca

SEQ ID NO: 106494 - DNA, 19 bp, Homo sapiens
  siRNA target sequence for TTN (NM_133378.1,21374-21392).
gaatacaggacctacttta

SEQ ID NO: 106495 - DNA, 19 bp, Homo sapiens
  siRNA target sequence for TTN (NM_133378.1,21381-21399).
ggacctactttacaaacaa

SEQ ID NO: 106496 - DNA, 19 bp, Homo sapiens
  siRNA target sequence for TTN (NM_133378.1,21401-21419).
gtggccacacttgttttta

SEQ ID NO: 106497 - DNA, 19 bp, Homo sapiens
  siRNA target sequence for TTN (NM_133378.1,21461-21479).
gcagaaaatagtataggaa

SEQ ID NO: 106498 - DNA, 19 bp, Homo sapiens
  siRNA target sequence for TTN (NM_133378.1,21527-21545).
ccttcttttgcaagacaat

SEQ ID NO: 106499 - DNA, 19 bp, Homo sapiens
  siRNA target sequence for TTN (NM_133378.1,21528-21546).
cttcttttgcaagacaatt

SEQ ID NO: 106500 - DNA, 19 bp, Homo sapiens
  siRNA target sequence for TTN (NM_133378.1,21540-21558).
gacaattaaaggacattga

SEQ ID NO: 106501 - DNA, 19 bp, Homo sapiens
  siRNA target sequence for TTN (NM_133378.1,21628-21646).
gtatagagatggagtactt

SEQ ID NO: 106502 - DNA, 19 bp, Homo sapiens
  siRNA target sequence for TTN (NM_133378.1,21683-21701).
gataatgtggcaactttaa

SEQ ID NO: 106503 - DNA, 19 bp, Homo sapiens
  siRNA target sequence for TTN (NM_133378.1,21832-21850).
gcctgtatctatagatgtt

SEQ ID NO: 106504 - DNA, 19 bp, Homo sapiens
  siRNA target sequence for TTN (NM_133378.1,21833-21851).
cctgtatctatagatgtta

SEQ ID NO: 106505 - DNA, 19 bp, Homo sapiens
  siRNA target sequence for TTN (NM_133378.1,21869-21887).
gattttgagtgtcatgtta

SEQ ID NO: 106506 - DNA, 19 bp, Homo sapiens
  siRNA target sequence for TTN (NM_133378.1,21896-21914).
caaccgatgcgaatcactt

SEQ ID NO: 106507 - DNA, 19 bp, Homo sapiens
  siRNA target sequence for TTN (NM_133378.1,21904-21922).
gcgaatcacttggtcaaaa

SEQ ID NO: 106508 - DNA, 19 bp, Homo sapiens
  siRNA target sequence for TTN (NM_133378.1,21937-21955).
ccgtcctggaggaaactat

SEQ ID NO: 106509 - DNA, 19 bp, Homo sapiens
  siRNA target sequence for TTN (NM_133378.1,21938-21956).
cgtcctggaggaaactata

SEQ ID NO: 106510 - DNA, 19 bp, Homo sapiens
  siRNA target sequence for TTN (NM_133378.1,21941-21959).
cctggaggaaactatacaa

SEQ ID NO: 106511 - DNA, 19 bp, Homo sapiens
  siRNA target sequence for TTN (NM_133378.1,21942-21960).
ctggaggaaactatacaat

SEQ ID NO: 106512 - DNA, 19 bp, Homo sapiens
  siRNA target sequence for TTN (NM_133378.1,21944-21962).
ggaggaaactatacaatca

SEQ ID NO: 106513 - DNA, 19 bp, Homo sapiens
  siRNA target sequence for TTN (NM_133378.1,21961-21979).
cacatgtgtgggaaacact

SEQ ID NO: 106514 - DNA, 19 bp, Homo sapiens
  siRNA target sequence for TTN (NM_133378.1,22013-22031).
gactctggtcaatatactt

SEQ ID NO: 106515 - DNA, 19 bp, Homo sapiens
  siRNA target sequence for TTN (NM_133378.1,22032-22050).
gccaagcaaccaatgatgt

SEQ ID NO: 106516 - DNA, 19 bp, Homo sapiens
  siRNA target sequence for TTN (NM_133378.1,22033-22051).
ccaagcaaccaatgatgtt

SEQ ID NO: 106517 - DNA, 19 bp, Homo sapiens
  siRNA target sequence for TTN (NM_133378.1,22135-22153).
gcagggagaatccattcaa

SEQ ID NO: 106518 - DNA, 19 bp, Homo sapiens
  siRNA target sequence for TTN (NM_133378.1,22257-22275).
ctgtggcattgcttacgat

SEQ ID NO: 106519 - DNA, 19 bp, Homo sapiens
  siRNA target sequence for TTN (NM_133378.1,22261-22279).
ggcattgcttacgatcaat

SEQ ID NO: 106520 - DNA, 19 bp, Homo sapiens
  siRNA target sequence for TTN (NM_133378.1,22263-22281).
cattgcttacgatcaatga

SEQ ID NO: 106521 - DNA, 19 bp, Homo sapiens
  siRNA target sequence for TTN (NM_133378.1,22297-22315).
cagcggggactacatttgt

SEQ ID NO: 106522 - DNA, 19 bp, Homo sapiens
  siRNA target sequence for TTN (NM_133378.1,22403-22421).
gtaggagctcttaaaggtt

SEQ ID NO: 106523 - DNA, 19 bp, Homo sapiens
  siRNA target sequence for TTN (NM_133378.1,22450-22468).
gggaactcccccatttgaa

SEQ ID NO: 106524 - DNA, 19 bp, Homo sapiens
  siRNA target sequence for TTN (NM_133378.1,22452-22470).
gaactcccccatttgaagt

SEQ ID NO: 106525 - DNA, 19 bp, Homo sapiens
  siRNA target sequence for TTN (NM_133378.1,22455-22473).
ctcccccatttgaagtagt

SEQ ID NO: 106526 - DNA, 19 bp, Homo sapiens
  siRNA target sequence for TTN (NM_133378.1,22545-22563).
gtcttcatatccttaatct

SEQ ID NO: 106527 - DNA, 19 bp, Homo sapiens
  siRNA target sequence for TTN (NM_133378.1,22570-22588).
ctccgatgtcggggaatat

SEQ ID NO: 106528 - DNA, 19 bp, Homo sapiens
  siRNA target sequence for TTN (NM_133378.1,22572-22590).
ccgatgtcggggaatatca

SEQ ID NO: 106529 - DNA, 19 bp, Homo sapiens
  siRNA target sequence for TTN (NM_133378.1,22574-22592).
gatgtcggggaatatcact

SEQ ID NO: 106530 - DNA, 19 bp, Homo sapiens
  siRNA target sequence for TTN (NM_133378.1,22629-22647).
cttgctctgtcaagttcaa

SEQ ID NO: 106531 - DNA, 19 bp, Homo sapiens
  siRNA target sequence for TTN (NM_133378.1,22652-22670).
cctccacgattcgtgaaaa

SEQ ID NO: 106532 - DNA, 19 bp, Homo sapiens
  siRNA target sequence for TTN (NM_133378.1,22653-22671).
ctccacgattcgtgaaaaa

SEQ ID NO: 106533 - DNA, 19 bp, Homo sapiens
  siRNA target sequence for TTN (NM_133378.1,22656-22674).
cacgattcgtgaaaaagct

SEQ ID NO: 106534 - DNA, 19 bp, Homo sapiens
  siRNA target sequence for TTN (NM_133378.1,22658-22676).
cgattcgtgaaaaagctaa

SEQ ID NO: 106535 - DNA, 19 bp, Homo sapiens
  siRNA target sequence for TTN (NM_133378.1,22729-22747).
gggcttccagccaatttct

SEQ ID NO: 106536 - DNA, 19 bp, Homo sapiens
  siRNA target sequence for TTN (NM_133378.1,22748-22766).
gttgtctggctgaaagata

SEQ ID NO: 106537 - DNA, 19 bp, Homo sapiens
  siRNA target sequence for TTN (NM_133378.1,22840-22858).
gagtccagaagcatctaat

SEQ ID NO: 106538 - DNA, 19 bp, Homo sapiens
  siRNA target sequence for TTN (NM_133378.1,22966-22984).
gactgtcactactggaaat

SEQ ID NO: 106539 - DNA, 19 bp, Homo sapiens
  siRNA target sequence for TTN (NM_133378.1,22972-22990).
cactactggaaatcctttt

SEQ ID NO: 106540 - DNA, 19 bp, Homo sapiens
  siRNA target sequence for TTN (NM_133378.1,23064-23082).
cagacagcaaacatcacat

SEQ ID NO: 106541 - DNA, 19 bp, Homo sapiens
  siRNA target sequence for TTN (NM_133378.1,23075-23093).
catcacattacattcatca

SEQ ID NO: 106542 - DNA, 19 bp, Homo sapiens
  siRNA target sequence for TTN (NM_133378.1,23078-23096).
cacattacattcatcaata

SEQ ID NO: 106543 - DNA, 19 bp, Homo sapiens
  siRNA target sequence for TTN (NM_133378.1,23126-23144).
gaaatgagtgacaaaggat

SEQ ID NO: 106544 - DNA, 19 bp, Homo sapiens
  siRNA target sequence for TTN (NM_133378.1,23137-23155).
caaaggattatatagcttt

SEQ ID NO: 106545 - DNA, 19 bp, Homo sapiens
  siRNA target sequence for TTN (NM_133378.1,23142-23160).
gattatatagctttgaagt

SEQ ID NO: 106546 - DNA, 19 bp, Homo sapiens
  siRNA target sequence for TTN (NM_133378.1,23301-23319).
gctcagccccgatttcagt

SEQ ID NO: 106547 - DNA, 19 bp, Homo sapiens
  siRNA target sequence for TTN (NM_133378.1,23302-23320).
ctcagccccgatttcagtt

SEQ ID NO: 106548 - DNA, 19 bp, Homo sapiens
  siRNA target sequence for TTN (NM_133378.1,23323-23341).
ctggtttcaggatggaaat

SEQ ID NO: 106549 - DNA, 19 bp, Homo sapiens
  siRNA target sequence for TTN (NM_133378.1,23332-23350).
ggatggaaatgagattgtt

SEQ ID NO: 106550 - DNA, 19 bp, Homo sapiens
  siRNA target sequence for TTN (NM_133378.1,23370-23388).
ccagcttttcggaaaacgt

SEQ ID NO: 106551 - DNA, 19 bp, Homo sapiens
  siRNA target sequence for TTN (NM_133378.1,23379-23397).
cggaaaacgtctgtacttt

SEQ ID NO: 106552 - DNA, 19 bp, Homo sapiens
  siRNA target sequence for TTN (NM_133378.1,23418-23436).
cctccgacacaggcatata

SEQ ID NO: 106553 - DNA, 19 bp, Homo sapiens
  siRNA target sequence for TTN (NM_133378.1,23718-23736).
cttgcctcgttacaaatga

SEQ ID NO: 106554 - DNA, 19 bp, Homo sapiens
  siRNA target sequence for TTN (NM_133378.1,23751-23769).
cctgtaccacacatctttt

SEQ ID NO: 106555 - DNA, 19 bp, Homo sapiens
  siRNA target sequence for TTN (NM_133378.1,23752-23770).
ctgtaccacacatcttttt

SEQ ID NO: 106556 - DNA, 19 bp, Homo sapiens
  siRNA target sequence for TTN (NM_133378.1,23777-23795).
gaaccagccacctttgtga

SEQ ID NO: 106557 - DNA, 19 bp, Homo sapiens
  siRNA target sequence for TTN (NM_133378.1,23780-23798).
ccagccacctttgtgaaaa

SEQ ID NO: 106558 - DNA, 19 bp, Homo sapiens
  siRNA target sequence for TTN (NM_133378.1,23783-23801).
gccacctttgtgaaaagat

SEQ ID NO: 106559 - DNA, 19 bp, Homo sapiens
  siRNA target sequence for TTN (NM_133378.1,23784-23802).
ccacctttgtgaaaagatt

SEQ ID NO: 106560 - DNA, 19 bp, Homo sapiens
  siRNA target sequence for TTN (NM_133378.1,23821-23839).
gacaggaagccccatagtt

SEQ ID NO: 106561 - DNA, 19 bp, Homo sapiens
  siRNA target sequence for TTN (NM_133378.1,23837-23855).
gttctcgaggccacataca

SEQ ID NO: 106562 - DNA, 19 bp, Homo sapiens
  siRNA target sequence for TTN (NM_133378.1,23883-23901).
ggataaaggacgagtatct

SEQ ID NO: 106563 - DNA, 19 bp, Homo sapiens
  siRNA target sequence for TTN (NM_133378.1,23884-23902).
gataaaggacgagtatctt

SEQ ID NO: 106564 - DNA, 19 bp, Homo sapiens
  siRNA target sequence for TTN (NM_133378.1,23890-23908).
ggacgagtatcttatttca

SEQ ID NO: 106565 - DNA, 19 bp, Homo sapiens
  siRNA target sequence for TTN (NM_133378.1,23893-23911).
cgagtatcttatttcacaa

SEQ ID NO: 106566 - DNA, 19 bp, Homo sapiens
  siRNA target sequence for TTN (NM_133378.1,23946-23964).
ctaccatactggaaattct

SEQ ID NO: 106567 - DNA, 19 bp, Homo sapiens
  siRNA target sequence for TTN (NM_133378.1,23949-23967).
ccatactggaaattcttga

SEQ ID NO: 106568 - DNA, 19 bp, Homo sapiens
  siRNA target sequence for TTN (NM_133378.1,23968-23986).
gagcacaatagaggattat

SEQ ID NO: 106569 - DNA, 19 bp, Homo sapiens
  siRNA target sequence for TTN (NM_133378.1,23971-23989).
cacaatagaggattatgca

SEQ ID NO: 106570 - DNA, 19 bp, Homo sapiens
  siRNA target sequence for TTN (NM_133378.1,23992-24010).
gtacagctgcctgatagaa

SEQ ID NO: 106571 - DNA, 19 bp, Homo sapiens
  siRNA target sequence for TTN (NM_133378.1,23997-24015).
gctgcctgatagaaaatga

SEQ ID NO: 106572 - DNA, 19 bp, Homo sapiens
  siRNA target sequence for TTN (NM_133378.1,24016-24034).
ggctggtcaagatatctgt

SEQ ID NO: 106573 - DNA, 19 bp, Homo sapiens
  siRNA target sequence for TTN (NM_133378.1,24039-24057).
ctctggtgtctgtcttaga

SEQ ID NO: 106574 - DNA, 19 bp, Homo sapiens
  siRNA target sequence for TTN (NM_133378.1,24052-24070).
cttagaaccaccgtacttt

SEQ ID NO: 106575 - DNA, 19 bp, Homo sapiens
  siRNA target sequence for TTN (NM_133378.1,24114-24132).
caactttacagtgtaaagt

SEQ ID NO: 106576 - DNA, 19 bp, Homo sapiens
  siRNA target sequence for TTN (NM_133378.1,24162-24180).
ggtataaagaacacacaaa

SEQ ID NO: 106577 - DNA, 19 bp, Homo sapiens
  siRNA target sequence for TTN (NM_133378.1,24189-24207).
cagctcctgcatataaaat

SEQ ID NO: 106578 - DNA, 19 bp, Homo sapiens
  siRNA target sequence for TTN (NM_133378.1,24208-24226).
gcaattcaaaaataacgtt

SEQ ID NO: 106579 - DNA, 19 bp, Homo sapiens
  siRNA target sequence for TTN (NM_133378.1,24227-24245).
gcttccttagtaatcaaca

SEQ ID NO: 106580 - DNA, 19 bp, Homo sapiens
  siRNA target sequence for TTN (NM_133378.1,24228-24246).
cttccttagtaatcaacaa

SEQ ID NO: 106581 - DNA, 19 bp, Homo sapiens
  siRNA target sequence for TTN (NM_133378.1,24231-24249).
ccttagtaatcaacaaagt

SEQ ID NO: 106582 - DNA, 19 bp, Homo sapiens
  siRNA target sequence for TTN (NM_133378.1,24482-24500).
gctaatttgcagacatctt

SEQ ID NO: 106583 - DNA, 19 bp, Homo sapiens
  siRNA target sequence for TTN (NM_133378.1,24490-24508).
gcagacatcttttgttcat

SEQ ID NO: 106584 - DNA, 19 bp, Homo sapiens
  siRNA target sequence for TTN (NM_133378.1,24495-24513).
catcttttgttcataatgt

SEQ ID NO: 106585 - DNA, 19 bp, Homo sapiens
  siRNA target sequence for TTN (NM_133378.1,24546-24564).
gccacatagggcagtataa

SEQ ID NO: 106586 - DNA, 19 bp, Homo sapiens
  siRNA target sequence for TTN (NM_133378.1,24547-24565).
ccacatagggcagtataat

SEQ ID NO: 106587 - DNA, 19 bp, Homo sapiens
  siRNA target sequence for TTN (NM_133378.1,24548-24566).
cacatagggcagtataatt

SEQ ID NO: 106588 - DNA, 19 bp, Homo sapiens
  siRNA target sequence for TTN (NM_133378.1,24634-24652).
gcctcctttctttgatcta

SEQ ID NO: 106589 - DNA, 19 bp, Homo sapiens
  siRNA target sequence for TTN (NM_133378.1,24635-24653).
cctcctttctttgatctaa

SEQ ID NO: 106590 - DNA, 19 bp, Homo sapiens
  siRNA target sequence for TTN (NM_133378.1,24636-24654).
ctcctttctttgatctaaa

SEQ ID NO: 106591 - DNA, 19 bp, Homo sapiens
  siRNA target sequence for TTN (NM_133378.1,24680-24698).
ggagaaagtggtactttta

SEQ ID NO: 106592 - DNA, 19 bp, Homo sapiens
  siRNA target sequence for TTN (NM_133378.1,24711-24729).
ctgggactgcaccaatcaa

SEQ ID NO: 106593 - DNA, 19 bp, Homo sapiens
  siRNA target sequence for TTN (NM_133378.1,24719-24737).
gcaccaatcaaaatcactt

SEQ ID NO: 106594 - DNA, 19 bp, Homo sapiens
  siRNA target sequence for TTN (NM_133378.1,24765-24783).
ctggaggcaactacaagat

SEQ ID NO: 106595 - DNA, 19 bp, Homo sapiens
  siRNA target sequence for TTN (NM_133378.1,24807-24825).
ctctgacagttctcaaagt

SEQ ID NO: 106596 - DNA, 19 bp, Homo sapiens
  siRNA target sequence for TTN (NM_133378.1,24934-24952).
gctagaaccttcaagaatt

SEQ ID NO: 106597 - DNA, 19 bp, Homo sapiens
  siRNA target sequence for TTN (NM_133378.1,24938-24956).
gaaccttcaagaattgtga

SEQ ID NO: 106598 - DNA, 19 bp, Homo sapiens
  siRNA target sequence for TTN (NM_133378.1,24942-24960).
cttcaagaattgtgaaaca

SEQ ID NO: 106599 - DNA, 19 bp, Homo sapiens
  siRNA target sequence for TTN (NM_133378.1,24965-24983).
gaattcacaaggtatgaat

SEQ ID NO: 106600 - DNA, 19 bp, Homo sapiens
  siRNA target sequence for TTN (NM_133378.1,24970-24988).
cacaaggtatgaatgcaaa

SEQ ID NO: 106601 - DNA, 19 bp, Homo sapiens
  siRNA target sequence for TTN (NM_133378.1,25099-25117).
gcacaatctcagtgttgaa

SEQ ID NO: 106602 - DNA, 19 bp, Homo sapiens
  siRNA target sequence for TTN (NM_133378.1,25168-25186).
cagcagcacatccttaaaa

SEQ ID NO: 106603 - DNA, 19 bp, Homo sapiens
  siRNA target sequence for TTN (NM_133378.1,25170-25188).
gcagcacatccttaaaagt

SEQ ID NO: 106604 - DNA, 19 bp, Homo sapiens
  siRNA target sequence for TTN (NM_133378.1,25280-25298).
cccccatttcacgtttctt

SEQ ID NO: 106605 - DNA, 19 bp, Homo sapiens
  siRNA target sequence for TTN (NM_133378.1,25323-25341).
ggagcggcaagaagtacaa

SEQ ID NO: 106606 - DNA, 19 bp, Homo sapiens
  siRNA target sequence for TTN (NM_133378.1,25329-25347).
gcaagaagtacaagataat

SEQ ID NO: 106607 - DNA, 19 bp, Homo sapiens
  siRNA target sequence for TTN (NM_133378.1,25416-25434).
gtaaagccacaaatgatgt

SEQ ID NO: 106608 - DNA, 19 bp, Homo sapiens
  siRNA target sequence for TTN (NM_133378.1,25509-25527).
ctactgtcgttggtaaaga

SEQ ID NO: 106609 - DNA, 19 bp, Homo sapiens
  siRNA target sequence for TTN (NM_133378.1,25512-25530).
ctgtcgttggtaaagaagt

SEQ ID NO: 106610 - DNA, 19 bp, Homo sapiens
  siRNA target sequence for TTN (NM_133378.1,25554-25572).
gcgctgaacccatttcagt

SEQ ID NO: 106611 - DNA, 19 bp, Homo sapiens
  siRNA target sequence for TTN (NM_133378.1,25586-25604).
gataagggagaaatcgtta

SEQ ID NO: 106612 - DNA, 19 bp, Homo sapiens
  siRNA target sequence for TTN (NM_133378.1,25642-25660).
cattgcaaccttacagttt

SEQ ID NO: 106613 - DNA, 19 bp, Homo sapiens
  siRNA target sequence for TTN (NM_133378.1,25676-25694).
gccaatgctggaaaataca

SEQ ID NO: 106614 - DNA, 19 bp, Homo sapiens
  siRNA target sequence for TTN (NM_133378.1,25695-25713).
cttgtcagatcaaaaacga

SEQ ID NO: 106615 - DNA, 19 bp, Homo sapiens
  siRNA target sequence for TTN (NM_133378.1,25753-25771).
cgagcctgcaacaattgta

SEQ ID NO: 106616 - DNA, 19 bp, Homo sapiens
  siRNA target sequence for TTN (NM_133378.1,25756-25774).
gcctgcaacaattgtagaa

SEQ ID NO: 106617 - DNA, 19 bp, Homo sapiens
  siRNA target sequence for TTN (NM_133378.1,25777-25795).
gccagaatccataaaagtt

SEQ ID NO: 106618 - DNA, 19 bp, Homo sapiens
  siRNA target sequence for TTN (NM_133378.1,25778-25796).
ccagaatccataaaagtta

SEQ ID NO: 106619 - DNA, 19 bp, Homo sapiens
  siRNA target sequence for TTN (NM_133378.1,25839-25857).
cccctgaactcagtactaa

SEQ ID NO: 106620 - DNA, 19 bp, Homo sapiens
  siRNA target sequence for TTN (NM_133378.1,25841-25859).
cctgaactcagtactaagt

SEQ ID NO: 106621 - DNA, 19 bp, Homo sapiens
  siRNA target sequence for TTN (NM_133378.1,25922-25940).
gtatccggccttaagatca

SEQ ID NO: 106622 - DNA, 19 bp, Homo sapiens
  siRNA target sequence for TTN (NM_133378.1,25926-25944).
ccggccttaagatcatcaa

SEQ ID NO: 106623 - DNA, 19 bp, Homo sapiens
  siRNA target sequence for TTN (NM_133378.1,25927-25945).
cggccttaagatcatcaat

SEQ ID NO: 106624 - DNA, 19 bp, Homo sapiens
  siRNA target sequence for TTN (NM_133378.1,26091-26109).
gctcctcagttgtaatgga

SEQ ID NO: 106625 - DNA, 19 bp, Homo sapiens
  siRNA target sequence for TTN (NM_133378.1,26097-26115).
cagttgtaatggagtgtaa

SEQ ID NO: 106626 - DNA, 19 bp, Homo sapiens
  siRNA target sequence for TTN (NM_133378.1,26189-26207).
cagaccaccctgacagata

SEQ ID NO: 106627 - DNA, 19 bp, Homo sapiens
  siRNA target sequence for TTN (NM_133378.1,26194-26212).
caccctgacagataatact

SEQ ID NO: 106628 - DNA, 19 bp, Homo sapiens
  siRNA target sequence for TTN (NM_133378.1,26262-26280).
catgtatagctactaatat

SEQ ID NO: 106629 - DNA, 19 bp, Homo sapiens
  siRNA target sequence for TTN (NM_133378.1,26369-26387).
gggaccaatgtaactttca

SEQ ID NO: 106630 - DNA, 19 bp, Homo sapiens
  siRNA target sequence for TTN (NM_133378.1,26371-26389).
gaccaatgtaactttcaca

SEQ ID NO: 106631 - DNA, 19 bp, Homo sapiens
  siRNA target sequence for TTN (NM_133378.1,26473-26491).
gtctttggaggattcagtt

SEQ ID NO: 106632 - DNA, 19 bp, Homo sapiens
  siRNA target sequence for TTN (NM_133378.1,26501-26519).
gagttgttcgatgtagata

SEQ ID NO: 106633 - DNA, 19 bp, Homo sapiens
  siRNA target sequence for TTN (NM_133378.1,26503-26521).
gttgttcgatgtagataca

SEQ ID NO: 106634 - DNA, 19 bp, Homo sapiens
  siRNA target sequence for TTN (NM_133378.1,26506-26524).
gttcgatgtagatacatca

SEQ ID NO: 106635 - DNA, 19 bp, Homo sapiens
  siRNA target sequence for TTN (NM_133378.1,26509-26527).
cgatgtagatacatcacaa

SEQ ID NO: 106636 - DNA, 19 bp, Homo sapiens
  siRNA target sequence for TTN (NM_133378.1,26510-26528).
gatgtagatacatcacaaa

SEQ ID NO: 106637 - DNA, 19 bp, Homo sapiens
  siRNA target sequence for TTN (NM_133378.1,26520-26538).
catcacaaagtggagaata

SEQ ID NO: 106638 - DNA, 19 bp, Homo sapiens
  siRNA target sequence for TTN (NM_133378.1,26534-26552).
gaatatacttgcatagtta

SEQ ID NO: 106639 - DNA, 19 bp, Homo sapiens
  siRNA target sequence for TTN (NM_133378.1,26569-26587).
ggcttcttgtacaacacat

SEQ ID NO: 106640 - DNA, 19 bp, Homo sapiens
  siRNA target sequence for TTN (NM_133378.1,26577-26595).
gtacaacacatctctacat

SEQ ID NO: 106641 - DNA, 19 bp, Homo sapiens
  siRNA target sequence for TTN (NM_133378.1,26600-26618).
gccccagccaaatttgtga

SEQ ID NO: 106642 - DNA, 19 bp, Homo sapiens
  siRNA target sequence for TTN (NM_133378.1,26662-26680).
cctagagggtacattcact

SEQ ID NO: 106643 - DNA, 19 bp, Homo sapiens
  siRNA target sequence for TTN (NM_133378.1,26738-26756).
cagaggtgtaatataacta

SEQ ID NO: 106644 - DNA, 19 bp, Homo sapiens
  siRNA target sequence for TTN (NM_133378.1,26859-26877).
cagcacaaatactcatact

SEQ ID NO: 106645 - DNA, 19 bp, Homo sapiens
  siRNA target sequence for TTN (NM_133378.1,26862-26880).
cacaaatactcatactaga

SEQ ID NO: 106646 - DNA, 19 bp, Homo sapiens
  siRNA target sequence for TTN (NM_133378.1,26879-26897).
gaaccaccgtattttgtca

SEQ ID NO: 106647 - DNA, 19 bp, Homo sapiens
  siRNA target sequence for TTN (NM_133378.1,27009-27027).
gacccactacgacttacaa

SEQ ID NO: 106648 - DNA, 19 bp, Homo sapiens
  siRNA target sequence for TTN (NM_133378.1,27011-27029).
cccactacgacttacaaaa

SEQ ID NO: 106649 - DNA, 19 bp, Homo sapiens
  siRNA target sequence for TTN (NM_133378.1,27018-27036).
cgacttacaaaatgcattt

SEQ ID NO: 106650 - DNA, 19 bp, Homo sapiens
  siRNA target sequence for TTN (NM_133378.1,27150-27168).
ccgttcaagagcaaaaact

SEQ ID NO: 106651 - DNA, 19 bp, Homo sapiens
  siRNA target sequence for TTN (NM_133378.1,27220-27238).
gccagttgtttttgattgt

SEQ ID NO: 106652 - DNA, 19 bp, Homo sapiens
  siRNA target sequence for TTN (NM_133378.1,27262-27280).
ctccgtgtcttggtataaa

SEQ ID NO: 106653 - DNA, 19 bp, Homo sapiens
  siRNA target sequence for TTN (NM_133378.1,27304-27322).
cccaaatgtacaaacatca

SEQ ID NO: 106654 - DNA, 19 bp, Homo sapiens
  siRNA target sequence for TTN (NM_133378.1,27534-27552).
cgggcacacaaccgataaa

SEQ ID NO: 106655 - DNA, 19 bp, Homo sapiens
  siRNA target sequence for TTN (NM_133378.1,27537-27555).
gcacacaaccgataaaggt

SEQ ID NO: 106656 - DNA, 19 bp, Homo sapiens
  siRNA target sequence for TTN (NM_133378.1,27590-27608).
ggcggaaagtaccagatta

SEQ ID NO: 106657 - DNA, 19 bp, Homo sapiens
  siRNA target sequence for TTN (NM_133378.1,27592-27610).
cggaaagtaccagattagt

SEQ ID NO: 106658 - DNA, 19 bp, Homo sapiens
  siRNA target sequence for TTN (NM_133378.1,27594-27612).
gaaagtaccagattagtta

SEQ ID NO: 106659 - DNA, 19 bp, Homo sapiens
  siRNA target sequence for TTN (NM_133378.1,27675-27693).
cctgctatgctgtgaatga

SEQ ID NO: 106660 - DNA, 19 bp, Homo sapiens
  siRNA target sequence for TTN (NM_133378.1,27738-27756).
ggctcatcccaccaagttt

SEQ ID NO: 106661 - DNA, 19 bp, Homo sapiens
  siRNA target sequence for TTN (NM_133378.1,27745-27763).
cccaccaagtttcactaaa

SEQ ID NO: 106662 - DNA, 19 bp, Homo sapiens
  siRNA target sequence for TTN (NM_133378.1,27746-27764).
ccaccaagtttcactaaaa

SEQ ID NO: 106663 - DNA, 19 bp, Homo sapiens
  siRNA target sequence for TTN (NM_133378.1,27769-27787).
ctcagagacagtagaagaa

SEQ ID NO: 106664 - DNA, 19 bp, Homo sapiens
  siRNA target sequence for TTN (NM_133378.1,27823-27841).
ggctggttcccaacctata

SEQ ID NO: 106665 - DNA, 19 bp, Homo sapiens
  siRNA target sequence for TTN (NM_133378.1,27824-27842).
gctggttcccaacctataa

SEQ ID NO: 106666 - DNA, 19 bp, Homo sapiens
  siRNA target sequence for TTN (NM_133378.1,27852-27870).
ggtacaaaaataatataga

SEQ ID NO: 106667 - DNA, 19 bp, Homo sapiens
  siRNA target sequence for TTN (NM_133378.1,27878-27896).
ccaacttctaactgtgaaa

SEQ ID NO: 106668 - DNA, 19 bp, Homo sapiens
  siRNA target sequence for TTN (NM_133378.1,27950-27968).
gacgctggtttgtacacat

SEQ ID NO: 106669 - DNA, 19 bp, Homo sapiens
  siRNA target sequence for TTN (NM_133378.1,27995-28013).
gctctgtgcacgtcttcaa

SEQ ID NO: 106670 - DNA, 19 bp, Homo sapiens
  siRNA target sequence for TTN (NM_133378.1,28005-28023).
cgtcttcaatcgtcatcaa

SEQ ID NO: 106671 - DNA, 19 bp, Homo sapiens
  siRNA target sequence for TTN (NM_133378.1,28008-28026).
cttcaatcgtcatcaaaga

SEQ ID NO: 106672 - DNA, 19 bp, Homo sapiens
  siRNA target sequence for TTN (NM_133378.1,28029-28047).
ctaagaagccacctgtatt

SEQ ID NO: 106673 - DNA, 19 bp, Homo sapiens
  siRNA target sequence for TTN (NM_133378.1,28116-28134).
gatctgagccaattaggat

SEQ ID NO: 106674 - DNA, 19 bp, Homo sapiens
  siRNA target sequence for TTN (NM_133378.1,28144-28162).
gaaggctggcagggaaata

SEQ ID NO: 106675 - DNA, 19 bp, Homo sapiens
  siRNA target sequence for TTN (NM_133378.1,28236-28254).
cagattcgggagattatgt

SEQ ID NO: 106676 - DNA, 19 bp, Homo sapiens
  siRNA target sequence for TTN (NM_133378.1,28242-28260).
cgggagattatgtgtgtaa

SEQ ID NO: 106677 - DNA, 19 bp, Homo sapiens
  siRNA target sequence for TTN (NM_133378.1,28277-28295).
ggaagtgacactaccaaat

SEQ ID NO: 106678 - DNA, 19 bp, Homo sapiens
  siRNA target sequence for TTN (NM_133378.1,28389-28407).
gtatcagagtcgtagaaaa

SEQ ID NO: 106679 - DNA, 19 bp, Homo sapiens
  siRNA target sequence for TTN (NM_133378.1,28416-28434).
cgaccttcattgcaaaagt

SEQ ID NO: 106680 - DNA, 19 bp, Homo sapiens
  siRNA target sequence for TTN (NM_133378.1,28417-28435).
gaccttcattgcaaaagtt

SEQ ID NO: 106681 - DNA, 19 bp, Homo sapiens
  siRNA target sequence for TTN (NM_133378.1,28442-28460).
gacccaatcccaaatgtta

SEQ ID NO: 106682 - DNA, 19 bp, Homo sapiens
  siRNA target sequence for TTN (NM_133378.1,28543-28561).
gattagggacaccacaaaa

SEQ ID NO: 106683 - DNA, 19 bp, Homo sapiens
  siRNA target sequence for TTN (NM_133378.1,28581-28599).
gatgcgtggcatttaacga

SEQ ID NO: 106684 - DNA, 19 bp, Homo sapiens
  siRNA target sequence for TTN (NM_133378.1,28597-28615).
cgaacatggtgaaattgaa

SEQ ID NO: 106685 - DNA, 19 bp, Homo sapiens
  siRNA target sequence for TTN (NM_133378.1,28687-28705).
gaaaaagactccaatctta

SEQ ID NO: 106686 - DNA, 19 bp, Homo sapiens
  siRNA target sequence for TTN (NM_133378.1,28789-28807).
ccgcatgtatggaatcact

SEQ ID NO: 106687 - DNA, 19 bp, Homo sapiens
  siRNA target sequence for TTN (NM_133378.1,28866-28884).
cacatagactggaaattga

SEQ ID NO: 106688 - DNA, 19 bp, Homo sapiens
  siRNA target sequence for TTN (NM_133378.1,28905-28923).
gggacgaaaaggaatttga

SEQ ID NO: 106689 - DNA, 19 bp, Homo sapiens
  siRNA target sequence for TTN (NM_133378.1,29021-29039).
gctgtctttgaaattgaca

SEQ ID NO: 106690 - DNA, 19 bp, Homo sapiens
  siRNA target sequence for TTN (NM_133378.1,29171-29189).
gaccagggcaattatcgat

SEQ ID NO: 106691 - DNA, 19 bp, Homo sapiens
  siRNA target sequence for TTN (NM_133378.1,29206-29224).
catcgctagcgctaaacta

SEQ ID NO: 106692 - DNA, 19 bp, Homo sapiens
  siRNA target sequence for TTN (NM_133378.1,29209-29227).
cgctagcgctaaactaact

SEQ ID NO: 106693 - DNA, 19 bp, Homo sapiens
  siRNA target sequence for TTN (NM_133378.1,29211-29229).
ctagcgctaaactaactgt

SEQ ID NO: 106694 - DNA, 19 bp, Homo sapiens
  siRNA target sequence for TTN (NM_133378.1,29215-29233).
cgctaaactaactgtaatt

SEQ ID NO: 106695 - DNA, 19 bp, Homo sapiens
  siRNA target sequence for TTN (NM_133378.1,29217-29235).
ctaaactaactgtaattga

SEQ ID NO: 106696 - DNA, 19 bp, Homo sapiens
  siRNA target sequence for TTN (NM_133378.1,29301-29319).
gccaattttctgtaccaaa

SEQ ID NO: 106697 - DNA, 19 bp, Homo sapiens
  siRNA target sequence for TTN (NM_133378.1,29362-29380).
ccaaggtagacataaaaca

SEQ ID NO: 106698 - DNA, 19 bp, Homo sapiens
  siRNA target sequence for TTN (NM_133378.1,29438-29456).
ggtcagtacacctgcaaat

SEQ ID NO: 106699 - DNA, 19 bp, Homo sapiens
  siRNA target sequence for TTN (NM_133378.1,29492-29510).
gaagctgaaccaattcagt

SEQ ID NO: 106700 - DNA, 19 bp, Homo sapiens
  siRNA target sequence for TTN (NM_133378.1,29495-29513).
gctgaaccaattcagttta

SEQ ID NO: 106701 - DNA, 19 bp, Homo sapiens
  siRNA target sequence for TTN (NM_133378.1,29514-29532).
caaagcgcatacagaacat

SEQ ID NO: 106702 - DNA, 19 bp, Homo sapiens
  siRNA target sequence for TTN (NM_133378.1,29549-29567).
cagtctgccacctttgagt

SEQ ID NO: 106703 - DNA, 19 bp, Homo sapiens
  siRNA target sequence for TTN (NM_133378.1,29566-29584).
gtgtgaagtgtcctttgat

SEQ ID NO: 106704 - DNA, 19 bp, Homo sapiens
  siRNA target sequence for TTN (NM_133378.1,29657-29675).
ggccgctgccattatatga

SEQ ID NO: 106705 - DNA, 19 bp, Homo sapiens
  siRNA target sequence for TTN (NM_133378.1,29767-29785).
gtacctaacgacgaaagaa

SEQ ID NO: 106706 - DNA, 19 bp, Homo sapiens
  siRNA target sequence for TTN (NM_133378.1,29771-29789).
ctaacgacgaaagaaatca

SEQ ID NO: 106707 - DNA, 19 bp, Homo sapiens
  siRNA target sequence for TTN (NM_133378.1,29797-29815).
gctgaagcctcctgatatt

SEQ ID NO: 106708 - DNA, 19 bp, Homo sapiens
  siRNA target sequence for TTN (NM_133378.1,29817-29835).
ctgactccagagttccaat

SEQ ID NO: 106709 - DNA, 19 bp, Homo sapiens
  siRNA target sequence for TTN (NM_133378.1,29929-29947).
gaaaccaccaccaaaacgt

SEQ ID NO: 106710 - DNA, 19 bp, Homo sapiens
  siRNA target sequence for TTN (NM_133378.1,29945-29963).
cgtattgaagttaccaaaa

SEQ ID NO: 106711 - DNA, 19 bp, Homo sapiens
  siRNA target sequence for TTN (NM_133378.1,30013-30031).
gacaccacgtgaagagatt

SEQ ID NO: 106712 - DNA, 19 bp, Homo sapiens
  siRNA target sequence for TTN (NM_133378.1,30018-30036).
cacgtgaagagattgtcaa

SEQ ID NO: 106713 - DNA, 19 bp, Homo sapiens
  siRNA target sequence for TTN (NM_133378.1,30021-30039).
gtgaagagattgtcaagaa

SEQ ID NO: 106714 - DNA, 19 bp, Homo sapiens
  siRNA target sequence for TTN (NM_133378.1,30085-30103).
cattgatgtatcctctaaa

SEQ ID NO: 106715 - DNA, 19 bp, Homo sapiens
  siRNA target sequence for TTN (NM_133378.1,30196-30214).
ggagaagagagtcttcatt

SEQ ID NO: 106716 - DNA, 19 bp, Homo sapiens
  siRNA target sequence for TTN (NM_133378.1,30202-30220).
gagagtcttcattgaatct

SEQ ID NO: 106717 - DNA, 19 bp, Homo sapiens
  siRNA target sequence for TTN (NM_133378.1,30208-30226).
cttcattgaatctttcgaa

SEQ ID NO: 106718 - DNA, 19 bp, Homo sapiens
  siRNA target sequence for TTN (NM_133378.1,30219-30237).
ctttcgaagaaccttatga

SEQ ID NO: 106719 - DNA, 19 bp, Homo sapiens
  siRNA target sequence for TTN (NM_133378.1,30244-30262).
ggaggtagaaccatacaca

SEQ ID NO: 106720 - DNA, 19 bp, Homo sapiens
  siRNA target sequence for TTN (NM_133378.1,30259-30277).
cacagagccatttgaacaa

SEQ ID NO: 106721 - DNA, 19 bp, Homo sapiens
  siRNA target sequence for TTN (NM_133378.1,30304-30322).
ctatgaagagattaaggta

SEQ ID NO: 106722 - DNA, 19 bp, Homo sapiens
  siRNA target sequence for TTN (NM_133378.1,30421-30439).
gtgggaagaggcttaccaa

SEQ ID NO: 106723 - DNA, 19 bp, Homo sapiens
  siRNA target sequence for TTN (NM_133378.1,30466-30484).
ggaggtctatgaagaatca

SEQ ID NO: 106724 - DNA, 19 bp, Homo sapiens
  siRNA target sequence for TTN (NM_133378.1,30469-30487).
ggtctatgaagaatcacat

SEQ ID NO: 106725 - DNA, 19 bp, Homo sapiens
  siRNA target sequence for TTN (NM_133378.1,30528-30546).
caccacctcctaaagttat

SEQ ID NO: 106726 - DNA, 19 bp, Homo sapiens
  siRNA target sequence for TTN (NM_133378.1,30530-30548).
ccacctcctaaagttataa

SEQ ID NO: 106727 - DNA, 19 bp, Homo sapiens
  siRNA target sequence for TTN (NM_133378.1,30533-30551).
cctcctaaagttataaaga

SEQ ID NO: 106728 - DNA, 19 bp, Homo sapiens
  siRNA target sequence for TTN (NM_133378.1,30534-30552).
ctcctaaagttataaagaa

SEQ ID NO: 106729 - DNA, 19 bp, Homo sapiens
  siRNA target sequence for TTN (NM_133378.1,30668-30686).
ccagtacaggaagaagtta

SEQ ID NO: 106730 - DNA, 19 bp, Homo sapiens
  siRNA target sequence for TTN (NM_133378.1,30669-30687).
cagtacaggaagaagttat

SEQ ID NO: 106731 - DNA, 19 bp, Homo sapiens
  siRNA target sequence for TTN (NM_133378.1,30698-30716).
gtaccagctgtgcatacaa

SEQ ID NO: 106732 - DNA, 19 bp, Homo sapiens
  siRNA target sequence for TTN (NM_133378.1,30710-30728).
catacaaagaagatggtta

SEQ ID NO: 106733 - DNA, 19 bp, Homo sapiens
  siRNA target sequence for TTN (NM_133378.1,30783-30801).
cagtccccgaggtacaaaa

SEQ ID NO: 106734 - DNA, 19 bp, Homo sapiens
  siRNA target sequence for TTN (NM_133378.1,30787-30805).
ccccgaggtacaaaaggaa

SEQ ID NO: 106735 - DNA, 19 bp, Homo sapiens
  siRNA target sequence for TTN (NM_133378.1,30847-30865).
ggttgaaccaccacctaaa

SEQ ID NO: 106736 - DNA, 19 bp, Homo sapiens
  siRNA target sequence for TTN (NM_133378.1,31161-31179).
ccattgtaactcaaagaga

SEQ ID NO: 106737 - DNA, 19 bp, Homo sapiens
  siRNA target sequence for TTN (NM_133378.1,31388-31406).
gttgtagaagaaaagagat

SEQ ID NO: 106738 - DNA, 19 bp, Homo sapiens
  siRNA target sequence for TTN (NM_133378.1,31413-31431).
ctgaagaaaaactatcctt

SEQ ID NO: 106739 - DNA, 19 bp, Homo sapiens
  siRNA target sequence for TTN (NM_133378.1,31429-31447).
cttcgcagttcctcaaaga

SEQ ID NO: 106740 - DNA, 19 bp, Homo sapiens
  siRNA target sequence for TTN (NM_133378.1,31454-31472).
gtcacgcggcacgaagtat

SEQ ID NO: 106741 - DNA, 19 bp, Homo sapiens
  siRNA target sequence for TTN (NM_133378.1,31456-31474).
cacgcggcacgaagtatct

SEQ ID NO: 106742 - DNA, 19 bp, Homo sapiens
  siRNA target sequence for TTN (NM_133378.1,31512-31530).
gtgtgtccatttcagttta

SEQ ID NO: 106743 - DNA, 19 bp, Homo sapiens
  siRNA target sequence for TTN (NM_133378.1,31616-31634).
gaaaagctgcacattattt

SEQ ID NO: 106744 - DNA, 19 bp, Homo sapiens
  siRNA target sequence for TTN (NM_133378.1,31622-31640).
ctgcacattatttctaaga

SEQ ID NO: 106745 - DNA, 19 bp, Homo sapiens
  siRNA target sequence for TTN (NM_133378.1,31624-31642).
gcacattatttctaagaga

SEQ ID NO: 106746 - DNA, 19 bp, Homo sapiens
  siRNA target sequence for TTN (NM_133378.1,31674-31692).
ggcaggagaagaaaattgt

SEQ ID NO: 106747 - DNA, 19 bp, Homo sapiens
  siRNA target sequence for TTN (NM_133378.1,31865-31883).
gttcctccaaaagtcatta

SEQ ID NO: 106748 - DNA, 19 bp, Homo sapiens
  siRNA target sequence for TTN (NM_133378.1,31868-31886).
cctccaaaagtcattaaga

SEQ ID NO: 106749 - DNA, 19 bp, Homo sapiens
  siRNA target sequence for TTN (NM_133378.1,31916-31934).
gagaggcacatgcaaatta

SEQ ID NO: 106750 - DNA, 19 bp, Homo sapiens
  siRNA target sequence for TTN (NM_133378.1,31973-31991).
gaggcgcctccaaaagcaa

SEQ ID NO: 106751 - DNA, 19 bp, Homo sapiens
  siRNA target sequence for TTN (NM_133378.1,32072-32090).
gctaaagtgactgaattca

SEQ ID NO: 106752 - DNA, 19 bp, Homo sapiens
  siRNA target sequence for TTN (NM_133378.1,32150-32168).
cccatcaaagaagtaacta

SEQ ID NO: 106753 - DNA, 19 bp, Homo sapiens
  siRNA target sequence for TTN (NM_133378.1,32177-32195).
gagaaagaaagggcttata

SEQ ID NO: 106754 - DNA, 19 bp, Homo sapiens
  siRNA target sequence for TTN (NM_133378.1,32217-32235).
cagtacaacgggaagaaga

SEQ ID NO: 106755 - DNA, 19 bp, Homo sapiens
  siRNA target sequence for TTN (NM_133378.1,32219-32237).
gtacaacgggaagaagaat

SEQ ID NO: 106756 - DNA, 19 bp, Homo sapiens
  siRNA target sequence for TTN (NM_133378.1,32278-32296).
gtatgaaccaacagaagaa

SEQ ID NO: 106757 - DNA, 19 bp, Homo sapiens
  siRNA target sequence for TTN (NM_133378.1,32317-32335).
cgaggagcgggagtatgaa

SEQ ID NO: 106758 - DNA, 19 bp, Homo sapiens
  siRNA target sequence for TTN (NM_133378.1,32323-32341).
gcgggagtatgaacgatat

SEQ ID NO: 106759 - DNA, 19 bp, Homo sapiens
  siRNA target sequence for TTN (NM_133378.1,32325-32343).
gggagtatgaacgatatga

SEQ ID NO: 106760 - DNA, 19 bp, Homo sapiens
  siRNA target sequence for TTN (NM_133378.1,32326-32344).
ggagtatgaacgatatgaa

SEQ ID NO: 106761 - DNA, 19 bp, Homo sapiens
  siRNA target sequence for TTN (NM_133378.1,32483-32501).
cccattcctaagaaactca

SEQ ID NO: 106762 - DNA, 19 bp, Homo sapiens
  siRNA target sequence for TTN (NM_133378.1,32593-32611).
gactgaacccgctgctaaa

SEQ ID NO: 106763 - DNA, 19 bp, Homo sapiens
  siRNA target sequence for TTN (NM_133378.1,32595-32613).
ctgaacccgctgctaaagt

SEQ ID NO: 106764 - DNA, 19 bp, Homo sapiens
  siRNA target sequence for TTN (NM_133378.1,32629-32647).
gagggttgtcgcagaagaa

SEQ ID NO: 106765 - DNA, 19 bp, Homo sapiens
  siRNA target sequence for TTN (NM_133378.1,32747-32765).
gtaacccatgtagaagaat

SEQ ID NO: 106766 - DNA, 19 bp, Homo sapiens
  siRNA target sequence for TTN (NM_133378.1,32751-32769).
cccatgtagaagaatatct

SEQ ID NO: 106767 - DNA, 19 bp, Homo sapiens
  siRNA target sequence for TTN (NM_133378.1,32835-32853).
cagtgataccagtcaaagt

SEQ ID NO: 106768 - DNA, 19 bp, Homo sapiens
  siRNA target sequence for TTN (NM_133378.1,32998-33016).
gcctccgccagcaaaagtt

SEQ ID NO: 106769 - DNA, 19 bp, Homo sapiens
  siRNA target sequence for TTN (NM_133378.1,33199-33217).
gaagctcatcccagaagaa

SEQ ID NO: 106770 - DNA, 19 bp, Homo sapiens
  siRNA target sequence for TTN (NM_133378.1,33225-33243).
caacacctgttccgaaaaa

SEQ ID NO: 106771 - DNA, 19 bp, Homo sapiens
  siRNA target sequence for TTN (NM_133378.1,33468-33486).
ctcccgaagaagaatatgt

SEQ ID NO: 106772 - DNA, 19 bp, Homo sapiens
  siRNA target sequence for TTN (NM_133378.1,33557-33575).
gcaccagtgcctgaaatta

SEQ ID NO: 106773 - DNA, 19 bp, Homo sapiens
  siRNA target sequence for TTN (NM_133378.1,33558-33576).
caccagtgcctgaaattaa

SEQ ID NO: 106774 - DNA, 19 bp, Homo sapiens
  siRNA target sequence for TTN (NM_133378.1,33560-33578).
ccagtgcctgaaattaaga

SEQ ID NO: 106775 - DNA, 19 bp, Homo sapiens
  siRNA target sequence for TTN (NM_133378.1,33561-33579).
cagtgcctgaaattaagaa

SEQ ID NO: 106776 - DNA, 19 bp, Homo sapiens
  siRNA target sequence for TTN (NM_133378.1,33672-33690).
gaatcattctccctaaaga

SEQ ID NO: 106777 - DNA, 19 bp, Homo sapiens
  siRNA target sequence for TTN (NM_133378.1,33843-33861).
cacctactcctgttcctaa

SEQ ID NO: 106778 - DNA, 19 bp, Homo sapiens
  siRNA target sequence for TTN (NM_133378.1,33876-33894).
caccagctaaagtgtcaaa

SEQ ID NO: 106779 - DNA, 19 bp, Homo sapiens
  siRNA target sequence for TTN (NM_133378.1,34035-34053).
gaactgtccttgaagaaaa

SEQ ID NO: 106780 - DNA, 19 bp, Homo sapiens
  siRNA target sequence for TTN (NM_133378.1,34065-34083).
ccttccgccaagaagtagt

SEQ ID NO: 106781 - DNA, 19 bp, Homo sapiens
  siRNA target sequence for TTN (NM_133378.1,34066-34084).
cttccgccaagaagtagta

SEQ ID NO: 106782 - DNA, 19 bp, Homo sapiens
  siRNA target sequence for TTN (NM_133378.1,34085-34103).
gtaaaagaaagactagaat

SEQ ID NO: 106783 - DNA, 19 bp, Homo sapiens
  siRNA target sequence for TTN (NM_133378.1,34182-34200).
gcgagtttcatgaagtaga

SEQ ID NO: 106784 - DNA, 19 bp, Homo sapiens
  siRNA target sequence for TTN (NM_133378.1,34183-34201).
cgagtttcatgaagtagaa

SEQ ID NO: 106785 - DNA, 19 bp, Homo sapiens
  siRNA target sequence for TTN (NM_133378.1,34259-34277).
catagggtaatagaagttt

SEQ ID NO: 106786 - DNA, 19 bp, Homo sapiens
  siRNA target sequence for TTN (NM_133378.1,34263-34281).
gggtaatagaagtttttga

SEQ ID NO: 106787 - DNA, 19 bp, Homo sapiens
  siRNA target sequence for TTN (NM_133378.1,34322-34340).
cctaaagggcctgagatat

SEQ ID NO: 106788 - DNA, 19 bp, Homo sapiens
  siRNA target sequence for TTN (NM_133378.1,34412-34430).
ccggaggtgcctaagaaaa

SEQ ID NO: 106789 - DNA, 19 bp, Homo sapiens
  siRNA target sequence for TTN (NM_133378.1,34413-34431).
cggaggtgcctaagaaaat

SEQ ID NO: 106790 - DNA, 19 bp, Homo sapiens
  siRNA target sequence for TTN (NM_133378.1,34470-34488).
gagttccaccaactaaagt

SEQ ID NO: 106791 - DNA, 19 bp, Homo sapiens
  siRNA target sequence for TTN (NM_133378.1,35083-35101).
gaccgtaccacctaagaaa

SEQ ID NO: 106792 - DNA, 19 bp, Homo sapiens
  siRNA target sequence for TTN (NM_133378.1,35124-35142).
ctgctgtcgttgccaaaaa

SEQ ID NO: 106793 - DNA, 19 bp, Homo sapiens
  siRNA target sequence for TTN (NM_133378.1,35601-35619).
ctgaacctgaaaaggttat

SEQ ID NO: 106794 - DNA, 19 bp, Homo sapiens
  siRNA target sequence for TTN (NM_133378.1,35667-35685).
cacctaaggaagatgtgaa

SEQ ID NO: 106795 - DNA, 19 bp, Homo sapiens
  siRNA target sequence for TTN (NM_133378.1,35687-35705).
gagaaaatattccaactta

SEQ ID NO: 106796 - DNA, 19 bp, Homo sapiens
  siRNA target sequence for TTN (NM_133378.1,35758-35776).
ggagcttacacctctgaaa

SEQ ID NO: 106797 - DNA, 19 bp, Homo sapiens
  siRNA target sequence for TTN (NM_133378.1,86116-86134).
gaagatggtgtgttcaagt

SEQ ID NO: 106798 - DNA, 19 bp, Homo sapiens
  siRNA target sequence for TTN (NM_133379.1,10626-10644).
cacgtgacgccttttcaga

SEQ ID NO: 106799 - DNA, 19 bp, Homo sapiens
  siRNA target sequence for TTN (NM_133379.1,10652-10670).
gacatagaccacaaatcca

SEQ ID NO: 106800 - DNA, 19 bp, Homo sapiens
  siRNA target sequence for TTN (NM_133379.1,10668-10686).
ccatggctgctaaaagata

SEQ ID NO: 106801 - DNA, 19 bp, Homo sapiens
  siRNA target sequence for TTN (NM_133379.1,10669-10687).
catggctgctaaaagatat

SEQ ID NO: 106802 - DNA, 19 bp, Homo sapiens
  siRNA target sequence for TTN (NM_133379.1,10774-10792).
gggtgaaccggttgttttt

SEQ ID NO: 106803 - DNA, 19 bp, Homo sapiens
  siRNA target sequence for TTN (NM_133379.1,10775-10793).
ggtgaaccggttgttttta

SEQ ID NO: 106804 - DNA, 19 bp, Homo sapiens
  siRNA target sequence for TTN (NM_133379.1,10778-10796).
gaaccggttgtttttacat

SEQ ID NO: 106805 - DNA, 19 bp, Homo sapiens
  siRNA target sequence for TTN (NM_133379.1,10781-10799).
ccggttgtttttacatgta

SEQ ID NO: 106806 - DNA, 19 bp, Homo sapiens
  siRNA target sequence for TTN (NM_133379.1,10783-10801).
ggttgtttttacatgtaga

SEQ ID NO: 106807 - DNA, 19 bp, Homo sapiens
  siRNA target sequence for TTN (NM_133379.1,10860-10878).
caggtcttcgtcggattat

SEQ ID NO: 106808 - DNA, 19 bp, Homo sapiens
  siRNA target sequence for TTN (NM_133379.1,10862-10880).
ggtcttcgtcggattataa

SEQ ID NO: 106809 - DNA, 19 bp, Homo sapiens
  siRNA target sequence for TTN (NM_133379.1,10863-10881).
gtcttcgtcggattataaa

SEQ ID NO: 106810 - DNA, 19 bp, Homo sapiens
  siRNA target sequence for TTN (NM_133379.1,10904-10922).
cactcttccagcttagaga

SEQ ID NO: 106811 - DNA, 19 bp, Homo sapiens
  siRNA target sequence for TTN (NM_133379.1,10943-10961).
gattctggaagttataggt

SEQ ID NO: 106812 - DNA, 19 bp, Homo sapiens
  siRNA target sequence for TTN (NM_133379.1,10953-10971).
gttataggttactagcaat

SEQ ID NO: 106813 - DNA, 19 bp, Homo sapiens
  siRNA target sequence for TTN (NM_133379.1,10960-10978).
gttactagcaattaatagt

SEQ ID NO: 106814 - DNA, 19 bp, Homo sapiens
  siRNA target sequence for TTN (NM_133379.1,10989-11007).
cagaatcaactgcatcatt

SEQ ID NO: 106815 - DNA, 19 bp, Homo sapiens
  siRNA target sequence for TTN (NM_133379.1,10998-11016).
ctgcatcattgcttgttat

SEQ ID NO: 106816 - DNA, 19 bp, Homo sapiens
  siRNA target sequence for TTN (NM_133379.1,11001-11019).
catcattgcttgttatcca

SEQ ID NO: 106817 - DNA, 19 bp, Homo sapiens
  siRNA target sequence for TTN (NM_133379.1,11119-11137).
ggttgacctgaggtttact

SEQ ID NO: 106818 - DNA, 19 bp, Homo sapiens
  siRNA target sequence for TTN (NM_133379.1,11216-11234).
gccaagaaaacagattaca

SEQ ID NO: 106819 - DNA, 19 bp, Homo sapiens
  siRNA target sequence for TTN (NM_133379.1,11321-11339).
gtgaagttgcaacgtttaa

SEQ ID NO: 106820 - DNA, 19 bp, Homo sapiens
  siRNA target sequence for TTN (NM_133379.1,11482-11500).
gtctgatctagctgaaagt

SEQ ID NO: 106821 - DNA, 19 bp, Homo sapiens
  siRNA target sequence for TTN (NM_133379.1,11520-11538).
ctgagagtattgtgcaaaa

SEQ ID NO: 106822 - DNA, 19 bp, Homo sapiens
  siRNA target sequence for TTN (NM_133379.1,11563-11581).
ggatcaaaatatagaatct

SEQ ID NO: 106823 - DNA, 19 bp, Homo sapiens
  siRNA target sequence for TTN (NM_133379.1,11591-11609).
cccacaagctttcaaacta

SEQ ID NO: 106824 - DNA, 19 bp, Homo sapiens
  siRNA target sequence for TTN (NM_133379.1,11593-11611).
cacaagctttcaaactatt

SEQ ID NO: 106825 - DNA, 19 bp, Homo sapiens
  siRNA target sequence for TTN (NM_133379.1,11649-11667).
gccaagaagcactggtaaa

SEQ ID NO: 106826 - DNA, 19 bp, Homo sapiens
  siRNA target sequence for TTN (NM_133379.1,11673-11691).
gtctaccaaaagaccattt

SEQ ID NO: 106827 - DNA, 19 bp, Homo sapiens
  siRNA target sequence for TTN (NM_133379.1,11771-11789).
gagtcatccacatatatca

SEQ ID NO: 106828 - DNA, 19 bp, Homo sapiens
  siRNA target sequence for TTN (NM_133379.1,11773-11791).
gtcatccacatatatcact

SEQ ID NO: 106829 - DNA, 19 bp, Homo sapiens
  siRNA target sequence for TTN (NM_133379.1,11778-11796).
ccacatatatcactaatgt

SEQ ID NO: 106830 - DNA, 19 bp, Homo sapiens
  siRNA target sequence for TTN (NM_133379.1,11858-11876).
gccagcgaatcttttggta

SEQ ID NO: 106831 - DNA, 19 bp, Homo sapiens
  siRNA target sequence for TTN (NM_133379.1,11863-11881).
cgaatcttttggtacactt

SEQ ID NO: 106832 - DNA, 19 bp, Homo sapiens
  siRNA target sequence for TTN (NM_133379.1,11958-11976).
cttctacacgaattgatga

SEQ ID NO: 106833 - DNA, 19 bp, Homo sapiens
  siRNA target sequence for TTN (NM_133379.1,11961-11979).
ctacacgaattgatgaatt

SEQ ID NO: 106834 - DNA, 19 bp, Homo sapiens
  siRNA target sequence for TTN (NM_133379.1,11964-11982).
cacgaattgatgaattcaa

SEQ ID NO: 106835 - DNA, 19 bp, Homo sapiens
  siRNA target sequence for TTN (NM_133379.1,11966-11984).
cgaattgatgaattcaaaa

SEQ ID NO: 106836 - DNA, 19 bp, Homo sapiens
  siRNA target sequence for TTN (NM_133379.1,12096-12114).
gtgacagttgtaattttgt

SEQ ID NO: 106837 - DNA, 19 bp, Homo sapiens
  siRNA target sequence for TTN (NM_133379.1,12098-12116).
gacagttgtaattttgtgt

SEQ ID NO: 106838 - DNA, 19 bp, Homo sapiens
  siRNA target sequence for TTN (NM_133379.1,12140-12158).
cctatagtgacgtggtata

SEQ ID NO: 106839 - DNA, 19 bp, Homo sapiens
  siRNA target sequence for TTN (NM_133379.1,12150-12168).
cgtggtataacaatgacat

SEQ ID NO: 106840 - DNA, 19 bp, Homo sapiens
  siRNA target sequence for TTN (NM_133379.1,12166-12184).
catgccaatcccacgtaat

SEQ ID NO: 106841 - DNA, 19 bp, Homo sapiens
  siRNA target sequence for TTN (NM_133379.1,12169-12187).
gccaatcccacgtaatcaa

SEQ ID NO: 106842 - DNA, 19 bp, Homo sapiens
  siRNA target sequence for TTN (NM_133379.1,12170-12188).
ccaatcccacgtaatcaaa

SEQ ID NO: 106843 - DNA, 19 bp, Homo sapiens
  siRNA target sequence for TTN (NM_133379.1,12171-12189).
caatcccacgtaatcaaaa

SEQ ID NO: 106844 - DNA, 19 bp, Homo sapiens
  siRNA target sequence for TTN (NM_133379.1,12175-12193).
cccacgtaatcaaaacttt

SEQ ID NO: 106845 - DNA, 19 bp, Homo sapiens
  siRNA target sequence for TTN (NM_133379.1,12176-12194).
ccacgtaatcaaaacttta

SEQ ID NO: 106846 - DNA, 19 bp, Homo sapiens
  siRNA target sequence for TTN (NM_133379.1,12177-12195).
cacgtaatcaaaactttat

SEQ ID NO: 106847 - DNA, 19 bp, Homo sapiens
  siRNA target sequence for TTN (NM_133379.1,12179-12197).
cgtaatcaaaactttatca

SEQ ID NO: 106848 - DNA, 19 bp, Homo sapiens
  siRNA target sequence for TTN (NM_133379.1,12200-12218).
cattcgttggaaaactatt

SEQ ID NO: 106849 - DNA, 19 bp, Homo sapiens
  siRNA target sequence for TTN (NM_133379.1,12204-12222).
cgttggaaaactattcaat

SEQ ID NO: 106850 - DNA, 19 bp, Homo sapiens
  siRNA target sequence for TTN (NM_133379.1,12248-12266).
cagaatgaaggttctatta

SEQ ID NO: 106851 - DNA, 19 bp, Homo sapiens
  siRNA target sequence for TTN (NM_133379.1,12270-12288).
gtgtgctatttaaccaata

SEQ ID NO: 106852 - DNA, 19 bp, Homo sapiens
  siRNA target sequence for TTN (NM_133379.1,12284-12302).
caatatggaacagtaaaaa

SEQ ID NO: 106853 - DNA, 19 bp, Homo sapiens
  siRNA target sequence for TTN (NM_133379.1,12451-12469).
gggccaaacaaatcttcat

SEQ ID NO: 106854 - DNA, 19 bp, Homo sapiens
  siRNA target sequence for TTN (NM_133379.1,12453-12471).
gccaaacaaatcttcattt

SEQ ID NO: 106855 - DNA, 19 bp, Homo sapiens
  siRNA target sequence for TTN (NM_133379.1,12558-12576).
ctatcccagaacaggataa

SEQ ID NO: 106856 - DNA, 19 bp, Homo sapiens
  siRNA target sequence for TTN (NM_133379.1,12604-12622).
ggagctggaacctaaagca

SEQ ID NO: 106857 - DNA, 19 bp, Homo sapiens
  siRNA target sequence for TTN (NM_133379.1,12665-12683).
gtatttttgtctgatatta

SEQ ID NO: 106858 - DNA, 19 bp, Homo sapiens
  siRNA target sequence for TTN (NM_133379.1,12673-12691).
gtctgatattactaatgaa

SEQ ID NO: 106859 - DNA, 19 bp, Homo sapiens
  siRNA target sequence for TTN (NM_133379.1,12732-12750).
gtagagaaggggattccat

SEQ ID NO: 106860 - DNA, 19 bp, Homo sapiens
  siRNA target sequence for TTN (NM_133379.1,12741-12759).
gggattccatcattcttga

SEQ ID NO: 106861 - DNA, 19 bp, Homo sapiens
  siRNA target sequence for TTN (NM_133379.1,12742-12760).
ggattccatcattcttgaa

SEQ ID NO: 106862 - DNA, 19 bp, Homo sapiens
  siRNA target sequence for TTN (NM_133379.1,12778-12796).
gccccagccagttgtaaca

SEQ ID NO: 106863 - DNA, 19 bp, Homo sapiens
  siRNA target sequence for TTN (NM_133379.1,12779-12797).
ccccagccagttgtaacat

SEQ ID NO: 106864 - DNA, 19 bp, Homo sapiens
  siRNA target sequence for TTN (NM_133379.1,12865-12883).
ccaattatatattaaggat

SEQ ID NO: 106865 - DNA, 19 bp, Homo sapiens
  siRNA target sequence for TTN (NM_133379.1,12937-12955).
ggcagttgaaagtgtttca

SEQ ID NO: 106866 - DNA, 19 bp, Homo sapiens
  siRNA target sequence for TTN (NM_133379.1,12967-12985).
ggagcctgtcacttataga

SEQ ID NO: 106867 - DNA, 19 bp, Homo sapiens
  siRNA target sequence for TTN (NM_133379.1,12984-13002).
gagaaaatagtcaattcga

SEQ ID NO: 106868 - DNA, 19 bp, Homo sapiens
  siRNA target sequence for TTN (NM_133379.1,12986-13004).
gaaaatagtcaattcgaaa

SEQ ID NO: 106869 - DNA, 19 bp, Homo sapiens
  siRNA target sequence for TTN (NM_133379.1,13052-13070).
gaccagggagaatctgtaa

SEQ ID NO: 106870 - DNA, 19 bp, Homo sapiens
  siRNA target sequence for TTN (NM_133379.1,13107-13125).
ctccctggacaaatgtaaa

SEQ ID NO: 106871 - DNA, 19 bp, Homo sapiens
  siRNA target sequence for TTN (NM_133379.1,13190-13208).
caggtgcgttgcatacctt

SEQ ID NO: 106872 - DNA, 19 bp, Homo sapiens
  siRNA target sequence for TTN (NM_133379.1,13195-13213).
gcgttgcataccttctaga

SEQ ID NO: 106873 - DNA, 19 bp, Homo sapiens
  siRNA target sequence for TTN (NM_133379.1,13239-13257).
gtgcttcaagaaccataaa

SEQ ID NO: 106874 - DNA, 19 bp, Homo sapiens
  siRNA target sequence for TTN (NM_133379.1,13268-13286).
cccatcagggctgaattca

SEQ ID NO: 106875 - DNA, 19 bp, Homo sapiens
  siRNA target sequence for TTN (NM_133379.1,13269-13287).
ccatcagggctgaattcat

SEQ ID NO: 106876 - DNA, 19 bp, Homo sapiens
  siRNA target sequence for TTN (NM_133379.1,13270-13288).
catcagggctgaattcata

SEQ ID NO: 106877 - DNA, 19 bp, Homo sapiens
  siRNA target sequence for TTN (NM_133379.1,13273-13291).
cagggctgaattcatacaa

SEQ ID NO: 106878 - DNA, 19 bp, Homo sapiens
  siRNA target sequence for TTN (NM_133379.1,13306-13324).
gaaagagagacatgtaagt

SEQ ID NO: 106879 - DNA, 19 bp, Homo sapiens
  siRNA target sequence for TTN (NM_133379.1,13349-13367).
gagggtactgtttatccat

SEQ ID NO: 106880 - DNA, 19 bp, Homo sapiens
  siRNA target sequence for TTN (NM_133379.1,13351-13369).
gggtactgtttatccattt

SEQ ID NO: 106881 - DNA, 19 bp, Homo sapiens
  siRNA target sequence for TTN (NM_133379.1,13383-13401).
gtgatgtcactattaagaa

SEQ ID NO: 106882 - DNA, 19 bp, Homo sapiens
  siRNA target sequence for TTN (NM_133379.1,13461-13479).
gtgcccaaagtgactattt

SEQ ID NO: 106883 - DNA, 19 bp, Homo sapiens
  siRNA target sequence for TTN (NM_133379.1,13470-13488).
gtgactatttaccaaatat

SEQ ID NO: 106884 - DNA, 19 bp, Homo sapiens
  siRNA target sequence for TTN (NM_133379.1,13500-13518).
gaatttctgacagttacaa

SEQ ID NO: 106885 - DNA, 19 bp, Homo sapiens
  siRNA target sequence for TTN (NM_133379.1,13506-13524).
ctgacagttacaatacaaa

SEQ ID NO: 106886 - DNA, 19 bp, Homo sapiens
  siRNA target sequence for TTN (NM_133379.1,13516-13534).
caatacaaaagattcatct

SEQ ID NO: 106887 - DNA, 19 bp, Homo sapiens
  siRNA target sequence for TTN (NM_133379.1,13533-13551).
ctgccattgtatatgaaga

SEQ ID NO: 106888 - DNA, 19 bp, Homo sapiens
  siRNA target sequence for TTN (NM_133379.1,13554-13572).
cccttggtgaagagataca

SEQ ID NO: 106889 - DNA, 19 bp, Homo sapiens
  siRNA target sequence for TTN (NM_133379.1,13556-13574).
cttggtgaagagatacact

SEQ ID NO: 106890 - DNA, 19 bp, Homo sapiens
  siRNA target sequence for TTN (NM_133379.1,13653-13671).
ctaccagaacatcaattgt

SEQ ID NO: 106891 - DNA, 19 bp, Homo sapiens
  siRNA target sequence for TTN (NM_133379.1,13670-13688).
gttaatcctcctcaaaaga

SEQ ID NO: 106892 - DNA, 19 bp, Homo sapiens
  siRNA target sequence for TTN (NM_133379.1,13677-13695).
ctcctcaaaagaagattga

SEQ ID NO: 106893 - DNA, 19 bp, Homo sapiens
  siRNA target sequence for TTN (NM_133379.1,13694-13712).
gatgacaaagccttttcat

SEQ ID NO: 106894 - DNA, 19 bp, Homo sapiens
  siRNA target sequence for TTN (NM_133379.1,13774-13792).
gtctccaaatactgaatca

SEQ ID NO: 106895 - DNA, 19 bp, Homo sapiens
  siRNA target sequence for TTN (NM_133379.1,13776-13794).
ctccaaatactgaatcaga

SEQ ID NO: 106896 - DNA, 19 bp, Homo sapiens
  siRNA target sequence for TTN (NM_133379.1,13778-13796).
ccaaatactgaatcagatt

SEQ ID NO: 106897 - DNA, 19 bp, Homo sapiens
  siRNA target sequence for TTN (NM_133379.1,13793-13811).
gattcatctaacattgcaa

SEQ ID NO: 106898 - DNA, 19 bp, Homo sapiens
  siRNA target sequence for TTN (NM_133379.1,13833-13851).
ctcaaactcataaagaatt

SEQ ID NO: 106899 - DNA, 19 bp, Homo sapiens
  siRNA target sequence for TTN (NM_133379.1,13895-13913).
gataaacctgcaatttcta

SEQ ID NO: 106900 - DNA, 19 bp, Homo sapiens
  siRNA target sequence for TTN (NM_133379.1,13987-14005).
gaaattccaagaattagat

SEQ ID NO: 106901 - DNA, 19 bp, Homo sapiens
  siRNA target sequence for TTN (NM_133379.1,14143-14161).
gcaggaaatacattataaa

SEQ ID NO: 106902 - DNA, 19 bp, Homo sapiens
  siRNA target sequence for TTN (NM_133379.1,14231-14249).
gtatttgccagtcaagaaa

SEQ ID NO: 106903 - DNA, 19 bp, Homo sapiens
  siRNA target sequence for TTN (NM_133379.1,14257-14275).
cagtcaagagctttcaaat

SEQ ID NO: 106904 - DNA, 19 bp, Homo sapiens
  siRNA target sequence for TTN (NM_133379.1,14287-14305).
ggagaaaagtagtattgat

SEQ ID NO: 106905 - DNA, 19 bp, Homo sapiens
  siRNA target sequence for TTN (NM_133379.1,14345-14363).
caggaacaaaacttagaca

SEQ ID NO: 106906 - DNA, 19 bp, Homo sapiens
  siRNA target sequence for TTN (NM_133379.1,14502-14520).
gaagttccatctcacattt

SEQ ID NO: 106907 - DNA, 19 bp, Homo sapiens
  siRNA target sequence for TTN (NM_133379.1,14547-14565).
ctttaggggttggtgaaat

SEQ ID NO: 106908 - DNA, 19 bp, Homo sapiens
  siRNA target sequence for TTN (NM_133379.1,14618-14636).
ggtgggacacaggaatata

SEQ ID NO: 106909 - DNA, 19 bp, Homo sapiens
  siRNA target sequence for TTN (NM_133379.1,14679-14697).
ctgacacactccatagaca

SEQ ID NO: 106910 - DNA, 19 bp, Homo sapiens
  siRNA target sequence for TTN (NM_133379.1,14746-14764).
gaatccaggtgaacaaata

SEQ ID NO: 106911 - DNA, 19 bp, Homo sapiens
  siRNA target sequence for TTN (NM_133379.1,14750-14768).
ccaggtgaacaaataagta

SEQ ID NO: 106912 - DNA, 19 bp, Homo sapiens
  siRNA target sequence for TTN (NM_133379.1,14754-14772).
gtgaacaaataagtacaaa

SEQ ID NO: 106913 - DNA, 19 bp, Homo sapiens
  siRNA target sequence for TTN (NM_133379.1,14857-14875).
gatagaaactagtttttct

SEQ ID NO: 106914 - DNA, 19 bp, Homo sapiens
  siRNA target sequence for TTN (NM_133379.1,14966-14984).
cgtgaggttcctgaaacta

SEQ ID NO: 106915 - DNA, 19 bp, Homo sapiens
  siRNA target sequence for TTN (NM_133379.1,14992-15010).
cagagaccaggcaaagctt

SEQ ID NO: 106916 - DNA, 19 bp, Homo sapiens
  siRNA target sequence for TTN (NM_133379.1,15007-15025).
gcttgtccagagtgaatca

SEQ ID NO: 106917 - DNA, 19 bp, Homo sapiens
  siRNA target sequence for TTN (NM_133379.1,15011-15029).
gtccagagtgaatcaatca

SEQ ID NO: 106918 - DNA, 19 bp, Homo sapiens
  siRNA target sequence for TTN (NM_133379.1,15018-15036).
gtgaatcaatcacttcaat

SEQ ID NO: 106919 - DNA, 19 bp, Homo sapiens
  siRNA target sequence for TTN (NM_133379.1,15054-15072).
ctttcaacactgtgtatga

SEQ ID NO: 106920 - DNA, 19 bp, Homo sapiens
  siRNA target sequence for TTN (NM_133379.1,15063-15081).
ctgtgtatgaatactacaa

SEQ ID NO: 106921 - DNA, 19 bp, Homo sapiens
  siRNA target sequence for TTN (NM_133379.1,15117-15135).
ctgagtctgacatttccat

SEQ ID NO: 106922 - DNA, 19 bp, Homo sapiens
  siRNA target sequence for TTN (NM_133379.1,15153-15171).
ccagtgaagaaatatctga

SEQ ID NO: 106923 - DNA, 19 bp, Homo sapiens
  siRNA target sequence for TTN (NM_133379.1,15192-15210).
caccatcatctgttgaata

SEQ ID NO: 106924 - DNA, 19 bp, Homo sapiens
  siRNA target sequence for TTN (NM_133379.1,15226-15244).
gtcccctgacttatatttt

SEQ ID NO: 106925 - DNA, 19 bp, Homo sapiens
  siRNA target sequence for TTN (NM_133379.1,15321-15339).
gggaagttgctgaaagata

SEQ ID NO: 106926 - DNA, 19 bp, Homo sapiens
  siRNA target sequence for TTN (NM_133379.1,15326-15344).
gttgctgaaagatattcaa

SEQ ID NO: 106927 - DNA, 19 bp, Homo sapiens
  siRNA target sequence for TTN (NM_133379.1,15356-15374).
ggtgaggtaggagaaagat

SEQ ID NO: 106928 - DNA, 19 bp, Homo sapiens
  siRNA target sequence for TTN (NM_133379.1,15559-15577).
ggcactagagagatattct

SEQ ID NO: 106929 - DNA, 19 bp, Homo sapiens
  siRNA target sequence for TTN (NM_133379.1,15566-15584).
gagagatattctattccta

SEQ ID NO: 106930 - DNA, 19 bp, Homo sapiens
  siRNA target sequence for TTN (NM_133379.1,15594-15612).
caaaccccactggtacttt

SEQ ID NO: 106931 - DNA, 19 bp, Homo sapiens
  siRNA target sequence for TTN (NM_133379.1,15640-15658).
ggaagacggtacaccaaat

SEQ ID NO: 106932 - DNA, 19 bp, Homo sapiens
  siRNA target sequence for TTN (NM_133379.1,15651-15669).
caccaaatgagcatttcta

SEQ ID NO: 106933 - DNA, 19 bp, Homo sapiens
  siRNA target sequence for TTN (NM_133379.1,15685-15703).
gaggggttcagcttatgaa

SEQ ID NO: 106934 - DNA, 19 bp, Homo sapiens
  siRNA target sequence for TTN (NM_133379.1,15687-15705).
ggggttcagcttatgaaat

SEQ ID NO: 106935 - DNA, 19 bp, Homo sapiens
  siRNA target sequence for TTN (NM_133379.1,15688-15706).
gggttcagcttatgaaata

SEQ ID NO: 106936 - DNA, 19 bp, Homo sapiens
  siRNA target sequence for TTN (NM_133379.1,15709-15727).
gcgttccgattcatttggt

SEQ ID NO: 106937 - DNA, 19 bp, Homo sapiens
  siRNA target sequence for TTN (NM_133379.1,15710-15728).
cgttccgattcatttggta

SEQ ID NO: 106938 - DNA, 19 bp, Homo sapiens
  siRNA target sequence for TTN (NM_133379.1,15766-15784).
gcctccatcttttattgaa

SEQ ID NO: 106939 - DNA, 19 bp, Homo sapiens
  siRNA target sequence for TTN (NM_133379.1,15790-15808).
gaccaaaaggaaggtatat

SEQ ID NO: 106940 - DNA, 19 bp, Homo sapiens
  siRNA target sequence for TTN (NM_133379.1,15819-15837).
cactaggcttcattgttga

SEQ ID NO: 106941 - DNA, 19 bp, Homo sapiens
  siRNA target sequence for TTN (NM_133379.1,15861-15879).
gtgtgaaatggtatcgaaa

SEQ ID NO: 106942 - DNA, 19 bp, Homo sapiens
  siRNA target sequence for TTN (NM_133379.1,15870-15888).
ggtatcgaaataaatcttt

SEQ ID NO: 106943 - DNA, 19 bp, Homo sapiens
  siRNA target sequence for TTN (NM_133379.1,15890-15908).
ctagagccagatgaaagaa

SEQ ID NO: 106944 - DNA, 19 bp, Homo sapiens
  siRNA target sequence for TTN (NM_133379.1,15917-15935).
gaaagagtgggtaatgtgt

SEQ ID NO: 106945 - DNA, 19 bp, Homo sapiens
  siRNA target sequence for TTN (NM_133379.1,15968-15986).
gaagggggagagtacatgt

SEQ ID NO: 106946 - DNA, 19 bp, Homo sapiens
  siRNA target sequence for TTN (NM_133379.1,16090-16108).
gcatgtcatggagtttgat

SEQ ID NO: 106947 - DNA, 19 bp, Homo sapiens
  siRNA target sequence for TTN (NM_133379.1,16091-16109).
catgtcatggagtttgatt

SEQ ID NO: 106948 - DNA, 19 bp, Homo sapiens
  siRNA target sequence for TTN (NM_133379.1,16112-16130).
gaacacaccacatcatcaa

SEQ ID NO: 106949 - DNA, 19 bp, Homo sapiens
  siRNA target sequence for TTN (NM_133379.1,16137-16155).
cttctcctcaagaaattgt

SEQ ID NO: 106950 - DNA, 19 bp, Homo sapiens
  siRNA target sequence for TTN (NM_133379.1,16156-16174).
cctggaagttgaattaagt

SEQ ID NO: 106951 - DNA, 19 bp, Homo sapiens
  siRNA target sequence for TTN (NM_133379.1,16214-16232).
gtgacagttcccgaattta

SEQ ID NO: 106952 - DNA, 19 bp, Homo sapiens
  siRNA target sequence for TTN (NM_133379.1,16241-16259).
cataaaagtatgattgtga

SEQ ID NO: 106953 - DNA, 19 bp, Homo sapiens
  siRNA target sequence for TTN (NM_133379.1,16252-16270).
gattgtgagtctagatgtt

SEQ ID NO: 106954 - DNA, 19 bp, Homo sapiens
  siRNA target sequence for TTN (NM_133379.1,16260-16278).
gtctagatgttcttccatt

SEQ ID NO: 106955 - DNA, 19 bp, Homo sapiens
  siRNA target sequence for TTN (NM_133379.1,16286-16304).
gtagatccaaatatggatt

SEQ ID NO: 106956 - DNA, 19 bp, Homo sapiens
  siRNA target sequence for TTN (NM_133379.1,16364-16382).
cgctttataatgcctattt

SEQ ID NO: 106957 - DNA, 19 bp, Homo sapiens
  siRNA target sequence for TTN (NM_133379.1,16442-16460).
ccgactcccgaagttaagt

SEQ ID NO: 106958 - DNA, 19 bp, Homo sapiens
  siRNA target sequence for TTN (NM_133379.1,16448-16466).
cccgaagttaagtggtata

SEQ ID NO: 106959 - DNA, 19 bp, Homo sapiens
  siRNA target sequence for TTN (NM_133379.1,16479-16497).
gtattgagccagataatat

SEQ ID NO: 106960 - DNA, 19 bp, Homo sapiens
  siRNA target sequence for TTN (NM_133379.1,16488-16506).
cagataatattaaatacgt

SEQ ID NO: 106961 - DNA, 19 bp, Homo sapiens
  siRNA target sequence for TTN (NM_133379.1,16529-16547).
cacactcttaaaattcgaa

SEQ ID NO: 106962 - DNA, 19 bp, Homo sapiens
  siRNA target sequence for TTN (NM_133379.1,16581-16599).
gcagagctgtgaattgtgt

SEQ ID NO: 106963 - DNA, 19 bp, Homo sapiens
  siRNA target sequence for TTN (NM_133379.1,16582-16600).
cagagctgtgaattgtgta

SEQ ID NO: 106964 - DNA, 19 bp, Homo sapiens
  siRNA target sequence for TTN (NM_133379.1,16680-16698).
ctttaagcagtttaatgga

SEQ ID NO: 106965 - DNA, 19 bp, Homo sapiens
  siRNA target sequence for TTN (NM_133379.1,16716-16734).
gcaactacacagacagttt

SEQ ID NO: 106966 - DNA, 19 bp, Homo sapiens
  siRNA target sequence for TTN (NM_133379.1,16717-16735).
caactacacagacagtttt

SEQ ID NO: 106967 - DNA, 19 bp, Homo sapiens
  siRNA target sequence for TTN (NM_133379.1,16763-16781).
cccaggtttatcaaaggta

SEQ ID NO: 106968 - DNA, 19 bp, Homo sapiens
  siRNA target sequence for TTN (NM_133379.1,16764-16782).
ccaggtttatcaaaggtat

SEQ ID NO: 106969 - DNA, 19 bp, Homo sapiens
  siRNA target sequence for TTN (NM_133379.1,16765-16783).
caggtttatcaaaggtatt

SEQ ID NO: 106970 - DNA, 19 bp, Homo sapiens
  siRNA target sequence for TTN (NM_133379.1,16806-16824).
gtacagcagcatattttca

SEQ ID NO: 106971 - DNA, 19 bp, Homo sapiens
  siRNA target sequence for TTN (NM_133379.1,16844-16862).
ccaagacccacggtttact

SEQ ID NO: 106972 - DNA, 19 bp, Homo sapiens
  siRNA target sequence for TTN (NM_133379.1,16914-16932).
gtggcacagggttccataa

SEQ ID NO: 106973 - DNA, 19 bp, Homo sapiens
  siRNA target sequence for TTN (NM_133379.1,16922-16940).
gggttccataacctgttta

SEQ ID NO: 106974 - DNA, 19 bp, Homo sapiens
  siRNA target sequence for TTN (NM_133379.1,16923-16941).
ggttccataacctgtttat

SEQ ID NO: 106975 - DNA, 19 bp, Homo sapiens
  siRNA target sequence for TTN (NM_133379.1,16924-16942).
gttccataacctgtttata

SEQ ID NO: 106976 - DNA, 19 bp, Homo sapiens
  siRNA target sequence for TTN (NM_133379.1,16933-16951).
cctgtttataacaagctta

SEQ ID NO: 106977 - DNA, 19 bp, Homo sapiens
  siRNA target sequence for TTN (NM_133379.1,16936-16954).
gtttataacaagcttagta

SEQ ID NO: 106978 - DNA, 19 bp, Homo sapiens
  siRNA target sequence for TTN (NM_133379.1,16957-16975).
gagtgatgaaggagagtat

SEQ ID NO: 106979 - DNA, 19 bp, Homo sapiens
  siRNA target sequence for TTN (NM_133379.1,17018-17036).
gcagcactcaccttaactt

SEQ ID NO: 106980 - DNA, 19 bp, Homo sapiens
  siRNA target sequence for TTN (NM_133432.1,10380-10398).
gtctggaaggatttagcaa

SEQ ID NO: 106981 - DNA, 19 bp, Homo sapiens
  siRNA target sequence for TTN (NM_133432.1,10423-10441).
ccaatggcatgtctcttta

SEQ ID NO: 106982 - DNA, 19 bp, Homo sapiens
  siRNA target sequence for TTN (NM_133432.1,10428-10446).
ggcatgtctctttatcagt

SEQ ID NO: 106983 - DNA, 19 bp, Homo sapiens
  siRNA target sequence for TTN (NM_133432.1,10429-10447).
gcatgtctctttatcagtt

SEQ ID NO: 106984 - DNA, 19 bp, Homo sapiens
  siRNA target sequence for TTN (NM_133432.1,10430-10448).
catgtctctttatcagttt

SEQ ID NO: 106985 - DNA, 19 bp, Homo sapiens
  siRNA target sequence for TTN (NM_133432.1,10433-10451).
gtctctttatcagtttcat

SEQ ID NO: 106986 - DNA, 19 bp, Homo sapiens
  siRNA target sequence for TTN (NM_133432.1,10519-10537).
cggggagacagtcagattt

SEQ ID NO: 106987 - DNA, 19 bp, Homo sapiens
  siRNA target sequence for TTN (NM_133432.1,10564-10582).
gccagaaatccaatggttt

SEQ ID NO: 106988 - DNA, 19 bp, Homo sapiens
  siRNA target sequence for TTN (NM_133432.1,10604-10622).
ccaacaaaagatgtagttt

SEQ ID NO: 106989 - DNA, 19 bp, Homo sapiens
  siRNA target sequence for TTN (NM_133432.1,10638-10656).
ccacaggcatggctttaat

SEQ ID NO: 106990 - DNA, 19 bp, Homo sapiens
  siRNA target sequence for TTN (NM_133432.1,10643-10661).
ggcatggctttaatgctta

SEQ ID NO: 106991 - DNA, 19 bp, Homo sapiens
  siRNA target sequence for TTN (NM_133432.1,10650-10668).
ctttaatgcttatagttga

SEQ ID NO: 106992 - DNA, 19 bp, Homo sapiens
  siRNA target sequence for TTN (NM_133432.1,10682-10700).
catgctgggcagtactctt

SEQ ID NO: 106993 - DNA, 19 bp, Homo sapiens
  siRNA target sequence for TTN (NM_133437.1,10394-10412).
gccctagataggcaaagtt

SEQ ID NO: 106994 - DNA, 19 bp, Homo sapiens
  siRNA target sequence for TTN (NM_133437.1,10396-10414).
cctagataggcaaagttct

SEQ ID NO: 106995 - DNA, 19 bp, Homo sapiens
  siRNA target sequence for TTN (NM_133437.1,10451-10469).
gtggcagattcctctttca

SEQ ID NO: 106996 - DNA, 19 bp, Homo sapiens
  siRNA target sequence for TTN (NM_133437.1,10454-10472).
gcagattcctctttcacaa

SEQ ID NO: 106997 - DNA, 19 bp, Homo sapiens
  siRNA target sequence for TTN (NM_133437.1,10507-10525).
gtcatttcaaggatcatca

SEQ ID NO: 106998 - DNA, 19 bp, Homo sapiens
  siRNA target sequence for TTN (NM_133437.1,10514-10532).
caaggatcatcatatgaat

SEQ ID NO: 106999 - DNA, 19 bp, Homo sapiens
  siRNA target sequence for TTN (NM_133437.1,10518-10536).
gatcatcatatgaatatga

SEQ ID NO: 107000 - DNA, 19 bp, Homo sapiens
  siRNA target sequence for TTN (NM_133437.1,10541-10559).
caggtttttgaaagtgtat

SEQ ID NO: 107001 - DNA, 19 bp, Homo sapiens
  siRNA target sequence for TTN (NM_133437.1,10543-10561).
ggtttttgaaagtgtatct

SEQ ID NO: 107002 - DNA, 19 bp, Homo sapiens
  siRNA target sequence for TTN (NM_133437.1,10614-10632).
ctgcatccctttcacaaat

SEQ ID NO: 107003 - DNA, 19 bp, Homo sapiens
  siRNA target sequence for TTN (NM_133437.1,10728-10746).
gcggtgacacggctcaatt

SEQ ID NO: 107004 - DNA, 19 bp, Homo sapiens
  siRNA target sequence for TTN (NM_133437.1,10731-10749).
gtgacacggctcaattcct

SEQ ID NO: 107005 - DNA, 19 bp, Homo sapiens
  siRNA target sequence for TTN (NM_133437.1,10791-10809).
ctcacgaaggtgcaaagat

SEQ ID NO: 107006 - DNA, 19 bp, Homo sapiens
  siRNA target sequence for TTN (NM_133437.1,10819-10837).
cgagagactgaaacaatca

SEQ ID NO: 107007 - DNA, 19 bp, Homo sapiens
  siRNA target sequence for TTN (NM_133437.1,10853-10871).
cagtttcttaccatatgta

SEQ ID NO: 107008 - DNA, 19 bp, Homo sapiens
  siRNA target sequence for TTN (NM_133437.1,10883-10901).
gtagaccaaggactataca

SEQ ID NO: 107009 - DNA, 19 bp, Homo sapiens
  siRNA target sequence for TTN (NM_133437.1,10933-10951).
gacaacgtcagcagtacta

SEQ ID NO: 107010 - DNA, 19 bp, Homo sapiens
  siRNA target sequence for TTN (NM_133437.1,10958-10976).
gaaggtgctcctgaatcaa

SEQ ID NO: 107011 - DNA, 19 bp, Homo sapiens
  siRNA target sequence for TXK (NM_003328.1,145-163).
cagtgcagaagcgacaaat

SEQ ID NO: 107012 - DNA, 19 bp, Homo sapiens
  siRNA target sequence for TXK (NM_003328.1,147-165).
gtgcagaagcgacaaatga

SEQ ID NO: 107013 - DNA, 19 bp, Homo sapiens
  siRNA target sequence for TXK (NM_003328.1,149-167).
gcagaagcgacaaatgaga

SEQ ID NO: 107014 - DNA, 19 bp, Homo sapiens
  siRNA target sequence for TXK (NM_003328.1,228-246).
ccgtggctcagccaattgt

SEQ ID NO: 107015 - DNA, 19 bp, Homo sapiens
  siRNA target sequence for TXK (NM_003328.1,230-248).
gtggctcagccaattgtca

SEQ ID NO: 107016 - DNA, 19 bp, Homo sapiens
  siRNA target sequence for TXK (NM_003328.1,232-250).
ggctcagccaattgtcaaa

SEQ ID NO: 107017 - DNA, 19 bp, Homo sapiens
  siRNA target sequence for TXK (NM_003328.1,233-251).
gctcagccaattgtcaaat

SEQ ID NO: 107018 - DNA, 19 bp, Homo sapiens
  siRNA target sequence for TXK (NM_003328.1,234-252).
ctcagccaattgtcaaata

SEQ ID NO: 107019 - DNA, 19 bp, Homo sapiens
  siRNA target sequence for TXK (NM_003328.1,272-290).
ccgtgtgcagccgtcaaaa

SEQ ID NO: 107020 - DNA, 19 bp, Homo sapiens
  siRNA target sequence for TXK (NM_003328.1,276-294).
gtgcagccgtcaaaacgaa

SEQ ID NO: 107021 - DNA, 19 bp, Homo sapiens
  siRNA target sequence for TXK (NM_003328.1,368-386).
gcccagagaaccctgtaat

SEQ ID NO: 107022 - DNA, 19 bp, Homo sapiens
  siRNA target sequence for TXK (NM_003328.1,369-387).
cccagagaaccctgtaatt

SEQ ID NO: 107023 - DNA, 19 bp, Homo sapiens
  siRNA target sequence for TXK (NM_003328.1,531-549).
gagtggtaccatagaaaca

SEQ ID NO: 107024 - DNA, 19 bp, Homo sapiens
  siRNA target sequence for TXK (NM_003328.1,563-581).
ggcagaacatctattgaga

SEQ ID NO: 107025 - DNA, 19 bp, Homo sapiens
  siRNA target sequence for TXK (NM_003328.1,587-605).
gtctaaagaaggtgcattt

SEQ ID NO: 107026 - DNA, 19 bp, Homo sapiens
  siRNA target sequence for TXK (NM_003328.1,635-653).
ctacacaatttccgtattt

SEQ ID NO: 107027 - DNA, 19 bp, Homo sapiens
  siRNA target sequence for TXK (NM_003328.1,670-688).
gtacggaggctgccataaa

SEQ ID NO: 107028 - DNA, 19 bp, Homo sapiens
  siRNA target sequence for TXK (NM_003328.1,673-691).
cggaggctgccataaaaca

SEQ ID NO: 107029 - DNA, 19 bp, Homo sapiens
  siRNA target sequence for TXK (NM_003328.1,674-692).
ggaggctgccataaaacat

SEQ ID NO: 107030 - DNA, 19 bp, Homo sapiens
  siRNA target sequence for TXK (NM_003328.1,675-693).
gaggctgccataaaacatt

SEQ ID NO: 107031 - DNA, 19 bp, Homo sapiens
  siRNA target sequence for TXK (NM_003328.1,724-742).
ggtatgtggctgaaagaca

SEQ ID NO: 107032 - DNA, 19 bp, Homo sapiens
  siRNA target sequence for TXK (NM_003328.1,735-753).
gaaagacacgcctttcaat

SEQ ID NO: 107033 - DNA, 19 bp, Homo sapiens
  siRNA target sequence for TXK (NM_003328.1,739-757).
gacacgcctttcaatcaat

SEQ ID NO: 107034 - DNA, 19 bp, Homo sapiens
  siRNA target sequence for TXK (NM_003328.1,855-873).
gctgggtttagctacgaaa

SEQ ID NO: 107035 - DNA, 19 bp, Homo sapiens
  siRNA target sequence for TXK (NM_003328.1,869-887).
cgaaaagtgggagatagat

SEQ ID NO: 107036 - DNA, 19 bp, Homo sapiens
  siRNA target sequence for TXK (NM_003328.1,948-966).
ggtgaatggcggtcacata

SEQ ID NO: 107037 - DNA, 19 bp, Homo sapiens
  siRNA target sequence for TXK (NM_003328.1,976-994).
ctatcaaggccatcaatga

SEQ ID NO: 107038 - DNA, 19 bp, Homo sapiens
  siRNA target sequence for TXK (NM_003328.1,1057-1075).
caaagctagtgcaacttta

SEQ ID NO: 107039 - DNA, 19 bp, Homo sapiens
  siRNA target sequence for TXK (NM_003328.1,1061-1079).
gctagtgcaactttatgga

SEQ ID NO: 107040 - DNA, 19 bp, Homo sapiens
  siRNA target sequence for TXK (NM_003328.1,1169-1187).
gcttaggaaggaaatgcta

SEQ ID NO: 107041 - DNA, 19 bp, Homo sapiens
  siRNA target sequence for TXK (NM_003328.1,1190-1208).
gagtgtatgccaggatata

SEQ ID NO: 107042 - DNA, 19 bp, Homo sapiens
  siRNA target sequence for TXK (NM_003328.1,1232-1250).
gaggaatggctatattcat

SEQ ID NO: 107043 - DNA, 19 bp, Homo sapiens
  siRNA target sequence for TXK (NM_003328.1,1253-1271).
ggatttggcggcaaggaat

SEQ ID NO: 107044 - DNA, 19 bp, Homo sapiens
  siRNA target sequence for TXK (NM_003328.1,1254-1272).
gatttggcggcaaggaatt

SEQ ID NO: 107045 - DNA, 19 bp, Homo sapiens
  siRNA target sequence for TXK (NM_003328.1,1280-1298).
cagttcaacatgcatagta

SEQ ID NO: 107046 - DNA, 19 bp, Homo sapiens
  siRNA target sequence for TXK (NM_003328.1,1282-1300).
gttcaacatgcatagtaaa

SEQ ID NO: 107047 - DNA, 19 bp, Homo sapiens
  siRNA target sequence for TXK (NM_003328.1,1285-1303).
caacatgcatagtaaaaat

SEQ ID NO: 107048 - DNA, 19 bp, Homo sapiens
  siRNA target sequence for TXK (NM_003328.1,1324-1342).
ggtacgttttggatgatga

SEQ ID NO: 107049 - DNA, 19 bp, Homo sapiens
  siRNA target sequence for TXK (NM_003328.1,1343-1361).
gtatgtcagttcttttgga

SEQ ID NO: 107050 - DNA, 19 bp, Homo sapiens
  siRNA target sequence for TXK (NM_003328.1,1382-1400).
gtcccctcctgaagttttt

SEQ ID NO: 107051 - DNA, 19 bp, Homo sapiens
  siRNA target sequence for TXK (NM_003328.1,1385-1403).
ccctcctgaagtttttctt

SEQ ID NO: 107052 - DNA, 19 bp, Homo sapiens
  siRNA target sequence for TXK (NM_003328.1,1505-1523).
gcaagtcgtggaagctatt

SEQ ID NO: 107053 - DNA, 19 bp, Homo sapiens
  siRNA target sequence for TXK (NM_003328.1,1506-1524).
caagtcgtggaagctattt

SEQ ID NO: 107054 - DNA, 19 bp, Homo sapiens
  siRNA target sequence for TXK (NM_003328.1,1556-1574).
ggcaccaatgtccatatat

SEQ ID NO: 107055 - DNA, 19 bp, Homo sapiens
  siRNA target sequence for TXK (NM_003328.1,1558-1576).
caccaatgtccatatatga

SEQ ID NO: 107056 - DNA, 19 bp, Homo sapiens
  siRNA target sequence for TXK (NM_003328.1,1561-1579).
caatgtccatatatgaagt

SEQ ID NO: 107057 - DNA, 19 bp, Homo sapiens
  siRNA target sequence for TXK (NM_003328.1,1567-1585).
ccatatatgaagtcatgta

SEQ ID NO: 107058 - DNA, 19 bp, Homo sapiens
  siRNA target sequence for TXK (NM_003328.1,1637-1655).
gcgggctgtcacagagatt

SEQ ID NO: 107059 - DNA, 19 bp, Homo sapiens
  siRNA target sequence for TXL-2 (NM_178130.2,244-262).
cagttccaaaggactaact

SEQ ID NO: 107060 - DNA, 19 bp, Homo sapiens
  siRNA target sequence for TXL-2 (NM_178130.2,246-264).
gttccaaaggactaactgt

SEQ ID NO: 107061 - DNA, 19 bp, Homo sapiens
  siRNA target sequence for TXL-2 (NM_178130.2,381-399).
gtcttgatgtcctcgaaaa

SEQ ID NO: 107062 - DNA, 19 bp, Homo sapiens
  siRNA target sequence for TXL-2 (NM_178130.2,383-401).
cttgatgtcctcgaaaagt

SEQ ID NO: 107063 - DNA, 19 bp, Homo sapiens
  siRNA target sequence for TXL-2 (NM_178130.2,414-432).
gcgagccaacctttctgtt

SEQ ID NO: 107064 - DNA, 19 bp, Homo sapiens
  siRNA target sequence for TXL-2 (NM_178130.2,415-433).
cgagccaacctttctgttt

SEQ ID NO: 107065 - DNA, 19 bp, Homo sapiens
  siRNA target sequence for TXL-2 (NM_178130.2,532-550).
ctgtaccttggccatcatt

SEQ ID NO: 107066 - DNA, 19 bp, Homo sapiens
  siRNA target sequence for TXL-2 (NM_178130.2,534-552).
gtaccttggccatcattaa

SEQ ID NO: 107067 - DNA, 19 bp, Homo sapiens
  siRNA target sequence for TXL-2 (NM_178130.2,573-591).
gaaagactgatgagattat

SEQ ID NO: 107068 - DNA, 19 bp, Homo sapiens
  siRNA target sequence for TXL-2 (NM_178130.2,604-622).
ggaagctgggtttgaaatt

SEQ ID NO: 107069 - DNA, 19 bp, Homo sapiens
  siRNA target sequence for TXL-2 (NM_178130.2,611-629).
gggtttgaaattctaacaa

SEQ ID NO: 107070 - DNA, 19 bp, Homo sapiens
  siRNA target sequence for TXL-2 (NM_178130.2,612-630).
ggtttgaaattctaacaaa

SEQ ID NO: 107071 - DNA, 19 bp, Homo sapiens
  siRNA target sequence for TXL-2 (NM_178130.2,653-671).
gcagaagtgcgacttttct

SEQ ID NO: 107072 - DNA, 19 bp, Homo sapiens
  siRNA target sequence for TXL-2 (NM_178130.2,654-672).
cagaagtgcgacttttcta

SEQ ID NO: 107073 - DNA, 19 bp, Homo sapiens
  siRNA target sequence for TXL-2 (NM_178130.2,663-681).
gacttttctaccaacacaa

SEQ ID NO: 107074 - DNA, 19 bp, Homo sapiens
  siRNA target sequence for TXL-2 (NM_178130.2,854-872).
gctcagtacggcacagaaa

SEQ ID NO: 107075 - DNA, 19 bp, Homo sapiens
  siRNA target sequence for TXL-2 (NM_178130.2,855-873).
ctcagtacggcacagaaat

SEQ ID NO: 107076 - DNA, 19 bp, Homo sapiens
  siRNA target sequence for TXL-2 (NM_178130.2,865-883).
cacagaaatgcccttcaat

SEQ ID NO: 107077 - DNA, 19 bp, Homo sapiens
  siRNA target sequence for TXNDC3 (NM_016616.2,444-462).
gcagaacaaaggcttaaca

SEQ ID NO: 107078 - DNA, 19 bp, Homo sapiens
  siRNA target sequence for TXNDC3 (NM_016616.2,497-515).
gcagagcaatgcaaccttt

SEQ ID NO: 107079 - DNA, 19 bp, Homo sapiens
  siRNA target sequence for TXNDC3 (NM_016616.2,600-618).
gccatttagagataaatgt

SEQ ID NO: 107080 - DNA, 19 bp, Homo sapiens
  siRNA target sequence for TXNDC3 (NM_016616.2,679-697).
gcaccgcttgttaataaaa

SEQ ID NO: 107081 - DNA, 19 bp, Homo sapiens
  siRNA target sequence for TXNDC3 (NM_016616.2,680-698).
caccgcttgttaataaaaa

SEQ ID NO: 107082 - DNA, 19 bp, Homo sapiens
  siRNA target sequence for TXNDC3 (NM_016616.2,683-701).
cgcttgttaataaaaaagt

SEQ ID NO: 107083 - DNA, 19 bp, Homo sapiens
  siRNA target sequence for TXNDC3 (NM_016616.2,714-732).
cgatgaggagagaaaaatt

SEQ ID NO: 107084 - DNA, 19 bp, Homo sapiens
  siRNA target sequence for TXNDC3 (NM_016616.2,783-801).
ctcagattcagaagttagt

SEQ ID NO: 107085 - DNA, 19 bp, Homo sapiens
  siRNA target sequence for TXNDC3 (NM_016616.2,823-841).
gttcaggaattatacagta

SEQ ID NO: 107086 - DNA, 19 bp, Homo sapiens
  siRNA target sequence for TXNDC3 (NM_016616.2,856-874).
ccggatgctgtgattagta

SEQ ID NO: 107087 - DNA, 19 bp, Homo sapiens
  siRNA target sequence for TXNDC3 (NM_016616.2,857-875).
cggatgctgtgattagtaa

SEQ ID NO: 107088 - DNA, 19 bp, Homo sapiens
  siRNA target sequence for TXNDC3 (NM_016616.2,858-876).
ggatgctgtgattagtaaa

SEQ ID NO: 107089 - DNA, 19 bp, Homo sapiens
  siRNA target sequence for TXNDC3 (NM_016616.2,863-881).
ctgtgattagtaaaaaagt

SEQ ID NO: 107090 - DNA, 19 bp, Homo sapiens
  siRNA target sequence for TXNDC3 (NM_016616.2,867-885).
gattagtaaaaaagttcta

SEQ ID NO: 107091 - DNA, 19 bp, Homo sapiens
  siRNA target sequence for TXNDC3 (NM_016616.2,958-976).
caagttgtcaacttctata

SEQ ID NO: 107092 - DNA, 19 bp, Homo sapiens
  siRNA target sequence for TXNDC3 (NM_016616.2,966-984).
caacttctatagtcgaata

SEQ ID NO: 107093 - DNA, 19 bp, Homo sapiens
  siRNA target sequence for TXNDC3 (NM_016616.2,969-987).
cttctatagtcgaatagca

SEQ ID NO: 107094 - DNA, 19 bp, Homo sapiens
  siRNA target sequence for TXNDC3 (NM_016616.2,1006-1024).
gagtttgtctcttttatga

SEQ ID NO: 107095 - DNA, 19 bp, Homo sapiens
  siRNA target sequence for TXNDC3 (NM_016616.2,1008-1026).
gtttgtctcttttatgaca

SEQ ID NO: 107096 - DNA, 19 bp, Homo sapiens
  siRNA target sequence for TXNDC3 (NM_016616.2,1023-1041).
gacaagtggcttaagctat

SEQ ID NO: 107097 - DNA, 19 bp, Homo sapiens
  siRNA target sequence for TXNDC3 (NM_016616.2,1028-1046).
gtggcttaagctatattct

SEQ ID NO: 107098 - DNA, 19 bp, Homo sapiens
  siRNA target sequence for TXNDC3 (NM_016616.2,1031-1049).
gcttaagctatattctagt

SEQ ID NO: 107099 - DNA, 19 bp, Homo sapiens
  siRNA target sequence for TXNDC3 (NM_016616.2,1032-1050).
cttaagctatattctagtt

SEQ ID NO: 107100 - DNA, 19 bp, Homo sapiens
  siRNA target sequence for TXNDC3 (NM_016616.2,1055-1073).
ctcaaggaagtaaacacaa

SEQ ID NO: 107101 - DNA, 19 bp, Homo sapiens
  siRNA target sequence for TXNDC3 (NM_016616.2,1156-1174).
gttacacctggaatgatga

SEQ ID NO: 107102 - DNA, 19 bp, Homo sapiens
  siRNA target sequence for TXNDC3 (NM_016616.2,1183-1201).
caagacagtttacaagaat

SEQ ID NO: 107103 - DNA, 19 bp, Homo sapiens
  siRNA target sequence for TXNDC3 (NM_016616.2,1250-1268).
cagctaatgttgctaagtt

SEQ ID NO: 107104 - DNA, 19 bp, Homo sapiens
  siRNA target sequence for TXNDC3 (NM_016616.2,1252-1270).
gctaatgttgctaagttca

SEQ ID NO: 107105 - DNA, 19 bp, Homo sapiens
  siRNA target sequence for TXNDC3 (NM_016616.2,1253-1271).
ctaatgttgctaagttcat

SEQ ID NO: 107106 - DNA, 19 bp, Homo sapiens
  siRNA target sequence for TXNDC3 (NM_016616.2,1276-1294).
gctttcttccccgatttta

SEQ ID NO: 107107 - DNA, 19 bp, Homo sapiens
  siRNA target sequence for TXNDC3 (NM_016616.2,1329-1347).
ggcattacttcgaccaaat

SEQ ID NO: 107108 - DNA, 19 bp, Homo sapiens
  siRNA target sequence for TXNDC3 (NM_016616.2,1340-1358).
gaccaaatctctttcatga

SEQ ID NO: 107109 - DNA, 19 bp, Homo sapiens
  siRNA target sequence for TXNDC3 (NM_016616.2,1366-1384).
gatgatgttttgcgtatta

SEQ ID NO: 107110 - DNA, 19 bp, Homo sapiens
  siRNA target sequence for TXNDC3 (NM_016616.2,1369-1387).
gatgttttgcgtattatta

SEQ ID NO: 107111 - DNA, 19 bp, Homo sapiens
  siRNA target sequence for TXNDC3 (NM_016616.2,1410-1428).
ggagcaaagacaagtagta

SEQ ID NO: 107112 - DNA, 19 bp, Homo sapiens
  siRNA target sequence for TXNDC3 (NM_016616.2,1516-1534).
ccatctctagcccttgttt

SEQ ID NO: 107113 - DNA, 19 bp, Homo sapiens
  siRNA target sequence for TXNDC3 (NM_016616.2,1554-1572).
gcaatactggaaacaatta

SEQ ID NO: 107114 - DNA, 19 bp, Homo sapiens
  siRNA target sequence for TXNDC3 (NM_016616.2,1669-1687).
ggcagcgattcattagaaa

SEQ ID NO: 107115 - DNA, 19 bp, Homo sapiens
  siRNA target sequence for TXNDC3 (NM_016616.2,1688-1706).
ccgctgaaagggaaataca

SEQ ID NO: 107116 - DNA, 19 bp, Homo sapiens
  siRNA target sequence for TXNDC3 (NM_016616.2,1754-1772).
caacaagtgaacaaagaga

SEQ ID NO: 107117 - DNA, 19 bp, Homo sapiens
  siRNA target sequence for TXNDC3 (NM_016616.2,1774-1792).
cagatcctgaagatagtta

SEQ ID NO: 107118 - DNA, 19 bp, Homo sapiens
  siRNA target sequence for TXNDC3 (NM_016616.2,1922-1940).
catctatggtcatgattct

SEQ ID NO: 107119 - DNA, 19 bp, Homo sapiens
  siRNA target sequence for TXNDC3 (NM_016616.2,2029-2047).
cgagcccagtttggaataa

SEQ ID NO: 107120 - DNA, 19 bp, Homo sapiens
  siRNA target sequence for TXNDC3 (NM_016616.2,2032-2050).
gcccagtttggaataagta

SEQ ID NO: 107121 - DNA, 19 bp, Homo sapiens
  siRNA target sequence for TXNDC3 (NM_016616.2,2033-2051).
cccagtttggaataagtaa

SEQ ID NO: 107122 - DNA, 19 bp, Homo sapiens
  siRNA target sequence for TXNDC3 (NM_016616.2,2035-2053).
cagtttggaataagtaaat

SEQ ID NO: 107123 - DNA, 19 bp, Homo sapiens
  siRNA target sequence for TXNDC3 (NM_016616.2,2078-2096).
ctaacgcctatgaagcaaa

SEQ ID NO: 107124 - DNA, 19 bp, Homo sapiens
  siRNA target sequence for TYK2 (NM_003331.3,464-482).
gccctgggtcactttcagt

SEQ ID NO: 107125 - DNA, 19 bp, Homo sapiens
  siRNA target sequence for TYK2 (NM_003331.3,511-529).
gcatccacattgcacataa

SEQ ID NO: 107126 - DNA, 19 bp, Homo sapiens
  siRNA target sequence for TYK2 (NM_003331.3,627-645).
gatgcaagcctgatgctat

SEQ ID NO: 107127 - DNA, 19 bp, Homo sapiens
  siRNA target sequence for TYK2 (NM_003331.3,630-648).
gcaagcctgatgctatatt

SEQ ID NO: 107128 - DNA, 19 bp, Homo sapiens
  siRNA target sequence for TYK2 (NM_003331.3,631-649).
caagcctgatgctatattt

SEQ ID NO: 107129 - DNA, 19 bp, Homo sapiens
  siRNA target sequence for TYK2 (NM_003331.3,642-660).
ctatatttccgcataaggt

SEQ ID NO: 107130 - DNA, 19 bp, Homo sapiens
  siRNA target sequence for TYK2 (NM_003331.3,861-879).
gaggagatccaccacttta

SEQ ID NO: 107131 - DNA, 19 bp, Homo sapiens
  siRNA target sequence for TYK2 (NM_003331.3,866-884).
gatccaccactttaagaat

SEQ ID NO: 107132 - DNA, 19 bp, Homo sapiens
  siRNA target sequence for TYK2 (NM_003331.3,1343-1361).
caaggaggagggttctagt

SEQ ID NO: 107133 - DNA, 19 bp, Homo sapiens
  siRNA target sequence for TYK2 (NM_003331.3,1455-1473).
ccactgtgggcctacttct

SEQ ID NO: 107134 - DNA, 19 bp, Homo sapiens
  siRNA target sequence for TYK2 (NM_003331.3,1837-1855).
gcttgcggctccgaaagtt

SEQ ID NO: 107135 - DNA, 19 bp, Homo sapiens
  siRNA target sequence for TYK2 (NM_003331.3,2137-2155).
caaggaccaacgtgtatga

SEQ ID NO: 107136 - DNA, 19 bp, Homo sapiens
  siRNA target sequence for TYK2 (NM_003331.3,2800-2818).
cctccgagaaggagcattt

SEQ ID NO: 107137 - DNA, 19 bp, Homo sapiens
  siRNA target sequence for TYK2 (NM_003331.3,2803-2821).
ccgagaaggagcatttcta

SEQ ID NO: 107138 - DNA, 19 bp, Homo sapiens
  siRNA target sequence for TYK2 (NM_003331.3,3001-3019).
cggaccctacggttttcca

SEQ ID NO: 107139 - DNA, 19 bp, Homo sapiens
  siRNA target sequence for TYK2 (NM_003331.3,3017-3035).
ccacaagcgctatttgaaa

SEQ ID NO: 107140 - DNA, 19 bp, Homo sapiens
  siRNA target sequence for TYK2 (NM_003331.3,3018-3036).
cacaagcgctatttgaaaa

SEQ ID NO: 107141 - DNA, 19 bp, Homo sapiens
  siRNA target sequence for TYK2 (NM_003331.3,3210-3228).
gagcacatcatcaagtaca

SEQ ID NO: 107142 - DNA, 19 bp, Homo sapiens
  siRNA target sequence for TYK2 (NM_003331.3,3487-3505).
ccgaaggccacgagtacta

SEQ ID NO: 107143 - DNA, 19 bp, Homo sapiens
  siRNA target sequence for TYK2 (NM_003331.3,3556-3574).
gcctgaaggagtataagtt

SEQ ID NO: 107144 - DNA, 19 bp, Homo sapiens
  siRNA target sequence for TYK2 (NM_003331.3,3563-3581).
ggagtataagttctactat

SEQ ID NO: 107145 - DNA, 19 bp, Homo sapiens
  siRNA target sequence for TYK2 (NM_003331.3,3763-3781).
cctgtgaggtctatcatct

SEQ ID NO: 107146 - DNA, 19 bp, Homo sapiens
  siRNA target sequence for TYK2 (NM_003331.3,3766-3784).
gtgaggtctatcatctcat

SEQ ID NO: 107147 - DNA, 19 bp, Homo sapiens
  siRNA target sequence for TYRO3 (NM_006293.2,647-665).
cacagtggagccaaaagat

SEQ ID NO: 107148 - DNA, 19 bp, Homo sapiens
  siRNA target sequence for TYRO3 (NM_006293.2,718-736).
cccctgaacctgttaccat

SEQ ID NO: 107149 - DNA, 19 bp, Homo sapiens
  siRNA target sequence for TYRO3 (NM_006293.2,779-797).
ctctccatctgttttaaat

SEQ ID NO: 107150 - DNA, 19 bp, Homo sapiens
  siRNA target sequence for TYRO3 (NM_006293.2,781-799).
ctccatctgttttaaatgt

SEQ ID NO: 107151 - DNA, 19 bp, Homo sapiens
  siRNA target sequence for TYRO3 (NM_006293.2,809-827).
gacccagagcaccatgttt

SEQ ID NO: 107152 - DNA, 19 bp, Homo sapiens
  siRNA target sequence for TYRO3 (NM_006293.2,914-932).
catcaccgtgacaaagctt

SEQ ID NO: 107153 - DNA, 19 bp, Homo sapiens
  siRNA target sequence for TYRO3 (NM_006293.2,986-1004).
gctacagtcctgtacagtt

SEQ ID NO: 107154 - DNA, 19 bp, Homo sapiens
  siRNA target sequence for TYRO3 (NM_006293.2,1192-1210).
ccagcgctccccaaaacct

SEQ ID NO: 107155 - DNA, 19 bp, Homo sapiens
  siRNA target sequence for TYRO3 (NM_006293.2,1212-1230).
catgccatccgcacagatt

SEQ ID NO: 107156 - DNA, 19 bp, Homo sapiens
  siRNA target sequence for TYRO3 (NM_006293.2,1564-1582).
ccctcatcctgcttcgaaa

SEQ ID NO: 107157 - DNA, 19 bp, Homo sapiens
  siRNA target sequence for TYRO3 (NM_006293.2,1718-1736).
gggcatcagcgatgaacta

SEQ ID NO: 107158 - DNA, 19 bp, Homo sapiens
  siRNA target sequence for TYRO3 (NM_006293.2,1719-1737).
ggcatcagcgatgaactaa

SEQ ID NO: 107159 - DNA, 19 bp, Homo sapiens
  siRNA target sequence for TYRO3 (NM_006293.2,1720-1738).
gcatcagcgatgaactaaa

SEQ ID NO: 107160 - DNA, 19 bp, Homo sapiens
  siRNA target sequence for TYRO3 (NM_006293.2,1793-1811).
gttgggcaaaggagagttt

SEQ ID NO: 107161 - DNA, 19 bp, Homo sapiens
  siRNA target sequence for TYRO3 (NM_006293.2,1844-1862).
ggatggctcctttgtgaaa

SEQ ID NO: 107162 - DNA, 19 bp, Homo sapiens
  siRNA target sequence for TYRO3 (NM_006293.2,1897-1915).
cctcaagcgacattgaaga

SEQ ID NO: 107163 - DNA, 19 bp, Homo sapiens
  siRNA target sequence for TYRO3 (NM_006293.2,1900-1918).
caagcgacattgaagagtt

SEQ ID NO: 107164 - DNA, 19 bp, Homo sapiens
  siRNA target sequence for TYRO3 (NM_006293.2,2247-2265).
ggactctcccggaagatct

SEQ ID NO: 107165 - DNA, 19 bp, Homo sapiens
  siRNA target sequence for TYRO3 (NM_006293.2,2248-2266).
gactctcccggaagatcta

SEQ ID NO: 107166 - DNA, 19 bp, Homo sapiens
  siRNA target sequence for TYRO3 (NM_006293.2,2336-2354).
ggccgacaacctgtatact

SEQ ID NO: 107167 - DNA, 19 bp, Homo sapiens
  siRNA target sequence for TYRO3 (NM_006293.2,2338-2356).
ccgacaacctgtatactgt

SEQ ID NO: 107168 - DNA, 19 bp, Homo sapiens
  siRNA target sequence for TYRO3 (NM_006293.2,2418-2436).
ccatatgctggcatcgaaa

SEQ ID NO: 107169 - DNA, 19 bp, Homo sapiens
  siRNA target sequence for TYRO3 (NM_006293.2,2419-2437).
catatgctggcatcgaaaa

SEQ ID NO: 107170 - DNA, 19 bp, Homo sapiens
  siRNA target sequence for TYRO3 (NM_006293.2,2464-2482).
gcgggaaccgcctgaaaca

SEQ ID NO: 107171 - DNA, 19 bp, Homo sapiens
  siRNA target sequence for TYRO3 (NM_006293.2,2494-2512).
gtatggaggacgtgtatga

SEQ ID NO: 107172 - DNA, 19 bp, Homo sapiens
  siRNA target sequence for TYRO3 (NM_006293.2,2620-2638).
gccaggaccccttatacat

SEQ ID NO: 107173 - DNA, 19 bp, Homo sapiens
  siRNA target sequence for TYRO3 (NM_006293.2,2622-2640).
caggaccccttatacatca

SEQ ID NO: 107174 - DNA, 19 bp, Homo sapiens
  siRNA target sequence for TYRO3 (NM_006293.2,2756-2774).
cagtgactgtcggtacata

SEQ ID NO: 107175 - DNA, 19 bp, Homo sapiens
  siRNA target sequence for TYRO3 (NM_006293.2,2758-2776).
gtgactgtcggtacatact

SEQ ID NO: 107176 - DNA, 19 bp, Homo sapiens
  siRNA target sequence for TYRO3 (NM_006293.2,2760-2778).
gactgtcggtacatactca

SEQ ID NO: 107177 - DNA, 19 bp, Homo sapiens
  siRNA target sequence for TYRO3 (NM_006293.2,2824-2842).
cagagagtcccctcaatga

SEQ ID NO: 107178 - DNA, 19 bp, Homo sapiens
  siRNA target sequence for UCK1 (NM_031432.1,204-222).
cgaccgtgtgtgagaagat

SEQ ID NO: 107179 - DNA, 19 bp, Homo sapiens
  siRNA target sequence for UCK1 (NM_031432.1,282-300).
gccaggacaggttctacaa

SEQ ID NO: 107180 - DNA, 19 bp, Homo sapiens
  siRNA target sequence for UCK1 (NM_031432.1,330-348).
ccttgaaaggacagtacaa

SEQ ID NO: 107181 - DNA, 19 bp, Homo sapiens
  siRNA target sequence for UCK1 (NM_031432.1,424-442).
ggaggtgccgacctatgat

SEQ ID NO: 107182 - DNA, 19 bp, Homo sapiens
  siRNA target sequence for UCK1 (NM_031432.1,425-443).
gaggtgccgacctatgatt

SEQ ID NO: 107183 - DNA, 19 bp, Homo sapiens
  siRNA target sequence for UCK1 (NM_031432.1,427-445).
ggtgccgacctatgatttt

SEQ ID NO: 107184 - DNA, 19 bp, Homo sapiens
  siRNA target sequence for UCK1 (NM_031432.1,489-507).
cggacgtggttctgtttga

SEQ ID NO: 107185 - DNA, 19 bp, Homo sapiens
  siRNA target sequence for UCK1 (NM_031432.1,586-604).
caggctgtctcgaagagtt

SEQ ID NO: 107186 - DNA, 19 bp, Homo sapiens
  siRNA target sequence for ULK1 (NM_003565.1,528-546).
ctgtctacctggttatgga

SEQ ID NO: 107187 - DNA, 19 bp, Homo sapiens
  siRNA target sequence for ULK1 (NM_003565.1,813-831).
gcggctcccccatgtacat

SEQ ID NO: 107188 - DNA, 19 bp, Homo sapiens
  siRNA target sequence for ULK1 (NM_003565.1,1066-1084).
catggacttcgatgagttt

SEQ ID NO: 107189 - DNA, 19 bp, Homo sapiens
  siRNA target sequence for ULK1 (NM_003565.1,1069-1087).
ggacttcgatgagtttttt

SEQ ID NO: 107190 - DNA, 19 bp, Homo sapiens
  siRNA target sequence for ULK1 (NM_003565.1,1774-1792).
cacgccatctcctcaagtt

SEQ ID NO: 107191 - DNA, 19 bp, Homo sapiens
  siRNA target sequence for ULK1 (NM_003565.1,2330-2348).
ccctttggccggtctttca

SEQ ID NO: 107192 - DNA, 19 bp, Homo sapiens
  siRNA target sequence for ULK1 (NM_003565.1,3167-3185).
ctcctggaccgcattcaca

SEQ ID NO: 107193 - DNA, 19 bp, Homo sapiens
  siRNA target sequence for ULK1 (NM_003565.1,3194-3212).
gccgagaggctcatcttca

SEQ ID NO: 107194 - DNA, 19 bp, Homo sapiens
  siRNA target sequence for ULK2 (NM_014683.2,581-599).
gcaccgccagaaaactgat

SEQ ID NO: 107195 - DNA, 19 bp, Homo sapiens
  siRNA target sequence for ULK2 (NM_014683.2,582-600).
caccgccagaaaactgatt

SEQ ID NO: 107196 - DNA, 19 bp, Homo sapiens
  siRNA target sequence for ULK2 (NM_014683.2,595-613).
ctgattgggaggtagctat

SEQ ID NO: 107197 - DNA, 19 bp, Homo sapiens
  siRNA target sequence for ULK2 (NM_014683.2,597-615).
gattgggaggtagctatta

SEQ ID NO: 107198 - DNA, 19 bp, Homo sapiens
  siRNA target sequence for ULK2 (NM_014683.2,605-623).
ggtagctattaaaagtatt

SEQ ID NO: 107199 - DNA, 19 bp, Homo sapiens
  siRNA target sequence for ULK2 (NM_014683.2,749-767).
ggtgatggagtattgcaat

SEQ ID NO: 107200 - DNA, 19 bp, Homo sapiens
  siRNA target sequence for ULK2 (NM_014683.2,769-787).
gtggagacctcgcagatta

SEQ ID NO: 107201 - DNA, 19 bp, Homo sapiens
  siRNA target sequence for ULK2 (NM_014683.2,771-789).
ggagacctcgcagattatt

SEQ ID NO: 107202 - DNA, 19 bp, Homo sapiens
  siRNA target sequence for ULK2 (NM_014683.2,772-790).
gagacctcgcagattattt

SEQ ID NO: 107203 - DNA, 19 bp, Homo sapiens
  siRNA target sequence for ULK2 (NM_014683.2,776-794).
cctcgcagattatttgcaa

SEQ ID NO: 107204 - DNA, 19 bp, Homo sapiens
  siRNA target sequence for ULK2 (NM_014683.2,920-938).
ctatgccaatcgcagaaaa

SEQ ID NO: 107205 - DNA, 19 bp, Homo sapiens
  siRNA target sequence for ULK2 (NM_014683.2,924-942).
gccaatcgcagaaaatcaa

SEQ ID NO: 107206 - DNA, 19 bp, Homo sapiens
  siRNA target sequence for ULK2 (NM_014683.2,926-944).
caatcgcagaaaatcaagt

SEQ ID NO: 107207 - DNA, 19 bp, Homo sapiens
  siRNA target sequence for ULK2 (NM_014683.2,947-965).
cagtggtattcgcatcaaa

SEQ ID NO: 107208 - DNA, 19 bp, Homo sapiens
  siRNA target sequence for ULK2 (NM_014683.2,984-1002).
gctcgttacctacatagta

SEQ ID NO: 107209 - DNA, 19 bp, Homo sapiens
  siRNA target sequence for ULK2 (NM_014683.2,985-1003).
ctcgttacctacatagtaa

SEQ ID NO: 107210 - DNA, 19 bp, Homo sapiens
  siRNA target sequence for ULK2 (NM_014683.2,987-1005).
cgttacctacatagtaaca

SEQ ID NO: 107211 - DNA, 19 bp, Homo sapiens
  siRNA target sequence for ULK2 (NM_014683.2,988-1006).
gttacctacatagtaacat

SEQ ID NO: 107212 - DNA, 19 bp, Homo sapiens
  siRNA target sequence for ULK2 (NM_014683.2,1024-1042).
gtggatccccgatgtacat

SEQ ID NO: 107213 - DNA, 19 bp, Homo sapiens
  siRNA target sequence for ULK2 (NM_014683.2,1044-1062).
gctcctgaggttattatgt

SEQ ID NO: 107214 - DNA, 19 bp, Homo sapiens
  siRNA target sequence for ULK2 (NM_014683.2,1052-1070).
ggttattatgtctcaacat

SEQ ID NO: 107215 - DNA, 19 bp, Homo sapiens
  siRNA target sequence for ULK2 (NM_014683.2,1053-1071).
gttattatgtctcaacatt

SEQ ID NO: 107216 - DNA, 19 bp, Homo sapiens
  siRNA target sequence for ULK2 (NM_014683.2,1101-1119).
ggaacagtgatataccaat

SEQ ID NO: 107217 - DNA, 19 bp, Homo sapiens
  siRNA target sequence for ULK2 (NM_014683.2,1115-1133).
ccaatgcctagttggaaaa

SEQ ID NO: 107218 - DNA, 19 bp, Homo sapiens
  siRNA target sequence for ULK2 (NM_014683.2,1147-1165).
ccaatagtcctcaagactt

SEQ ID NO: 107219 - DNA, 19 bp, Homo sapiens
  siRNA target sequence for ULK2 (NM_014683.2,1148-1166).
caatagtcctcaagactta

SEQ ID NO: 107220 - DNA, 19 bp, Homo sapiens
  siRNA target sequence for ULK2 (NM_014683.2,1158-1176).
caagacttaaggatgtttt

SEQ ID NO: 107221 - DNA, 19 bp, Homo sapiens
  siRNA target sequence for ULK2 (NM_014683.2,1189-1207).
ggagcttaatgcctagtat

SEQ ID NO: 107222 - DNA, 19 bp, Homo sapiens
  siRNA target sequence for ULK2 (NM_014683.2,1190-1208).
gagcttaatgcctagtatt

SEQ ID NO: 107223 - DNA, 19 bp, Homo sapiens
  siRNA target sequence for ULK2 (NM_014683.2,1314-1332).
gagcaaggtccagtaaaaa

SEQ ID NO: 107224 - DNA, 19 bp, Homo sapiens
  siRNA target sequence for ULK2 (NM_014683.2,1317-1335).
caaggtccagtaaaaaaat

SEQ ID NO: 107225 - DNA, 19 bp, Homo sapiens
  siRNA target sequence for ULK2 (NM_014683.2,1394-1412).
ctctccatcttgtcgtttt

SEQ ID NO: 107226 - DNA, 19 bp, Homo sapiens
  siRNA target sequence for ULK2 (NM_014683.2,1398-1416).
ccatcttgtcgttttgctt

SEQ ID NO: 107227 - DNA, 19 bp, Homo sapiens
  siRNA target sequence for ULK2 (NM_014683.2,1543-1561).
gtgacacggatgactttgt

SEQ ID NO: 107228 - DNA, 19 bp, Homo sapiens
  siRNA target sequence for ULK2 (NM_014683.2,1545-1563).
gacacggatgactttgttt

SEQ ID NO: 107229 - DNA, 19 bp, Homo sapiens
  siRNA target sequence for ULK2 (NM_014683.2,1618-1636).
ctggcagacgtgcttcaaa

SEQ ID NO: 107230 - DNA, 19 bp, Homo sapiens
  siRNA target sequence for ULK2 (NM_014683.2,1621-1639).
gcagacgtgcttcaaatga

SEQ ID NO: 107231 - DNA, 19 bp, Homo sapiens
  siRNA target sequence for ULK2 (NM_014683.2,1622-1640).
cagacgtgcttcaaatgaa

SEQ ID NO: 107232 - DNA, 19 bp, Homo sapiens
  siRNA target sequence for ULK2 (NM_014683.2,1688-1706).
cgaaacagcaccaattcca

SEQ ID NO: 107233 - DNA, 19 bp, Homo sapiens
  siRNA target sequence for ULK2 (NM_014683.2,1714-1732).
ctcaaataaggaattatca

SEQ ID NO: 107234 - DNA, 19 bp, Homo sapiens
  siRNA target sequence for ULK2 (NM_014683.2,1734-1752).
cgcatagagcagaatctta

SEQ ID NO: 107235 - DNA, 19 bp, Homo sapiens
  siRNA target sequence for ULK2 (NM_014683.2,1742-1760).
gcagaatcttacatctact

SEQ ID NO: 107236 - DNA, 19 bp, Homo sapiens
  siRNA target sequence for ULK2 (NM_014683.2,1765-1783).
gctcaggcacaaatgtaca

SEQ ID NO: 107237 - DNA, 19 bp, Homo sapiens
  siRNA target sequence for ULK2 (NM_014683.2,2252-2270).
gagttctgactggttcttt

SEQ ID NO: 107238 - DNA, 19 bp, Homo sapiens
  siRNA target sequence for ULK2 (NM_014683.2,2254-2272).
gttctgactggttctttaa

SEQ ID NO: 107239 - DNA, 19 bp, Homo sapiens
  siRNA target sequence for ULK2 (NM_014683.2,2309-2327).
gaccacagctcctttcaaa

SEQ ID NO: 107240 - DNA, 19 bp, Homo sapiens
  siRNA target sequence for ULK2 (NM_014683.2,2504-2522).
cagtaccgggaagttatca

SEQ ID NO: 107241 - DNA, 19 bp, Homo sapiens
  siRNA target sequence for ULK2 (NM_014683.2,2506-2524).
gtaccgggaagttatcaga

SEQ ID NO: 107242 - DNA, 19 bp, Homo sapiens
  siRNA target sequence for ULK2 (NM_014683.2,2510-2528).
cgggaagttatcagatcaa

SEQ ID NO: 107243 - DNA, 19 bp, Homo sapiens
  siRNA target sequence for ULK2 (NM_014683.2,2700-2718).
gcggcagcccccacttgta

SEQ ID NO: 107244 - DNA, 19 bp, Homo sapiens
  siRNA target sequence for ULK2 (NM_014683.2,2723-2741).
catgttccttcgaacaaga

SEQ ID NO: 107245 - DNA, 19 bp, Homo sapiens
  siRNA target sequence for ULK2 (NM_014683.2,2726-2744).
gttccttcgaacaagaaca

SEQ ID NO: 107246 - DNA, 19 bp, Homo sapiens
  siRNA target sequence for ULK2 (NM_014683.2,2975-2993).
caccttacgccatctgaat

SEQ ID NO: 107247 - DNA, 19 bp, Homo sapiens
  siRNA target sequence for ULK2 (NM_014683.2,2977-2995).
ccttacgccatctgaatgt

SEQ ID NO: 107248 - DNA, 19 bp, Homo sapiens
  siRNA target sequence for ULK2 (NM_014683.2,3255-3273).
caagttgtcaagaatctga

SEQ ID NO: 107249 - DNA, 19 bp, Homo sapiens
  siRNA target sequence for ULK2 (NM_014683.2,3266-3284).
gaatctgaacgaacgatat

SEQ ID NO: 107250 - DNA, 19 bp, Homo sapiens
  siRNA target sequence for ULK2 (NM_014683.2,3270-3288).
ctgaacgaacgatataaat

SEQ ID NO: 107251 - DNA, 19 bp, Homo sapiens
  siRNA target sequence for ULK2 (NM_014683.2,3381-3399).
gcagagaaactcatctata

SEQ ID NO: 107252 - DNA, 19 bp, Homo sapiens
  siRNA target sequence for ULK2 (NM_014683.2,3382-3400).
cagagaaactcatctataa

SEQ ID NO: 107253 - DNA, 19 bp, Homo sapiens
  siRNA target sequence for ULK2 (NM_014683.2,3386-3404).
gaaactcatctataattgt

SEQ ID NO: 107254 - DNA, 19 bp, Homo sapiens
  siRNA target sequence for ULK2 (NM_014683.2,3452-3470).
gaccgaagatattgtttat

SEQ ID NO: 107255 - DNA, 19 bp, Homo sapiens
  siRNA target sequence for ULK2 (NM_014683.2,3502-3520).
gcctaagtaggattctaca

SEQ ID NO: 107256 - DNA, 19 bp, Homo sapiens
  siRNA target sequence for UMP-CMPK (NM_016308.1,113-131).
gctctccacgtctcatgaa

SEQ ID NO: 107257 - DNA, 19 bp, Homo sapiens
  siRNA target sequence for UMP-CMPK (NM_016308.1,189-207).
ccgcatcgtcgagaaatat

SEQ ID NO: 107258 - DNA, 19 bp, Homo sapiens
  siRNA target sequence for UMP-CMPK (NM_016308.1,266-284).
cacagtatggtgaacttat

SEQ ID NO: 107259 - DNA, 19 bp, Homo sapiens
  siRNA target sequence for UMP-CMPK (NM_016308.1,270-288).
gtatggtgaacttattgaa

SEQ ID NO: 107260 - DNA, 19 bp, Homo sapiens
  siRNA target sequence for UMP-CMPK (NM_016308.1,309-327).
gattgtaccagttgagata

SEQ ID NO: 107261 - DNA, 19 bp, Homo sapiens
  siRNA target sequence for UMP-CMPK (NM_016308.1,319-337).
gttgagataaccatcagtt

SEQ ID NO: 107262 - DNA, 19 bp, Homo sapiens
  siRNA target sequence for UMP-CMPK (NM_016308.1,454-472).
gggaaggcagatgtatctt

SEQ ID NO: 107263 - DNA, 19 bp, Homo sapiens
  siRNA target sequence for UMP-CMPK (NM_016308.1,520-538).
cttgagaggggaaagagta

SEQ ID NO: 107264 - DNA, 19 bp, Homo sapiens
  siRNA target sequence for UMP-CMPK (NM_016308.1,587-605).
cctaccttcagtcaacaaa

SEQ ID NO: 107265 - DNA, 19 bp, Homo sapiens
  siRNA target sequence for UMP-CMPK (NM_016308.1,597-615).
gtcaacaaagccaattatt

SEQ ID NO: 107266 - DNA, 19 bp, Homo sapiens
  siRNA target sequence for UMP-CMPK (NM_016308.1,606-624).
gccaattattgacttatat

SEQ ID NO: 107267 - DNA, 19 bp, Homo sapiens
  siRNA target sequence for UMP-CMPK (NM_016308.1,608-626).
caattattgacttatatga

SEQ ID NO: 107268 - DNA, 19 bp, Homo sapiens
  siRNA target sequence for UMP-CMPK (NM_016308.1,645-663).
gaaaatagatgcttctaaa

SEQ ID NO: 107269 - DNA, 19 bp, Homo sapiens
  siRNA target sequence for UMP-CMPK (NM_016308.1,682-700).
gatgaagttgtgcagattt

SEQ ID NO: 107270 - DNA, 19 bp, Homo sapiens
  siRNA target sequence for UMPK (NM_012474.3,282-300).
cttccgtgtgtgctaagat

SEQ ID NO: 107271 - DNA, 19 bp, Homo sapiens
  siRNA target sequence for UMPK (NM_012474.3,505-523).
gatccccgtgtatgacttt

SEQ ID NO: 107272 - DNA, 19 bp, Homo sapiens
  siRNA target sequence for UMPK (NM_012474.3,544-562).
ggagacagttactgtctat

SEQ ID NO: 107273 - DNA, 19 bp, Homo sapiens
  siRNA target sequence for UMPK (NM_012474.3,625-643).
gttccagatgaagcttttt

SEQ ID NO: 107274 - DNA, 19 bp, Homo sapiens
  siRNA target sequence for UMPK (NM_012474.3,665-683).
cggctctcacgcagagtat

SEQ ID NO: 107275 - DNA, 19 bp, Homo sapiens
  siRNA target sequence for UMPK (NM_012474.3,666-684).
ggctctcacgcagagtatt

SEQ ID NO: 107276 - DNA, 19 bp, Homo sapiens
  siRNA target sequence for UMPK (NM_012474.3,667-685).
gctctcacgcagagtatta

SEQ ID NO: 107277 - DNA, 19 bp, Homo sapiens
  siRNA target sequence for UMPK (NM_012474.3,668-686).
ctctcacgcagagtattaa

SEQ ID NO: 107278 - DNA, 19 bp, Homo sapiens
  siRNA target sequence for UMPK (NM_012474.3,807-825).
ctagaggtgcagataatct

SEQ ID NO: 107279 - DNA, 19 bp, Homo sapiens
  siRNA target sequence for URKL1 (NM_017859.1,379-397).
ccactgtggccagaatgat

SEQ ID NO: 107280 - DNA, 19 bp, Homo sapiens
  siRNA target sequence for URKL1 (NM_017859.1,483-501).
gccgcacacaacaacttca

SEQ ID NO: 107281 - DNA, 19 bp, Homo sapiens
  siRNA target sequence for URKL1 (NM_017859.1,487-505).
cacacaacaacttcaactt

SEQ ID NO: 107282 - DNA, 19 bp, Homo sapiens
  siRNA target sequence for URKL1 (NM_017859.1,525-543).
gacttcgacctcatcattt

SEQ ID NO: 107283 - DNA, 19 bp, Homo sapiens
  siRNA target sequence for URKL1 (NM_017859.1,574-592).
gtgtcaaggtgcccattta

SEQ ID NO: 107284 - DNA, 19 bp, Homo sapiens
  siRNA target sequence for URKL1 (NM_017859.1,640-658).
gtgcaaacgtcatcatctt

SEQ ID NO: 107285 - DNA, 19 bp, Homo sapiens
  siRNA target sequence for URKL1 (NM_017859.1,798-816).
gtcatcaagcagtacaaca

SEQ ID NO: 107286 - DNA, 19 bp, Homo sapiens
  siRNA target sequence for URKL1 (NM_017859.1,829-847).
cctccttcgaccagtacat

SEQ ID NO: 107287 - DNA, 19 bp, Homo sapiens
  siRNA target sequence for URKL1 (NM_017859.1,1078-1096).
ccagtcgcgacgagttcat

SEQ ID NO: 107288 - DNA, 19 bp, Homo sapiens
  siRNA target sequence for URKL1 (NM_017859.1,1086-1104).
gacgagttcatcttctact

SEQ ID NO: 107289 - DNA, 19 bp, Homo sapiens
  siRNA target sequence for URKL1 (NM_017859.1,1464-1482).
gtgcctgaggacaagatct

SEQ ID NO: 107290 - DNA, 19 bp, Homo sapiens
  siRNA target sequence for URKL1 (NM_017859.1,1534-1552).
catttccgcgagtgagaat

SEQ ID NO: 107291 - DNA, 19 bp, Homo sapiens
  siRNA target sequence for URKL1 (NM_017859.1,1539-1557).
ccgcgagtgagaatcatca

SEQ ID NO: 107292 - DNA, 19 bp, Homo sapiens
  siRNA target sequence for URKL1 (NM_017859.1,1616-1634).
ctttggcgaccgctacttt

SEQ ID NO: 107293 - DNA, 19 bp, Homo sapiens
  siRNA target sequence for VARS2 (NM_006295.1,527-545).
cgccgacacggagttaata

SEQ ID NO: 107294 - DNA, 19 bp, Homo sapiens
  siRNA target sequence for VARS2 (NM_006295.1,530-548).
cgacacggagttaatacca

SEQ ID NO: 107295 - DNA, 19 bp, Homo sapiens
  siRNA target sequence for VARS2 (NM_006295.1,765-783).
cggatctggaataatgtga

SEQ ID NO: 107296 - DNA, 19 bp, Homo sapiens
  siRNA target sequence for VARS2 (NM_006295.1,831-849).
ctaggagaagtggttctat

SEQ ID NO: 107297 - DNA, 19 bp, Homo sapiens
  siRNA target sequence for VARS2 (NM_006295.1,1038-1056).
cgggatcctggggtcatta

SEQ ID NO: 107298 - DNA, 19 bp, Homo sapiens
  siRNA target sequence for VARS2 (NM_006295.1,1218-1236).
ccccgaggtgtcttcatga

SEQ ID NO: 107299 - DNA, 19 bp, Homo sapiens
  siRNA target sequence for VARS2 (NM_006295.1,1219-1237).
cccgaggtgtcttcatgat

SEQ ID NO: 107300 - DNA, 19 bp, Homo sapiens
  siRNA target sequence for VARS2 (NM_006295.1,1221-1239).
cgaggtgtcttcatgatgt

SEQ ID NO: 107301 - DNA, 19 bp, Homo sapiens
  siRNA target sequence for VARS2 (NM_006295.1,1498-1516).
ggatttaccaccagttgaa

SEQ ID NO: 107302 - DNA, 19 bp, Homo sapiens
  siRNA target sequence for VARS2 (NM_006295.1,1629-1647).
cgcagtacccgccttgtta

SEQ ID NO: 107303 - DNA, 19 bp, Homo sapiens
  siRNA target sequence for VARS2 (NM_006295.1,1825-1843).
caactcggatcgagacaat

SEQ ID NO: 107304 - DNA, 19 bp, Homo sapiens
  siRNA target sequence for VARS2 (NM_006295.1,1863-1881).
gctgtgcaccccaaagata

SEQ ID NO: 107305 - DNA, 19 bp, Homo sapiens
  siRNA target sequence for VARS2 (NM_006295.1,1942-1960).
ccattgtcttcgatgaatt

SEQ ID NO: 107306 - DNA, 19 bp, Homo sapiens
  siRNA target sequence for VARS2 (NM_006295.1,2004-2022).
gcacatgaccaaaatgact

SEQ ID NO: 107307 - DNA, 19 bp, Homo sapiens
  siRNA target sequence for VARS2 (NM_006295.1,2370-2388).
cgggagtggtgcatttcca

SEQ ID NO: 107308 - DNA, 19 bp, Homo sapiens
  siRNA target sequence for VARS2 (NM_006295.1,2603-2621).
cctcttccccttatccatt

SEQ ID NO: 107309 - DNA, 19 bp, Homo sapiens
  siRNA target sequence for VARS2 (NM_006295.1,2982-3000).
gctctccggtttggattat

SEQ ID NO: 107310 - DNA, 19 bp, Homo sapiens
  siRNA target sequence for VARS2 (NM_006295.1,2994-3012).
ggattatgtgcctacatgt

SEQ ID NO: 107311 - DNA, 19 bp, Homo sapiens
  siRNA target sequence for VARS2 (NM_006295.1,3013-3031).
cccagggtcgtgacatcaa

SEQ ID NO: 107312 - DNA, 19 bp, Homo sapiens
  siRNA target sequence for VARS2 (NM_006295.1,3307-3325).
gcctgaaacctgtactgaa

SEQ ID NO: 107313 - DNA, 19 bp, Homo sapiens
  siRNA target sequence for VARS2 (NM_006295.1,3357-3375).
cgccagaccctgtacactt

SEQ ID NO: 107314 - DNA, 19 bp, Homo sapiens
  siRNA target sequence for VCP (NM_007126.2,246-264).
ctatcaacagccattctca

SEQ ID NO: 107315 - DNA, 19 bp, Homo sapiens
  siRNA target sequence for VCP (NM_007126.2,275-293).
ccgtcccaatcggttaatt

SEQ ID NO: 107316 - DNA, 19 bp, Homo sapiens
  siRNA target sequence for VCP (NM_007126.2,277-295).
gtcccaatcggttaattgt

SEQ ID NO: 107317 - DNA, 19 bp, Homo sapiens
  siRNA target sequence for VCP (NM_007126.2,280-298).
ccaatcggttaattgttga

SEQ ID NO: 107318 - DNA, 19 bp, Homo sapiens
  siRNA target sequence for VCP (NM_007126.2,281-299).
caatcggttaattgttgat

SEQ ID NO: 107319 - DNA, 19 bp, Homo sapiens
  siRNA target sequence for VCP (NM_007126.2,419-437).
catcgtcctttctgatgat

SEQ ID NO: 107320 - DNA, 19 bp, Homo sapiens
  siRNA target sequence for VCP (NM_007126.2,422-440).
cgtcctttctgatgatact

SEQ ID NO: 107321 - DNA, 19 bp, Homo sapiens
  siRNA target sequence for VCP (NM_007126.2,455-473).
gattcggatgaatagagtt

SEQ ID NO: 107322 - DNA, 19 bp, Homo sapiens
  siRNA target sequence for VCP (NM_007126.2,469-487).
gagttgttcggaataacct

SEQ ID NO: 107323 - DNA, 19 bp, Homo sapiens
  siRNA target sequence for VCP (NM_007126.2,523-541).
catgccctgatgtgaagta

SEQ ID NO: 107324 - DNA, 19 bp, Homo sapiens
  siRNA target sequence for VCP (NM_007126.2,534-552).
gtgaagtacggcaaacgta

SEQ ID NO: 107325 - DNA, 19 bp, Homo sapiens
  siRNA target sequence for VCP (NM_007126.2,539-557).
gtacggcaaacgtatccat

SEQ ID NO: 107326 - DNA, 19 bp, Homo sapiens
  siRNA target sequence for VCP (NM_007126.2,575-593).
cacagtggaaggcattact

SEQ ID NO: 107327 - DNA, 19 bp, Homo sapiens
  siRNA target sequence for VCP (NM_007126.2,585-603).
ggcattactggtaatctct

SEQ ID NO: 107328 - DNA, 19 bp, Homo sapiens
  siRNA target sequence for VCP (NM_007126.2,600-618).
ctcttcgaggtatacctta

SEQ ID NO: 107329 - DNA, 19 bp, Homo sapiens
  siRNA target sequence for VCP (NM_007126.2,647-665).
catccggaaaggagacatt

SEQ ID NO: 107330 - DNA, 19 bp, Homo sapiens
  siRNA target sequence for VCP (NM_007126.2,686-704).
gcgtgctgtggagttcaaa

SEQ ID NO: 107331 - DNA, 19 bp, Homo sapiens
  siRNA target sequence for VCP (NM_007126.2,717-735).
gatcctagcccttattgca

SEQ ID NO: 107332 - DNA, 19 bp, Homo sapiens
  siRNA target sequence for VCP (NM_007126.2,763-781).
gcgaaggggagcctatcaa

SEQ ID NO: 107333 - DNA, 19 bp, Homo sapiens
  siRNA target sequence for VCP (NM_007126.2,764-782).
cgaaggggagcctatcaaa

SEQ ID NO: 107334 - DNA, 19 bp, Homo sapiens
  siRNA target sequence for VCP (NM_007126.2,896-914).
cctctttaaggcaattggt

SEQ ID NO: 107335 - DNA, 19 bp, Homo sapiens
  siRNA target sequence for VCP (NM_007126.2,976-994).
ctcgagctgtagcaaatga

SEQ ID NO: 107336 - DNA, 19 bp, Homo sapiens
  siRNA target sequence for VCP (NM_007126.2,978-996).
cgagctgtagcaaatgaga

SEQ ID NO: 107337 - DNA, 19 bp, Homo sapiens
  siRNA target sequence for VCP (NM_007126.2,1000-1018).
gagccttcttcttcttgat

SEQ ID NO: 107338 - DNA, 19 bp, Homo sapiens
  siRNA target sequence for VCP (NM_007126.2,1026-1044).
cctgagatcatgagcaaat

SEQ ID NO: 107339 - DNA, 19 bp, Homo sapiens
  siRNA target sequence for VCP (NM_007126.2,1057-1075).
ctgagagcaaccttcgtaa

SEQ ID NO: 107340 - DNA, 19 bp, Homo sapiens
  siRNA target sequence for VCP (NM_007126.2,1135-1153).
ccatcgctcccaaaagaga

SEQ ID NO: 107341 - DNA, 19 bp, Homo sapiens
  siRNA target sequence for VCP (NM_007126.2,1223-1241).
gagggcacatgtgattgtt

SEQ ID NO: 107342 - DNA, 19 bp, Homo sapiens
  siRNA target sequence for VCP (NM_007126.2,1287-1305).
cgatttggtcgctttgaca

SEQ ID NO: 107343 - DNA, 19 bp, Homo sapiens
  siRNA target sequence for VCP (NM_007126.2,1306-1324).
gggaggtagatattggaat

SEQ ID NO: 107344 - DNA, 19 bp, Homo sapiens
  siRNA target sequence for VCP (NM_007126.2,1307-1325).
ggaggtagatattggaatt

SEQ ID NO: 107345 - DNA, 19 bp, Homo sapiens
  siRNA target sequence for VCP (NM_007126.2,1310-1328).
ggtagatattggaattcct

SEQ ID NO: 107346 - DNA, 19 bp, Homo sapiens
  siRNA target sequence for VCP (NM_007126.2,1332-1350).
gctacaggacgcttagaga

SEQ ID NO: 107347 - DNA, 19 bp, Homo sapiens
  siRNA target sequence for VCP (NM_007126.2,1333-1351).
ctacaggacgcttagagat

SEQ ID NO: 107348 - DNA, 19 bp, Homo sapiens
  siRNA target sequence for VCP (NM_007126.2,1339-1357).
gacgcttagagattcttca

SEQ ID NO: 107349 - DNA, 19 bp, Homo sapiens
  siRNA target sequence for VCP (NM_007126.2,1427-1445).
gcatgtgggtgctgactta

SEQ ID NO: 107350 - DNA, 19 bp, Homo sapiens
  siRNA target sequence for VCP (NM_007126.2,1524-1542).
gatgccgaggtcatgaact

SEQ ID NO: 107351 - DNA, 19 bp, Homo sapiens
  siRNA target sequence for VCP (NM_007126.2,1701-1719).
gtggagcacccagacaaat

SEQ ID NO: 107352 - DNA, 19 bp, Homo sapiens
  siRNA target sequence for VCP (NM_007126.2,1741-1759).
cttccaagggagttctgtt

SEQ ID NO: 107353 - DNA, 19 bp, Homo sapiens
  siRNA target sequence for VCP (NM_007126.2,2512-2530).
gctttggcagcttcagatt

SEQ ID NO: 107354 - DNA, 19 bp, Homo sapiens
  siRNA target sequence for VPS11 (NM_021729.3,419-437).
cactctgcactcgaatctt

SEQ ID NO: 107355 - DNA, 19 bp, Homo sapiens
  siRNA target sequence for VPS11 (NM_021729.3,457-475).
gagccaactgttgtatctt

SEQ ID NO: 107356 - DNA, 19 bp, Homo sapiens
  siRNA target sequence for VPS11 (NM_021729.3,460-478).
ccaactgttgtatcttgtt

SEQ ID NO: 107357 - DNA, 19 bp, Homo sapiens
  siRNA target sequence for VPS11 (NM_021729.3,476-494).
gtttgactgtccatgaaaa

SEQ ID NO: 107358 - DNA, 19 bp, Homo sapiens
  siRNA target sequence for VPS11 (NM_021729.3,557-575).
cccgggaccggcatagcaa

SEQ ID NO: 107359 - DNA, 19 bp, Homo sapiens
  siRNA target sequence for VPS11 (NM_021729.3,572-590).
gcaagacccagattttgca

SEQ ID NO: 107360 - DNA, 19 bp, Homo sapiens
  siRNA target sequence for VPS11 (NM_021729.3,594-612).
gggcaactatcctgtaact

SEQ ID NO: 107361 - DNA, 19 bp, Homo sapiens
  siRNA target sequence for VPS11 (NM_021729.3,639-657).
gaccactcacttgtttgtt

SEQ ID NO: 107362 - DNA, 19 bp, Homo sapiens
  siRNA target sequence for VPS11 (NM_021729.3,667-685).
gagaacgtccagtcctata

SEQ ID NO: 107363 - DNA, 19 bp, Homo sapiens
  siRNA target sequence for VPS11 (NM_021729.3,669-687).
gaacgtccagtcctatata

SEQ ID NO: 107364 - DNA, 19 bp, Homo sapiens
  siRNA target sequence for VPS11 (NM_021729.3,864-882).
cattgcccactggtttaga

SEQ ID NO: 107365 - DNA, 19 bp, Homo sapiens
  siRNA target sequence for VPS11 (NM_021729.3,883-901).
ggctaccttatcattgtct

SEQ ID NO: 107366 - DNA, 19 bp, Homo sapiens
  siRNA target sequence for VPS11 (NM_021729.3,957-975).
ctccgacaagcagattcta

SEQ ID NO: 107367 - DNA, 19 bp, Homo sapiens
  siRNA target sequence for VPS11 (NM_021729.3,959-977).
ccgacaagcagattctaaa

SEQ ID NO: 107368 - DNA, 19 bp, Homo sapiens
  siRNA target sequence for VPS11 (NM_021729.3,1007-1025).
cctatagcaccgtctttga

SEQ ID NO: 107369 - DNA, 19 bp, Homo sapiens
  siRNA target sequence for VPS11 (NM_021729.3,1016-1034).
ccgtctttgaggatgtagt

SEQ ID NO: 107370 - DNA, 19 bp, Homo sapiens
  siRNA target sequence for VPS11 (NM_021729.3,1132-1150).
ctgtttaagaagaacctat

SEQ ID NO: 107371 - DNA, 19 bp, Homo sapiens
  siRNA target sequence for VPS11 (NM_021729.3,1258-1276).
ggggctgtccagcaatata

SEQ ID NO: 107372 - DNA, 19 bp, Homo sapiens
  siRNA target sequence for VPS11 (NM_021729.3,1269-1287).
gcaatatatccgaaccatt

SEQ ID NO: 107373 - DNA, 19 bp, Homo sapiens
  siRNA target sequence for VPS11 (NM_021729.3,1327-1345).
gatgcccagcgcattcaca

SEQ ID NO: 107374 - DNA, 19 bp, Homo sapiens
  siRNA target sequence for VPS11 (NM_021729.3,1411-1429).
ctcctcaactgctatacca

SEQ ID NO: 107375 - DNA, 19 bp, Homo sapiens
  siRNA target sequence for VPS11 (NM_021729.3,1522-1540).
cggcaggctggctactact

SEQ ID NO: 107376 - DNA, 19 bp, Homo sapiens
  siRNA target sequence for VPS11 (NM_021729.3,1731-1749).
gctgaagggactttgtact

SEQ ID NO: 107377 - DNA, 19 bp, Homo sapiens
  siRNA target sequence for VPS11 (NM_021729.3,1734-1752).
gaagggactttgtactgat

SEQ ID NO: 107378 - DNA, 19 bp, Homo sapiens
  siRNA target sequence for VPS11 (NM_021729.3,1737-1755).
gggactttgtactgattat

SEQ ID NO: 107379 - DNA, 19 bp, Homo sapiens
  siRNA target sequence for VPS11 (NM_021729.3,1815-1833).
ggagttcatccccatcttt

SEQ ID NO: 107380 - DNA, 19 bp, Homo sapiens
  siRNA target sequence for VPS11 (NM_021729.3,2075-2093).
gtgtcctttacctttatga

SEQ ID NO: 107381 - DNA, 19 bp, Homo sapiens
  siRNA target sequence for VPS11 (NM_021729.3,2289-2307).
cctcatgccacctcttcta

SEQ ID NO: 107382 - DNA, 19 bp, Homo sapiens
  siRNA target sequence for VPS11 (NM_021729.3,2358-2376).
ggactacctggtccaaaaa

SEQ ID NO: 107383 - DNA, 19 bp, Homo sapiens
  siRNA target sequence for VPS11 (NM_021729.3,2361-2379).
ctacctggtccaaaaacta

SEQ ID NO: 107384 - DNA, 19 bp, Homo sapiens
  siRNA target sequence for VPS11 (NM_021729.3,2477-2495).
ccagtcctaagattttcca

SEQ ID NO: 107385 - DNA, 19 bp, Homo sapiens
  siRNA target sequence for VPS11 (NM_021729.3,2505-2523).
gtgcagcatctgtaacagt

SEQ ID NO: 107386 - DNA, 19 bp, Homo sapiens
  siRNA target sequence for VPS11 (NM_021729.3,2635-2653).
cggaaggtcatggatatga

SEQ ID NO: 107387 - DNA, 19 bp, Homo sapiens
  siRNA target sequence for VPS11 (NM_021729.3,2636-2654).
ggaaggtcatggatatgat

SEQ ID NO: 107388 - DNA, 19 bp, Homo sapiens
  siRNA target sequence for VPS11 (NM_021729.3,2674-2692).
cgagatctccatgatcaat

SEQ ID NO: 107389 - DNA, 19 bp, Homo sapiens
  siRNA target sequence for VPS11 (NM_021729.3,2675-2693).
gagatctccatgatcaatt

SEQ ID NO: 107390 - DNA, 19 bp, Homo sapiens
  siRNA target sequence for VPS11 (NM_021729.3,2749-2767).
ggcagaggtgttttcaaca

SEQ ID NO: 107391 - DNA, 19 bp, Homo sapiens
  siRNA target sequence for VPS4A (NM_013245.2,245-263).
cctccacgctatcaagtat

SEQ ID NO: 107392 - DNA, 19 bp, Homo sapiens
  siRNA target sequence for VPS4A (NM_013245.2,328-346).
ccgagaagctgaaggatta

SEQ ID NO: 107393 - DNA, 19 bp, Homo sapiens
  siRNA target sequence for VPS4A (NM_013245.2,335-353).
gctgaaggattatttacga

SEQ ID NO: 107394 - DNA, 19 bp, Homo sapiens
  siRNA target sequence for VPS4A (NM_013245.2,336-354).
ctgaaggattatttacgaa

SEQ ID NO: 107395 - DNA, 19 bp, Homo sapiens
  siRNA target sequence for VPS4A (NM_013245.2,341-359).
ggattatttacgaagcaaa

SEQ ID NO: 107396 - DNA, 19 bp, Homo sapiens
  siRNA target sequence for VPS4A (NM_013245.2,368-386).
cggcaagaagccagtcaaa

SEQ ID NO: 107397 - DNA, 19 bp, Homo sapiens
  siRNA target sequence for VPS4A (NM_013245.2,429-447).
ggggataatccggagaaaa

SEQ ID NO: 107398 - DNA, 19 bp, Homo sapiens
  siRNA target sequence for VPS4A (NM_013245.2,430-448).
gggataatccggagaaaaa

SEQ ID NO: 107399 - DNA, 19 bp, Homo sapiens
  siRNA target sequence for VPS4A (NM_013245.2,432-450).
gataatccggagaaaaaga

SEQ ID NO: 107400 - DNA, 19 bp, Homo sapiens
  siRNA target sequence for VPS4A (NM_013245.2,482-500).
gatggagaagcccaacata

SEQ ID NO: 107401 - DNA, 19 bp, Homo sapiens
  siRNA target sequence for VPS4A (NM_013245.2,824-842).
ctgcgggtcccgaaatgaa

SEQ ID NO: 107402 - DNA, 19 bp, Homo sapiens
  siRNA target sequence for VPS4A (NM_013245.2,826-844).
gcgggtcccgaaatgaaaa

SEQ ID NO: 107403 - DNA, 19 bp, Homo sapiens
  siRNA target sequence for VPS4A (NM_013245.2,827-845).
cgggtcccgaaatgaaaat

SEQ ID NO: 107404 - DNA, 19 bp, Homo sapiens
  siRNA target sequence for VPS4A (NM_013245.2,898-916).
gggtggggaataacaatga

SEQ ID NO: 107405 - DNA, 19 bp, Homo sapiens
  siRNA target sequence for VPS4A (NM_013245.2,899-917).
ggtggggaataacaatgat

SEQ ID NO: 107406 - DNA, 19 bp, Homo sapiens
  siRNA target sequence for VPS4A (NM_013245.2,974-992).
gaggaggtttgaaaaacga

SEQ ID NO: 107407 - DNA, 19 bp, Homo sapiens
  siRNA target sequence for VPS4A (NM_013245.2,976-994).
ggaggtttgaaaaacgaat

SEQ ID NO: 107408 - DNA, 19 bp, Homo sapiens
  siRNA target sequence for VPS4A (NM_013245.2,977-995).
gaggtttgaaaaacgaatt

SEQ ID NO: 107409 - DNA, 19 bp, Homo sapiens
  siRNA target sequence for VPS4A (NM_013245.2,1178-1196).
gtcggccacacacttcaaa

SEQ ID NO: 107410 - DNA, 19 bp, Homo sapiens
  siRNA target sequence for VPS4A (NM_013245.2,1180-1198).
cggccacacacttcaaaaa

SEQ ID NO: 107411 - DNA, 19 bp, Homo sapiens
  siRNA target sequence for VPS4A (NM_013245.2,1220-1238).
caaccccagcatgatgatt

SEQ ID NO: 107412 - DNA, 19 bp, Homo sapiens
  siRNA target sequence for VPS4A (NM_013245.2,1302-1320).
gtccctggggacaaactct

SEQ ID NO: 107413 - DNA, 19 bp, Homo sapiens
  siRNA target sequence for VPS4A (NM_013245.2,1304-1322).
ccctggggacaaactctta

SEQ ID NO: 107414 - DNA, 19 bp, Homo sapiens
  siRNA target sequence for VPS4A (NM_013245.2,1306-1324).
ctggggacaaactcttaga

SEQ ID NO: 107415 - DNA, 19 bp, Homo sapiens
  siRNA target sequence for VPS4A (NM_013245.2,1389-1407).
gacgacctcctgaaagtga

SEQ ID NO: 107416 - DNA, 19 bp, Homo sapiens
  siRNA target sequence for VPS4B (NM_004869.2,234-252).
gatagatctggctagcaaa

SEQ ID NO: 107417 - DNA, 19 bp, Homo sapiens
  siRNA target sequence for VPS4B (NM_004869.2,304-322).
cagcatgctgtgcagtatt

SEQ ID NO: 107418 - DNA, 19 bp, Homo sapiens
  siRNA target sequence for VPS4B (NM_004869.2,306-324).
gcatgctgtgcagtatttt

SEQ ID NO: 107419 - DNA, 19 bp, Homo sapiens
  siRNA target sequence for VPS4B (NM_004869.2,352-370).
ggtgataaagccaagcaaa

SEQ ID NO: 107420 - DNA, 19 bp, Homo sapiens
  siRNA target sequence for VPS4B (NM_004869.2,355-373).
gataaagccaagcaaagta

SEQ ID NO: 107421 - DNA, 19 bp, Homo sapiens
  siRNA target sequence for VPS4B (NM_004869.2,377-395).
gggcaaagtgtacagaata

SEQ ID NO: 107422 - DNA, 19 bp, Homo sapiens
  siRNA target sequence for VPS4B (NM_004869.2,476-494).
cgagtccagcagatgagaa

SEQ ID NO: 107423 - DNA, 19 bp, Homo sapiens
  siRNA target sequence for VPS4B (NM_004869.2,626-644).
ccaaagaagcactgaaaga

SEQ ID NO: 107424 - DNA, 19 bp, Homo sapiens
  siRNA target sequence for VPS4B (NM_004869.2,646-664).
gctgtgatactgcctatta

SEQ ID NO: 107425 - DNA, 19 bp, Homo sapiens
  siRNA target sequence for VPS4B (NM_004869.2,649-667).
gtgatactgcctattaaat

SEQ ID NO: 107426 - DNA, 19 bp, Homo sapiens
  siRNA target sequence for VPS4B (NM_004869.2,701-719).
ggaggggaatcctattatt

SEQ ID NO: 107427 - DNA, 19 bp, Homo sapiens
  siRNA target sequence for VPS4B (NM_004869.2,769-787).
gaagccaacaactcaacat

SEQ ID NO: 107428 - DNA, 19 bp, Homo sapiens
  siRNA target sequence for VPS4B (NM_004869.2,772-790).
gccaacaactcaacatttt

SEQ ID NO: 107429 - DNA, 19 bp, Homo sapiens
  siRNA target sequence for VPS4B (NM_004869.2,918-936).
ctgtggttcaagaagtgaa

SEQ ID NO: 107430 - DNA, 19 bp, Homo sapiens
  siRNA target sequence for VPS4B (NM_004869.2,944-962).
gtgaagccgcacgtagaat

SEQ ID NO: 107431 - DNA, 19 bp, Homo sapiens
  siRNA target sequence for VPS4B (NM_004869.2,946-964).
gaagccgcacgtagaatta

SEQ ID NO: 107432 - DNA, 19 bp, Homo sapiens
  siRNA target sequence for VPS4B (NM_004869.2,949-967).
gccgcacgtagaattaaga

SEQ ID NO: 107433 - DNA, 19 bp, Homo sapiens
  siRNA target sequence for VPS4B (NM_004869.2,968-986).
cggagttcctagtgcaaat

SEQ ID NO: 107434 - DNA, 19 bp, Homo sapiens
  siRNA target sequence for VPS4B (NM_004869.2,992-1010).
gggttggtgtagacaatga

SEQ ID NO: 107435 - DNA, 19 bp, Homo sapiens
  siRNA target sequence for VPS4B (NM_004869.2,993-1011).
ggttggtgtagacaatgat

SEQ ID NO: 107436 - DNA, 19 bp, Homo sapiens
  siRNA target sequence for VPS4B (NM_004869.2,1061-1079).
ccattaggcgaagatttga

SEQ ID NO: 107437 - DNA, 19 bp, Homo sapiens
  siRNA target sequence for VPS4B (NM_004869.2,1069-1087).
cgaagatttgagaaacgaa

SEQ ID NO: 107438 - DNA, 19 bp, Homo sapiens
  siRNA target sequence for VPS4B (NM_004869.2,1114-1132).
gcccgagcagcaatgttta

SEQ ID NO: 107439 - DNA, 19 bp, Homo sapiens
  siRNA target sequence for VPS4B (NM_004869.2,1115-1133).
cccgagcagcaatgtttaa

SEQ ID NO: 107440 - DNA, 19 bp, Homo sapiens
  siRNA target sequence for VPS4B (NM_004869.2,1116-1134).
ccgagcagcaatgtttaaa

SEQ ID NO: 107441 - DNA, 19 bp, Homo sapiens
  siRNA target sequence for VPS4B (NM_004869.2,1190-1208).
ggaggaaaacagatggtta

SEQ ID NO: 107442 - DNA, 19 bp, Homo sapiens
  siRNA target sequence for VPS4B (NM_004869.2,1205-1223).
gttattcaggggcagatat

SEQ ID NO: 107443 - DNA, 19 bp, Homo sapiens
  siRNA target sequence for VPS4B (NM_004869.2,1215-1233).
ggcagatataagtatcatt

SEQ ID NO: 107444 - DNA, 19 bp, Homo sapiens
  siRNA target sequence for VPS4B (NM_004869.2,1270-1288).
cagtcagctactcatttta

SEQ ID NO: 107445 - DNA, 19 bp, Homo sapiens
  siRNA target sequence for VPS4B (NM_004869.2,1308-1326).
ccgagctgatcctaaccat

SEQ ID NO: 107446 - DNA, 19 bp, Homo sapiens
  siRNA target sequence for VPS4B (NM_004869.2,1363-1381).
gaccctggtgccattgaaa

SEQ ID NO: 107447 - DNA, 19 bp, Homo sapiens
  siRNA target sequence for VPS4B (NM_004869.2,1426-1444).
gtttccatgtcggatatgt

SEQ ID NO: 107448 - DNA, 19 bp, Homo sapiens
  siRNA target sequence for VPS4B (NM_004869.2,1438-1456).
gatatgttgcggtcactat

SEQ ID NO: 107449 - DNA, 19 bp, Homo sapiens
  siRNA target sequence for VPS4B (NM_004869.2,1446-1464).
gcggtcactatctaacaca

SEQ ID NO: 107450 - DNA, 19 bp, Homo sapiens
  siRNA target sequence for VPS4B (NM_004869.2,1447-1465).
cggtcactatctaacacaa

SEQ ID NO: 107451 - DNA, 19 bp, Homo sapiens
  siRNA target sequence for VPS4B (NM_004869.2,1448-1466).
ggtcactatctaacacaaa

SEQ ID NO: 107452 - DNA, 19 bp, Homo sapiens
  siRNA target sequence for VPS4B (NM_004869.2,1449-1467).
gtcactatctaacacaaaa

SEQ ID NO: 107453 - DNA, 19 bp, Homo sapiens
  siRNA target sequence for VPS4B (NM_004869.2,1461-1479).
cacaaaacctacagtcaat

SEQ ID NO: 107454 - DNA, 19 bp, Homo sapiens
  siRNA target sequence for VPS4B (NM_004869.2,1463-1481).
caaaacctacagtcaatga

SEQ ID NO: 107455 - DNA, 19 bp, Homo sapiens
  siRNA target sequence for VPS4B (NM_004869.2,1472-1490).
cagtcaatgaacatgactt

SEQ ID NO: 107456 - DNA, 19 bp, Homo sapiens
  siRNA target sequence for VRK1 (NM_003384.1,125-143).
gacatcttgcagaacaatt

SEQ ID NO: 107457 - DNA, 19 bp, Homo sapiens
  siRNA target sequence for VRK1 (NM_003384.1,145-163).
gcagttggagagataataa

SEQ ID NO: 107458 - DNA, 19 bp, Homo sapiens
  siRNA target sequence for VRK1 (NM_003384.1,180-198).
ggaatggaaagtaggatta

SEQ ID NO: 107459 - DNA, 19 bp, Homo sapiens
  siRNA target sequence for VRK1 (NM_003384.1,212-230).
gaggctttggctgtatata

SEQ ID NO: 107460 - DNA, 19 bp, Homo sapiens
  siRNA target sequence for VRK1 (NM_003384.1,215-233).
gctttggctgtatatatct

SEQ ID NO: 107461 - DNA, 19 bp, Homo sapiens
  siRNA target sequence for VRK1 (NM_003384.1,264-282).
cagtgatgcaccttgtgtt

SEQ ID NO: 107462 - DNA, 19 bp, Homo sapiens
  siRNA target sequence for VRK1 (NM_003384.1,268-286).
gatgcaccttgtgttgtaa

SEQ ID NO: 107463 - DNA, 19 bp, Homo sapiens
  siRNA target sequence for VRK1 (NM_003384.1,301-319).
gacaatggacctcttttta

SEQ ID NO: 107464 - DNA, 19 bp, Homo sapiens
  siRNA target sequence for VRK1 (NM_003384.1,307-325).
ggacctctttttactgaat

SEQ ID NO: 107465 - DNA, 19 bp, Homo sapiens
  siRNA target sequence for VRK1 (NM_003384.1,377-395).
gtacccgtaagctgaagta

SEQ ID NO: 107466 - DNA, 19 bp, Homo sapiens
  siRNA target sequence for VRK1 (NM_003384.1,396-414).
cctgggtgttcctaagtat

SEQ ID NO: 107467 - DNA, 19 bp, Homo sapiens
  siRNA target sequence for VRK1 (NM_003384.1,397-415).
ctgggtgttcctaagtatt

SEQ ID NO: 107468 - DNA, 19 bp, Homo sapiens
  siRNA target sequence for VRK1 (NM_003384.1,416-434).
gggggtctggtctacatga

SEQ ID NO: 107469 - DNA, 19 bp, Homo sapiens
  siRNA target sequence for VRK1 (NM_003384.1,518-536).
ggttttctcggaaaactgt

SEQ ID NO: 107470 - DNA, 19 bp, Homo sapiens
  siRNA target sequence for VRK1 (NM_003384.1,537-555).
cttgcagctaagcttaaga

SEQ ID NO: 107471 - DNA, 19 bp, Homo sapiens
  siRNA target sequence for VRK1 (NM_003384.1,649-667).
caggtgtacttggtagatt

SEQ ID NO: 107472 - DNA, 19 bp, Homo sapiens
  siRNA target sequence for VRK1 (NM_003384.1,651-669).
ggtgtacttggtagattat

SEQ ID NO: 107473 - DNA, 19 bp, Homo sapiens
  siRNA target sequence for VRK1 (NM_003384.1,694-712).
gaaggagttcataaagaat

SEQ ID NO: 107474 - DNA, 19 bp, Homo sapiens
  siRNA target sequence for VRK1 (NM_003384.1,759-777).
gagcatcgatgcacacaat

SEQ ID NO: 107475 - DNA, 19 bp, Homo sapiens
  siRNA target sequence for VRK1 (NM_003384.1,788-806).
catcaagacgtggtgattt

SEQ ID NO: 107476 - DNA, 19 bp, Homo sapiens
  siRNA target sequence for VRK1 (NM_003384.1,791-809).
caagacgtggtgatttgga

SEQ ID NO: 107477 - DNA, 19 bp, Homo sapiens
  siRNA target sequence for VRK1 (NM_003384.1,817-835).
ggttattgcatgatccaat

SEQ ID NO: 107478 - DNA, 19 bp, Homo sapiens
  siRNA target sequence for VRK1 (NM_003384.1,886-904).
gttagagattccaaaatta

SEQ ID NO: 107479 - DNA, 19 bp, Homo sapiens
  siRNA target sequence for VRK1 (NM_003384.1,989-1007).
cagtgaaattactagacta

SEQ ID NO: 107480 - DNA, 19 bp, Homo sapiens
  siRNA target sequence for VRK1 (NM_003384.1,1050-1068).
gcaaggactaaaagctata

SEQ ID NO: 107481 - DNA, 19 bp, Homo sapiens
  siRNA target sequence for VRK1 (NM_003384.1,1073-1091).
gtaaggatgatggcaaatt

SEQ ID NO: 107482 - DNA, 19 bp, Homo sapiens
  siRNA target sequence for VRK1 (NM_003384.1,1224-1242).
catacagacccgttcaaga

SEQ ID NO: 107483 - DNA, 19 bp, Homo sapiens
  siRNA target sequence for VRK2 (NM_006296.2,235-253).
ggcaaggttctggatgata

SEQ ID NO: 107484 - DNA, 19 bp, Homo sapiens
  siRNA target sequence for VRK2 (NM_006296.2,236-254).
gcaaggttctggatgatat

SEQ ID NO: 107485 - DNA, 19 bp, Homo sapiens
  siRNA target sequence for VRK2 (NM_006296.2,269-287).
gggtactgggcaagaagat

SEQ ID NO: 107486 - DNA, 19 bp, Homo sapiens
  siRNA target sequence for VRK2 (NM_006296.2,270-288).
ggtactgggcaagaagatt

SEQ ID NO: 107487 - DNA, 19 bp, Homo sapiens
  siRNA target sequence for VRK2 (NM_006296.2,298-316).
ggatttggattgatatatt

SEQ ID NO: 107488 - DNA, 19 bp, Homo sapiens
  siRNA target sequence for VRK2 (NM_006296.2,305-323).
gattgatatatttagcttt

SEQ ID NO: 107489 - DNA, 19 bp, Homo sapiens
  siRNA target sequence for VRK2 (NM_006296.2,346-364).
gatgcaagacatgtagtaa

SEQ ID NO: 107490 - DNA, 19 bp, Homo sapiens
  siRNA target sequence for VRK2 (NM_006296.2,379-397).
gaaaatggcccgttatttt

SEQ ID NO: 107491 - DNA, 19 bp, Homo sapiens
  siRNA target sequence for VRK2 (NM_006296.2,387-405).
cccgttattttcagaactt

SEQ ID NO: 107492 - DNA, 19 bp, Homo sapiens
  siRNA target sequence for VRK2 (NM_006296.2,388-406).
ccgttattttcagaactta

SEQ ID NO: 107493 - DNA, 19 bp, Homo sapiens
  siRNA target sequence for VRK2 (NM_006296.2,389-407).
cgttattttcagaacttaa

SEQ ID NO: 107494 - DNA, 19 bp, Homo sapiens
  siRNA target sequence for VRK2 (NM_006296.2,390-408).
gttattttcagaacttaaa

SEQ ID NO: 107495 - DNA, 19 bp, Homo sapiens
  siRNA target sequence for VRK2 (NM_006296.2,447-465).
gtggatagaacgcaaacaa

SEQ ID NO: 107496 - DNA, 19 bp, Homo sapiens
  siRNA target sequence for VRK2 (NM_006296.2,449-467).
ggatagaacgcaaacaact

SEQ ID NO: 107497 - DNA, 19 bp, Homo sapiens
  siRNA target sequence for VRK2 (NM_006296.2,450-468).
gatagaacgcaaacaactt

SEQ ID NO: 107498 - DNA, 19 bp, Homo sapiens
  siRNA target sequence for VRK2 (NM_006296.2,497-515).
gatctggtctgactgaatt

SEQ ID NO: 107499 - DNA, 19 bp, Homo sapiens
  siRNA target sequence for VRK2 (NM_006296.2,551-569).
gactaggaatagatttaca

SEQ ID NO: 107500 - DNA, 19 bp, Homo sapiens
  siRNA target sequence for VRK2 (NM_006296.2,580-598).
ggccagaatggtaccttta

SEQ ID NO: 107501 - DNA, 19 bp, Homo sapiens
  siRNA target sequence for VRK2 (NM_006296.2,582-600).
ccagaatggtacctttaaa

SEQ ID NO: 107502 - DNA, 19 bp, Homo sapiens
  siRNA target sequence for VRK2 (NM_006296.2,603-621).
gtcaactgtcctgcaatta

SEQ ID NO: 107503 - DNA, 19 bp, Homo sapiens
  siRNA target sequence for VRK2 (NM_006296.2,608-626).
ctgtcctgcaattaggtat

SEQ ID NO: 107504 - DNA, 19 bp, Homo sapiens
  siRNA target sequence for VRK2 (NM_006296.2,636-654).
ggatgtactggaatatata

SEQ ID NO: 107505 - DNA, 19 bp, Homo sapiens
  siRNA target sequence for VRK2 (NM_006296.2,811-829).
cataatgggacaatagagt

SEQ ID NO: 107506 - DNA, 19 bp, Homo sapiens
  siRNA target sequence for VRK2 (NM_006296.2,869-887).
gacgaagtgacgttgagat

SEQ ID NO: 107507 - DNA, 19 bp, Homo sapiens
  siRNA target sequence for VRK2 (NM_006296.2,957-975).
ggctgtgcagactgctaaa

SEQ ID NO: 107508 - DNA, 19 bp, Homo sapiens
  siRNA target sequence for VRK2 (NM_006296.2,1098-1116).
ctatcaagccctcaagaaa

SEQ ID NO: 107509 - DNA, 19 bp, Homo sapiens
  siRNA target sequence for VRK2 (NM_006296.2,1102-1120).
caagccctcaagaaaattt

SEQ ID NO: 107510 - DNA, 19 bp, Homo sapiens
  siRNA target sequence for VRK2 (NM_006296.2,1186-1204).
catactccaaacagtcaaa

SEQ ID NO: 107511 - DNA, 19 bp, Homo sapiens
  siRNA target sequence for VRK2 (NM_006296.2,1237-1255).
gtcaacaaggcacacaata

SEQ ID NO: 107512 - DNA, 19 bp, Homo sapiens
  siRNA target sequence for VRK2 (NM_006296.2,1242-1260).
caaggcacacaataggtta

SEQ ID NO: 107513 - DNA, 19 bp, Homo sapiens
  siRNA target sequence for VRK2 (NM_006296.2,1247-1265).
cacacaataggttaatcga

SEQ ID NO: 107514 - DNA, 19 bp, Homo sapiens
  siRNA target sequence for VRK2 (NM_006296.2,1249-1267).
cacaataggttaatcgaaa

SEQ ID NO: 107515 - DNA, 19 bp, Homo sapiens
  siRNA target sequence for VRK2 (NM_006296.2,1251-1269).
caataggttaatcgaaaaa

SEQ ID NO: 107516 - DNA, 19 bp, Homo sapiens
  siRNA target sequence for VRK2 (NM_006296.2,1296-1314).
gtcctgtgcaacatggaaa

SEQ ID NO: 107517 - DNA, 19 bp, Homo sapiens
  siRNA target sequence for VRK2 (NM_006296.2,1398-1416).
gtctcaagaacctttgaat

SEQ ID NO: 107518 - DNA, 19 bp, Homo sapiens
  siRNA target sequence for VRK2 (NM_006296.2,1451-1469).
cacaattcccaaactcatt

SEQ ID NO: 107519 - DNA, 19 bp, Homo sapiens
  siRNA target sequence for VRK2 (NM_006296.2,1474-1492).
gagcctcatcaagatttta

SEQ ID NO: 107520 - DNA, 19 bp, Homo sapiens
  siRNA target sequence for VRK2 (NM_006296.2,1520-1538).
gatctccatcttggtataa

SEQ ID NO: 107521 - DNA, 19 bp, Homo sapiens
  siRNA target sequence for VRK2 (NM_006296.2,1523-1541).
ctccatcttggtataaata

SEQ ID NO: 107522 - DNA, 19 bp, Homo sapiens
  siRNA target sequence for VRK2 (NM_006296.2,1557-1575).
cacggggatcacagactta

SEQ ID NO: 107523 - DNA, 19 bp, Homo sapiens
  siRNA target sequence for VRK2 (NM_006296.2,1607-1625).
cccagtttactcttagtga

SEQ ID NO: 107524 - DNA, 19 bp, Homo sapiens
  siRNA target sequence for VRK2 (NM_006296.2,1608-1626).
ccagtttactcttagtgaa

SEQ ID NO: 107525 - DNA, 19 bp, Homo sapiens
  siRNA target sequence for VRK2 (NM_006296.2,1629-1647).
gacaaacgcagatgtttat

SEQ ID NO: 107526 - DNA, 19 bp, Homo sapiens
  siRNA target sequence for VRK2 (NM_006296.2,1680-1698).
gttagtatttcttgcttta

SEQ ID NO: 107527 - DNA, 19 bp, Homo sapiens
  siRNA target sequence for VRK3 (NM_016440.2,210-228).
gtatccaagcggcattcaa

SEQ ID NO: 107528 - DNA, 19 bp, Homo sapiens
  siRNA target sequence for VRK3 (NM_016440.2,215-233).
caagcggcattcaaattct

SEQ ID NO: 107529 - DNA, 19 bp, Homo sapiens
  siRNA target sequence for VRK3 (NM_016440.2,275-293).
gggtcccagacctttgtca

SEQ ID NO: 107530 - DNA, 19 bp, Homo sapiens
  siRNA target sequence for VRK3 (NM_016440.2,277-295).
gtcccagacctttgtcaat

SEQ ID NO: 107531 - DNA, 19 bp, Homo sapiens
  siRNA target sequence for VRK3 (NM_016440.2,383-401).
gtcacctctccccgattat

SEQ ID NO: 107532 - DNA, 19 bp, Homo sapiens
  siRNA target sequence for VRK3 (NM_016440.2,615-633).
ccacctcacttgaagcttt

SEQ ID NO: 107533 - DNA, 19 bp, Homo sapiens
  siRNA target sequence for VRK3 (NM_016440.2,701-719).
gacaaccagggcattctct

SEQ ID NO: 107534 - DNA, 19 bp, Homo sapiens
  siRNA target sequence for VRK3 (NM_016440.2,703-721).
caaccagggcattctctat

SEQ ID NO: 107535 - DNA, 19 bp, Homo sapiens
  siRNA target sequence for VRK3 (NM_016440.2,848-866).
cctctgcaagtcaacaagt

SEQ ID NO: 107536 - DNA, 19 bp, Homo sapiens
  siRNA target sequence for VRK3 (NM_016440.2,920-938).
ggtgttcaccaggacaaat

SEQ ID NO: 107537 - DNA, 19 bp, Homo sapiens
  siRNA target sequence for VRK3 (NM_016440.2,921-939).
gtgttcaccaggacaaata

SEQ ID NO: 107538 - DNA, 19 bp, Homo sapiens
  siRNA target sequence for VRK3 (NM_016440.2,1231-1249).
gggggaccttgagttcatt

SEQ ID NO: 107539 - DNA, 19 bp, Homo sapiens
  siRNA target sequence for VRK3 (NM_016440.2,1232-1250).
ggggaccttgagttcatta

SEQ ID NO: 107540 - DNA, 19 bp, Homo sapiens
  siRNA target sequence for WARS (NM_004184.2,271-289).
gggaaatgcgtcaaaggat

SEQ ID NO: 107541 - DNA, 19 bp, Homo sapiens
  siRNA target sequence for WARS (NM_004184.2,387-405).
cagcacctaccagtaatca

SEQ ID NO: 107542 - DNA, 19 bp, Homo sapiens
  siRNA target sequence for WARS (NM_004184.2,468-486).
gtgcaaaaggcatagacta

SEQ ID NO: 107543 - DNA, 19 bp, Homo sapiens
  siRNA target sequence for WARS (NM_004184.2,477-495).
gcatagactacgataagct

SEQ ID NO: 107544 - DNA, 19 bp, Homo sapiens
  siRNA target sequence for WARS (NM_004184.2,500-518).
gttcggtttggaagtagta

SEQ ID NO: 107545 - DNA, 19 bp, Homo sapiens
  siRNA target sequence for WARS (NM_004184.2,509-527).
ggaagtagtaaaattgaca

SEQ ID NO: 107546 - DNA, 19 bp, Homo sapiens
  siRNA target sequence for WARS (NM_004184.2,510-528).
gaagtagtaaaattgacaa

SEQ ID NO: 107547 - DNA, 19 bp, Homo sapiens
  siRNA target sequence for WARS (NM_004184.2,513-531).
gtagtaaaattgacaaaga

SEQ ID NO: 107548 - DNA, 19 bp, Homo sapiens
  siRNA target sequence for WARS (NM_004184.2,581-599).
ctgcgcagaggcatcttct

SEQ ID NO: 107549 - DNA, 19 bp, Homo sapiens
  siRNA target sequence for WARS (NM_004184.2,603-621).
cacacagagatatgaatca

SEQ ID NO: 107550 - DNA, 19 bp, Homo sapiens
  siRNA target sequence for WARS (NM_004184.2,622-640).
ggttcttgatgcctatgaa

SEQ ID NO: 107551 - DNA, 19 bp, Homo sapiens
  siRNA target sequence for WARS (NM_004184.2,623-641).
gttcttgatgcctatgaaa

SEQ ID NO: 107552 - DNA, 19 bp, Homo sapiens
  siRNA target sequence for WARS (NM_004184.2,626-644).
cttgatgcctatgaaaata

SEQ ID NO: 107553 - DNA, 19 bp, Homo sapiens
  siRNA target sequence for WARS (NM_004184.2,638-656).
gaaaataagaagccatttt

SEQ ID NO: 107554 - DNA, 19 bp, Homo sapiens
  siRNA target sequence for WARS (NM_004184.2,679-697).
ctcttctgaagcaatgcat

SEQ ID NO: 107555 - DNA, 19 bp, Homo sapiens
  siRNA target sequence for WARS (NM_004184.2,701-719).
ggtcacctcattccattta

SEQ ID NO: 107556 - DNA, 19 bp, Homo sapiens
  siRNA target sequence for WARS (NM_004184.2,704-722).
cacctcattccatttattt

SEQ ID NO: 107557 - DNA, 19 bp, Homo sapiens
  siRNA target sequence for WARS (NM_004184.2,730-748).
gtggctccaggatgtattt

SEQ ID NO: 107558 - DNA, 19 bp, Homo sapiens
  siRNA target sequence for WARS (NM_004184.2,732-750).
ggctccaggatgtatttaa

SEQ ID NO: 107559 - DNA, 19 bp, Homo sapiens
  siRNA target sequence for WARS (NM_004184.2,772-790).
gacggatgacgagaagtat

SEQ ID NO: 107560 - DNA, 19 bp, Homo sapiens
  siRNA target sequence for WARS (NM_004184.2,774-792).
cggatgacgagaagtatct

SEQ ID NO: 107561 - DNA, 19 bp, Homo sapiens
  siRNA target sequence for WARS (NM_004184.2,912-930).
ggatgagctcaggtttcta

SEQ ID NO: 107562 - DNA, 19 bp, Homo sapiens
  siRNA target sequence for WARS (NM_004184.2,921-939).
caggtttctacaaaaatgt

SEQ ID NO: 107563 - DNA, 19 bp, Homo sapiens
  siRNA target sequence for WARS (NM_004184.2,1008-1026).
gcattgggaagatcagttt

SEQ ID NO: 107564 - DNA, 19 bp, Homo sapiens
  siRNA target sequence for WARS (NM_004184.2,1047-1065).
cctccttcagcaactcatt

SEQ ID NO: 107565 - DNA, 19 bp, Homo sapiens
  siRNA target sequence for WARS (NM_004184.2,1080-1098).
gagacaggacggatatcca

SEQ ID NO: 107566 - DNA, 19 bp, Homo sapiens
  siRNA target sequence for WARS (NM_004184.2,1116-1134).
ccattgaccaggatcctta

SEQ ID NO: 107567 - DNA, 19 bp, Homo sapiens
  siRNA target sequence for WARS (NM_004184.2,1121-1139).
gaccaggatccttacttta

SEQ ID NO: 107568 - DNA, 19 bp, Homo sapiens
  siRNA target sequence for WARS (NM_004184.2,1123-1141).
ccaggatccttactttaga

SEQ ID NO: 107569 - DNA, 19 bp, Homo sapiens
  siRNA target sequence for WARS (NM_004184.2,1474-1492).
gctcaagaaggcactcata

SEQ ID NO: 107570 - DNA, 19 bp, Homo sapiens
  siRNA target sequence for WARS (NM_004184.2,1541-1559).
gtcacggatgagatagtga

SEQ ID NO: 107571 - DNA, 19 bp, Homo sapiens
  siRNA target sequence for WARS (NM_004184.2,1543-1561).
cacggatgagatagtgaaa

SEQ ID NO: 107572 - DNA, 19 bp, Homo sapiens
  siRNA target sequence for WARS (NM_004184.2,1583-1601).
ctgtccttcgactttcagt

SEQ ID NO: 107573 - DNA, 19 bp, Homo sapiens
  siRNA target sequence for WARS2 (NM_015836.1,51-69).
cttcatccgggcacttcat

SEQ ID NO: 107574 - DNA, 19 bp, Homo sapiens
  siRNA target sequence for WARS2 (NM_015836.1,86-104).
ctcccgctctccagaaaga

SEQ ID NO: 107575 - DNA, 19 bp, Homo sapiens
  siRNA target sequence for WARS2 (NM_015836.1,88-106).
cccgctctccagaaagaca

SEQ ID NO: 107576 - DNA, 19 bp, Homo sapiens
  siRNA target sequence for WARS2 (NM_015836.1,187-205).
gtgaggttacaggatgaat

SEQ ID NO: 107577 - DNA, 19 bp, Homo sapiens
  siRNA target sequence for WARS2 (NM_015836.1,202-220).
gaatatgactctgtattat

SEQ ID NO: 107578 - DNA, 19 bp, Homo sapiens
  siRNA target sequence for WARS2 (NM_015836.1,316-334).
ggcataaacccggaaaaaa

SEQ ID NO: 107579 - DNA, 19 bp, Homo sapiens
  siRNA target sequence for WARS2 (NM_015836.1,325-343).
ccggaaaaaagcatccttt

SEQ ID NO: 107580 - DNA, 19 bp, Homo sapiens
  siRNA target sequence for WARS2 (NM_015836.1,336-354).
catccttttccaacaatct

SEQ ID NO: 107581 - DNA, 19 bp, Homo sapiens
  siRNA target sequence for WARS2 (NM_015836.1,399-417).
ggtcagactacctcgatta

SEQ ID NO: 107582 - DNA, 19 bp, Homo sapiens
  siRNA target sequence for WARS2 (NM_015836.1,402-420).
cagactacctcgattacaa

SEQ ID NO: 107583 - DNA, 19 bp, Homo sapiens
  siRNA target sequence for WARS2 (NM_015836.1,404-422).
gactacctcgattacaaca

SEQ ID NO: 107584 - DNA, 19 bp, Homo sapiens
  siRNA target sequence for WARS2 (NM_015836.1,406-424).
ctacctcgattacaacatt

SEQ ID NO: 107585 - DNA, 19 bp, Homo sapiens
  siRNA target sequence for WARS2 (NM_015836.1,470-488).
cggtgggcctgctcacata

SEQ ID NO: 107586 - DNA, 19 bp, Homo sapiens
  siRNA target sequence for WARS2 (NM_015836.1,503-521).
cagccgacattctgttgta

SEQ ID NO: 107587 - DNA, 19 bp, Homo sapiens
  siRNA target sequence for WARS2 (NM_015836.1,506-524).
ccgacattctgttgtacaa

SEQ ID NO: 107588 - DNA, 19 bp, Homo sapiens
  siRNA target sequence for WARS2 (NM_015836.1,558-576).
ccagcacatggaactagtt

SEQ ID NO: 107589 - DNA, 19 bp, Homo sapiens
  siRNA target sequence for WARS2 (NM_015836.1,583-601).
ctagcacaaggtttcaaca

SEQ ID NO: 107590 - DNA, 19 bp, Homo sapiens
  siRNA target sequence for WARS2 (NM_015836.1,589-607).
caaggtttcaacaagaagt

SEQ ID NO: 107591 - DNA, 19 bp, Homo sapiens
  siRNA target sequence for WARS2 (NM_015836.1,671-689).
gtgatccttctgccaaaat

SEQ ID NO: 107592 - DNA, 19 bp, Homo sapiens
  siRNA target sequence for WARS2 (NM_015836.1,683-701).
ccaaaatgtcgaaatcaga

SEQ ID NO: 107593 - DNA, 19 bp, Homo sapiens
  siRNA target sequence for WARS2 (NM_015836.1,712-730).
ctggccaccgtccgaataa

SEQ ID NO: 107594 - DNA, 19 bp, Homo sapiens
  siRNA target sequence for WARS2 (NM_015836.1,714-732).
ggccaccgtccgaataaca

SEQ ID NO: 107595 - DNA, 19 bp, Homo sapiens
  siRNA target sequence for WARS2 (NM_015836.1,816-834).
cgctggcgtgtccaacata

SEQ ID NO: 107596 - DNA, 19 bp, Homo sapiens
  siRNA target sequence for WARS2 (NM_015836.1,924-942).
cgtggcagatgctgtgatt

SEQ ID NO: 107597 - DNA, 19 bp, Homo sapiens
  siRNA target sequence for WARS2 (NM_015836.1,943-961).
gagaagtttgccccaatta

SEQ ID NO: 107598 - DNA, 19 bp, Homo sapiens
  siRNA target sequence for WARS2 (NM_015836.1,953-971).
ccccaattaagcgtgaaat

SEQ ID NO: 107599 - DNA, 19 bp, Homo sapiens
  siRNA target sequence for WARS2 (NM_015836.1,954-972).
cccaattaagcgtgaaatt

SEQ ID NO: 107600 - DNA, 19 bp, Homo sapiens
  siRNA target sequence for WARS2 (NM_015836.1,956-974).
caattaagcgtgaaattga

SEQ ID NO: 107601 - DNA, 19 bp, Homo sapiens
  siRNA target sequence for WARS2 (NM_015836.1,1035-1053).
caaagaattagcatacact

SEQ ID NO: 107602 - DNA, 19 bp, Homo sapiens
  siRNA target sequence for WEE1 (NM_003390.2,1703-1721).
ccgcacacgcccaagagtt

SEQ ID NO: 107603 - DNA, 19 bp, Homo sapiens
  siRNA target sequence for WEE1 (NM_003390.2,1704-1722).
cgcacacgcccaagagttt

SEQ ID NO: 107604 - DNA, 19 bp, Homo sapiens
  siRNA target sequence for WEE1 (NM_003390.2,1767-1785).
ggggtagttctctcttcat

SEQ ID NO: 107605 - DNA, 19 bp, Homo sapiens
  siRNA target sequence for WEE1 (NM_003390.2,1824-1842).
gacagactcctcaagtgaa

SEQ ID NO: 107606 - DNA, 19 bp, Homo sapiens
  siRNA target sequence for WEE1 (NM_003390.2,1826-1844).
cagactcctcaagtgaata

SEQ ID NO: 107607 - DNA, 19 bp, Homo sapiens
  siRNA target sequence for WEE1 (NM_003390.2,1851-1869).
cttttactccggattcttt

SEQ ID NO: 107608 - DNA, 19 bp, Homo sapiens
  siRNA target sequence for WEE1 (NM_003390.2,1891-1909).
gtgtcgtcgtagaaagaga

SEQ ID NO: 107609 - DNA, 19 bp, Homo sapiens
  siRNA target sequence for WEE1 (NM_003390.2,1898-1916).
cgtagaaagagaacgtatt

SEQ ID NO: 107610 - DNA, 19 bp, Homo sapiens
  siRNA target sequence for WEE1 (NM_003390.2,1906-1924).
gagaacgtattggaatgat

SEQ ID NO: 107611 - DNA, 19 bp, Homo sapiens
  siRNA target sequence for WEE1 (NM_003390.2,1974-1992).
caagacctgctaagagaat

SEQ ID NO: 107612 - DNA, 19 bp, Homo sapiens
  siRNA target sequence for WEE1 (NM_003390.2,1980-1998).
ctgctaagagaattacaat

SEQ ID NO: 107613 - DNA, 19 bp, Homo sapiens
  siRNA target sequence for WEE1 (NM_003390.2,2014-2032).
gaagtcccggtatacaaca

SEQ ID NO: 107614 - DNA, 19 bp, Homo sapiens
  siRNA target sequence for WEE1 (NM_003390.2,2017-2035).
gtcccggtatacaacagaa

SEQ ID NO: 107615 - DNA, 19 bp, Homo sapiens
  siRNA target sequence for WEE1 (NM_003390.2,2019-2037).
cccggtatacaacagaatt

SEQ ID NO: 107616 - DNA, 19 bp, Homo sapiens
  siRNA target sequence for WEE1 (NM_003390.2,2020-2038).
ccggtatacaacagaattt

SEQ ID NO: 107617 - DNA, 19 bp, Homo sapiens
  siRNA target sequence for WEE1 (NM_003390.2,2066-2084).
gaatttggttctgtattta

SEQ ID NO: 107618 - DNA, 19 bp, Homo sapiens
  siRNA target sequence for WEE1 (NM_003390.2,2106-2124).
gatgcatttatgccattaa

SEQ ID NO: 107619 - DNA, 19 bp, Homo sapiens
  siRNA target sequence for WEE1 (NM_003390.2,2167-2185).
cgctttgagagaagtatat

SEQ ID NO: 107620 - DNA, 19 bp, Homo sapiens
  siRNA target sequence for WEE1 (NM_003390.2,2197-2215).
gcttggacagcattctcat

SEQ ID NO: 107621 - DNA, 19 bp, Homo sapiens
  siRNA target sequence for WEE1 (NM_003390.2,2211-2229).
ctcatgtagttcgatattt

SEQ ID NO: 107622 - DNA, 19 bp, Homo sapiens
  siRNA target sequence for WEE1 (NM_003390.2,2213-2231).
catgtagttcgatatttct

SEQ ID NO: 107623 - DNA, 19 bp, Homo sapiens
  siRNA target sequence for WEE1 (NM_003390.2,2243-2261).
gaagatgatcatatgctta

SEQ ID NO: 107624 - DNA, 19 bp, Homo sapiens
  siRNA target sequence for WEE1 (NM_003390.2,2249-2267).
gatcatatgcttatacaga

SEQ ID NO: 107625 - DNA, 19 bp, Homo sapiens
  siRNA target sequence for WEE1 (NM_003390.2,2258-2276).
cttatacagaatgaatatt

SEQ ID NO: 107626 - DNA, 19 bp, Homo sapiens
  siRNA target sequence for WEE1 (NM_003390.2,2294-2312).
gctgatgctataagtgaaa

SEQ ID NO: 107627 - DNA, 19 bp, Homo sapiens
  siRNA target sequence for WEE1 (NM_003390.2,2295-2313).
ctgatgctataagtgaaaa

SEQ ID NO: 107628 - DNA, 19 bp, Homo sapiens
  siRNA target sequence for WEE1 (NM_003390.2,2307-2325).
gtgaaaactacagaatcat

SEQ ID NO: 107629 - DNA, 19 bp, Homo sapiens
  siRNA target sequence for WEE1 (NM_003390.2,2373-2391).
gccgaggcttgaggtatat

SEQ ID NO: 107630 - DNA, 19 bp, Homo sapiens
  siRNA target sequence for WEE1 (NM_003390.2,2376-2394).
gaggcttgaggtatattca

SEQ ID NO: 107631 - DNA, 19 bp, Homo sapiens
  siRNA target sequence for WEE1 (NM_003390.2,2378-2396).
ggcttgaggtatattcatt

SEQ ID NO: 107632 - DNA, 19 bp, Homo sapiens
  siRNA target sequence for WEE1 (NM_003390.2,2380-2398).
cttgaggtatattcattca

SEQ ID NO: 107633 - DNA, 19 bp, Homo sapiens
  siRNA target sequence for WEE1 (NM_003390.2,2386-2404).
gtatattcattcaatgtct

SEQ ID NO: 107634 - DNA, 19 bp, Homo sapiens
  siRNA target sequence for WEE1 (NM_003390.2,2403-2421).
ctttggttcacatggatat

SEQ ID NO: 107635 - DNA, 19 bp, Homo sapiens
  siRNA target sequence for WEE1 (NM_003390.2,2407-2425).
ggttcacatggatataaaa

SEQ ID NO: 107636 - DNA, 19 bp, Homo sapiens
  siRNA target sequence for WEE1 (NM_003390.2,2496-2514).
gggcatccaacaaagttat

SEQ ID NO: 107637 - DNA, 19 bp, Homo sapiens
  siRNA target sequence for WEE1 (NM_003390.2,2498-2516).
gcatccaacaaagttatgt

SEQ ID NO: 107638 - DNA, 19 bp, Homo sapiens
  siRNA target sequence for WEE1 (NM_003390.2,2499-2517).
catccaacaaagttatgtt

SEQ ID NO: 107639 - DNA, 19 bp, Homo sapiens
  siRNA target sequence for WEE1 (NM_003390.2,2528-2546).
gatcttgggcatgtaacaa

SEQ ID NO: 107640 - DNA, 19 bp, Homo sapiens
  siRNA target sequence for WEE1 (NM_003390.2,2548-2566).
gatctccagtccacaagtt

SEQ ID NO: 107641 - DNA, 19 bp, Homo sapiens
  siRNA target sequence for WEE1 (NM_003390.2,2572-2590).
gggcgatagtcgttttctt

SEQ ID NO: 107642 - DNA, 19 bp, Homo sapiens
  siRNA target sequence for WEE1 (NM_003390.2,2580-2598).
gtcgttttcttgcaaatga

SEQ ID NO: 107643 - DNA, 19 bp, Homo sapiens
  siRNA target sequence for WEE1 (NM_003390.2,2690-2708).
ccgagaaatggagatcaat

SEQ ID NO: 107644 - DNA, 19 bp, Homo sapiens
  siRNA target sequence for WEE1 (NM_003390.2,2769-2787).
cagagttgctaaaagttat

SEQ ID NO: 107645 - DNA, 19 bp, Homo sapiens
  siRNA target sequence for WEE1 (NM_003390.2,2849-2867).
ctgtccgcttctagaaaga

SEQ ID NO: 107646 - DNA, 19 bp, Homo sapiens
  siRNA target sequence for WEE1 (NM_003390.2,2851-2869).
gtccgcttctagaaagagt

SEQ ID NO: 107647 - DNA, 19 bp, Homo sapiens
  siRNA target sequence for WEE1 (NM_003390.2,2868-2886).
gtgcagaacaattacgaat

SEQ ID NO: 107648 - DNA, 19 bp, Homo sapiens
  siRNA target sequence for WEE1 (NM_003390.2,2871-2889).
cagaacaattacgaataga

SEQ ID NO: 107649 - DNA, 19 bp, Homo sapiens
  siRNA target sequence for WEE1 (NM_003390.2,2876-2894).
caattacgaatagaattga

SEQ ID NO: 107650 - DNA, 19 bp, Homo sapiens
  siRNA target sequence for WEE1 (NM_003390.2,2888-2906).
gaattgaatgccgaaaagt

SEQ ID NO: 107651 - DNA, 19 bp, Homo sapiens
  siRNA target sequence for WEE1 (NM_003390.2,2897-2915).
gccgaaaagttcaaaaatt

SEQ ID NO: 107652 - DNA, 19 bp, Homo sapiens
  siRNA target sequence for WEE1 (NM_003390.2,3003-3021).
ggtccaccacccagagtaa

SEQ ID NO: 107653 - DNA, 19 bp, Homo sapiens
  siRNA target sequence for WEE1 (NM_003390.2,3004-3022).
gtccaccacccagagtaat

SEQ ID NO: 107654 - DNA, 19 bp, Homo sapiens
  siRNA target sequence for WEE1 (NM_003390.2,3027-3045).
catctcgacttattggaaa

SEQ ID NO: 107655 - DNA, 19 bp, Homo sapiens
  siRNA target sequence for WEE1 (NM_003390.2,3030-3048).
ctcgacttattggaaagaa

SEQ ID NO: 107656 - DNA, 19 bp, Homo sapiens
  siRNA target sequence for WEE1 (NM_003390.2,3056-3074).
cgctctgtcagccttacta

SEQ ID NO: 107657 - DNA, 19 bp, Homo sapiens
  siRNA target sequence for WEE1 (NM_003390.2,3058-3076).
ctctgtcagccttactata

SEQ ID NO: 107658 - DNA, 19 bp, Homo sapiens
  siRNA target sequence for WEE1 (NM_003390.2,3060-3078).
ctgtcagccttactatata

SEQ ID NO: 107659 - DNA, 19 bp, Homo sapiens
  siRNA target sequence for XAB1 (NM_007266.1,167-185).
ctccaccgtatgtgatcaa

SEQ ID NO: 107660 - DNA, 19 bp, Homo sapiens
  siRNA target sequence for XAB1 (NM_007266.1,236-254).
gtgatactgtaaagtataa

SEQ ID NO: 107661 - DNA, 19 bp, Homo sapiens
  siRNA target sequence for XAB1 (NM_007266.1,283-301).
cccaatggcggcatagtga

SEQ ID NO: 107662 - DNA, 19 bp, Homo sapiens
  siRNA target sequence for XAB1 (NM_007266.1,300-318).
gacctcactcaatctcttt

SEQ ID NO: 107663 - DNA, 19 bp, Homo sapiens
  siRNA target sequence for XAB1 (NM_007266.1,358-376).
gcccagaacatgtccaaat

SEQ ID NO: 107664 - DNA, 19 bp, Homo sapiens
  siRNA target sequence for XAB1 (NM_007266.1,369-387).
gtccaaatatgtgttgatt

SEQ ID NO: 107665 - DNA, 19 bp, Homo sapiens
  siRNA target sequence for XAB1 (NM_007266.1,397-415).
ggacagattgaggtattca

SEQ ID NO: 107666 - DNA, 19 bp, Homo sapiens
  siRNA target sequence for XAB1 (NM_007266.1,450-468).
ccttgcatcctcatttcca

SEQ ID NO: 107667 - DNA, 19 bp, Homo sapiens
  siRNA target sequence for XAB1 (NM_007266.1,467-485).
caacagttgtcatctatgt

SEQ ID NO: 107668 - DNA, 19 bp, Homo sapiens
  siRNA target sequence for XAB1 (NM_007266.1,686-704).
gtaacctgactcgttcaat

SEQ ID NO: 107669 - DNA, 19 bp, Homo sapiens
  siRNA target sequence for XAB1 (NM_007266.1,701-719).
caatgagcctggtgttaga

SEQ ID NO: 107670 - DNA, 19 bp, Homo sapiens
  siRNA target sequence for XAB1 (NM_007266.1,708-726).
cctggtgttagatgagttt

SEQ ID NO: 107671 - DNA, 19 bp, Homo sapiens
  siRNA target sequence for XAB1 (NM_007266.1,824-842).
gggagtatcgtcctgaata

SEQ ID NO: 107672 - DNA, 19 bp, Homo sapiens
  siRNA target sequence for XAB1 (NM_007266.1,825-843).
ggagtatcgtcctgaatat

SEQ ID NO: 107673 - DNA, 19 bp, Homo sapiens
  siRNA target sequence for XAB1 (NM_007266.1,901-919).
gaacgccttcgaaaagata

SEQ ID NO: 107674 - DNA, 19 bp, Homo sapiens
  siRNA target sequence for XAB1 (NM_007266.1,970-988).
gtgctgcacccttctgatt

SEQ ID NO: 107675 - DNA, 19 bp, Homo sapiens
  siRNA target sequence for XAB1 (NM_007266.1,1001-1019).
gaggaaccttggatgaaga

SEQ ID NO: 107676 - DNA, 19 bp, Homo sapiens
  siRNA target sequence for XAB1 (NM_007266.1,1035-1053).
cagcgatactgatgacatt

SEQ ID NO: 107677 - DNA, 19 bp, Homo sapiens
  siRNA target sequence for XAB1 (NM_007266.1,1037-1055).
gcgatactgatgacattga

SEQ ID NO: 107678 - DNA, 19 bp, Homo sapiens
  siRNA target sequence for XAB1 (NM_007266.1,1086-1104).
gccagcattccagaatttt

SEQ ID NO: 107679 - DNA, 19 bp, Homo sapiens
  siRNA target sequence for XAB1 (NM_007266.1,1111-1129).
gaatcgatggcacaatact

SEQ ID NO: 107680 - DNA, 19 bp, Homo sapiens
  siRNA target sequence for YES1 (NM_005433.2,164-182).
gttaatttcagcagtcttt

SEQ ID NO: 107681 - DNA, 19 bp, Homo sapiens
  siRNA target sequence for YES1 (NM_005433.2,246-264).
cagtggtgccaagttcata

SEQ ID NO: 107682 - DNA, 19 bp, Homo sapiens
  siRNA target sequence for YES1 (NM_005433.2,349-367).
gaagggtgaaagatttcaa

SEQ ID NO: 107683 - DNA, 19 bp, Homo sapiens
  siRNA target sequence for YES1 (NM_005433.2,393-411).
ggtgggaagcaagatcaat

SEQ ID NO: 107684 - DNA, 19 bp, Homo sapiens
  siRNA target sequence for YES1 (NM_005433.2,428-446).
ggttatatcccgagcaatt

SEQ ID NO: 107685 - DNA, 19 bp, Homo sapiens
  siRNA target sequence for YES1 (NM_005433.2,509-527).
gatgctgaaagattacttt

SEQ ID NO: 107686 - DNA, 19 bp, Homo sapiens
  siRNA target sequence for YES1 (NM_005433.2,537-555).
gaaatcaacgaggtatttt

SEQ ID NO: 107687 - DNA, 19 bp, Homo sapiens
  siRNA target sequence for YES1 (NM_005433.2,624-642).
ggggtgacaatgtgaaaca

SEQ ID NO: 107688 - DNA, 19 bp, Homo sapiens
  siRNA target sequence for YES1 (NM_005433.2,668-686).
ggtggatactatatcacaa

SEQ ID NO: 107689 - DNA, 19 bp, Homo sapiens
  siRNA target sequence for YES1 (NM_005433.2,688-706).
cagagcacaatttgatact

SEQ ID NO: 107690 - DNA, 19 bp, Homo sapiens
  siRNA target sequence for YES1 (NM_005433.2,734-752).
gaacatgctgatggtttat

SEQ ID NO: 107691 - DNA, 19 bp, Homo sapiens
  siRNA target sequence for YES1 (NM_005433.2,746-764).
ggtttatgccacaagttga

SEQ ID NO: 107692 - DNA, 19 bp, Homo sapiens
  siRNA target sequence for YES1 (NM_005433.2,793-811).
gactcaaggtctagcaaaa

SEQ ID NO: 107693 - DNA, 19 bp, Homo sapiens
  siRNA target sequence for YES1 (NM_005433.2,841-859).
gcgactagaggttaaacta

SEQ ID NO: 107694 - DNA, 19 bp, Homo sapiens
  siRNA target sequence for YES1 (NM_005433.2,942-960).
caatgatgccagaagcttt

SEQ ID NO: 107695 - DNA, 19 bp, Homo sapiens
  siRNA target sequence for YES1 (NM_005433.2,946-964).
gatgccagaagctttcctt

SEQ ID NO: 107696 - DNA, 19 bp, Homo sapiens
  siRNA target sequence for YES1 (NM_005433.2,1049-1067).
gtcactgaatttatgtcaa

SEQ ID NO: 107697 - DNA, 19 bp, Homo sapiens
  siRNA target sequence for YES1 (NM_005433.2,1065-1083).
caaaaggaagcttattaga

SEQ ID NO: 107698 - DNA, 19 bp, Homo sapiens
  siRNA target sequence for YES1 (NM_005433.2,1118-1136).
cttccacagctggttgata

SEQ ID NO: 107699 - DNA, 19 bp, Homo sapiens
  siRNA target sequence for YES1 (NM_005433.2,1151-1169).
gctgatggtatggcatata

SEQ ID NO: 107700 - DNA, 19 bp, Homo sapiens
  siRNA target sequence for YES1 (NM_005433.2,1157-1175).
ggtatggcatatattgaaa

SEQ ID NO: 107701 - DNA, 19 bp, Homo sapiens
  siRNA target sequence for YES1 (NM_005433.2,1183-1201).
ctatattcaccgagatctt

SEQ ID NO: 107702 - DNA, 19 bp, Homo sapiens
  siRNA target sequence for YES1 (NM_005433.2,1196-1214).
gatcttcgggctgctaata

SEQ ID NO: 107703 - DNA, 19 bp, Homo sapiens
  siRNA target sequence for YES1 (NM_005433.2,1203-1221).
gggctgctaatattcttgt

SEQ ID NO: 107704 - DNA, 19 bp, Homo sapiens
  siRNA target sequence for YES1 (NM_005433.2,1204-1222).
ggctgctaatattcttgta

SEQ ID NO: 107705 - DNA, 19 bp, Homo sapiens
  siRNA target sequence for YES1 (NM_005433.2,1343-1361).
ctgtatggtcggtttacaa

SEQ ID NO: 107706 - DNA, 19 bp, Homo sapiens
  siRNA target sequence for YES1 (NM_005433.2,1345-1363).
gtatggtcggtttacaata

SEQ ID NO: 107707 - DNA, 19 bp, Homo sapiens
  siRNA target sequence for YES1 (NM_005433.2,1349-1367).
ggtcggtttacaataaagt

SEQ ID NO: 107708 - DNA, 19 bp, Homo sapiens
  siRNA target sequence for YES1 (NM_005433.2,1391-1409).
ctgcaaacagaactagtaa

SEQ ID NO: 107709 - DNA, 19 bp, Homo sapiens
  siRNA target sequence for YES1 (NM_005433.2,1505-1523).
gaatccctccatgaattga

SEQ ID NO: 107710 - DNA, 19 bp, Homo sapiens
  siRNA target sequence for YME1L1 (NM_014263.2,246-264).
gccttccatacaccaaaaa

SEQ ID NO: 107711 - DNA, 19 bp, Homo sapiens
  siRNA target sequence for YME1L1 (NM_014263.2,251-269).
ccatacaccaaaaaacact

SEQ ID NO: 107712 - DNA, 19 bp, Homo sapiens
  siRNA target sequence for YME1L1 (NM_014263.2,348-366).
gagccttcacttaacttaa

SEQ ID NO: 107713 - DNA, 19 bp, Homo sapiens
  siRNA target sequence for YME1L1 (NM_014263.2,368-386).
ggaccttggattatctgaa

SEQ ID NO: 107714 - DNA, 19 bp, Homo sapiens
  siRNA target sequence for YME1L1 (NM_014263.2,375-393).
ggattatctgaactaaaaa

SEQ ID NO: 107715 - DNA, 19 bp, Homo sapiens
  siRNA target sequence for YME1L1 (NM_014263.2,376-394).
gattatctgaactaaaaat

SEQ ID NO: 107716 - DNA, 19 bp, Homo sapiens
  siRNA target sequence for YME1L1 (NM_014263.2,554-572).
gtatcgacatcattcaaga

SEQ ID NO: 107717 - DNA, 19 bp, Homo sapiens
  siRNA target sequence for YME1L1 (NM_014263.2,568-586).
caagagctcttcaaagcat

SEQ ID NO: 107718 - DNA, 19 bp, Homo sapiens
  siRNA target sequence for YME1L1 (NM_014263.2,602-620).
gtactggccagttttcata

SEQ ID NO: 107719 - DNA, 19 bp, Homo sapiens
  siRNA target sequence for YME1L1 (NM_014263.2,621-639).
cagtctcggggttttaaaa

SEQ ID NO: 107720 - DNA, 19 bp, Homo sapiens
  siRNA target sequence for YME1L1 (NM_014263.2,668-686).
gtctacctccgagagatta

SEQ ID NO: 107721 - DNA, 19 bp, Homo sapiens
  siRNA target sequence for YME1L1 (NM_014263.2,677-695).
cgagagattagctgaaaca

SEQ ID NO: 107722 - DNA, 19 bp, Homo sapiens
  siRNA target sequence for YME1L1 (NM_014263.2,734-752).
gcgggacagaggatcagat

SEQ ID NO: 107723 - DNA, 19 bp, Homo sapiens
  siRNA target sequence for YME1L1 (NM_014263.2,745-763).
gatcagatgttgagagttt

SEQ ID NO: 107724 - DNA, 19 bp, Homo sapiens
  siRNA target sequence for YME1L1 (NM_014263.2,846-864).
gctcaagcactcacacaaa

SEQ ID NO: 107725 - DNA, 19 bp, Homo sapiens
  siRNA target sequence for YME1L1 (NM_014263.2,852-870).
gcactcacacaaaaaacca

SEQ ID NO: 107726 - DNA, 19 bp, Homo sapiens
  siRNA target sequence for YME1L1 (NM_014263.2,883-901).
ggcgaacccgtctgattct

SEQ ID NO: 107727 - DNA, 19 bp, Homo sapiens
  siRNA target sequence for YME1L1 (NM_014263.2,911-929).
gctgctattcggcatttat

SEQ ID NO: 107728 - DNA, 19 bp, Homo sapiens
  siRNA target sequence for YME1L1 (NM_014263.2,920-938).
cggcatttatggacttcta

SEQ ID NO: 107729 - DNA, 19 bp, Homo sapiens
  siRNA target sequence for YME1L1 (NM_014263.2,921-939).
ggcatttatggacttctaa

SEQ ID NO: 107730 - DNA, 19 bp, Homo sapiens
  siRNA target sequence for YME1L1 (NM_014263.2,957-975).
gtccgcttccggacaacaa

SEQ ID NO: 107731 - DNA, 19 bp, Homo sapiens
  siRNA target sequence for YME1L1 (NM_014263.2,959-977).
ccgcttccggacaacaaca

SEQ ID NO: 107732 - DNA, 19 bp, Homo sapiens
  siRNA target sequence for YME1L1 (NM_014263.2,1065-1083).
caggaagttgttgaattct

SEQ ID NO: 107733 - DNA, 19 bp, Homo sapiens
  siRNA target sequence for YME1L1 (NM_014263.2,1157-1175).
gactggaaagacacttctt

SEQ ID NO: 107734 - DNA, 19 bp, Homo sapiens
  siRNA target sequence for YME1L1 (NM_014263.2,1187-1205).
ggcgggagaagctgatgtt

SEQ ID NO: 107735 - DNA, 19 bp, Homo sapiens
  siRNA target sequence for YME1L1 (NM_014263.2,1225-1243).
gatccgaatttgatgagat

SEQ ID NO: 107736 - DNA, 19 bp, Homo sapiens
  siRNA target sequence for YME1L1 (NM_014263.2,1228-1246).
ccgaatttgatgagatgtt

SEQ ID NO: 107737 - DNA, 19 bp, Homo sapiens
  siRNA target sequence for YME1L1 (NM_014263.2,1256-1274).
gggagccagccgtatcaga

SEQ ID NO: 107738 - DNA, 19 bp, Homo sapiens
  siRNA target sequence for YME1L1 (NM_014263.2,1257-1275).
ggagccagccgtatcagaa

SEQ ID NO: 107739 - DNA, 19 bp, Homo sapiens
  siRNA target sequence for YME1L1 (NM_014263.2,1262-1280).
cagccgtatcagaaatctt

SEQ ID NO: 107740 - DNA, 19 bp, Homo sapiens
  siRNA target sequence for YME1L1 (NM_014263.2,1264-1282).
gccgtatcagaaatctttt

SEQ ID NO: 107741 - DNA, 19 bp, Homo sapiens
  siRNA target sequence for YME1L1 (NM_014263.2,1265-1283).
ccgtatcagaaatcttttt

SEQ ID NO: 107742 - DNA, 19 bp, Homo sapiens
  siRNA target sequence for YME1L1 (NM_014263.2,1295-1313).
ggcgaatgctccttgtgtt

SEQ ID NO: 107743 - DNA, 19 bp, Homo sapiens
  siRNA target sequence for YME1L1 (NM_014263.2,1296-1314).
gcgaatgctccttgtgtta

SEQ ID NO: 107744 - DNA, 19 bp, Homo sapiens
  siRNA target sequence for YME1L1 (NM_014263.2,1297-1315).
cgaatgctccttgtgttat

SEQ ID NO: 107745 - DNA, 19 bp, Homo sapiens
  siRNA target sequence for YME1L1 (NM_014263.2,1298-1316).
gaatgctccttgtgttata

SEQ ID NO: 107746 - DNA, 19 bp, Homo sapiens
  siRNA target sequence for YME1L1 (NM_014263.2,1302-1320).
gctccttgtgttatattta

SEQ ID NO: 107747 - DNA, 19 bp, Homo sapiens
  siRNA target sequence for YME1L1 (NM_014263.2,1381-1399).
ggcagaccataaatcaact

SEQ ID NO: 107748 - DNA, 19 bp, Homo sapiens
  siRNA target sequence for YME1L1 (NM_014263.2,1385-1403).
gaccataaatcaacttctt

SEQ ID NO: 107749 - DNA, 19 bp, Homo sapiens
  siRNA target sequence for YME1L1 (NM_014263.2,1425-1443).
cccaatgaaggagttatca

SEQ ID NO: 107750 - DNA, 19 bp, Homo sapiens
  siRNA target sequence for YME1L1 (NM_014263.2,1500-1518).
cgttttgacatgcaagtta

SEQ ID NO: 107751 - DNA, 19 bp, Homo sapiens
  siRNA target sequence for YME1L1 (NM_014263.2,1521-1539).
gttccaaggccagatgtaa

SEQ ID NO: 107752 - DNA, 19 bp, Homo sapiens
  siRNA target sequence for YME1L1 (NM_014263.2,1594-1612).
ccgttgatccagaaattat

SEQ ID NO: 107753 - DNA, 19 bp, Homo sapiens
  siRNA target sequence for YME1L1 (NM_014263.2,1595-1613).
cgttgatccagaaattata

SEQ ID NO: 107754 - DNA, 19 bp, Homo sapiens
  siRNA target sequence for YME1L1 (NM_014263.2,1787-1805).
caaaaccatcacagcatat

SEQ ID NO: 107755 - DNA, 19 bp, Homo sapiens
  siRNA target sequence for YME1L1 (NM_014263.2,1906-1924).
ccctgttacctgagaatga

SEQ ID NO: 107756 - DNA, 19 bp, Homo sapiens
  siRNA target sequence for YME1L1 (NM_014263.2,2065-2083).
caaagcggatggttaccaa

SEQ ID NO: 107757 - DNA, 19 bp, Homo sapiens
  siRNA target sequence for YME1L1 (NM_014263.2,2069-2087).
gcggatggttaccaaattt

SEQ ID NO: 107758 - DNA, 19 bp, Homo sapiens
  siRNA target sequence for YME1L1 (NM_014263.2,2109-2127).
gttatgacctacagtgata

SEQ ID NO: 107759 - DNA, 19 bp, Homo sapiens
  siRNA target sequence for YME1L1 (NM_014263.2,2155-2173).
ctgccatcgaacaagaaat

SEQ ID NO: 107760 - DNA, 19 bp, Homo sapiens
  siRNA target sequence for YME1L1 (NM_014263.2,2180-2198).
ccttctaagggactcatat

SEQ ID NO: 107761 - DNA, 19 bp, Homo sapiens
  siRNA target sequence for YME1L1 (NM_014263.2,2194-2212).
catatgaacgagcaaaaca

SEQ ID NO: 107762 - DNA, 19 bp, Homo sapiens
  siRNA target sequence for YME1L1 (NM_014263.2,2224-2242).
ctcatgcaaaggagcataa

SEQ ID NO: 107763 - DNA, 19 bp, Homo sapiens
  siRNA target sequence for YME1L1 (NM_139312.1,368-386).
cctgacgaagcttaacatt

SEQ ID NO: 107764 - DNA, 19 bp, Homo sapiens
  siRNA target sequence for YME1L1 (NM_139312.1,371-389).
gacgaagcttaacattgtt

SEQ ID NO: 107765 - DNA, 19 bp, Homo sapiens
  siRNA target sequence for YME1L1 (NM_139312.1,374-392).
gaagcttaacattgtttca

SEQ ID NO: 107766 - DNA, 19 bp, Homo sapiens
  siRNA target sequence for YME1L1 (NM_139312.1,418-436).
ggtacagatccatgttcat

SEQ ID NO: 107767 - DNA, 19 bp, Homo sapiens
  siRNA target sequence for ZAK (NM_016653.1,141-159).
ctgcggtggaggaagtttt

SEQ ID NO: 107768 - DNA, 19 bp, Homo sapiens
  siRNA target sequence for ZAK (NM_016653.1,166-184).
gtttatcgagccaaatgga

SEQ ID NO: 107769 - DNA, 19 bp, Homo sapiens
  siRNA target sequence for ZAK (NM_016653.1,304-322).
cccaactatggcattgtca

SEQ ID NO: 107770 - DNA, 19 bp, Homo sapiens
  siRNA target sequence for ZAK (NM_016653.1,337-355).
ctgggatcactctatgatt

SEQ ID NO: 107771 - DNA, 19 bp, Homo sapiens
  siRNA target sequence for ZAK (NM_016653.1,340-358).
ggatcactctatgattaca

SEQ ID NO: 107772 - DNA, 19 bp, Homo sapiens
  siRNA target sequence for ZAK (NM_016653.1,344-362).
cactctatgattacattaa

SEQ ID NO: 107773 - DNA, 19 bp, Homo sapiens
  siRNA target sequence for ZAK (NM_016653.1,346-364).
ctctatgattacattaaca

SEQ ID NO: 107774 - DNA, 19 bp, Homo sapiens
  siRNA target sequence for ZAK (NM_016653.1,385-403).
gatatggatcacattatga

SEQ ID NO: 107775 - DNA, 19 bp, Homo sapiens
  siRNA target sequence for ZAK (NM_016653.1,452-470).
ctcctgtcaaggtgattca

SEQ ID NO: 107776 - DNA, 19 bp, Homo sapiens
  siRNA target sequence for ZAK (NM_016653.1,483-501).
gtcaagaaacgttgttata

SEQ ID NO: 107777 - DNA, 19 bp, Homo sapiens
  siRNA target sequence for ZAK (NM_016653.1,535-553).
ggtgcctctcggttccata

SEQ ID NO: 107778 - DNA, 19 bp, Homo sapiens
  siRNA target sequence for ZAK (NM_016653.1,536-554).
gtgcctctcggttccataa

SEQ ID NO: 107779 - DNA, 19 bp, Homo sapiens
  siRNA target sequence for ZAK (NM_016653.1,539-557).
cctctcggttccataacca

SEQ ID NO: 107780 - DNA, 19 bp, Homo sapiens
  siRNA target sequence for ZAK (NM_016653.1,540-558).
ctctcggttccataaccat

SEQ ID NO: 107781 - DNA, 19 bp, Homo sapiens
  siRNA target sequence for ZAK (NM_016653.1,544-562).
cggttccataaccatacaa

SEQ ID NO: 107782 - DNA, 19 bp, Homo sapiens
  siRNA target sequence for ZAK (NM_016653.1,546-564).
gttccataaccatacaaca

SEQ ID NO: 107783 - DNA, 19 bp, Homo sapiens
  siRNA target sequence for ZAK (NM_016653.1,619-637).
ctccctgtgtcagaaactt

SEQ ID NO: 107784 - DNA, 19 bp, Homo sapiens
  siRNA target sequence for ZAK (NM_016653.1,631-649).
gaaacttgtgacacatatt

SEQ ID NO: 107785 - DNA, 19 bp, Homo sapiens
  siRNA target sequence for ZAK (NM_016653.1,661-679).
gttctctgggagatgctaa

SEQ ID NO: 107786 - DNA, 19 bp, Homo sapiens
  siRNA target sequence for ZAK (NM_016653.1,701-719).
gtttggaaggattacaagt

SEQ ID NO: 107787 - DNA, 19 bp, Homo sapiens
  siRNA target sequence for ZAK (NM_016653.1,722-740).
cttggcttgtagtggaaaa

SEQ ID NO: 107788 - DNA, 19 bp, Homo sapiens
  siRNA target sequence for ZAK (NM_016653.1,818-836).
ccaagaaacggccatcatt

SEQ ID NO: 107789 - DNA, 19 bp, Homo sapiens
  siRNA target sequence for ZAK (NM_016653.1,826-844).
cggccatcattcaagcaaa

SEQ ID NO: 107790 - DNA, 19 bp, Homo sapiens
  siRNA target sequence for ZAK (NM_016653.1,883-901).
cttcctgacaagtgtaact

SEQ ID NO: 107791 - DNA, 19 bp, Homo sapiens
  siRNA target sequence for ZAK (NM_016653.1,886-904).
cctgacaagtgtaactcat

SEQ ID NO: 107792 - DNA, 19 bp, Homo sapiens
  siRNA target sequence for ZAK (NM_016653.1,891-909).
caagtgtaactcattccta

SEQ ID NO: 107793 - DNA, 19 bp, Homo sapiens
  siRNA target sequence for ZAK (NM_016653.1,896-914).
gtaactcattcctacacaa

SEQ ID NO: 107794 - DNA, 19 bp, Homo sapiens
  siRNA target sequence for ZAK (NM_016653.1,933-951).
cgaaattgaggcaactctt

SEQ ID NO: 107795 - DNA, 19 bp, Homo sapiens
  siRNA target sequence for ZAK (NM_016653.1,947-965).
ctcttgagaggctaaagaa

SEQ ID NO: 107796 - DNA, 19 bp, Homo sapiens
  siRNA target sequence for ZAK (NM_016653.1,970-988).
gagcgtgatctcagcttta

SEQ ID NO: 107797 - DNA, 19 bp, Homo sapiens
  siRNA target sequence for ZAK (NM_016653.1,1006-1024).
gaacgagaaagacgtttaa

SEQ ID NO: 107798 - DNA, 19 bp, Homo sapiens
  siRNA target sequence for ZAK (NM_016653.1,1009-1027).
cgagaaagacgtttaaaga

SEQ ID NO: 107799 - DNA, 19 bp, Homo sapiens
  siRNA target sequence for ZAK (NM_016653.1,1010-1028).
gagaaagacgtttaaagat

SEQ ID NO: 107800 - DNA, 19 bp, Homo sapiens
  siRNA target sequence for ZAK (NM_016653.1,1094-1112).
ggacggaagacgatgtgta

SEQ ID NO: 107801 - DNA, 19 bp, Homo sapiens
  siRNA target sequence for ZAK (NM_016653.1,1099-1117).
gaagacgatgtgtattgtt

SEQ ID NO: 107802 - DNA, 19 bp, Homo sapiens
  siRNA target sequence for ZAK (NM_016653.1,1151-1169).
cagcagagatgagtgtata

SEQ ID NO: 107803 - DNA, 19 bp, Homo sapiens
  siRNA target sequence for ZAK (NM_016653.1,1156-1174).
gagatgagtgtatatgcaa

SEQ ID NO: 107804 - DNA, 19 bp, Homo sapiens
  siRNA target sequence for ZAK (NM_016653.1,1254-1272).
ctccaaggggcatatcatt

SEQ ID NO: 107805 - DNA, 19 bp, Homo sapiens
  siRNA target sequence for ZAK (NM_016653.1,1264-1282).
catatcattcacttcaagt

SEQ ID NO: 107806 - DNA, 19 bp, Homo sapiens
  siRNA target sequence for ZAK (NM_016653.1,1324-1342).
cacttcccaccactaatta

SEQ ID NO: 107807 - DNA, 19 bp, Homo sapiens
  siRNA target sequence for ZAK (NM_016653.1,1389-1407).
cctggaactggtttttggt

SEQ ID NO: 107808 - DNA, 19 bp, Homo sapiens
  siRNA target sequence for ZAK (NM_016653.1,1396-1414).
ctggtttttggttttcact

SEQ ID NO: 107809 - DNA, 19 bp, Homo sapiens
  siRNA target sequence for ZAK (NM_016653.1,1468-1486).
gatggggatgaaattgcaa

SEQ ID NO: 107810 - DNA, 19 bp, Homo sapiens
  siRNA target sequence for ZAK (NM_016653.1,1501-1519).
gatgtgacattcaacacta

SEQ ID NO: 107811 - DNA, 19 bp, Homo sapiens
  siRNA target sequence for ZAK (NM_016653.1,1506-1524).
gacattcaacactaaccta

SEQ ID NO: 107812 - DNA, 19 bp, Homo sapiens
  siRNA target sequence for ZAK (NM_016653.1,1522-1540).
ctacctgatgcggagattt

SEQ ID NO: 107813 - DNA, 19 bp, Homo sapiens
  siRNA target sequence for ZAK (NM_016653.1,1528-1546).
gatgcggagattttaaaga

SEQ ID NO: 107814 - DNA, 19 bp, Homo sapiens
  siRNA target sequence for ZAK (NM_016653.1,1548-1566).
gacaaagccaccatttgta

SEQ ID NO: 107815 - DNA, 19 bp, Homo sapiens
  siRNA target sequence for ZAK (NM_016653.1,1550-1568).
caaagccaccatttgtaat

SEQ ID NO: 107816 - DNA, 19 bp, Homo sapiens
  siRNA target sequence for ZAK (NM_016653.1,1608-1626).
ggagtgcactgtcacatat

SEQ ID NO: 107817 - DNA, 19 bp, Homo sapiens
  siRNA target sequence for ZAK (NM_016653.1,1620-1638).
cacatatgagagtgatgtt

SEQ ID NO: 107818 - DNA, 19 bp, Homo sapiens
  siRNA target sequence for ZAK (NM_016653.1,1720-1738).
cttgccattcagacattat

SEQ ID NO: 107819 - DNA, 19 bp, Homo sapiens
  siRNA target sequence for ZAK (NM_016653.1,1729-1747).
cagacattattcaccaatt

SEQ ID NO: 107820 - DNA, 19 bp, Homo sapiens
  siRNA target sequence for ZAK (NM_016653.1,1731-1749).
gacattattcaccaattca

SEQ ID NO: 107821 - DNA, 19 bp, Homo sapiens
  siRNA target sequence for ZAK (NM_016653.1,1790-1808).
gccagtggttagatactct

SEQ ID NO: 107822 - DNA, 19 bp, Homo sapiens
  siRNA target sequence for ZAK (NM_016653.1,1846-1864).
cgttcccagagcaatccta

SEQ ID NO: 107823 - DNA, 19 bp, Homo sapiens
  siRNA target sequence for ZAK (NM_016653.1,1847-1865).
gttcccagagcaatcctat

SEQ ID NO: 107824 - DNA, 19 bp, Homo sapiens
  siRNA target sequence for ZAK (NM_016653.1,1877-1895).
cgttcttctcacactttga

SEQ ID NO: 107825 - DNA, 19 bp, Homo sapiens
  siRNA target sequence for ZAK (NM_016653.1,1932-1950).
ccaggtgcccattaagtat

SEQ ID NO: 107826 - DNA, 19 bp, Homo sapiens
  siRNA target sequence for ZAK (NM_016653.1,1935-1953).
ggtgcccattaagtatcaa

SEQ ID NO: 107827 - DNA, 19 bp, Homo sapiens
  siRNA target sequence for ZAK (NM_016653.1,1940-1958).
ccattaagtatcaacagat

SEQ ID NO: 107828 - DNA, 19 bp, Homo sapiens
  siRNA target sequence for ZAK (NM_016653.1,1983-2001).
ctcgtctcctactcagtat

SEQ ID NO: 107829 - DNA, 19 bp, Homo sapiens
  siRNA target sequence for ZAK (NM_016653.1,2128-2146).
ggtagtatatcactcaatt

SEQ ID NO: 107830 - DNA, 19 bp, Homo sapiens
  siRNA target sequence for ZAK (NM_016653.1,2254-2272).
cagtcgcctgacttcaaga

SEQ ID NO: 107831 - DNA, 19 bp, Homo sapiens
  siRNA target sequence for ZAK (NM_016653.1,2370-2388).
cgaagggggctggacaaaa

SEQ ID NO: 107832 - DNA, 19 bp, Homo sapiens
  siRNA target sequence for ZAK (NM_016653.1,2416-2434).
ccatctcccgccaaaacca

SEQ ID NO: 107833 - DNA, 19 bp, Homo sapiens
  siRNA target sequence for ZAK (NM_016653.1,2417-2435).
catctcccgccaaaaccaa

SEQ ID NO: 107834 - DNA, 19 bp, Homo sapiens
  siRNA target sequence for ZAK (NM_016653.1,2420-2438).
ctcccgccaaaaccaataa

SEQ ID NO: 107835 - DNA, 19 bp, Homo sapiens
  siRNA target sequence for ZAK (NM_016653.1,2423-2441).
ccgccaaaaccaataaaga

SEQ ID NO: 107836 - DNA, 19 bp, Homo sapiens
  siRNA target sequence for ZAK (NM_133646.1,625-643).
gatggagtattgaagatct

SEQ ID NO: 107837 - DNA, 19 bp, Homo sapiens
  siRNA target sequence for ZAK (NM_133646.1,1172-1190).
ccaacaccccgcttctctt

SEQ ID NO: 107838 - DNA, 19 bp, Homo sapiens
  siRNA target sequence for ZAK (NM_133646.1,1216-1234).
gagtcttactttgaatcta

SEQ ID NO: 107839 - DNA, 19 bp, Homo sapiens
  siRNA target sequence for ZAK (NM_133646.1,1345-1363).
ggggatatcttctcaatga

SEQ ID NO: 107840 - DNA, 19 bp, Homo sapiens
  siRNA target sequence for ZAK (NM_133646.1,1408-1426).
caagccaagcagaattctt

SEQ ID NO: 107841 - DNA, 19 bp, Homo sapiens
  siRNA target sequence for ZAK (NM_133646.1,1474-1492).
gggttcagtgattttgact

SEQ ID NO: 107842 - DNA, 19 bp, Homo sapiens
  siRNA target sequence for ZAK (NM_133646.1,1543-1561).
gacatggataatagtgaat

SEQ ID NO: 107843 - DNA, 19 bp, Homo sapiens
  siRNA target sequence for ZAP70 (NM_001079.2,451-469).
cagagctctgcgagttcta

SEQ ID NO: 107844 - DNA, 19 bp, Homo sapiens
  siRNA target sequence for ZAP70 (NM_001079.2,654-672).
gtggagaagctcattgcta

SEQ ID NO: 107845 - DNA, 19 bp, Homo sapiens
  siRNA target sequence for ZAP70 (NM_001079.2,723-741).
gaggccgagcgcaaacttt

SEQ ID NO: 107846 - DNA, 19 bp, Homo sapiens
  siRNA target sequence for ZAP70 (NM_001079.2,726-744).
gccgagcgcaaactttact

SEQ ID NO: 107847 - DNA, 19 bp, Homo sapiens
  siRNA target sequence for ZAP70 (NM_001079.2,728-746).
cgagcgcaaactttactct

SEQ ID NO: 107848 - DNA, 19 bp, Homo sapiens
  siRNA target sequence for ZAP70 (NM_001079.2,880-898).
ccgagggcaccaagtttga

SEQ ID NO: 107849 - DNA, 19 bp, Homo sapiens
  siRNA target sequence for ZAP70 (NM_001079.2,1092-1110).
gagccagcacgcataacgt

SEQ ID NO: 107850 - DNA, 19 bp, Homo sapiens
  siRNA target sequence for ZAP70 (NM_001079.2,1103-1121).
cataacgtccccagacaaa

SEQ ID NO: 107851 - DNA, 19 bp, Homo sapiens
  siRNA target sequence for ZAP70 (NM_001079.2,1140-1158).
gacacgagcgtgtatgaga

SEQ ID NO: 107852 - DNA, 19 bp, Homo sapiens
  siRNA target sequence for ZAP70 (NM_001079.2,1603-1621).
gcaacgtcctgctggttaa

SEQ ID NO: 107853 - DNA, 19 bp, Homo sapiens
  siRNA target sequence for ZAP70 (NM_001079.2,1729-1747).
cacccgaatgcatcaactt

SEQ ID NO: 107854 - DNA, 19 bp, Homo sapiens
  siRNA target sequence for ZAP70 (NM_001079.2,1983-2001).
cgcatgcgagcctgttact

SEQ ID NO: 107855 - DNA, 19 bp, Homo sapiens
  siRNA target sequence for ZCWCC3 (NM_015358.1,93-111).
cgcgctttgcccgaagttt

SEQ ID NO: 107856 - DNA, 19 bp, Homo sapiens
  siRNA target sequence for ZCWCC3 (NM_015358.1,102-120).
cccgaagtttttacataca

SEQ ID NO: 107857 - DNA, 19 bp, Homo sapiens
  siRNA target sequence for ZCWCC3 (NM_015358.1,103-121).
ccgaagtttttacatacaa

SEQ ID NO: 107858 - DNA, 19 bp, Homo sapiens
  siRNA target sequence for ZCWCC3 (NM_015358.1,105-123).
gaagtttttacatacaaat

SEQ ID NO: 107859 - DNA, 19 bp, Homo sapiens
  siRNA target sequence for ZCWCC3 (NM_015358.1,147-165).
cagtgcagttgctgaatta

SEQ ID NO: 107860 - DNA, 19 bp, Homo sapiens
  siRNA target sequence for ZCWCC3 (NM_015358.1,149-167).
gtgcagttgctgaattaat

SEQ ID NO: 107861 - DNA, 19 bp, Homo sapiens
  siRNA target sequence for ZCWCC3 (NM_015358.1,154-172).
gttgctgaattaatagata

SEQ ID NO: 107862 - DNA, 19 bp, Homo sapiens
  siRNA target sequence for ZCWCC3 (NM_015358.1,190-208).
gtgaacgctaaacaaatat

SEQ ID NO: 107863 - DNA, 19 bp, Homo sapiens
  siRNA target sequence for ZCWCC3 (NM_015358.1,210-228).
gattgacaaaacagtgata

SEQ ID NO: 107864 - DNA, 19 bp, Homo sapiens
  siRNA target sequence for ZCWCC3 (NM_015358.1,221-239).
cagtgataaatgaccatat

SEQ ID NO: 107865 - DNA, 19 bp, Homo sapiens
  siRNA target sequence for ZCWCC3 (NM_015358.1,223-241).
gtgataaatgaccatatat

SEQ ID NO: 107866 - DNA, 19 bp, Homo sapiens
  siRNA target sequence for ZCWCC3 (NM_015358.1,254-272).
ccgacaatgggaatggtat

SEQ ID NO: 107867 - DNA, 19 bp, Homo sapiens
  siRNA target sequence for ZCWCC3 (NM_015358.1,273-291).
gacttctgataaattacat

SEQ ID NO: 107868 - DNA, 19 bp, Homo sapiens
  siRNA target sequence for ZCWCC3 (NM_015358.1,365-383).
gcttcaagtcgggttctat

SEQ ID NO: 107869 - DNA, 19 bp, Homo sapiens
  siRNA target sequence for ZCWCC3 (NM_015358.1,380-398).
ctatgcgtctgggtaaaga

SEQ ID NO: 107870 - DNA, 19 bp, Homo sapiens
  siRNA target sequence for ZCWCC3 (NM_015358.1,390-408).
gggtaaagacgcaatcgtt

SEQ ID NO: 107871 - DNA, 19 bp, Homo sapiens
  siRNA target sequence for ZCWCC3 (NM_015358.1,391-409).
ggtaaagacgcaatcgttt

SEQ ID NO: 107872 - DNA, 19 bp, Homo sapiens
  siRNA target sequence for ZCWCC3 (NM_015358.1,392-410).
gtaaagacgcaatcgtttt

SEQ ID NO: 107873 - DNA, 19 bp, Homo sapiens
  siRNA target sequence for ZCWCC3 (NM_015358.1,397-415).
gacgcaatcgtttttacca

SEQ ID NO: 107874 - DNA, 19 bp, Homo sapiens
  siRNA target sequence for ZCWCC3 (NM_015358.1,399-417).
cgcaatcgtttttaccaaa

SEQ ID NO: 107875 - DNA, 19 bp, Homo sapiens
  siRNA target sequence for ZCWCC3 (NM_015358.1,400-418).
gcaatcgtttttaccaaaa

SEQ ID NO: 107876 - DNA, 19 bp, Homo sapiens
  siRNA target sequence for ZCWCC3 (NM_015358.1,432-450).
gagcgtgggccttttgtct

SEQ ID NO: 107877 - DNA, 19 bp, Homo sapiens
  siRNA target sequence for ZCWCC3 (NM_015358.1,493-511).
ccaatagtggcattcaaca

SEQ ID NO: 107878 - DNA, 19 bp, Homo sapiens
  siRNA target sequence for ZCWCC3 (NM_015358.1,494-512).
caatagtggcattcaacaa

SEQ ID NO: 107879 - DNA, 19 bp, Homo sapiens
  siRNA target sequence for ZCWCC3 (NM_015358.1,513-531).
gcaccgacagatgattaat

SEQ ID NO: 107880 - DNA, 19 bp, Homo sapiens
  siRNA target sequence for ZCWCC3 (NM_015358.1,584-602).
ccacggaacagaagttact

SEQ ID NO: 107881 - DNA, 19 bp, Homo sapiens
  siRNA target sequence for ZCWCC3 (NM_015358.1,594-612).
gaagttactggcagaactt

SEQ ID NO: 107882 - DNA, 19 bp, Homo sapiens
  siRNA target sequence for ZCWCC3 (NM_015358.1,633-651).
ggggacgaggatcatcatt

SEQ ID NO: 107883 - DNA, 19 bp, Homo sapiens
  siRNA target sequence for ZCWCC3 (NM_015358.1,638-656).
cgaggatcatcatttggaa

SEQ ID NO: 107884 - DNA, 19 bp, Homo sapiens
  siRNA target sequence for ZCWCC3 (NM_015358.1,699-717).
ggataaatatgatatcaga

SEQ ID NO: 107885 - DNA, 19 bp, Homo sapiens
  siRNA target sequence for ZCWCC3 (NM_015358.1,810-828).
gagggcttattgcagtata

SEQ ID NO: 107886 - DNA, 19 bp, Homo sapiens
  siRNA target sequence for ZCWCC3 (NM_015358.1,813-831).
ggcttattgcagtatatta

SEQ ID NO: 107887 - DNA, 19 bp, Homo sapiens
  siRNA target sequence for ZCWCC3 (NM_015358.1,855-873).
catcctacgtggacagaaa

SEQ ID NO: 107888 - DNA, 19 bp, Homo sapiens
  siRNA target sequence for ZCWCC3 (NM_015358.1,906-924).
ctacatcgaacgtgatgtt

SEQ ID NO: 107889 - DNA, 19 bp, Homo sapiens
  siRNA target sequence for ZCWCC3 (NM_015358.1,909-927).
catcgaacgtgatgtttat

SEQ ID NO: 107890 - DNA, 19 bp, Homo sapiens
  siRNA target sequence for ZCWCC3 (NM_015358.1,912-930).
cgaacgtgatgtttatcga

SEQ ID NO: 107891 - DNA, 19 bp, Homo sapiens
  siRNA target sequence for ZCWCC3 (NM_015358.1,919-937).
gatgtttatcgaccaaaat

SEQ ID NO: 107892 - DNA, 19 bp, Homo sapiens
  siRNA target sequence for ZCWCC3 (NM_015358.1,922-940).
gtttatcgaccaaaatttt

SEQ ID NO: 107893 - DNA, 19 bp, Homo sapiens
  siRNA target sequence for ZCWCC3 (NM_015358.1,929-947).
gaccaaaatttttatctaa

SEQ ID NO: 107894 - DNA, 19 bp, Homo sapiens
  siRNA target sequence for ZCWCC3 (NM_015358.1,991-1009).
cattatgggataatgatgt

SEQ ID NO: 107895 - DNA, 19 bp, Homo sapiens
  siRNA target sequence for ZCWCC3 (NM_015358.1,1022-1040).
gactcatcaaagcttatga

SEQ ID NO: 107896 - DNA, 19 bp, Homo sapiens
  siRNA target sequence for ZCWCC3 (NM_015358.1,1024-1042).
ctcatcaaagcttatgaaa

SEQ ID NO: 107897 - DNA, 19 bp, Homo sapiens
  siRNA target sequence for ZCWCC3 (NM_015358.1,1054-1072).
cagttaagggcaaacaaca

SEQ ID NO: 107898 - DNA, 19 bp, Homo sapiens
  siRNA target sequence for ZCWCC3 (NM_015358.1,1090-1108).
ggaattatagagtgtaatt

SEQ ID NO: 107899 - DNA, 19 bp, Homo sapiens
  siRNA target sequence for ZCWCC3 (NM_015358.1,1091-1109).
gaattatagagtgtaattt

SEQ ID NO: 107900 - DNA, 19 bp, Homo sapiens
  siRNA target sequence for ZCWCC3 (NM_015358.1,1111-1129).
cttaagccaactcataata

SEQ ID NO: 107901 - DNA, 19 bp, Homo sapiens
  siRNA target sequence for ZCWCC3 (NM_015358.1,1132-1150).
caagatttcgactatacta

SEQ ID NO: 107902 - DNA, 19 bp, Homo sapiens
  siRNA target sequence for ZCWCC3 (NM_015358.1,1155-1173).
gtacagacttacaataaca

SEQ ID NO: 107903 - DNA, 19 bp, Homo sapiens
  siRNA target sequence for ZCWCC3 (NM_015358.1,1181-1199).
gagaaaagctgaatgatta

SEQ ID NO: 107904 - DNA, 19 bp, Homo sapiens
  siRNA target sequence for ZCWCC3 (NM_015358.1,1183-1201).
gaaaagctgaatgattact

SEQ ID NO: 107905 - DNA, 19 bp, Homo sapiens
  siRNA target sequence for ZCWCC3 (NM_015358.1,1291-1309).
cagtgtgatgcctgtctaa

SEQ ID NO: 107906 - DNA, 19 bp, Homo sapiens
  siRNA target sequence for ZCWCC3 (NM_015358.1,1304-1322).
gtctaaagtggcggaaatt

SEQ ID NO: 107907 - DNA, 19 bp, Homo sapiens
  siRNA target sequence for ZCWCC3 (NM_015358.1,1373-1391).
ctgacccacagttcagaaa

SEQ ID NO: 107908 - DNA, 19 bp, Homo sapiens
  siRNA target sequence for ZCWCC3 (NM_015358.1,1375-1393).
gacccacagttcagaaatt

SEQ ID NO: 107909 - DNA, 19 bp, Homo sapiens
  siRNA target sequence for ZCWCC3 (NM_015358.1,1428-1446).
ggtacatcccacttatgaa

SEQ ID NO: 107910 - DNA, 19 bp, Homo sapiens
  siRNA target sequence for ZCWCC3 (NM_015358.1,1429-1447).
gtacatcccacttatgaaa

SEQ ID NO: 107911 - DNA, 19 bp, Homo sapiens
  siRNA target sequence for ZCWCC3 (NM_015358.1,1435-1453).
cccacttatgaaaaaacct

SEQ ID NO: 107912 - DNA, 19 bp, Homo sapiens
  siRNA target sequence for ZCWCC3 (NM_015358.1,1436-1454).
ccacttatgaaaaaaccta

SEQ ID NO: 107913 - DNA, 19 bp, Homo sapiens
  siRNA target sequence for ZCWCC3 (NM_015358.1,1500-1518).
gatccctcggattaatgct

SEQ ID NO: 107914 - DNA, 19 bp, Homo sapiens
  siRNA target sequence for ZCWCC3 (NM_015358.1,1618-1636).
gcgacaagacttctaaata

SEQ ID NO: 107915 - DNA, 19 bp, Homo sapiens
  siRNA target sequence for ZCWCC3 (NM_015358.1,1619-1637).
cgacaagacttctaaataa

SEQ ID NO: 107916 - DNA, 19 bp, Homo sapiens
  siRNA target sequence for ZCWCC3 (NM_015358.1,1734-1752).
gagtagtcagtttgaaaat

SEQ ID NO: 107917 - DNA, 19 bp, Homo sapiens
  siRNA target sequence for ZCWCC3 (NM_015358.1,1874-1892).
gtggtgttcaggttgagtt

SEQ ID NO: 107918 - DNA, 19 bp, Homo sapiens
  siRNA target sequence for ZCWCC3 (NM_015358.1,1877-1895).
gtgttcaggttgagtttgt

SEQ ID NO: 107919 - DNA, 19 bp, Homo sapiens
  siRNA target sequence for ZCWCC3 (NM_015358.1,1948-1966).
cgatgcgaccagggaaata

SEQ ID NO: 107920 - DNA, 19 bp, Homo sapiens
  siRNA target sequence for ZCWCC3 (NM_015358.1,1987-2005).
gtaccaagtttagttgtta

SEQ ID NO: 107921 - DNA, 19 bp, Homo sapiens
  siRNA target sequence for ZCWCC3 (NM_015358.1,2018-2036).
ctgttgaagacgagataga

SEQ ID NO: 107922 - DNA, 19 bp, Homo sapiens
  siRNA target sequence for ZCWCC3 (NM_015358.1,2026-2044).
gacgagatagacgtaagaa

SEQ ID NO: 107923 - DNA, 19 bp, Homo sapiens
  siRNA target sequence for ZCWCC3 (NM_015358.1,2028-2046).
cgagatagacgtaagaaat

SEQ ID NO: 107924 - DNA, 19 bp, Homo sapiens
  siRNA target sequence for ZCWCC3 (NM_015358.1,2100-2118).
ccaggaaaccaccgataaa

SEQ ID NO: 107925 - DNA, 19 bp, Homo sapiens
  siRNA target sequence for ZCWCC3 (NM_015358.1,2103-2121).
ggaaaccaccgataaatct

SEQ ID NO: 107926 - DNA, 19 bp, Homo sapiens
  siRNA target sequence for ZCWCC3 (NM_015358.1,2135-2153).
gctgccaattacaagaact

SEQ ID NO: 107927 - DNA, 19 bp, Homo sapiens
  siRNA target sequence for ZCWCC3 (NM_015358.1,2244-2262).
gaggatactagaaatgaat

SEQ ID NO: 107928 - DNA, 19 bp, Homo sapiens
  siRNA target sequence for ZCWCC3 (NM_015358.1,2300-2318).
ctgaaaccgatgctgtatt

SEQ ID NO: 107929 - DNA, 19 bp, Homo sapiens
  siRNA target sequence for ZCWCC3 (NM_015358.1,2302-2320).
gaaaccgatgctgtatttt

SEQ ID NO: 107930 - DNA, 19 bp, Homo sapiens
  siRNA target sequence for ZCWCC3 (NM_015358.1,2306-2324).
ccgatgctgtatttttact

SEQ ID NO: 107931 - DNA, 19 bp, Homo sapiens
  siRNA target sequence for ZCWCC3 (NM_015358.1,2330-2348).
gtattaatggcaaatctga

SEQ ID NO: 107932 - DNA, 19 bp, Homo sapiens
  siRNA target sequence for ZCWCC3 (NM_015358.1,2469-2487).
gagtaaaagtgaaatggat

SEQ ID NO: 107933 - DNA, 19 bp, Homo sapiens
  siRNA target sequence for ZCWCC3 (NM_015358.1,2499-2517).
gcagcttgacgatgtgttt

SEQ ID NO: 107934 - DNA, 19 bp, Homo sapiens
  siRNA target sequence for ZCWCC3 (NM_015358.1,2500-2518).
cagcttgacgatgtgttta

SEQ ID NO: 107935 - DNA, 19 bp, Homo sapiens
  siRNA target sequence for ZCWCC3 (NM_015358.1,2502-2520).
gcttgacgatgtgtttaga

SEQ ID NO: 107936 - DNA, 19 bp, Homo sapiens
  siRNA target sequence for ZCWCC3 (NM_015358.1,2542-2560).
gagagggaccagtataaaa

SEQ ID NO: 107937 - DNA, 19 bp, Homo sapiens
  siRNA target sequence for ZCWCC3 (NM_015358.1,2544-2562).
gagggaccagtataaaagt

SEQ ID NO: 107938 - DNA, 19 bp, Homo sapiens
  siRNA target sequence for ZCWCC3 (NM_015358.1,2629-2647).
gtagaacagttaaaatcta

SEQ ID NO: 107939 - DNA, 19 bp, Homo sapiens
  siRNA target sequence for ZCWCC3 (NM_015358.1,2658-2676).
gacggcaacagatgtttca

SEQ ID NO: 107940 - DNA, 19 bp, Homo sapiens
  siRNA target sequence for ZCWCC3 (NM_015358.1,2688-2706).
cattgaggagtctgtaaat

SEQ ID NO: 107941 - DNA, 19 bp, Homo sapiens
  siRNA target sequence for ZCWCC3 (NM_015358.1,2735-2753).
gatctcttcgagttaacgt

SEQ ID NO: 107942 - DNA, 19 bp, Homo sapiens
  siRNA target sequence for ZCWCC3 (NM_015358.1,2808-2826).
cgatgttgatgtagttgat

SEQ ID NO: 107943 - DNA, 19 bp, Homo sapiens
  siRNA target sequence for CNGA3 (NM_001298.1,99-117).
ctcagaccgagatctcaat

SEQ ID NO: 107944 - DNA, 19 bp, Homo sapiens
  siRNA target sequence for CNGA3 (NM_001298.1,254-272).
ggctgtcgcgcctcatctt

SEQ ID NO: 107945 - DNA, 19 bp, Homo sapiens
  siRNA target sequence for CNGA3 (NM_001298.1,256-274).
ctgtcgcgcctcatcttct

SEQ ID NO: 107946 - DNA, 19 bp, Homo sapiens
  siRNA target sequence for CNGA3 (NM_001298.1,315-333).
ccagggaccggactctttt

SEQ ID NO: 107947 - DNA, 19 bp, Homo sapiens
  siRNA target sequence for CNGA3 (NM_001298.1,318-336).
gggaccggactcttttcct

SEQ ID NO: 107948 - DNA, 19 bp, Homo sapiens
  siRNA target sequence for CNGA3 (NM_001298.1,527-545).
cgtccagcaacctgtacta

SEQ ID NO: 107949 - DNA, 19 bp, Homo sapiens
  siRNA target sequence for CNGA3 (NM_001298.1,727-745).
ggcttaatggtcagtgata

SEQ ID NO: 107950 - DNA, 19 bp, Homo sapiens
  siRNA target sequence for CNGA3 (NM_001298.1,812-830).
ccaccgacctggcttactt

SEQ ID NO: 107951 - DNA, 19 bp, Homo sapiens
  siRNA target sequence for CNGA3 (NM_001298.1,813-831).
caccgacctggcttactta

SEQ ID NO: 107952 - DNA, 19 bp, Homo sapiens
  siRNA target sequence for CNGA3 (NM_001298.1,860-878).
ggttcaaccgcctactgaa

SEQ ID NO: 107953 - DNA, 19 bp, Homo sapiens
  siRNA target sequence for CNGA3 (NM_001298.1,920-938).
ggaccaactaccccaatat

SEQ ID NO: 107954 - DNA, 19 bp, Homo sapiens
  siRNA target sequence for CNGA3 (NM_001298.1,923-941).
ccaactaccccaatatgtt

SEQ ID NO: 107955 - DNA, 19 bp, Homo sapiens
  siRNA target sequence for CNGA3 (NM_001298.1,1348-1366).
gttatccggtggtttgact

SEQ ID NO: 107956 - DNA, 19 bp, Homo sapiens
  siRNA target sequence for CNGA3 (NM_001298.1,1844-1862).
gacggcagatcctgatgaa

SEQ ID NO: 107957 - DNA, 19 bp, Homo sapiens
  siRNA target sequence for EPAC (NM_006105.2,841-859).
gtcagcgcacggatgaaga

SEQ ID NO: 107958 - DNA, 19 bp, Homo sapiens
  siRNA target sequence for EPAC (NM_006105.2,917-935).
ctcggtgaagcgagaatta

SEQ ID NO: 107959 - DNA, 19 bp, Homo sapiens
  siRNA target sequence for EPAC (NM_006105.2,938-956).
ggctgttctgctctttgaa

SEQ ID NO: 107960 - DNA, 19 bp, Homo sapiens
  siRNA target sequence for EPAC (NM_006105.2,969-987).
gcagggaccgtgttgttca

SEQ ID NO: 107961 - DNA, 19 bp, Homo sapiens
  siRNA target sequence for EPAC (NM_006105.2,1001-1019).
gggcacttcgtggtacatt

SEQ ID NO: 107962 - DNA, 19 bp, Homo sapiens
  siRNA target sequence for EPAC (NM_006105.2,1002-1020).
ggcacttcgtggtacatta

SEQ ID NO: 107963 - DNA, 19 bp, Homo sapiens
  siRNA target sequence for EPAC (NM_006105.2,1003-1021).
gcacttcgtggtacattat

SEQ ID NO: 107964 - DNA, 19 bp, Homo sapiens
  siRNA target sequence for EPAC (NM_006105.2,1185-1203).
gacttcaaccgtatcatca

SEQ ID NO: 107965 - DNA, 19 bp, Homo sapiens
  siRNA target sequence for EPAC (NM_006105.2,1309-1327).
gcaggaaccggtatacagt

SEQ ID NO: 107966 - DNA, 19 bp, Homo sapiens
  siRNA target sequence for EPAC (NM_006105.2,1836-1854).
gataaagtcccctatgaca

SEQ ID NO: 107967 - DNA, 19 bp, Homo sapiens
  siRNA target sequence for EPAC (NM_006105.2,2029-2047).
catctctggggctcaatga

SEQ ID NO: 107968 - DNA, 19 bp, Homo sapiens
  siRNA target sequence for EPAC (NM_006105.2,2042-2060).
caatgagcgtctctttgtt

SEQ ID NO: 107969 - DNA, 19 bp, Homo sapiens
  siRNA target sequence for EPAC (NM_006105.2,2188-2206).
ggagcctcttcaacagtat

SEQ ID NO: 107970 - DNA, 19 bp, Homo sapiens
  siRNA target sequence for EPAC (NM_006105.2,2402-2420).
ggagcagaagaatctcaat

SEQ ID NO: 107971 - DNA, 19 bp, Homo sapiens
  siRNA target sequence for EPAC (NM_006105.2,2403-2421).
gagcagaagaatctcaatt

SEQ ID NO: 107972 - DNA, 19 bp, Homo sapiens
  siRNA target sequence for EPAC (NM_006105.2,2406-2424).
cagaagaatctcaattcct

SEQ ID NO: 107973 - DNA, 19 bp, Homo sapiens
  siRNA target sequence for EPAC (NM_006105.2,2423-2441).
cttctttgccgtcatgttt

SEQ ID NO: 107974 - DNA, 19 bp, Homo sapiens
  siRNA target sequence for EPAC (NM_006105.2,2483-2501).
ggagcggctgcctcacaaa

SEQ ID NO: 107975 - DNA, 19 bp, Homo sapiens
  siRNA target sequence for EPAC (NM_006105.2,2851-2869).
ccagcacctgggcttatgt

SEQ ID NO: 107976 - DNA, 19 bp, Homo sapiens
  siRNA target sequence for HCN2 (NM_001194.2,2703-2721).
cgcctctcgtccaacttgt

SEQ ID NO: 107977 - DNA, 19 bp, Homo sapiens
  siRNA target sequence for HCN3 (NM_020897.1,171-189).
cctacggtcaacaagttct

SEQ ID NO: 107978 - DNA, 19 bp, Homo sapiens
  siRNA target sequence for HCN3 (NM_020897.1,385-403).
ggatcgtcttcaacgtatt

SEQ ID NO: 107979 - DNA, 19 bp, Homo sapiens
  siRNA target sequence for HCN3 (NM_020897.1,389-407).
cgtcttcaacgtattgtct

SEQ ID NO: 107980 - DNA, 19 bp, Homo sapiens
  siRNA target sequence for HCN3 (NM_020897.1,395-413).
caacgtattgtctgatact

SEQ ID NO: 107981 - DNA, 19 bp, Homo sapiens
  siRNA target sequence for HCN3 (NM_020897.1,399-417).
gtattgtctgatactttct

SEQ ID NO: 107982 - DNA, 19 bp, Homo sapiens
  siRNA target sequence for HCN3 (NM_020897.1,544-562).
cttctatccctgtggatta

SEQ ID NO: 107983 - DNA, 19 bp, Homo sapiens
  siRNA target sequence for HCN3 (NM_020897.1,683-701).
ccgcctcatccgctacata

SEQ ID NO: 107984 - DNA, 19 bp, Homo sapiens
  siRNA target sequence for HCN3 (NM_020897.1,1234-1252).
cgcttcgcgaggagatcat

SEQ ID NO: 107985 - DNA, 19 bp, Homo sapiens
  siRNA target sequence for HCN3 (NM_020897.1,1235-1253).
gcttcgcgaggagatcatt

SEQ ID NO: 107986 - DNA, 19 bp, Homo sapiens
  siRNA target sequence for HCN3 (NM_020897.1,1236-1254).
cttcgcgaggagatcatta

SEQ ID NO: 107987 - DNA, 19 bp, Homo sapiens
  siRNA target sequence for HCN3 (NM_020897.1,1387-1405).
ccgtggggaggaagatgta

SEQ ID NO: 107988 - DNA, 19 bp, Homo sapiens
  siRNA target sequence for HCN3 (NM_020897.1,1463-1481).
caccgatggatcctacttt

SEQ ID NO: 107989 - DNA, 19 bp, Homo sapiens
  siRNA target sequence for HCN3 (NM_020897.1,1555-1573).
cactcagcgtggaccattt

SEQ ID NO: 107990 - DNA, 19 bp, Homo sapiens
  siRNA target sequence for HCN3 (NM_020897.1,1557-1575).
ctcagcgtggaccatttca

SEQ ID NO: 107991 - DNA, 19 bp, Homo sapiens
  siRNA target sequence for HCN3 (NM_020897.1,1559-1577).
cagcgtggaccatttcaat

SEQ ID NO: 107992 - DNA, 19 bp, Homo sapiens
  siRNA target sequence for HCN3 (NM_020897.1,2313-2331).
cagctttctgccaacatgt

SEQ ID NO: 107993 - DNA, 19 bp, Homo sapiens
  siRNA target sequence for HCN4 (NM_005477.1,1114-1132).
cggtggacaccgctatcaa

SEQ ID NO: 107994 - DNA, 19 bp, Homo sapiens
  siRNA target sequence for HCN4 (NM_005477.1,1115-1133).
ggtggacaccgctatcaaa

SEQ ID NO: 107995 - DNA, 19 bp, Homo sapiens
  siRNA target sequence for HCN4 (NM_005477.1,1315-1333).
ccggattttggattatcca

SEQ ID NO: 107996 - DNA, 19 bp, Homo sapiens
  siRNA target sequence for HCN4 (NM_005477.1,1388-1406).
gggaaacctgattatcatt

SEQ ID NO: 107997 - DNA, 19 bp, Homo sapiens
  siRNA target sequence for HCN4 (NM_005477.1,1441-1459).
ccacaccctggattgtctt

SEQ ID NO: 107998 - DNA, 19 bp, Homo sapiens
  siRNA target sequence for HCN4 (NM_005477.1,1444-1462).
caccctggattgtcttcaa

SEQ ID NO: 107999 - DNA, 19 bp, Homo sapiens
  siRNA target sequence for HCN4 (NM_005477.1,1551-1569).
gacccgcagcggattaaaa

SEQ ID NO: 108000 - DNA, 19 bp, Homo sapiens
  siRNA target sequence for HCN4 (NM_005477.1,1739-1757).
ctcccgcctcattcgatat

SEQ ID NO: 108001 - DNA, 19 bp, Homo sapiens
  siRNA target sequence for HCN4 (NM_005477.1,1741-1759).
cccgcctcattcgatatat

SEQ ID NO: 108002 - DNA, 19 bp, Homo sapiens
  siRNA target sequence for HCN4 (NM_005477.1,1742-1760).
ccgcctcattcgatatatt

SEQ ID NO: 108003 - DNA, 19 bp, Homo sapiens
  siRNA target sequence for HCN4 (NM_005477.1,1744-1762).
gcctcattcgatatattca

SEQ ID NO: 108004 - DNA, 19 bp, Homo sapiens
  siRNA target sequence for HCN4 (NM_005477.1,2522-2540).
ggccgacggctcctacttt

SEQ ID NO: 108005 - DNA, 19 bp, Homo sapiens
  siRNA target sequence for HCN4 (NM_005477.1,3111-3129).
gtggacacaccgtcttcat

SEQ ID NO: 108006 - DNA, 19 bp, Homo sapiens
  siRNA target sequence for HCN4 (NM_005477.1,4154-4172).
ctccaaactgccatccaat

SEQ ID NO: 108007 - DNA, 19 bp, Homo sapiens
  siRNA target sequence for HCN4 (NM_005477.1,4157-4175).
caaactgccatccaatcta

SEQ ID NO: 108008 - DNA, 19 bp, Homo sapiens
  siRNA target sequence for PRKAR1A (NM_002734.2,191-209).
cgtccagaagcataacatt

SEQ ID NO: 108009 - DNA, 19 bp, Homo sapiens
  siRNA target sequence for PRKAR1A (NM_002734.2,194-212).
ccagaagcataacattcaa

SEQ ID NO: 108010 - DNA, 19 bp, Homo sapiens
  siRNA target sequence for PRKAR1A (NM_002734.2,210-228).
caagcgctgctcaaagatt

SEQ ID NO: 108011 - DNA, 19 bp, Homo sapiens
  siRNA target sequence for PRKAR1A (NM_002734.2,214-232).
cgctgctcaaagattctat

SEQ ID NO: 108012 - DNA, 19 bp, Homo sapiens
  siRNA target sequence for PRKAR1A (NM_002734.2,270-288).
gcattcctcagggaatact

SEQ ID NO: 108013 - DNA, 19 bp, Homo sapiens
  siRNA target sequence for PRKAR1A (NM_002734.2,271-289).
cattcctcagggaatactt

SEQ ID NO: 108014 - DNA, 19 bp, Homo sapiens
  siRNA target sequence for PRKAR1A (NM_002734.2,449-467).
ggaagatgcggcatcctat

SEQ ID NO: 108015 - DNA, 19 bp, Homo sapiens
  siRNA target sequence for PRKAR1A (NM_002734.2,453-471).
gatgcggcatcctatgtta

SEQ ID NO: 108016 - DNA, 19 bp, Homo sapiens
  siRNA target sequence for PRKAR1A (NM_002734.2,456-474).
gcggcatcctatgttagaa

SEQ ID NO: 108017 - DNA, 19 bp, Homo sapiens
  siRNA target sequence for PRKAR1A (NM_002734.2,457-475).
cggcatcctatgttagaaa

SEQ ID NO: 108018 - DNA, 19 bp, Homo sapiens
  siRNA target sequence for PRKAR1A (NM_002734.2,477-495).
gttataccaaaagattaca

SEQ ID NO: 108019 - DNA, 19 bp, Homo sapiens
  siRNA target sequence for PRKAR1A (NM_002734.2,546-564).
catcttgatgataatgaga

SEQ ID NO: 108020 - DNA, 19 bp, Homo sapiens
  siRNA target sequence for PRKAR1A (NM_002734.2,605-623).
cgcaggagagactgtgatt

SEQ ID NO: 108021 - DNA, 19 bp, Homo sapiens
  siRNA target sequence for PRKAR1A (NM_002734.2,640-658).
gggataacttctatgtgat

SEQ ID NO: 108022 - DNA, 19 bp, Homo sapiens
  siRNA target sequence for PRKAR1A (NM_002734.2,641-659).
ggataacttctatgtgatt

SEQ ID NO: 108023 - DNA, 19 bp, Homo sapiens
  siRNA target sequence for PRKAR1A (NM_002734.2,667-685).
gagagacggatgtctatgt

SEQ ID NO: 108024 - DNA, 19 bp, Homo sapiens
  siRNA target sequence for PRKAR1A (NM_002734.2,669-687).
gagacggatgtctatgtta

SEQ ID NO: 108025 - DNA, 19 bp, Homo sapiens
  siRNA target sequence for PRKAR1A (NM_002734.2,735-753).
cttgctttgatttatggaa

SEQ ID NO: 108026 - DNA, 19 bp, Homo sapiens
  siRNA target sequence for PRKAR1A (NM_002734.2,769-787).
ctgtcaaagcaaagacaaa

SEQ ID NO: 108027 - DNA, 19 bp, Homo sapiens
  siRNA target sequence for PRKAR1A (NM_002734.2,806-824).
cgaccgagacagctataga

SEQ ID NO: 108028 - DNA, 19 bp, Homo sapiens
  siRNA target sequence for PRKAR1A (NM_002734.2,807-825).
gaccgagacagctatagaa

SEQ ID NO: 108029 - DNA, 19 bp, Homo sapiens
  siRNA target sequence for PRKAR1A (NM_002734.2,809-827).
ccgagacagctatagaaga

SEQ ID NO: 108030 - DNA, 19 bp, Homo sapiens
  siRNA target sequence for PRKAR1A (NM_002734.2,810-828).
cgagacagctatagaagaa

SEQ ID NO: 108031 - DNA, 19 bp, Homo sapiens
  siRNA target sequence for PRKAR1A (NM_002734.2,850-868).
gaaagcggaagatgtatga

SEQ ID NO: 108032 - DNA, 19 bp, Homo sapiens
  siRNA target sequence for PRKAR1A (NM_002734.2,870-888).
gaattccttagtaaagtct

SEQ ID NO: 108033 - DNA, 19 bp, Homo sapiens
  siRNA target sequence for PRKAR1A (NM_002734.2,926-944).
ggtagctgatgcattggaa

SEQ ID NO: 108034 - DNA, 19 bp, Homo sapiens
  siRNA target sequence for PRKAR1A (NM_002734.2,941-959).
ggaaccagtgcagtttgaa

SEQ ID NO: 108035 - DNA, 19 bp, Homo sapiens
  siRNA target sequence for PRKAR1A (NM_002734.2,993-1011).
ggggatgagttcttcatta

SEQ ID NO: 108036 - DNA, 19 bp, Homo sapiens
  siRNA target sequence for PRKAR1A (NM_002734.2,994-1012).
gggatgagttcttcattat

SEQ ID NO: 108037 - DNA, 19 bp, Homo sapiens
  siRNA target sequence for PRKAR1A (NM_002734.2,1078-1096).
gattggggccttctgatta

SEQ ID NO: 108038 - DNA, 19 bp, Homo sapiens
  siRNA target sequence for PRKAR1A (NM_002734.2,1082-1100).
ggggccttctgattatttt

SEQ ID NO: 108039 - DNA, 19 bp, Homo sapiens
  siRNA target sequence for PRKAR1A (NM_002734.2,1159-1177).
ccttgaagtgcgttaagct

SEQ ID NO: 108040 - DNA, 19 bp, Homo sapiens
  siRNA target sequence for PRKAR1A (NM_002734.2,1178-1196).
ggaccgacctagatttgaa

SEQ ID NO: 108041 - DNA, 19 bp, Homo sapiens
  siRNA target sequence for PRKAR1A (NM_002734.2,1242-1260).
cagtacaacagttttgtgt

SEQ ID NO: 108042 - DNA, 19 bp, Homo sapiens
  siRNA target sequence for PRKAR2A (NM_004157.1,455-473).
cagttcctagcagatttaa

SEQ ID NO: 108043 - DNA, 19 bp, Homo sapiens
  siRNA target sequence for PRKAR2A (NM_004157.1,457-475).
gttcctagcagatttaata

SEQ ID NO: 108044 - DNA, 19 bp, Homo sapiens
  siRNA target sequence for PRKAR2A (NM_004157.1,530-548).
cagatccaagggtgattca

SEQ ID NO: 108045 - DNA, 19 bp, Homo sapiens
  siRNA target sequence for PRKAR2A (NM_004157.1,543-561).
gattcatcctaaaactgat

SEQ ID NO: 108046 - DNA, 19 bp, Homo sapiens
  siRNA target sequence for PRKAR2A (NM_004157.1,723-741).
catagaacggggaacttat

SEQ ID NO: 108047 - DNA, 19 bp, Homo sapiens
  siRNA target sequence for PRKAR2A (NM_004157.1,727-745).
gaacggggaacttatgaca

SEQ ID NO: 108048 - DNA, 19 bp, Homo sapiens
  siRNA target sequence for PRKAR2A (NM_004157.1,730-748).
cggggaacttatgacattt

SEQ ID NO: 108049 - DNA, 19 bp, Homo sapiens
  siRNA target sequence for PRKAR2A (NM_004157.1,771-789).
ccgctctgttggtcaatat

SEQ ID NO: 108050 - DNA, 19 bp, Homo sapiens
  siRNA target sequence for PRKAR2A (NM_004157.1,773-791).
gctctgttggtcaatatga

SEQ ID NO: 108051 - DNA, 19 bp, Homo sapiens
  siRNA target sequence for PRKAR2A (NM_004157.1,792-810).
caaccgtggcagttttgga

SEQ ID NO: 108052 - DNA, 19 bp, Homo sapiens
  siRNA target sequence for PRKAR2A (NM_004157.1,811-829).
gaactagctctgatgtaca

SEQ ID NO: 108053 - DNA, 19 bp, Homo sapiens
  siRNA target sequence for PRKAR2A (NM_004157.1,837-855).
gagagctgctaccattgtt

SEQ ID NO: 108054 - DNA, 19 bp, Homo sapiens
  siRNA target sequence for PRKAR2A (NM_004157.1,881-899).
gactggaccgggtgacttt

SEQ ID NO: 108055 - DNA, 19 bp, Homo sapiens
  siRNA target sequence for PRKAR2A (NM_004157.1,886-904).
gaccgggtgacttttagaa

SEQ ID NO: 108056 - DNA, 19 bp, Homo sapiens
  siRNA target sequence for PRKAR2A (NM_004157.1,889-907).
cgggtgacttttagaagaa

SEQ ID NO: 108057 - DNA, 19 bp, Homo sapiens
  siRNA target sequence for PRKAR2A (NM_004157.1,966-984).
gcccctccttaaatcacta

SEQ ID NO: 108058 - DNA, 19 bp, Homo sapiens
  siRNA target sequence for PRKAR2A (NM_004157.1,1099-1117).
ggcgaagtgagcatcttga

SEQ ID NO: 108059 - DNA, 19 bp, Homo sapiens
  siRNA target sequence for PRKAR2A (NM_004157.1,1100-1118).
gcgaagtgagcatcttgat

SEQ ID NO: 108060 - DNA, 19 bp, Homo sapiens
  siRNA target sequence for PRKAR2A (NM_004157.1,1105-1123).
gtgagcatcttgattagaa

SEQ ID NO: 108061 - DNA, 19 bp, Homo sapiens
  siRNA target sequence for PRKAR2A (NM_004157.1,1121-1139).
gaagcaggactaaatcaaa

SEQ ID NO: 108062 - DNA, 19 bp, Homo sapiens
  siRNA target sequence for PRKAR2A (NM_004157.1,1124-1142).
gcaggactaaatcaaacaa

SEQ ID NO: 108063 - DNA, 19 bp, Homo sapiens
  siRNA target sequence for PRKAR2A (NM_004157.1,1249-1267).
gttggagatgtcaaatgct

SEQ ID NO: 108064 - DNA, 19 bp, Homo sapiens
  siRNA target sequence for PRKAR2A (NM_004157.1,1265-1283).
gcttagttatggatgtaca

SEQ ID NO: 108065 - DNA, 19 bp, Homo sapiens
  siRNA target sequence for PRKAR2A (NM_004157.1,1307-1325).
cctgcatggacatcatgaa

SEQ ID NO: 108066 - DNA, 19 bp, Homo sapiens
  siRNA target sequence for PRKAR2B (NM_002736.1,454-472).
ggacgcaggggcgttcaat

SEQ ID NO: 108067 - DNA, 19 bp, Homo sapiens
  siRNA target sequence for PRKAR2B (NM_002736.1,465-483).
cgttcaatgctccagtaat

SEQ ID NO: 108068 - DNA, 19 bp, Homo sapiens
  siRNA target sequence for PRKAR2B (NM_002736.1,466-484).
gttcaatgctccagtaata

SEQ ID NO: 108069 - DNA, 19 bp, Homo sapiens
  siRNA target sequence for PRKAR2B (NM_002736.1,548-566).
gatgcagagtccaggatta

SEQ ID NO: 108070 - DNA, 19 bp, Homo sapiens
  siRNA target sequence for PRKAR2B (NM_002736.1,558-576).
ccaggattatacatccaaa

SEQ ID NO: 108071 - DNA, 19 bp, Homo sapiens
  siRNA target sequence for PRKAR2B (NM_002736.1,572-590).
ccaaaaactgatgatcaaa

SEQ ID NO: 108072 - DNA, 19 bp, Homo sapiens
  siRNA target sequence for PRKAR2B (NM_002736.1,598-616).
gttgcaagaggcttgcaaa

SEQ ID NO: 108073 - DNA, 19 bp, Homo sapiens
  siRNA target sequence for PRKAR2B (NM_002736.1,619-637).
catcctgctgtttaagaat

SEQ ID NO: 108074 - DNA, 19 bp, Homo sapiens
  siRNA target sequence for PRKAR2B (NM_002736.1,652-670).
gatgtctcaagtattagat

SEQ ID NO: 108075 - DNA, 19 bp, Homo sapiens
  siRNA target sequence for PRKAR2B (NM_002736.1,699-717).
gggagcatgtaattgatca

SEQ ID NO: 108076 - DNA, 19 bp, Homo sapiens
  siRNA target sequence for PRKAR2B (NM_002736.1,700-718).
ggagcatgtaattgatcaa

SEQ ID NO: 108077 - DNA, 19 bp, Homo sapiens
  siRNA target sequence for PRKAR2B (NM_002736.1,720-738).
gtgacgatggtgacaactt

SEQ ID NO: 108078 - DNA, 19 bp, Homo sapiens
  siRNA target sequence for PRKAR2B (NM_002736.1,792-810).
gaagatgtgttggtaacta

SEQ ID NO: 108079 - DNA, 19 bp, Homo sapiens
  siRNA target sequence for PRKAR2B (NM_002736.1,830-848).
ggcgaactggccttaatgt

SEQ ID NO: 108080 - DNA, 19 bp, Homo sapiens
  siRNA target sequence for PRKAR2B (NM_002736.1,836-854).
ctggccttaatgtacaata

SEQ ID NO: 108081 - DNA, 19 bp, Homo sapiens
  siRNA target sequence for PRKAR2B (NM_002736.1,838-856).
ggccttaatgtacaataca

SEQ ID NO: 108082 - DNA, 19 bp, Homo sapiens
  siRNA target sequence for PRKAR2B (NM_002736.1,913-931).
ggtaaccttcaggagaata

SEQ ID NO: 108083 - DNA, 19 bp, Homo sapiens
  siRNA target sequence for PRKAR2B (NM_002736.1,982-1000).
gtcactgccattccttaaa

SEQ ID NO: 108084 - DNA, 19 bp, Homo sapiens
  siRNA target sequence for PRKAR2B (NM_002736.1,986-1004).
ctgccattccttaaatctt

SEQ ID NO: 108085 - DNA, 19 bp, Homo sapiens
  siRNA target sequence for PRKAR2B (NM_002736.1,1014-1032).
ctgaacgcctgaaagtagt

SEQ ID NO: 108086 - DNA, 19 bp, Homo sapiens
  siRNA target sequence for PRKAR2B (NM_002736.1,1084-1102).
gggagattcggctgattct

SEQ ID NO: 108087 - DNA, 19 bp, Homo sapiens
  siRNA target sequence for PRKAR2B (NM_002736.1,1085-1103).
ggagattcggctgattctt

SEQ ID NO: 108088 - DNA, 19 bp, Homo sapiens
  siRNA target sequence for PRKAR2B (NM_002736.1,1122-1140).
gagaagtgaaaattactat

SEQ ID NO: 108089 - DNA, 19 bp, Homo sapiens
  siRNA target sequence for PRKAR2B (NM_002736.1,1264-1282).
cgccattgggactgtcaaa

SEQ ID NO: 108090 - DNA, 19 bp, Homo sapiens
  siRNA target sequence for PRKAR2B (NM_002736.1,1265-1283).
gccattgggactgtcaaat

SEQ ID NO: 108091 - DNA, 19 bp, Homo sapiens
  siRNA target sequence for PRKAR2B (NM_002736.1,1273-1291).
gactgtcaaatgtttagca

SEQ ID NO: 108092 - DNA, 19 bp, Homo sapiens
  siRNA target sequence for PRKAR2B (NM_002736.1,1279-1297).
caaatgtttagcaatggat

SEQ ID NO: 108093 - DNA, 19 bp, Homo sapiens
  siRNA target sequence for PRKAR2B (NM_002736.1,1325-1343).
ccttgcatggaaattatga

SEQ ID NO: 108094 - DNA, 19 bp, Homo sapiens
  siRNA target sequence for PRKAR2B (NM_002736.1,1348-1366).
gaacatcgctacctatgaa

SEQ ID NO: 108095 - DNA, 19 bp, Homo sapiens
  siRNA target sequence for PRKAR2B (NM_002736.1,1359-1377).
cctatgaagaacagttagt

SEQ ID NO: 108096 - DNA, 19 bp, Homo sapiens
  siRNA target sequence for PRKAR2B (NM_002736.1,1360-1378).
ctatgaagaacagttagtt

SEQ ID NO: 108097 - DNA, 19 bp, Homo sapiens
  siRNA target sequence for PRKAR2B (NM_002736.1,1389-1407).
gaacgaacatggatattgt

SEQ ID NO: 108098 - DNA, 19 bp, Homo sapiens
  siRNA target sequence for PRKAR2B (NM_002736.1,1392-1410).
cgaacatggatattgttga

SEQ ID NO: 108099 - DNA, 19 bp, Homo sapiens
  siRNA target sequence for ACAS2 (NM_018677.2,261-279).
ggagacattgccaaggaat

SEQ ID NO: 108100 - DNA, 19 bp, Homo sapiens
  siRNA target sequence for ACAS2 (NM_018677.2,306-324).
ccattccttcggtacaact

SEQ ID NO: 108101 - DNA, 19 bp, Homo sapiens
  siRNA target sequence for ACAS2 (NM_018677.2,307-325).
cattccttcggtacaactt

SEQ ID NO: 108102 - DNA, 19 bp, Homo sapiens
  siRNA target sequence for ACAS2 (NM_018677.2,311-329).
ccttcggtacaactttgat

SEQ ID NO: 108103 - DNA, 19 bp, Homo sapiens
  siRNA target sequence for ACAS2 (NM_018677.2,366-384).
ggagcaactaccaacatct

SEQ ID NO: 108104 - DNA, 19 bp, Homo sapiens
  siRNA target sequence for ACAS2 (NM_018677.2,389-407).
caatgtactggatcgaaat

SEQ ID NO: 108105 - DNA, 19 bp, Homo sapiens
  siRNA target sequence for ACAS2 (NM_018677.2,473-491).
cactcagatcacataccat

SEQ ID NO: 108106 - DNA, 19 bp, Homo sapiens
  siRNA target sequence for ACAS2 (NM_018677.2,520-538).
gcaatgttctccgaaaaca

SEQ ID NO: 108107 - DNA, 19 bp, Homo sapiens
  siRNA target sequence for ACAS2 (NM_018677.2,531-549).
cgaaaacagggcattcaga

SEQ ID NO: 108108 - DNA, 19 bp, Homo sapiens
  siRNA target sequence for ACAS2 (NM_018677.2,627-645).
gctttgcactccattgtgt

SEQ ID NO: 108109 - DNA, 19 bp, Homo sapiens
  siRNA target sequence for ACAS2 (NM_018677.2,791-809).
gaagggtttcccagtaaga

SEQ ID NO: 108110 - DNA, 19 bp, Homo sapiens
  siRNA target sequence for ACAS2 (NM_018677.2,1083-1101).
gtagccacaaccttcaagt

SEQ ID NO: 108111 - DNA, 19 bp, Homo sapiens
  siRNA target sequence for ACAS2 (NM_018677.2,1093-1111).
ccttcaagtatgtgtttga

SEQ ID NO: 108112 - DNA, 19 bp, Homo sapiens
  siRNA target sequence for ACAS2 (NM_018677.2,1133-1151).
ctggtgcacggcagacatt

SEQ ID NO: 108113 - DNA, 19 bp, Homo sapiens
  siRNA target sequence for ACAS2 (NM_018677.2,1156-1174).
ggatcactggtcattccta

SEQ ID NO: 108114 - DNA, 19 bp, Homo sapiens
  siRNA target sequence for ACAS2 (NM_018677.2,1201-1219).
gtgccaccagtgttttgtt

SEQ ID NO: 108115 - DNA, 19 bp, Homo sapiens
  siRNA target sequence for ACAS2 (NM_018677.2,1313-1331).
ccgtctgctcatgaagttt

SEQ ID NO: 108116 - DNA, 19 bp, Homo sapiens
  siRNA target sequence for ACAS2 (NM_018677.2,1566-1584).
cctgcaatcctgaatgagt

SEQ ID NO: 108117 - DNA, 19 bp, Homo sapiens
  siRNA target sequence for ACAS2 (NM_018677.2,1603-1621).
gtgaagctgaaggttatct

SEQ ID NO: 108118 - DNA, 19 bp, Homo sapiens
  siRNA target sequence for ACAS2 (NM_018677.2,1646-1664).
gatcatgcgcacagtctat

SEQ ID NO: 108119 - DNA, 19 bp, Homo sapiens
  siRNA target sequence for ACAS2 (NM_018677.2,1679-1697).
ctttgagacaacctacttt

SEQ ID NO: 108120 - DNA, 19 bp, Homo sapiens
  siRNA target sequence for ACAS2 (NM_018677.2,1683-1701).
gagacaacctactttaaga

SEQ ID NO: 108121 - DNA, 19 bp, Homo sapiens
  siRNA target sequence for ACAS2 (NM_018677.2,1687-1705).
caacctactttaagaagtt

SEQ ID NO: 108122 - DNA, 19 bp, Homo sapiens
  siRNA target sequence for ACAS2 (NM_018677.2,1741-1759).
gggaccaggatggctatta

SEQ ID NO: 108123 - DNA, 19 bp, Homo sapiens
  siRNA target sequence for ACAS2 (NM_018677.2,2046-2064).
cgctcagggaaaatcatga

SEQ ID NO: 108124 - DNA, 19 bp, Homo sapiens
  siRNA target sequence for ACAS2 (NM_018677.2,2066-2084).
gcgagtgcttcggaagatt

SEQ ID NO: 108125 - DNA, 19 bp, Homo sapiens
  siRNA target sequence for ADSS (NM_001126.2,491-509).
ctggccatacagttgttgt

SEQ ID NO: 108126 - DNA, 19 bp, Homo sapiens
  siRNA target sequence for ADSS (NM_001126.2,537-555).
cttacccagtggaataatt

SEQ ID NO: 108127 - DNA, 19 bp, Homo sapiens
  siRNA target sequence for ADSS (NM_001126.2,543-561).
cagtggaataattaatcca

SEQ ID NO: 108128 - DNA, 19 bp, Homo sapiens
  siRNA target sequence for ADSS (NM_001126.2,560-578).
caaatgtcactgcattcat

SEQ ID NO: 108129 - DNA, 19 bp, Homo sapiens
  siRNA target sequence for ADSS (NM_001126.2,565-583).
gtcactgcattcattggaa

SEQ ID NO: 108130 - DNA, 19 bp, Homo sapiens
  siRNA target sequence for ADSS (NM_001126.2,662-680).
gggaaaaaaggcttattat

SEQ ID NO: 108131 - DNA, 19 bp, Homo sapiens
  siRNA target sequence for ADSS (NM_001126.2,834-852).
gatgtgcgaccttgtttct

SEQ ID NO: 108132 - DNA, 19 bp, Homo sapiens
  siRNA target sequence for ADSS (NM_001126.2,840-858).
cgaccttgtttctgacttt

SEQ ID NO: 108133 - DNA, 19 bp, Homo sapiens
  siRNA target sequence for ADSS (NM_001126.2,863-881).
gcttctctgagaggtttaa

SEQ ID NO: 108134 - DNA, 19 bp, Homo sapiens
  siRNA target sequence for ADSS (NM_001126.2,883-901).
gttctagctaaccaataca

SEQ ID NO: 108135 - DNA, 19 bp, Homo sapiens
  siRNA target sequence for ADSS (NM_001126.2,889-907).
gctaaccaatacaaatcta

SEQ ID NO: 108136 - DNA, 19 bp, Homo sapiens
  siRNA target sequence for ADSS (NM_001126.2,890-908).
ctaaccaatacaaatctat

SEQ ID NO: 108137 - DNA, 19 bp, Homo sapiens
  siRNA target sequence for ADSS (NM_001126.2,937-955).
ggtgaattacaaaaactca

SEQ ID NO: 108138 - DNA, 19 bp, Homo sapiens
  siRNA target sequence for ADSS (NM_001126.2,946-964).
caaaaactcaagggttata

SEQ ID NO: 108139 - DNA, 19 bp, Homo sapiens
  siRNA target sequence for ADSS (NM_001126.2,1055-1073).
caaatgcagcactattaga

SEQ ID NO: 108140 - DNA, 19 bp, Homo sapiens
  siRNA target sequence for ADSS (NM_001126.2,1084-1102).
gggacttacccttttgtaa

SEQ ID NO: 108141 - DNA, 19 bp, Homo sapiens
  siRNA target sequence for ADSS (NM_001126.2,1093-1111).
ccttttgtaacctcttcaa

SEQ ID NO: 108142 - DNA, 19 bp, Homo sapiens
  siRNA target sequence for ADSS (NM_001126.2,1094-1112).
cttttgtaacctcttcaaa

SEQ ID NO: 108143 - DNA, 19 bp, Homo sapiens
  siRNA target sequence for ADSS (NM_001126.2,1099-1117).
gtaacctcttcaaattgta

SEQ ID NO: 108144 - DNA, 19 bp, Homo sapiens
  siRNA target sequence for ADSS (NM_001126.2,1143-1161).
gggtatgccacctcaaaat

SEQ ID NO: 108145 - DNA, 19 bp, Homo sapiens
  siRNA target sequence for ADSS (NM_001126.2,1145-1163).
gtatgccacctcaaaatgt

SEQ ID NO: 108146 - DNA, 19 bp, Homo sapiens
  siRNA target sequence for ADSS (NM_001126.2,1177-1195).
ggagttgtgaaagcttata

SEQ ID NO: 108147 - DNA, 19 bp, Homo sapiens
  siRNA target sequence for ADSS (NM_001126.2,1183-1201).
gtgaaagcttatacaacta

SEQ ID NO: 108148 - DNA, 19 bp, Homo sapiens
  siRNA target sequence for ADSS (NM_001126.2,1185-1203).
gaaagcttatacaactaga

SEQ ID NO: 108149 - DNA, 19 bp, Homo sapiens
  siRNA target sequence for ADSS (NM_001126.2,1310-1328).
gctggttggacctcgtttt

SEQ ID NO: 108150 - DNA, 19 bp, Homo sapiens
  siRNA target sequence for ADSS (NM_001126.2,1313-1331).
ggttggacctcgttttgct

SEQ ID NO: 108151 - DNA, 19 bp, Homo sapiens
  siRNA target sequence for ADSS (NM_001126.2,1339-1357).
gctcatatgatcaatggat

SEQ ID NO: 108152 - DNA, 19 bp, Homo sapiens
  siRNA target sequence for ADSS (NM_001126.2,1342-1360).
catatgatcaatggattta

SEQ ID NO: 108153 - DNA, 19 bp, Homo sapiens
  siRNA target sequence for ADSS (NM_001126.2,1361-1379).
ctgcgttggcacttaccaa

SEQ ID NO: 108154 - DNA, 19 bp, Homo sapiens
  siRNA target sequence for ADSS (NM_001126.2,1369-1387).
gcacttaccaagttggata

SEQ ID NO: 108155 - DNA, 19 bp, Homo sapiens
  siRNA target sequence for ADSS (NM_001126.2,1370-1388).
cacttaccaagttggatat

SEQ ID NO: 108156 - DNA, 19 bp, Homo sapiens
  siRNA target sequence for ADSS (NM_001126.2,1431-1449).
gttagatggtgaaatcata

SEQ ID NO: 108157 - DNA, 19 bp, Homo sapiens
  siRNA target sequence for ADSS (NM_001126.2,1476-1494).
cttaaataaagttgaagtt

SEQ ID NO: 108158 - DNA, 19 bp, Homo sapiens
  siRNA target sequence for ADSS (NM_001126.2,1486-1504).
gttgaagttcaatataaga

SEQ ID NO: 108159 - DNA, 19 bp, Homo sapiens
  siRNA target sequence for ADSS (NM_001126.2,1517-1535).
ggaacacagacatatcaaa

SEQ ID NO: 108160 - DNA, 19 bp, Homo sapiens
  siRNA target sequence for ADSS (NM_001126.2,1521-1539).
cacagacatatcaaatgca

SEQ ID NO: 108161 - DNA, 19 bp, Homo sapiens
  siRNA target sequence for ADSS (NM_001126.2,1559-1577).
ctgttaatgcacaaaacta

SEQ ID NO: 108162 - DNA, 19 bp, Homo sapiens
  siRNA target sequence for ADSS (NM_001126.2,1600-1618).
cttcaaattccagttaagt

SEQ ID NO: 108163 - DNA, 19 bp, Homo sapiens
  siRNA target sequence for ADSS (NM_001126.2,1617-1635).
gtggattggtgttggtaaa

SEQ ID NO: 108164 - DNA, 19 bp, Homo sapiens
  siRNA target sequence for ADSS (NM_001126.2,1627-1645).
gttggtaaatccagagaat

SEQ ID NO: 108165 - DNA, 19 bp, Homo sapiens
  siRNA target sequence for ADSSL1 (NM_152328.3,534-552).
gcacaagaggggaagaata

SEQ ID NO: 108166 - DNA, 19 bp, Homo sapiens
  siRNA target sequence for ADSSL1 (NM_152328.3,622-640).
gcgacctcctgtcagattt

SEQ ID NO: 108167 - DNA, 19 bp, Homo sapiens
  siRNA target sequence for ADSSL1 (NM_152328.3,623-641).
cgacctcctgtcagatttt

SEQ ID NO: 108168 - DNA, 19 bp, Homo sapiens
  siRNA target sequence for ADSSL1 (NM_152328.3,632-650).
gtcagattttgatgagttt

SEQ ID NO: 108169 - DNA, 19 bp, Homo sapiens
  siRNA target sequence for ADSSL1 (NM_152328.3,645-663).
gagttttcctccagattca

SEQ ID NO: 108170 - DNA, 19 bp, Homo sapiens
  siRNA target sequence for ADSSL1 (NM_152328.3,713-731).
cattgaaggccaactcaaa

SEQ ID NO: 108171 - DNA, 19 bp, Homo sapiens
  siRNA target sequence for ADSSL1 (NM_152328.3,771-789).
cgagatggtgtttacttta

SEQ ID NO: 108172 - DNA, 19 bp, Homo sapiens
  siRNA target sequence for ADSSL1 (NM_152328.3,772-790).
gagatggtgtttactttat

SEQ ID NO: 108173 - DNA, 19 bp, Homo sapiens
  siRNA target sequence for ADSSL1 (NM_152328.3,778-796).
gtgtttactttatgtatga

SEQ ID NO: 108174 - DNA, 19 bp, Homo sapiens
  siRNA target sequence for ADSSL1 (NM_152328.3,963-981).
gtggtgaaagcctatacca

SEQ ID NO: 108175 - DNA, 19 bp, Homo sapiens
  siRNA target sequence for ADSSL1 (NM_152328.3,1096-1114).
ggctcgacctgatgattct

SEQ ID NO: 108176 - DNA, 19 bp, Homo sapiens
  siRNA target sequence for ADSSL1 (NM_152328.3,1097-1115).
gctcgacctgatgattcta

SEQ ID NO: 108177 - DNA, 19 bp, Homo sapiens
  siRNA target sequence for ADSSL1 (NM_152328.3,1101-1119).
gacctgatgattctaagat

SEQ ID NO: 108178 - DNA, 19 bp, Homo sapiens
  siRNA target sequence for ADSSL1 (NM_152328.3,1127-1145).
catggtcaacggattcact

SEQ ID NO: 108179 - DNA, 19 bp, Homo sapiens
  siRNA target sequence for ADSSL1 (NM_152328.3,1178-1196).
cgtactgggtgaggttaaa

SEQ ID NO: 108180 - DNA, 19 bp, Homo sapiens
  siRNA target sequence for ADSSL1 (NM_152328.3,1214-1232).
gctgaacgggaaaaggatt

SEQ ID NO: 108181 - DNA, 19 bp, Homo sapiens
  siRNA target sequence for ADSSL1 (NM_152328.3,1265-1283).
gaaggtcgaagttgagtat

SEQ ID NO: 108182 - DNA, 19 bp, Homo sapiens
  siRNA target sequence for ADSSL1 (NM_152328.3,1268-1286).
ggtcgaagttgagtatgaa

SEQ ID NO: 108183 - DNA, 19 bp, Homo sapiens
  siRNA target sequence for ADSSL1 (NM_152328.3,1269-1287).
gtcgaagttgagtatgaaa

SEQ ID NO: 108184 - DNA, 19 bp, Homo sapiens
  siRNA target sequence for ADSSL1 (NM_152328.3,1344-1362).
ccacaggcccagaactaca

SEQ ID NO: 108185 - DNA, 19 bp, Homo sapiens
  siRNA target sequence for ADSSL1 (NM_152328.3,1382-1400).
cgtgggagtcgcagtcaaa

SEQ ID NO: 108186 - DNA, 19 bp, Homo sapiens
  siRNA target sequence for ADSSL1 (NM_152328.3,1404-1422).
gttggtgttggcaagtcaa

SEQ ID NO: 108187 - DNA, 19 bp, Homo sapiens
  siRNA target sequence for APMCF1 (NM_021203.2,166-184).
gctagtcttctggaagtta

SEQ ID NO: 108188 - DNA, 19 bp, Homo sapiens
  siRNA target sequence for APMCF1 (NM_021203.2,202-220).
cagtcagagagctgttctt

SEQ ID NO: 108189 - DNA, 19 bp, Homo sapiens
  siRNA target sequence for APMCF1 (NM_021203.2,234-252).
gtgattccgggaaaacgtt

SEQ ID NO: 108190 - DNA, 19 bp, Homo sapiens
  siRNA target sequence for APMCF1 (NM_021203.2,253-271).
gctctttgtcaggttgtta

SEQ ID NO: 108191 - DNA, 19 bp, Homo sapiens
  siRNA target sequence for APMCF1 (NM_021203.2,254-272).
ctctttgtcaggttgttaa

SEQ ID NO: 108192 - DNA, 19 bp, Homo sapiens
  siRNA target sequence for APMCF1 (NM_021203.2,265-283).
gttgttaacaggcctttat

SEQ ID NO: 108193 - DNA, 19 bp, Homo sapiens
  siRNA target sequence for APMCF1 (NM_021203.2,268-286).
gttaacaggcctttataga

SEQ ID NO: 108194 - DNA, 19 bp, Homo sapiens
  siRNA target sequence for APMCF1 (NM_021203.2,287-305).
gacactcagacgtccatta

SEQ ID NO: 108195 - DNA, 19 bp, Homo sapiens
  siRNA target sequence for APMCF1 (NM_021203.2,289-307).
cactcagacgtccattact

SEQ ID NO: 108196 - DNA, 19 bp, Homo sapiens
  siRNA target sequence for APMCF1 (NM_021203.2,291-309).
ctcagacgtccattactga

SEQ ID NO: 108197 - DNA, 19 bp, Homo sapiens
  siRNA target sequence for APMCF1 (NM_021203.2,310-328).
cagctgtgctgtatacaga

SEQ ID NO: 108198 - DNA, 19 bp, Homo sapiens
  siRNA target sequence for APMCF1 (NM_021203.2,334-352).
caataacaggggcaatagt

SEQ ID NO: 108199 - DNA, 19 bp, Homo sapiens
  siRNA target sequence for APMCF1 (NM_021203.2,346-364).
caatagtctgaccttgatt

SEQ ID NO: 108200 - DNA, 19 bp, Homo sapiens
  siRNA target sequence for APMCF1 (NM_021203.2,384-402).
gtttgaggcttcagttctt

SEQ ID NO: 108201 - DNA, 19 bp, Homo sapiens
  siRNA target sequence for APMCF1 (NM_021203.2,400-418).
cttagagcggtttaagtct

SEQ ID NO: 108202 - DNA, 19 bp, Homo sapiens
  siRNA target sequence for APMCF1 (NM_021203.2,460-478).
ccagcgagaggtgaaagat

SEQ ID NO: 108203 - DNA, 19 bp, Homo sapiens
  siRNA target sequence for APMCF1 (NM_021203.2,481-499).
ggctgagtttctgtatcaa

SEQ ID NO: 108204 - DNA, 19 bp, Homo sapiens
  siRNA target sequence for APMCF1 (NM_021203.2,526-544).
gaatacaccatcattctta

SEQ ID NO: 108205 - DNA, 19 bp, Homo sapiens
  siRNA target sequence for APMCF1 (NM_021203.2,548-566).
gcctgcaataagcaagata

SEQ ID NO: 108206 - DNA, 19 bp, Homo sapiens
  siRNA target sequence for APMCF1 (NM_021203.2,549-567).
cctgcaataagcaagatat

SEQ ID NO: 108207 - DNA, 19 bp, Homo sapiens
  siRNA target sequence for APMCF1 (NM_021203.2,720-738).
cacagttgcccctcaaagt

SEQ ID NO: 108208 - DNA, 19 bp, Homo sapiens
  siRNA target sequence for ARF1 (NM_001658.2,235-253).
gaaaccgtggagtacaaga

SEQ ID NO: 108209 - DNA, 19 bp, Homo sapiens
  siRNA target sequence for ARF1 (NM_001658.2,462-480).
cctccccaacgccatgaat

SEQ ID NO: 108210 - DNA, 19 bp, Homo sapiens
  siRNA target sequence for ARF1 (NM_001658.2,561-579).
cggcgacgggctctatgaa

SEQ ID NO: 108211 - DNA, 19 bp, Homo sapiens
  siRNA target sequence for ARF3 (NM_001659.1,565-583).
cccaagggttgatatttgt

SEQ ID NO: 108212 - DNA, 19 bp, Homo sapiens
  siRNA target sequence for ARF4 (NM_001660.2,230-248).
ccctcttctcccgactatt

SEQ ID NO: 108213 - DNA, 19 bp, Homo sapiens
  siRNA target sequence for ARF4 (NM_001660.2,231-249).
cctcttctcccgactattt

SEQ ID NO: 108214 - DNA, 19 bp, Homo sapiens
  siRNA target sequence for ARF4 (NM_001660.2,300-318).
gacaaccattctgtataaa

SEQ ID NO: 108215 - DNA, 19 bp, Homo sapiens
  siRNA target sequence for ARF4 (NM_001660.2,302-320).
caaccattctgtataaact

SEQ ID NO: 108216 - DNA, 19 bp, Homo sapiens
  siRNA target sequence for ARF4 (NM_001660.2,459-477).
gaatacccagggtcttatt

SEQ ID NO: 108217 - DNA, 19 bp, Homo sapiens
  siRNA target sequence for ARF4 (NM_001660.2,562-580).
gatgcagtgctgctacttt

SEQ ID NO: 108218 - DNA, 19 bp, Homo sapiens
  siRNA target sequence for ARF4 (NM_001660.2,608-626).
ctatggccatcagtgaaat

SEQ ID NO: 108219 - DNA, 19 bp, Homo sapiens
  siRNA target sequence for ARF4 (NM_001660.2,641-659).
ggcttcagtctcttcgtaa

SEQ ID NO: 108220 - DNA, 19 bp, Homo sapiens
  siRNA target sequence for ARF4 (NM_001660.2,727-745).
ctgtcaaatgagctttcaa

SEQ ID NO: 108221 - DNA, 19 bp, Homo sapiens
  siRNA target sequence for ARF4L (NM_001661.1,434-452).
ggacagacggtctagtgtt

SEQ ID NO: 108222 - DNA, 19 bp, Homo sapiens
  siRNA target sequence for ARF4L (NM_001661.1,435-453).
gacagacggtctagtgttt

SEQ ID NO: 108223 - DNA, 19 bp, Homo sapiens
  siRNA target sequence for ARF4L (NM_001661.1,437-455).
cagacggtctagtgtttgt

SEQ ID NO: 108224 - DNA, 19 bp, Homo sapiens
  siRNA target sequence for ARF4L (NM_001661.1,692-710).
gccttgagcgcctctatga

SEQ ID NO: 108225 - DNA, 19 bp, Homo sapiens
  siRNA target sequence for ARF5 (NM_001662.2,128-146).
ccacaatcctgtacaaact

SEQ ID NO: 108226 - DNA, 19 bp, Homo sapiens
  siRNA target sequence for ARF5 (NM_001662.2,174-192).
cccaaccataggcttcaat

SEQ ID NO: 108227 - DNA, 19 bp, Homo sapiens
  siRNA target sequence for ARF5 (NM_001662.2,347-365).
ctgatgaactccagaagat

SEQ ID NO: 108228 - DNA, 19 bp, Homo sapiens
  siRNA target sequence for ARF6 (NM_001663.2,522-540).
ggaaggtgctatccaaaat

SEQ ID NO: 108229 - DNA, 19 bp, Homo sapiens
  siRNA target sequence for ARF6 (NM_001663.2,669-687).
cggtgacttacaaaaatgt

SEQ ID NO: 108230 - DNA, 19 bp, Homo sapiens
  siRNA target sequence for ARF6 (NM_001663.2,731-749).
ccgctctggcggcattact

SEQ ID NO: 108231 - DNA, 19 bp, Homo sapiens
  siRNA target sequence for ARF6 (NM_001663.2,732-750).
cgctctggcggcattacta

SEQ ID NO: 108232 - DNA, 19 bp, Homo sapiens
  siRNA target sequence for ARF6 (NM_001663.2,734-752).
ctctggcggcattactaca

SEQ ID NO: 108233 - DNA, 19 bp, Homo sapiens
  siRNA target sequence for ARF6 (NM_001663.2,756-774).
ggacccaaggtctcatctt

SEQ ID NO: 108234 - DNA, 19 bp, Homo sapiens
  siRNA target sequence for ARF6 (NM_001663.2,821-839).
gagctgcaccgcattatca

SEQ ID NO: 108235 - DNA, 19 bp, Homo sapiens
  siRNA target sequence for ARF6 (NM_001663.2,988-1006).
ctcaggggacggactctat

SEQ ID NO: 108236 - DNA, 19 bp, Homo sapiens
  siRNA target sequence for ARF6 (NM_001663.2,990-1008).
caggggacggactctatga

SEQ ID NO: 108237 - DNA, 19 bp, Homo sapiens
  siRNA target sequence for ARF6 (NM_001663.2,1007-1025).
gaggggctcacatggttaa

SEQ ID NO: 108238 - DNA, 19 bp, Homo sapiens
  siRNA target sequence for ARF6 (NM_001663.2,1010-1028).
gggctcacatggttaacct

SEQ ID NO: 108239 - DNA, 19 bp, Homo sapiens
  siRNA target sequence for ARF6 (NM_001663.2,1017-1035).
catggttaacctctaacta

SEQ ID NO: 108240 - DNA, 19 bp, Homo sapiens
  siRNA target sequence for ARF6 (NM_001663.2,1020-1038).
ggttaacctctaactacaa

SEQ ID NO: 108241 - DNA, 19 bp, Homo sapiens
  siRNA target sequence for ARFD1 (NM_001656.2,155-173).
gttccccgtcttttgcttt

SEQ ID NO: 108242 - DNA, 19 bp, Homo sapiens
  siRNA target sequence for ARFD1 (NM_001656.2,202-220).
cactcgcctacctcttcat

SEQ ID NO: 108243 - DNA, 19 bp, Homo sapiens
  siRNA target sequence for ARFD1 (NM_001656.2,228-246).
caatccgttgcccatttga

SEQ ID NO: 108244 - DNA, 19 bp, Homo sapiens
  siRNA target sequence for ARFD1 (NM_001656.2,328-346).
gcagaatgggcctattggt

SEQ ID NO: 108245 - DNA, 19 bp, Homo sapiens
  siRNA target sequence for ARFD1 (NM_001656.2,388-406).
gagcatcattcgttgtgat

SEQ ID NO: 108246 - DNA, 19 bp, Homo sapiens
  siRNA target sequence for ARFD1 (NM_001656.2,391-409).
catcattcgttgtgatgaa

SEQ ID NO: 108247 - DNA, 19 bp, Homo sapiens
  siRNA target sequence for ARFD1 (NM_001656.2,416-434).
gctcaccttgcctctgtat

SEQ ID NO: 108248 - DNA, 19 bp, Homo sapiens
  siRNA target sequence for ARFD1 (NM_001656.2,417-435).
ctcaccttgcctctgtata

SEQ ID NO: 108249 - DNA, 19 bp, Homo sapiens
  siRNA target sequence for ARFD1 (NM_001656.2,419-437).
caccttgcctctgtatatt

SEQ ID NO: 108250 - DNA, 19 bp, Homo sapiens
  siRNA target sequence for ARFD1 (NM_001656.2,463-481).
ctctgagtgttctcaagtt

SEQ ID NO: 108251 - DNA, 19 bp, Homo sapiens
  siRNA target sequence for ARFD1 (NM_001656.2,476-494).
caagttactcattctacaa

SEQ ID NO: 108252 - DNA, 19 bp, Homo sapiens
  siRNA target sequence for ARFD1 (NM_001656.2,479-497).
gttactcattctacaaaga

SEQ ID NO: 108253 - DNA, 19 bp, Homo sapiens
  siRNA target sequence for ARFD1 (NM_001656.2,516-534).
gagttcctctagctgataa

SEQ ID NO: 108254 - DNA, 19 bp, Homo sapiens
  siRNA target sequence for ARFD1 (NM_001656.2,627-645).
gctgtgtctgcaaagaata

SEQ ID NO: 108255 - DNA, 19 bp, Homo sapiens
  siRNA target sequence for ARFD1 (NM_001656.2,653-671).
caccagggtcacaagcatt

SEQ ID NO: 108256 - DNA, 19 bp, Homo sapiens
  siRNA target sequence for ARFD1 (NM_001656.2,658-676).
gggtcacaagcattcagta

SEQ ID NO: 108257 - DNA, 19 bp, Homo sapiens
  siRNA target sequence for ARFD1 (NM_001656.2,680-698).
gaaccagaagctaatcaga

SEQ ID NO: 108258 - DNA, 19 bp, Homo sapiens
  siRNA target sequence for ARFD1 (NM_001656.2,695-713).
cagatccgagcatcaattt

SEQ ID NO: 108259 - DNA, 19 bp, Homo sapiens
  siRNA target sequence for ARFD1 (NM_001656.2,697-715).
gatccgagcatcaatttta

SEQ ID NO: 108260 - DNA, 19 bp, Homo sapiens
  siRNA target sequence for ARFD1 (NM_001656.2,700-718).
ccgagcatcaattttagat

SEQ ID NO: 108261 - DNA, 19 bp, Homo sapiens
  siRNA target sequence for ARFD1 (NM_001656.2,701-719).
cgagcatcaattttagata

SEQ ID NO: 108262 - DNA, 19 bp, Homo sapiens
  siRNA target sequence for ARFD1 (NM_001656.2,735-753).
ggaccttcacagaggaaat

SEQ ID NO: 108263 - DNA, 19 bp, Homo sapiens
  siRNA target sequence for ARFD1 (NM_001656.2,744-762).
cagaggaaatctcagatta

SEQ ID NO: 108264 - DNA, 19 bp, Homo sapiens
  siRNA target sequence for ARFD1 (NM_001656.2,780-798).
gaattgtgcagcacattga

SEQ ID NO: 108265 - DNA, 19 bp, Homo sapiens
  siRNA target sequence for ARFD1 (NM_001656.2,814-832).
cgtggaagatggaattgga

SEQ ID NO: 108266 - DNA, 19 bp, Homo sapiens
  siRNA target sequence for ARFD1 (NM_001656.2,866-884).
gagaatgcccggtcatgta

SEQ ID NO: 108267 - DNA, 19 bp, Homo sapiens
  siRNA target sequence for ARFD1 (NM_001656.2,868-886).
gaatgcccggtcatgtatt

SEQ ID NO: 108268 - DNA, 19 bp, Homo sapiens
  siRNA target sequence for ARFD1 (NM_001656.2,879-897).
catgtattcgagcttattt

SEQ ID NO: 108269 - DNA, 19 bp, Homo sapiens
  siRNA target sequence for ARFD1 (NM_001656.2,882-900).
gtattcgagcttattttta

SEQ ID NO: 108270 - DNA, 19 bp, Homo sapiens
  siRNA target sequence for ARFD1 (NM_001656.2,956-974).
gctcatgttcgtgaaaaat

SEQ ID NO: 108271 - DNA, 19 bp, Homo sapiens
  siRNA target sequence for ARFD1 (NM_001656.2,959-977).
catgttcgtgaaaaattga

SEQ ID NO: 108272 - DNA, 19 bp, Homo sapiens
  siRNA target sequence for ARFD1 (NM_001656.2,1060-1078).
gcagcaggatgattgtaga

SEQ ID NO: 108273 - DNA, 19 bp, Homo sapiens
  siRNA target sequence for ARFD1 (NM_001656.2,1077-1095).
gagttgtcttggcaaaaca

SEQ ID NO: 108274 - DNA, 19 bp, Homo sapiens
  siRNA target sequence for ARFD1 (NM_001656.2,1177-1195).
cagcatccctgtcactttt

SEQ ID NO: 108275 - DNA, 19 bp, Homo sapiens
  siRNA target sequence for ARFD1 (NM_001656.2,1180-1198).
catccctgtcacttttaca

SEQ ID NO: 108276 - DNA, 19 bp, Homo sapiens
  siRNA target sequence for ARFD1 (NM_001656.2,1187-1205).
gtcacttttacaaaggata

SEQ ID NO: 108277 - DNA, 19 bp, Homo sapiens
  siRNA target sequence for ARFD1 (NM_001656.2,1201-1219).
ggataatcgagttcacatt

SEQ ID NO: 108278 - DNA, 19 bp, Homo sapiens
  siRNA target sequence for ARFD1 (NM_001656.2,1238-1256).
cgggtcgttacgttaggat

SEQ ID NO: 108279 - DNA, 19 bp, Homo sapiens
  siRNA target sequence for ARFD1 (NM_001656.2,1239-1257).
gggtcgttacgttaggatt

SEQ ID NO: 108280 - DNA, 19 bp, Homo sapiens
  siRNA target sequence for ARFD1 (NM_001656.2,1243-1261).
cgttacgttaggattggat

SEQ ID NO: 108281 - DNA, 19 bp, Homo sapiens
  siRNA target sequence for ARFD1 (NM_001656.2,1275-1293).
ctactatcttgtttaagtt

SEQ ID NO: 108282 - DNA, 19 bp, Homo sapiens
  siRNA target sequence for ARFD1 (NM_001656.2,1278-1296).
ctatcttgtttaagttaaa

SEQ ID NO: 108283 - DNA, 19 bp, Homo sapiens
  siRNA target sequence for ARFD1 (NM_001656.2,1312-1330).
gcagcccattccaacaatt

SEQ ID NO: 108284 - DNA, 19 bp, Homo sapiens
  siRNA target sequence for ARFD1 (NM_001656.2,1315-1333).
gcccattccaacaattggt

SEQ ID NO: 108285 - DNA, 19 bp, Homo sapiens
  siRNA target sequence for ARFD1 (NM_001656.2,1316-1334).
cccattccaacaattggtt

SEQ ID NO: 108286 - DNA, 19 bp, Homo sapiens
  siRNA target sequence for ARFD1 (NM_001656.2,1347-1365).
ctgtagaatataaaaatct

SEQ ID NO: 108287 - DNA, 19 bp, Homo sapiens
  siRNA target sequence for ARFD1 (NM_001656.2,1454-1472).
gttgtagatagcagtcata

SEQ ID NO: 108288 - DNA, 19 bp, Homo sapiens
  siRNA target sequence for ARFD1 (NM_001656.2,1497-1515).
gcgaacttgcaaagttgtt

SEQ ID NO: 108289 - DNA, 19 bp, Homo sapiens
  siRNA target sequence for ARFD1 (NM_001656.2,1510-1528).
gttgttaacggaaaaagaa

SEQ ID NO: 108290 - DNA, 19 bp, Homo sapiens
  siRNA target sequence for ARFD1 (NM_001656.2,1541-1559).
ctgctcctgatttttgcta

SEQ ID NO: 108291 - DNA, 19 bp, Homo sapiens
  siRNA target sequence for ARFD1 (NM_001656.2,1580-1598).
gcactgtcagtagaagaaa

SEQ ID NO: 108292 - DNA, 19 bp, Homo sapiens
  siRNA target sequence for ARFD1 (NM_001656.2,1585-1603).
gtcagtagaagaaatcact

SEQ ID NO: 108293 - DNA, 19 bp, Homo sapiens
  siRNA target sequence for ARFD1 (NM_001656.2,1607-1625).
ctactcagtctccataaat

SEQ ID NO: 108294 - DNA, 19 bp, Homo sapiens
  siRNA target sequence for ARFD1 (NM_001656.2,1635-1653).
gccgtagctggtatattca

SEQ ID NO: 108295 - DNA, 19 bp, Homo sapiens
  siRNA target sequence for ARFD1 (NM_001656.2,1671-1689).
gtggtatgggactgtatga

SEQ ID NO: 108296 - DNA, 19 bp, Homo sapiens
  siRNA target sequence for ARFD1 (NM_001656.2,1701-1719).
ggctctcacggcaacttgt

SEQ ID NO: 108297 - DNA, 19 bp, Homo sapiens
  siRNA target sequence for ARFD1 (NM_001656.2,1702-1720).
gctctcacggcaacttgta

SEQ ID NO: 108298 - DNA, 19 bp, Homo sapiens
  siRNA target sequence for ARFD1 (NM_033227.1,1664-1682).
gctcgaagtgtttttcaga

SEQ ID NO: 108299 - DNA, 19 bp, Homo sapiens
  siRNA target sequence for ARFD1 (NM_033227.1,1667-1685).
cgaagtgtttttcagataa

SEQ ID NO: 108300 - DNA, 19 bp, Homo sapiens
  siRNA target sequence for ARFD1 (NM_033228.1,1635-1653).
gccgtagctgtttttcaga

SEQ ID NO: 108301 - DNA, 19 bp, Homo sapiens
  siRNA target sequence for ARFIP2 (NM_012402.2,259-277).
caggacccaacctcaatga

SEQ ID NO: 108302 - DNA, 19 bp, Homo sapiens
  siRNA target sequence for ARFIP2 (NM_012402.2,402-420).
gctggagaaaagtttgaca

SEQ ID NO: 108303 - DNA, 19 bp, Homo sapiens
  siRNA target sequence for ARFIP2 (NM_012402.2,433-451).
ggggcatcaacacctataa

SEQ ID NO: 108304 - DNA, 19 bp, Homo sapiens
  siRNA target sequence for ARFIP2 (NM_012402.2,457-475).
caaagcaactgttatcaga

SEQ ID NO: 108305 - DNA, 19 bp, Homo sapiens
  siRNA target sequence for ARFIP2 (NM_012402.2,467-485).
gttatcagaacgatttggt

SEQ ID NO: 108306 - DNA, 19 bp, Homo sapiens
  siRNA target sequence for ARFIP2 (NM_012402.2,513-531).
ctagagctgcagattgagt

SEQ ID NO: 108307 - DNA, 19 bp, Homo sapiens
  siRNA target sequence for ARFIP2 (NM_012402.2,674-692).
ggaggaatttggctacaat

SEQ ID NO: 108308 - DNA, 19 bp, Homo sapiens
  siRNA target sequence for ARFIP2 (NM_012402.2,700-718).
cacagaaactactatgcaa

SEQ ID NO: 108309 - DNA, 19 bp, Homo sapiens
  siRNA target sequence for ARFIP2 (NM_012402.2,735-753).
ctaggagccgtgaacttct

SEQ ID NO: 108310 - DNA, 19 bp, Homo sapiens
  siRNA target sequence for ARFIP2 (NM_012402.2,739-757).
gagccgtgaacttctttgt

SEQ ID NO: 108311 - DNA, 19 bp, Homo sapiens
  siRNA target sequence for ARFIP2 (NM_012402.2,756-774).
gtctctagcatcaacacat

SEQ ID NO: 108312 - DNA, 19 bp, Homo sapiens
  siRNA target sequence for ARFIP2 (NM_012402.2,797-815).
cacgctcatgactgtgaaa

SEQ ID NO: 108313 - DNA, 19 bp, Homo sapiens
  siRNA target sequence for ARFIP2 (NM_012402.2,824-842).
ggctgccaggctggaatat

SEQ ID NO: 108314 - DNA, 19 bp, Homo sapiens
  siRNA target sequence for ARFIP2 (NM_012402.2,935-953).
ggcccatcgggacaagtat

SEQ ID NO: 108315 - DNA, 19 bp, Homo sapiens
  siRNA target sequence for ARFIP2 (NM_012402.2,937-955).
cccatcgggacaagtatga

SEQ ID NO: 108316 - DNA, 19 bp, Homo sapiens
  siRNA target sequence for ARFRP1 (NM_003224.2,158-176).
ctgctgtcgggcttgtaca

SEQ ID NO: 108317 - DNA, 19 bp, Homo sapiens
  siRNA target sequence for ARFRP1 (NM_003224.2,161-179).
ctgtcgggcttgtacaagt

SEQ ID NO: 108318 - DNA, 19 bp, Homo sapiens
  siRNA target sequence for ARFRP1 (NM_003224.2,254-272).
cagtcgaaaacccgattta

SEQ ID NO: 108319 - DNA, 19 bp, Homo sapiens
  siRNA target sequence for ARFRP1 (NM_003224.2,258-276).
cgaaaacccgatttaacaa

SEQ ID NO: 108320 - DNA, 19 bp, Homo sapiens
  siRNA target sequence for ARFRP1 (NM_003224.2,264-282).
cccgatttaacaagaacta

SEQ ID NO: 108321 - DNA, 19 bp, Homo sapiens
  siRNA target sequence for ARFRP1 (NM_003224.2,266-284).
cgatttaacaagaactaca

SEQ ID NO: 108322 - DNA, 19 bp, Homo sapiens
  siRNA target sequence for ARFRP1 (NM_003224.2,286-304).
ggggatgagtctatccaaa

SEQ ID NO: 108323 - DNA, 19 bp, Homo sapiens
  siRNA target sequence for ARFRP1 (NM_003224.2,288-306).
ggatgagtctatccaaaat

SEQ ID NO: 108324 - DNA, 19 bp, Homo sapiens
  siRNA target sequence for ARFRP1 (NM_003224.2,348-366).
gaaaggctcggctcatgtt

SEQ ID NO: 108325 - DNA, 19 bp, Homo sapiens
  siRNA target sequence for ARFRP1 (NM_003224.2,399-417).
ctttgtgggacaagtatta

SEQ ID NO: 108326 - DNA, 19 bp, Homo sapiens
  siRNA target sequence for ARFRP1 (NM_003224.2,432-450).
gcgtcatctacgtcattga

SEQ ID NO: 108327 - DNA, 19 bp, Homo sapiens
  siRNA target sequence for ARHA (NM_001664.1,373-391).
cccagataccgatgttata

SEQ ID NO: 108328 - DNA, 19 bp, Homo sapiens
  siRNA target sequence for ARHA (NM_001664.1,375-393).
cagataccgatgttatact

SEQ ID NO: 108329 - DNA, 19 bp, Homo sapiens
  siRNA target sequence for ARHA (NM_001664.1,377-395).
gataccgatgttatactga

SEQ ID NO: 108330 - DNA, 19 bp, Homo sapiens
  siRNA target sequence for ARHA (NM_001664.1,409-427).
cgacagccctgatagttta

SEQ ID NO: 108331 - DNA, 19 bp, Homo sapiens
  siRNA target sequence for ARHA (NM_001664.1,412-430).
cagccctgatagtttagaa

SEQ ID NO: 108332 - DNA, 19 bp, Homo sapiens
  siRNA target sequence for ARHA (NM_001664.1,414-432).
gccctgatagtttagaaaa

SEQ ID NO: 108333 - DNA, 19 bp, Homo sapiens
  siRNA target sequence for ARHA (NM_001664.1,536-554).
cgggagctagccaagatga

SEQ ID NO: 108334 - DNA, 19 bp, Homo sapiens
  siRNA target sequence for ARHA (NM_001664.1,692-710).
gctagacgtgggaagaaaa

SEQ ID NO: 108335 - DNA, 19 bp, Homo sapiens
  siRNA target sequence for ARHA (NM_001664.1,693-711).
ctagacgtgggaagaaaaa

SEQ ID NO: 108336 - DNA, 19 bp, Homo sapiens
  siRNA target sequence for ARHB (NM_004040.1,226-244).
gacaccgacgtcattctca

SEQ ID NO: 108337 - DNA, 19 bp, Homo sapiens
  siRNA target sequence for ARHB (NM_004040.1,556-574).
cagaacggctgcatcaact

SEQ ID NO: 108338 - DNA, 19 bp, Homo sapiens
  siRNA target sequence for ARHC (NM_175744.3,196-214).
ctacgtccctactgtcttt

SEQ ID NO: 108339 - DNA, 19 bp, Homo sapiens
  siRNA target sequence for ARHC (NM_175744.3,632-650).
ctccaggtccgcaagaaca

SEQ ID NO: 108340 - DNA, 19 bp, Homo sapiens
  siRNA target sequence for ARHD (NM_014578.2,385-403).
ggtacccagaagtgaatca

SEQ ID NO: 108341 - DNA, 19 bp, Homo sapiens
  siRNA target sequence for ARHD (NM_014578.2,386-404).
gtacccagaagtgaatcat

SEQ ID NO: 108342 - DNA, 19 bp, Homo sapiens
  siRNA target sequence for ARHD (NM_014578.2,568-586).
cggctcggctccatgacaa

SEQ ID NO: 108343 - DNA, 19 bp, Homo sapiens
  siRNA target sequence for ARHE (NM_005168.2,156-174).
gccagccagaaattatcca

SEQ ID NO: 108344 - DNA, 19 bp, Homo sapiens
  siRNA target sequence for ARHE (NM_005168.2,181-199).
ctatcatggatcctaatca

SEQ ID NO: 108345 - DNA, 19 bp, Homo sapiens
  siRNA target sequence for ARHE (NM_005168.2,192-210).
cctaatcagaacgtgaaat

SEQ ID NO: 108346 - DNA, 19 bp, Homo sapiens
  siRNA target sequence for ARHE (NM_005168.2,203-221).
cgtgaaatgcaagatagtt

SEQ ID NO: 108347 - DNA, 19 bp, Homo sapiens
  siRNA target sequence for ARHE (NM_005168.2,280-298).
gcttccccgagaattacgt

SEQ ID NO: 108348 - DNA, 19 bp, Homo sapiens
  siRNA target sequence for ARHE (NM_005168.2,314-332).
gaattacacggccagtttt

SEQ ID NO: 108349 - DNA, 19 bp, Homo sapiens
  siRNA target sequence for ARHE (NM_005168.2,322-340).
cggccagttttgaaatcga

SEQ ID NO: 108350 - DNA, 19 bp, Homo sapiens
  siRNA target sequence for ARHE (NM_005168.2,378-396).
ggttctccttactatgaca

SEQ ID NO: 108351 - DNA, 19 bp, Homo sapiens
  siRNA target sequence for ARHE (NM_005168.2,379-397).
gttctccttactatgacaa

SEQ ID NO: 108352 - DNA, 19 bp, Homo sapiens
  siRNA target sequence for ARHE (NM_005168.2,382-400).
ctccttactatgacaatgt

SEQ ID NO: 108353 - DNA, 19 bp, Homo sapiens
  siRNA target sequence for ARHE (NM_005168.2,555-573).
ctgcggacagatgttagta

SEQ ID NO: 108354 - DNA, 19 bp, Homo sapiens
  siRNA target sequence for ARHE (NM_005168.2,557-575).
gcggacagatgttagtaca

SEQ ID NO: 108355 - DNA, 19 bp, Homo sapiens
  siRNA target sequence for ARHE (NM_005168.2,558-576).
cggacagatgttagtacat

SEQ ID NO: 108356 - DNA, 19 bp, Homo sapiens
  siRNA target sequence for ARHE (NM_005168.2,562-580).
cagatgttagtacattagt

SEQ ID NO: 108357 - DNA, 19 bp, Homo sapiens
  siRNA target sequence for ARHE (NM_005168.2,579-597).
gtagagctctccaatcaca

SEQ ID NO: 108358 - DNA, 19 bp, Homo sapiens
  siRNA target sequence for ARHE (NM_005168.2,644-662).
gattggagcagctacttat

SEQ ID NO: 108359 - DNA, 19 bp, Homo sapiens
  siRNA target sequence for ARHE (NM_005168.2,649-667).
gagcagctacttatatcga

SEQ ID NO: 108360 - DNA, 19 bp, Homo sapiens
  siRNA target sequence for ARHE (NM_005168.2,666-684).
gaatgctcagctttacagt

SEQ ID NO: 108361 - DNA, 19 bp, Homo sapiens
  siRNA target sequence for ARHE (NM_005168.2,675-693).
gctttacagtcggaaaata

SEQ ID NO: 108362 - DNA, 19 bp, Homo sapiens
  siRNA target sequence for ARHE (NM_005168.2,717-735).
gccaccttggcatgtgtaa

SEQ ID NO: 108363 - DNA, 19 bp, Homo sapiens
  siRNA target sequence for ARHE (NM_005168.2,719-737).
caccttggcatgtgtaaat

SEQ ID NO: 108364 - DNA, 19 bp, Homo sapiens
  siRNA target sequence for ARHE (NM_005168.2,725-743).
ggcatgtgtaaataagaca

SEQ ID NO: 108365 - DNA, 19 bp, Homo sapiens
  siRNA target sequence for ARHE (NM_005168.2,825-843).
gttgctacggacttacgaa

SEQ ID NO: 108366 - DNA, 19 bp, Homo sapiens
  siRNA target sequence for ARHF (NM_019034.2,204-222).
catcggtgttcgagaagta

SEQ ID NO: 108367 - DNA, 19 bp, Homo sapiens
  siRNA target sequence for ARHF (NM_019034.2,343-361).
ctgctatgacgtcatgaat

SEQ ID NO: 108368 - DNA, 19 bp, Homo sapiens
  siRNA target sequence for ARHF (NM_019034.2,568-586).
ggaatgttccgccaagttt

SEQ ID NO: 108369 - DNA, 19 bp, Homo sapiens
  siRNA target sequence for ARHG (NM_001665.1,187-205).
ctcatctgctacacaacta

SEQ ID NO: 108370 - DNA, 19 bp, Homo sapiens
  siRNA target sequence for ARHG (NM_001665.1,347-365).
ctcagaccaacgttttcgt

SEQ ID NO: 108371 - DNA, 19 bp, Homo sapiens
  siRNA target sequence for ARHG (NM_001665.1,386-404).
gtccgccgtcctatgagaa

SEQ ID NO: 108372 - DNA, 19 bp, Homo sapiens
  siRNA target sequence for ARHGAP1 (NM_004308.2,246-264).
gtgggatgacccatactat

SEQ ID NO: 108373 - DNA, 19 bp, Homo sapiens
  siRNA target sequence for ARHGAP1 (NM_004308.2,250-268).
gatgacccatactatgaca

SEQ ID NO: 108374 - DNA, 19 bp, Homo sapiens
  siRNA target sequence for ARHGAP1 (NM_004308.2,309-327).
gtatgggcggaagatcatt

SEQ ID NO: 108375 - DNA, 19 bp, Homo sapiens
  siRNA target sequence for ARHGAP1 (NM_004308.2,422-440).
gtgactacacacttctgta

SEQ ID NO: 108376 - DNA, 19 bp, Homo sapiens
  siRNA target sequence for ARHGAP1 (NM_004308.2,550-568).
gtgcatccaaccatgttca

SEQ ID NO: 108377 - DNA, 19 bp, Homo sapiens
  siRNA target sequence for ARHGAP1 (NM_004308.2,553-571).
catccaaccatgttcatca

SEQ ID NO: 108378 - DNA, 19 bp, Homo sapiens
  siRNA target sequence for ARHGAP1 (NM_004308.2,556-574).
ccaaccatgttcatcaaaa

SEQ ID NO: 108379 - DNA, 19 bp, Homo sapiens
  siRNA target sequence for ARHGAP1 (NM_004308.2,560-578).
ccatgttcatcaaaactct

SEQ ID NO: 108380 - DNA, 19 bp, Homo sapiens
  siRNA target sequence for ARHGAP1 (NM_004308.2,615-633).
cgggcagaagatcttctat

SEQ ID NO: 108381 - DNA, 19 bp, Homo sapiens
  siRNA target sequence for ARHGAP1 (NM_004308.2,688-706).
cctcgccaagtgctcaaat

SEQ ID NO: 108382 - DNA, 19 bp, Homo sapiens
  siRNA target sequence for ARHGAP1 (NM_004308.2,689-707).
ctcgccaagtgctcaaata

SEQ ID NO: 108383 - DNA, 19 bp, Homo sapiens
  siRNA target sequence for ARHGAP1 (NM_004308.2,692-710).
gccaagtgctcaaatatga

SEQ ID NO: 108384 - DNA, 19 bp, Homo sapiens
  siRNA target sequence for ARHGAP1 (NM_004308.2,861-879).
ggagactgttgcctactta

SEQ ID NO: 108385 - DNA, 19 bp, Homo sapiens
  siRNA target sequence for ARHGAP1 (NM_004308.2,941-959).
gggaagtgcagcagaagta

SEQ ID NO: 108386 - DNA, 19 bp, Homo sapiens
  siRNA target sequence for ARHGAP1 (NM_004308.2,978-996).
ggatttcgaccagtacaat

SEQ ID NO: 108387 - DNA, 19 bp, Homo sapiens
  siRNA target sequence for ARHGAP1 (NM_004308.2,1086-1104).
gggcttcctcaacattgat

SEQ ID NO: 108388 - DNA, 19 bp, Homo sapiens
  siRNA target sequence for ARHGAP1 (NM_004308.2,1293-1311).
caccctcaaggccattaat

SEQ ID NO: 108389 - DNA, 19 bp, Homo sapiens
  siRNA target sequence for ARHGAP1 (NM_004308.2,1303-1321).
gccattaatcccatcaaca

SEQ ID NO: 108390 - DNA, 19 bp, Homo sapiens
  siRNA target sequence for ARHGEF5 (NM_005435.2,972-990).
gagccagaagattgagttt

SEQ ID NO: 108391 - DNA, 19 bp, Homo sapiens
  siRNA target sequence for ARHGEF5 (NM_005435.2,974-992).
gccagaagattgagtttga

SEQ ID NO: 108392 - DNA, 19 bp, Homo sapiens
  siRNA target sequence for ARHGEF5 (NM_005435.2,1227-1245).
gctacatggacctcacaaa

SEQ ID NO: 108393 - DNA, 19 bp, Homo sapiens
  siRNA target sequence for ARHGEF5 (NM_005435.2,1228-1246).
ctacatggacctcacaaaa

SEQ ID NO: 108394 - DNA, 19 bp, Homo sapiens
  siRNA target sequence for ARHGEF5 (NM_005435.2,1305-1323).
ccgcacggagactcaaagt

SEQ ID NO: 108395 - DNA, 19 bp, Homo sapiens
  siRNA target sequence for ARHGEF5 (NM_005435.2,1419-1437).
ctacaagccccgagagaat

SEQ ID NO: 108396 - DNA, 19 bp, Homo sapiens
  siRNA target sequence for ARHGEF5 (NM_005435.2,1422-1440).
caagccccgagagaatgat

SEQ ID NO: 108397 - DNA, 19 bp, Homo sapiens
  siRNA target sequence for ARHGEF5 (NM_005435.2,1548-1566).
gcagcaggtggagttcatt

SEQ ID NO: 108398 - DNA, 19 bp, Homo sapiens
  siRNA target sequence for ARHGEF5 (NM_005435.2,1549-1567).
cagcaggtggagttcattt

SEQ ID NO: 108399 - DNA, 19 bp, Homo sapiens
  siRNA target sequence for ARHH (NM_004310.1,832-850).
gtggccaaccataactcat

SEQ ID NO: 108400 - DNA, 19 bp, Homo sapiens
  siRNA target sequence for ARHH (NM_004310.1,1123-1141).
ctcttctccatcaatgagt

SEQ ID NO: 108401 - DNA, 19 bp, Homo sapiens
  siRNA target sequence for ARHI (NM_004675.1,327-345).
gcaacttccgtcatgagta

SEQ ID NO: 108402 - DNA, 19 bp, Homo sapiens
  siRNA target sequence for ARHI (NM_004675.1,343-361).
gtacctgccgaccattgaa

SEQ ID NO: 108403 - DNA, 19 bp, Homo sapiens
  siRNA target sequence for ARHI (NM_004675.1,346-364).
cctgccgaccattgaaaat

SEQ ID NO: 108404 - DNA, 19 bp, Homo sapiens
  siRNA target sequence for ARHI (NM_004675.1,589-607).
cgtgctggtgggcaataaa

SEQ ID NO: 108405 - DNA, 19 bp, Homo sapiens
  siRNA target sequence for ARHI (NM_004675.1,690-708).
cagccaagaccgatgtgaa

SEQ ID NO: 108406 - DNA, 19 bp, Homo sapiens
  siRNA target sequence for ARHI (NM_004675.1,812-830).
ctgcttgacaagtgcataa

SEQ ID NO: 108407 - DNA, 19 bp, Homo sapiens
  siRNA target sequence for ARHI (NM_004675.1,818-836).
gacaagtgcataatcatgt

SEQ ID NO: 108408 - DNA, 19 bp, Homo sapiens
  siRNA target sequence for ARHJ (NM_020663.2,533-551).
ggtgccgtggggaaaacct

SEQ ID NO: 108409 - DNA, 19 bp, Homo sapiens
  siRNA target sequence for ARHJ (NM_020663.2,835-853).
catagggacccagattgat

SEQ ID NO: 108410 - DNA, 19 bp, Homo sapiens
  siRNA target sequence for ARHJ (NM_020663.2,857-875).
cgtgatgacccaaaaacct

SEQ ID NO: 108411 - DNA, 19 bp, Homo sapiens
  siRNA target sequence for ARHJ (NM_020663.2,858-876).
gtgatgacccaaaaacctt

SEQ ID NO: 108412 - DNA, 19 bp, Homo sapiens
  siRNA target sequence for ARHJ (NM_020663.2,878-896).
gcccgtttgctgtatatga

SEQ ID NO: 108413 - DNA, 19 bp, Homo sapiens
  siRNA target sequence for ARHJ (NM_020663.2,879-897).
cccgtttgctgtatatgaa

SEQ ID NO: 108414 - DNA, 19 bp, Homo sapiens
  siRNA target sequence for ARHJ (NM_020663.2,880-898).
ccgtttgctgtatatgaaa

SEQ ID NO: 108415 - DNA, 19 bp, Homo sapiens
  siRNA target sequence for ARHJ (NM_020663.2,955-973).
gtgctacttggaatgttca

SEQ ID NO: 108416 - DNA, 19 bp, Homo sapiens
  siRNA target sequence for ARHJ (NM_020663.2,994-1012).
caaagcggtttttgatgaa

SEQ ID NO: 108417 - DNA, 19 bp, Homo sapiens
  siRNA target sequence for ARHN (NM_005440.2,90-108).
cgcctatcccgggagttat

SEQ ID NO: 108418 - DNA, 19 bp, Homo sapiens
  siRNA target sequence for ARHN (NM_005440.2,92-110).
cctatcccgggagttatgt

SEQ ID NO: 108419 - DNA, 19 bp, Homo sapiens
  siRNA target sequence for ARHN (NM_005440.2,247-265).
ctcatctgcttcgacatta

SEQ ID NO: 108420 - DNA, 19 bp, Homo sapiens
  siRNA target sequence for ARHN (NM_005440.2,459-477).
gggggctgtgtcctatgtt

SEQ ID NO: 108421 - DNA, 19 bp, Homo sapiens
  siRNA target sequence for ARHN (NM_005440.2,632-650).
ggaatgagggcgagataca

SEQ ID NO: 108422 - DNA, 19 bp, Homo sapiens
  siRNA target sequence for ARHT1 (NM_018307.2,90-108).
ggtgggagaacctagagtt

SEQ ID NO: 108423 - DNA, 19 bp, Homo sapiens
  siRNA target sequence for ARHT1 (NM_018307.2,131-149).
ctctggtcagtgaagaatt

SEQ ID NO: 108424 - DNA, 19 bp, Homo sapiens
  siRNA target sequence for ARHT1 (NM_018307.2,210-228).
gagagttccaacacacatt

SEQ ID NO: 108425 - DNA, 19 bp, Homo sapiens
  siRNA target sequence for ARHT1 (NM_018307.2,283-301).
caggctaatgtcatctgta

SEQ ID NO: 108426 - DNA, 19 bp, Homo sapiens
  siRNA target sequence for ARHT1 (NM_018307.2,285-303).
ggctaatgtcatctgtata

SEQ ID NO: 108427 - DNA, 19 bp, Homo sapiens
  siRNA target sequence for ARHT1 (NM_018307.2,310-328).
gccgttaacaacaagcatt

SEQ ID NO: 108428 - DNA, 19 bp, Homo sapiens
  siRNA target sequence for ARHT1 (NM_018307.2,353-371).
ggattcctctcataaatga

SEQ ID NO: 108429 - DNA, 19 bp, Homo sapiens
  siRNA target sequence for ARHT1 (NM_018307.2,424-442).
gatctggtggaatatagta

SEQ ID NO: 108430 - DNA, 19 bp, Homo sapiens
  siRNA target sequence for ARHT1 (NM_018307.2,427-445).
ctggtggaatatagtagta

SEQ ID NO: 108431 - DNA, 19 bp, Homo sapiens
  siRNA target sequence for ARHT1 (NM_018307.2,460-478).
cctattatgaaccagtata

SEQ ID NO: 108432 - DNA, 19 bp, Homo sapiens
  siRNA target sequence for ARHT1 (NM_018307.2,468-486).
gaaccagtatacagaaata

SEQ ID NO: 108433 - DNA, 19 bp, Homo sapiens
  siRNA target sequence for ARHT1 (NM_018307.2,525-543).
catatcagagctcttttat

SEQ ID NO: 108434 - DNA, 19 bp, Homo sapiens
  siRNA target sequence for ARHT1 (NM_018307.2,603-621).
gatgaaaccagcttgtata

SEQ ID NO: 108435 - DNA, 19 bp, Homo sapiens
  siRNA target sequence for ARHT1 (NM_018307.2,625-643).
gcccttactcgtatattta

SEQ ID NO: 108436 - DNA, 19 bp, Homo sapiens
  siRNA target sequence for ARHT1 (NM_018307.2,627-645).
ccttactcgtatatttaaa

SEQ ID NO: 108437 - DNA, 19 bp, Homo sapiens
  siRNA target sequence for ARHT1 (NM_018307.2,796-814).
gggttgaccctgaaaggtt

SEQ ID NO: 108438 - DNA, 19 bp, Homo sapiens
  siRNA target sequence for ARHT1 (NM_018307.2,797-815).
ggttgaccctgaaaggttt

SEQ ID NO: 108439 - DNA, 19 bp, Homo sapiens
  siRNA target sequence for ARHT1 (NM_018307.2,867-885).
gactgtgcttcgacgattt

SEQ ID NO: 108440 - DNA, 19 bp, Homo sapiens
  siRNA target sequence for ARHT1 (NM_018307.2,871-889).
gtgcttcgacgatttggtt

SEQ ID NO: 108441 - DNA, 19 bp, Homo sapiens
  siRNA target sequence for ARHT1 (NM_018307.2,873-891).
gcttcgacgatttggttat

SEQ ID NO: 108442 - DNA, 19 bp, Homo sapiens
  siRNA target sequence for ARHT1 (NM_018307.2,878-896).
gacgatttggttatgatga

SEQ ID NO: 108443 - DNA, 19 bp, Homo sapiens
  siRNA target sequence for ARHT1 (NM_018307.2,903-921).
ggatttgacacctgaatat

SEQ ID NO: 108444 - DNA, 19 bp, Homo sapiens
  siRNA target sequence for ARHT1 (NM_018307.2,904-922).
gatttgacacctgaatatt

SEQ ID NO: 108445 - DNA, 19 bp, Homo sapiens
  siRNA target sequence for ARHT1 (NM_018307.2,927-945).
ccccctgctgaaaatacct

SEQ ID NO: 108446 - DNA, 19 bp, Homo sapiens
  siRNA target sequence for ARHT1 (NM_018307.2,946-964).
cctgattgcactactgaat

SEQ ID NO: 108447 - DNA, 19 bp, Homo sapiens
  siRNA target sequence for ARHT1 (NM_018307.2,947-965).
ctgattgcactactgaatt

SEQ ID NO: 108448 - DNA, 19 bp, Homo sapiens
  siRNA target sequence for ARHT1 (NM_018307.2,953-971).
gcactactgaattaaatca

SEQ ID NO: 108449 - DNA, 19 bp, Homo sapiens
  siRNA target sequence for ARHT1 (NM_018307.2,1066-1084).
gttttcccttacatacctt

SEQ ID NO: 108450 - DNA, 19 bp, Homo sapiens
  siRNA target sequence for ARHT1 (NM_018307.2,1158-1176).
gtggacgctcacgacttat

SEQ ID NO: 108451 - DNA, 19 bp, Homo sapiens
  siRNA target sequence for ARHT1 (NM_018307.2,1160-1178).
ggacgctcacgacttattt

SEQ ID NO: 108452 - DNA, 19 bp, Homo sapiens
  siRNA target sequence for ARHT1 (NM_018307.2,1161-1179).
gacgctcacgacttattta

SEQ ID NO: 108453 - DNA, 19 bp, Homo sapiens
  siRNA target sequence for ARHT1 (NM_018307.2,1163-1181).
cgctcacgacttatttaga

SEQ ID NO: 108454 - DNA, 19 bp, Homo sapiens
  siRNA target sequence for ARHT1 (NM_018307.2,1164-1182).
gctcacgacttatttagat

SEQ ID NO: 108455 - DNA, 19 bp, Homo sapiens
  siRNA target sequence for ARHT1 (NM_018307.2,1169-1187).
cgacttatttagatgtaca

SEQ ID NO: 108456 - DNA, 19 bp, Homo sapiens
  siRNA target sequence for ARHT1 (NM_018307.2,1186-1204).
cagcggtgcctggaatatt

SEQ ID NO: 108457 - DNA, 19 bp, Homo sapiens
  siRNA target sequence for ARHT1 (NM_018307.2,1206-1224).
gggctatctaggctattca

SEQ ID NO: 108458 - DNA, 19 bp, Homo sapiens
  siRNA target sequence for ARHT1 (NM_018307.2,1207-1225).
ggctatctaggctattcaa

SEQ ID NO: 108459 - DNA, 19 bp, Homo sapiens
  siRNA target sequence for ARHT1 (NM_018307.2,1208-1226).
gctatctaggctattcaat

SEQ ID NO: 108460 - DNA, 19 bp, Homo sapiens
  siRNA target sequence for ARHT1 (NM_018307.2,1209-1227).
ctatctaggctattcaata

SEQ ID NO: 108461 - DNA, 19 bp, Homo sapiens
  siRNA target sequence for ARHT1 (NM_018307.2,1213-1231).
ctaggctattcaatattga

SEQ ID NO: 108462 - DNA, 19 bp, Homo sapiens
  siRNA target sequence for ARHT1 (NM_018307.2,1315-1333).
gtgttcagatgtaatgtaa

SEQ ID NO: 108463 - DNA, 19 bp, Homo sapiens
  siRNA target sequence for ARHT1 (NM_018307.2,1317-1335).
gttcagatgtaatgtaatt

SEQ ID NO: 108464 - DNA, 19 bp, Homo sapiens
  siRNA target sequence for ARHT1 (NM_018307.2,1404-1422).
gaaaattcgtgaagatcat

SEQ ID NO: 108465 - DNA, 19 bp, Homo sapiens
  siRNA target sequence for ARHT1 (NM_018307.2,1411-1429).
cgtgaagatcataaatcct

SEQ ID NO: 108466 - DNA, 19 bp, Homo sapiens
  siRNA target sequence for ARHT1 (NM_018307.2,1412-1430).
gtgaagatcataaatccta

SEQ ID NO: 108467 - DNA, 19 bp, Homo sapiens
  siRNA target sequence for ARHT1 (NM_018307.2,1428-1446).
ctactatgcgattaacact

SEQ ID NO: 108468 - DNA, 19 bp, Homo sapiens
  siRNA target sequence for ARHT1 (NM_018307.2,1436-1454).
cgattaacactgtttatgt

SEQ ID NO: 108469 - DNA, 19 bp, Homo sapiens
  siRNA target sequence for ARHT1 (NM_018307.2,1437-1455).
gattaacactgtttatgta

SEQ ID NO: 108470 - DNA, 19 bp, Homo sapiens
  siRNA target sequence for ARHT1 (NM_018307.2,1443-1461).
cactgtttatgtatatgga

SEQ ID NO: 108471 - DNA, 19 bp, Homo sapiens
  siRNA target sequence for ARHT1 (NM_018307.2,1507-1525).
ctaactgaagctgaaatca

SEQ ID NO: 108472 - DNA, 19 bp, Homo sapiens
  siRNA target sequence for ARHT1 (NM_018307.2,1557-1575).
cagcaatcccaaatccttt

SEQ ID NO: 108473 - DNA, 19 bp, Homo sapiens
  siRNA target sequence for ARHT1 (NM_018307.2,1576-1594).
gaatactgtgccaggattt

SEQ ID NO: 108474 - DNA, 19 bp, Homo sapiens
  siRNA target sequence for ARHT1 (NM_018307.2,1605-1623).
ctttatggacagcagaata

SEQ ID NO: 108475 - DNA, 19 bp, Homo sapiens
  siRNA target sequence for ARHT1 (NM_018307.2,1616-1634).
gcagaataccttgcttaat

SEQ ID NO: 108476 - DNA, 19 bp, Homo sapiens
  siRNA target sequence for ARHT1 (NM_018307.2,1679-1697).
gtatttcacctactgattt

SEQ ID NO: 108477 - DNA, 19 bp, Homo sapiens
  siRNA target sequence for ARHT1 (NM_018307.2,1753-1771).
gcccccagtaaggatatct

SEQ ID NO: 108478 - DNA, 19 bp, Homo sapiens
  siRNA target sequence for ARHT1 (NM_018307.2,1754-1772).
cccccagtaaggatatctt

SEQ ID NO: 108479 - DNA, 19 bp, Homo sapiens
  siRNA target sequence for ARHT1 (NM_018307.2,1755-1773).
ccccagtaaggatatcttt

SEQ ID NO: 108480 - DNA, 19 bp, Homo sapiens
  siRNA target sequence for ARHT1 (NM_018307.2,1782-1800).
gacaacaatggccatgtat

SEQ ID NO: 108481 - DNA, 19 bp, Homo sapiens
  siRNA target sequence for ARHT2 (NM_138769.1,338-356).
gagaagattcgaactaagt

SEQ ID NO: 108482 - DNA, 19 bp, Homo sapiens
  siRNA target sequence for ARHT2 (NM_138769.1,629-647).
gcgctgacgcgcatcttca

SEQ ID NO: 108483 - DNA, 19 bp, Homo sapiens
  siRNA target sequence for ARHT2 (NM_138769.1,911-929).
ctgactgcggactatctct

SEQ ID NO: 108484 - DNA, 19 bp, Homo sapiens
  siRNA target sequence for ARHT2 (NM_138769.1,1049-1067).
gagctgcaaagccttttca

SEQ ID NO: 108485 - DNA, 19 bp, Homo sapiens
  siRNA target sequence for ARHT2 (NM_138769.1,1526-1544).
gacgttgcctgcttgatgt

SEQ ID NO: 108486 - DNA, 19 bp, Homo sapiens
  siRNA target sequence for ARHT2 (NM_138769.1,1528-1546).
cgttgcctgcttgatgttt

SEQ ID NO: 108487 - DNA, 19 bp, Homo sapiens
  siRNA target sequence for ARHT2 (NM_138769.1,1584-1602).
gcgtctacaagcaccatta

SEQ ID NO: 108488 - DNA, 19 bp, Homo sapiens
  siRNA target sequence for ARHU (NM_021205.3,1108-1126).
gtcggatctcagagaagat

SEQ ID NO: 108489 - DNA, 19 bp, Homo sapiens
  siRNA target sequence for ARHU (NM_021205.3,1136-1154).
ctcattgagttggacaaat

SEQ ID NO: 108490 - DNA, 19 bp, Homo sapiens
  siRNA target sequence for ARHU (NM_021205.3,1190-1208).
ctgtgcgccgaggaaatca

SEQ ID NO: 108491 - DNA, 19 bp, Homo sapiens
  siRNA target sequence for ARHU (NM_021205.3,1192-1210).
gtgcgccgaggaaatcaaa

SEQ ID NO: 108492 - DNA, 19 bp, Homo sapiens
  siRNA target sequence for ARHU (NM_021205.3,1276-1294).
catcgtcgctggcattcaa

SEQ ID NO: 108493 - DNA, 19 bp, Homo sapiens
  siRNA target sequence for ARHU (NM_021205.3,1280-1298).
gtcgctggcattcaatact

SEQ ID NO: 108494 - DNA, 19 bp, Homo sapiens
  siRNA target sequence for ARHV (NM_133639.2,547-565).
gacgatgtcaacgtactaa

SEQ ID NO: 108495 - DNA, 19 bp, Homo sapiens
  siRNA target sequence for ARHV (NM_133639.2,549-567).
cgatgtcaacgtactaatt

SEQ ID NO: 108496 - DNA, 19 bp, Homo sapiens
  siRNA target sequence for ARHV (NM_133639.2,664-682).
gccttgacgcagaagaact

SEQ ID NO: 108497 - DNA, 19 bp, Homo sapiens
  siRNA target sequence for ARL1 (NM_001177.3,154-172).
gtggctttttctcaagtat

SEQ ID NO: 108498 - DNA, 19 bp, Homo sapiens
  siRNA target sequence for ARL1 (NM_001177.3,190-208).
gaactcgggaaatgagaat

SEQ ID NO: 108499 - DNA, 19 bp, Homo sapiens
  siRNA target sequence for ARL1 (NM_001177.3,195-213).
cgggaaatgagaattttaa

SEQ ID NO: 108500 - DNA, 19 bp, Homo sapiens
  siRNA target sequence for ARL1 (NM_001177.3,268-286).
gagaagttgttactactat

SEQ ID NO: 108501 - DNA, 19 bp, Homo sapiens
  siRNA target sequence for ARL1 (NM_001177.3,273-291).
gttgttactactataccta

SEQ ID NO: 108502 - DNA, 19 bp, Homo sapiens
  siRNA target sequence for ARL1 (NM_001177.3,283-301).
ctatacctaccattggatt

SEQ ID NO: 108503 - DNA, 19 bp, Homo sapiens
  siRNA target sequence for ARL1 (NM_001177.3,314-332).
ggtgacgtacaaaaacctt

SEQ ID NO: 108504 - DNA, 19 bp, Homo sapiens
  siRNA target sequence for ARL1 (NM_001177.3,354-372).
ggaggacagacaagtatca

SEQ ID NO: 108505 - DNA, 19 bp, Homo sapiens
  siRNA target sequence for ARL1 (NM_001177.3,373-391).
ggccatactggagatgtta

SEQ ID NO: 108506 - DNA, 19 bp, Homo sapiens
  siRNA target sequence for ARL1 (NM_001177.3,375-393).
ccatactggagatgttact

SEQ ID NO: 108507 - DNA, 19 bp, Homo sapiens
  siRNA target sequence for ARL1 (NM_001177.3,441-459).
gaccgaattggcatttcca

SEQ ID NO: 108508 - DNA, 19 bp, Homo sapiens
  siRNA target sequence for ARL1 (NM_001177.3,588-606).
gccttgaaggaccgaaaat

SEQ ID NO: 108509 - DNA, 19 bp, Homo sapiens
  siRNA target sequence for ARL1 (NM_001177.3,645-663).
cttgatgaggcaatggaat

SEQ ID NO: 108510 - DNA, 19 bp, Homo sapiens
  siRNA target sequence for ARL1 (NM_001177.3,653-671).
ggcaatggaatggttagtt

SEQ ID NO: 108511 - DNA, 19 bp, Homo sapiens
  siRNA target sequence for ARL1 (NM_001177.3,655-673).
caatggaatggttagttga

SEQ ID NO: 108512 - DNA, 19 bp, Homo sapiens
  siRNA target sequence for ARL1 (NM_001177.3,660-678).
gaatggttagttgaaacat

SEQ ID NO: 108513 - DNA, 19 bp, Homo sapiens
  siRNA target sequence for ARL1 (NM_001177.3,664-682).
ggttagttgaaacattaaa

SEQ ID NO: 108514 - DNA, 19 bp, Homo sapiens
  siRNA target sequence for ARL3 (NM_004311.2,295-313).
cacctacacagggtttcaa

SEQ ID NO: 108515 - DNA, 19 bp, Homo sapiens
  siRNA target sequence for ARL3 (NM_004311.2,297-315).
cctacacagggtttcaaca

SEQ ID NO: 108516 - DNA, 19 bp, Homo sapiens
  siRNA target sequence for ARL3 (NM_004311.2,305-323).
gggtttcaacatcaaaagt

SEQ ID NO: 108517 - DNA, 19 bp, Homo sapiens
  siRNA target sequence for ARL3 (NM_004311.2,322-340).
gtgtacaatcacaaggttt

SEQ ID NO: 108518 - DNA, 19 bp, Homo sapiens
  siRNA target sequence for ARL3 (NM_004311.2,384-402).
ccatactggaagaattatt

SEQ ID NO: 108519 - DNA, 19 bp, Homo sapiens
  siRNA target sequence for ARL3 (NM_004311.2,516-534).
ccagtgctcatctttgcta

SEQ ID NO: 108520 - DNA, 19 bp, Homo sapiens
  siRNA target sequence for ARL3 (NM_004311.2,532-550).
ctaataagcaggatttgct

SEQ ID NO: 108521 - DNA, 19 bp, Homo sapiens
  siRNA target sequence for ARL3 (NM_004311.2,583-601).
gactgaacctgcataccat

SEQ ID NO: 108522 - DNA, 19 bp, Homo sapiens
  siRNA target sequence for ARL3 (NM_004311.2,654-672).
gttcaggatggcatgaact

SEQ ID NO: 108523 - DNA, 19 bp, Homo sapiens
  siRNA target sequence for ARL5 (NM_012097.2,310-328).
gaattctcttcactagaat

SEQ ID NO: 108524 - DNA, 19 bp, Homo sapiens
  siRNA target sequence for ARL5 (NM_012097.2,365-383).
cattgttgggctggataat

SEQ ID NO: 108525 - DNA, 19 bp, Homo sapiens
  siRNA target sequence for ARL5 (NM_012097.2,439-457).
ctcctacaataggaagtaa

SEQ ID NO: 108526 - DNA, 19 bp, Homo sapiens
  siRNA target sequence for ARL5 (NM_012097.2,501-519).
gatattggtggccaagaat

SEQ ID NO: 108527 - DNA, 19 bp, Homo sapiens
  siRNA target sequence for ARL5 (NM_012097.2,533-551).
ctggaacacttactatact

SEQ ID NO: 108528 - DNA, 19 bp, Homo sapiens
  siRNA target sequence for ARL5 (NM_012097.2,535-553).
ggaacacttactatactaa

SEQ ID NO: 108529 - DNA, 19 bp, Homo sapiens
  siRNA target sequence for ARL5 (NM_012097.2,539-557).
cacttactatactaacaca

SEQ ID NO: 108530 - DNA, 19 bp, Homo sapiens
  siRNA target sequence for ARL5 (NM_012097.2,545-563).
ctatactaacacagagttt

SEQ ID NO: 108531 - DNA, 19 bp, Homo sapiens
  siRNA target sequence for ARL5 (NM_012097.2,550-568).
ctaacacagagtttgtaat

SEQ ID NO: 108532 - DNA, 19 bp, Homo sapiens
  siRNA target sequence for ARL5 (NM_012097.2,590-608).
cagagagaggatttctgta

SEQ ID NO: 108533 - DNA, 19 bp, Homo sapiens
  siRNA target sequence for ARL5 (NM_012097.2,594-612).
gagaggatttctgtaacta

SEQ ID NO: 108534 - DNA, 19 bp, Homo sapiens
  siRNA target sequence for ARL5 (NM_012097.2,613-631).
gagaagaactctataaaat

SEQ ID NO: 108535 - DNA, 19 bp, Homo sapiens
  siRNA target sequence for ARL5 (NM_012097.2,636-654).
gcgcatgaggacctaagaa

SEQ ID NO: 108536 - DNA, 19 bp, Homo sapiens
  siRNA target sequence for ARL5 (NM_012097.2,637-655).
cgcatgaggacctaagaaa

SEQ ID NO: 108537 - DNA, 19 bp, Homo sapiens
  siRNA target sequence for ARL5 (NM_012097.2,675-693).
gctaataaacaagatgtta

SEQ ID NO: 108538 - DNA, 19 bp, Homo sapiens
  siRNA target sequence for ARL5 (NM_012097.2,700-718).
gcatgactgtagcagaaat

SEQ ID NO: 108539 - DNA, 19 bp, Homo sapiens
  siRNA target sequence for ARL5 (NM_012097.2,770-788).
ggcatgctgtgctctaact

SEQ ID NO: 108540 - DNA, 19 bp, Homo sapiens
  siRNA target sequence for ARL5 (NM_012097.2,817-835).
ggatgatgtcacgacttaa

SEQ ID NO: 108541 - DNA, 19 bp, Homo sapiens
  siRNA target sequence for ARL5 (NM_012097.2,821-839).
gatgtcacgacttaagatt

SEQ ID NO: 108542 - DNA, 19 bp, Homo sapiens
  siRNA target sequence for ARL5 (NM_012097.2,824-842).
gtcacgacttaagattaga

SEQ ID NO: 108543 - DNA, 19 bp, Homo sapiens
  siRNA target sequence for ARL6 (NM_032146.3,357-375).
ggattgctagacagacttt

SEQ ID NO: 108544 - DNA, 19 bp, Homo sapiens
  siRNA target sequence for ARL6 (NM_032146.3,419-437).
ccttgggctagataatagt

SEQ ID NO: 108545 - DNA, 19 bp, Homo sapiens
  siRNA target sequence for ARL6 (NM_032146.3,438-456).
ggcaaaacgacgatcatta

SEQ ID NO: 108546 - DNA, 19 bp, Homo sapiens
  siRNA target sequence for ARL6 (NM_032146.3,439-457).
gcaaaacgacgatcattaa

SEQ ID NO: 108547 - DNA, 19 bp, Homo sapiens
  siRNA target sequence for ARL6 (NM_032146.3,445-463).
cgacgatcattaacaaact

SEQ ID NO: 108548 - DNA, 19 bp, Homo sapiens
  siRNA target sequence for ARL6 (NM_032146.3,446-464).
gacgatcattaacaaactt

SEQ ID NO: 108549 - DNA, 19 bp, Homo sapiens
  siRNA target sequence for ARL6 (NM_032146.3,448-466).
cgatcattaacaaacttaa

SEQ ID NO: 108550 - DNA, 19 bp, Homo sapiens
  siRNA target sequence for ARL6 (NM_032146.3,583-601).
gaaatctctgggaacacta

SEQ ID NO: 108551 - DNA, 19 bp, Homo sapiens
  siRNA target sequence for ARL6 (NM_032146.3,592-610).
gggaacactattataaaga

SEQ ID NO: 108552 - DNA, 19 bp, Homo sapiens
  siRNA target sequence for ARL6 (NM_032146.3,636-654).
gatagtagtgatagattaa

SEQ ID NO: 108553 - DNA, 19 bp, Homo sapiens
  siRNA target sequence for ARL6 (NM_032146.3,680-698).
cgatactcttctgaatcat

SEQ ID NO: 108554 - DNA, 19 bp, Homo sapiens
  siRNA target sequence for ARL6 (NM_032146.3,713-731).
ccgtcgaattccaatctta

SEQ ID NO: 108555 - DNA, 19 bp, Homo sapiens
  siRNA target sequence for ARL6 (NM_032146.3,714-732).
cgtcgaattccaatcttat

SEQ ID NO: 108556 - DNA, 19 bp, Homo sapiens
  siRNA target sequence for ARL6 (NM_032146.3,715-733).
gtcgaattccaatcttatt

SEQ ID NO: 108557 - DNA, 19 bp, Homo sapiens
  siRNA target sequence for ARL6 (NM_032146.3,718-736).
gaattccaatcttattctt

SEQ ID NO: 108558 - DNA, 19 bp, Homo sapiens
  siRNA target sequence for ARL6 (NM_032146.3,759-777).
gatgcagtgacatctgtaa

SEQ ID NO: 108559 - DNA, 19 bp, Homo sapiens
  siRNA target sequence for ARL6 (NM_032146.3,782-800).
gtctcagttgctgtgttta

SEQ ID NO: 108560 - DNA, 19 bp, Homo sapiens
  siRNA target sequence for ARL6 (NM_032146.3,813-831).
gataaaccctggcatattt

SEQ ID NO: 108561 - DNA, 19 bp, Homo sapiens
  siRNA target sequence for ARL6 (NM_032146.3,832-850).
gtgctagtgatgccataaa

SEQ ID NO: 108562 - DNA, 19 bp, Homo sapiens
  siRNA target sequence for ARL6 (NM_032146.3,871-889).
gtgtagactggcttcaaga

SEQ ID NO: 108563 - DNA, 19 bp, Homo sapiens
  siRNA target sequence for ARL6IP2 (NM_022374.1,121-139).
gacctccctaggtgagaat

SEQ ID NO: 108564 - DNA, 19 bp, Homo sapiens
  siRNA target sequence for ARL6IP2 (NM_022374.1,123-141).
cctccctaggtgagaatta

SEQ ID NO: 108565 - DNA, 19 bp, Homo sapiens
  siRNA target sequence for ARL6IP2 (NM_022374.1,124-142).
ctccctaggtgagaattat

SEQ ID NO: 108566 - DNA, 19 bp, Homo sapiens
  siRNA target sequence for ARL6IP2 (NM_022374.1,199-217).
gattgttcttgctcatgaa

SEQ ID NO: 108567 - DNA, 19 bp, Homo sapiens
  siRNA target sequence for ARL6IP2 (NM_022374.1,223-241).
ccataactttgaacttgat

SEQ ID NO: 108568 - DNA, 19 bp, Homo sapiens
  siRNA target sequence for ARL6IP2 (NM_022374.1,272-290).
gagcacatacgagatctta

SEQ ID NO: 108569 - DNA, 19 bp, Homo sapiens
  siRNA target sequence for ARL6IP2 (NM_022374.1,352-370).
catgcttagatacatgtat

SEQ ID NO: 108570 - DNA, 19 bp, Homo sapiens
  siRNA target sequence for ARL6IP2 (NM_022374.1,387-405).
gttggattggtggaaacaa

SEQ ID NO: 108571 - DNA, 19 bp, Homo sapiens
  siRNA target sequence for ARL6IP2 (NM_022374.1,391-409).
gattggtggaaacaatgaa

SEQ ID NO: 108572 - DNA, 19 bp, Homo sapiens
  siRNA target sequence for ARL6IP2 (NM_022374.1,410-428).
ccattgacaggctttacat

SEQ ID NO: 108573 - DNA, 19 bp, Homo sapiens
  siRNA target sequence for ARL6IP2 (NM_022374.1,456-474).
caggcatacaagtttggaa

SEQ ID NO: 108574 - DNA, 19 bp, Homo sapiens
  siRNA target sequence for ARL6IP2 (NM_022374.1,487-505).
gattgacagacctaatgga

SEQ ID NO: 108575 - DNA, 19 bp, Homo sapiens
  siRNA target sequence for ARL6IP2 (NM_022374.1,493-511).
cagacctaatggaactaaa

SEQ ID NO: 108576 - DNA, 19 bp, Homo sapiens
  siRNA target sequence for ARL6IP2 (NM_022374.1,495-513).
gacctaatggaactaaagt

SEQ ID NO: 108577 - DNA, 19 bp, Homo sapiens
  siRNA target sequence for ARL6IP2 (NM_022374.1,515-533).
gctgtgctgcttatggata

SEQ ID NO: 108578 - DNA, 19 bp, Homo sapiens
  siRNA target sequence for ARL6IP2 (NM_022374.1,603-621).
ctagctctgtccaggtata

SEQ ID NO: 108579 - DNA, 19 bp, Homo sapiens
  siRNA target sequence for ARL6IP2 (NM_022374.1,606-624).
gctctgtccaggtatataa

SEQ ID NO: 108580 - DNA, 19 bp, Homo sapiens
  siRNA target sequence for ARL6IP2 (NM_022374.1,607-625).
ctctgtccaggtatataat

SEQ ID NO: 108581 - DNA, 19 bp, Homo sapiens
  siRNA target sequence for ARL6IP2 (NM_022374.1,611-629).
gtccaggtatataatctgt

SEQ ID NO: 108582 - DNA, 19 bp, Homo sapiens
  siRNA target sequence for ARL6IP2 (NM_022374.1,653-671).
cttcaacatttgcaattat

SEQ ID NO: 108583 - DNA, 19 bp, Homo sapiens
  siRNA target sequence for ARL6IP2 (NM_022374.1,687-705).
gacttgcgatggaagaaat

SEQ ID NO: 108584 - DNA, 19 bp, Homo sapiens
  siRNA target sequence for ARL6IP2 (NM_022374.1,689-707).
cttgcgatggaagaaatct

SEQ ID NO: 108585 - DNA, 19 bp, Homo sapiens
  siRNA target sequence for ARL6IP2 (NM_022374.1,722-740).
cagacattaatgtttttga

SEQ ID NO: 108586 - DNA, 19 bp, Homo sapiens
  siRNA target sequence for ARL6IP2 (NM_022374.1,743-761).
cgagattggagctatcctt

SEQ ID NO: 108587 - DNA, 19 bp, Homo sapiens
  siRNA target sequence for ARL6IP2 (NM_022374.1,754-772).
ctatccttatgaacattca

SEQ ID NO: 108588 - DNA, 19 bp, Homo sapiens
  siRNA target sequence for ARL6IP2 (NM_022374.1,786-804).
gtggaaagcaatttcttga

SEQ ID NO: 108589 - DNA, 19 bp, Homo sapiens
  siRNA target sequence for ARL6IP2 (NM_022374.1,1043-1061).
ggatctaaagtcacttgta

SEQ ID NO: 108590 - DNA, 19 bp, Homo sapiens
  siRNA target sequence for ARL6IP2 (NM_022374.1,1056-1074).
cttgtagagatcttgtaga

SEQ ID NO: 108591 - DNA, 19 bp, Homo sapiens
  siRNA target sequence for ARL6IP2 (NM_022374.1,1059-1077).
gtagagatcttgtagaata

SEQ ID NO: 108592 - DNA, 19 bp, Homo sapiens
  siRNA target sequence for ARL6IP2 (NM_022374.1,1084-1102).
ggcttacatcaaaatctat

SEQ ID NO: 108593 - DNA, 19 bp, Homo sapiens
  siRNA target sequence for ARL6IP2 (NM_022374.1,1141-1159).
ggcaacagctgaagctaat

SEQ ID NO: 108594 - DNA, 19 bp, Homo sapiens
  siRNA target sequence for ARL6IP2 (NM_022374.1,1142-1160).
gcaacagctgaagctaata

SEQ ID NO: 108595 - DNA, 19 bp, Homo sapiens
  siRNA target sequence for ARL6IP2 (NM_022374.1,1146-1164).
cagctgaagctaataatct

SEQ ID NO: 108596 - DNA, 19 bp, Homo sapiens
  siRNA target sequence for ARL6IP2 (NM_022374.1,1182-1200).
caagagatacctattgtaa

SEQ ID NO: 108597 - DNA, 19 bp, Homo sapiens
  siRNA target sequence for ARL6IP2 (NM_022374.1,1187-1205).
gatacctattgtaaaagta

SEQ ID NO: 108598 - DNA, 19 bp, Homo sapiens
  siRNA target sequence for ARL6IP2 (NM_022374.1,1221-1239).
gaggggacaagccttacat

SEQ ID NO: 108599 - DNA, 19 bp, Homo sapiens
  siRNA target sequence for ARL6IP2 (NM_022374.1,1248-1266).
cagatctggagcgaaaaca

SEQ ID NO: 108600 - DNA, 19 bp, Homo sapiens
  siRNA target sequence for ARL6IP2 (NM_022374.1,1260-1278).
gaaaacacttggatctcaa

SEQ ID NO: 108601 - DNA, 19 bp, Homo sapiens
  siRNA target sequence for ARL6IP2 (NM_022374.1,1276-1294).
caaggaagtggcgataaaa

SEQ ID NO: 108602 - DNA, 19 bp, Homo sapiens
  siRNA target sequence for ARL6IP2 (NM_022374.1,1279-1297).
ggaagtggcgataaaacaa

SEQ ID NO: 108603 - DNA, 19 bp, Homo sapiens
  siRNA target sequence for ARL6IP2 (NM_022374.1,1280-1298).
gaagtggcgataaaacaat

SEQ ID NO: 108604 - DNA, 19 bp, Homo sapiens
  siRNA target sequence for ARL6IP2 (NM_022374.1,1285-1303).
ggcgataaaacaatttcgt

SEQ ID NO: 108605 - DNA, 19 bp, Homo sapiens
  siRNA target sequence for ARL6IP2 (NM_022374.1,1286-1304).
gcgataaaacaatttcgtt

SEQ ID NO: 108606 - DNA, 19 bp, Homo sapiens
  siRNA target sequence for ARL6IP2 (NM_022374.1,1295-1313).
caatttcgttcagtaaaaa

SEQ ID NO: 108607 - DNA, 19 bp, Homo sapiens
  siRNA target sequence for ARL6IP2 (NM_022374.1,1452-1470).
cggtcatgtttgctatgta

SEQ ID NO: 108608 - DNA, 19 bp, Homo sapiens
  siRNA target sequence for ARL6IP2 (NM_022374.1,1453-1471).
ggtcatgtttgctatgtat

SEQ ID NO: 108609 - DNA, 19 bp, Homo sapiens
  siRNA target sequence for ARL6IP2 (NM_022374.1,1454-1472).
gtcatgtttgctatgtata

SEQ ID NO: 108610 - DNA, 19 bp, Homo sapiens
  siRNA target sequence for ARL6IP2 (NM_022374.1,1495-1513).
cattggcctaaactctata

SEQ ID NO: 108611 - DNA, 19 bp, Homo sapiens
  siRNA target sequence for ARL6IP2 (NM_022374.1,1560-1578).
gtacttgggcatatgttaa

SEQ ID NO: 108612 - DNA, 19 bp, Homo sapiens
  siRNA target sequence for ARL6IP2 (NM_022374.1,1563-1581).
cttgggcatatgttaaata

SEQ ID NO: 108613 - DNA, 19 bp, Homo sapiens
  siRNA target sequence for ARL6IP2 (NM_022374.1,1567-1585).
ggcatatgttaaatactct

SEQ ID NO: 108614 - DNA, 19 bp, Homo sapiens
  siRNA target sequence for ARL6IP2 (NM_022374.1,1619-1637).
cagattgctgaaacactat

SEQ ID NO: 108615 - DNA, 19 bp, Homo sapiens
  siRNA target sequence for ARL6IP2 (NM_022374.1,1684-1702).
ggttcaccgtgctctttca

SEQ ID NO: 108616 - DNA, 19 bp, Homo sapiens
  siRNA target sequence for ARL6IP2 (NM_022374.1,1685-1703).
gttcaccgtgctctttcat

SEQ ID NO: 108617 - DNA, 19 bp, Homo sapiens
  siRNA target sequence for ARL6IP2 (NM_022374.1,1717-1735).
gagactgtcatccaacaat

SEQ ID NO: 108618 - DNA, 19 bp, Homo sapiens
  siRNA target sequence for ARL6IP2 (NM_022374.1,1719-1737).
gactgtcatccaacaataa

SEQ ID NO: 108619 - DNA, 19 bp, Homo sapiens
  siRNA target sequence for ARL8 (NM_178815.2,272-290).
gtaaccaagaacacaaagt

SEQ ID NO: 108620 - DNA, 19 bp, Homo sapiens
  siRNA target sequence for ARL8 (NM_178815.2,374-392).
ccataggaagcaatgttga

SEQ ID NO: 108621 - DNA, 19 bp, Homo sapiens
  siRNA target sequence for ARL8 (NM_178815.2,375-393).
cataggaagcaatgttgaa

SEQ ID NO: 108622 - DNA, 19 bp, Homo sapiens
  siRNA target sequence for ARL8 (NM_178815.2,454-472).
cgatcatcctggaacacat

SEQ ID NO: 108623 - DNA, 19 bp, Homo sapiens
  siRNA target sequence for ARL8 (NM_178815.2,468-486).
cacatattactcaaataca

SEQ ID NO: 108624 - DNA, 19 bp, Homo sapiens
  siRNA target sequence for ARL8 (NM_178815.2,470-488).
catattactcaaatacaga

SEQ ID NO: 108625 - DNA, 19 bp, Homo sapiens
  siRNA target sequence for ARL8 (NM_178815.2,485-503).
cagagttcatcattcttgt

SEQ ID NO: 108626 - DNA, 19 bp, Homo sapiens
  siRNA target sequence for ARL8 (NM_178815.2,489-507).
gttcatcattcttgttgtt

SEQ ID NO: 108627 - DNA, 19 bp, Homo sapiens
  siRNA target sequence for ARL8 (NM_178815.2,519-537).
cagggaacgactagctatt

SEQ ID NO: 108628 - DNA, 19 bp, Homo sapiens
  siRNA target sequence for ARL8 (NM_178815.2,522-540).
ggaacgactagctattaca

SEQ ID NO: 108629 - DNA, 19 bp, Homo sapiens
  siRNA target sequence for ARL8 (NM_178815.2,523-541).
gaacgactagctattacaa

SEQ ID NO: 108630 - DNA, 19 bp, Homo sapiens
  siRNA target sequence for ARL8 (NM_178815.2,561-579).
gttggctcatgaggattta

SEQ ID NO: 108631 - DNA, 19 bp, Homo sapiens
  siRNA target sequence for ARL8 (NM_178815.2,581-599).
ggaaggctgcagtccttat

SEQ ID NO: 108632 - DNA, 19 bp, Homo sapiens
  siRNA target sequence for ARL8 (NM_178815.2,585-603).
ggctgcagtccttatcttt

SEQ ID NO: 108633 - DNA, 19 bp, Homo sapiens
  siRNA target sequence for ARL8 (NM_178815.2,592-610).
gtccttatctttgcaaata

SEQ ID NO: 108634 - DNA, 19 bp, Homo sapiens
  siRNA target sequence for ARL8 (NM_178815.2,657-675).
cctcacccttagttcaatt

SEQ ID NO: 108635 - DNA, 19 bp, Homo sapiens
  siRNA target sequence for ARL8 (NM_178815.2,658-676).
ctcacccttagttcaatta

SEQ ID NO: 108636 - DNA, 19 bp, Homo sapiens
  siRNA target sequence for ARL8 (NM_178815.2,662-680).
cccttagttcaattaagga

SEQ ID NO: 108637 - DNA, 19 bp, Homo sapiens
  siRNA target sequence for C14orf159 (NM_024952.3,514-532).
cttccctctgccataagga

SEQ ID NO: 108638 - DNA, 19 bp, Homo sapiens
  siRNA target sequence for C14orf159 (NM_024952.3,521-539).
ctgccataaggagtttgat

SEQ ID NO: 108639 - DNA, 19 bp, Homo sapiens
  siRNA target sequence for C14orf159 (NM_024952.3,714-732).
ccctcaaggtgctatctca

SEQ ID NO: 108640 - DNA, 19 bp, Homo sapiens
  siRNA target sequence for C14orf159 (NM_024952.3,748-766).
catccccagttctggaaat

SEQ ID NO: 108641 - DNA, 19 bp, Homo sapiens
  siRNA target sequence for C14orf159 (NM_024952.3,1297-1315).
ccagaggtccatcacattt

SEQ ID NO: 108642 - DNA, 19 bp, Homo sapiens
  siRNA target sequence for C14orf159 (NM_024952.3,1370-1388).
gagaactagagtctatgat

SEQ ID NO: 108643 - DNA, 19 bp, Homo sapiens
  siRNA target sequence for C14orf159 (NM_024952.3,1590-1608).
ggaggtcgccataatcgtt

SEQ ID NO: 108644 - DNA, 19 bp, Homo sapiens
  siRNA target sequence for C14orf159 (NM_024952.3,1632-1650).
ccagaagattgttgaagat

SEQ ID NO: 108645 - DNA, 19 bp, Homo sapiens
  siRNA target sequence for C14orf159 (NM_024952.3,1674-1692).
gacgcagatcccgatatta

SEQ ID NO: 108646 - DNA, 19 bp, Homo sapiens
  siRNA target sequence for C14orf159 (NM_024952.3,1677-1695).
gcagatcccgatattaact

SEQ ID NO: 108647 - DNA, 19 bp, Homo sapiens
  siRNA target sequence for C14orf159 (NM_024952.3,1678-1696).
cagatcccgatattaactt

SEQ ID NO: 108648 - DNA, 19 bp, Homo sapiens
  siRNA target sequence for C14orf159 (NM_024952.3,1683-1701).
cccgatattaacttaccaa

SEQ ID NO: 108649 - DNA, 19 bp, Homo sapiens
  siRNA target sequence for C14orf159 (NM_024952.3,1749-1767).
cccgcagacacctagattt

SEQ ID NO: 108650 - DNA, 19 bp, Homo sapiens
  siRNA target sequence for C14orf159 (NM_024952.3,1751-1769).
cgcagacacctagatttga

SEQ ID NO: 108651 - DNA, 19 bp, Homo sapiens
  siRNA target sequence for C14orf159 (NM_024952.3,1804-1822).
gctgatggcaattactaca

SEQ ID NO: 108652 - DNA, 19 bp, Homo sapiens
  siRNA target sequence for C14orf159 (NM_024952.3,1855-1873).
gaccccattgacgatcttt

SEQ ID NO: 108653 - DNA, 19 bp, Homo sapiens
  siRNA target sequence for C14orf159 (NM_024952.3,1857-1875).
ccccattgacgatcttttt

SEQ ID NO: 108654 - DNA, 19 bp, Homo sapiens
  siRNA target sequence for C14orf159 (NM_024952.3,1859-1877).
ccattgacgatctttttct

SEQ ID NO: 108655 - DNA, 19 bp, Homo sapiens
  siRNA target sequence for C14orf159 (NM_024952.3,1887-1905).
gaagattcctggaatctca

SEQ ID NO: 108656 - DNA, 19 bp, Homo sapiens
  siRNA target sequence for C14orf159 (NM_024952.3,1936-1954).
cttgggatgggtaaagtca

SEQ ID NO: 108657 - DNA, 19 bp, Homo sapiens
  siRNA target sequence for C14orf159 (NM_024952.3,2001-2019).
cgacgtggaggctgacttt

SEQ ID NO: 108658 - DNA, 19 bp, Homo sapiens
  siRNA target sequence for C14orf159 (NM_024952.3,2023-2041).
gtcattgctggtgtttcta

SEQ ID NO: 108659 - DNA, 19 bp, Homo sapiens
  siRNA target sequence for C14orf159 (NM_024952.3,2164-2182).
gccctcccgtcggtcatta

SEQ ID NO: 108660 - DNA, 19 bp, Homo sapiens
  siRNA target sequence for C14orf159 (NM_024952.3,2169-2187).
cccgtcggtcattaaggaa

SEQ ID NO: 108661 - DNA, 19 bp, Homo sapiens
  siRNA target sequence for CDC10 (NM_001788.2,93-111).
caatctcccaaatcaagta

SEQ ID NO: 108662 - DNA, 19 bp, Homo sapiens
  siRNA target sequence for CDC10 (NM_001788.2,97-115).
ctcccaaatcaagtataca

SEQ ID NO: 108663 - DNA, 19 bp, Homo sapiens
  siRNA target sequence for CDC10 (NM_001788.2,99-117).
cccaaatcaagtatacaga

SEQ ID NO: 108664 - DNA, 19 bp, Homo sapiens
  siRNA target sequence for CDC42 (NM_001791.2,134-152).
cgatggtgctgttggtaaa

SEQ ID NO: 108665 - DNA, 19 bp, Homo sapiens
  siRNA target sequence for CDC42 (NM_001791.2,138-156).
ggtgctgttggtaaaacat

SEQ ID NO: 108666 - DNA, 19 bp, Homo sapiens
  siRNA target sequence for CDC42 (NM_001791.2,159-177).
ctcctgatatcctacacaa

SEQ ID NO: 108667 - DNA, 19 bp, Homo sapiens
  siRNA target sequence for CDC42 (NM_001791.2,162-180).
ctgatatcctacacaacaa

SEQ ID NO: 108668 - DNA, 19 bp, Homo sapiens
  siRNA target sequence for CDC42 (NM_001791.2,418-436).
gtccaaagactcctttctt

SEQ ID NO: 108669 - DNA, 19 bp, Homo sapiens
  siRNA target sequence for CDC42 (NM_001791.2,470-488).
cccctctactattgagaaa

SEQ ID NO: 108670 - DNA, 19 bp, Homo sapiens
  siRNA target sequence for CDC42 (NM_001791.2,548-566).
cctgaaggctgtcaagtat

SEQ ID NO: 108671 - DNA, 19 bp, Homo sapiens
  siRNA target sequence for CDC42 (NM_044472.1,635-653).
cgagcctccggaaactcaa

SEQ ID NO: 108672 - DNA, 19 bp, Homo sapiens
  siRNA target sequence for DIRAS2 (NM_017594.2,99-117).
ggtgttgaggtttgtgaaa

SEQ ID NO: 108673 - DNA, 19 bp, Homo sapiens
  siRNA target sequence for DIRAS2 (NM_017594.2,325-343).
cccatctacgaacaaatct

SEQ ID NO: 108674 - DNA, 19 bp, Homo sapiens
  siRNA target sequence for DIRAS2 (NM_017594.2,482-500).
cagccaagctcaaccataa

SEQ ID NO: 108675 - DNA, 19 bp, Homo sapiens
  siRNA target sequence for DIRAS2 (NM_017594.2,485-503).
ccaagctcaaccataacgt

SEQ ID NO: 108676 - DNA, 19 bp, Homo sapiens
  siRNA target sequence for DIRAS2 (NM_017594.2,559-577).
cagatcgacgggaaaaaga

SEQ ID NO: 108677 - DNA, 19 bp, Homo sapiens
  siRNA target sequence for DKFZP564J0863 (NM_015459.2,494-512).
ccacatccgagatcttgat

SEQ ID NO: 108678 - DNA, 19 bp, Homo sapiens
  siRNA target sequence for DKFZP564J0863 (NM_015459.2,575-593).
gctacgatacttatattct

SEQ ID NO: 108679 - DNA, 19 bp, Homo sapiens
  siRNA target sequence for DKFZP564J0863 (NM_015459.2,600-618).
gaaagtggccattcaaatt

SEQ ID NO: 108680 - DNA, 19 bp, Homo sapiens
  siRNA target sequence for DKFZP564J0863 (NM_015459.2,604-622).
gtggccattcaaattggtt

SEQ ID NO: 108681 - DNA, 19 bp, Homo sapiens
  siRNA target sequence for DKFZP564J0863 (NM_015459.2,636-654).
gaaccgttaacaggatttt

SEQ ID NO: 108682 - DNA, 19 bp, Homo sapiens
  siRNA target sequence for DKFZP564J0863 (NM_015459.2,639-657).
ccgttaacaggattttcct

SEQ ID NO: 108683 - DNA, 19 bp, Homo sapiens
  siRNA target sequence for DKFZP564J0863 (NM_015459.2,911-929).
cggtcgtctggcaatggat

SEQ ID NO: 108684 - DNA, 19 bp, Homo sapiens
  siRNA target sequence for DKFZP564J0863 (NM_015459.2,915-933).
cgtctggcaatggatgaaa

SEQ ID NO: 108685 - DNA, 19 bp, Homo sapiens
  siRNA target sequence for DKFZP564J0863 (NM_015459.2,946-964).
ctttccagacactgatgtt

SEQ ID NO: 108686 - DNA, 19 bp, Homo sapiens
  siRNA target sequence for DKFZP564J0863 (NM_015459.2,979-997).
ggagtttcccttatgaata

SEQ ID NO: 108687 - DNA, 19 bp, Homo sapiens
  siRNA target sequence for DKFZP564J0863 (NM_015459.2,1074-1092).
cagaatgttcgaaatcaca

SEQ ID NO: 108688 - DNA, 19 bp, Homo sapiens
  siRNA target sequence for DKFZP564J0863 (NM_015459.2,1076-1094).
gaatgttcgaaatcacatt

SEQ ID NO: 108689 - DNA, 19 bp, Homo sapiens
  siRNA target sequence for DKFZP564J0863 (NM_015459.2,1080-1098).
gttcgaaatcacattcact

SEQ ID NO: 108690 - DNA, 19 bp, Homo sapiens
  siRNA target sequence for DKFZP564J0863 (NM_015459.2,1208-1226).
gcagttacaggcactgata

SEQ ID NO: 108691 - DNA, 19 bp, Homo sapiens
  siRNA target sequence for DKFZP564J0863 (NM_015459.2,1217-1235).
ggcactgataccgtatgta

SEQ ID NO: 108692 - DNA, 19 bp, Homo sapiens
  siRNA target sequence for DKFZP564J0863 (NM_015459.2,1218-1236).
gcactgataccgtatgtat

SEQ ID NO: 108693 - DNA, 19 bp, Homo sapiens
  siRNA target sequence for DKFZP564J0863 (NM_015459.2,1219-1237).
cactgataccgtatgtatt

SEQ ID NO: 108694 - DNA, 19 bp, Homo sapiens
  siRNA target sequence for DKFZP564J0863 (NM_015459.2,1241-1259).
cccatctaagttaatggaa

SEQ ID NO: 108695 - DNA, 19 bp, Homo sapiens
  siRNA target sequence for DKFZP564J0863 (NM_015459.2,1290-1308).
cggggactactggagtatt

SEQ ID NO: 108696 - DNA, 19 bp, Homo sapiens
  siRNA target sequence for DKFZP564J0863 (NM_015459.2,1291-1309).
ggggactactggagtattt

SEQ ID NO: 108697 - DNA, 19 bp, Homo sapiens
  siRNA target sequence for DKFZP564J0863 (NM_015459.2,1292-1310).
gggactactggagtatttt

SEQ ID NO: 108698 - DNA, 19 bp, Homo sapiens
  siRNA target sequence for DKFZP564J0863 (NM_015459.2,1293-1311).
ggactactggagtatttta

SEQ ID NO: 108699 - DNA, 19 bp, Homo sapiens
  siRNA target sequence for DKFZP564J0863 (NM_015459.2,1410-1428).
gccaaggacatttattata

SEQ ID NO: 108700 - DNA, 19 bp, Homo sapiens
  siRNA target sequence for DKFZP564J0863 (NM_015459.2,1589-1607).
ggaggaaatcaaggaatta

SEQ ID NO: 108701 - DNA, 19 bp, Homo sapiens
  siRNA target sequence for DKFZP564J0863 (NM_015459.2,1673-1691).
gctgttcacgggcattgta

SEQ ID NO: 108702 - DNA, 19 bp, Homo sapiens
  siRNA target sequence for DKFZP564J0863 (NM_015459.2,1684-1702).
gcattgtagctttgtacat

SEQ ID NO: 108703 - DNA, 19 bp, Homo sapiens
  siRNA target sequence for DKFZP564J0863 (NM_015459.2,1740-1758).
gtagcccagttgttcaact

SEQ ID NO: 108704 - DNA, 19 bp, Homo sapiens
  siRNA target sequence for DKFZP564J0863 (NM_015459.2,1796-1814).
gggctacatcaggtattct

SEQ ID NO: 108705 - DNA, 19 bp, Homo sapiens
  siRNA target sequence for DKFZP564J0863 (NM_015459.2,1829-1847).
gctgggcggagctattgat

SEQ ID NO: 108706 - DNA, 19 bp, Homo sapiens
  siRNA target sequence for DKFZP564J0863 (NM_015459.2,1832-1850).
gggcggagctattgatttt

SEQ ID NO: 108707 - DNA, 19 bp, Homo sapiens
  siRNA target sequence for DKFZP564J0863 (NM_015459.2,1835-1853).
cggagctattgattttggt

SEQ ID NO: 108708 - DNA, 19 bp, Homo sapiens
  siRNA target sequence for DNCLI1 (NM_016141.1,126-144).
ggattatcctcgacttaca

SEQ ID NO: 108709 - DNA, 19 bp, Homo sapiens
  siRNA target sequence for DNCLI1 (NM_016141.1,207-225).
gaggacgggcagaaccttt

SEQ ID NO: 108710 - DNA, 19 bp, Homo sapiens
  siRNA target sequence for DNCLI1 (NM_016141.1,290-308).
gctactgctgggtgaagat

SEQ ID NO: 108711 - DNA, 19 bp, Homo sapiens
  siRNA target sequence for DNCLI1 (NM_016141.1,313-331).
ctggaaaaacaagcttaat

SEQ ID NO: 108712 - DNA, 19 bp, Homo sapiens
  siRNA target sequence for DNCLI1 (NM_016141.1,405-423).
gaagacagggatgatcaaa

SEQ ID NO: 108713 - DNA, 19 bp, Homo sapiens
  siRNA target sequence for DNCLI1 (NM_016141.1,410-428).
cagggatgatcaaacaaga

SEQ ID NO: 108714 - DNA, 19 bp, Homo sapiens
  siRNA target sequence for DNCLI1 (NM_016141.1,413-431).
ggatgatcaaacaagatgt

SEQ ID NO: 108715 - DNA, 19 bp, Homo sapiens
  siRNA target sequence for DNCLI1 (NM_016141.1,424-442).
caagatgtaatgtttggat

SEQ ID NO: 108716 - DNA, 19 bp, Homo sapiens
  siRNA target sequence for DNCLI1 (NM_016141.1,430-448).
gtaatgtttggatcttaga

SEQ ID NO: 108717 - DNA, 19 bp, Homo sapiens
  siRNA target sequence for DNCLI1 (NM_016141.1,447-465).
gatggagacctatatcaca

SEQ ID NO: 108718 - DNA, 19 bp, Homo sapiens
  siRNA target sequence for DNCLI1 (NM_016141.1,484-502).
cactggatgccgtatctct

SEQ ID NO: 108719 - DNA, 19 bp, Homo sapiens
  siRNA target sequence for DNCLI1 (NM_016141.1,522-540).
ctggttgttgacatgtcaa

SEQ ID NO: 108720 - DNA, 19 bp, Homo sapiens
  siRNA target sequence for DNCLI1 (NM_016141.1,543-561).
ccttggactgctttggatt

SEQ ID NO: 108721 - DNA, 19 bp, Homo sapiens
  siRNA target sequence for DNCLI1 (NM_016141.1,580-598).
gtgttgttagagaacatgt

SEQ ID NO: 108722 - DNA, 19 bp, Homo sapiens
  siRNA target sequence for DNCLI1 (NM_016141.1,718-736).
ctgcgtcacaagaagacaa

SEQ ID NO: 108723 - DNA, 19 bp, Homo sapiens
  siRNA target sequence for DNCLI1 (NM_016141.1,757-775).
ctctgggtgcggatacact

SEQ ID NO: 108724 - DNA, 19 bp, Homo sapiens
  siRNA target sequence for DNCLI1 (NM_016141.1,759-777).
ctgggtgcggatacactta

SEQ ID NO: 108725 - DNA, 19 bp, Homo sapiens
  siRNA target sequence for DNCLI1 (NM_016141.1,785-803).
cttgggcattccagtacta

SEQ ID NO: 108726 - DNA, 19 bp, Homo sapiens
  siRNA target sequence for DNCLI1 (NM_016141.1,788-806).
gggcattccagtactagta

SEQ ID NO: 108727 - DNA, 19 bp, Homo sapiens
  siRNA target sequence for DNCLI1 (NM_016141.1,790-808).
gcattccagtactagtagt

SEQ ID NO: 108728 - DNA, 19 bp, Homo sapiens
  siRNA target sequence for DNCLI1 (NM_016141.1,818-836).
gtgtgatgccattagtgta

SEQ ID NO: 108729 - DNA, 19 bp, Homo sapiens
  siRNA target sequence for DNCLI1 (NM_016141.1,888-906).
catatccggaagttttgtt

SEQ ID NO: 108730 - DNA, 19 bp, Homo sapiens
  siRNA target sequence for DNCLI1 (NM_016141.1,911-929).
gtatggtgcagcacttatt

SEQ ID NO: 108731 - DNA, 19 bp, Homo sapiens
  siRNA target sequence for DNCLI1 (NM_016141.1,915-933).
ggtgcagcacttatttaca

SEQ ID NO: 108732 - DNA, 19 bp, Homo sapiens
  siRNA target sequence for DNCLI1 (NM_016141.1,924-942).
cttatttacacttcagtaa

SEQ ID NO: 108733 - DNA, 19 bp, Homo sapiens
  siRNA target sequence for DNCLI1 (NM_016141.1,977-995).
catcgttcagaaactatat

SEQ ID NO: 108734 - DNA, 19 bp, Homo sapiens
  siRNA target sequence for DNCLI1 (NM_016141.1,1141-1159).
ctaaaccacctgttcgaaa

SEQ ID NO: 108735 - DNA, 19 bp, Homo sapiens
  siRNA target sequence for DNCLI1 (NM_016141.1,1147-1165).
cacctgttcgaaagtttgt

SEQ ID NO: 108736 - DNA, 19 bp, Homo sapiens
  siRNA target sequence for DNCLI1 (NM_016141.1,1150-1168).
ctgttcgaaagtttgtaca

SEQ ID NO: 108737 - DNA, 19 bp, Homo sapiens
  siRNA target sequence for DNCLI1 (NM_016141.1,1214-1232).
gctacagtcccttttagca

SEQ ID NO: 108738 - DNA, 19 bp, Homo sapiens
  siRNA target sequence for DNCLI1 (NM_016141.1,1220-1238).
gtcccttttagcaaagcaa

SEQ ID NO: 108739 - DNA, 19 bp, Homo sapiens
  siRNA target sequence for DNCLI1 (NM_016141.1,1295-1313).
cccacgaacaccaaataga

SEQ ID NO: 108740 - DNA, 19 bp, Homo sapiens
  siRNA target sequence for DNCLI1 (NM_016141.1,1296-1314).
ccacgaacaccaaatagat

SEQ ID NO: 108741 - DNA, 19 bp, Homo sapiens
  siRNA target sequence for DNCLI1 (NM_016141.1,1312-1330).
gatctgtatcatctaatgt

SEQ ID NO: 108742 - DNA, 19 bp, Homo sapiens
  siRNA target sequence for DNCLI1 (NM_016141.1,1404-1422).
ggcgttctggcaaatttct

SEQ ID NO: 108743 - DNA, 19 bp, Homo sapiens
  siRNA target sequence for DNCLI1 (NM_016141.1,1405-1423).
gcgttctggcaaatttctt

SEQ ID NO: 108744 - DNA, 19 bp, Homo sapiens
  siRNA target sequence for DNCLI1 (NM_016141.1,1410-1428).
ctggcaaatttcttcaaca

SEQ ID NO: 108745 - DNA, 19 bp, Homo sapiens
  siRNA target sequence for DNCLI1 (NM_016141.1,1580-1598).
cagaattacacgaaaacca

SEQ ID NO: 108746 - DNA, 19 bp, Homo sapiens
  siRNA target sequence for DNCLI1 (NM_016141.1,1588-1606).
cacgaaaaccagttacagt

SEQ ID NO: 108747 - DNA, 19 bp, Homo sapiens
  siRNA target sequence for DNCLI1 (NM_016141.1,1590-1608).
cgaaaaccagttacagttt

SEQ ID NO: 108748 - DNA, 19 bp, Homo sapiens
  siRNA target sequence for DNM1 (NM_004408.1,602-620).
ctgacctggccaattctga

SEQ ID NO: 108749 - DNA, 19 bp, Homo sapiens
  siRNA target sequence for DNM1 (NM_004408.1,818-836).
ccttggctgctgaacgaaa

SEQ ID NO: 108750 - DNA, 19 bp, Homo sapiens
  siRNA target sequence for DNM1 (NM_004408.1,824-842).
ctgctgaacgaaagttctt

SEQ ID NO: 108751 - DNA, 19 bp, Homo sapiens
  siRNA target sequence for DNM1 (NM_004408.1,843-861).
cctctcccatccatcttat

SEQ ID NO: 108752 - DNA, 19 bp, Homo sapiens
  siRNA target sequence for DNM1 (NM_004408.1,973-991).
cagctactgtccattgaga

SEQ ID NO: 108753 - DNA, 19 bp, Homo sapiens
  siRNA target sequence for DNM1 (NM_004408.1,1136-1154).
cagggggagcccgcattaa

SEQ ID NO: 108754 - DNA, 19 bp, Homo sapiens
  siRNA target sequence for DNM1 (NM_004408.1,1145-1163).
cccgcattaaccgaatctt

SEQ ID NO: 108755 - DNA, 19 bp, Homo sapiens
  siRNA target sequence for DNM1 (NM_004408.1,1178-1196).
ctttcgagctggtcaagat

SEQ ID NO: 108756 - DNA, 19 bp, Homo sapiens
  siRNA target sequence for DNM1 (NM_004408.1,1245-1263).
gaatatccatggcattaga

SEQ ID NO: 108757 - DNA, 19 bp, Homo sapiens
  siRNA target sequence for DNM1 (NM_004408.1,1489-1507).
gtcatgcttctcatcgata

SEQ ID NO: 108758 - DNA, 19 bp, Homo sapiens
  siRNA target sequence for DNM1 (NM_004408.1,1638-1656).
ctggctgactatcaataat

SEQ ID NO: 108759 - DNA, 19 bp, Homo sapiens
  siRNA target sequence for DNM1 (NM_004408.1,1640-1658).
ggctgactatcaataatat

SEQ ID NO: 108760 - DNA, 19 bp, Homo sapiens
  siRNA target sequence for DNM1 (NM_004408.1,2043-2061).
ggagaccatccggaatctt

SEQ ID NO: 108761 - DNA, 19 bp, Homo sapiens
  siRNA target sequence for DNM1 (NM_004408.1,2054-2072).
ggaatcttgtggactcata

SEQ ID NO: 108762 - DNA, 19 bp, Homo sapiens
  siRNA target sequence for DNM1L (NM_005690.2,78-96).
ggcgctaattcctgtcata

SEQ ID NO: 108763 - DNA, 19 bp, Homo sapiens
  siRNA target sequence for DNM1L (NM_005690.2,79-97).
gcgctaattcctgtcataa

SEQ ID NO: 108764 - DNA, 19 bp, Homo sapiens
  siRNA target sequence for DNM1L (NM_005690.2,369-387).
gctttacacggattttgat

SEQ ID NO: 108765 - DNA, 19 bp, Homo sapiens
  siRNA target sequence for DNM1L (NM_005690.2,375-393).
cacggattttgatgaaatt

SEQ ID NO: 108766 - DNA, 19 bp, Homo sapiens
  siRNA target sequence for DNM1L (NM_005690.2,454-472).
gaaccaattcatcttaaga

SEQ ID NO: 108767 - DNA, 19 bp, Homo sapiens
  siRNA target sequence for DNM1L (NM_005690.2,481-499).
cccaacgttgtcaatttga

SEQ ID NO: 108768 - DNA, 19 bp, Homo sapiens
  siRNA target sequence for DNM1L (NM_005690.2,483-501).
caacgttgtcaatttgaca

SEQ ID NO: 108769 - DNA, 19 bp, Homo sapiens
  siRNA target sequence for DNM1L (NM_005690.2,528-546).
ggtgcctgtaggtgatcaa

SEQ ID NO: 108770 - DNA, 19 bp, Homo sapiens
  siRNA target sequence for DNM1L (NM_005690.2,533-551).
ctgtaggtgatcaacctaa

SEQ ID NO: 108771 - DNA, 19 bp, Homo sapiens
  siRNA target sequence for DNM1L (NM_005690.2,538-556).
ggtgatcaacctaaggata

SEQ ID NO: 108772 - DNA, 19 bp, Homo sapiens
  siRNA target sequence for DNM1L (NM_005690.2,553-571).
gatattgagcttcaaatca

SEQ ID NO: 108773 - DNA, 19 bp, Homo sapiens
  siRNA target sequence for DNM1L (NM_005690.2,577-595).
ctcattcttcggttcatca

SEQ ID NO: 108774 - DNA, 19 bp, Homo sapiens
  siRNA target sequence for DNM1L (NM_005690.2,586-604).
cggttcatcagtaatccta

SEQ ID NO: 108775 - DNA, 19 bp, Homo sapiens
  siRNA target sequence for DNM1L (NM_005690.2,587-605).
ggttcatcagtaatcctaa

SEQ ID NO: 108776 - DNA, 19 bp, Homo sapiens
  siRNA target sequence for DNM1L (NM_005690.2,588-606).
gttcatcagtaatcctaat

SEQ ID NO: 108777 - DNA, 19 bp, Homo sapiens
  siRNA target sequence for DNM1L (NM_005690.2,596-614).
gtaatcctaattccattat

SEQ ID NO: 108778 - DNA, 19 bp, Homo sapiens
  siRNA target sequence for DNM1L (NM_005690.2,618-636).
cgctgtcactgctgctaat

SEQ ID NO: 108779 - DNA, 19 bp, Homo sapiens
  siRNA target sequence for DNM1L (NM_005690.2,695-713).
gcagaaccctagctgtaat

SEQ ID NO: 108780 - DNA, 19 bp, Homo sapiens
  siRNA target sequence for DNM1L (NM_005690.2,701-719).
ccctagctgtaatcactaa

SEQ ID NO: 108781 - DNA, 19 bp, Homo sapiens
  siRNA target sequence for DNM1L (NM_005690.2,729-747).
catggatgcgggtactgat

SEQ ID NO: 108782 - DNA, 19 bp, Homo sapiens
  siRNA target sequence for DNM1L (NM_005690.2,770-788).
gggttattccagtcaaact

SEQ ID NO: 108783 - DNA, 19 bp, Homo sapiens
  siRNA target sequence for DNM1L (NM_005690.2,771-789).
ggttattccagtcaaactt

SEQ ID NO: 108784 - DNA, 19 bp, Homo sapiens
  siRNA target sequence for DNM1L (NM_005690.2,812-830).
ggagccagctagatattaa

SEQ ID NO: 108785 - DNA, 19 bp, Homo sapiens
  siRNA target sequence for DNM1L (NM_005690.2,817-835).
cagctagatattaacaaca

SEQ ID NO: 108786 - DNA, 19 bp, Homo sapiens
  siRNA target sequence for DNM1L (NM_005690.2,820-838).
ctagatattaacaacaaga

SEQ ID NO: 108787 - DNA, 19 bp, Homo sapiens
  siRNA target sequence for DNM1L (NM_005690.2,858-876).
ccgtgatgagtatgctttt

SEQ ID NO: 108788 - DNA, 19 bp, Homo sapiens
  siRNA target sequence for DNM1L (NM_005690.2,892-910).
ccatctctggccaatagaa

SEQ ID NO: 108789 - DNA, 19 bp, Homo sapiens
  siRNA target sequence for DNM1L (NM_005690.2,893-911).
catctctggccaatagaaa

SEQ ID NO: 108790 - DNA, 19 bp, Homo sapiens
  siRNA target sequence for DNM1L (NM_005690.2,935-953).
ctctaaacaggttactgat

SEQ ID NO: 108791 - DNA, 19 bp, Homo sapiens
  siRNA target sequence for DNM1L (NM_005690.2,944-962).
ggttactgatgcatcacat

SEQ ID NO: 108792 - DNA, 19 bp, Homo sapiens
  siRNA target sequence for DNM1L (NM_005690.2,954-972).
gcatcacatcagagattgt

SEQ ID NO: 108793 - DNA, 19 bp, Homo sapiens
  siRNA target sequence for DNM1L (NM_005690.2,960-978).
catcagagattgtttacca

SEQ ID NO: 108794 - DNA, 19 bp, Homo sapiens
  siRNA target sequence for DNM1L (NM_005690.2,1003-1021).
ctagctgctcagtatcagt

SEQ ID NO: 108795 - DNA, 19 bp, Homo sapiens
  siRNA target sequence for DNM1L (NM_005690.2,1012-1030).
cagtatcagtctcttctaa

SEQ ID NO: 108796 - DNA, 19 bp, Homo sapiens
  siRNA target sequence for DNM1L (NM_005690.2,1039-1057).
ggtgaacccgtggatgata

SEQ ID NO: 108797 - DNA, 19 bp, Homo sapiens
  siRNA target sequence for DNM1L (NM_005690.2,1040-1058).
gtgaacccgtggatgataa

SEQ ID NO: 108798 - DNA, 19 bp, Homo sapiens
  siRNA target sequence for DNM1L (NM_005690.2,1074-1092).
ccaacttattaccaaattt

SEQ ID NO: 108799 - DNA, 19 bp, Homo sapiens
  siRNA target sequence for DNM1L (NM_005690.2,1093-1111).
gccacagaatattgtaaca

SEQ ID NO: 108800 - DNA, 19 bp, Homo sapiens
  siRNA target sequence for DNM1L (NM_005690.2,1155-1173).
cggtggtgctagaatttgt

SEQ ID NO: 108801 - DNA, 19 bp, Homo sapiens
  siRNA target sequence for DNM1L (NM_005690.2,1156-1174).
ggtggtgctagaatttgtt

SEQ ID NO: 108802 - DNA, 19 bp, Homo sapiens
  siRNA target sequence for DNM1L (NM_005690.2,1157-1175).
gtggtgctagaatttgtta

SEQ ID NO: 108803 - DNA, 19 bp, Homo sapiens
  siRNA target sequence for DNM1L (NM_005690.2,1188-1206).
gacttttgggcgaacctta

SEQ ID NO: 108804 - DNA, 19 bp, Homo sapiens
  siRNA target sequence for DNM1L (NM_005690.2,1222-1240).
cttggtggccttaacacta

SEQ ID NO: 108805 - DNA, 19 bp, Homo sapiens
  siRNA target sequence for DNM1L (NM_005690.2,1228-1246).
ggccttaacactattgaca

SEQ ID NO: 108806 - DNA, 19 bp, Homo sapiens
  siRNA target sequence for DNM1L (NM_005690.2,1273-1291).
ggtcctcgtcctgctttat

SEQ ID NO: 108807 - DNA, 19 bp, Homo sapiens
  siRNA target sequence for DNM1L (NM_005690.2,1274-1292).
gtcctcgtcctgctttatt

SEQ ID NO: 108808 - DNA, 19 bp, Homo sapiens
  siRNA target sequence for DNM1L (NM_005690.2,1320-1338).
ggtgaagcggcaaatcaaa

SEQ ID NO: 108809 - DNA, 19 bp, Homo sapiens
  siRNA target sequence for DNM1L (NM_005690.2,1364-1382).
gtgtggaactggttcatga

SEQ ID NO: 108810 - DNA, 19 bp, Homo sapiens
  siRNA target sequence for DNM1L (NM_005690.2,1402-1420).
cagcactgtagcaattaca

SEQ ID NO: 108811 - DNA, 19 bp, Homo sapiens
  siRNA target sequence for DNM1L (NM_005690.2,1424-1442).
cacaggaattgttacgatt

SEQ ID NO: 108812 - DNA, 19 bp, Homo sapiens
  siRNA target sequence for DNM1L (NM_005690.2,1428-1446).
ggaattgttacgatttcct

SEQ ID NO: 108813 - DNA, 19 bp, Homo sapiens
  siRNA target sequence for DNM1L (NM_005690.2,1429-1447).
gaattgttacgatttccta

SEQ ID NO: 108814 - DNA, 19 bp, Homo sapiens
  siRNA target sequence for DNM1L (NM_005690.2,1434-1452).
gttacgatttcctaaactt

SEQ ID NO: 108815 - DNA, 19 bp, Homo sapiens
  siRNA target sequence for DNM1L (NM_005690.2,1496-1514).
ggttgcctgttacaaatga

SEQ ID NO: 108816 - DNA, 19 bp, Homo sapiens
  siRNA target sequence for DNM1L (NM_005690.2,1535-1553).
caattgaactggcttatat

SEQ ID NO: 108817 - DNA, 19 bp, Homo sapiens
  siRNA target sequence for DNM1L (NM_005690.2,1557-1575).
cacaaaacatccagacttt

SEQ ID NO: 108818 - DNA, 19 bp, Homo sapiens
  siRNA target sequence for DNM1L (NM_005690.2,1579-1597).
gatgcttgtgggctaatga

SEQ ID NO: 108819 - DNA, 19 bp, Homo sapiens
  siRNA target sequence for DNM1L (NM_005690.2,1589-1607).
ggctaatgaacaataatat

SEQ ID NO: 108820 - DNA, 19 bp, Homo sapiens
  siRNA target sequence for DNM1L (NM_005690.2,1590-1608).
gctaatgaacaataatata

SEQ ID NO: 108821 - DNA, 19 bp, Homo sapiens
  siRNA target sequence for DNM1L (NM_005690.2,1626-1644).
caggctagccagagaatta

SEQ ID NO: 108822 - DNA, 19 bp, Homo sapiens
  siRNA target sequence for DNM1L (NM_005690.2,1629-1647).
gctagccagagaattacct

SEQ ID NO: 108823 - DNA, 19 bp, Homo sapiens
  siRNA target sequence for DNM1L (NM_005690.2,1630-1648).
ctagccagagaattacctt

SEQ ID NO: 108824 - DNA, 19 bp, Homo sapiens
  siRNA target sequence for DNM1L (NM_005690.2,1826-1844).
ccgtgaacctgctagatgt

SEQ ID NO: 108825 - DNA, 19 bp, Homo sapiens
  siRNA target sequence for DNM1L (NM_005690.2,1852-1870).
cctgttgcacgaaaactat

SEQ ID NO: 108826 - DNA, 19 bp, Homo sapiens
  siRNA target sequence for DNM1L (NM_005690.2,1884-1902).
gcgagattgtgaggttatt

SEQ ID NO: 108827 - DNA, 19 bp, Homo sapiens
  siRNA target sequence for DNM1L (NM_005690.2,1896-1914).
ggttattgaacgactcatt

SEQ ID NO: 108828 - DNA, 19 bp, Homo sapiens
  siRNA target sequence for DNM1L (NM_005690.2,1897-1915).
gttattgaacgactcatta

SEQ ID NO: 108829 - DNA, 19 bp, Homo sapiens
  siRNA target sequence for DNM1L (NM_005690.2,1903-1921).
gaacgactcattaaatcat

SEQ ID NO: 108830 - DNA, 19 bp, Homo sapiens
  siRNA target sequence for DNM1L (NM_005690.2,1906-1924).
cgactcattaaatcatatt

SEQ ID NO: 108831 - DNA, 19 bp, Homo sapiens
  siRNA target sequence for DNM1L (NM_005690.2,1927-1945).
ctcattgtcagaaagaata

SEQ ID NO: 108832 - DNA, 19 bp, Homo sapiens
  siRNA target sequence for DNM1L (NM_005690.2,1960-1978).
ccaaaggcagtaatgcatt

SEQ ID NO: 108833 - DNA, 19 bp, Homo sapiens
  siRNA target sequence for DNM1L (NM_005690.2,1967-1985).
cagtaatgcattttttggt

SEQ ID NO: 108834 - DNA, 19 bp, Homo sapiens
  siRNA target sequence for DNM1L (NM_005690.2,2017-2035).
ctagtaggccagctgtata

SEQ ID NO: 108835 - DNA, 19 bp, Homo sapiens
  siRNA target sequence for DNM1L (NM_005690.2,2020-2038).
gtaggccagctgtataaat

SEQ ID NO: 108836 - DNA, 19 bp, Homo sapiens
  siRNA target sequence for DNM1L (NM_005690.2,2023-2041).
ggccagctgtataaatcat

SEQ ID NO: 108837 - DNA, 19 bp, Homo sapiens
  siRNA target sequence for DNM1L (NM_005690.2,2039-2057).
catccttattggatgatct

SEQ ID NO: 108838 - DNA, 19 bp, Homo sapiens
  siRNA target sequence for DNM1L (NM_005690.2,2042-2060).
ccttattggatgatcttct

SEQ ID NO: 108839 - DNA, 19 bp, Homo sapiens
  siRNA target sequence for DNM1L (NM_005690.2,2050-2068).
gatgatcttctgacagaat

SEQ ID NO: 108840 - DNA, 19 bp, Homo sapiens
  siRNA target sequence for DNM1L (NM_012062.2,1658-1676).
cacgagacaagtcttctaa

SEQ ID NO: 108841 - DNA, 19 bp, Homo sapiens
  siRNA target sequence for DNM1L (NM_012062.2,1732-1750).
gaggctgatggcaagttaa

SEQ ID NO: 108842 - DNA, 19 bp, Homo sapiens
  siRNA target sequence for DNM1L (NM_012062.2,1734-1752).
ggctgatggcaagttaatt

SEQ ID NO: 108843 - DNA, 19 bp, Homo sapiens
  siRNA target sequence for DNM1L (NM_012062.2,1736-1754).
ctgatggcaagttaattca

SEQ ID NO: 108844 - DNA, 19 bp, Homo sapiens
  siRNA target sequence for DNM1L (NM_012063.1,1654-1672).
gtatcacgagacaagttaa

SEQ ID NO: 108845 - DNA, 19 bp, Homo sapiens
  siRNA target sequence for DNM1L (NM_012063.1,1658-1676).
cacgagacaagttaattca

SEQ ID NO: 108846 - DNA, 19 bp, Homo sapiens
  siRNA target sequence for DNM2 (NM_004945.1,171-189).
gatcccgctggtcaacaaa

SEQ ID NO: 108847 - DNA, 19 bp, Homo sapiens
  siRNA target sequence for DNM2 (NM_004945.1,357-375).
gcagctcatcttctcaaaa

SEQ ID NO: 108848 - DNA, 19 bp, Homo sapiens
  siRNA target sequence for DNM2 (NM_004945.1,465-483).
ggtcacggggaccaacaaa

SEQ ID NO: 108849 - DNA, 19 bp, Homo sapiens
  siRNA target sequence for DNM2 (NM_004945.1,521-539).
cgccacacgtgttgaactt

SEQ ID NO: 108850 - DNA, 19 bp, Homo sapiens
  siRNA target sequence for DNM2 (NM_004945.1,523-541).
ccacacgtgttgaacttga

SEQ ID NO: 108851 - DNA, 19 bp, Homo sapiens
  siRNA target sequence for DNM2 (NM_004945.1,794-812).
gggacgtcttggagaacaa

SEQ ID NO: 108852 - DNA, 19 bp, Homo sapiens
  siRNA target sequence for DNM2 (NM_004945.1,1028-1046).
ccctacgtagcaaactaca

SEQ ID NO: 108853 - DNA, 19 bp, Homo sapiens
  siRNA target sequence for DNM2 (NM_004945.1,1146-1164).
gcagtttggggtggatttt

SEQ ID NO: 108854 - DNA, 19 bp, Homo sapiens
  siRNA target sequence for DNM2 (NM_004945.1,1256-1274).
catttgagctggtgaagat

SEQ ID NO: 108855 - DNA, 19 bp, Homo sapiens
  siRNA target sequence for DNM2 (NM_004945.1,1366-1384).
gcattcgaggccattgtga

SEQ ID NO: 108856 - DNA, 19 bp, Homo sapiens
  siRNA target sequence for DNM2 (NM_004945.1,1367-1385).
cattcgaggccattgtgaa

SEQ ID NO: 108857 - DNA, 19 bp, Homo sapiens
  siRNA target sequence for DNM2 (NM_004945.1,1424-1442).
gtgtcgacctggttatcca

SEQ ID NO: 108858 - DNA, 19 bp, Homo sapiens
  siRNA target sequence for DNM2 (NM_004945.1,1443-1461).
ggagctaatcaatacagtt

SEQ ID NO: 108859 - DNA, 19 bp, Homo sapiens
  siRNA target sequence for DNM2 (NM_004945.1,1444-1462).
gagctaatcaatacagtta

SEQ ID NO: 108860 - DNA, 19 bp, Homo sapiens
  siRNA target sequence for DNM2 (NM_004945.1,1516-1534).
cgaatcgtcaccacttaca

SEQ ID NO: 108861 - DNA, 19 bp, Homo sapiens
  siRNA target sequence for DNM2 (NM_004945.1,1517-1535).
gaatcgtcaccacttacat

SEQ ID NO: 108862 - DNA, 19 bp, Homo sapiens
  siRNA target sequence for DNM2 (NM_004945.1,1556-1574).
cgaaggaccagattcttct

SEQ ID NO: 108863 - DNA, 19 bp, Homo sapiens
  siRNA target sequence for DNM2 (NM_004945.1,2102-2120).
gcaacctggtggactcata

SEQ ID NO: 108864 - DNA, 19 bp, Homo sapiens
  siRNA target sequence for DRG2 (NM_001388.3,59-77).
gggatcttagagaagatct

SEQ ID NO: 108865 - DNA, 19 bp, Homo sapiens
  siRNA target sequence for DRG2 (NM_001388.3,215-233).
ggctttgatgtcatgaagt

SEQ ID NO: 108866 - DNA, 19 bp, Homo sapiens
  siRNA target sequence for DRG2 (NM_001388.3,272-290).
gtgggtaagtccacattct

SEQ ID NO: 108867 - DNA, 19 bp, Homo sapiens
  siRNA target sequence for DRG2 (NM_001388.3,275-293).
ggtaagtccacattcttga

SEQ ID NO: 108868 - DNA, 19 bp, Homo sapiens
  siRNA target sequence for DRG2 (NM_001388.3,337-355).
caccactctgacgtgtatt

SEQ ID NO: 108869 - DNA, 19 bp, Homo sapiens
  siRNA target sequence for DRG2 (NM_001388.3,340-358).
cactctgacgtgtattcct

SEQ ID NO: 108870 - DNA, 19 bp, Homo sapiens
  siRNA target sequence for DRG2 (NM_001388.3,356-374).
cctggggtcattgaataca

SEQ ID NO: 108871 - DNA, 19 bp, Homo sapiens
  siRNA target sequence for DRG2 (NM_001388.3,357-375).
ctggggtcattgaatacaa

SEQ ID NO: 108872 - DNA, 19 bp, Homo sapiens
  siRNA target sequence for DRG2 (NM_001388.3,642-660).
cccagtgctcggaaaagct

SEQ ID NO: 108873 - DNA, 19 bp, Homo sapiens
  siRNA target sequence for DRG2 (NM_001388.3,668-686).
ctcatcctgcacgaataca

SEQ ID NO: 108874 - DNA, 19 bp, Homo sapiens
  siRNA target sequence for DRG2 (NM_001388.3,679-697).
cgaatacaagatcttcaat

SEQ ID NO: 108875 - DNA, 19 bp, Homo sapiens
  siRNA target sequence for DRG2 (NM_001388.3,723-741).
gctccccggacgagttcat

SEQ ID NO: 108876 - DNA, 19 bp, Homo sapiens
  siRNA target sequence for DRG2 (NM_001388.3,773-791).
ccctgcctgtatgtttata

SEQ ID NO: 108877 - DNA, 19 bp, Homo sapiens
  siRNA target sequence for DRG2 (NM_001388.3,917-935).
gccctgacctgcatctaca

SEQ ID NO: 108878 - DNA, 19 bp, Homo sapiens
  siRNA target sequence for DRG2 (NM_001388.3,961-979).
cttcacagacgccatcatt

SEQ ID NO: 108879 - DNA, 19 bp, Homo sapiens
  siRNA target sequence for DRG2 (NM_001388.3,1029-1047).
cactcgccagccagttcaa

SEQ ID NO: 108880 - DNA, 19 bp, Homo sapiens
  siRNA target sequence for DRG2 (NM_001388.3,1031-1049).
ctcgccagccagttcaagt

SEQ ID NO: 108881 - DNA, 19 bp, Homo sapiens
  siRNA target sequence for FLJ10101 (NM_024718.2,694-712).
gcaacggggtggtcatgat

SEQ ID NO: 108882 - DNA, 19 bp, Homo sapiens
  siRNA target sequence for FLJ10101 (NM_024718.2,731-749).
gtggaccttcaattacatt

SEQ ID NO: 108883 - DNA, 19 bp, Homo sapiens
  siRNA target sequence for FLJ10101 (NM_024718.2,733-751).
ggaccttcaattacattct

SEQ ID NO: 108884 - DNA, 19 bp, Homo sapiens
  siRNA target sequence for FLJ10101 (NM_024718.2,930-948).
ggcctaaagtaccttcata

SEQ ID NO: 108885 - DNA, 19 bp, Homo sapiens
  siRNA target sequence for FLJ10702 (NM_018184.1,294-312).
cgcgtcaggtcaattcagt

SEQ ID NO: 108886 - DNA, 19 bp, Homo sapiens
  siRNA target sequence for FLJ10702 (NM_018184.1,302-320).
gtcaattcagtgaagatat

SEQ ID NO: 108887 - DNA, 19 bp, Homo sapiens
  siRNA target sequence for FLJ10702 (NM_018184.1,304-322).
caattcagtgaagatatga

SEQ ID NO: 108888 - DNA, 19 bp, Homo sapiens
  siRNA target sequence for FLJ10702 (NM_018184.1,356-374).
ctaaaggtaacgtcacaat

SEQ ID NO: 108889 - DNA, 19 bp, Homo sapiens
  siRNA target sequence for FLJ10702 (NM_018184.1,361-379).
ggtaacgtcacaataaaga

SEQ ID NO: 108890 - DNA, 19 bp, Homo sapiens
  siRNA target sequence for FLJ10702 (NM_018184.1,394-412).
ggacaaccccgatttcgaa

SEQ ID NO: 108891 - DNA, 19 bp, Homo sapiens
  siRNA target sequence for FLJ10702 (NM_018184.1,431-449).
gcagaggagtcaatgctat

SEQ ID NO: 108892 - DNA, 19 bp, Homo sapiens
  siRNA target sequence for FLJ10702 (NM_018184.1,439-457).
gtcaatgctattgtttaca

SEQ ID NO: 108893 - DNA, 19 bp, Homo sapiens
  siRNA target sequence for FLJ10702 (NM_018184.1,446-464).
ctattgtttacatgataga

SEQ ID NO: 108894 - DNA, 19 bp, Homo sapiens
  siRNA target sequence for FLJ10702 (NM_018184.1,467-485).
ctgcagatcgtgaaaagat

SEQ ID NO: 108895 - DNA, 19 bp, Homo sapiens
  siRNA target sequence for FLJ10702 (NM_018184.1,470-488).
cagatcgtgaaaagataga

SEQ ID NO: 108896 - DNA, 19 bp, Homo sapiens
  siRNA target sequence for FLJ10702 (NM_018184.1,497-515).
gaaatgagctacataatct

SEQ ID NO: 108897 - DNA, 19 bp, Homo sapiens
  siRNA target sequence for FLJ10702 (NM_018184.1,505-523).
ctacataatcttctagata

SEQ ID NO: 108898 - DNA, 19 bp, Homo sapiens
  siRNA target sequence for FLJ10702 (NM_018184.1,550-568).
ctagtgcttggaaacaaga

SEQ ID NO: 108899 - DNA, 19 bp, Homo sapiens
  siRNA target sequence for FLJ10702 (NM_018184.1,626-644).
ctattcaggatagagaaat

SEQ ID NO: 108900 - DNA, 19 bp, Homo sapiens
  siRNA target sequence for FLJ10702 (NM_018184.1,651-669).
ctattcaatttcttgcaaa

SEQ ID NO: 108901 - DNA, 19 bp, Homo sapiens
  siRNA target sequence for FLJ10702 (NM_018184.1,701-719).
ggcttattcagcattcaaa

SEQ ID NO: 108902 - DNA, 19 bp, Homo sapiens
  siRNA target sequence for FLJ10849 (NM_018243.2,174-192).
cgtggggagaccgtctaat

SEQ ID NO: 108903 - DNA, 19 bp, Homo sapiens
  siRNA target sequence for FLJ10849 (NM_018243.2,177-195).
ggggagaccgtctaatgaa

SEQ ID NO: 108904 - DNA, 19 bp, Homo sapiens
  siRNA target sequence for FLJ10849 (NM_018243.2,179-197).
ggagaccgtctaatgaaga

SEQ ID NO: 108905 - DNA, 19 bp, Homo sapiens
  siRNA target sequence for FLJ10849 (NM_018243.2,188-206).
ctaatgaagagcttcgaaa

SEQ ID NO: 108906 - DNA, 19 bp, Homo sapiens
  siRNA target sequence for FLJ10849 (NM_018243.2,196-214).
gagcttcgaaacttgtctt

SEQ ID NO: 108907 - DNA, 19 bp, Homo sapiens
  siRNA target sequence for FLJ10849 (NM_018243.2,258-276).
caacaagtctacttctcaa

SEQ ID NO: 108908 - DNA, 19 bp, Homo sapiens
  siRNA target sequence for FLJ10849 (NM_018243.2,274-292).
caaggattctgtttcaaca

SEQ ID NO: 108909 - DNA, 19 bp, Homo sapiens
  siRNA target sequence for FLJ10849 (NM_018243.2,320-338).
gcaaatccacgttaatgga

SEQ ID NO: 108910 - DNA, 19 bp, Homo sapiens
  siRNA target sequence for FLJ10849 (NM_018243.2,326-344).
ccacgttaatggacacttt

SEQ ID NO: 108911 - DNA, 19 bp, Homo sapiens
  siRNA target sequence for FLJ10849 (NM_018243.2,329-347).
cgttaatggacactttgtt

SEQ ID NO: 108912 - DNA, 19 bp, Homo sapiens
  siRNA target sequence for FLJ10849 (NM_018243.2,397-415).
cggttaaaagccagaagtt

SEQ ID NO: 108913 - DNA, 19 bp, Homo sapiens
  siRNA target sequence for FLJ10849 (NM_018243.2,398-416).
ggttaaaagccagaagtta

SEQ ID NO: 108914 - DNA, 19 bp, Homo sapiens
  siRNA target sequence for FLJ10849 (NM_018243.2,399-417).
gttaaaagccagaagttat

SEQ ID NO: 108915 - DNA, 19 bp, Homo sapiens
  siRNA target sequence for FLJ10849 (NM_018243.2,431-449).
gcaatgtacggctgaagtt

SEQ ID NO: 108916 - DNA, 19 bp, Homo sapiens
  siRNA target sequence for FLJ10849 (NM_018243.2,432-450).
caatgtacggctgaagtta

SEQ ID NO: 108917 - DNA, 19 bp, Homo sapiens
  siRNA target sequence for FLJ10849 (NM_018243.2,436-454).
gtacggctgaagttaacca

SEQ ID NO: 108918 - DNA, 19 bp, Homo sapiens
  siRNA target sequence for FLJ10849 (NM_018243.2,498-516).
cagctataagccgatagta

SEQ ID NO: 108919 - DNA, 19 bp, Homo sapiens
  siRNA target sequence for FLJ10849 (NM_018243.2,500-518).
gctataagccgatagtaga

SEQ ID NO: 108920 - DNA, 19 bp, Homo sapiens
  siRNA target sequence for FLJ10849 (NM_018243.2,501-519).
ctataagccgatagtagaa

SEQ ID NO: 108921 - DNA, 19 bp, Homo sapiens
  siRNA target sequence for FLJ10849 (NM_018243.2,507-525).
gccgatagtagaatatatt

SEQ ID NO: 108922 - DNA, 19 bp, Homo sapiens
  siRNA target sequence for FLJ10849 (NM_018243.2,509-527).
cgatagtagaatatattga

SEQ ID NO: 108923 - DNA, 19 bp, Homo sapiens
  siRNA target sequence for FLJ10849 (NM_018243.2,626-644).
cccctactggacattcact

SEQ ID NO: 108924 - DNA, 19 bp, Homo sapiens
  siRNA target sequence for FLJ10849 (NM_018243.2,627-645).
ccctactggacattcacta

SEQ ID NO: 108925 - DNA, 19 bp, Homo sapiens
  siRNA target sequence for FLJ10849 (NM_018243.2,829-847).
gagattaacgcaacaatga

SEQ ID NO: 108926 - DNA, 19 bp, Homo sapiens
  siRNA target sequence for FLJ10849 (NM_018243.2,831-849).
gattaacgcaacaatgagt

SEQ ID NO: 108927 - DNA, 19 bp, Homo sapiens
  siRNA target sequence for FLJ10849 (NM_018243.2,1034-1052).
cccgccactatgaattgta

SEQ ID NO: 108928 - DNA, 19 bp, Homo sapiens
  siRNA target sequence for FLJ10849 (NM_018243.2,1050-1068).
gtaccgacgctgtaagctt

SEQ ID NO: 108929 - DNA, 19 bp, Homo sapiens
  siRNA target sequence for FLJ10849 (NM_018243.2,1276-1294).
cggacacaccaagaagaaa

SEQ ID NO: 108930 - DNA, 19 bp, Homo sapiens
  siRNA target sequence for FLJ21665 (NM_024803.1,135-153).
caaatggcgttgttcttga

SEQ ID NO: 108931 - DNA, 19 bp, Homo sapiens
  siRNA target sequence for FLJ21665 (NM_024803.1,265-283).
ggacttggagccaactgtt

SEQ ID NO: 108932 - DNA, 19 bp, Homo sapiens
  siRNA target sequence for FLJ21665 (NM_024803.1,266-284).
gacttggagccaactgtta

SEQ ID NO: 108933 - DNA, 19 bp, Homo sapiens
  siRNA target sequence for FLJ21665 (NM_024803.1,268-286).
cttggagccaactgttata

SEQ ID NO: 108934 - DNA, 19 bp, Homo sapiens
  siRNA target sequence for FLJ21665 (NM_024803.1,370-388).
cgcgcgaggccgttactct

SEQ ID NO: 108935 - DNA, 19 bp, Homo sapiens
  siRNA target sequence for FLJ21665 (NM_024803.1,450-468).
gtggacttcagggattttt

SEQ ID NO: 108936 - DNA, 19 bp, Homo sapiens
  siRNA target sequence for FLJ21665 (NM_024803.1,452-470).
ggacttcagggatttttga

SEQ ID NO: 108937 - DNA, 19 bp, Homo sapiens
  siRNA target sequence for FLJ21665 (NM_024803.1,453-471).
gacttcagggatttttgat

SEQ ID NO: 108938 - DNA, 19 bp, Homo sapiens
  siRNA target sequence for FLJ21665 (NM_024803.1,504-522).
ggtttacgtctctcttaat

SEQ ID NO: 108939 - DNA, 19 bp, Homo sapiens
  siRNA target sequence for FLJ21665 (NM_024803.1,602-620).
gtggtagagccttataact

SEQ ID NO: 108940 - DNA, 19 bp, Homo sapiens
  siRNA target sequence for FLJ21665 (NM_024803.1,604-622).
ggtagagccttataactct

SEQ ID NO: 108941 - DNA, 19 bp, Homo sapiens
  siRNA target sequence for FLJ21665 (NM_024803.1,704-722).
cgtaaactcggtgttgaat

SEQ ID NO: 108942 - DNA, 19 bp, Homo sapiens
  siRNA target sequence for FLJ21665 (NM_024803.1,727-745).
ctctcatgccagcatcaat

SEQ ID NO: 108943 - DNA, 19 bp, Homo sapiens
  siRNA target sequence for FLJ21665 (NM_024803.1,790-808).
gtttgaagggcccttgaat

SEQ ID NO: 108944 - DNA, 19 bp, Homo sapiens
  siRNA target sequence for FLJ21665 (NM_024803.1,801-819).
ccttgaatgtagacctaat

SEQ ID NO: 108945 - DNA, 19 bp, Homo sapiens
  siRNA target sequence for FLJ21665 (NM_024803.1,805-823).
gaatgtagacctaattgaa

SEQ ID NO: 108946 - DNA, 19 bp, Homo sapiens
  siRNA target sequence for FLJ21665 (NM_024803.1,838-856).
ggtaccttatccgagaata

SEQ ID NO: 108947 - DNA, 19 bp, Homo sapiens
  siRNA target sequence for FLJ21665 (NM_024803.1,842-860).
ccttatccgagaatacatt

SEQ ID NO: 108948 - DNA, 19 bp, Homo sapiens
  siRNA target sequence for FLJ21665 (NM_024803.1,980-998).
cctcggcttgggaagtaca

SEQ ID NO: 108949 - DNA, 19 bp, Homo sapiens
  siRNA target sequence for FLJ21665 (NM_024803.1,981-999).
ctcggcttgggaagtacat

SEQ ID NO: 108950 - DNA, 19 bp, Homo sapiens
  siRNA target sequence for FLJ21665 (NM_024803.1,1001-1019).
gcctgctgcctactctata

SEQ ID NO: 108951 - DNA, 19 bp, Homo sapiens
  siRNA target sequence for FLJ21665 (NM_024803.1,1071-1089).
cgaggcactctgttcagtt

SEQ ID NO: 108952 - DNA, 19 bp, Homo sapiens
  siRNA target sequence for FLJ21665 (NM_024803.1,1072-1090).
gaggcactctgttcagttt

SEQ ID NO: 108953 - DNA, 19 bp, Homo sapiens
  siRNA target sequence for FLJ21665 (NM_024803.1,1074-1092).
ggcactctgttcagtttgt

SEQ ID NO: 108954 - DNA, 19 bp, Homo sapiens
  siRNA target sequence for FLJ21665 (NM_024803.1,1255-1273).
gtacgccaagagagcattt

SEQ ID NO: 108955 - DNA, 19 bp, Homo sapiens
  siRNA target sequence for FLJ21665 (NM_024803.1,1361-1379).
gaagtggcgcaaagtttct

SEQ ID NO: 108956 - DNA, 19 bp, Homo sapiens
  siRNA target sequence for FLJ22595 (NM_025047.1,191-209).
gggttcgctgggttctaaa

SEQ ID NO: 108957 - DNA, 19 bp, Homo sapiens
  siRNA target sequence for FLJ22595 (NM_025047.1,193-211).
gttcgctgggttctaaaaa

SEQ ID NO: 108958 - DNA, 19 bp, Homo sapiens
  siRNA target sequence for FLJ22595 (NM_025047.1,252-270).
gactcagctgggaagtcta

SEQ ID NO: 108959 - DNA, 19 bp, Homo sapiens
  siRNA target sequence for FLJ22595 (NM_025047.1,262-280).
ggaagtctactctccttta

SEQ ID NO: 108960 - DNA, 19 bp, Homo sapiens
  siRNA target sequence for FLJ22595 (NM_025047.1,266-284).
gtctactctcctttataaa

SEQ ID NO: 108961 - DNA, 19 bp, Homo sapiens
  siRNA target sequence for FLJ22595 (NM_025047.1,308-326).
caccatccctacaataggt

SEQ ID NO: 108962 - DNA, 19 bp, Homo sapiens
  siRNA target sequence for FLJ22595 (NM_025047.1,434-452).
cgatgggctggtgtatgtt

SEQ ID NO: 108963 - DNA, 19 bp, Homo sapiens
  siRNA target sequence for FLJ22595 (NM_025047.1,495-513).
cagtttgagcacattttga

SEQ ID NO: 108964 - DNA, 19 bp, Homo sapiens
  siRNA target sequence for FLJ22595 (NM_025047.1,686-704).
ggggttcaggaaattaact

SEQ ID NO: 108965 - DNA, 19 bp, Homo sapiens
  siRNA target sequence for FLJ22595 (NM_025047.1,738-756).
gacactttggcgttcttca

SEQ ID NO: 108966 - DNA, 19 bp, Homo sapiens
  siRNA target sequence for FLJ22655 (NM_024730.2,213-231).
ctcaaatataatgagaaat

SEQ ID NO: 108967 - DNA, 19 bp, Homo sapiens
  siRNA target sequence for FLJ22655 (NM_024730.2,421-439).
gggcagatgggtttgttat

SEQ ID NO: 108968 - DNA, 19 bp, Homo sapiens
  siRNA target sequence for FLJ22655 (NM_024730.2,441-459).
gtgtatgacatcagtgata

SEQ ID NO: 108969 - DNA, 19 bp, Homo sapiens
  siRNA target sequence for FLJ22655 (NM_024730.2,500-518).
ccgggagccacaaactagt

SEQ ID NO: 108970 - DNA, 19 bp, Homo sapiens
  siRNA target sequence for FLJ22655 (NM_024730.2,504-522).
gagccacaaactagtcatt

SEQ ID NO: 108971 - DNA, 19 bp, Homo sapiens
  siRNA target sequence for FLJ22655 (NM_024730.2,507-525).
ccacaaactagtcattgta

SEQ ID NO: 108972 - DNA, 19 bp, Homo sapiens
  siRNA target sequence for FLJ22655 (NM_024730.2,558-576).
ggcaacaaacgagatcttt

SEQ ID NO: 108973 - DNA, 19 bp, Homo sapiens
  siRNA target sequence for FLJ22655 (NM_024730.2,560-578).
caacaaacgagatctttgt

SEQ ID NO: 108974 - DNA, 19 bp, Homo sapiens
  siRNA target sequence for FLJ22655 (NM_024730.2,739-757).
gacgtcccagtggatctaa

SEQ ID NO: 108975 - DNA, 19 bp, Homo sapiens
  siRNA target sequence for FLJ22655 (NM_024730.2,764-782).
ggccaaattgatcaataat

SEQ ID NO: 108976 - DNA, 19 bp, Homo sapiens
  siRNA target sequence for FLJ22655 (NM_024730.2,767-785).
caaattgatcaataatgta

SEQ ID NO: 108977 - DNA, 19 bp, Homo sapiens
  siRNA target sequence for FLJ25410 (NM_144605.1,371-389).
cactgacccatgtcataga

SEQ ID NO: 108978 - DNA, 19 bp, Homo sapiens
  siRNA target sequence for FLJ25410 (NM_144605.1,482-500).
gctacatcaacgagcaata

SEQ ID NO: 108979 - DNA, 19 bp, Homo sapiens
  siRNA target sequence for FLJ25410 (NM_144605.1,567-585).
ctgctgcgtgtactttgta

SEQ ID NO: 108980 - DNA, 19 bp, Homo sapiens
  siRNA target sequence for FLJ25410 (NM_144605.1,891-909).
gaccaagtggggcatcatt

SEQ ID NO: 108981 - DNA, 19 bp, Homo sapiens
  siRNA target sequence for FLJ25410 (NM_144605.1,893-911).
ccaagtggggcatcattga

SEQ ID NO: 108982 - DNA, 19 bp, Homo sapiens
  siRNA target sequence for FLJ25410 (NM_144605.1,921-939).
catggcgcactgtgaattt

SEQ ID NO: 108983 - DNA, 19 bp, Homo sapiens
  siRNA target sequence for FLJ25410 (NM_144605.1,1020-1038).
ccgcgtcatcagactcaat

SEQ ID NO: 108984 - DNA, 19 bp, Homo sapiens
  siRNA target sequence for FLJ25410 (NM_144605.1,1022-1040).
gcgtcatcagactcaatga

SEQ ID NO: 108985 - DNA, 19 bp, Homo sapiens
  siRNA target sequence for FLJ25410 (NM_144605.1,1023-1041).
cgtcatcagactcaatgaa

SEQ ID NO: 108986 - DNA, 19 bp, Homo sapiens
  siRNA target sequence for FLJ25410 (NM_144605.1,1024-1042).
gtcatcagactcaatgaaa

SEQ ID NO: 108987 - DNA, 19 bp, Homo sapiens
  siRNA target sequence for FLJ25410 (NM_144605.1,1140-1158).
ccatgacgattctgatgat

SEQ ID NO: 108988 - DNA, 19 bp, Homo sapiens
  siRNA target sequence for FLJ39249 (NM_173664.2,627-645).
ctgagcgaggccatgagta

SEQ ID NO: 108989 - DNA, 19 bp, Homo sapiens
  siRNA target sequence for FLJ39249 (NM_173664.2,668-686).
gggtctacaggctatcgat

SEQ ID NO: 108990 - DNA, 19 bp, Homo sapiens
  siRNA target sequence for FLJ39249 (NM_173664.2,669-687).
ggtctacaggctatcgata

SEQ ID NO: 108991 - DNA, 19 bp, Homo sapiens
  siRNA target sequence for FLJ39249 (NM_173664.2,670-688).
gtctacaggctatcgataa

SEQ ID NO: 108992 - DNA, 19 bp, Homo sapiens
  siRNA target sequence for GBP1 (NM_002053.1,663-681).
gatgagtacctgacatact

SEQ ID NO: 108993 - DNA, 19 bp, Homo sapiens
  siRNA target sequence for GBP1 (NM_002053.1,1824-1842).
cgaaaggcatgtaccataa

SEQ ID NO: 108994 - DNA, 19 bp, Homo sapiens
  siRNA target sequence for GBP2 (NM_004120.3,736-754).
ctcctcacctggtaacaat

SEQ ID NO: 108995 - DNA, 19 bp, Homo sapiens
  siRNA target sequence for GBP2 (NM_004120.3,871-889).
ggagctttcgctaaagcta

SEQ ID NO: 108996 - DNA, 19 bp, Homo sapiens
  siRNA target sequence for GBP2 (NM_004120.3,872-890).
gagctttcgctaaagctaa

SEQ ID NO: 108997 - DNA, 19 bp, Homo sapiens
  siRNA target sequence for GBP2 (NM_004120.3,875-893).
ctttcgctaaagctaagaa

SEQ ID NO: 108998 - DNA, 19 bp, Homo sapiens
  siRNA target sequence for GBP2 (NM_004120.3,881-899).
ctaaagctaagaaaaggta

SEQ ID NO: 108999 - DNA, 19 bp, Homo sapiens
  siRNA target sequence for GBP2 (NM_004120.3,896-914).
ggtactgataagaaaagta

SEQ ID NO: 109000 - DNA, 19 bp, Homo sapiens
  siRNA target sequence for GBP2 (NM_004120.3,933-951).
ggttgtgcatccgaaagtt

SEQ ID NO: 109001 - DNA, 19 bp, Homo sapiens
  siRNA target sequence for GBP2 (NM_004120.3,1008-1026).
ctcacctagagcagctaaa

SEQ ID NO: 109002 - DNA, 19 bp, Homo sapiens
  siRNA target sequence for GBP2 (NM_004120.3,1042-1060).
ccctgatttcatagaacaa

SEQ ID NO: 109003 - DNA, 19 bp, Homo sapiens
  siRNA target sequence for GBP2 (NM_004120.3,1433-1451).
gcaaggcgagatgactttt

SEQ ID NO: 109004 - DNA, 19 bp, Homo sapiens
  siRNA target sequence for GBP2 (NM_004120.3,1465-1483).
caaagcatcatcagattgt

SEQ ID NO: 109005 - DNA, 19 bp, Homo sapiens
  siRNA target sequence for GBP2 (NM_004120.3,1512-1530).
gccctttagaagaagatgt

SEQ ID NO: 109006 - DNA, 19 bp, Homo sapiens
  siRNA target sequence for GBP2 (NM_004120.3,1556-1574).
ggaggttaccgtctcttta

SEQ ID NO: 109007 - DNA, 19 bp, Homo sapiens
  siRNA target sequence for GBP2 (NM_004120.3,1560-1578).
gttaccgtctctttactca

SEQ ID NO: 109008 - DNA, 19 bp, Homo sapiens
  siRNA target sequence for GBP2 (NM_004120.3,1634-1652).
gccaaagaggtgctgaaaa

SEQ ID NO: 109009 - DNA, 19 bp, Homo sapiens
  siRNA target sequence for GBP2 (NM_004120.3,1969-1987).
gagcaagagacttcaaaaa

SEQ ID NO: 109010 - DNA, 19 bp, Homo sapiens
  siRNA target sequence for GBP2 (NM_004120.3,2019-2037).
cattggagccaatatgtaa

SEQ ID NO: 109011 - DNA, 19 bp, Homo sapiens
  siRNA target sequence for GBP2 (NM_004120.3,2023-2041).
ggagccaatatgtaacata

SEQ ID NO: 109012 - DNA, 19 bp, Homo sapiens
  siRNA target sequence for GBP3 (NM_018284.1,801-819).
gagtattccctgaagctaa

SEQ ID NO: 109013 - DNA, 19 bp, Homo sapiens
  siRNA target sequence for GBP3 (NM_018284.1,1737-1755).
gagaagaccctcactagta

SEQ ID NO: 109014 - DNA, 19 bp, Homo sapiens
  siRNA target sequence for GBP3 (NM_018284.1,1742-1760).
gaccctcactagtaaactt

SEQ ID NO: 109015 - DNA, 19 bp, Homo sapiens
  siRNA target sequence for GBP3 (NM_018284.1,1744-1762).
ccctcactagtaaacttca

SEQ ID NO: 109016 - DNA, 19 bp, Homo sapiens
  siRNA target sequence for GBP3 (NM_018284.1,1764-1782).
gaacaggcccgagtactaa

SEQ ID NO: 109017 - DNA, 19 bp, Homo sapiens
  siRNA target sequence for GBP3 (NM_018284.1,1787-1805).
gagatgccaaggtgaaagt

SEQ ID NO: 109018 - DNA, 19 bp, Homo sapiens
  siRNA target sequence for GBP3 (NM_018284.1,1798-1816).
gtgaaagtacccaacttca

SEQ ID NO: 109019 - DNA, 19 bp, Homo sapiens
  siRNA target sequence for GBP3 (NM_018284.1,1800-1818).
gaaagtacccaacttcaaa

SEQ ID NO: 109020 - DNA, 19 bp, Homo sapiens
  siRNA target sequence for GBP3 (NM_018284.1,1804-1822).
gtacccaacttcaaaatga

SEQ ID NO: 109021 - DNA, 19 bp, Homo sapiens
  siRNA target sequence for GBP3 (NM_018284.1,1864-1882).
gatatatgtcgcataagct

SEQ ID NO: 109022 - DNA, 19 bp, Homo sapiens
  siRNA target sequence for GBP4 (NM_052941.2,76-94).
gcccacaccaggttatcca

SEQ ID NO: 109023 - DNA, 19 bp, Homo sapiens
  siRNA target sequence for GBP4 (NM_052941.2,86-104).
ggttatccagaatctgaat

SEQ ID NO: 109024 - DNA, 19 bp, Homo sapiens
  siRNA target sequence for GBP4 (NM_052941.2,95-113).
gaatctgaatccatcatga

SEQ ID NO: 109025 - DNA, 19 bp, Homo sapiens
  siRNA target sequence for GBP4 (NM_052941.2,395-413).
ggcgatgtagaaaagagta

SEQ ID NO: 109026 - DNA, 19 bp, Homo sapiens
  siRNA target sequence for GBP4 (NM_052941.2,396-414).
gcgatgtagaaaagagtaa

SEQ ID NO: 109027 - DNA, 19 bp, Homo sapiens
  siRNA target sequence for GBP4 (NM_052941.2,806-824).
cctacaaatgacaagcaat

SEQ ID NO: 109028 - DNA, 19 bp, Homo sapiens
  siRNA target sequence for GBP4 (NM_052941.2,807-825).
ctacaaatgacaagcaata

SEQ ID NO: 109029 - DNA, 19 bp, Homo sapiens
  siRNA target sequence for GBP4 (NM_052941.2,860-878).
ctggaaaggcatttcctta

SEQ ID NO: 109030 - DNA, 19 bp, Homo sapiens
  siRNA target sequence for GBP4 (NM_052941.2,969-987).
ggactctggtggtgactta

SEQ ID NO: 109031 - DNA, 19 bp, Homo sapiens
  siRNA target sequence for GBP4 (NM_052941.2,1391-1409).
ctctacttagaagaaaaga

SEQ ID NO: 109032 - DNA, 19 bp, Homo sapiens
  siRNA target sequence for GBP4 (NM_052941.2,1412-1430).
caggttgagtgggactata

SEQ ID NO: 109033 - DNA, 19 bp, Homo sapiens
  siRNA target sequence for GBP4 (NM_052941.2,1853-1871).
gaacagttaaggctcttaa

SEQ ID NO: 109034 - DNA, 19 bp, Homo sapiens
  siRNA target sequence for GBP4 (NM_052941.2,1880-1898).
gacatggctagcaacataa

SEQ ID NO: 109035 - DNA, 19 bp, Homo sapiens
  siRNA target sequence for GBP5 (NM_052942.2,560-578).
cctcatcgagaactttaat

SEQ ID NO: 109036 - DNA, 19 bp, Homo sapiens
  siRNA target sequence for GBP5 (NM_052942.2,623-641).
cattacgcaacctgtagtt

SEQ ID NO: 109037 - DNA, 19 bp, Homo sapiens
  siRNA target sequence for GBP5 (NM_052942.2,787-805).
ggccaaatcacacattagt

SEQ ID NO: 109038 - DNA, 19 bp, Homo sapiens
  siRNA target sequence for GBP5 (NM_052942.2,873-891).
gcactggcactcttactga

SEQ ID NO: 109039 - DNA, 19 bp, Homo sapiens
  siRNA target sequence for GBP5 (NM_052942.2,896-914).
cacctttgtgtacaatact

SEQ ID NO: 109040 - DNA, 19 bp, Homo sapiens
  siRNA target sequence for GBP5 (NM_052942.2,898-916).
cctttgtgtacaatactgt

SEQ ID NO: 109041 - DNA, 19 bp, Homo sapiens
  siRNA target sequence for GBP5 (NM_052942.2,1186-1204).
gtctgtgtatacagaagtt

SEQ ID NO: 109042 - DNA, 19 bp, Homo sapiens
  siRNA target sequence for GBP5 (NM_052942.2,1190-1208).
gtgtatacagaagttcttt

SEQ ID NO: 109043 - DNA, 19 bp, Homo sapiens
  siRNA target sequence for GBP5 (NM_052942.2,1718-1736).
ggaagcatcctcggattat

SEQ ID NO: 109044 - DNA, 19 bp, Homo sapiens
  siRNA target sequence for GBP5 (NM_052942.2,1738-1756).
gctcggctttacttaagga

SEQ ID NO: 109045 - DNA, 19 bp, Homo sapiens
  siRNA target sequence for GBP5 (NM_052942.2,1806-1824).
ccaggaggccataatctct

SEQ ID NO: 109046 - DNA, 19 bp, Homo sapiens
  siRNA target sequence for GBP5 (NM_052942.2,1813-1831).
gccataatctcttcattca

SEQ ID NO: 109047 - DNA, 19 bp, Homo sapiens
  siRNA target sequence for GBP5 (NM_052942.2,1865-1883).
ggagcctcggaaaggaata

SEQ ID NO: 109048 - DNA, 19 bp, Homo sapiens
  siRNA target sequence for GBP5 (NM_052942.2,1925-1943).
gtctgtgagtcatgcaata

SEQ ID NO: 109049 - DNA, 19 bp, Homo sapiens
  siRNA target sequence for GBP5 (NM_052942.2,2050-2068).
ggcagaacgagcaaatgat

SEQ ID NO: 109050 - DNA, 19 bp, Homo sapiens
  siRNA target sequence for GBP5 (NM_052942.2,2240-2258).
cgcccagaggactgttaat

SEQ ID NO: 109051 - DNA, 19 bp, Homo sapiens
  siRNA target sequence for GBP5 (NM_052942.2,2246-2264).
gaggactgttaataacgat

SEQ ID NO: 109052 - DNA, 19 bp, Homo sapiens
  siRNA target sequence for GEM (NM_005261.2,613-631).
ggggaaagtgcaacgatta

SEQ ID NO: 109053 - DNA, 19 bp, Homo sapiens
  siRNA target sequence for GEM (NM_005261.2,614-632).
gggaaagtgcaacgattat

SEQ ID NO: 109054 - DNA, 19 bp, Homo sapiens
  siRNA target sequence for GEM (NM_005261.2,615-633).
ggaaagtgcaacgattata

SEQ ID NO: 109055 - DNA, 19 bp, Homo sapiens
  siRNA target sequence for GEM (NM_005261.2,698-716).
gggacgcatacctgattgt

SEQ ID NO: 109056 - DNA, 19 bp, Homo sapiens
  siRNA target sequence for GEM (NM_005261.2,711-729).
gattgtctactcaatcaca

SEQ ID NO: 109057 - DNA, 19 bp, Homo sapiens
  siRNA target sequence for GEM (NM_005261.2,843-861).
ccgagaagtgtctgtatca

SEQ ID NO: 109058 - DNA, 19 bp, Homo sapiens
  siRNA target sequence for GEM (NM_005261.2,1003-1021).
cggctggcctaccagaaaa

SEQ ID NO: 109059 - DNA, 19 bp, Homo sapiens
  siRNA target sequence for GNA12 (NM_007353.1,312-330).
ctcaagggttcttgttgat

SEQ ID NO: 109060 - DNA, 19 bp, Homo sapiens
  siRNA target sequence for GNA12 (NM_007353.1,346-364).
ggcattccttggcagtatt

SEQ ID NO: 109061 - DNA, 19 bp, Homo sapiens
  siRNA target sequence for GNA12 (NM_007353.1,352-370).
ccttggcagtattctgaaa

SEQ ID NO: 109062 - DNA, 19 bp, Homo sapiens
  siRNA target sequence for GNA12 (NM_007353.1,503-521).
gccggagaagcgagtttca

SEQ ID NO: 109063 - DNA, 19 bp, Homo sapiens
  siRNA target sequence for GNA12 (NM_007353.1,526-544).
ggggagtcggtgaagtact

SEQ ID NO: 109064 - DNA, 19 bp, Homo sapiens
  siRNA target sequence for GNA12 (NM_007353.1,527-545).
gggagtcggtgaagtactt

SEQ ID NO: 109065 - DNA, 19 bp, Homo sapiens
  siRNA target sequence for GNA12 (NM_007353.1,562-580).
cggatcggccagctgaatt

SEQ ID NO: 109066 - DNA, 19 bp, Homo sapiens
  siRNA target sequence for GNA12 (NM_007353.1,563-581).
ggatcggccagctgaatta

SEQ ID NO: 109067 - DNA, 19 bp, Homo sapiens
  siRNA target sequence for GNA12 (NM_007353.1,567-585).
cggccagctgaattacttt

SEQ ID NO: 109068 - DNA, 19 bp, Homo sapiens
  siRNA target sequence for GNA12 (NM_007353.1,634-652).
gtggagcatgacttcgtta

SEQ ID NO: 109069 - DNA, 19 bp, Homo sapiens
  siRNA target sequence for GNA12 (NM_007353.1,637-655).
gagcatgacttcgttatta

SEQ ID NO: 109070 - DNA, 19 bp, Homo sapiens
  siRNA target sequence for GNA13 (NM_006572.3,323-341).
gcaacgtgatcaaaggtat

SEQ ID NO: 109071 - DNA, 19 bp, Homo sapiens
  siRNA target sequence for GNA13 (NM_006572.3,358-376).
gctcgagagaagcttcata

SEQ ID NO: 109072 - DNA, 19 bp, Homo sapiens
  siRNA target sequence for GNA13 (NM_006572.3,359-377).
ctcgagagaagcttcatat

SEQ ID NO: 109073 - DNA, 19 bp, Homo sapiens
  siRNA target sequence for GNA13 (NM_006572.3,379-397).
ccctggggagacaactcaa

SEQ ID NO: 109074 - DNA, 19 bp, Homo sapiens
  siRNA target sequence for GNA13 (NM_006572.3,400-418).
caacaacatggagataaga

SEQ ID NO: 109075 - DNA, 19 bp, Homo sapiens
  siRNA target sequence for GNA13 (NM_006572.3,406-424).
catggagataagatgatgt

SEQ ID NO: 109076 - DNA, 19 bp, Homo sapiens
  siRNA target sequence for GNA13 (NM_006572.3,465-483).
ggaaacaagggttttctta

SEQ ID NO: 109077 - DNA, 19 bp, Homo sapiens
  siRNA target sequence for GNA13 (NM_006572.3,484-502).
caatatcttcctgctataa

SEQ ID NO: 109078 - DNA, 19 bp, Homo sapiens
  siRNA target sequence for GNA13 (NM_006572.3,493-511).
cctgctataagagcattat

SEQ ID NO: 109079 - DNA, 19 bp, Homo sapiens
  siRNA target sequence for GNA13 (NM_006572.3,514-532).
gcagacagcggcatacaga

SEQ ID NO: 109080 - DNA, 19 bp, Homo sapiens
  siRNA target sequence for GNA13 (NM_006572.3,543-561).
ccggcgtcgagaatttcaa

SEQ ID NO: 109081 - DNA, 19 bp, Homo sapiens
  siRNA target sequence for GNA13 (NM_006572.3,545-563).
ggcgtcgagaatttcaact

SEQ ID NO: 109082 - DNA, 19 bp, Homo sapiens
  siRNA target sequence for GNA13 (NM_006572.3,588-606).
ggataacttggataaactt

SEQ ID NO: 109083 - DNA, 19 bp, Homo sapiens
  siRNA target sequence for GNA13 (NM_006572.3,610-628).
gaaccagattatattccat

SEQ ID NO: 109084 - DNA, 19 bp, Homo sapiens
  siRNA target sequence for GNA13 (NM_006572.3,672-690).
ccatgaatacgactttgaa

SEQ ID NO: 109085 - DNA, 19 bp, Homo sapiens
  siRNA target sequence for GNA13 (NM_006572.3,704-722).
ctttcaaaatggttgatgt

SEQ ID NO: 109086 - DNA, 19 bp, Homo sapiens
  siRNA target sequence for GNA13 (NM_006572.3,724-742).
ggtggtcagagatcagaaa

SEQ ID NO: 109087 - DNA, 19 bp, Homo sapiens
  siRNA target sequence for GNA13 (NM_006572.3,770-788).
gtgtgacatcaatactttt

SEQ ID NO: 109088 - DNA, 19 bp, Homo sapiens
  siRNA target sequence for GNA13 (NM_006572.3,790-808).
cttgtttcctcaagtgaat

SEQ ID NO: 109089 - DNA, 19 bp, Homo sapiens
  siRNA target sequence for GNA13 (NM_006572.3,897-915).
cagcaatgtctccataatt

SEQ ID NO: 109090 - DNA, 19 bp, Homo sapiens
  siRNA target sequence for GNA13 (NM_006572.3,994-1012).
ggggatccccactgcttaa

SEQ ID NO: 109091 - DNA, 19 bp, Homo sapiens
  siRNA target sequence for GNA13 (NM_006572.3,996-1014).
ggatccccactgcttaaga

SEQ ID NO: 109092 - DNA, 19 bp, Homo sapiens
  siRNA target sequence for GNA13 (NM_006572.3,1100-1118).
ctatcaacacggagaacat

SEQ ID NO: 109093 - DNA, 19 bp, Homo sapiens
  siRNA target sequence for GNA13 (NM_006572.3,1132-1150).
cgtgacgtgaaggatacta

SEQ ID NO: 109094 - DNA, 19 bp, Homo sapiens
  siRNA target sequence for GNA13 (NM_006572.3,1133-1151).
gtgacgtgaaggatactat

SEQ ID NO: 109095 - DNA, 19 bp, Homo sapiens
  siRNA target sequence for GNA13 (NM_006572.3,1164-1182).
cctcaagcagcttatgcta

SEQ ID NO: 109096 - DNA, 19 bp, Homo sapiens
  siRNA target sequence for GNA14 (NM_004297.2,651-669).
gtgggaaaagcacctttat

SEQ ID NO: 109097 - DNA, 19 bp, Homo sapiens
  siRNA target sequence for GNA14 (NM_004297.2,729-747).
cgaagctggtttaccaaaa

SEQ ID NO: 109098 - DNA, 19 bp, Homo sapiens
  siRNA target sequence for GNA14 (NM_004297.2,780-798).
cgatggacacgctaaggat

SEQ ID NO: 109099 - DNA, 19 bp, Homo sapiens
  siRNA target sequence for GNA14 (NM_004297.2,781-799).
gatggacacgctaaggata

SEQ ID NO: 109100 - DNA, 19 bp, Homo sapiens
  siRNA target sequence for GNA14 (NM_004297.2,785-803).
gacacgctaaggatacagt

SEQ ID NO: 109101 - DNA, 19 bp, Homo sapiens
  siRNA target sequence for GNA14 (NM_004297.2,787-805).
cacgctaaggatacagtat

SEQ ID NO: 109102 - DNA, 19 bp, Homo sapiens
  siRNA target sequence for GNA14 (NM_004297.2,789-807).
cgctaaggatacagtatgt

SEQ ID NO: 109103 - DNA, 19 bp, Homo sapiens
  siRNA target sequence for GNA14 (NM_004297.2,808-826).
gtgtgaacagaataaggaa

SEQ ID NO: 109104 - DNA, 19 bp, Homo sapiens
  siRNA target sequence for GNA14 (NM_004297.2,999-1017).
gcatcgccacaccatcatt

SEQ ID NO: 109105 - DNA, 19 bp, Homo sapiens
  siRNA target sequence for GNA14 (NM_004297.2,1065-1083).
gcatcattgagtatccatt

SEQ ID NO: 109106 - DNA, 19 bp, Homo sapiens
  siRNA target sequence for GNA14 (NM_004297.2,1165-1183).
gagtgtcacctccattatt

SEQ ID NO: 109107 - DNA, 19 bp, Homo sapiens
  siRNA target sequence for GNA14 (NM_004297.2,1286-1304).
ccctggtttctgaattcgt

SEQ ID NO: 109108 - DNA, 19 bp, Homo sapiens
  siRNA target sequence for GNA14 (NM_004297.2,1295-1313).
ctgaattcgtctgtgattt

SEQ ID NO: 109109 - DNA, 19 bp, Homo sapiens
  siRNA target sequence for GNA14 (NM_004297.2,1410-1428).
gagctgccagagactttat

SEQ ID NO: 109110 - DNA, 19 bp, Homo sapiens
  siRNA target sequence for GNA14 (NM_004297.2,1413-1431).
ctgccagagactttatcct

SEQ ID NO: 109111 - DNA, 19 bp, Homo sapiens
  siRNA target sequence for GNA14 (NM_004297.2,1454-1472).
cctgacaaagagaaagtca

SEQ ID NO: 109112 - DNA, 19 bp, Homo sapiens
  siRNA target sequence for GNA14 (NM_004297.2,1455-1473).
ctgacaaagagaaagtcat

SEQ ID NO: 109113 - DNA, 19 bp, Homo sapiens
  siRNA target sequence for GNA14 (NM_004297.2,1505-1523).
gacaatattcgctttgtgt

SEQ ID NO: 109114 - DNA, 19 bp, Homo sapiens
  siRNA target sequence for GNA15 (NM_002068.1,572-590).
gccaggacccctataaagt

SEQ ID NO: 109115 - DNA, 19 bp, Homo sapiens
  siRNA target sequence for GNA15 (NM_002068.1,574-592).
caggacccctataaagtga

SEQ ID NO: 109116 - DNA, 19 bp, Homo sapiens
  siRNA target sequence for GNA15 (NM_002068.1,917-935).
cctcactgagtgaatacga

SEQ ID NO: 109117 - DNA, 19 bp, Homo sapiens
  siRNA target sequence for GNA15 (NM_002068.1,1006-1024).
gaactaccctggttcaaaa

SEQ ID NO: 109118 - DNA, 19 bp, Homo sapiens
  siRNA target sequence for GNA15 (NM_002068.1,1083-1101).
ctcccacctggctacctat

SEQ ID NO: 109119 - DNA, 19 bp, Homo sapiens
  siRNA target sequence for GNA15 (NM_002068.1,1085-1103).
cccacctggctacctattt

SEQ ID NO: 109120 - DNA, 19 bp, Homo sapiens
  siRNA target sequence for GNA15 (NM_002068.1,1148-1166).
ggttcatcctggacatgta

SEQ ID NO: 109121 - DNA, 19 bp, Homo sapiens
  siRNA target sequence for GNAI1 (NM_002069.4,371-389).
gcggtggagcggagtaaga

SEQ ID NO: 109122 - DNA, 19 bp, Homo sapiens
  siRNA target sequence for GNAI1 (NM_002069.4,372-390).
cggtggagcggagtaagat

SEQ ID NO: 109123 - DNA, 19 bp, Homo sapiens
  siRNA target sequence for GNAI1 (NM_002069.4,505-523).
ccatgaagctggttattca

SEQ ID NO: 109124 - DNA, 19 bp, Homo sapiens
  siRNA target sequence for GNAI1 (NM_002069.4,527-545).
gaggagtgtaaacaataca

SEQ ID NO: 109125 - DNA, 19 bp, Homo sapiens
  siRNA target sequence for GNAI1 (NM_002069.4,529-547).
ggagtgtaaacaatacaaa

SEQ ID NO: 109126 - DNA, 19 bp, Homo sapiens
  siRNA target sequence for GNAI1 (NM_002069.4,548-566).
gcagtggtctacagtaaca

SEQ ID NO: 109127 - DNA, 19 bp, Homo sapiens
  siRNA target sequence for GNAI1 (NM_002069.4,675-693).
ctgctgaagaaggctttat

SEQ ID NO: 109128 - DNA, 19 bp, Homo sapiens
  siRNA target sequence for GNAI1 (NM_002069.4,701-719).
gaacttgctggagttataa

SEQ ID NO: 109129 - DNA, 19 bp, Homo sapiens
  siRNA target sequence for GNAI1 (NM_002069.4,730-748).
gaaagatagtggtgtacaa

SEQ ID NO: 109130 - DNA, 19 bp, Homo sapiens
  siRNA target sequence for GNAI1 (NM_002069.4,740-758).
ggtgtacaagcctgtttca

SEQ ID NO: 109131 - DNA, 19 bp, Homo sapiens
  siRNA target sequence for GNAI1 (NM_002069.4,765-783).
cccgagagtaccagcttaa

SEQ ID NO: 109132 - DNA, 19 bp, Homo sapiens
  siRNA target sequence for GNAI1 (NM_002069.4,766-784).
ccgagagtaccagcttaat

SEQ ID NO: 109133 - DNA, 19 bp, Homo sapiens
  siRNA target sequence for GNAI1 (NM_002069.4,785-803).
gattctgcagcatactatt

SEQ ID NO: 109134 - DNA, 19 bp, Homo sapiens
  siRNA target sequence for GNAI1 (NM_002069.4,789-807).
ctgcagcatactatttgaa

SEQ ID NO: 109135 - DNA, 19 bp, Homo sapiens
  siRNA target sequence for GNAI1 (NM_002069.4,792-810).
cagcatactatttgaatga

SEQ ID NO: 109136 - DNA, 19 bp, Homo sapiens
  siRNA target sequence for GNAI1 (NM_002069.4,794-812).
gcatactatttgaatgact

SEQ ID NO: 109137 - DNA, 19 bp, Homo sapiens
  siRNA target sequence for GNAI1 (NM_002069.4,795-813).
catactatttgaatgactt

SEQ ID NO: 109138 - DNA, 19 bp, Homo sapiens
  siRNA target sequence for GNAI1 (NM_002069.4,841-859).
cccgactcaacaagatgtt

SEQ ID NO: 109139 - DNA, 19 bp, Homo sapiens
  siRNA target sequence for GNAI1 (NM_002069.4,890-908).
gttgaaacccattttactt

SEQ ID NO: 109140 - DNA, 19 bp, Homo sapiens
  siRNA target sequence for GNAI1 (NM_002069.4,986-1004).
ggagtgacggcgatcatct

SEQ ID NO: 109141 - DNA, 19 bp, Homo sapiens
  siRNA target sequence for GNAI1 (NM_002069.4,987-1005).
gagtgacggcgatcatctt

SEQ ID NO: 109142 - DNA, 19 bp, Homo sapiens
  siRNA target sequence for GNAI1 (NM_002069.4,989-1007).
gtgacggcgatcatcttct

SEQ ID NO: 109143 - DNA, 19 bp, Homo sapiens
  siRNA target sequence for GNAI1 (NM_002069.4,1030-1048).
cctggttctagctgaagat

SEQ ID NO: 109144 - DNA, 19 bp, Homo sapiens
  siRNA target sequence for GNAI1 (NM_002069.4,1105-1123).
caagtggtttacagataca

SEQ ID NO: 109145 - DNA, 19 bp, Homo sapiens
  siRNA target sequence for GNAI1 (NM_002069.4,1179-1197).
gccctctcactatatgcta

SEQ ID NO: 109146 - DNA, 19 bp, Homo sapiens
  siRNA target sequence for GNAI1 (NM_002069.4,1180-1198).
ccctctcactatatgctat

SEQ ID NO: 109147 - DNA, 19 bp, Homo sapiens
  siRNA target sequence for GNAI2 (NM_002070.1,160-178).
gccgagcgctctaagatga

SEQ ID NO: 109148 - DNA, 19 bp, Homo sapiens
  siRNA target sequence for GNAI2 (NM_002070.1,161-179).
ccgagcgctctaagatgat

SEQ ID NO: 109149 - DNA, 19 bp, Homo sapiens
  siRNA target sequence for GNAI2 (NM_002070.1,432-450).
cgccaggcagctatttgca

SEQ ID NO: 109150 - DNA, 19 bp, Homo sapiens
  siRNA target sequence for GNAI2 (NM_002070.1,548-566).
gccgctcaagggaatacca

SEQ ID NO: 109151 - DNA, 19 bp, Homo sapiens
  siRNA target sequence for GNAI2 (NM_002070.1,597-615).
cgacctggagcgtattgca

SEQ ID NO: 109152 - DNA, 19 bp, Homo sapiens
  siRNA target sequence for GNAI2 (NM_002070.1,649-667).
ctacggacccgcgtaaaga

SEQ ID NO: 109153 - DNA, 19 bp, Homo sapiens
  siRNA target sequence for GNAI2 (NM_002070.1,993-1011).
gtacacaggggccaacaaa

SEQ ID NO: 109154 - DNA, 19 bp, Homo sapiens
  siRNA target sequence for GNAI2 (NM_002070.1,1025-1043).
ccagctacatccagagtaa

SEQ ID NO: 109155 - DNA, 19 bp, Homo sapiens
  siRNA target sequence for GNAI2 (NM_002070.1,1054-1072).
ctgaataagcgcaaagaca

SEQ ID NO: 109156 - DNA, 19 bp, Homo sapiens
  siRNA target sequence for GNAI3 (NM_006496.1,232-250).
gatgaatgtaaacaatata

SEQ ID NO: 109157 - DNA, 19 bp, Homo sapiens
  siRNA target sequence for GNAI3 (NM_006496.1,253-271).
gtagttgtctacagcaata

SEQ ID NO: 109158 - DNA, 19 bp, Homo sapiens
  siRNA target sequence for GNAI3 (NM_006496.1,279-297).
gtccatcattgcaatcata

SEQ ID NO: 109159 - DNA, 19 bp, Homo sapiens
  siRNA target sequence for GNAI3 (NM_006496.1,282-300).
catcattgcaatcataaga

SEQ ID NO: 109160 - DNA, 19 bp, Homo sapiens
  siRNA target sequence for GNAI3 (NM_006496.1,301-319).
gccatgggacggctaaaga

SEQ ID NO: 109161 - DNA, 19 bp, Homo sapiens
  siRNA target sequence for GNAI3 (NM_006496.1,302-320).
ccatgggacggctaaagat

SEQ ID NO: 109162 - DNA, 19 bp, Homo sapiens
  siRNA target sequence for GNAI3 (NM_006496.1,303-321).
catgggacggctaaagatt

SEQ ID NO: 109163 - DNA, 19 bp, Homo sapiens
  siRNA target sequence for GNAI3 (NM_006496.1,307-325).
ggacggctaaagattgact

SEQ ID NO: 109164 - DNA, 19 bp, Homo sapiens
  siRNA target sequence for GNAI3 (NM_006496.1,308-326).
gacggctaaagattgactt

SEQ ID NO: 109165 - DNA, 19 bp, Homo sapiens
  siRNA target sequence for GNAI3 (NM_006496.1,406-424).
gaactagcaggagtgatta

SEQ ID NO: 109166 - DNA, 19 bp, Homo sapiens
  siRNA target sequence for GNAI3 (NM_006496.1,497-515).
cttcatattatctaaatga

SEQ ID NO: 109167 - DNA, 19 bp, Homo sapiens
  siRNA target sequence for GNAI3 (NM_006496.1,500-518).
catattatctaaatgatct

SEQ ID NO: 109168 - DNA, 19 bp, Homo sapiens
  siRNA target sequence for GNAI3 (NM_006496.1,579-597).
gaagaccacaggcattgta

SEQ ID NO: 109169 - DNA, 19 bp, Homo sapiens
  siRNA target sequence for GNAI3 (NM_006496.1,691-709).
ggagtgacagcaattatct

SEQ ID NO: 109170 - DNA, 19 bp, Homo sapiens
  siRNA target sequence for GNAI3 (NM_006496.1,692-710).
gagtgacagcaattatctt

SEQ ID NO: 109171 - DNA, 19 bp, Homo sapiens
  siRNA target sequence for GNAI3 (NM_006496.1,713-731).
gtgtggccctcagtgatta

SEQ ID NO: 109172 - DNA, 19 bp, Homo sapiens
  siRNA target sequence for GNAI3 (NM_006496.1,725-743).
gtgattatgaccttgttct

SEQ ID NO: 109173 - DNA, 19 bp, Homo sapiens
  siRNA target sequence for GNAI3 (NM_006496.1,810-828).
caaatggtttacagaaact

SEQ ID NO: 109174 - DNA, 19 bp, Homo sapiens
  siRNA target sequence for GNAI3 (NM_006496.1,821-839).
cagaaacttcaatcattct

SEQ ID NO: 109175 - DNA, 19 bp, Homo sapiens
  siRNA target sequence for GNAI3 (NM_006496.1,823-841).
gaaacttcaatcattctct

SEQ ID NO: 109176 - DNA, 19 bp, Homo sapiens
  siRNA target sequence for GNAI3 (NM_006496.1,882-900).
gagtccgttaactatctgt

SEQ ID NO: 109177 - DNA, 19 bp, Homo sapiens
  siRNA target sequence for GNAI3 (NM_006496.1,884-902).
gtccgttaactatctgtta

SEQ ID NO: 109178 - DNA, 19 bp, Homo sapiens
  siRNA target sequence for GNAI3 (NM_006496.1,888-906).
gttaactatctgttatcca

SEQ ID NO: 109179 - DNA, 19 bp, Homo sapiens
  siRNA target sequence for GNAI3 (NM_006496.1,912-930).
cacaggttccaatacatat

SEQ ID NO: 109180 - DNA, 19 bp, Homo sapiens
  siRNA target sequence for GNAI3 (NM_006496.1,917-935).
gttccaatacatatgaaga

SEQ ID NO: 109181 - DNA, 19 bp, Homo sapiens
  siRNA target sequence for GNAL (NM_002071.1,292-310).
gaccagggcgtcgatgaaa

SEQ ID NO: 109182 - DNA, 19 bp, Homo sapiens
  siRNA target sequence for GNAL (NM_002071.1,294-312).
ccagggcgtcgatgaaaaa

SEQ ID NO: 109183 - DNA, 19 bp, Homo sapiens
  siRNA target sequence for GNAL (NM_002071.1,297-315).
gggcgtcgatgaaaaagaa

SEQ ID NO: 109184 - DNA, 19 bp, Homo sapiens
  siRNA target sequence for GNAL (NM_002071.1,496-514).
gacatccggaaaaatgtta

SEQ ID NO: 109185 - DNA, 19 bp, Homo sapiens
  siRNA target sequence for GNAL (NM_002071.1,498-516).
catccggaaaaatgttaaa

SEQ ID NO: 109186 - DNA, 19 bp, Homo sapiens
  siRNA target sequence for GNAL (NM_002071.1,501-519).
ccggaaaaatgttaaagat

SEQ ID NO: 109187 - DNA, 19 bp, Homo sapiens
  siRNA target sequence for GNAL (NM_002071.1,535-553).
gtttcagcaatgagtacta

SEQ ID NO: 109188 - DNA, 19 bp, Homo sapiens
  siRNA target sequence for GNAL (NM_002071.1,595-613).
cgatcagactacatcaaga

SEQ ID NO: 109189 - DNA, 19 bp, Homo sapiens
  siRNA target sequence for GNAL (NM_002071.1,612-630).
gagcatagcccctatcact

SEQ ID NO: 109190 - DNA, 19 bp, Homo sapiens
  siRNA target sequence for GNAL (NM_002071.1,621-639).
ccctatcactgactttgaa

SEQ ID NO: 109191 - DNA, 19 bp, Homo sapiens
  siRNA target sequence for GNAL (NM_002071.1,658-676).
gaccatgtgaaaaaacttt

SEQ ID NO: 109192 - DNA, 19 bp, Homo sapiens
  siRNA target sequence for GNAL (NM_002071.1,691-709).
gtgaaggcatgctttgaga

SEQ ID NO: 109193 - DNA, 19 bp, Homo sapiens
  siRNA target sequence for GNAL (NM_002071.1,767-785).
gcgtcagcttggttgacta

SEQ ID NO: 109194 - DNA, 19 bp, Homo sapiens
  siRNA target sequence for GNAL (NM_002071.1,933-951).
cgatgtcacagctatcatt

SEQ ID NO: 109195 - DNA, 19 bp, Homo sapiens
  siRNA target sequence for GNAL (NM_002071.1,934-952).
gatgtcacagctatcattt

SEQ ID NO: 109196 - DNA, 19 bp, Homo sapiens
  siRNA target sequence for GNAL (NM_002071.1,978-996).
catggtgattcgagaagat

SEQ ID NO: 109197 - DNA, 19 bp, Homo sapiens
  siRNA target sequence for GNAL (NM_002071.1,1056-1074).
gtggttacggaccatttct

SEQ ID NO: 109198 - DNA, 19 bp, Homo sapiens
  siRNA target sequence for GNAL (NM_002071.1,1058-1076).
ggttacggaccatttctat

SEQ ID NO: 109199 - DNA, 19 bp, Homo sapiens
  siRNA target sequence for GNAL (NM_002071.1,1063-1081).
cggaccatttctatcatct

SEQ ID NO: 109200 - DNA, 19 bp, Homo sapiens
  siRNA target sequence for GNAL (NM_002071.1,1073-1091).
ctatcatcttgttcttgaa

SEQ ID NO: 109201 - DNA, 19 bp, Homo sapiens
  siRNA target sequence for GNAL (NM_002071.1,1083-1101).
gttcttgaacaaacaagat

SEQ ID NO: 109202 - DNA, 19 bp, Homo sapiens
  siRNA target sequence for GNAL (NM_002071.1,1117-1135).
gtcttggcagggaaatcaa

SEQ ID NO: 109203 - DNA, 19 bp, Homo sapiens
  siRNA target sequence for GNAL (NM_002071.1,1216-1234).
gttacaagagccaagttct

SEQ ID NO: 109204 - DNA, 19 bp, Homo sapiens
  siRNA target sequence for GNAL (NM_002071.1,1269-1287).
caccggtgacggcaaacat

SEQ ID NO: 109205 - DNA, 19 bp, Homo sapiens
  siRNA target sequence for GNAL (NM_002071.1,1271-1289).
ccggtgacggcaaacatta

SEQ ID NO: 109206 - DNA, 19 bp, Homo sapiens
  siRNA target sequence for GNAL (NM_002071.1,1273-1291).
ggtgacggcaaacattact

SEQ ID NO: 109207 - DNA, 19 bp, Homo sapiens
  siRNA target sequence for GNAO1 (NM_020988.1,47-65).
gcaaggcgattgagaaaaa

SEQ ID NO: 109208 - DNA, 19 bp, Homo sapiens
  siRNA target sequence for GNAO1 (NM_020988.1,185-203).
ccggagaagacgtgaaaca

SEQ ID NO: 109209 - DNA, 19 bp, Homo sapiens
  siRNA target sequence for GNAO1 (NM_020988.1,187-205).
ggagaagacgtgaaacagt

SEQ ID NO: 109210 - DNA, 19 bp, Homo sapiens
  siRNA target sequence for GNAO1 (NM_020988.1,265-283).
gacactttgggcatcgaat

SEQ ID NO: 109211 - DNA, 19 bp, Homo sapiens
  siRNA target sequence for GNAO1 (NM_020988.1,267-285).
cactttgggcatcgaatat

SEQ ID NO: 109212 - DNA, 19 bp, Homo sapiens
  siRNA target sequence for GNAO1 (NM_020988.1,275-293).
gcatcgaatatggtgataa

SEQ ID NO: 109213 - DNA, 19 bp, Homo sapiens
  siRNA target sequence for GNAO1 (NM_020988.1,396-414).
gggcgactcaggaatccaa

SEQ ID NO: 109214 - DNA, 19 bp, Homo sapiens
  siRNA target sequence for GNAO1 (NM_020988.1,556-574).
gtagaaacccacttcacat

SEQ ID NO: 109215 - DNA, 19 bp, Homo sapiens
  siRNA target sequence for GNAO1 (NM_020988.1,616-634).
cgatctgaacgcaagaagt

SEQ ID NO: 109216 - DNA, 19 bp, Homo sapiens
  siRNA target sequence for GNAO1 (NM_020988.1,651-669).
ggacgtcacggccatcatt

SEQ ID NO: 109217 - DNA, 19 bp, Homo sapiens
  siRNA target sequence for GNAO1 (NM_020988.1,652-670).
gacgtcacggccatcattt

SEQ ID NO: 109218 - DNA, 19 bp, Homo sapiens
  siRNA target sequence for GNAO1 (NM_020988.1,764-782).
gtaacaacaagttcttcat

SEQ ID NO: 109219 - DNA, 19 bp, Homo sapiens
  siRNA target sequence for GNAO1 (NM_020988.1,780-798).
catcgatacctccatcatt

SEQ ID NO: 109220 - DNA, 19 bp, Homo sapiens
  siRNA target sequence for GNAO1 (NM_020988.1,878-896).
gccccaatacctatgaaga

SEQ ID NO: 109221 - DNA, 19 bp, Homo sapiens
  siRNA target sequence for GNAO1 (NM_020988.1,905-923).
cctacatccaagcacaatt

SEQ ID NO: 109222 - DNA, 19 bp, Homo sapiens
  siRNA target sequence for GNAO1 (NM_020988.1,906-924).
ctacatccaagcacaattt

SEQ ID NO: 109223 - DNA, 19 bp, Homo sapiens
  siRNA target sequence for GNAS (NM_000516.3,51-69).
ggctgcctcgggaacagta

SEQ ID NO: 109224 - DNA, 19 bp, Homo sapiens
  siRNA target sequence for GNAS (NM_000516.3,341-359).
cctgaaagaggcgattgaa

SEQ ID NO: 109225 - DNA, 19 bp, Homo sapiens
  siRNA target sequence for GNAS (NM_000516.3,342-360).
ctgaaagaggcgattgaaa

SEQ ID NO: 109226 - DNA, 19 bp, Homo sapiens
  siRNA target sequence for GNAS (NM_000516.3,449-467).
gatgaacgtgcctgacttt

SEQ ID NO: 109227 - DNA, 19 bp, Homo sapiens
  siRNA target sequence for GNAS (NM_000516.3,599-617).
gatcaagcaggctgactat

SEQ ID NO: 109228 - DNA, 19 bp, Homo sapiens
  siRNA target sequence for GNAS (NM_000516.3,987-1005).
gaatttgctcgctacacta

SEQ ID NO: 109229 - DNA, 19 bp, Homo sapiens
  siRNA target sequence for GNAS (NM_000516.3,1064-1082).
cttcattcgagatgagttt

SEQ ID NO: 109230 - DNA, 19 bp, Homo sapiens
  siRNA target sequence for GNAS (NM_016592.1,399-417).
gccgagctcgccataatta

SEQ ID NO: 109231 - DNA, 19 bp, Homo sapiens
  siRNA target sequence for GNAS (NM_016592.1,401-419).
cgagctcgccataattaca

SEQ ID NO: 109232 - DNA, 19 bp, Homo sapiens
  siRNA target sequence for GNAS (NM_016592.1,402-420).
gagctcgccataattacaa

SEQ ID NO: 109233 - DNA, 19 bp, Homo sapiens
  siRNA target sequence for GNAS (NM_016592.1,603-621).
cccccgaatcggaatctga

SEQ ID NO: 109234 - DNA, 19 bp, Homo sapiens
  siRNA target sequence for GNAS (NM_016592.1,852-870).
gtctgcacgctctcaagtt

SEQ ID NO: 109235 - DNA, 19 bp, Homo sapiens
  siRNA target sequence for GNAS (NM_080425.1,135-153).
ctgcagtcaacttctctta

SEQ ID NO: 109236 - DNA, 19 bp, Homo sapiens
  siRNA target sequence for GNAS (NM_080425.1,137-155).
gcagtcaacttctcttaca

SEQ ID NO: 109237 - DNA, 19 bp, Homo sapiens
  siRNA target sequence for GNAS (NM_080425.1,479-497).
ctgtcagacctccttctaa

SEQ ID NO: 109238 - DNA, 19 bp, Homo sapiens
  siRNA target sequence for GNAS (NM_080425.1,481-499).
gtcagacctccttctaact

SEQ ID NO: 109239 - DNA, 19 bp, Homo sapiens
  siRNA target sequence for GNAS (NM_080425.1,636-654).
cggagccccagataagaga

SEQ ID NO: 109240 - DNA, 19 bp, Homo sapiens
  siRNA target sequence for GNAS (NM_080425.1,1431-1449).
caacttactccgcaacttt

SEQ ID NO: 109241 - DNA, 19 bp, Homo sapiens
  siRNA target sequence for GNAS (NM_080425.1,1613-1631).
gtaagctcatcgacaaaca

SEQ ID NO: 109242 - DNA, 19 bp, Homo sapiens
  siRNA target sequence for GNAT1 (NM_000172.2,506-524).
cggtatccaggcctgtttt

SEQ ID NO: 109243 - DNA, 19 bp, Homo sapiens
  siRNA target sequence for GNAT1 (NM_000172.2,508-526).
gtatccaggcctgttttga

SEQ ID NO: 109244 - DNA, 19 bp, Homo sapiens
  siRNA target sequence for GNAT1 (NM_000172.2,921-939).
gtcttcttcgagaagatca

SEQ ID NO: 109245 - DNA, 19 bp, Homo sapiens
  siRNA target sequence for GNAT1 (NM_000172.2,946-964).
cgcacctcagcatctgttt

SEQ ID NO: 109246 - DNA, 19 bp, Homo sapiens
  siRNA target sequence for GNAT2 (NM_005272.2,257-275).
ggtccaaggagctagaaaa

SEQ ID NO: 109247 - DNA, 19 bp, Homo sapiens
  siRNA target sequence for GNAT2 (NM_005272.2,391-409).
ggctattcaccagaagaat

SEQ ID NO: 109248 - DNA, 19 bp, Homo sapiens
  siRNA target sequence for GNAT2 (NM_005272.2,423-441).
ggctatcatctatggaaat

SEQ ID NO: 109249 - DNA, 19 bp, Homo sapiens
  siRNA target sequence for GNAT2 (NM_005272.2,480-498).
cacactgggcatcgattat

SEQ ID NO: 109250 - DNA, 19 bp, Homo sapiens
  siRNA target sequence for GNAT2 (NM_005272.2,580-598).
ctcgtggaggtcattagga

SEQ ID NO: 109251 - DNA, 19 bp, Homo sapiens
  siRNA target sequence for GNAT2 (NM_005272.2,671-689).
cttactacctgaaccaatt

SEQ ID NO: 109252 - DNA, 19 bp, Homo sapiens
  siRNA target sequence for GNAT2 (NM_005272.2,681-699).
gaaccaattagaacgaatt

SEQ ID NO: 109253 - DNA, 19 bp, Homo sapiens
  siRNA target sequence for GNAT2 (NM_005272.2,782-800).
ccgtcaaagacttgaattt

SEQ ID NO: 109254 - DNA, 19 bp, Homo sapiens
  siRNA target sequence for GNAT2 (NM_005272.2,784-802).
gtcaaagacttgaatttca

SEQ ID NO: 109255 - DNA, 19 bp, Homo sapiens
  siRNA target sequence for GNAT2 (NM_005272.2,922-940).
gatgacgaagtgaatcgta

SEQ ID NO: 109256 - DNA, 19 bp, Homo sapiens
  siRNA target sequence for GNAT2 (NM_005272.2,927-945).
cgaagtgaatcgtatgcat

SEQ ID NO: 109257 - DNA, 19 bp, Homo sapiens
  siRNA target sequence for GNAT2 (NM_005272.2,987-1005).
ctttgcggctacttccatt

SEQ ID NO: 109258 - DNA, 19 bp, Homo sapiens
  siRNA target sequence for GNAT2 (NM_005272.2,1076-1094).
cagagtatgatggtaacaa

SEQ ID NO: 109259 - DNA, 19 bp, Homo sapiens
  siRNA target sequence for GNAT2 (NM_005272.2,1105-1123).
gatgcggggaattacataa

SEQ ID NO: 109260 - DNA, 19 bp, Homo sapiens
  siRNA target sequence for GNAT2 (NM_005272.2,1140-1158).
cctcaatatgcgaaaagat

SEQ ID NO: 109261 - DNA, 19 bp, Homo sapiens
  siRNA target sequence for GNAT2 (NM_005272.2,1149-1167).
gcgaaaagatgtcaaagaa

SEQ ID NO: 109262 - DNA, 19 bp, Homo sapiens
  siRNA target sequence for GNAZ (NM_002073.1,222-240).
gcccctcatcatctacaat

SEQ ID NO: 109263 - DNA, 19 bp, Homo sapiens
  siRNA target sequence for GNAZ (NM_002073.1,921-939).
catccagcggcagtttgaa

SEQ ID NO: 109264 - DNA, 19 bp, Homo sapiens
  siRNA target sequence for GNAZ (NM_002073.1,991-1009).
gccaccgacaccagtaaca

SEQ ID NO: 109265 - DNA, 19 bp, Homo sapiens
  siRNA target sequence for GNAZ (NM_002073.1,992-1010).
ccaccgacaccagtaacat

SEQ ID NO: 109266 - DNA, 19 bp, Homo sapiens
  siRNA target sequence for GNAZ (NM_002073.1,1029-1047).
ggtgacagacgtcatcata

SEQ ID NO: 109267 - DNA, 19 bp, Homo sapiens
  siRNA target sequence for GNAZ (NM_002073.1,1038-1056).
cgtcatcatacagaacaat

SEQ ID NO: 109268 - DNA, 19 bp, Homo sapiens
  siRNA target sequence for GNAZ (NM_002073.1,1050-1068).
gaacaatctcaagtacatt

SEQ ID NO: 109269 - DNA, 19 bp, Homo sapiens
  siRNA target sequence for GNL1 (NM_005275.2,1188-1206).
gagtctgtgacccatcata

SEQ ID NO: 109270 - DNA, 19 bp, Homo sapiens
  siRNA target sequence for GNL1 (NM_005275.2,1251-1269).
ggctacgacccaaatcgat

SEQ ID NO: 109271 - DNA, 19 bp, Homo sapiens
  siRNA target sequence for GNL1 (NM_005275.2,1252-1270).
gctacgacccaaatcgata

SEQ ID NO: 109272 - DNA, 19 bp, Homo sapiens
  siRNA target sequence for GNL1 (NM_005275.2,1267-1285).
gataccgactgcattttga

SEQ ID NO: 109273 - DNA, 19 bp, Homo sapiens
  siRNA target sequence for GNL1 (NM_005275.2,1511-1529).
ggcttactcctctgagaaa

SEQ ID NO: 109274 - DNA, 19 bp, Homo sapiens
  siRNA target sequence for GNL1 (NM_005275.2,1534-1552).
gctactttgagcacaatct

SEQ ID NO: 109275 - DNA, 19 bp, Homo sapiens
  siRNA target sequence for GNL1 (NM_005275.2,1569-1587).
ctgtggcgggtgttagaga

SEQ ID NO: 109276 - DNA, 19 bp, Homo sapiens
  siRNA target sequence for GNL1 (NM_005275.2,1619-1637).
ccgacatccagttgtgaat

SEQ ID NO: 109277 - DNA, 19 bp, Homo sapiens
  siRNA target sequence for GNL1 (NM_005275.2,1620-1638).
cgacatccagttgtgaatt

SEQ ID NO: 109278 - DNA, 19 bp, Homo sapiens
  siRNA target sequence for GNL1 (NM_005275.2,1647-1665).
gcactttatgagtatgtga

SEQ ID NO: 109279 - DNA, 19 bp, Homo sapiens
  siRNA target sequence for GNL1 (NM_005275.2,1731-1749).
gtggttgcctggaagcatt

SEQ ID NO: 109280 - DNA, 19 bp, Homo sapiens
  siRNA target sequence for GNL1 (NM_005275.2,1733-1751).
ggttgcctggaagcattat

SEQ ID NO: 109281 - DNA, 19 bp, Homo sapiens
  siRNA target sequence for GNL1 (NM_005275.2,1773-1791).
ctccacgtcgtccttttca

SEQ ID NO: 109282 - DNA, 19 bp, Homo sapiens
  siRNA target sequence for GNL1 (NM_005275.2,1781-1799).
cgtccttttcacctctttt

SEQ ID NO: 109283 - DNA, 19 bp, Homo sapiens
  siRNA target sequence for GNL1 (NM_005275.2,1827-1845).
cctagtagtgtcttgaaga

SEQ ID NO: 109284 - DNA, 19 bp, Homo sapiens
  siRNA target sequence for GNL1 (NM_005275.2,1828-1846).
ctagtagtgtcttgaagaa

SEQ ID NO: 109285 - DNA, 19 bp, Homo sapiens
  siRNA target sequence for GNL1 (NM_005275.2,1943-1961).
cagctggcgggagaagatt

SEQ ID NO: 109286 - DNA, 19 bp, Homo sapiens
  siRNA target sequence for GNL1 (NM_005275.2,2122-2140).
gtgtgggtttccctaatgt

SEQ ID NO: 109287 - DNA, 19 bp, Homo sapiens
  siRNA target sequence for GNL1 (NM_005275.2,2206-2224).
gccatacccgatactttca

SEQ ID NO: 109288 - DNA, 19 bp, Homo sapiens
  siRNA target sequence for GNL1 (NM_005275.2,2501-2519).
caaggcggctcggaatgat

SEQ ID NO: 109289 - DNA, 19 bp, Homo sapiens
  siRNA target sequence for GNL1 (NM_005275.2,2506-2524).
cggctcggaatgatgtgta

SEQ ID NO: 109290 - DNA, 19 bp, Homo sapiens
  siRNA target sequence for GTPBP4 (NM_012341.1,61-79).
cgtccgccaaggacttcat

SEQ ID NO: 109291 - DNA, 19 bp, Homo sapiens
  siRNA target sequence for GTPBP4 (NM_012341.1,118-136).
ccgttattcataaacatta

SEQ ID NO: 109292 - DNA, 19 bp, Homo sapiens
  siRNA target sequence for GTPBP4 (NM_012341.1,137-155).
ccaaatacatcgcattaga

SEQ ID NO: 109293 - DNA, 19 bp, Homo sapiens
  siRNA target sequence for GTPBP4 (NM_012341.1,147-165).
cgcattagacatttttaca

SEQ ID NO: 109294 - DNA, 19 bp, Homo sapiens
  siRNA target sequence for GTPBP4 (NM_012341.1,186-204).
caacagaattaccatgata

SEQ ID NO: 109295 - DNA, 19 bp, Homo sapiens
  siRNA target sequence for GTPBP4 (NM_012341.1,191-209).
gaattaccatgatagactt

SEQ ID NO: 109296 - DNA, 19 bp, Homo sapiens
  siRNA target sequence for GTPBP4 (NM_012341.1,211-229).
cacaaattctaacagattt

SEQ ID NO: 109297 - DNA, 19 bp, Homo sapiens
  siRNA target sequence for GTPBP4 (NM_012341.1,232-250).
ccaaattggatgatattca

SEQ ID NO: 109298 - DNA, 19 bp, Homo sapiens
  siRNA target sequence for GTPBP4 (NM_012341.1,252-270).
ccgttctatgctgatttga

SEQ ID NO: 109299 - DNA, 19 bp, Homo sapiens
  siRNA target sequence for GTPBP4 (NM_012341.1,253-271).
cgttctatgctgatttgat

SEQ ID NO: 109300 - DNA, 19 bp, Homo sapiens
  siRNA target sequence for GTPBP4 (NM_012341.1,279-297).
ctctacgacaaggatcatt

SEQ ID NO: 109301 - DNA, 19 bp, Homo sapiens
  siRNA target sequence for GTPBP4 (NM_012341.1,285-303).
gacaaggatcattacaagt

SEQ ID NO: 109302 - DNA, 19 bp, Homo sapiens
  siRNA target sequence for GTPBP4 (NM_012341.1,302-320).
gttggctctggggcaaata

SEQ ID NO: 109303 - DNA, 19 bp, Homo sapiens
  siRNA target sequence for GTPBP4 (NM_012341.1,306-324).
gctctggggcaaataaata

SEQ ID NO: 109304 - DNA, 19 bp, Homo sapiens
  siRNA target sequence for GTPBP4 (NM_012341.1,341-359).
ggacaatgttgctaaagat

SEQ ID NO: 109305 - DNA, 19 bp, Homo sapiens
  siRNA target sequence for GTPBP4 (NM_012341.1,342-360).
gacaatgttgctaaagatt

SEQ ID NO: 109306 - DNA, 19 bp, Homo sapiens
  siRNA target sequence for GTPBP4 (NM_012341.1,344-362).
caatgttgctaaagattat

SEQ ID NO: 109307 - DNA, 19 bp, Homo sapiens
  siRNA target sequence for GTPBP4 (NM_012341.1,479-497).
gcaagtgcgtcagcattta

SEQ ID NO: 109308 - DNA, 19 bp, Homo sapiens
  siRNA target sequence for GTPBP4 (NM_012341.1,480-498).
caagtgcgtcagcatttat

SEQ ID NO: 109309 - DNA, 19 bp, Homo sapiens
  siRNA target sequence for GTPBP4 (NM_012341.1,500-518).
ccgtttgccaaccattgat

SEQ ID NO: 109310 - DNA, 19 bp, Homo sapiens
  siRNA target sequence for GTPBP4 (NM_012341.1,623-641).
cacaaccaagtctctgttt

SEQ ID NO: 109311 - DNA, 19 bp, Homo sapiens
  siRNA target sequence for GTPBP4 (NM_012341.1,642-660).
gttgggcacatggattata

SEQ ID NO: 109312 - DNA, 19 bp, Homo sapiens
  siRNA target sequence for GTPBP4 (NM_012341.1,766-784).
gtgctgcggtcctgtatgt

SEQ ID NO: 109313 - DNA, 19 bp, Homo sapiens
  siRNA target sequence for GTPBP4 (NM_012341.1,769-787).
ctgcggtcctgtatgtgat

SEQ ID NO: 109314 - DNA, 19 bp, Homo sapiens
  siRNA target sequence for GTPBP4 (NM_012341.1,779-797).
gtatgtgatggatttgtct

SEQ ID NO: 109315 - DNA, 19 bp, Homo sapiens
  siRNA target sequence for GTPBP4 (NM_012341.1,850-868).
gacctctcttcatcaacaa

SEQ ID NO: 109316 - DNA, 19 bp, Homo sapiens
  siRNA target sequence for GTPBP4 (NM_012341.1,866-884).
caagcctctcatagttgta

SEQ ID NO: 109317 - DNA, 19 bp, Homo sapiens
  siRNA target sequence for GTPBP4 (NM_012341.1,875-893).
catagttgtagccaacaaa

SEQ ID NO: 109318 - DNA, 19 bp, Homo sapiens
  siRNA target sequence for GTPBP4 (NM_012341.1,958-976).
ctgaaggattccctgtaat

SEQ ID NO: 109319 - DNA, 19 bp, Homo sapiens
  siRNA target sequence for GTPBP4 (NM_012341.1,994-1012).
ctgaggaaggtgttattaa

SEQ ID NO: 109320 - DNA, 19 bp, Homo sapiens
  siRNA target sequence for GTPBP4 (NM_012341.1,999-1017).
gaaggtgttattaaagtta

SEQ ID NO: 109321 - DNA, 19 bp, Homo sapiens
  siRNA target sequence for GTPBP4 (NM_012341.1,1047-1065).
catcgagtggaaaccaaaa

SEQ ID NO: 109322 - DNA, 19 bp, Homo sapiens
  siRNA target sequence for GTPBP4 (NM_012341.1,1050-1068).
cgagtggaaaccaaaatga

SEQ ID NO: 109323 - DNA, 19 bp, Homo sapiens
  siRNA target sequence for GTPBP4 (NM_012341.1,1117-1135).
caaccaggagggacgataa

SEQ ID NO: 109324 - DNA, 19 bp, Homo sapiens
  siRNA target sequence for GTPBP4 (NM_012341.1,1120-1138).
ccaggagggacgataagga

SEQ ID NO: 109325 - DNA, 19 bp, Homo sapiens
  siRNA target sequence for GTPBP4 (NM_012341.1,1233-1251).
gaaatgggagatgattata

SEQ ID NO: 109326 - DNA, 19 bp, Homo sapiens
  siRNA target sequence for GTPBP4 (NM_012341.1,1268-1286).
gtactgggatttaatgaat

SEQ ID NO: 109327 - DNA, 19 bp, Homo sapiens
  siRNA target sequence for GTPBP4 (NM_012341.1,1302-1320).
gataagataccagaaatct

SEQ ID NO: 109328 - DNA, 19 bp, Homo sapiens
  siRNA target sequence for GTPBP4 (NM_012341.1,1319-1337).
ctgggaaggccataatata

SEQ ID NO: 109329 - DNA, 19 bp, Homo sapiens
  siRNA target sequence for GTPBP4 (NM_012341.1,1322-1340).
ggaaggccataatatagct

SEQ ID NO: 109330 - DNA, 19 bp, Homo sapiens
  siRNA target sequence for GTPBP4 (NM_012341.1,1327-1345).
gccataatatagctgatta

SEQ ID NO: 109331 - DNA, 19 bp, Homo sapiens
  siRNA target sequence for GTPBP4 (NM_012341.1,1328-1346).
ccataatatagctgattat

SEQ ID NO: 109332 - DNA, 19 bp, Homo sapiens
  siRNA target sequence for GTPBP4 (NM_012341.1,1413-1431).
ggagagtatgacagtgtat

SEQ ID NO: 109333 - DNA, 19 bp, Homo sapiens
  siRNA target sequence for GTPBP4 (NM_012341.1,1463-1481).
ccgacagctggcaaagcaa

SEQ ID NO: 109334 - DNA, 19 bp, Homo sapiens
  siRNA target sequence for GTPBP4 (NM_012341.1,1586-1604).
gaaggagatgcgtagtctt

SEQ ID NO: 109335 - DNA, 19 bp, Homo sapiens
  siRNA target sequence for GTPBP4 (NM_012341.1,1606-1624).
gtgttgacatggacgataa

SEQ ID NO: 109336 - DNA, 19 bp, Homo sapiens
  siRNA target sequence for GTPBP4 (NM_012341.1,1661-1679).
ccggagcatcactaggaaa

SEQ ID NO: 109337 - DNA, 19 bp, Homo sapiens
  siRNA target sequence for GTPBP4 (NM_012341.1,1662-1680).
cggagcatcactaggaaaa

SEQ ID NO: 109338 - DNA, 19 bp, Homo sapiens
  siRNA target sequence for GTPBP4 (NM_012341.1,1759-1777).
gtcttagggatgtcaagat

SEQ ID NO: 109339 - DNA, 19 bp, Homo sapiens
  siRNA target sequence for GTPBP4 (NM_012341.1,1846-1864).
cggatagacacgtgtttga

SEQ ID NO: 109340 - DNA, 19 bp, Homo sapiens
  siRNA target sequence for GTPBP4 (NM_012341.1,1848-1866).
gatagacacgtgtttgata

SEQ ID NO: 109341 - DNA, 19 bp, Homo sapiens
  siRNA target sequence for GTPBP5 (NM_015666.2,228-246).
gcacctgcaaggtgtttct

SEQ ID NO: 109342 - DNA, 19 bp, Homo sapiens
  siRNA target sequence for GTPBP5 (NM_015666.2,238-256).
ggtgtttctcagcaagatt

SEQ ID NO: 109343 - DNA, 19 bp, Homo sapiens
  siRNA target sequence for GTPBP5 (NM_015666.2,253-271).
gattgaggaccgtgtttca

SEQ ID NO: 109344 - DNA, 19 bp, Homo sapiens
  siRNA target sequence for GTPBP5 (NM_015666.2,614-632).
gcggtaccagggtttcagt

SEQ ID NO: 109345 - DNA, 19 bp, Homo sapiens
  siRNA target sequence for GTPBP5 (NM_015666.2,639-657).
gatggagggagtaaaaact

SEQ ID NO: 109346 - DNA, 19 bp, Homo sapiens
  siRNA target sequence for GTPBP5 (NM_015666.2,745-763).
cttgcgtgggagatgagta

SEQ ID NO: 109347 - DNA, 19 bp, Homo sapiens
  siRNA target sequence for GTPBP5 (NM_015666.2,1028-1046).
cgaaggccacctacaaata

SEQ ID NO: 109348 - DNA, 19 bp, Homo sapiens
  siRNA target sequence for GTPBP5 (NM_015666.2,1145-1163).
gttcgtggtggatctttct

SEQ ID NO: 109349 - DNA, 19 bp, Homo sapiens
  siRNA target sequence for GTPBP5 (NM_015666.2,1177-1195).
ggactcaagttgacgattt

SEQ ID NO: 109350 - DNA, 19 bp, Homo sapiens
  siRNA target sequence for GTPBP5 (NM_015666.2,1245-1263).
gcaatcgtcgcaaacaaga

SEQ ID NO: 109351 - DNA, 19 bp, Homo sapiens
  siRNA target sequence for GTPBP5 (NM_015666.2,1246-1264).
caatcgtcgcaaacaagat

SEQ ID NO: 109352 - DNA, 19 bp, Homo sapiens
  siRNA target sequence for GTPBP5 (NM_015666.2,1294-1312).
cccagctccgggatcactt

SEQ ID NO: 109353 - DNA, 19 bp, Homo sapiens
  siRNA target sequence for HRAS (NM_005343.1,90-108).
cgaatacgaccccactata

SEQ ID NO: 109354 - DNA, 19 bp, Homo sapiens
  siRNA target sequence for HUMAUANTIG (NM_013285.1,232-250).
cagtcgtggtaaaataatt

SEQ ID NO: 109355 - DNA, 19 bp, Homo sapiens
  siRNA target sequence for HUMAUANTIG (NM_013285.1,234-252).
gtcgtggtaaaataattaa

SEQ ID NO: 109356 - DNA, 19 bp, Homo sapiens
  siRNA target sequence for HUMAUANTIG (NM_013285.1,323-341).
ggaaacacacgtgtgatta

SEQ ID NO: 109357 - DNA, 19 bp, Homo sapiens
  siRNA target sequence for HUMAUANTIG (NM_013285.1,324-342).
gaaacacacgtgtgattaa

SEQ ID NO: 109358 - DNA, 19 bp, Homo sapiens
  siRNA target sequence for HUMAUANTIG (NM_013285.1,343-361).
gcagtcatcattacaaaaa

SEQ ID NO: 109359 - DNA, 19 bp, Homo sapiens
  siRNA target sequence for HUMAUANTIG (NM_013285.1,449-467).
cgaatccggcctcataact

SEQ ID NO: 109360 - DNA, 19 bp, Homo sapiens
  siRNA target sequence for HUMAUANTIG (NM_013285.1,472-490).
ggtgcacattcttgatact

SEQ ID NO: 109361 - DNA, 19 bp, Homo sapiens
  siRNA target sequence for HUMAUANTIG (NM_013285.1,526-544).
gaggaaacgaccaaactta

SEQ ID NO: 109362 - DNA, 19 bp, Homo sapiens
  siRNA target sequence for HUMAUANTIG (NM_013285.1,528-546).
ggaaacgaccaaacttatt

SEQ ID NO: 109363 - DNA, 19 bp, Homo sapiens
  siRNA target sequence for HUMAUANTIG (NM_013285.1,533-551).
cgaccaaacttatttgcaa

SEQ ID NO: 109364 - DNA, 19 bp, Homo sapiens
  siRNA target sequence for HUMAUANTIG (NM_013285.1,559-577).
gcagtctcttatcgaaaat

SEQ ID NO: 109365 - DNA, 19 bp, Homo sapiens
  siRNA target sequence for HUMAUANTIG (NM_013285.1,609-627).
gcaaggatcgtgatttggt

SEQ ID NO: 109366 - DNA, 19 bp, Homo sapiens
  siRNA target sequence for HUMAUANTIG (NM_013285.1,610-628).
caaggatcgtgatttggta

SEQ ID NO: 109367 - DNA, 19 bp, Homo sapiens
  siRNA target sequence for HUMAUANTIG (NM_013285.1,679-697).
gggacagtccaaaagaata

SEQ ID NO: 109368 - DNA, 19 bp, Homo sapiens
  siRNA target sequence for HUMAUANTIG (NM_013285.1,680-698).
ggacagtccaaaagaatat

SEQ ID NO: 109369 - DNA, 19 bp, Homo sapiens
  siRNA target sequence for HUMAUANTIG (NM_013285.1,706-724).
gctctacaaggtgatagat

SEQ ID NO: 109370 - DNA, 19 bp, Homo sapiens
  siRNA target sequence for HUMAUANTIG (NM_013285.1,707-725).
ctctacaaggtgatagatt

SEQ ID NO: 109371 - DNA, 19 bp, Homo sapiens
  siRNA target sequence for HUMAUANTIG (NM_013285.1,709-727).
ctacaaggtgatagattca

SEQ ID NO: 109372 - DNA, 19 bp, Homo sapiens
  siRNA target sequence for HUMAUANTIG (NM_013285.1,712-730).
caaggtgatagattcatca

SEQ ID NO: 109373 - DNA, 19 bp, Homo sapiens
  siRNA target sequence for HUMAUANTIG (NM_013285.1,715-733).
ggtgatagattcatcagat

SEQ ID NO: 109374 - DNA, 19 bp, Homo sapiens
  siRNA target sequence for HUMAUANTIG (NM_013285.1,718-736).
gatagattcatcagatgtt

SEQ ID NO: 109375 - DNA, 19 bp, Homo sapiens
  siRNA target sequence for HUMAUANTIG (NM_013285.1,776-794).
cgttcccctcacattgaaa

SEQ ID NO: 109376 - DNA, 19 bp, Homo sapiens
  siRNA target sequence for HUMAUANTIG (NM_013285.1,815-833).
ccttggaaacacctcattt

SEQ ID NO: 109377 - DNA, 19 bp, Homo sapiens
  siRNA target sequence for HUMAUANTIG (NM_013285.1,819-837).
ggaaacacctcatttttgt

SEQ ID NO: 109378 - DNA, 19 bp, Homo sapiens
  siRNA target sequence for HUMAUANTIG (NM_013285.1,820-838).
gaaacacctcatttttgta

SEQ ID NO: 109379 - DNA, 19 bp, Homo sapiens
  siRNA target sequence for HUMAUANTIG (NM_013285.1,893-911).
ctctcccaggattatccaa

SEQ ID NO: 109380 - DNA, 19 bp, Homo sapiens
  siRNA target sequence for HUMAUANTIG (NM_013285.1,898-916).
ccaggattatccaacactt

SEQ ID NO: 109381 - DNA, 19 bp, Homo sapiens
  siRNA target sequence for HUMAUANTIG (NM_013285.1,988-1006).
gttgcacactgacaagaaa

SEQ ID NO: 109382 - DNA, 19 bp, Homo sapiens
  siRNA target sequence for HUMAUANTIG (NM_013285.1,1009-1027).
gatcagtgttgggttcatt

SEQ ID NO: 109383 - DNA, 19 bp, Homo sapiens
  siRNA target sequence for HUMAUANTIG (NM_013285.1,1019-1037).
gggttcattggctatccaa

SEQ ID NO: 109384 - DNA, 19 bp, Homo sapiens
  siRNA target sequence for HUMAUANTIG (NM_013285.1,1020-1038).
ggttcattggctatccaaa

SEQ ID NO: 109385 - DNA, 19 bp, Homo sapiens
  siRNA target sequence for HUMAUANTIG (NM_013285.1,1021-1039).
gttcattggctatccaaat

SEQ ID NO: 109386 - DNA, 19 bp, Homo sapiens
  siRNA target sequence for HUMAUANTIG (NM_013285.1,1024-1042).
cattggctatccaaatgtt

SEQ ID NO: 109387 - DNA, 19 bp, Homo sapiens
  siRNA target sequence for HUMAUANTIG (NM_013285.1,1134-1152).
ctttgatgcgtcggatatt

SEQ ID NO: 109388 - DNA, 19 bp, Homo sapiens
  siRNA target sequence for HUMAUANTIG (NM_013285.1,1189-1207).
ggactccgagacagacatt

SEQ ID NO: 109389 - DNA, 19 bp, Homo sapiens
  siRNA target sequence for HUMAUANTIG (NM_013285.1,1277-1295).
cgagcaaagccagaatata

SEQ ID NO: 109390 - DNA, 19 bp, Homo sapiens
  siRNA target sequence for HUMAUANTIG (NM_013285.1,1442-1460).
cggattcctttctttgtca

SEQ ID NO: 109391 - DNA, 19 bp, Homo sapiens
  siRNA target sequence for HUMAUANTIG (NM_013285.1,1571-1589).
gcaggtgaagggtcagaat

SEQ ID NO: 109392 - DNA, 19 bp, Homo sapiens
  siRNA target sequence for HUMAUANTIG (NM_013285.1,1580-1598).
gggtcagaatccatcatta

SEQ ID NO: 109393 - DNA, 19 bp, Homo sapiens
  siRNA target sequence for HUMAUANTIG (NM_013285.1,1581-1599).
ggtcagaatccatcattaa

SEQ ID NO: 109394 - DNA, 19 bp, Homo sapiens
  siRNA target sequence for HUMAUANTIG (NM_013285.1,1584-1602).
cagaatccatcattaagga

SEQ ID NO: 109395 - DNA, 19 bp, Homo sapiens
  siRNA target sequence for HUMAUANTIG (NM_013285.1,1659-1677).
cacgagttcggcagaactt

SEQ ID NO: 109396 - DNA, 19 bp, Homo sapiens
  siRNA target sequence for HUMAUANTIG (NM_013285.1,1664-1682).
gttcggcagaactttggta

SEQ ID NO: 109397 - DNA, 19 bp, Homo sapiens
  siRNA target sequence for HUMAUANTIG (NM_013285.1,1668-1686).
ggcagaactttggtaaaat

SEQ ID NO: 109398 - DNA, 19 bp, Homo sapiens
  siRNA target sequence for HUMAUANTIG (NM_013285.1,1687-1705).
caacgtggtgcctcagttt

SEQ ID NO: 109399 - DNA, 19 bp, Homo sapiens
  siRNA target sequence for HUMAUANTIG (NM_013285.1,1853-1871).
gacaccaaagccgttatta

SEQ ID NO: 109400 - DNA, 19 bp, Homo sapiens
  siRNA target sequence for HUMAUANTIG (NM_013285.1,1855-1873).
caccaaagccgttattaaa

SEQ ID NO: 109401 - DNA, 19 bp, Homo sapiens
  siRNA target sequence for HUMAUANTIG (NM_013285.1,1938-1956).
cagcagtcagaatatccaa

SEQ ID NO: 109402 - DNA, 19 bp, Homo sapiens
  siRNA target sequence for HUMAUANTIG (NM_013285.1,1959-1977).
gactgagtgaaaagatatt

SEQ ID NO: 109403 - DNA, 19 bp, Homo sapiens
  siRNA target sequence for HUMAUANTIG (NM_013285.1,2024-2042).
gacagagcaccttccaaaa

SEQ ID NO: 109404 - DNA, 19 bp, Homo sapiens
  siRNA target sequence for HUMAUANTIG (NM_013285.1,2096-2114).
gctcccagggcgcttacat

SEQ ID NO: 109405 - DNA, 19 bp, Homo sapiens
  siRNA target sequence for HUMAUANTIG (NM_013285.1,2101-2119).
cagggcgcttacatcaaaa

SEQ ID NO: 109406 - DNA, 19 bp, Homo sapiens
  siRNA target sequence for HUMAUANTIG (NM_013285.1,2104-2122).
ggcgcttacatcaaaagaa

SEQ ID NO: 109407 - DNA, 19 bp, Homo sapiens
  siRNA target sequence for HUMAUANTIG (NM_013285.1,2139-2157).
gacagcaacggccgaaaaa

SEQ ID NO: 109408 - DNA, 19 bp, Homo sapiens
  siRNA target sequence for HUMAUANTIG (NM_013285.1,2143-2161).
gcaacggccgaaaaaagtt

SEQ ID NO: 109409 - DNA, 19 bp, Homo sapiens
  siRNA target sequence for HUMAUANTIG (NM_013285.1,2183-2201).
cacaacgtgaaaaatagga

SEQ ID NO: 109410 - DNA, 19 bp, Homo sapiens
  siRNA target sequence for KBRAS2 (NM_017595.4,306-324).
gagagcaggtgcgtttcta

SEQ ID NO: 109411 - DNA, 19 bp, Homo sapiens
  siRNA target sequence for KBRAS2 (NM_017595.4,311-329).
caggtgcgtttctatgaca

SEQ ID NO: 109412 - DNA, 19 bp, Homo sapiens
  siRNA target sequence for KIAA0820 (NM_015569.1,332-350).
cgagggtcgggcattgtaa

SEQ ID NO: 109413 - DNA, 19 bp, Homo sapiens
  siRNA target sequence for KIAA0820 (NM_015569.1,335-353).
gggtcgggcattgtaacaa

SEQ ID NO: 109414 - DNA, 19 bp, Homo sapiens
  siRNA target sequence for KIAA0820 (NM_015569.1,337-355).
gtcgggcattgtaacaaga

SEQ ID NO: 109415 - DNA, 19 bp, Homo sapiens
  siRNA target sequence for KIAA0820 (NM_015569.1,373-391).
gcttgttacttctaaagca

SEQ ID NO: 109416 - DNA, 19 bp, Homo sapiens
  siRNA target sequence for KIAA0820 (NM_015569.1,399-417).
ccgagtttctacattgcaa

SEQ ID NO: 109417 - DNA, 19 bp, Homo sapiens
  siRNA target sequence for KIAA0820 (NM_015569.1,400-418).
cgagtttctacattgcaaa

SEQ ID NO: 109418 - DNA, 19 bp, Homo sapiens
  siRNA target sequence for KIAA0820 (NM_015569.1,476-494).
cgcgtgactggaatgaata

SEQ ID NO: 109419 - DNA, 19 bp, Homo sapiens
  siRNA target sequence for KIAA0820 (NM_015569.1,478-496).
cgtgactggaatgaataaa

SEQ ID NO: 109420 - DNA, 19 bp, Homo sapiens
  siRNA target sequence for KIAA0820 (NM_015569.1,508-526).
catacccattaatttacga

SEQ ID NO: 109421 - DNA, 19 bp, Homo sapiens
  siRNA target sequence for KIAA0820 (NM_015569.1,514-532).
cattaatttacgagtctat

SEQ ID NO: 109422 - DNA, 19 bp, Homo sapiens
  siRNA target sequence for KIAA0820 (NM_015569.1,603-621).
caccagatatcgagtatca

SEQ ID NO: 109423 - DNA, 19 bp, Homo sapiens
  siRNA target sequence for KIAA0820 (NM_015569.1,714-732).
cgctgaagctagctaaaga

SEQ ID NO: 109424 - DNA, 19 bp, Homo sapiens
  siRNA target sequence for KIAA0820 (NM_015569.1,715-733).
gctgaagctagctaaagaa

SEQ ID NO: 109425 - DNA, 19 bp, Homo sapiens
  siRNA target sequence for KIAA0820 (NM_015569.1,721-739).
gctagctaaagaagttgat

SEQ ID NO: 109426 - DNA, 19 bp, Homo sapiens
  siRNA target sequence for KIAA0820 (NM_015569.1,804-822).
ccagggatgttctagagaa

SEQ ID NO: 109427 - DNA, 19 bp, Homo sapiens
  siRNA target sequence for KIAA0820 (NM_015569.1,812-830).
gttctagagaacaaactgt

SEQ ID NO: 109428 - DNA, 19 bp, Homo sapiens
  siRNA target sequence for KIAA0820 (NM_015569.1,846-864).
gttacgtgggggtggtaaa

SEQ ID NO: 109429 - DNA, 19 bp, Homo sapiens
  siRNA target sequence for KIAA0820 (NM_015569.1,850-868).
cgtgggggtggtaaacaga

SEQ ID NO: 109430 - DNA, 19 bp, Homo sapiens
  siRNA target sequence for KIAA0820 (NM_015569.1,851-869).
gtgggggtggtaaacagaa

SEQ ID NO: 109431 - DNA, 19 bp, Homo sapiens
  siRNA target sequence for KIAA0820 (NM_015569.1,941-959).
cacccggcttacagacata

SEQ ID NO: 109432 - DNA, 19 bp, Homo sapiens
  siRNA target sequence for KIAA0820 (NM_015569.1,1026-1044).
gggataccctaccaaactt

SEQ ID NO: 109433 - DNA, 19 bp, Homo sapiens
  siRNA target sequence for KIAA0820 (NM_015569.1,1028-1046).
gataccctaccaaacttca

SEQ ID NO: 109434 - DNA, 19 bp, Homo sapiens
  siRNA target sequence for KIAA0820 (NM_015569.1,1069-1087).
gctctccatagaacatgaa

SEQ ID NO: 109435 - DNA, 19 bp, Homo sapiens
  siRNA target sequence for KIAA0820 (NM_015569.1,1074-1092).
ccatagaacatgaagtaga

SEQ ID NO: 109436 - DNA, 19 bp, Homo sapiens
  siRNA target sequence for KIAA0820 (NM_015569.1,1150-1168).
gatggttcagcaatttgct

SEQ ID NO: 109437 - DNA, 19 bp, Homo sapiens
  siRNA target sequence for KIAA0820 (NM_015569.1,1195-1213).
gtcaggggatcaagtagat

SEQ ID NO: 109438 - DNA, 19 bp, Homo sapiens
  siRNA target sequence for KIAA0820 (NM_015569.1,1232-1250).
ggtgctaaaatcaatcgta

SEQ ID NO: 109439 - DNA, 19 bp, Homo sapiens
  siRNA target sequence for KIAA0820 (NM_015569.1,1233-1251).
gtgctaaaatcaatcgtat

SEQ ID NO: 109440 - DNA, 19 bp, Homo sapiens
  siRNA target sequence for KIAA0820 (NM_015569.1,1235-1253).
gctaaaatcaatcgtattt

SEQ ID NO: 109441 - DNA, 19 bp, Homo sapiens
  siRNA target sequence for KIAA0820 (NM_015569.1,1236-1254).
ctaaaatcaatcgtatttt

SEQ ID NO: 109442 - DNA, 19 bp, Homo sapiens
  siRNA target sequence for KIAA0820 (NM_015569.1,1243-1261).
caatcgtatttttcatgaa

SEQ ID NO: 109443 - DNA, 19 bp, Homo sapiens
  siRNA target sequence for KIAA0820 (NM_015569.1,1259-1277).
gaacgctttccttttgaga

SEQ ID NO: 109444 - DNA, 19 bp, Homo sapiens
  siRNA target sequence for KIAA0820 (NM_015569.1,1435-1453).
gagtgtggatctggtaata

SEQ ID NO: 109445 - DNA, 19 bp, Homo sapiens
  siRNA target sequence for KIAA0820 (NM_015569.1,1437-1455).
gtgtggatctggtaataca

SEQ ID NO: 109446 - DNA, 19 bp, Homo sapiens
  siRNA target sequence for KIAA0820 (NM_015569.1,1448-1466).
gtaatacaagaattaatca

SEQ ID NO: 109447 - DNA, 19 bp, Homo sapiens
  siRNA target sequence for KIAA0820 (NM_015569.1,1516-1534).
cgaggaaacggaaaggatt

SEQ ID NO: 109448 - DNA, 19 bp, Homo sapiens
  siRNA target sequence for KIAA0820 (NM_015569.1,1524-1542).
cggaaaggattgttgctaa

SEQ ID NO: 109449 - DNA, 19 bp, Homo sapiens
  siRNA target sequence for KIAA0820 (NM_015569.1,1574-1592).
gaccaggtattgctattga

SEQ ID NO: 109450 - DNA, 19 bp, Homo sapiens
  siRNA target sequence for KIAA0820 (NM_015569.1,1580-1598).
gtattgctattgattgaca

SEQ ID NO: 109451 - DNA, 19 bp, Homo sapiens
  siRNA target sequence for KIAA0820 (NM_015569.1,1601-1619).
caagtctcttacatcaaca

SEQ ID NO: 109452 - DNA, 19 bp, Homo sapiens
  siRNA target sequence for KIAA0820 (NM_015569.1,1636-1654).
cattggcttcgcaaatgct

SEQ ID NO: 109453 - DNA, 19 bp, Homo sapiens
  siRNA target sequence for KIAA0820 (NM_015569.1,1791-1809).
gcttgtcctggtataaaga

SEQ ID NO: 109454 - DNA, 19 bp, Homo sapiens
  siRNA target sequence for KIAA0820 (NM_015569.1,1926-1944).
ggaatgtatacaaagacta

SEQ ID NO: 109455 - DNA, 19 bp, Homo sapiens
  siRNA target sequence for KIAA0820 (NM_015569.1,1927-1945).
gaatgtatacaaagactat

SEQ ID NO: 109456 - DNA, 19 bp, Homo sapiens
  siRNA target sequence for KIAA0820 (NM_015569.1,1952-1970).
cttgagctggcatgtgatt

SEQ ID NO: 109457 - DNA, 19 bp, Homo sapiens
  siRNA target sequence for KIAA0820 (NM_015569.1,1990-2008).
ctggaaggcatctctacta

SEQ ID NO: 109458 - DNA, 19 bp, Homo sapiens
  siRNA target sequence for KIAA0820 (NM_015569.1,2015-2033).
ggggtctatcctgacaaat

SEQ ID NO: 109459 - DNA, 19 bp, Homo sapiens
  siRNA target sequence for KIAA0820 (NM_015569.1,2017-2035).
ggtctatcctgacaaatct

SEQ ID NO: 109460 - DNA, 19 bp, Homo sapiens
  siRNA target sequence for KIAA0820 (NM_015569.1,2132-2150).
ctcgtagactcctacatgt

SEQ ID NO: 109461 - DNA, 19 bp, Homo sapiens
  siRNA target sequence for KIAA0820 (NM_015569.1,2161-2179).
caaatgtatccgagatcta

SEQ ID NO: 109462 - DNA, 19 bp, Homo sapiens
  siRNA target sequence for KIAA0820 (NM_015569.1,2170-2188).
ccgagatctaattccaaaa

SEQ ID NO: 109463 - DNA, 19 bp, Homo sapiens
  siRNA target sequence for KIAA0820 (NM_015569.1,2171-2189).
cgagatctaattccaaaaa

SEQ ID NO: 109464 - DNA, 19 bp, Homo sapiens
  siRNA target sequence for KIAA0820 (NM_015569.1,2200-2218).
ccttatgatcaataacgtt

SEQ ID NO: 109465 - DNA, 19 bp, Homo sapiens
  siRNA target sequence for KIAA0820 (NM_015569.1,2313-2331).
gggatgagatgcttcgaat

SEQ ID NO: 109466 - DNA, 19 bp, Homo sapiens
  siRNA target sequence for KIAA0820 (NM_015569.1,2320-2338).
gatgcttcgaatgtatcaa

SEQ ID NO: 109467 - DNA, 19 bp, Homo sapiens
  siRNA target sequence for KIAA0820 (NM_015569.1,2623-2641).
cggagcccctccacaagtt

SEQ ID NO: 109468 - DNA, 19 bp, Homo sapiens
  siRNA target sequence for KIAA0820 (NM_015569.1,2699-2717).
ccaactcgtcccactataa

SEQ ID NO: 109469 - DNA, 19 bp, Homo sapiens
  siRNA target sequence for KIAA0820 (NM_015569.1,2700-2718).
caactcgtcccactataat

SEQ ID NO: 109470 - DNA, 19 bp, Homo sapiens
  siRNA target sequence for KRAS2 (NM_004985.3,245-263).
cagctaattcagaatcatt

SEQ ID NO: 109471 - DNA, 19 bp, Homo sapiens
  siRNA target sequence for KRAS2 (NM_004985.3,271-289).
cgaatatgatccaacaata

SEQ ID NO: 109472 - DNA, 19 bp, Homo sapiens
  siRNA target sequence for KRAS2 (NM_004985.3,330-348).
cctgtctcttggatattct

SEQ ID NO: 109473 - DNA, 19 bp, Homo sapiens
  siRNA target sequence for KRAS2 (NM_004985.3,406-424).
ggagggctttctttgtgta

SEQ ID NO: 109474 - DNA, 19 bp, Homo sapiens
  siRNA target sequence for KRAS2 (NM_004985.3,407-425).
gagggctttctttgtgtat

SEQ ID NO: 109475 - DNA, 19 bp, Homo sapiens
  siRNA target sequence for KRAS2 (NM_004985.3,452-470).
gaagatattcaccattata

SEQ ID NO: 109476 - DNA, 19 bp, Homo sapiens
  siRNA target sequence for KRAS2 (NM_004985.3,461-479).
caccattatagagaacaaa

SEQ ID NO: 109477 - DNA, 19 bp, Homo sapiens
  siRNA target sequence for KRAS2 (NM_004985.3,546-564).
ctagaacagtagacacaaa

SEQ ID NO: 109478 - DNA, 19 bp, Homo sapiens
  siRNA target sequence for KRAS2 (NM_004985.3,574-592).
ggacttagcaagaagttat

SEQ ID NO: 109479 - DNA, 19 bp, Homo sapiens
  siRNA target sequence for KRAS2 (NM_004985.3,577-595).
cttagcaagaagttatgga

SEQ ID NO: 109480 - DNA, 19 bp, Homo sapiens
  siRNA target sequence for KRAS2 (NM_004985.3,585-603).
gaagttatggaattccttt

SEQ ID NO: 109481 - DNA, 19 bp, Homo sapiens
  siRNA target sequence for KRAS2 (NM_004985.3,588-606).
gttatggaattccttttat

SEQ ID NO: 109482 - DNA, 19 bp, Homo sapiens
  siRNA target sequence for KRAS2 (NM_004985.3,688-706).
gatgagcaaagatggtaaa

SEQ ID NO: 109483 - DNA, 19 bp, Homo sapiens
  siRNA target sequence for KRAS2 (NM_033360.2,631-649).
gagagtggaggatgctttt

SEQ ID NO: 109484 - DNA, 19 bp, Homo sapiens
  siRNA target sequence for KRAS2 (NM_033360.2,664-682).
ggagatccgacaatacaga

SEQ ID NO: 109485 - DNA, 19 bp, Homo sapiens
  siRNA target sequence for KRAS2 (NM_033360.2,671-689).
cgacaatacagattgaaaa

SEQ ID NO: 109486 - DNA, 19 bp, Homo sapiens
  siRNA target sequence for KRAS2 (NM_033360.2,672-690).
gacaatacagattgaaaaa

SEQ ID NO: 109487 - DNA, 19 bp, Homo sapiens
  siRNA target sequence for LOC127829 (NM_138795.2,237-255).
cgctggtcgggcttcagta

SEQ ID NO: 109488 - DNA, 19 bp, Homo sapiens
  siRNA target sequence for LOC127829 (NM_138795.2,565-583).
ccttccgggagcattggat

SEQ ID NO: 109489 - DNA, 19 bp, Homo sapiens
  siRNA target sequence for LOC127829 (NM_138795.2,685-703).
cctacagtggcttattcaa

SEQ ID NO: 109490 - DNA, 19 bp, Homo sapiens
  siRNA target sequence for LOC51277 (NM_016544.1,87-105).
caggtctctccgcatcaaa

SEQ ID NO: 109491 - DNA, 19 bp, Homo sapiens
  siRNA target sequence for LOC51277 (NM_016544.1,89-107).
ggtctctccgcatcaaagt

SEQ ID NO: 109492 - DNA, 19 bp, Homo sapiens
  siRNA target sequence for LOC51277 (NM_016544.1,154-172).
cgatactgtgagaaaagat

SEQ ID NO: 109493 - DNA, 19 bp, Homo sapiens
  siRNA target sequence for LOC51277 (NM_016544.1,165-183).
gaaaagattcgtgtctaaa

SEQ ID NO: 109494 - DNA, 19 bp, Homo sapiens
  siRNA target sequence for LOC51277 (NM_016544.1,170-188).
gattcgtgtctaaatacct

SEQ ID NO: 109495 - DNA, 19 bp, Homo sapiens
  siRNA target sequence for LOC51277 (NM_016544.1,179-197).
ctaaatacctggcaacaat

SEQ ID NO: 109496 - DNA, 19 bp, Homo sapiens
  siRNA target sequence for LOC51277 (NM_016544.1,207-225).
ctatggagtcacaaaggta

SEQ ID NO: 109497 - DNA, 19 bp, Homo sapiens
  siRNA target sequence for LOC51277 (NM_016544.1,241-259).
gaaatcaaagttaacatct

SEQ ID NO: 109498 - DNA, 19 bp, Homo sapiens
  siRNA target sequence for LOC51277 (NM_016544.1,282-300).
cttctatgaggttcgaaat

SEQ ID NO: 109499 - DNA, 19 bp, Homo sapiens
  siRNA target sequence for LOC51277 (NM_016544.1,289-307).
gaggttcgaaatgagtttt

SEQ ID NO: 109500 - DNA, 19 bp, Homo sapiens
  siRNA target sequence for LOC51277 (NM_016544.1,292-310).
gttcgaaatgagttttaca

SEQ ID NO: 109501 - DNA, 19 bp, Homo sapiens
  siRNA target sequence for LOC51277 (NM_016544.1,312-330).
ggacacacagggtgtgata

SEQ ID NO: 109502 - DNA, 19 bp, Homo sapiens
  siRNA target sequence for LOC51277 (NM_016544.1,327-345).
gatactggtctatgatgtt

SEQ ID NO: 109503 - DNA, 19 bp, Homo sapiens
  siRNA target sequence for LOC51277 (NM_016544.1,376-394).
gcgtggctggcagaaatga

SEQ ID NO: 109504 - DNA, 19 bp, Homo sapiens
  siRNA target sequence for LOC51277 (NM_016544.1,468-486).
caaacatcgctgtgtagat

SEQ ID NO: 109505 - DNA, 19 bp, Homo sapiens
  siRNA target sequence for LOC51277 (NM_016544.1,472-490).
catcgctgtgtagatgaaa

SEQ ID NO: 109506 - DNA, 19 bp, Homo sapiens
  siRNA target sequence for LOC51277 (NM_016544.1,516-534).
caaagggttcctgtacttt

SEQ ID NO: 109507 - DNA, 19 bp, Homo sapiens
  siRNA target sequence for LOC51277 (NM_016544.1,520-538).
gggttcctgtactttgaaa

SEQ ID NO: 109508 - DNA, 19 bp, Homo sapiens
  siRNA target sequence for LOC51277 (NM_016544.1,573-591).
gttccagaccttttatata

SEQ ID NO: 109509 - DNA, 19 bp, Homo sapiens
  siRNA target sequence for LOC51277 (NM_016544.1,577-595).
cagaccttttatatatcca

SEQ ID NO: 109510 - DNA, 19 bp, Homo sapiens
  siRNA target sequence for LOC51277 (NM_016544.1,579-597).
gaccttttatatatccata

SEQ ID NO: 109511 - DNA, 19 bp, Homo sapiens
  siRNA target sequence for LOC51277 (NM_016544.1,593-611).
ccatagttgatttatgtga

SEQ ID NO: 109512 - DNA, 19 bp, Homo sapiens
  siRNA target sequence for LOC51277 (NM_016544.1,635-653).
ccaatagcagtgctagttt

SEQ ID NO: 109513 - DNA, 19 bp, Homo sapiens
  siRNA target sequence for LOC51277 (NM_016544.1,673-691).
gccattcgcagaattcgaa

SEQ ID NO: 109514 - DNA, 19 bp, Homo sapiens
  siRNA target sequence for LOC51277 (NM_016544.1,674-692).
ccattcgcagaattcgaaa

SEQ ID NO: 109515 - DNA, 19 bp, Homo sapiens
  siRNA target sequence for LOC51277 (NM_016544.1,675-693).
cattcgcagaattcgaaat

SEQ ID NO: 109516 - DNA, 19 bp, Homo sapiens
  siRNA target sequence for LOC51277 (NM_016544.1,731-749).
gggcctcaagggatgaagt

SEQ ID NO: 109517 - DNA, 19 bp, Homo sapiens
  siRNA target sequence for LOC51277 (NM_016544.1,734-752).
cctcaagggatgaagtcaa

SEQ ID NO: 109518 - DNA, 19 bp, Homo sapiens
  siRNA target sequence for LOC51277 (NM_016544.1,777-795).
gcttcttcaccctgacaaa

SEQ ID NO: 109519 - DNA, 19 bp, Homo sapiens
  siRNA target sequence for LOC51762 (NM_016530.1,500-518).
gagaagctagcaattgact

SEQ ID NO: 109520 - DNA, 19 bp, Homo sapiens
  siRNA target sequence for LOC51762 (NM_016530.1,515-533).
gactatgggattaaattct

SEQ ID NO: 109521 - DNA, 19 bp, Homo sapiens
  siRNA target sequence for LOC51762 (NM_016530.1,536-554).
gagacaagcgcaaaatcca

SEQ ID NO: 109522 - DNA, 19 bp, Homo sapiens
  siRNA target sequence for LOC51762 (NM_016530.1,584-602).
cttgcacgagatataatga

SEQ ID NO: 109523 - DNA, 19 bp, Homo sapiens
  siRNA target sequence for LOC51762 (NM_016530.1,588-606).
cacgagatataatgacaaa

SEQ ID NO: 109524 - DNA, 19 bp, Homo sapiens
  siRNA target sequence for LOC51762 (NM_016530.1,647-665).
ggtggaccagtgaaaataa

SEQ ID NO: 109525 - DNA, 19 bp, Homo sapiens
  siRNA target sequence for MEL (NM_005370.4,233-251).
cctacgattacctgttcaa

SEQ ID NO: 109526 - DNA, 19 bp, Homo sapiens
  siRNA target sequence for MEL (NM_005370.4,375-393).
gctcgatggcaagagaatt

SEQ ID NO: 109527 - DNA, 19 bp, Homo sapiens
  siRNA target sequence for MEL (NM_005370.4,376-394).
ctcgatggcaagagaatta

SEQ ID NO: 109528 - DNA, 19 bp, Homo sapiens
  siRNA target sequence for MEL (NM_005370.4,378-396).
cgatggcaagagaattaaa

SEQ ID NO: 109529 - DNA, 19 bp, Homo sapiens
  siRNA target sequence for MEL (NM_005370.4,427-445).
cggtttcggacgatcacaa

SEQ ID NO: 109530 - DNA, 19 bp, Homo sapiens
  siRNA target sequence for MEL (NM_005370.4,522-540).
gaactggattcgcaacatt

SEQ ID NO: 109531 - DNA, 19 bp, Homo sapiens
  siRNA target sequence for MEL (NM_005370.4,551-569).
cctctgcagacgtcgaaaa

SEQ ID NO: 109532 - DNA, 19 bp, Homo sapiens
  siRNA target sequence for MEL (NM_005370.4,554-572).
ctgcagacgtcgaaaagat

SEQ ID NO: 109533 - DNA, 19 bp, Homo sapiens
  siRNA target sequence for MEL (NM_005370.4,557-575).
cagacgtcgaaaagatgat

SEQ ID NO: 109534 - DNA, 19 bp, Homo sapiens
  siRNA target sequence for MEL (NM_005370.4,637-655).
ctggccctcgactatggaa

SEQ ID NO: 109535 - DNA, 19 bp, Homo sapiens
  siRNA target sequence for MEL (NM_005370.4,641-659).
ccctcgactatggaatcaa

SEQ ID NO: 109536 - DNA, 19 bp, Homo sapiens
  siRNA target sequence for MEL (NM_005370.4,646-664).
gactatggaatcaagttca

SEQ ID NO: 109537 - DNA, 19 bp, Homo sapiens
  siRNA target sequence for MEL (NM_005370.4,675-693).
cgcgaaggccaacatcaat

SEQ ID NO: 109538 - DNA, 19 bp, Homo sapiens
  siRNA target sequence for MEL (NM_005370.4,677-695).
cgaaggccaacatcaatgt

SEQ ID NO: 109539 - DNA, 19 bp, Homo sapiens
  siRNA target sequence for MEL (NM_005370.4,718-736).
gccagagatatcaaagcaa

SEQ ID NO: 109540 - DNA, 19 bp, Homo sapiens
  siRNA target sequence for MEL (NM_005370.4,719-737).
ccagagatatcaaagcaaa

SEQ ID NO: 109541 - DNA, 19 bp, Homo sapiens
  siRNA target sequence for MEL (NM_005370.4,774-792).
gagcaaccagggagtcaaa

SEQ ID NO: 109542 - DNA, 19 bp, Homo sapiens
  siRNA target sequence for MEL (NM_005370.4,819-837).
cagctttttccgatgtgtt

SEQ ID NO: 109543 - DNA, 19 bp, Homo sapiens
  siRNA target sequence for MEL (NM_005370.4,822-840).
ctttttccgatgtgttctt

SEQ ID NO: 109544 - DNA, 19 bp, Homo sapiens
  siRNA target sequence for MGC10731 (NM_030907.2,367-385).
ctgccagctacaagatctt

SEQ ID NO: 109545 - DNA, 19 bp, Homo sapiens
  siRNA target sequence for MGC10731 (NM_030907.2,370-388).
ccagctacaagatctttgt

SEQ ID NO: 109546 - DNA, 19 bp, Homo sapiens
  siRNA target sequence for MGC10731 (NM_030907.2,479-497).
ccagaccaccgtggtattt

SEQ ID NO: 109547 - DNA, 19 bp, Homo sapiens
  siRNA target sequence for MGC10731 (NM_030907.2,480-498).
cagaccaccgtggtatttt

SEQ ID NO: 109548 - DNA, 19 bp, Homo sapiens
  siRNA target sequence for MGC10731 (NM_030907.2,520-538).
gcagccgtgtcgtcatgtt

SEQ ID NO: 109549 - DNA, 19 bp, Homo sapiens
  siRNA target sequence for MGC10731 (NM_030907.2,521-539).
cagccgtgtcgtcatgttt

SEQ ID NO: 109550 - DNA, 19 bp, Homo sapiens
  siRNA target sequence for MGC10731 (NM_030907.2,525-543).
cgtgtcgtcatgtttcgtt

SEQ ID NO: 109551 - DNA, 19 bp, Homo sapiens
  siRNA target sequence for MGC10731 (NM_030907.2,526-544).
gtgtcgtcatgtttcgttt

SEQ ID NO: 109552 - DNA, 19 bp, Homo sapiens
  siRNA target sequence for MGC10731 (NM_030907.2,573-591).
ctcaaaaagttcgatcata

SEQ ID NO: 109553 - DNA, 19 bp, Homo sapiens
  siRNA target sequence for MGC10731 (NM_030907.2,883-901).
ccgacgttgcccacatact

SEQ ID NO: 109554 - DNA, 19 bp, Homo sapiens
  siRNA target sequence for MGC10731 (NM_030907.2,885-903).
gacgttgcccacatactca

SEQ ID NO: 109555 - DNA, 19 bp, Homo sapiens
  siRNA target sequence for MGC10731 (NM_030907.2,887-905).
cgttgcccacatactcaat

SEQ ID NO: 109556 - DNA, 19 bp, Homo sapiens
  siRNA target sequence for MGC2827 (NM_023940.2,184-202).
cgcctcattcagaacatgt

SEQ ID NO: 109557 - DNA, 19 bp, Homo sapiens
  siRNA target sequence for MGC2827 (NM_023940.2,334-352).
cggttcctcaccaaacgat

SEQ ID NO: 109558 - DNA, 19 bp, Homo sapiens
  siRNA target sequence for MGC2827 (NM_023940.2,335-353).
ggttcctcaccaaacgatt

SEQ ID NO: 109559 - DNA, 19 bp, Homo sapiens
  siRNA target sequence for MGC2827 (NM_023940.2,354-372).
catcggtgactatgaaaga

SEQ ID NO: 109560 - DNA, 19 bp, Homo sapiens
  siRNA target sequence for MGC2827 (NM_023940.2,371-389).
gaaatgcaggtaatctcta

SEQ ID NO: 109561 - DNA, 19 bp, Homo sapiens
  siRNA target sequence for MGC2827 (NM_023940.2,376-394).
gcaggtaatctctatacta

SEQ ID NO: 109562 - DNA, 19 bp, Homo sapiens
  siRNA target sequence for MGC2827 (NM_023940.2,392-410).
ctagacaagttcagataga

SEQ ID NO: 109563 - DNA, 19 bp, Homo sapiens
  siRNA target sequence for MGC2827 (NM_023940.2,641-659).
ctgacctgttgcacatcaa

SEQ ID NO: 109564 - DNA, 19 bp, Homo sapiens
  siRNA target sequence for MGC2827 (NM_023940.2,704-722).
gctgctcattctatgaagt

SEQ ID NO: 109565 - DNA, 19 bp, Homo sapiens
  siRNA target sequence for MGC2827 (NM_023940.2,723-741).
gtctgtcagtgaaaattat

SEQ ID NO: 109566 - DNA, 19 bp, Homo sapiens
  siRNA target sequence for MGC4083 (NM_032525.1,204-222).
gtcatcgtctcagaaatat

SEQ ID NO: 109567 - DNA, 19 bp, Homo sapiens
  siRNA target sequence for MGC4083 (NM_032525.1,206-224).
catcgtctcagaaatatgt

SEQ ID NO: 109568 - DNA, 19 bp, Homo sapiens
  siRNA target sequence for MGC4083 (NM_032525.1,281-299).
ggccttttgggcagctttt

SEQ ID NO: 109569 - DNA, 19 bp, Homo sapiens
  siRNA target sequence for MGC45806 (NM_152304.1,436-454).
gagacctcggttaaaaaca

SEQ ID NO: 109570 - DNA, 19 bp, Homo sapiens
  siRNA target sequence for MGC9726 (NM_177403.3,383-401).
cgttttatgaggaatacca

SEQ ID NO: 109571 - DNA, 19 bp, Homo sapiens
  siRNA target sequence for MGC9726 (NM_177403.3,424-442).
ctctccaagattatcatat

SEQ ID NO: 109572 - DNA, 19 bp, Homo sapiens
  siRNA target sequence for MGC9726 (NM_177403.3,445-463).
ggtgacacaactttgaagt

SEQ ID NO: 109573 - DNA, 19 bp, Homo sapiens
  siRNA target sequence for MGC9726 (NM_177403.3,446-464).
gtgacacaactttgaagtt

SEQ ID NO: 109574 - DNA, 19 bp, Homo sapiens
  siRNA target sequence for MGC9726 (NM_177403.3,536-554).
gctgcatcctagcttttga

SEQ ID NO: 109575 - DNA, 19 bp, Homo sapiens
  siRNA target sequence for MGC9726 (NM_177403.3,561-579).
cgacctggagtcttttgaa

SEQ ID NO: 109576 - DNA, 19 bp, Homo sapiens
  siRNA target sequence for MGC9726 (NM_177403.3,572-590).
cttttgaagccctggatat

SEQ ID NO: 109577 - DNA, 19 bp, Homo sapiens
  siRNA target sequence for MGC9726 (NM_177403.3,710-728).
ggtgtagagagaaagatat

SEQ ID NO: 109578 - DNA, 19 bp, Homo sapiens
  siRNA target sequence for MGC9726 (NM_177403.3,766-784).
gtggtgcaagcgtttgaga

SEQ ID NO: 109579 - DNA, 19 bp, Homo sapiens
  siRNA target sequence for MGC9726 (NM_177403.3,807-825).
gaggtaccagagcatctta

SEQ ID NO: 109580 - DNA, 19 bp, Homo sapiens
  siRNA target sequence for MGC9726 (NM_177403.3,809-827).
ggtaccagagcatcttaga

SEQ ID NO: 109581 - DNA, 19 bp, Homo sapiens
  siRNA target sequence for MGC9726 (NM_177403.3,810-828).
gtaccagagcatcttagaa

SEQ ID NO: 109582 - DNA, 19 bp, Homo sapiens
  siRNA target sequence for MRAS (NM_012219.2,161-179).
gactcctacctgaaacata

SEQ ID NO: 109583 - DNA, 19 bp, Homo sapiens
  siRNA target sequence for MRAS (NM_012219.2,333-351).
gcttccaccagcttatcct

SEQ ID NO: 109584 - DNA, 19 bp, Homo sapiens
  siRNA target sequence for MRAS (NM_012219.2,463-481).
caatattccgtacatagaa

SEQ ID NO: 109585 - DNA, 19 bp, Homo sapiens
  siRNA target sequence for MRAS (NM_012219.2,523-541).
ccatgacctcgttagagta

SEQ ID NO: 109586 - DNA, 19 bp, Homo sapiens
  siRNA target sequence for MRAS (NM_012219.2,524-542).
catgacctcgttagagtaa

SEQ ID NO: 109587 - DNA, 19 bp, Homo sapiens
  siRNA target sequence for MRAS (NM_012219.2,527-545).
gacctcgttagagtaatta

SEQ ID NO: 109588 - DNA, 19 bp, Homo sapiens
  siRNA target sequence for MSF (NM_006640.2,269-287).
ccggatctcagccttgaaa

SEQ ID NO: 109589 - DNA, 19 bp, Homo sapiens
  siRNA target sequence for MSF (NM_006640.2,1086-1104).
cagggcttcgagttcaaca

SEQ ID NO: 109590 - DNA, 19 bp, Homo sapiens
  siRNA target sequence for MSF (NM_006640.2,1131-1149).
ggtaaatccaccttaatca

SEQ ID NO: 109591 - DNA, 19 bp, Homo sapiens
  siRNA target sequence for MSF (NM_006640.2,1153-1171).
ccctcttcaaatccaaaat

SEQ ID NO: 109592 - DNA, 19 bp, Homo sapiens
  siRNA target sequence for MSF (NM_006640.2,1232-1250).
gtccatcacgcacgatatt

SEQ ID NO: 109593 - DNA, 19 bp, Homo sapiens
  siRNA target sequence for MSF (NM_006640.2,1234-1252).
ccatcacgcacgatattga

SEQ ID NO: 109594 - DNA, 19 bp, Homo sapiens
  siRNA target sequence for MSF (NM_006640.2,1473-1491).
cccctggacatcgagttta

SEQ ID NO: 109595 - DNA, 19 bp, Homo sapiens
  siRNA target sequence for MSF (NM_006640.2,1474-1492).
ccctggacatcgagtttat

SEQ ID NO: 109596 - DNA, 19 bp, Homo sapiens
  siRNA target sequence for MSF (NM_006640.2,1476-1494).
ctggacatcgagtttatga

SEQ ID NO: 109597 - DNA, 19 bp, Homo sapiens
  siRNA target sequence for MSF (NM_006640.2,1657-1675).
ggctggtgaacgagaagtt

SEQ ID NO: 109598 - DNA, 19 bp, Homo sapiens
  siRNA target sequence for MSF (NM_006640.2,1679-1697).
ggagatgatcccatttgct

SEQ ID NO: 109599 - DNA, 19 bp, Homo sapiens
  siRNA target sequence for MSF (NM_006640.2,1762-1780).
ggggtaccatcgaagttga

SEQ ID NO: 109600 - DNA, 19 bp, Homo sapiens
  siRNA target sequence for MSF (NM_006640.2,1763-1781).
gggtaccatcgaagttgaa

SEQ ID NO: 109601 - DNA, 19 bp, Homo sapiens
  siRNA target sequence for MSF (NM_006640.2,1764-1782).
ggtaccatcgaagttgaaa

SEQ ID NO: 109602 - DNA, 19 bp, Homo sapiens
  siRNA target sequence for MSF (NM_006640.2,1765-1783).
gtaccatcgaagttgaaaa

SEQ ID NO: 109603 - DNA, 19 bp, Homo sapiens
  siRNA target sequence for MX1 (NM_002462.2,395-413).
cccaccctctattactgaa

SEQ ID NO: 109604 - DNA, 19 bp, Homo sapiens
  siRNA target sequence for MX1 (NM_002462.2,685-703).
cttgtgaacgaagataagt

SEQ ID NO: 109605 - DNA, 19 bp, Homo sapiens
  siRNA target sequence for MX1 (NM_002462.2,704-722).
ggagaggcaaggtcagtta

SEQ ID NO: 109606 - DNA, 19 bp, Homo sapiens
  siRNA target sequence for MX1 (NM_002462.2,724-742).
caggactacgagattgaga

SEQ ID NO: 109607 - DNA, 19 bp, Homo sapiens
  siRNA target sequence for MX1 (NM_002462.2,812-830).
gaatcagtcatgagctaat

SEQ ID NO: 109608 - DNA, 19 bp, Homo sapiens
  siRNA target sequence for MX1 (NM_002462.2,856-874).
gtcccggatctgactctaa

SEQ ID NO: 109609 - DNA, 19 bp, Homo sapiens
  siRNA target sequence for MX1 (NM_002462.2,858-876).
cccggatctgactctaata

SEQ ID NO: 109610 - DNA, 19 bp, Homo sapiens
  siRNA target sequence for MX1 (NM_002462.2,860-878).
cggatctgactctaataga

SEQ ID NO: 109611 - DNA, 19 bp, Homo sapiens
  siRNA target sequence for MX1 (NM_002462.2,1331-1349).
gcgagctcatcacacatat

SEQ ID NO: 109612 - DNA, 19 bp, Homo sapiens
  siRNA target sequence for MX1 (NM_002462.2,1333-1351).
gagctcatcacacatatct

SEQ ID NO: 109613 - DNA, 19 bp, Homo sapiens
  siRNA target sequence for MX1 (NM_002462.2,1338-1356).
catcacacatatctgtaaa

SEQ ID NO: 109614 - DNA, 19 bp, Homo sapiens
  siRNA target sequence for MX1 (NM_002462.2,1389-1407).
gactcaccagagaataaca

SEQ ID NO: 109615 - DNA, 19 bp, Homo sapiens
  siRNA target sequence for MX1 (NM_002462.2,1434-1452).
cataccggaagacgaaaat

SEQ ID NO: 109616 - DNA, 19 bp, Homo sapiens
  siRNA target sequence for MX1 (NM_002462.2,1540-1558).
gaagacattcggctgttta

SEQ ID NO: 109617 - DNA, 19 bp, Homo sapiens
  siRNA target sequence for MX1 (NM_002462.2,1543-1561).
gacattcggctgtttacca

SEQ ID NO: 109618 - DNA, 19 bp, Homo sapiens
  siRNA target sequence for MX1 (NM_002462.2,1567-1585).
cgacacgagttccacaaat

SEQ ID NO: 109619 - DNA, 19 bp, Homo sapiens
  siRNA target sequence for MX1 (NM_002462.2,1578-1596).
ccacaaatggagtacaata

SEQ ID NO: 109620 - DNA, 19 bp, Homo sapiens
  siRNA target sequence for MX1 (NM_002462.2,1712-1730).
caatcgtgaaacagcaaat

SEQ ID NO: 109621 - DNA, 19 bp, Homo sapiens
  siRNA target sequence for MX1 (NM_002462.2,1746-1764).
gccggctgtggatatgcta

SEQ ID NO: 109622 - DNA, 19 bp, Homo sapiens
  siRNA target sequence for MX1 (NM_002462.2,1793-1811).
ctttcacagatgtttcgat

SEQ ID NO: 109623 - DNA, 19 bp, Homo sapiens
  siRNA target sequence for MX1 (NM_002462.2,1847-1865).
ccgccaagtccaaaattga

SEQ ID NO: 109624 - DNA, 19 bp, Homo sapiens
  siRNA target sequence for MX1 (NM_002462.2,1854-1872).
gtccaaaattgaagacatt

SEQ ID NO: 109625 - DNA, 19 bp, Homo sapiens
  siRNA target sequence for MX2 (NM_002463.1,131-149).
ctaccggaggagaagtcaa

SEQ ID NO: 109626 - DNA, 19 bp, Homo sapiens
  siRNA target sequence for MX2 (NM_002463.1,135-153).
cggaggagaagtcaatttt

SEQ ID NO: 109627 - DNA, 19 bp, Homo sapiens
  siRNA target sequence for MX2 (NM_002463.1,214-232).
gcacagtgccaccacaaat

SEQ ID NO: 109628 - DNA, 19 bp, Homo sapiens
  siRNA target sequence for MX2 (NM_002463.1,217-235).
cagtgccaccacaaatgat

SEQ ID NO: 109629 - DNA, 19 bp, Homo sapiens
  siRNA target sequence for MX2 (NM_002463.1,985-1003).
ccaaaccagatctaatgga

SEQ ID NO: 109630 - DNA, 19 bp, Homo sapiens
  siRNA target sequence for MX2 (NM_002463.1,1208-1226).
ccgactggcagaaagactt

SEQ ID NO: 109631 - DNA, 19 bp, Homo sapiens
  siRNA target sequence for MX2 (NM_002463.1,1209-1227).
cgactggcagaaagactta

SEQ ID NO: 109632 - DNA, 19 bp, Homo sapiens
  siRNA target sequence for MX2 (NM_002463.1,1231-1249).
ctgaactcatcatgcatat

SEQ ID NO: 109633 - DNA, 19 bp, Homo sapiens
  siRNA target sequence for MX2 (NM_002463.1,1397-1415).
ggacatcgaaaagttagta

SEQ ID NO: 109634 - DNA, 19 bp, Homo sapiens
  siRNA target sequence for MX2 (NM_002463.1,1400-1418).
catcgaaaagttagtagaa

SEQ ID NO: 109635 - DNA, 19 bp, Homo sapiens
  siRNA target sequence for MX2 (NM_002463.1,1428-1446).
gttgtaagggagaatgaga

SEQ ID NO: 109636 - DNA, 19 bp, Homo sapiens
  siRNA target sequence for MX2 (NM_002463.1,1437-1455).
gagaatgagacccgtttat

SEQ ID NO: 109637 - DNA, 19 bp, Homo sapiens
  siRNA target sequence for MX2 (NM_002463.1,1443-1461).
gagacccgtttatacaaca

SEQ ID NO: 109638 - DNA, 19 bp, Homo sapiens
  siRNA target sequence for MX2 (NM_002463.1,1445-1463).
gacccgtttatacaacaaa

SEQ ID NO: 109639 - DNA, 19 bp, Homo sapiens
  siRNA target sequence for MX2 (NM_002463.1,1460-1478).
caaaatcagagaggatttt

SEQ ID NO: 109640 - DNA, 19 bp, Homo sapiens
  siRNA target sequence for MX2 (NM_002463.1,1491-1509).
ggcatacttgcaactaata

SEQ ID NO: 109641 - DNA, 19 bp, Homo sapiens
  siRNA target sequence for MX2 (NM_002463.1,1501-1519).
caactaatacccaaaaagt

SEQ ID NO: 109642 - DNA, 19 bp, Homo sapiens
  siRNA target sequence for MX2 (NM_002463.1,1581-1599).
ctgggatttgtcaactaca

SEQ ID NO: 109643 - DNA, 19 bp, Homo sapiens
  siRNA target sequence for MX2 (NM_002463.1,1697-1715).
cattaacgtggccaaaaaa

SEQ ID NO: 109644 - DNA, 19 bp, Homo sapiens
  siRNA target sequence for MX2 (NM_002463.1,1722-1740).
ggcgaatttttcaacctta

SEQ ID NO: 109645 - DNA, 19 bp, Homo sapiens
  siRNA target sequence for MX2 (NM_002463.1,1723-1741).
gcgaatttttcaaccttaa

SEQ ID NO: 109646 - DNA, 19 bp, Homo sapiens
  siRNA target sequence for MX2 (NM_002463.1,1733-1751).
caaccttaaccaaactgtt

SEQ ID NO: 109647 - DNA, 19 bp, Homo sapiens
  siRNA target sequence for MX2 (NM_002463.1,1754-1772).
gagcacgattgaagacata

SEQ ID NO: 109648 - DNA, 19 bp, Homo sapiens
  siRNA target sequence for MX2 (NM_002463.1,1756-1774).
gcacgattgaagacataaa

SEQ ID NO: 109649 - DNA, 19 bp, Homo sapiens
  siRNA target sequence for MX2 (NM_002463.1,1788-1806).
gcaaaggcagaaaacatga

SEQ ID NO: 109650 - DNA, 19 bp, Homo sapiens
  siRNA target sequence for MX2 (NM_002463.1,1829-1847).
gcagatggttttttgtcaa

SEQ ID NO: 109651 - DNA, 19 bp, Homo sapiens
  siRNA target sequence for MX2 (NM_002463.1,1832-1850).
gatggttttttgtcaagat

SEQ ID NO: 109652 - DNA, 19 bp, Homo sapiens
  siRNA target sequence for MX2 (NM_002463.1,1861-1879).
gtgttgttctgaagaaagt

SEQ ID NO: 109653 - DNA, 19 bp, Homo sapiens
  siRNA target sequence for MX2 (NM_002463.1,1904-1922).
ggggacgccttcacagaat

SEQ ID NO: 109654 - DNA, 19 bp, Homo sapiens
  siRNA target sequence for MX2 (NM_002463.1,1905-1923).
gggacgccttcacagaata

SEQ ID NO: 109655 - DNA, 19 bp, Homo sapiens
  siRNA target sequence for MX2 (NM_002463.1,1906-1924).
ggacgccttcacagaatat

SEQ ID NO: 109656 - DNA, 19 bp, Homo sapiens
  siRNA target sequence for MX2 (NM_002463.1,1909-1927).
cgccttcacagaatatgaa

SEQ ID NO: 109657 - DNA, 19 bp, Homo sapiens
  siRNA target sequence for MX2 (NM_002463.1,1912-1930).
cttcacagaatatgaagtt

SEQ ID NO: 109658 - DNA, 19 bp, Homo sapiens
  siRNA target sequence for MX2 (NM_002463.1,1989-2007).
cacctgaatgcctacttct

SEQ ID NO: 109659 - DNA, 19 bp, Homo sapiens
  siRNA target sequence for MX2 (NM_002463.1,2029-2047).
ccaaccagatcccatttat

SEQ ID NO: 109660 - DNA, 19 bp, Homo sapiens
  siRNA target sequence for MX2 (NM_002463.1,2115-2133).
gaaaaaaatcgctattcct

SEQ ID NO: 109661 - DNA, 19 bp, Homo sapiens
  siRNA target sequence for MX2 (NM_002463.1,2154-2172).
gagaccgctaccaagagaa

SEQ ID NO: 109662 - DNA, 19 bp, Homo sapiens
  siRNA target sequence for MX2 (NM_002463.1,2211-2229).
cgacacgcactctgtcaat

SEQ ID NO: 109663 - DNA, 19 bp, Homo sapiens
  siRNA target sequence for MX2 (NM_002463.1,2212-2230).
gacacgcactctgtcaatt

SEQ ID NO: 109664 - DNA, 19 bp, Homo sapiens
  siRNA target sequence for MX2 (NM_002463.1,2214-2232).
cacgcactctgtcaattct

SEQ ID NO: 109665 - DNA, 19 bp, Homo sapiens
  siRNA target sequence for NEDD5 (NM_004404.1,666-684).
gaacaggcggcacatcatt

SEQ ID NO: 109666 - DNA, 19 bp, Homo sapiens
  siRNA target sequence for NEDD5 (NM_004404.1,669-687).
caggcggcacatcattgat

SEQ ID NO: 109667 - DNA, 19 bp, Homo sapiens
  siRNA target sequence for NEDD5 (NM_004404.1,692-710).
gggtgcattgttgctttta

SEQ ID NO: 109668 - DNA, 19 bp, Homo sapiens
  siRNA target sequence for NEDD5 (NM_004404.1,734-752).
gacttaagcccttagatgt

SEQ ID NO: 109669 - DNA, 19 bp, Homo sapiens
  siRNA target sequence for NEDD5 (NM_004404.1,832-850).
cgggagcggctgaagaaaa

SEQ ID NO: 109670 - DNA, 19 bp, Homo sapiens
  siRNA target sequence for NEDD5 (NM_004404.1,973-991).
gtggttggatccaatcagt

SEQ ID NO: 109671 - DNA, 19 bp, Homo sapiens
  siRNA target sequence for NEDD5 (NM_004404.1,1128-1146).
gacccaggaccttcattat

SEQ ID NO: 109672 - DNA, 19 bp, Homo sapiens
  siRNA target sequence for NEDD5 (NM_004404.1,1130-1148).
cccaggaccttcattatga

SEQ ID NO: 109673 - DNA, 19 bp, Homo sapiens
  siRNA target sequence for NEDD5 (NM_004404.1,1131-1149).
ccaggaccttcattatgaa

SEQ ID NO: 109674 - DNA, 19 bp, Homo sapiens
  siRNA target sequence for NEDD5 (NM_004404.1,1132-1150).
caggaccttcattatgaaa

SEQ ID NO: 109675 - DNA, 19 bp, Homo sapiens
  siRNA target sequence for NRAS (NM_002524.2,447-465).
gtgccatgagagaccaata

SEQ ID NO: 109676 - DNA, 19 bp, Homo sapiens
  siRNA target sequence for NRAS (NM_002524.2,505-523).
caataatagcaagtcattt

SEQ ID NO: 109677 - DNA, 19 bp, Homo sapiens
  siRNA target sequence for NRAS (NM_002524.2,519-537).
catttgcggatattaacct

SEQ ID NO: 109678 - DNA, 19 bp, Homo sapiens
  siRNA target sequence for NRAS (NM_002524.2,613-631).
gccaacaaggacagttgat

SEQ ID NO: 109679 - DNA, 19 bp, Homo sapiens
  siRNA target sequence for NRAS (NM_002524.2,621-639).
ggacagttgatacaaaaca

SEQ ID NO: 109680 - DNA, 19 bp, Homo sapiens
  siRNA target sequence for NRAS (NM_002524.2,665-683).
gggattccattcattgaaa

SEQ ID NO: 109681 - DNA, 19 bp, Homo sapiens
  siRNA target sequence for NRAS (NM_002524.2,724-742).
cacactggtaagagaaata

SEQ ID NO: 109682 - DNA, 19 bp, Homo sapiens
  siRNA target sequence for OPA1 (NM_015560.1,92-110).
gtctgccagtctttagtga

SEQ ID NO: 109683 - DNA, 19 bp, Homo sapiens
  siRNA target sequence for OPA1 (NM_015560.1,94-112).
ctgccagtctttagtgaaa

SEQ ID NO: 109684 - DNA, 19 bp, Homo sapiens
  siRNA target sequence for OPA1 (NM_015560.1,132-150).
gaagtttaccactacaaaa

SEQ ID NO: 109685 - DNA, 19 bp, Homo sapiens
  siRNA target sequence for OPA1 (NM_015560.1,160-178).
ggtttcacgaagcatttat

SEQ ID NO: 109686 - DNA, 19 bp, Homo sapiens
  siRNA target sequence for OPA1 (NM_015560.1,206-224).
caacgaccccaattaagga

SEQ ID NO: 109687 - DNA, 19 bp, Homo sapiens
  siRNA target sequence for OPA1 (NM_015560.1,250-268).
gacaaaccttcctttacgt

SEQ ID NO: 109688 - DNA, 19 bp, Homo sapiens
  siRNA target sequence for OPA1 (NM_015560.1,252-270).
caaaccttcctttacgtaa

SEQ ID NO: 109689 - DNA, 19 bp, Homo sapiens
  siRNA target sequence for OPA1 (NM_015560.1,257-275).
cttcctttacgtaaactga

SEQ ID NO: 109690 - DNA, 19 bp, Homo sapiens
  siRNA target sequence for OPA1 (NM_015560.1,260-278).
cctttacgtaaactgaaat

SEQ ID NO: 109691 - DNA, 19 bp, Homo sapiens
  siRNA target sequence for OPA1 (NM_015560.1,261-279).
ctttacgtaaactgaaatt

SEQ ID NO: 109692 - DNA, 19 bp, Homo sapiens
  siRNA target sequence for OPA1 (NM_015560.1,272-290).
ctgaaattctctccaatta

SEQ ID NO: 109693 - DNA, 19 bp, Homo sapiens
  siRNA target sequence for OPA1 (NM_015560.1,336-354).
ctacgagactcttaaaact

SEQ ID NO: 109694 - DNA, 19 bp, Homo sapiens
  siRNA target sequence for OPA1 (NM_015560.1,413-431).
gatcagtggaaagatatga

SEQ ID NO: 109695 - DNA, 19 bp, Homo sapiens
  siRNA target sequence for OPA1 (NM_015560.1,430-448).
gataccggaccttagtgaa

SEQ ID NO: 109696 - DNA, 19 bp, Homo sapiens
  siRNA target sequence for OPA1 (NM_015560.1,434-452).
ccggaccttagtgaatata

SEQ ID NO: 109697 - DNA, 19 bp, Homo sapiens
  siRNA target sequence for OPA1 (NM_015560.1,435-453).
cggaccttagtgaatataa

SEQ ID NO: 109698 - DNA, 19 bp, Homo sapiens
  siRNA target sequence for OPA1 (NM_015560.1,437-455).
gaccttagtgaatataaat

SEQ ID NO: 109699 - DNA, 19 bp, Homo sapiens
  siRNA target sequence for OPA1 (NM_015560.1,490-508).
gtatatcgattttgagaaa

SEQ ID NO: 109700 - DNA, 19 bp, Homo sapiens
  siRNA target sequence for OPA1 (NM_015560.1,496-514).
cgattttgagaaaattaga

SEQ ID NO: 109701 - DNA, 19 bp, Homo sapiens
  siRNA target sequence for OPA1 (NM_015560.1,572-590).
gttgaaagccttagcttat

SEQ ID NO: 109702 - DNA, 19 bp, Homo sapiens
  siRNA target sequence for OPA1 (NM_015560.1,619-637).
ggaagaaacggcgtttaga

SEQ ID NO: 109703 - DNA, 19 bp, Homo sapiens
  siRNA target sequence for OPA1 (NM_015560.1,628-646).
ggcgtttagagcaacagat

SEQ ID NO: 109704 - DNA, 19 bp, Homo sapiens
  siRNA target sequence for OPA1 (NM_015560.1,722-740).
ctgcacactcagttgaagt

SEQ ID NO: 109705 - DNA, 19 bp, Homo sapiens
  siRNA target sequence for OPA1 (NM_015560.1,724-742).
gcacactcagttgaagtat

SEQ ID NO: 109706 - DNA, 19 bp, Homo sapiens
  siRNA target sequence for OPA1 (NM_015560.1,747-765).
gaatcttggaacgattaga

SEQ ID NO: 109707 - DNA, 19 bp, Homo sapiens
  siRNA target sequence for OPA1 (NM_015560.1,856-874).
gtattctgaagttcttgat

SEQ ID NO: 109708 - DNA, 19 bp, Homo sapiens
  siRNA target sequence for OPA1 (NM_015560.1,897-915).
gttataatacgcaagatca

SEQ ID NO: 109709 - DNA, 19 bp, Homo sapiens
  siRNA target sequence for OPA1 (NM_015560.1,944-962).
cagagtgctggaaagacta

SEQ ID NO: 109710 - DNA, 19 bp, Homo sapiens
  siRNA target sequence for OPA1 (NM_015560.1,960-978).
ctagtgtgttggaaatgat

SEQ ID NO: 109711 - DNA, 19 bp, Homo sapiens
  siRNA target sequence for OPA1 (NM_015560.1,976-994).
gattgcccaagctcgaata

SEQ ID NO: 109712 - DNA, 19 bp, Homo sapiens
  siRNA target sequence for OPA1 (NM_015560.1,1023-1041).
cacgttctccagttaaggt

SEQ ID NO: 109713 - DNA, 19 bp, Homo sapiens
  siRNA target sequence for OPA1 (NM_015560.1,1061-1079).
caccatgtggccctattta

SEQ ID NO: 109714 - DNA, 19 bp, Homo sapiens
  siRNA target sequence for OPA1 (NM_015560.1,1069-1087).
ggccctatttaaagatagt

SEQ ID NO: 109715 - DNA, 19 bp, Homo sapiens
  siRNA target sequence for OPA1 (NM_015560.1,1070-1088).
gccctatttaaagatagtt

SEQ ID NO: 109716 - DNA, 19 bp, Homo sapiens
  siRNA target sequence for OPA1 (NM_015560.1,1086-1104).
gttctcgggagtttgatct

SEQ ID NO: 109717 - DNA, 19 bp, Homo sapiens
  siRNA target sequence for OPA1 (NM_015560.1,1115-1133).
gaagatcttgcagcattaa

SEQ ID NO: 109718 - DNA, 19 bp, Homo sapiens
  siRNA target sequence for OPA1 (NM_015560.1,1124-1142).
gcagcattaagacatgaaa

SEQ ID NO: 109719 - DNA, 19 bp, Homo sapiens
  siRNA target sequence for OPA1 (NM_015560.1,1189-1207).
ccctgagaccatatcctta

SEQ ID NO: 109720 - DNA, 19 bp, Homo sapiens
  siRNA target sequence for OPA1 (NM_015560.1,1191-1209).
ctgagaccatatccttaaa

SEQ ID NO: 109721 - DNA, 19 bp, Homo sapiens
  siRNA target sequence for OPA1 (NM_015560.1,1233-1251).
ggatggtgcttgttgactt

SEQ ID NO: 109722 - DNA, 19 bp, Homo sapiens
  siRNA target sequence for OPA1 (NM_015560.1,1234-1252).
gatggtgcttgttgactta

SEQ ID NO: 109723 - DNA, 19 bp, Homo sapiens
  siRNA target sequence for OPA1 (NM_015560.1,1281-1299).
gcatggctcctgacacaaa

SEQ ID NO: 109724 - DNA, 19 bp, Homo sapiens
  siRNA target sequence for OPA1 (NM_015560.1,1301-1319).
gaaactattttcagtatca

SEQ ID NO: 109725 - DNA, 19 bp, Homo sapiens
  siRNA target sequence for OPA1 (NM_015560.1,1336-1354).
gaatcctaatgccatcata

SEQ ID NO: 109726 - DNA, 19 bp, Homo sapiens
  siRNA target sequence for OPA1 (NM_015560.1,1378-1396).
ggatgctgaacgcagtatt

SEQ ID NO: 109727 - DNA, 19 bp, Homo sapiens
  siRNA target sequence for OPA1 (NM_015560.1,1382-1400).
gctgaacgcagtattgtta

SEQ ID NO: 109728 - DNA, 19 bp, Homo sapiens
  siRNA target sequence for OPA1 (NM_015560.1,1431-1449).
gaaggagaaccatattcgt

SEQ ID NO: 109729 - DNA, 19 bp, Homo sapiens
  siRNA target sequence for OPA1 (NM_015560.1,1434-1452).
ggagaaccatattcgtttt

SEQ ID NO: 109730 - DNA, 19 bp, Homo sapiens
  siRNA target sequence for OPA1 (NM_015560.1,1525-1543).
cttcccaatgaaagcttta

SEQ ID NO: 109731 - DNA, 19 bp, Homo sapiens
  siRNA target sequence for OPA1 (NM_015560.1,1694-1712).
gcagtatcagactgctttt

SEQ ID NO: 109732 - DNA, 19 bp, Homo sapiens
  siRNA target sequence for OPA1 (NM_015560.1,1720-1738).
ggtacgagagtctgttgaa

SEQ ID NO: 109733 - DNA, 19 bp, Homo sapiens
  siRNA target sequence for OPA1 (NM_015560.1,1739-1757).
caacaggctgatagtttca

SEQ ID NO: 109734 - DNA, 19 bp, Homo sapiens
  siRNA target sequence for OPA1 (NM_015560.1,1813-1831).
ggaacttgaccggaatgaa

SEQ ID NO: 109735 - DNA, 19 bp, Homo sapiens
  siRNA target sequence for OPA1 (NM_015560.1,1822-1840).
ccggaatgaactatttgaa

SEQ ID NO: 109736 - DNA, 19 bp, Homo sapiens
  siRNA target sequence for OPA1 (NM_015560.1,1823-1841).
cggaatgaactatttgaaa

SEQ ID NO: 109737 - DNA, 19 bp, Homo sapiens
  siRNA target sequence for OPA1 (NM_015560.1,1824-1842).
ggaatgaactatttgaaaa

SEQ ID NO: 109738 - DNA, 19 bp, Homo sapiens
  siRNA target sequence for OPA1 (NM_015560.1,1882-1900).
ccaggttacaccaaaacat

SEQ ID NO: 109739 - DNA, 19 bp, Homo sapiens
  siRNA target sequence for OPA1 (NM_015560.1,1883-1901).
caggttacaccaaaacatt

SEQ ID NO: 109740 - DNA, 19 bp, Homo sapiens
  siRNA target sequence for OPA1 (NM_015560.1,1935-1953).
gagtatcaactcatgtgat

SEQ ID NO: 109741 - DNA, 19 bp, Homo sapiens
  siRNA target sequence for OPA1 (NM_015560.1,1944-1962).
ctcatgtgattgaaaacat

SEQ ID NO: 109742 - DNA, 19 bp, Homo sapiens
  siRNA target sequence for OPA1 (NM_015560.1,2024-2042).
cttaaacagtggactgata

SEQ ID NO: 109743 - DNA, 19 bp, Homo sapiens
  siRNA target sequence for OPA1 (NM_015560.1,2032-2050).
gtggactgataaacaactt

SEQ ID NO: 109744 - DNA, 19 bp, Homo sapiens
  siRNA target sequence for OPA1 (NM_015560.1,2125-2143).
gaaagagcatgatgacata

SEQ ID NO: 109745 - DNA, 19 bp, Homo sapiens
  siRNA target sequence for OPA1 (NM_015560.1,2132-2150).
catgatgacatatttgata

SEQ ID NO: 109746 - DNA, 19 bp, Homo sapiens
  siRNA target sequence for OPA1 (NM_015560.1,2186-2204).
cgacacaagtggaatgact

SEQ ID NO: 109747 - DNA, 19 bp, Homo sapiens
  siRNA target sequence for OPA1 (NM_015560.1,2187-2205).
gacacaagtggaatgactt

SEQ ID NO: 109748 - DNA, 19 bp, Homo sapiens
  siRNA target sequence for OPA1 (NM_015560.1,2212-2230).
ggacagcttgagggttatt

SEQ ID NO: 109749 - DNA, 19 bp, Homo sapiens
  siRNA target sequence for OPA1 (NM_015560.1,2215-2233).
cagcttgagggttattcaa

SEQ ID NO: 109750 - DNA, 19 bp, Homo sapiens
  siRNA target sequence for OPA1 (NM_015560.1,2217-2235).
gcttgagggttattcaaca

SEQ ID NO: 109751 - DNA, 19 bp, Homo sapiens
  siRNA target sequence for OPA1 (NM_015560.1,2249-2267).
gaccgatccatatctgata

SEQ ID NO: 109752 - DNA, 19 bp, Homo sapiens
  siRNA target sequence for OPA1 (NM_015560.1,2251-2269).
ccgatccatatctgataaa

SEQ ID NO: 109753 - DNA, 19 bp, Homo sapiens
  siRNA target sequence for OPA1 (NM_015560.1,2272-2290).
gcaatgggatgcagctatt

SEQ ID NO: 109754 - DNA, 19 bp, Homo sapiens
  siRNA target sequence for OPA1 (NM_015560.1,2316-2334).
ctcgtctcaaggatactga

SEQ ID NO: 109755 - DNA, 19 bp, Homo sapiens
  siRNA target sequence for OPA1 (NM_015560.1,2354-2372).
gtgggtccagactggaaaa

SEQ ID NO: 109756 - DNA, 19 bp, Homo sapiens
  siRNA target sequence for OPA1 (NM_015560.1,2377-2395).
gtggttatactggaagaat

SEQ ID NO: 109757 - DNA, 19 bp, Homo sapiens
  siRNA target sequence for OPA1 (NM_015560.1,2464-2482).
ggagcacccagcttatctt

SEQ ID NO: 109758 - DNA, 19 bp, Homo sapiens
  siRNA target sequence for OPA1 (NM_015560.1,2523-2541).
cccgaggagtagaagtaga

SEQ ID NO: 109759 - DNA, 19 bp, Homo sapiens
  siRNA target sequence for OPA1 (NM_015560.1,2537-2555).
gtagatccaagcttgatta

SEQ ID NO: 109760 - DNA, 19 bp, Homo sapiens
  siRNA target sequence for OPA1 (NM_015560.1,2543-2561).
ccaagcttgattaaggata

SEQ ID NO: 109761 - DNA, 19 bp, Homo sapiens
  siRNA target sequence for OPA1 (NM_015560.1,2557-2575).
ggatacttggcatcaagtt

SEQ ID NO: 109762 - DNA, 19 bp, Homo sapiens
  siRNA target sequence for OPA1 (NM_015560.1,2558-2576).
gatacttggcatcaagttt

SEQ ID NO: 109763 - DNA, 19 bp, Homo sapiens
  siRNA target sequence for OPA1 (NM_015560.1,2598-2616).
cagctctaaaccattgtaa

SEQ ID NO: 109764 - DNA, 19 bp, Homo sapiens
  siRNA target sequence for OPA1 (NM_015560.1,2603-2621).
ctaaaccattgtaaccttt

SEQ ID NO: 109765 - DNA, 19 bp, Homo sapiens
  siRNA target sequence for OPA1 (NM_015560.1,2617-2635).
cctttgtcgaagaggtttt

SEQ ID NO: 109766 - DNA, 19 bp, Homo sapiens
  siRNA target sequence for OPA1 (NM_015560.1,2618-2636).
ctttgtcgaagaggttttt

SEQ ID NO: 109767 - DNA, 19 bp, Homo sapiens
  siRNA target sequence for OPA1 (NM_015560.1,2622-2640).
gtcgaagaggtttttatta

SEQ ID NO: 109768 - DNA, 19 bp, Homo sapiens
  siRNA target sequence for OPA1 (NM_015560.1,2624-2642).
cgaagaggtttttattact

SEQ ID NO: 109769 - DNA, 19 bp, Homo sapiens
  siRNA target sequence for OPA1 (NM_015560.1,2644-2662).
ccaaaggcattttgtagat

SEQ ID NO: 109770 - DNA, 19 bp, Homo sapiens
  siRNA target sequence for OPA1 (NM_015560.1,2676-2694).
gcaatgatgtggtcttgtt

SEQ ID NO: 109771 - DNA, 19 bp, Homo sapiens
  siRNA target sequence for OPA1 (NM_015560.1,2677-2695).
caatgatgtggtcttgttt

SEQ ID NO: 109772 - DNA, 19 bp, Homo sapiens
  siRNA target sequence for OPA1 (NM_015560.1,2714-2732).
cttgctatcaccgcaaata

SEQ ID NO: 109773 - DNA, 19 bp, Homo sapiens
  siRNA target sequence for OPA1 (NM_015560.1,2718-2736).
ctatcaccgcaaatacttt

SEQ ID NO: 109774 - DNA, 19 bp, Homo sapiens
  siRNA target sequence for OPA1 (NM_015560.1,2757-2775).
ctgaagttaggcgattaga

SEQ ID NO: 109775 - DNA, 19 bp, Homo sapiens
  siRNA target sequence for OPA1 (NM_015560.1,2759-2777).
gaagttaggcgattagaga

SEQ ID NO: 109776 - DNA, 19 bp, Homo sapiens
  siRNA target sequence for OPA1 (NM_015560.1,2762-2780).
gttaggcgattagagaaaa

SEQ ID NO: 109777 - DNA, 19 bp, Homo sapiens
  siRNA target sequence for OPA1 (NM_015560.1,2766-2784).
ggcgattagagaaaaatgt

SEQ ID NO: 109778 - DNA, 19 bp, Homo sapiens
  siRNA target sequence for OPA1 (NM_015560.1,2767-2785).
gcgattagagaaaaatgtt

SEQ ID NO: 109779 - DNA, 19 bp, Homo sapiens
  siRNA target sequence for OPA1 (NM_015560.1,2768-2786).
cgattagagaaaaatgtta

SEQ ID NO: 109780 - DNA, 19 bp, Homo sapiens
  siRNA target sequence for OPA1 (NM_015560.1,2791-2809).
ggtattggaagattttgct

SEQ ID NO: 109781 - DNA, 19 bp, Homo sapiens
  siRNA target sequence for OPA1 (NM_015560.1,2841-2859).
ctggtaaacgcgttcaact

SEQ ID NO: 109782 - DNA, 19 bp, Homo sapiens
  siRNA target sequence for OPA1 (NM_015560.1,2918-2936).
gctcttcatcaggagaaat

SEQ ID NO: 109783 - DNA, 19 bp, Homo sapiens
  siRNA target sequence for OPA1 (NM_130832.1,504-522).
gtcacaaattggttagtga

SEQ ID NO: 109784 - DNA, 19 bp, Homo sapiens
  siRNA target sequence for OPA1 (NM_130833.1,586-604).
gctcattctcttacaacaa

SEQ ID NO: 109785 - DNA, 19 bp, Homo sapiens
  siRNA target sequence for OPA1 (NM_130833.1,595-613).
cttacaacaacaaattcaa

SEQ ID NO: 109786 - DNA, 19 bp, Homo sapiens
  siRNA target sequence for OPA1 (NM_130833.1,638-656).
gccgctggccaatatagca

SEQ ID NO: 109787 - DNA, 19 bp, Homo sapiens
  siRNA target sequence for OPA1 (NM_130833.1,657-675).
cgagctatgcccaacagaa

SEQ ID NO: 109788 - DNA, 19 bp, Homo sapiens
  siRNA target sequence for OPA1 (NM_130834.1,606-624).
cctcaggtcacaaattggt

SEQ ID NO: 109789 - DNA, 19 bp, Homo sapiens
  siRNA target sequence for OPA1 (NM_130834.1,607-625).
ctcaggtcacaaattggtt

SEQ ID NO: 109790 - DNA, 19 bp, Homo sapiens
  siRNA target sequence for PCK1 (NM_002591.2,190-208).
gaacctctcggccaaagtt

SEQ ID NO: 109791 - DNA, 19 bp, Homo sapiens
  siRNA target sequence for PCK1 (NM_002591.2,246-264).
gggagtttctcgagaataa

SEQ ID NO: 109792 - DNA, 19 bp, Homo sapiens
  siRNA target sequence for PCK1 (NM_002591.2,361-379).
caggcggctgaagaagtat

SEQ ID NO: 109793 - DNA, 19 bp, Homo sapiens
  siRNA target sequence for PCK1 (NM_002591.2,611-629).
ggctcgcctctgtcaaaga

SEQ ID NO: 109794 - DNA, 19 bp, Homo sapiens
  siRNA target sequence for PCK1 (NM_002591.2,612-630).
gctcgcctctgtcaaagat

SEQ ID NO: 109795 - DNA, 19 bp, Homo sapiens
  siRNA target sequence for PCK1 (NM_002591.2,665-683).
gccagcatgcggatcatga

SEQ ID NO: 109796 - DNA, 19 bp, Homo sapiens
  siRNA target sequence for PCK1 (NM_002591.2,716-734).
ggcgatggggagtttgtca

SEQ ID NO: 109797 - DNA, 19 bp, Homo sapiens
  siRNA target sequence for PCK1 (NM_002591.2,717-735).
gcgatggggagtttgtcaa

SEQ ID NO: 109798 - DNA, 19 bp, Homo sapiens
  siRNA target sequence for PCK1 (NM_002591.2,718-736).
cgatggggagtttgtcaaa

SEQ ID NO: 109799 - DNA, 19 bp, Homo sapiens
  siRNA target sequence for PCK1 (NM_002591.2,831-849).
ctgaccgcagagagatcat

SEQ ID NO: 109800 - DNA, 19 bp, Homo sapiens
  siRNA target sequence for PCK1 (NM_002591.2,833-851).
gaccgcagagagatcatct

SEQ ID NO: 109801 - DNA, 19 bp, Homo sapiens
  siRNA target sequence for PCK1 (NM_002591.2,1094-1112).
gacattgcctggatgaagt

SEQ ID NO: 109802 - DNA, 19 bp, Homo sapiens
  siRNA target sequence for PCK1 (NM_002591.2,1115-1133).
gacgcacaaggtcatttaa

SEQ ID NO: 109803 - DNA, 19 bp, Homo sapiens
  siRNA target sequence for PCK1 (NM_002591.2,1135-1153).
ggccatcaacccagaaaat

SEQ ID NO: 109804 - DNA, 19 bp, Homo sapiens
  siRNA target sequence for PCK1 (NM_002591.2,1222-1240).
gaacacaatctttaccaat

SEQ ID NO: 109805 - DNA, 19 bp, Homo sapiens
  siRNA target sequence for PCK1 (NM_002591.2,1679-1697).
gccaaactgcccaagatct

SEQ ID NO: 109806 - DNA, 19 bp, Homo sapiens
  siRNA target sequence for PCK1 (NM_002591.2,1680-1698).
ccaaactgcccaagatctt

SEQ ID NO: 109807 - DNA, 19 bp, Homo sapiens
  siRNA target sequence for PCK1 (NM_002591.2,1786-1804).
caaccggatcgatggaaaa

SEQ ID NO: 109808 - DNA, 19 bp, Homo sapiens
  siRNA target sequence for PCK1 (NM_002591.2,1967-1985).
gccgacctcccctgtgaaa

SEQ ID NO: 109809 - DNA, 19 bp, Homo sapiens
  siRNA target sequence for PCK1 (NM_002591.2,1968-1986).
ccgacctcccctgtgaaat

SEQ ID NO: 109810 - DNA, 19 bp, Homo sapiens
  siRNA target sequence for PCK2 (NM_004563.1,85-103).
cctggcctgcggcttaact

SEQ ID NO: 109811 - DNA, 19 bp, Homo sapiens
  siRNA target sequence for PCK2 (NM_004563.1,188-206).
ccactggcattcgagattt

SEQ ID NO: 109812 - DNA, 19 bp, Homo sapiens
  siRNA target sequence for PCK2 (NM_004563.1,189-207).
cactggcattcgagatttt

SEQ ID NO: 109813 - DNA, 19 bp, Homo sapiens
  siRNA target sequence for PCK2 (NM_004563.1,194-212).
gcattcgagattttgtaga

SEQ ID NO: 109814 - DNA, 19 bp, Homo sapiens
  siRNA target sequence for PCK2 (NM_004563.1,316-334).
cgaaagctccccaagtaca

SEQ ID NO: 109815 - DNA, 19 bp, Homo sapiens
  siRNA target sequence for PCK2 (NM_004563.1,322-340).
ctccccaagtacaataact

SEQ ID NO: 109816 - DNA, 19 bp, Homo sapiens
  siRNA target sequence for PCK2 (NM_004563.1,384-402).
gagcaagacggtgattgta

SEQ ID NO: 109817 - DNA, 19 bp, Homo sapiens
  siRNA target sequence for PCK2 (NM_004563.1,467-485).
ggatgtccccagctgattt

SEQ ID NO: 109818 - DNA, 19 bp, Homo sapiens
  siRNA target sequence for PCK2 (NM_004563.1,619-637).
gtggcaagcatgcgtatta

SEQ ID NO: 109819 - DNA, 19 bp, Homo sapiens
  siRNA target sequence for PCK2 (NM_004563.1,622-640).
gcaagcatgcgtattatga

SEQ ID NO: 109820 - DNA, 19 bp, Homo sapiens
  siRNA target sequence for PCK2 (NM_004563.1,750-768).
gccgtgcaacccagagaaa

SEQ ID NO: 109821 - DNA, 19 bp, Homo sapiens
  siRNA target sequence for PCK2 (NM_004563.1,751-769).
ccgtgcaacccagagaaaa

SEQ ID NO: 109822 - DNA, 19 bp, Homo sapiens
  siRNA target sequence for PCK2 (NM_004563.1,1101-1119).
ccctgagaacggcttcttt

SEQ ID NO: 109823 - DNA, 19 bp, Homo sapiens
  siRNA target sequence for PCK2 (NM_004563.1,1154-1172).
ccaacgccatggctacaat

SEQ ID NO: 109824 - DNA, 19 bp, Homo sapiens
  siRNA target sequence for PCK2 (NM_004563.1,1169-1187).
caatccagagtaacactat

SEQ ID NO: 109825 - DNA, 19 bp, Homo sapiens
  siRNA target sequence for PCK2 (NM_004563.1,1173-1191).
ccagagtaacactattttt

SEQ ID NO: 109826 - DNA, 19 bp, Homo sapiens
  siRNA target sequence for PCK2 (NM_004563.1,1178-1196).
gtaacactatttttaccaa

SEQ ID NO: 109827 - DNA, 19 bp, Homo sapiens
  siRNA target sequence for PCK2 (NM_004563.1,1321-1339).
catcccaactctcgatttt

SEQ ID NO: 109828 - DNA, 19 bp, Homo sapiens
  siRNA target sequence for PCK2 (NM_004563.1,1400-1418).
ccattgacgccatcatctt

SEQ ID NO: 109829 - DNA, 19 bp, Homo sapiens
  siRNA target sequence for PCK2 (NM_004563.1,1439-1457).
gggtacccctggtatacga

SEQ ID NO: 109830 - DNA, 19 bp, Homo sapiens
  siRNA target sequence for PCK2 (NM_004563.1,1450-1468).
gtatacgaggccttcaact

SEQ ID NO: 109831 - DNA, 19 bp, Homo sapiens
  siRNA target sequence for PCK2 (NM_004563.1,1637-1655).
cccagctgccccgtatctt

SEQ ID NO: 109832 - DNA, 19 bp, Homo sapiens
  siRNA target sequence for PCK2 (NM_004563.1,1646-1664).
cccgtatcttccatgtcaa

SEQ ID NO: 109833 - DNA, 19 bp, Homo sapiens
  siRNA target sequence for PCK2 (NM_004563.1,1820-1838).
gcggcctcagagctataga

SEQ ID NO: 109834 - DNA, 19 bp, Homo sapiens
  siRNA target sequence for PGPL (NM_012227.1,538-556).
ccccgaccaagaaagaact

SEQ ID NO: 109835 - DNA, 19 bp, Homo sapiens
  siRNA target sequence for PGPL (NM_012227.1,672-690).
ctgcacaggtcgaacttga

SEQ ID NO: 109836 - DNA, 19 bp, Homo sapiens
  siRNA target sequence for PGPL (NM_012227.1,720-738).
gtcggctcgcgctacatca

SEQ ID NO: 109837 - DNA, 19 bp, Homo sapiens
  siRNA target sequence for PNUTL1 (NM_002688.2,335-353).
gccagacggtagagattct

SEQ ID NO: 109838 - DNA, 19 bp, Homo sapiens
  siRNA target sequence for PNUTL1 (NM_002688.2,336-354).
ccagacggtagagattcta

SEQ ID NO: 109839 - DNA, 19 bp, Homo sapiens
  siRNA target sequence for PNUTL1 (NM_002688.2,337-355).
cagacggtagagattctaa

SEQ ID NO: 109840 - DNA, 19 bp, Homo sapiens
  siRNA target sequence for PNUTL1 (NM_002688.2,339-357).
gacggtagagattctaaaa

SEQ ID NO: 109841 - DNA, 19 bp, Homo sapiens
  siRNA target sequence for PNUTL1 (NM_002688.2,341-359).
cggtagagattctaaaaca

SEQ ID NO: 109842 - DNA, 19 bp, Homo sapiens
  siRNA target sequence for PNUTL1 (NM_002688.2,1102-1120).
gccgagactgagaagctta

SEQ ID NO: 109843 - DNA, 19 bp, Homo sapiens
  siRNA target sequence for PNUTL2 (NM_004574.2,143-161).
gggatggcaagggaattct

SEQ ID NO: 109844 - DNA, 19 bp, Homo sapiens
  siRNA target sequence for PNUTL2 (NM_004574.2,145-163).
gatggcaagggaattctgt

SEQ ID NO: 109845 - DNA, 19 bp, Homo sapiens
  siRNA target sequence for PNUTL2 (NM_004574.2,236-254).
gttcgtgaaggatttctca

SEQ ID NO: 109846 - DNA, 19 bp, Homo sapiens
  siRNA target sequence for PNUTL2 (NM_004574.2,458-476).
caagcttgatccctatgat

SEQ ID NO: 109847 - DNA, 19 bp, Homo sapiens
  siRNA target sequence for PNUTL2 (NM_004574.2,635-653).
gtaccgggaccggaaactt

SEQ ID NO: 109848 - DNA, 19 bp, Homo sapiens
  siRNA target sequence for PNUTL2 (NM_004574.2,797-815).
gcctgtggcagaatacatt

SEQ ID NO: 109849 - DNA, 19 bp, Homo sapiens
  siRNA target sequence for PNUTL2 (NM_004574.2,930-948).
cggccattggatgttgaat

SEQ ID NO: 109850 - DNA, 19 bp, Homo sapiens
  siRNA target sequence for PNUTL2 (NM_004574.2,931-949).
ggccattggatgttgaatt

SEQ ID NO: 109851 - DNA, 19 bp, Homo sapiens
  siRNA target sequence for PNUTL2 (NM_004574.2,1052-1070).
ggagattgagcattttgga

SEQ ID NO: 109852 - DNA, 19 bp, Homo sapiens
  siRNA target sequence for PNUTL2 (NM_004574.2,1062-1080).
cattttggaatcaagatct

SEQ ID NO: 109853 - DNA, 19 bp, Homo sapiens
  siRNA target sequence for PNUTL2 (NM_004574.2,1068-1086).
ggaatcaagatctatcaat

SEQ ID NO: 109854 - DNA, 19 bp, Homo sapiens
  siRNA target sequence for PNUTL2 (NM_004574.2,1069-1087).
gaatcaagatctatcaatt

SEQ ID NO: 109855 - DNA, 19 bp, Homo sapiens
  siRNA target sequence for PNUTL2 (NM_004574.2,1171-1189).
gcagcaacactgtagtaga

SEQ ID NO: 109856 - DNA, 19 bp, Homo sapiens
  siRNA target sequence for PNUTL2 (NM_004574.2,1391-1409).
ggaacggaatcgcaacaaa

SEQ ID NO: 109857 - DNA, 19 bp, Homo sapiens
  siRNA target sequence for PNUTL2 (NM_004574.2,1395-1413).
cggaatcgcaacaaactga

SEQ ID NO: 109858 - DNA, 19 bp, Homo sapiens
  siRNA target sequence for PTD004 (NM_013341.2,38-56).
ccacccccaatcattggaa

SEQ ID NO: 109859 - DNA, 19 bp, Homo sapiens
  siRNA target sequence for PTD004 (NM_013341.2,42-60).
ccccaatcattggaagatt

SEQ ID NO: 109860 - DNA, 19 bp, Homo sapiens
  siRNA target sequence for PTD004 (NM_013341.2,66-84).
cctcactgaaaattggtat

SEQ ID NO: 109861 - DNA, 19 bp, Homo sapiens
  siRNA target sequence for PTD004 (NM_013341.2,94-112).
gccaaatgttgggaaatct

SEQ ID NO: 109862 - DNA, 19 bp, Homo sapiens
  siRNA target sequence for PTD004 (NM_013341.2,105-123).
ggaaatctactttcttcaa

SEQ ID NO: 109863 - DNA, 19 bp, Homo sapiens
  siRNA target sequence for PTD004 (NM_013341.2,121-139).
caatgtgttaaccaatagt

SEQ ID NO: 109864 - DNA, 19 bp, Homo sapiens
  siRNA target sequence for PTD004 (NM_013341.2,140-158).
caggcttcagcagaaaact

SEQ ID NO: 109865 - DNA, 19 bp, Homo sapiens
  siRNA target sequence for PTD004 (NM_013341.2,160-178).
cccgttctgcactattgat

SEQ ID NO: 109866 - DNA, 19 bp, Homo sapiens
  siRNA target sequence for PTD004 (NM_013341.2,166-184).
ctgcactattgatcctaat

SEQ ID NO: 109867 - DNA, 19 bp, Homo sapiens
  siRNA target sequence for PTD004 (NM_013341.2,213-231).
ggtttgactttctttgtca

SEQ ID NO: 109868 - DNA, 19 bp, Homo sapiens
  siRNA target sequence for PTD004 (NM_013341.2,318-336).
gcctggggaatgctttttt

SEQ ID NO: 109869 - DNA, 19 bp, Homo sapiens
  siRNA target sequence for PTD004 (NM_013341.2,322-340).
ggggaatgcttttttatct

SEQ ID NO: 109870 - DNA, 19 bp, Homo sapiens
  siRNA target sequence for PTD004 (NM_013341.2,324-342).
ggaatgcttttttatctca

SEQ ID NO: 109871 - DNA, 19 bp, Homo sapiens
  siRNA target sequence for PTD004 (NM_013341.2,354-372).
gtgatggcatctttcatct

SEQ ID NO: 109872 - DNA, 19 bp, Homo sapiens
  siRNA target sequence for PTD004 (NM_013341.2,356-374).
gatggcatctttcatctaa

SEQ ID NO: 109873 - DNA, 19 bp, Homo sapiens
  siRNA target sequence for PTD004 (NM_013341.2,406-424).
cgttgaaggaagtgtagat

SEQ ID NO: 109874 - DNA, 19 bp, Homo sapiens
  siRNA target sequence for PTD004 (NM_013341.2,425-443).
cctattcgagatatagaaa

SEQ ID NO: 109875 - DNA, 19 bp, Homo sapiens
  siRNA target sequence for PTD004 (NM_013341.2,486-504).
ggcccattatagataaact

SEQ ID NO: 109876 - DNA, 19 bp, Homo sapiens
  siRNA target sequence for PTD004 (NM_013341.2,487-505).
gcccattatagataaacta

SEQ ID NO: 109877 - DNA, 19 bp, Homo sapiens
  siRNA target sequence for PTD004 (NM_013341.2,489-507).
ccattatagataaactaga

SEQ ID NO: 109878 - DNA, 19 bp, Homo sapiens
  siRNA target sequence for PTD004 (NM_013341.2,539-557).
ctaaaacctgaatatgata

SEQ ID NO: 109879 - DNA, 19 bp, Homo sapiens
  siRNA target sequence for PTD004 (NM_013341.2,554-572).
gatataatgtgcaaagtaa

SEQ ID NO: 109880 - DNA, 19 bp, Homo sapiens
  siRNA target sequence for PTD004 (NM_013341.2,600-618).
ctgttcgcttctatcatga

SEQ ID NO: 109881 - DNA, 19 bp, Homo sapiens
  siRNA target sequence for PTD004 (NM_013341.2,602-620).
gttcgcttctatcatgatt

SEQ ID NO: 109882 - DNA, 19 bp, Homo sapiens
  siRNA target sequence for RAB11A (NM_004663.3,212-230).
gtctcgatttactcgaaat

SEQ ID NO: 109883 - DNA, 19 bp, Homo sapiens
  siRNA target sequence for RAB11A (NM_004663.3,214-232).
ctcgatttactcgaaatga

SEQ ID NO: 109884 - DNA, 19 bp, Homo sapiens
  siRNA target sequence for RAB11A (NM_004663.3,216-234).
cgatttactcgaaatgagt

SEQ ID NO: 109885 - DNA, 19 bp, Homo sapiens
  siRNA target sequence for RAB11A (NM_004663.3,217-235).
gatttactcgaaatgagtt

SEQ ID NO: 109886 - DNA, 19 bp, Homo sapiens
  siRNA target sequence for RAB11A (NM_004663.3,253-271).
gcaccattggagtagagtt

SEQ ID NO: 109887 - DNA, 19 bp, Homo sapiens
  siRNA target sequence for RAB11A (NM_004663.3,339-357).
gagcgatatcgagctataa

SEQ ID NO: 109888 - DNA, 19 bp, Homo sapiens
  siRNA target sequence for RAB11A (NM_004663.3,341-359).
gcgatatcgagctataaca

SEQ ID NO: 109889 - DNA, 19 bp, Homo sapiens
  siRNA target sequence for RAB11A (NM_004663.3,342-360).
cgatatcgagctataacat

SEQ ID NO: 109890 - DNA, 19 bp, Homo sapiens
  siRNA target sequence for RAB11A (NM_004663.3,455-473).
gagagatcatgctgatagt

SEQ ID NO: 109891 - DNA, 19 bp, Homo sapiens
  siRNA target sequence for RAB11A (NM_004663.3,457-475).
gagatcatgctgatagtaa

SEQ ID NO: 109892 - DNA, 19 bp, Homo sapiens
  siRNA target sequence for RAB11A (NM_004663.3,563-581).
gaatggtttgtcattcatt

SEQ ID NO: 109893 - DNA, 19 bp, Homo sapiens
  siRNA target sequence for RAB11A (NM_004663.3,589-607).
cggccctagactctacaaa

SEQ ID NO: 109894 - DNA, 19 bp, Homo sapiens
  siRNA target sequence for RAB11A (NM_004663.3,590-608).
ggccctagactctacaaat

SEQ ID NO: 109895 - DNA, 19 bp, Homo sapiens
  siRNA target sequence for RAB11A (NM_004663.3,593-611).
cctagactctacaaatgta

SEQ ID NO: 109896 - DNA, 19 bp, Homo sapiens
  siRNA target sequence for RAB11A (NM_004663.3,639-657).
gagatttaccgcattgttt

SEQ ID NO: 109897 - DNA, 19 bp, Homo sapiens
  siRNA target sequence for RAB11A (NM_004663.3,671-689).
gtcagacagacgcgaaaat

SEQ ID NO: 109898 - DNA, 19 bp, Homo sapiens
  siRNA target sequence for RAB11A (NM_004663.3,692-710).
catgtctccaagcaacaat

SEQ ID NO: 109899 - DNA, 19 bp, Homo sapiens
  siRNA target sequence for RAB11A (NM_004663.3,707-725).
caatgtggttcctattcat

SEQ ID NO: 109900 - DNA, 19 bp, Homo sapiens
  siRNA target sequence for RAB11B (NM_004218.1,427-445).
gccttcgcagaaaagaaca

SEQ ID NO: 109901 - DNA, 19 bp, Homo sapiens
  siRNA target sequence for RAB11B (NM_004218.1,428-446).
ccttcgcagaaaagaacaa

SEQ ID NO: 109902 - DNA, 19 bp, Homo sapiens
  siRNA target sequence for RAB11B (NM_004218.1,471-489).
cttggattccactaacgta

SEQ ID NO: 109903 - DNA, 19 bp, Homo sapiens
  siRNA target sequence for RAB11B (NM_004218.1,482-500).
ctaacgtagaggaagcatt

SEQ ID NO: 109904 - DNA, 19 bp, Homo sapiens
  siRNA target sequence for RAB11B (NM_004218.1,487-505).
gtagaggaagcattcaaga

SEQ ID NO: 109905 - DNA, 19 bp, Homo sapiens
  siRNA target sequence for RAB14 (NM_016322.2,187-205).
gcaactgcaccatacaact

SEQ ID NO: 109906 - DNA, 19 bp, Homo sapiens
  siRNA target sequence for RAB14 (NM_016322.2,188-206).
caactgcaccatacaacta

SEQ ID NO: 109907 - DNA, 19 bp, Homo sapiens
  siRNA target sequence for RAB14 (NM_016322.2,193-211).
gcaccatacaactactctt

SEQ ID NO: 109908 - DNA, 19 bp, Homo sapiens
  siRNA target sequence for RAB14 (NM_016322.2,194-212).
caccatacaactactctta

SEQ ID NO: 109909 - DNA, 19 bp, Homo sapiens
  siRNA target sequence for RAB14 (NM_016322.2,196-214).
ccatacaactactcttaca

SEQ ID NO: 109910 - DNA, 19 bp, Homo sapiens
  siRNA target sequence for RAB14 (NM_016322.2,296-314).
ctgattgtcctcacacaat

SEQ ID NO: 109911 - DNA, 19 bp, Homo sapiens
  siRNA target sequence for RAB14 (NM_016322.2,319-337).
gttgaatttggtacaagaa

SEQ ID NO: 109912 - DNA, 19 bp, Homo sapiens
  siRNA target sequence for RAB14 (NM_016322.2,342-360).
cgaagttagtggccaaaaa

SEQ ID NO: 109913 - DNA, 19 bp, Homo sapiens
  siRNA target sequence for RAB14 (NM_016322.2,346-364).
gttagtggccaaaaaataa

SEQ ID NO: 109914 - DNA, 19 bp, Homo sapiens
  siRNA target sequence for RAB14 (NM_016322.2,409-427).
gttacacggagctactaca

SEQ ID NO: 109915 - DNA, 19 bp, Homo sapiens
  siRNA target sequence for RAB14 (NM_016322.2,434-452).
ctgcgggagctcttatggt

SEQ ID NO: 109916 - DNA, 19 bp, Homo sapiens
  siRNA target sequence for RAB14 (NM_016322.2,440-458).
gagctcttatggtctatga

SEQ ID NO: 109917 - DNA, 19 bp, Homo sapiens
  siRNA target sequence for RAB14 (NM_016322.2,442-460).
gctcttatggtctatgata

SEQ ID NO: 109918 - DNA, 19 bp, Homo sapiens
  siRNA target sequence for RAB14 (NM_016322.2,443-461).
ctcttatggtctatgatat

SEQ ID NO: 109919 - DNA, 19 bp, Homo sapiens
  siRNA target sequence for RAB14 (NM_016322.2,445-463).
cttatggtctatgatatca

SEQ ID NO: 109920 - DNA, 19 bp, Homo sapiens
  siRNA target sequence for RAB14 (NM_016322.2,464-482).
ctagaagaagtacatataa

SEQ ID NO: 109921 - DNA, 19 bp, Homo sapiens
  siRNA target sequence for RAB14 (NM_016322.2,519-537).
caccaatccaaatactgta

SEQ ID NO: 109922 - DNA, 19 bp, Homo sapiens
  siRNA target sequence for RAB14 (NM_016322.2,521-539).
ccaatccaaatactgtaat

SEQ ID NO: 109923 - DNA, 19 bp, Homo sapiens
  siRNA target sequence for RAB14 (NM_016322.2,522-540).
caatccaaatactgtaata

SEQ ID NO: 109924 - DNA, 19 bp, Homo sapiens
  siRNA target sequence for RAB14 (NM_016322.2,633-651).
cctcgaagcgagtgcaaaa

SEQ ID NO: 109925 - DNA, 19 bp, Homo sapiens
  siRNA target sequence for RAB14 (NM_016322.2,693-711).
gaaaatctatcagaacatt

SEQ ID NO: 109926 - DNA, 19 bp, Homo sapiens
  siRNA target sequence for RAB17 (NM_022449.1,690-708).
gccagccccgtgtgttcaa

SEQ ID NO: 109927 - DNA, 19 bp, Homo sapiens
  siRNA target sequence for RAB17 (NM_022449.1,753-771).
ctcttcggtacgtgaagaa

SEQ ID NO: 109928 - DNA, 19 bp, Homo sapiens
  siRNA target sequence for RAB17 (NM_022449.1,800-818).
ggctgtgcgttcttcacaa

SEQ ID NO: 109929 - DNA, 19 bp, Homo sapiens
  siRNA target sequence for RAB17 (NM_022449.1,891-909).
gcgtctgccacctctactt

SEQ ID NO: 109930 - DNA, 19 bp, Homo sapiens
  siRNA target sequence for RAB17 (NM_022449.1,1124-1142).
gaaacttcggccaaactga

SEQ ID NO: 109931 - DNA, 19 bp, Homo sapiens
  siRNA target sequence for RAB17 (NM_022449.1,1150-1168).
ggtgtcggaggtgttcaat

SEQ ID NO: 109932 - DNA, 19 bp, Homo sapiens
  siRNA target sequence for RAB17 (NM_022449.1,1151-1169).
gtgtcggaggtgttcaata

SEQ ID NO: 109933 - DNA, 19 bp, Homo sapiens
  siRNA target sequence for RAB17 (NM_022449.1,1155-1173).
cggaggtgttcaatacagt

SEQ ID NO: 109934 - DNA, 19 bp, Homo sapiens
  siRNA target sequence for RAB18 (NM_021252.3,166-184).
caacaataggtgttgactt

SEQ ID NO: 109935 - DNA, 19 bp, Homo sapiens
  siRNA target sequence for RAB18 (NM_021252.3,249-267).
caagagaggtttagaacat

SEQ ID NO: 109936 - DNA, 19 bp, Homo sapiens
  siRNA target sequence for RAB18 (NM_021252.3,254-272).
gaggtttagaacattaact

SEQ ID NO: 109937 - DNA, 19 bp, Homo sapiens
  siRNA target sequence for RAB18 (NM_021252.3,288-306).
ggtgcacagggtgttatat

SEQ ID NO: 109938 - DNA, 19 bp, Homo sapiens
  siRNA target sequence for RAB18 (NM_021252.3,289-307).
gtgcacagggtgttatatt

SEQ ID NO: 109939 - DNA, 19 bp, Homo sapiens
  siRNA target sequence for RAB18 (NM_021252.3,294-312).
cagggtgttatattagttt

SEQ ID NO: 109940 - DNA, 19 bp, Homo sapiens
  siRNA target sequence for RAB18 (NM_021252.3,296-314).
gggtgttatattagtttat

SEQ ID NO: 109941 - DNA, 19 bp, Homo sapiens
  siRNA target sequence for RAB18 (NM_021252.3,298-316).
gtgttatattagtttatga

SEQ ID NO: 109942 - DNA, 19 bp, Homo sapiens
  siRNA target sequence for RAB18 (NM_021252.3,318-336).
gtcacaagaagagatacat

SEQ ID NO: 109943 - DNA, 19 bp, Homo sapiens
  siRNA target sequence for RAB18 (NM_021252.3,325-343).
gaagagatacatttgttaa

SEQ ID NO: 109944 - DNA, 19 bp, Homo sapiens
  siRNA target sequence for RAB18 (NM_021252.3,368-386).
ggaaacatactgtacaaga

SEQ ID NO: 109945 - DNA, 19 bp, Homo sapiens
  siRNA target sequence for RAB18 (NM_021252.3,373-391).
catactgtacaagaaatga

SEQ ID NO: 109946 - DNA, 19 bp, Homo sapiens
  siRNA target sequence for RAB18 (NM_021252.3,412-430).
gaaataaaatcgataagga

SEQ ID NO: 109947 - DNA, 19 bp, Homo sapiens
  siRNA target sequence for RAB18 (NM_021252.3,436-454).
gtgaagtcgatagaaatga

SEQ ID NO: 109948 - DNA, 19 bp, Homo sapiens
  siRNA target sequence for RAB18 (NM_021252.3,495-513).
gaggcaagtgcaaaaacct

SEQ ID NO: 109949 - DNA, 19 bp, Homo sapiens
  siRNA target sequence for RAB1A (NM_004161.2,184-202).
cagcatgaatcccgaatat

SEQ ID NO: 109950 - DNA, 19 bp, Homo sapiens
  siRNA target sequence for RAB1A (NM_004161.2,190-208).
gaatcccgaatatgattat

SEQ ID NO: 109951 - DNA, 19 bp, Homo sapiens
  siRNA target sequence for RAB1A (NM_004161.2,194-212).
cccgaatatgattatttat

SEQ ID NO: 109952 - DNA, 19 bp, Homo sapiens
  siRNA target sequence for RAB1A (NM_004161.2,195-213).
ccgaatatgattatttatt

SEQ ID NO: 109953 - DNA, 19 bp, Homo sapiens
  siRNA target sequence for RAB1A (NM_004161.2,231-249).
gcgactcaggggttggaaa

SEQ ID NO: 109954 - DNA, 19 bp, Homo sapiens
  siRNA target sequence for RAB1A (NM_004161.2,252-270).
cttgccttcttcttaggtt

SEQ ID NO: 109955 - DNA, 19 bp, Homo sapiens
  siRNA target sequence for RAB1A (NM_004161.2,267-285).
ggtttgcagatgatacata

SEQ ID NO: 109956 - DNA, 19 bp, Homo sapiens
  siRNA target sequence for RAB1A (NM_004161.2,295-313).
ctacatcagcacaattggt

SEQ ID NO: 109957 - DNA, 19 bp, Homo sapiens
  siRNA target sequence for RAB1A (NM_004161.2,303-321).
gcacaattggtgtggattt

SEQ ID NO: 109958 - DNA, 19 bp, Homo sapiens
  siRNA target sequence for RAB1A (NM_004161.2,338-356).
gagttagacgggaaaacaa

SEQ ID NO: 109959 - DNA, 19 bp, Homo sapiens
  siRNA target sequence for RAB1A (NM_004161.2,426-444).
gagcccatggcatcatagt

SEQ ID NO: 109960 - DNA, 19 bp, Homo sapiens
  siRNA target sequence for RAB1A (NM_004161.2,461-479).
gatcaggagtccttcaata

SEQ ID NO: 109961 - DNA, 19 bp, Homo sapiens
  siRNA target sequence for RAB1A (NM_004161.2,467-485).
gagtccttcaataatgtta

SEQ ID NO: 109962 - DNA, 19 bp, Homo sapiens
  siRNA target sequence for RAB1A (NM_004161.2,469-487).
gtccttcaataatgttaaa

SEQ ID NO: 109963 - DNA, 19 bp, Homo sapiens
  siRNA target sequence for RAB1A (NM_004161.2,471-489).
ccttcaataatgttaaaca

SEQ ID NO: 109964 - DNA, 19 bp, Homo sapiens
  siRNA target sequence for RAB1A (NM_004161.2,490-508).
gtggctgcaggaaatagat

SEQ ID NO: 109965 - DNA, 19 bp, Homo sapiens
  siRNA target sequence for RAB1A (NM_004161.2,506-524).
gatcgttatgccagtgaaa

SEQ ID NO: 109966 - DNA, 19 bp, Homo sapiens
  siRNA target sequence for RAB1A (NM_004161.2,510-528).
gttatgccagtgaaaatgt

SEQ ID NO: 109967 - DNA, 19 bp, Homo sapiens
  siRNA target sequence for RAB1A (NM_004161.2,538-556).
gttggtagggaacaaatgt

SEQ ID NO: 109968 - DNA, 19 bp, Homo sapiens
  siRNA target sequence for RAB1A (NM_004161.2,567-585).
caaagaaagtagtagacta

SEQ ID NO: 109969 - DNA, 19 bp, Homo sapiens
  siRNA target sequence for RAB1A (NM_004161.2,617-635).
ggaattccgtttttggaaa

SEQ ID NO: 109970 - DNA, 19 bp, Homo sapiens
  siRNA target sequence for RAB2 (NM_002865.1,246-264).
gcgacacaggtgttggtaa

SEQ ID NO: 109971 - DNA, 19 bp, Homo sapiens
  siRNA target sequence for RAB2 (NM_002865.1,250-268).
cacaggtgttggtaaatca

SEQ ID NO: 109972 - DNA, 19 bp, Homo sapiens
  siRNA target sequence for RAB2 (NM_002865.1,257-275).
gttggtaaatcatgcttat

SEQ ID NO: 109973 - DNA, 19 bp, Homo sapiens
  siRNA target sequence for RAB2 (NM_002865.1,271-289).
cttattgctacagtttaca

SEQ ID NO: 109974 - DNA, 19 bp, Homo sapiens
  siRNA target sequence for RAB2 (NM_002865.1,305-323).
ccagtgcatgaccttacta

SEQ ID NO: 109975 - DNA, 19 bp, Homo sapiens
  siRNA target sequence for RAB2 (NM_002865.1,306-324).
cagtgcatgaccttactat

SEQ ID NO: 109976 - DNA, 19 bp, Homo sapiens
  siRNA target sequence for RAB2 (NM_002865.1,310-328).
gcatgaccttactattggt

SEQ ID NO: 109977 - DNA, 19 bp, Homo sapiens
  siRNA target sequence for RAB2 (NM_002865.1,334-352).
gttcggtgctcgaatgata

SEQ ID NO: 109978 - DNA, 19 bp, Homo sapiens
  siRNA target sequence for RAB2 (NM_002865.1,337-355).
cggtgctcgaatgataact

SEQ ID NO: 109979 - DNA, 19 bp, Homo sapiens
  siRNA target sequence for RAB2 (NM_002865.1,338-356).
ggtgctcgaatgataacta

SEQ ID NO: 109980 - DNA, 19 bp, Homo sapiens
  siRNA target sequence for RAB2 (NM_002865.1,339-357).
gtgctcgaatgataactat

SEQ ID NO: 109981 - DNA, 19 bp, Homo sapiens
  siRNA target sequence for RAB2 (NM_002865.1,342-360).
ctcgaatgataactattga

SEQ ID NO: 109982 - DNA, 19 bp, Homo sapiens
  siRNA target sequence for RAB2 (NM_002865.1,417-435).
ccatcacaaggtcgtatta

SEQ ID NO: 109983 - DNA, 19 bp, Homo sapiens
  siRNA target sequence for RAB2 (NM_002865.1,421-439).
cacaaggtcgtattacaga

SEQ ID NO: 109984 - DNA, 19 bp, Homo sapiens
  siRNA target sequence for RAB2 (NM_002865.1,446-464).
gcaggagctttactagttt

SEQ ID NO: 109985 - DNA, 19 bp, Homo sapiens
  siRNA target sequence for RAB2 (NM_002865.1,447-465).
caggagctttactagttta

SEQ ID NO: 109986 - DNA, 19 bp, Homo sapiens
  siRNA target sequence for RAB2 (NM_002865.1,450-468).
gagctttactagtttacga

SEQ ID NO: 109987 - DNA, 19 bp, Homo sapiens
  siRNA target sequence for RAB2 (NM_002865.1,467-485).
gatattacacggagagata

SEQ ID NO: 109988 - DNA, 19 bp, Homo sapiens
  siRNA target sequence for RAB2 (NM_002865.1,496-514).
cttgacaacctggttagaa

SEQ ID NO: 109989 - DNA, 19 bp, Homo sapiens
  siRNA target sequence for RAB2 (NM_002865.1,499-517).
gacaacctggttagaagat

SEQ ID NO: 109990 - DNA, 19 bp, Homo sapiens
  siRNA target sequence for RAB2 (NM_002865.1,521-539).
cgccagcattccaattcca

SEQ ID NO: 109991 - DNA, 19 bp, Homo sapiens
  siRNA target sequence for RAB2 (NM_002865.1,541-559).
catggtcattatgcttatt

SEQ ID NO: 109992 - DNA, 19 bp, Homo sapiens
  siRNA target sequence for RAB2 (NM_002865.1,725-743).
gaaggagtctttgacatta

SEQ ID NO: 109993 - DNA, 19 bp, Homo sapiens
  siRNA target sequence for RAB20 (NM_017817.1,264-282).
cgctgctgcagcggtatat

SEQ ID NO: 109994 - DNA, 19 bp, Homo sapiens
  siRNA target sequence for RAB20 (NM_017817.1,661-679).
ggatgcggtggccctttat

SEQ ID NO: 109995 - DNA, 19 bp, Homo sapiens
  siRNA target sequence for RAB20 (NM_017817.1,662-680).
gatgcggtggccctttata

SEQ ID NO: 109996 - DNA, 19 bp, Homo sapiens
  siRNA target sequence for RAB20 (NM_017817.1,754-772).
cgccaagaccggctacaat

SEQ ID NO: 109997 - DNA, 19 bp, Homo sapiens
  siRNA target sequence for RAB20 (NM_017817.1,756-774).
ccaagaccggctacaatgt

SEQ ID NO: 109998 - DNA, 19 bp, Homo sapiens
  siRNA target sequence for RAB20 (NM_017817.1,854-872).
gtggatatatccagtcata

SEQ ID NO: 109999 - DNA, 19 bp, Homo sapiens
  siRNA target sequence for RAB21 (NM_014999.1,367-385).
cgctactgcgagaacaagt

SEQ ID NO: 110000 - DNA, 19 bp, Homo sapiens
  siRNA target sequence for RAB21 (NM_014999.1,368-386).
gctactgcgagaacaagtt

SEQ ID NO: 110001 - DNA, 19 bp, Homo sapiens
  siRNA target sequence for RAB21 (NM_014999.1,369-387).
ctactgcgagaacaagttt

SEQ ID NO: 110002 - DNA, 19 bp, Homo sapiens
  siRNA target sequence for RAB21 (NM_014999.1,374-392).
gcgagaacaagtttaacga

SEQ ID NO: 110003 - DNA, 19 bp, Homo sapiens
  siRNA target sequence for RAB21 (NM_014999.1,498-516).
ccatgcattgggtccaatt

SEQ ID NO: 110004 - DNA, 19 bp, Homo sapiens
  siRNA target sequence for RAB21 (NM_014999.1,502-520).
gcattgggtccaatttact

SEQ ID NO: 110005 - DNA, 19 bp, Homo sapiens
  siRNA target sequence for RAB21 (NM_014999.1,503-521).
cattgggtccaatttacta

SEQ ID NO: 110006 - DNA, 19 bp, Homo sapiens
  siRNA target sequence for RAB21 (NM_014999.1,530-548).
caaatggagcgattttagt

SEQ ID NO: 110007 - DNA, 19 bp, Homo sapiens
  siRNA target sequence for RAB21 (NM_014999.1,536-554).
gagcgattttagtttatga

SEQ ID NO: 110008 - DNA, 19 bp, Homo sapiens
  siRNA target sequence for RAB21 (NM_014999.1,632-650).
gtttatgtatagttggtaa

SEQ ID NO: 110009 - DNA, 19 bp, Homo sapiens
  siRNA target sequence for RAB21 (NM_014999.1,643-661).
gttggtaataaaatagact

SEQ ID NO: 110010 - DNA, 19 bp, Homo sapiens
  siRNA target sequence for RAB21 (NM_014999.1,717-735).
gggagcaaaacattatcat

SEQ ID NO: 110011 - DNA, 19 bp, Homo sapiens
  siRNA target sequence for RAB21 (NM_014999.1,718-736).
ggagcaaaacattatcata

SEQ ID NO: 110012 - DNA, 19 bp, Homo sapiens
  siRNA target sequence for RAB21 (NM_014999.1,733-751).
catacttcagccaaacaga

SEQ ID NO: 110013 - DNA, 19 bp, Homo sapiens
  siRNA target sequence for RAB21 (NM_014999.1,758-776).
gaattgaggaactctttct

SEQ ID NO: 110014 - DNA, 19 bp, Homo sapiens
  siRNA target sequence for RAB21 (NM_014999.1,857-875).
caaggcgaggtgtacagat

SEQ ID NO: 110015 - DNA, 19 bp, Homo sapiens
  siRNA target sequence for RAB21 (NM_014999.1,860-878).
ggcgaggtgtacagattat

SEQ ID NO: 110016 - DNA, 19 bp, Homo sapiens
  siRNA target sequence for RAB21 (NM_014999.1,861-879).
gcgaggtgtacagattatt

SEQ ID NO: 110017 - DNA, 19 bp, Homo sapiens
  siRNA target sequence for RAB21 (NM_014999.1,863-881).
gaggtgtacagattattga

SEQ ID NO: 110018 - DNA, 19 bp, Homo sapiens
  siRNA target sequence for RAB22A (NM_020673.2,297-315).
gggatacaggtgtaggtaa

SEQ ID NO: 110019 - DNA, 19 bp, Homo sapiens
  siRNA target sequence for RAB22A (NM_020673.2,311-329).
ggtaaatcgagtattgtgt

SEQ ID NO: 110020 - DNA, 19 bp, Homo sapiens
  siRNA target sequence for RAB22A (NM_020673.2,357-375).
caaacatcaacccaacaat

SEQ ID NO: 110021 - DNA, 19 bp, Homo sapiens
  siRNA target sequence for RAB22A (NM_020673.2,419-437).
ctacataaattcctaatct

SEQ ID NO: 110022 - DNA, 19 bp, Homo sapiens
  siRNA target sequence for RAB22A (NM_020673.2,465-483).
gtgccttagcaccaatgta

SEQ ID NO: 110023 - DNA, 19 bp, Homo sapiens
  siRNA target sequence for RAB22A (NM_020673.2,467-485).
gccttagcaccaatgtact

SEQ ID NO: 110024 - DNA, 19 bp, Homo sapiens
  siRNA target sequence for RAB22A (NM_020673.2,491-509).
gggtcggctgcagctataa

SEQ ID NO: 110025 - DNA, 19 bp, Homo sapiens
  siRNA target sequence for RAB22A (NM_020673.2,492-510).
ggtcggctgcagctataat

SEQ ID NO: 110026 - DNA, 19 bp, Homo sapiens
  siRNA target sequence for RAB22A (NM_020673.2,495-513).
cggctgcagctataatcgt

SEQ ID NO: 110027 - DNA, 19 bp, Homo sapiens
  siRNA target sequence for RAB22A (NM_020673.2,496-514).
ggctgcagctataatcgtt

SEQ ID NO: 110028 - DNA, 19 bp, Homo sapiens
  siRNA target sequence for RAB22A (NM_020673.2,497-515).
gctgcagctataatcgttt

SEQ ID NO: 110029 - DNA, 19 bp, Homo sapiens
  siRNA target sequence for RAB22A (NM_020673.2,498-516).
ctgcagctataatcgttta

SEQ ID NO: 110030 - DNA, 19 bp, Homo sapiens
  siRNA target sequence for RAB22A (NM_020673.2,501-519).
cagctataatcgtttatga

SEQ ID NO: 110031 - DNA, 19 bp, Homo sapiens
  siRNA target sequence for RAB22A (NM_020673.2,503-521).
gctataatcgtttatgata

SEQ ID NO: 110032 - DNA, 19 bp, Homo sapiens
  siRNA target sequence for RAB22A (NM_020673.2,504-522).
ctataatcgtttatgatat

SEQ ID NO: 110033 - DNA, 19 bp, Homo sapiens
  siRNA target sequence for RAB22A (NM_020673.2,533-551).
gagacattttcaacattaa

SEQ ID NO: 110034 - DNA, 19 bp, Homo sapiens
  siRNA target sequence for RAB22A (NM_020673.2,611-629).
ggaaataaatgtgatctta

SEQ ID NO: 110035 - DNA, 19 bp, Homo sapiens
  siRNA target sequence for RAB22A (NM_020673.2,667-685).
ctacgccgactctattcat

SEQ ID NO: 110036 - DNA, 19 bp, Homo sapiens
  siRNA target sequence for RAB22A (NM_020673.2,672-690).
ccgactctattcatgcaat

SEQ ID NO: 110037 - DNA, 19 bp, Homo sapiens
  siRNA target sequence for RAB22A (NM_020673.2,673-691).
cgactctattcatgcaatt

SEQ ID NO: 110038 - DNA, 19 bp, Homo sapiens
  siRNA target sequence for RAB22A (NM_020673.2,676-694).
ctctattcatgcaattttt

SEQ ID NO: 110039 - DNA, 19 bp, Homo sapiens
  siRNA target sequence for RAB22A (NM_020673.2,695-713).
gtagagaccagcgcaaaaa

SEQ ID NO: 110040 - DNA, 19 bp, Homo sapiens
  siRNA target sequence for RAB22A (NM_020673.2,705-723).
gcgcaaaaaacgcgataaa

SEQ ID NO: 110041 - DNA, 19 bp, Homo sapiens
  siRNA target sequence for RAB22A (NM_020673.2,707-725).
gcaaaaaacgcgataaaca

SEQ ID NO: 110042 - DNA, 19 bp, Homo sapiens
  siRNA target sequence for RAB22A (NM_020673.2,708-726).
caaaaaacgcgataaacat

SEQ ID NO: 110043 - DNA, 19 bp, Homo sapiens
  siRNA target sequence for RAB22A (NM_020673.2,715-733).
cgcgataaacataaatgaa

SEQ ID NO: 110044 - DNA, 19 bp, Homo sapiens
  siRNA target sequence for RAB22A (NM_020673.2,789-807).
gcggtaagggcttcaaact

SEQ ID NO: 110045 - DNA, 19 bp, Homo sapiens
  siRNA target sequence for RAB23 (NM_016277.3,667-685).
ggaatggagcagttggaaa

SEQ ID NO: 110046 - DNA, 19 bp, Homo sapiens
  siRNA target sequence for RAB23 (NM_016277.3,695-713).
gattcagcgatattgcaaa

SEQ ID NO: 110047 - DNA, 19 bp, Homo sapiens
  siRNA target sequence for RAB23 (NM_016277.3,762-780).
gagcgacaaattcaagtta

SEQ ID NO: 110048 - DNA, 19 bp, Homo sapiens
  siRNA target sequence for RAB23 (NM_016277.3,783-801).
gatgaagatgtcagactaa

SEQ ID NO: 110049 - DNA, 19 bp, Homo sapiens
  siRNA target sequence for RAB23 (NM_016277.3,825-843).
gaggaatttgatgcaatta

SEQ ID NO: 110050 - DNA, 19 bp, Homo sapiens
  siRNA target sequence for RAB23 (NM_016277.3,925-943).
gttggagagagaaagtagt

SEQ ID NO: 110051 - DNA, 19 bp, Homo sapiens
  siRNA target sequence for RAB23 (NM_016277.3,947-965).
cgaagtgggagatatacca

SEQ ID NO: 110052 - DNA, 19 bp, Homo sapiens
  siRNA target sequence for RAB23 (NM_016277.3,967-985).
ctgtacttgtgcaaaacaa

SEQ ID NO: 110053 - DNA, 19 bp, Homo sapiens
  siRNA target sequence for RAB23 (NM_016277.3,977-995).
gcaaaacaagattgatctt

SEQ ID NO: 110054 - DNA, 19 bp, Homo sapiens
  siRNA target sequence for RAB23 (NM_016277.3,1026-1044).
gctgaggcactggcaaaaa

SEQ ID NO: 110055 - DNA, 19 bp, Homo sapiens
  siRNA target sequence for RAB23 (NM_016277.3,1035-1053).
ctggcaaaaaggttaaagt

SEQ ID NO: 110056 - DNA, 19 bp, Homo sapiens
  siRNA target sequence for RAB23 (NM_016277.3,1045-1063).
ggttaaagttaagattcta

SEQ ID NO: 110057 - DNA, 19 bp, Homo sapiens
  siRNA target sequence for RAB23 (NM_016277.3,1164-1182).
gaactaacgcattcaagta

SEQ ID NO: 110058 - DNA, 19 bp, Homo sapiens
  siRNA target sequence for RAB23 (NM_016277.3,1167-1185).
ctaacgcattcaagtagta

SEQ ID NO: 110059 - DNA, 19 bp, Homo sapiens
  siRNA target sequence for RAB23 (NM_016277.3,1171-1189).
cgcattcaagtagtaacaa

SEQ ID NO: 110060 - DNA, 19 bp, Homo sapiens
  siRNA target sequence for RAB23 (NM_016277.3,1173-1191).
cattcaagtagtaacaaga

SEQ ID NO: 110061 - DNA, 19 bp, Homo sapiens
  siRNA target sequence for RAB23 (NM_016277.3,1252-1270).
gtggagatgtcatcaatct

SEQ ID NO: 110062 - DNA, 19 bp, Homo sapiens
  siRNA target sequence for RAB23 (NM_016277.3,1254-1272).
ggagatgtcatcaatctta

SEQ ID NO: 110063 - DNA, 19 bp, Homo sapiens
  siRNA target sequence for RAB23 (NM_016277.3,1265-1283).
caatcttagacccaacaaa

SEQ ID NO: 110064 - DNA, 19 bp, Homo sapiens
  siRNA target sequence for RAB24 (NM_130781.1,645-663).
gagaccggactgtgacatt

SEQ ID NO: 110065 - DNA, 19 bp, Homo sapiens
  siRNA target sequence for RAB24 (NM_130781.1,649-667).
ccggactgtgacattaggt

SEQ ID NO: 110066 - DNA, 19 bp, Homo sapiens
  siRNA target sequence for RAB24 (NM_130781.1,650-668).
cggactgtgacattaggta

SEQ ID NO: 110067 - DNA, 19 bp, Homo sapiens
  siRNA target sequence for RAB24 (NM_130781.1,692-710).
cgctatgaggccatgagta

SEQ ID NO: 110068 - DNA, 19 bp, Homo sapiens
  siRNA target sequence for RAB24 (NM_130781.1,703-721).
catgagtagaatctactat

SEQ ID NO: 110069 - DNA, 19 bp, Homo sapiens
  siRNA target sequence for RAB24 (NM_130781.1,815-833).
gaggagggctgccaaatct

SEQ ID NO: 110070 - DNA, 19 bp, Homo sapiens
  siRNA target sequence for RAB24 (NM_130781.1,820-838).
gggctgccaaatctactta

SEQ ID NO: 110071 - DNA, 19 bp, Homo sapiens
  siRNA target sequence for RAB24 (NM_130781.1,821-839).
ggctgccaaatctacttat

SEQ ID NO: 110072 - DNA, 19 bp, Homo sapiens
  siRNA target sequence for RAB27A (NM_004580.3,306-324).
gggaagaccagtgtacttt

SEQ ID NO: 110073 - DNA, 19 bp, Homo sapiens
  siRNA target sequence for RAB27A (NM_004580.3,311-329).
gaccagtgtactttaccaa

SEQ ID NO: 110074 - DNA, 19 bp, Homo sapiens
  siRNA target sequence for RAB27A (NM_004580.3,313-331).
ccagtgtactttaccaata

SEQ ID NO: 110075 - DNA, 19 bp, Homo sapiens
  siRNA target sequence for RAB27A (NM_004580.3,314-332).
cagtgtactttaccaatat

SEQ ID NO: 110076 - DNA, 19 bp, Homo sapiens
  siRNA target sequence for RAB27A (NM_004580.3,327-345).
caatatacagatggtaaat

SEQ ID NO: 110077 - DNA, 19 bp, Homo sapiens
  siRNA target sequence for RAB27A (NM_004580.3,474-492).
gggcaggagaggtttcgta

SEQ ID NO: 110078 - DNA, 19 bp, Homo sapiens
  siRNA target sequence for RAB27A (NM_004580.3,480-498).
gagaggtttcgtagcttaa

SEQ ID NO: 110079 - DNA, 19 bp, Homo sapiens
  siRNA target sequence for RAB27A (NM_004580.3,505-523).
cgttcttcagagatgctat

SEQ ID NO: 110080 - DNA, 19 bp, Homo sapiens
  siRNA target sequence for RAB27A (NM_004580.3,593-611).
gctacagatgcatgcatat

SEQ ID NO: 110081 - DNA, 19 bp, Homo sapiens
  siRNA target sequence for RAB27A (NM_004580.3,594-612).
ctacagatgcatgcatatt

SEQ ID NO: 110082 - DNA, 19 bp, Homo sapiens
  siRNA target sequence for RAB27A (NM_004580.3,689-707).
catagcactcgcagagaaa

SEQ ID NO: 110083 - DNA, 19 bp, Homo sapiens
  siRNA target sequence for RAB27A (NM_004580.3,716-734).
cccctactttgaaactagt

SEQ ID NO: 110084 - DNA, 19 bp, Homo sapiens
  siRNA target sequence for RAB27A (NM_004580.3,774-792).
cttctggacctgataatga

SEQ ID NO: 110085 - DNA, 19 bp, Homo sapiens
  siRNA target sequence for RAB27A (NM_004580.3,858-876).
gcctctacggatcagttaa

SEQ ID NO: 110086 - DNA, 19 bp, Homo sapiens
  siRNA target sequence for RAB27A (NM_004580.3,860-878).
ctctacggatcagttaagt

SEQ ID NO: 110087 - DNA, 19 bp, Homo sapiens
  siRNA target sequence for RAB27A (NM_004580.3,862-880).
ctacggatcagttaagtga

SEQ ID NO: 110088 - DNA, 19 bp, Homo sapiens
  siRNA target sequence for RAB27B (NM_004163.3,290-308).
gatcttcagggaaagcatt

SEQ ID NO: 110089 - DNA, 19 bp, Homo sapiens
  siRNA target sequence for RAB27B (NM_004163.3,305-323).
catttaaagtgcatcttca

SEQ ID NO: 110090 - DNA, 19 bp, Homo sapiens
  siRNA target sequence for RAB27B (NM_004163.3,386-404).
ccatgggcttcttattaat

SEQ ID NO: 110091 - DNA, 19 bp, Homo sapiens
  siRNA target sequence for RAB27B (NM_004163.3,390-408).
gggcttcttattaatgttt

SEQ ID NO: 110092 - DNA, 19 bp, Homo sapiens
  siRNA target sequence for RAB27B (NM_004163.3,568-586).
gacaaatatggcataccat

SEQ ID NO: 110093 - DNA, 19 bp, Homo sapiens
  siRNA target sequence for RAB27B (NM_004163.3,570-588).
caaatatggcataccatat

SEQ ID NO: 110094 - DNA, 19 bp, Homo sapiens
  siRNA target sequence for RAB27B (NM_004163.3,686-704).
cacaaatccctgatactgt

SEQ ID NO: 110095 - DNA, 19 bp, Homo sapiens
  siRNA target sequence for RAB28 (NM_004249.1,120-138).
gtacaaacaaactatagga

SEQ ID NO: 110096 - DNA, 19 bp, Homo sapiens
  siRNA target sequence for RAB28 (NM_004249.1,259-277).
cagggagtcctcttggtat

SEQ ID NO: 110097 - DNA, 19 bp, Homo sapiens
  siRNA target sequence for RAB28 (NM_004249.1,261-279).
gggagtcctcttggtatat

SEQ ID NO: 110098 - DNA, 19 bp, Homo sapiens
  siRNA target sequence for RAB28 (NM_004249.1,263-281).
gagtcctcttggtatatga

SEQ ID NO: 110099 - DNA, 19 bp, Homo sapiens
  siRNA target sequence for RAB28 (NM_004249.1,265-283).
gtcctcttggtatatgata

SEQ ID NO: 110100 - DNA, 19 bp, Homo sapiens
  siRNA target sequence for RAB28 (NM_004249.1,268-286).
ctcttggtatatgatatta

SEQ ID NO: 110101 - DNA, 19 bp, Homo sapiens
  siRNA target sequence for RAB28 (NM_004249.1,270-288).
cttggtatatgatattaca

SEQ ID NO: 110102 - DNA, 19 bp, Homo sapiens
  siRNA target sequence for RAB28 (NM_004249.1,320-338).
ggtatactgtggtgaagaa

SEQ ID NO: 110103 - DNA, 19 bp, Homo sapiens
  siRNA target sequence for RAB28 (NM_004249.1,321-339).
gtatactgtggtgaagaaa

SEQ ID NO: 110104 - DNA, 19 bp, Homo sapiens
  siRNA target sequence for RAB28 (NM_004249.1,565-583).
cagtcacagcgtattgtca

SEQ ID NO: 110105 - DNA, 19 bp, Homo sapiens
  siRNA target sequence for RAB28 (NM_004249.1,597-615).
gaagtacccggaagaagaa

SEQ ID NO: 110106 - DNA, 19 bp, Homo sapiens
  siRNA target sequence for RAB28 (NM_004249.1,639-657).
gagtagaatctgttcagta

SEQ ID NO: 110107 - DNA, 19 bp, Homo sapiens
  siRNA target sequence for RAB2B (NM_032846.2,157-175).
ctcctgcagtttacagata

SEQ ID NO: 110108 - DNA, 19 bp, Homo sapiens
  siRNA target sequence for RAB2B (NM_032846.2,188-206).
ctgtccacgacctcacaat

SEQ ID NO: 110109 - DNA, 19 bp, Homo sapiens
  siRNA target sequence for RAB2B (NM_032846.2,192-210).
ccacgacctcacaataggt

SEQ ID NO: 110110 - DNA, 19 bp, Homo sapiens
  siRNA target sequence for RAB2B (NM_032846.2,224-242).
ctcgtatggtcaacattga

SEQ ID NO: 110111 - DNA, 19 bp, Homo sapiens
  siRNA target sequence for RAB2B (NM_032846.2,231-249).
ggtcaacattgatggaaaa

SEQ ID NO: 110112 - DNA, 19 bp, Homo sapiens
  siRNA target sequence for RAB2B (NM_032846.2,375-393).
ccacctgacctcatggtta

SEQ ID NO: 110113 - DNA, 19 bp, Homo sapiens
  siRNA target sequence for RAB2B (NM_032846.2,413-431).
ctagttccaacatggttat

SEQ ID NO: 110114 - DNA, 19 bp, Homo sapiens
  siRNA target sequence for RAB2B (NM_032846.2,435-453).
gctcattgggaataagagt

SEQ ID NO: 110115 - DNA, 19 bp, Homo sapiens
  siRNA target sequence for RAB2B (NM_032846.2,503-521).
ctagggagcatggacttat

SEQ ID NO: 110116 - DNA, 19 bp, Homo sapiens
  siRNA target sequence for RAB2B (NM_032846.2,603-621).
ccagcagggtttatttgat

SEQ ID NO: 110117 - DNA, 19 bp, Homo sapiens
  siRNA target sequence for RAB2B (NM_032846.2,699-717).
gcggaactctcgtgacata

SEQ ID NO: 110118 - DNA, 19 bp, Homo sapiens
  siRNA target sequence for RAB30 (NM_014488.3,329-347).
cgtgcctcgtccgaagatt

SEQ ID NO: 110119 - DNA, 19 bp, Homo sapiens
  siRNA target sequence for RAB30 (NM_014488.3,333-351).
cctcgtccgaagattcact

SEQ ID NO: 110120 - DNA, 19 bp, Homo sapiens
  siRNA target sequence for RAB30 (NM_014488.3,344-362).
gattcactcagggtctttt

SEQ ID NO: 110121 - DNA, 19 bp, Homo sapiens
  siRNA target sequence for RAB30 (NM_014488.3,379-397).
gccacaattggagttgatt

SEQ ID NO: 110122 - DNA, 19 bp, Homo sapiens
  siRNA target sequence for RAB30 (NM_014488.3,380-398).
ccacaattggagttgattt

SEQ ID NO: 110123 - DNA, 19 bp, Homo sapiens
  siRNA target sequence for RAB30 (NM_014488.3,408-426).
gacagtggagattaatggt

SEQ ID NO: 110124 - DNA, 19 bp, Homo sapiens
  siRNA target sequence for RAB30 (NM_014488.3,466-484).
gagagatttcggtccatta

SEQ ID NO: 110125 - DNA, 19 bp, Homo sapiens
  siRNA target sequence for RAB30 (NM_014488.3,476-494).
ggtccattacccagagtta

SEQ ID NO: 110126 - DNA, 19 bp, Homo sapiens
  siRNA target sequence for RAB30 (NM_014488.3,573-591).
gcgggagatagaacaatat

SEQ ID NO: 110127 - DNA, 19 bp, Homo sapiens
  siRNA target sequence for RAB30 (NM_014488.3,615-633).
gttagtgggcaacaagatt

SEQ ID NO: 110128 - DNA, 19 bp, Homo sapiens
  siRNA target sequence for RAB30 (NM_014488.3,666-684).
gcgagctgaagaattctca

SEQ ID NO: 110129 - DNA, 19 bp, Homo sapiens
  siRNA target sequence for RAB30 (NM_014488.3,685-703).
gaagctcaggacatgtatt

SEQ ID NO: 110130 - DNA, 19 bp, Homo sapiens
  siRNA target sequence for RAB30 (NM_014488.3,689-707).
ctcaggacatgtattatct

SEQ ID NO: 110131 - DNA, 19 bp, Homo sapiens
  siRNA target sequence for RAB30 (NM_014488.3,741-759).
gaaactcttccttgactta

SEQ ID NO: 110132 - DNA, 19 bp, Homo sapiens
  siRNA target sequence for RAB30 (NM_014488.3,843-861).
cagctatttgacttgttgt

SEQ ID NO: 110133 - DNA, 19 bp, Homo sapiens
  siRNA target sequence for RAB31 (NM_006868.2,136-154).
cgatacgggagctcaaagt

SEQ ID NO: 110134 - DNA, 19 bp, Homo sapiens
  siRNA target sequence for RAB31 (NM_006868.2,190-208).
gcatcgtgtgtcgatttgt

SEQ ID NO: 110135 - DNA, 19 bp, Homo sapiens
  siRNA target sequence for RAB31 (NM_006868.2,238-256).
ctactattggggcatcttt

SEQ ID NO: 110136 - DNA, 19 bp, Homo sapiens
  siRNA target sequence for RAB31 (NM_006868.2,274-292).
cttgtggaaatgaacttca

SEQ ID NO: 110137 - DNA, 19 bp, Homo sapiens
  siRNA target sequence for RAB31 (NM_006868.2,318-336).
ggtcaggaacggtttcatt

SEQ ID NO: 110138 - DNA, 19 bp, Homo sapiens
  siRNA target sequence for RAB31 (NM_006868.2,321-339).
caggaacggtttcattcat

SEQ ID NO: 110139 - DNA, 19 bp, Homo sapiens
  siRNA target sequence for RAB31 (NM_006868.2,337-355).
cattggctcccatgtacta

SEQ ID NO: 110140 - DNA, 19 bp, Homo sapiens
  siRNA target sequence for RAB31 (NM_006868.2,361-379).
gctcagctgcagctgttat

SEQ ID NO: 110141 - DNA, 19 bp, Homo sapiens
  siRNA target sequence for RAB31 (NM_006868.2,364-382).
cagctgcagctgttatcgt

SEQ ID NO: 110142 - DNA, 19 bp, Homo sapiens
  siRNA target sequence for RAB31 (NM_006868.2,370-388).
cagctgttatcgtgtatga

SEQ ID NO: 110143 - DNA, 19 bp, Homo sapiens
  siRNA target sequence for RAB31 (NM_006868.2,372-390).
gctgttatcgtgtatgata

SEQ ID NO: 110144 - DNA, 19 bp, Homo sapiens
  siRNA target sequence for RAB31 (NM_006868.2,373-391).
ctgttatcgtgtatgatat

SEQ ID NO: 110145 - DNA, 19 bp, Homo sapiens
  siRNA target sequence for RAB31 (NM_006868.2,471-489).
gccatcgctggaaacaagt

SEQ ID NO: 110146 - DNA, 19 bp, Homo sapiens
  siRNA target sequence for RAB31 (NM_006868.2,488-506).
gtgcgacctctcagatatt

SEQ ID NO: 110147 - DNA, 19 bp, Homo sapiens
  siRNA target sequence for RAB31 (NM_006868.2,654-672).
ggaaacaatggaacaatca

SEQ ID NO: 110148 - DNA, 19 bp, Homo sapiens
  siRNA target sequence for RAB32 (NM_006834.2,438-456).
gagcgatttggcaacatga

SEQ ID NO: 110149 - DNA, 19 bp, Homo sapiens
  siRNA target sequence for RAB32 (NM_006834.2,492-510).
gtagtctttgatatatcaa

SEQ ID NO: 110150 - DNA, 19 bp, Homo sapiens
  siRNA target sequence for RAB32 (NM_006834.2,518-536).
cacatttgaggcagtctta

SEQ ID NO: 110151 - DNA, 19 bp, Homo sapiens
  siRNA target sequence for RAB32 (NM_006834.2,595-613).
ctgtcctcttggctaacaa

SEQ ID NO: 110152 - DNA, 19 bp, Homo sapiens
  siRNA target sequence for RAB32 (NM_006834.2,789-807).
gaaaacgatgtggacaaaa

SEQ ID NO: 110153 - DNA, 19 bp, Homo sapiens
  siRNA target sequence for RAB32 (NM_006834.2,803-821).
caaaattaagctagatcaa

SEQ ID NO: 110154 - DNA, 19 bp, Homo sapiens
  siRNA target sequence for RAB33A (NM_004794.2,358-376).
gtgcagattcgcatcttca

SEQ ID NO: 110155 - DNA, 19 bp, Homo sapiens
  siRNA target sequence for RAB33A (NM_004794.2,361-379).
cagattcgcatcttcaaaa

SEQ ID NO: 110156 - DNA, 19 bp, Homo sapiens
  siRNA target sequence for RAB33A (NM_004794.2,363-381).
gattcgcatcttcaaaata

SEQ ID NO: 110157 - DNA, 19 bp, Homo sapiens
  siRNA target sequence for RAB33A (NM_004794.2,550-568).
gaacgtttccgcaaaagca

SEQ ID NO: 110158 - DNA, 19 bp, Homo sapiens
  siRNA target sequence for RAB33A (NM_004794.2,566-584).
gcatggtcgagcattacta

SEQ ID NO: 110159 - DNA, 19 bp, Homo sapiens
  siRNA target sequence for RAB33A (NM_004794.2,599-617).
ccgtggtcttcgtctatga

SEQ ID NO: 110160 - DNA, 19 bp, Homo sapiens
  siRNA target sequence for RAB33A (NM_004794.2,722-740).
gtgacttgagggaacagat

SEQ ID NO: 110161 - DNA, 19 bp, Homo sapiens
  siRNA target sequence for RAB33A (NM_004794.2,741-759).
ccaggtgccctccaactta

SEQ ID NO: 110162 - DNA, 19 bp, Homo sapiens
  siRNA target sequence for RAB33A (NM_004794.2,779-797).
cccacaacatgctcttgtt

SEQ ID NO: 110163 - DNA, 19 bp, Homo sapiens
  siRNA target sequence for RAB33A (NM_004794.2,780-798).
ccacaacatgctcttgttt

SEQ ID NO: 110164 - DNA, 19 bp, Homo sapiens
  siRNA target sequence for RAB33A (NM_004794.2,829-847).
cagaacgtggagtcgattt

SEQ ID NO: 110165 - DNA, 19 bp, Homo sapiens
  siRNA target sequence for RAB33A (NM_004794.2,865-883).
cgattgaaggcccagaaat

SEQ ID NO: 110166 - DNA, 19 bp, Homo sapiens
  siRNA target sequence for RAB33A (NM_004794.2,939-957).
cccacaggaagctaacagt

SEQ ID NO: 110167 - DNA, 19 bp, Homo sapiens
  siRNA target sequence for RAB33A (NM_004794.2,943-961).
caggaagctaacagtaaaa

SEQ ID NO: 110168 - DNA, 19 bp, Homo sapiens
  siRNA target sequence for RAB33A (NM_004794.2,945-963).
ggaagctaacagtaaaact

SEQ ID NO: 110169 - DNA, 19 bp, Homo sapiens
  siRNA target sequence for RAB33B (NM_031296.1,410-428).
gtcgctcgaggcaagcttt

SEQ ID NO: 110170 - DNA, 19 bp, Homo sapiens
  siRNA target sequence for RAB33B (NM_031296.1,414-432).
ctcgaggcaagcttttcgt

SEQ ID NO: 110171 - DNA, 19 bp, Homo sapiens
  siRNA target sequence for RAB33B (NM_031296.1,448-466).
caggggcctcagggttttt

SEQ ID NO: 110172 - DNA, 19 bp, Homo sapiens
  siRNA target sequence for RAB33B (NM_031296.1,475-493).
cccgctcccgcatcttcaa

SEQ ID NO: 110173 - DNA, 19 bp, Homo sapiens
  siRNA target sequence for RAB33B (NM_031296.1,477-495).
cgctcccgcatcttcaaga

SEQ ID NO: 110174 - DNA, 19 bp, Homo sapiens
  siRNA target sequence for RAB33B (NM_031296.1,478-496).
gctcccgcatcttcaagat

SEQ ID NO: 110175 - DNA, 19 bp, Homo sapiens
  siRNA target sequence for RAB33B (NM_031296.1,479-497).
ctcccgcatcttcaagata

SEQ ID NO: 110176 - DNA, 19 bp, Homo sapiens
  siRNA target sequence for RAB33B (NM_031296.1,481-499).
cccgcatcttcaagataat

SEQ ID NO: 110177 - DNA, 19 bp, Homo sapiens
  siRNA target sequence for RAB33B (NM_031296.1,663-681).
caagaacgattcagaaaga

SEQ ID NO: 110178 - DNA, 19 bp, Homo sapiens
  siRNA target sequence for RAB33B (NM_031296.1,682-700).
gcatggttcagcactacta

SEQ ID NO: 110179 - DNA, 19 bp, Homo sapiens
  siRNA target sequence for RAB33B (NM_031296.1,695-713).
ctactacagaaatgtacat

SEQ ID NO: 110180 - DNA, 19 bp, Homo sapiens
  siRNA target sequence for RAB33B (NM_031296.1,715-733).
ctgttgtcttcgtgtatga

SEQ ID NO: 110181 - DNA, 19 bp, Homo sapiens
  siRNA target sequence for RAB33B (NM_031296.1,717-735).
gttgtcttcgtgtatgata

SEQ ID NO: 110182 - DNA, 19 bp, Homo sapiens
  siRNA target sequence for RAB33B (NM_031296.1,737-755).
gaccaacatggctagtttt

SEQ ID NO: 110183 - DNA, 19 bp, Homo sapiens
  siRNA target sequence for RAB33B (NM_031296.1,740-758).
caacatggctagttttcat

SEQ ID NO: 110184 - DNA, 19 bp, Homo sapiens
  siRNA target sequence for RAB33B (NM_031296.1,792-810).
catttgctagccaatgata

SEQ ID NO: 110185 - DNA, 19 bp, Homo sapiens
  siRNA target sequence for RAB33B (NM_031296.1,797-815).
gctagccaatgatatacca

SEQ ID NO: 110186 - DNA, 19 bp, Homo sapiens
  siRNA target sequence for RAB33B (NM_031296.1,814-832).
cacggattcttgttggaaa

SEQ ID NO: 110187 - DNA, 19 bp, Homo sapiens
  siRNA target sequence for RAB33B (NM_031296.1,924-942).
gctaaaaaccccaatgata

SEQ ID NO: 110188 - DNA, 19 bp, Homo sapiens
  siRNA target sequence for RAB33B (NM_031296.1,925-943).
ctaaaaaccccaatgataa

SEQ ID NO: 110189 - DNA, 19 bp, Homo sapiens
  siRNA target sequence for RAB33B (NM_031296.1,945-963).
gaccatgtggaagctatat

SEQ ID NO: 110190 - DNA, 19 bp, Homo sapiens
  siRNA target sequence for RAB33B (NM_031296.1,968-986).
gaccttggctcataagctt

SEQ ID NO: 110191 - DNA, 19 bp, Homo sapiens
  siRNA target sequence for RAB33B (NM_031296.1,970-988).
ccttggctcataagcttaa

SEQ ID NO: 110192 - DNA, 19 bp, Homo sapiens
  siRNA target sequence for RAB33B (NM_031296.1,984-1002).
cttaagagccacaaaccat

SEQ ID NO: 110193 - DNA, 19 bp, Homo sapiens
  siRNA target sequence for RAB33B (NM_031296.1,991-1009).
gccacaaaccattaatgct

SEQ ID NO: 110194 - DNA, 19 bp, Homo sapiens
  siRNA target sequence for RAB33B (NM_031296.1,1014-1032).
cagccccctgataatggaa

SEQ ID NO: 110195 - DNA, 19 bp, Homo sapiens
  siRNA target sequence for RAB33B (NM_031296.1,1016-1034).
gccccctgataatggaatt

SEQ ID NO: 110196 - DNA, 19 bp, Homo sapiens
  siRNA target sequence for RAB33B (NM_031296.1,1017-1035).
ccccctgataatggaatta

SEQ ID NO: 110197 - DNA, 19 bp, Homo sapiens
  siRNA target sequence for RAB33B (NM_031296.1,1021-1039).
ctgataatggaattatcct

SEQ ID NO: 110198 - DNA, 19 bp, Homo sapiens
  siRNA target sequence for RAB34 (NM_031934.3,676-694).
ctttgcacgggcacaaaga

SEQ ID NO: 110199 - DNA, 19 bp, Homo sapiens
  siRNA target sequence for RAB34 (NM_031934.3,793-811).
ggaagacttgcctcattaa

SEQ ID NO: 110200 - DNA, 19 bp, Homo sapiens
  siRNA target sequence for RAB34 (NM_031934.3,799-817).
cttgcctcattaataggtt

SEQ ID NO: 110201 - DNA, 19 bp, Homo sapiens
  siRNA target sequence for RAB34 (NM_031934.3,935-953).
ggagaggttcaaatgcatt

SEQ ID NO: 110202 - DNA, 19 bp, Homo sapiens
  siRNA target sequence for RAB34 (NM_031934.3,950-968).
cattgcatcaacctactat

SEQ ID NO: 110203 - DNA, 19 bp, Homo sapiens
  siRNA target sequence for RAB34 (NM_031934.3,976-994).
ctcaagccatcatcattgt

SEQ ID NO: 110204 - DNA, 19 bp, Homo sapiens
  siRNA target sequence for RAB34 (NM_031934.3,978-996).
caagccatcatcattgtct

SEQ ID NO: 110205 - DNA, 19 bp, Homo sapiens
  siRNA target sequence for RAB34 (NM_031934.3,1011-1029).
gtggcatctctggaacata

SEQ ID NO: 110206 - DNA, 19 bp, Homo sapiens
  siRNA target sequence for RAB34 (NM_031934.3,1207-1225).
gtgagaatgtccgagaatt

SEQ ID NO: 110207 - DNA, 19 bp, Homo sapiens
  siRNA target sequence for RAB34 (NM_031934.3,1294-1312).
gacgcattggggatgttgt

SEQ ID NO: 110208 - DNA, 19 bp, Homo sapiens
  siRNA target sequence for RAB34 (NM_031934.3,1305-1323).
gatgttgtccgcatcaaca

SEQ ID NO: 110209 - DNA, 19 bp, Homo sapiens
  siRNA target sequence for RAB35 (NM_006861.4,224-242).
cgttttgcagacaacactt

SEQ ID NO: 110210 - DNA, 19 bp, Homo sapiens
  siRNA target sequence for RAB35 (NM_006861.4,264-282).
cgatcggagtggatttcaa

SEQ ID NO: 110211 - DNA, 19 bp, Homo sapiens
  siRNA target sequence for RAB35 (NM_006861.4,361-379).
catcacctccacgtattat

SEQ ID NO: 110212 - DNA, 19 bp, Homo sapiens
  siRNA target sequence for RAB35 (NM_006861.4,393-411).
gggtcattgtggtttacga

SEQ ID NO: 110213 - DNA, 19 bp, Homo sapiens
  siRNA target sequence for RAB35 (NM_006861.4,446-464).
cggtggcttcacgaaatca

SEQ ID NO: 110214 - DNA, 19 bp, Homo sapiens
  siRNA target sequence for RAB35 (NM_006861.4,447-465).
ggtggcttcacgaaatcaa

SEQ ID NO: 110215 - DNA, 19 bp, Homo sapiens
  siRNA target sequence for RAB35 (NM_006861.4,540-558).
cggaagatgcctacaaatt

SEQ ID NO: 110216 - DNA, 19 bp, Homo sapiens
  siRNA target sequence for RAB35 (NM_006861.4,594-612).
gcgccaaggagaatgtcaa

SEQ ID NO: 110217 - DNA, 19 bp, Homo sapiens
  siRNA target sequence for RAB35 (NM_006861.4,646-664).
ggtcctccgagcaaagaaa

SEQ ID NO: 110218 - DNA, 19 bp, Homo sapiens
  siRNA target sequence for RAB35 (NM_006861.4,650-668).
ctccgagcaaagaaagaca

SEQ ID NO: 110219 - DNA, 19 bp, Homo sapiens
  siRNA target sequence for RAB35 (NM_006861.4,712-730).
gctcacgaagaacagtaaa

SEQ ID NO: 110220 - DNA, 19 bp, Homo sapiens
  siRNA target sequence for RAB35 (NM_006861.4,715-733).
cacgaagaacagtaaacga

SEQ ID NO: 110221 - DNA, 19 bp, Homo sapiens
  siRNA target sequence for RAB35 (NM_006861.4,717-735).
cgaagaacagtaaacgaaa

SEQ ID NO: 110222 - DNA, 19 bp, Homo sapiens
  siRNA target sequence for RAB35 (NM_006861.4,721-739).
gaacagtaaacgaaagaaa

SEQ ID NO: 110223 - DNA, 19 bp, Homo sapiens
  siRNA target sequence for RAB36 (NM_004914.2,390-408).
ggactgtcgggctcaaact

SEQ ID NO: 110224 - DNA, 19 bp, Homo sapiens
  siRNA target sequence for RAB36 (NM_004914.2,465-483).
ggttttgcaagaatgtttt

SEQ ID NO: 110225 - DNA, 19 bp, Homo sapiens
  siRNA target sequence for RAB37 (NM_175738.2,563-581).
cgtctctgctggttcagtt

SEQ ID NO: 110226 - DNA, 19 bp, Homo sapiens
  siRNA target sequence for RAB37 (NM_175738.2,713-731).
gaagcgtcacccatgctta

SEQ ID NO: 110227 - DNA, 19 bp, Homo sapiens
  siRNA target sequence for RAB37 (NM_175738.2,716-734).
gcgtcacccatgcttatta

SEQ ID NO: 110228 - DNA, 19 bp, Homo sapiens
  siRNA target sequence for RAB37 (NM_175738.2,718-736).
gtcacccatgcttattaca

SEQ ID NO: 110229 - DNA, 19 bp, Homo sapiens
  siRNA target sequence for RAB37 (NM_175738.2,720-738).
cacccatgcttattacaga

SEQ ID NO: 110230 - DNA, 19 bp, Homo sapiens
  siRNA target sequence for RAB37 (NM_175738.2,749-767).
ccttgcttctgctgtatga

SEQ ID NO: 110231 - DNA, 19 bp, Homo sapiens
  siRNA target sequence for RAB37 (NM_175738.2,766-784).
gacatcaccaacaaatctt

SEQ ID NO: 110232 - DNA, 19 bp, Homo sapiens
  siRNA target sequence for RAB37 (NM_175738.2,810-828).
cactgagattcatgagtat

SEQ ID NO: 110233 - DNA, 19 bp, Homo sapiens
  siRNA target sequence for RAB37 (NM_175738.2,859-877).
ggcaacaaggcggatatga

SEQ ID NO: 110234 - DNA, 19 bp, Homo sapiens
  siRNA target sequence for RAB37 (NM_175738.2,1044-1062).
cttccagatccgagactat

SEQ ID NO: 110235 - DNA, 19 bp, Homo sapiens
  siRNA target sequence for RAB37 (NM_175738.2,1047-1065).
ccagatccgagactatgta

SEQ ID NO: 110236 - DNA, 19 bp, Homo sapiens
  siRNA target sequence for RAB38 (NM_022337.1,130-148).
gctacgtgcaccagaactt

SEQ ID NO: 110237 - DNA, 19 bp, Homo sapiens
  siRNA target sequence for RAB38 (NM_022337.1,239-257).
ggatatcgcaggtcaagaa

SEQ ID NO: 110238 - DNA, 19 bp, Homo sapiens
  siRNA target sequence for RAB38 (NM_022337.1,240-258).
gatatcgcaggtcaagaaa

SEQ ID NO: 110239 - DNA, 19 bp, Homo sapiens
  siRNA target sequence for RAB38 (NM_022337.1,402-420).
ccggtttcagtggttttgt

SEQ ID NO: 110240 - DNA, 19 bp, Homo sapiens
  siRNA target sequence for RAB38 (NM_022337.1,488-506).
caaggagcacggtttcgta

SEQ ID NO: 110241 - DNA, 19 bp, Homo sapiens
  siRNA target sequence for RAB38 (NM_022337.1,497-515).
cggtttcgtaggatggttt

SEQ ID NO: 110242 - DNA, 19 bp, Homo sapiens
  siRNA target sequence for RAB38 (NM_022337.1,503-521).
cgtaggatggtttgaaaca

SEQ ID NO: 110243 - DNA, 19 bp, Homo sapiens
  siRNA target sequence for RAB38 (NM_022337.1,556-574).
ccagatgcctggtgaaaca

SEQ ID NO: 110244 - DNA, 19 bp, Homo sapiens
  siRNA target sequence for RAB38 (NM_022337.1,563-581).
cctggtgaaacacatactt

SEQ ID NO: 110245 - DNA, 19 bp, Homo sapiens
  siRNA target sequence for RAB38 (NM_022337.1,573-591).
cacatacttgcaaatgagt

SEQ ID NO: 110246 - DNA, 19 bp, Homo sapiens
  siRNA target sequence for RAB38 (NM_022337.1,583-601).
caaatgagtgtgacctaat

SEQ ID NO: 110247 - DNA, 19 bp, Homo sapiens
  siRNA target sequence for RAB38 (NM_022337.1,592-610).
gtgacctaatggagtctat

SEQ ID NO: 110248 - DNA, 19 bp, Homo sapiens
  siRNA target sequence for RAB39 (NM_017516.1,149-167).
ccgtcggcgtggacttctt

SEQ ID NO: 110249 - DNA, 19 bp, Homo sapiens
  siRNA target sequence for RAB39 (NM_017516.1,151-169).
gtcggcgtggacttcttct

SEQ ID NO: 110250 - DNA, 19 bp, Homo sapiens
  siRNA target sequence for RAB39 (NM_017516.1,229-247).
ggacaggagcggttcagat

SEQ ID NO: 110251 - DNA, 19 bp, Homo sapiens
  siRNA target sequence for RAB39 (NM_017516.1,232-250).
caggagcggttcagatcaa

SEQ ID NO: 110252 - DNA, 19 bp, Homo sapiens
  siRNA target sequence for RAB39 (NM_017516.1,234-252).
ggagcggttcagatcaata

SEQ ID NO: 110253 - DNA, 19 bp, Homo sapiens
  siRNA target sequence for RAB39 (NM_017516.1,235-253).
gagcggttcagatcaataa

SEQ ID NO: 110254 - DNA, 19 bp, Homo sapiens
  siRNA target sequence for RAB39 (NM_017516.1,245-263).
gatcaataacccgatctta

SEQ ID NO: 110255 - DNA, 19 bp, Homo sapiens
  siRNA target sequence for RAB39 (NM_017516.1,248-266).
caataacccgatcttatta

SEQ ID NO: 110256 - DNA, 19 bp, Homo sapiens
  siRNA target sequence for RAB39 (NM_017516.1,305-323).
ctaaccgacgatcttttga

SEQ ID NO: 110257 - DNA, 19 bp, Homo sapiens
  siRNA target sequence for RAB39 (NM_017516.1,309-327).
ccgacgatcttttgaacat

SEQ ID NO: 110258 - DNA, 19 bp, Homo sapiens
  siRNA target sequence for RAB39 (NM_017516.1,311-329).
gacgatcttttgaacatgt

SEQ ID NO: 110259 - DNA, 19 bp, Homo sapiens
  siRNA target sequence for RAB39 (NM_017516.1,364-382).
cagccatttcggattgtat

SEQ ID NO: 110260 - DNA, 19 bp, Homo sapiens
  siRNA target sequence for RAB39 (NM_017516.1,366-384).
gccatttcggattgtattt

SEQ ID NO: 110261 - DNA, 19 bp, Homo sapiens
  siRNA target sequence for RAB39 (NM_017516.1,368-386).
catttcggattgtatttct

SEQ ID NO: 110262 - DNA, 19 bp, Homo sapiens
  siRNA target sequence for RAB39 (NM_017516.1,385-403).
ctgctagtgggacataaat

SEQ ID NO: 110263 - DNA, 19 bp, Homo sapiens
  siRNA target sequence for RAB39 (NM_017516.1,387-405).
gctagtgggacataaatgt

SEQ ID NO: 110264 - DNA, 19 bp, Homo sapiens
  siRNA target sequence for RAB39 (NM_017516.1,593-611).
gggttaaaagtggttttgt

SEQ ID NO: 110265 - DNA, 19 bp, Homo sapiens
  siRNA target sequence for RAB39 (NM_017516.1,594-612).
ggttaaaagtggttttgtt

SEQ ID NO: 110266 - DNA, 19 bp, Homo sapiens
  siRNA target sequence for RAB39B (NM_171998.1,492-510).
cacgttcagccctaccaaa

SEQ ID NO: 110267 - DNA, 19 bp, Homo sapiens
  siRNA target sequence for RAB39B (NM_171998.1,498-516).
cagccctaccaaattgtat

SEQ ID NO: 110268 - DNA, 19 bp, Homo sapiens
  siRNA target sequence for RAB39B (NM_171998.1,568-586).
gccacgaggccgagaaact

SEQ ID NO: 110269 - DNA, 19 bp, Homo sapiens
  siRNA target sequence for RAB39B (NM_171998.1,592-610).
ctgcatacggcatgaagta

SEQ ID NO: 110270 - DNA, 19 bp, Homo sapiens
  siRNA target sequence for RAB39B (NM_171998.1,594-612).
gcatacggcatgaagtaca

SEQ ID NO: 110271 - DNA, 19 bp, Homo sapiens
  siRNA target sequence for RAB39B (NM_171998.1,595-613).
catacggcatgaagtacat

SEQ ID NO: 110272 - DNA, 19 bp, Homo sapiens
  siRNA target sequence for RAB39B (NM_171998.1,599-617).
cggcatgaagtacattgaa

SEQ ID NO: 110273 - DNA, 19 bp, Homo sapiens
  siRNA target sequence for RAB39B (NM_171998.1,660-678).
gacctgacaagagacatat

SEQ ID NO: 110274 - DNA, 19 bp, Homo sapiens
  siRNA target sequence for RAB39B (NM_171998.1,674-692).
catatatgagctggttaaa

SEQ ID NO: 110275 - DNA, 19 bp, Homo sapiens
  siRNA target sequence for RAB39B (NM_171998.1,687-705).
gttaaaaggggggagatta

SEQ ID NO: 110276 - DNA, 19 bp, Homo sapiens
  siRNA target sequence for RAB39B (NM_171998.1,728-746).
ggtgaagagtggatttgta

SEQ ID NO: 110277 - DNA, 19 bp, Homo sapiens
  siRNA target sequence for RAB3A (NM_002866.3,191-209).
cgactacatgttcaagatt

SEQ ID NO: 110278 - DNA, 19 bp, Homo sapiens
  siRNA target sequence for RAB3B (NM_002867.2,130-148).
cttcagtgacagatggtaa

SEQ ID NO: 110279 - DNA, 19 bp, Homo sapiens
  siRNA target sequence for RAB3B (NM_002867.2,409-427).
ccatgggcttcattctgat

SEQ ID NO: 110280 - DNA, 19 bp, Homo sapiens
  siRNA target sequence for RAB3C (NM_138453.2,214-232).
cagtgtggggaaaacatct

SEQ ID NO: 110281 - DNA, 19 bp, Homo sapiens
  siRNA target sequence for RAB3C (NM_138453.2,279-297).
gcacagttgggatcgattt

SEQ ID NO: 110282 - DNA, 19 bp, Homo sapiens
  siRNA target sequence for RAB3C (NM_138453.2,287-305).
gggatcgatttcaaagtaa

SEQ ID NO: 110283 - DNA, 19 bp, Homo sapiens
  siRNA target sequence for RAB3C (NM_138453.2,288-306).
ggatcgatttcaaagtaaa

SEQ ID NO: 110284 - DNA, 19 bp, Homo sapiens
  siRNA target sequence for RAB3C (NM_138453.2,289-307).
gatcgatttcaaagtaaaa

SEQ ID NO: 110285 - DNA, 19 bp, Homo sapiens
  siRNA target sequence for RAB3C (NM_138453.2,292-310).
cgatttcaaagtaaaaact

SEQ ID NO: 110286 - DNA, 19 bp, Homo sapiens
  siRNA target sequence for RAB3C (NM_138453.2,365-383).
gaaagatacaggactatca

SEQ ID NO: 110287 - DNA, 19 bp, Homo sapiens
  siRNA target sequence for RAB3C (NM_138453.2,401-419).
ggagccatgggctttattt

SEQ ID NO: 110288 - DNA, 19 bp, Homo sapiens
  siRNA target sequence for RAB3C (NM_138453.2,402-420).
gagccatgggctttatttt

SEQ ID NO: 110289 - DNA, 19 bp, Homo sapiens
  siRNA target sequence for RAB3C (NM_138453.2,461-479).
caagattggtcaactcaaa

SEQ ID NO: 110290 - DNA, 19 bp, Homo sapiens
  siRNA target sequence for RAB3C (NM_138453.2,464-482).
gattggtcaactcaaatca

SEQ ID NO: 110291 - DNA, 19 bp, Homo sapiens
  siRNA target sequence for RAB3C (NM_138453.2,476-494).
caaatcaaaacatactctt

SEQ ID NO: 110292 - DNA, 19 bp, Homo sapiens
  siRNA target sequence for RAB3C (NM_138453.2,662-680).
gatatcatctgcgacaaaa

SEQ ID NO: 110293 - DNA, 19 bp, Homo sapiens
  siRNA target sequence for RAB3D (NM_004283.2,304-322).
gttcaaactgctactgata

SEQ ID NO: 110294 - DNA, 19 bp, Homo sapiens
  siRNA target sequence for RAB3D (NM_004283.2,426-444).
ccgtctaccgccatgacaa

SEQ ID NO: 110295 - DNA, 19 bp, Homo sapiens
  siRNA target sequence for RAB3D (NM_004283.2,581-599).
gactgggccacgcaaatca

SEQ ID NO: 110296 - DNA, 19 bp, Homo sapiens
  siRNA target sequence for RAB40B (NM_006822.1,354-372).
cggcattgatcgatggatt

SEQ ID NO: 110297 - DNA, 19 bp, Homo sapiens
  siRNA target sequence for RAB40C (NM_021168.1,126-144).
ccccgtacgcctacagtaa

SEQ ID NO: 110298 - DNA, 19 bp, Homo sapiens
  siRNA target sequence for RAB40C (NM_021168.1,141-159).
gtaacgggatcgactacaa

SEQ ID NO: 110299 - DNA, 19 bp, Homo sapiens
  siRNA target sequence for RAB40C (NM_021168.1,431-449).
gcgtacgcagagaagaact

SEQ ID NO: 110300 - DNA, 19 bp, Homo sapiens
  siRNA target sequence for RAB40C (NM_021168.1,827-845).
cggagtaactgcaagatct

SEQ ID NO: 110301 - DNA, 19 bp, Homo sapiens
  siRNA target sequence for RAB4A (NM_004578.2,219-237).
cggccatgtccgaaaccta

SEQ ID NO: 110302 - DNA, 19 bp, Homo sapiens
  siRNA target sequence for RAB4A (NM_004578.2,291-309).
gcttacttcatcagtttat

SEQ ID NO: 110303 - DNA, 19 bp, Homo sapiens
  siRNA target sequence for RAB4A (NM_004578.2,326-344).
gatgactcaaatcatacaa

SEQ ID NO: 110304 - DNA, 19 bp, Homo sapiens
  siRNA target sequence for RAB4A (NM_004578.2,331-349).
ctcaaatcatacaatagga

SEQ ID NO: 110305 - DNA, 19 bp, Homo sapiens
  siRNA target sequence for RAB4A (NM_004578.2,377-395).
gttggtggtaaatatgtaa

SEQ ID NO: 110306 - DNA, 19 bp, Homo sapiens
  siRNA target sequence for RAB4A (NM_004578.2,435-453).
ggtccgtgacgagaagtta

SEQ ID NO: 110307 - DNA, 19 bp, Homo sapiens
  siRNA target sequence for RAB4A (NM_004578.2,436-454).
gtccgtgacgagaagttat

SEQ ID NO: 110308 - DNA, 19 bp, Homo sapiens
  siRNA target sequence for RAB4A (NM_004578.2,473-491).
gctctcctcgtctatgata

SEQ ID NO: 110309 - DNA, 19 bp, Homo sapiens
  siRNA target sequence for RAB4A (NM_004578.2,476-494).
ctcctcgtctatgatatca

SEQ ID NO: 110310 - DNA, 19 bp, Homo sapiens
  siRNA target sequence for RAB4A (NM_004578.2,496-514).
cagccgagaaacctacaat

SEQ ID NO: 110311 - DNA, 19 bp, Homo sapiens
  siRNA target sequence for RAB4A (NM_004578.2,507-525).
cctacaatgcgcttactaa

SEQ ID NO: 110312 - DNA, 19 bp, Homo sapiens
  siRNA target sequence for RAB4A (NM_004578.2,547-565).
gctagcgagccagaacatt

SEQ ID NO: 110313 - DNA, 19 bp, Homo sapiens
  siRNA target sequence for RAB4A (NM_004578.2,551-569).
gcgagccagaacattgtga

SEQ ID NO: 110314 - DNA, 19 bp, Homo sapiens
  siRNA target sequence for RAB4A (NM_004578.2,552-570).
cgagccagaacattgtgat

SEQ ID NO: 110315 - DNA, 19 bp, Homo sapiens
  siRNA target sequence for RAB4A (NM_004578.2,555-573).
gccagaacattgtgatcat

SEQ ID NO: 110316 - DNA, 19 bp, Homo sapiens
  siRNA target sequence for RAB4A (NM_004578.2,603-621).
cagatcgtgaagttacctt

SEQ ID NO: 110317 - DNA, 19 bp, Homo sapiens
  siRNA target sequence for RAB4A (NM_004578.2,609-627).
gtgaagttaccttcttaga

SEQ ID NO: 110318 - DNA, 19 bp, Homo sapiens
  siRNA target sequence for RAB4A (NM_004578.2,622-640).
cttagaagcctccagattt

SEQ ID NO: 110319 - DNA, 19 bp, Homo sapiens
  siRNA target sequence for RAB4A (NM_004578.2,678-696).
cgctcacaggggagaatgt

SEQ ID NO: 110320 - DNA, 19 bp, Homo sapiens
  siRNA target sequence for RAB4A (NM_004578.2,679-697).
gctcacaggggagaatgta

SEQ ID NO: 110321 - DNA, 19 bp, Homo sapiens
  siRNA target sequence for RAB4A (NM_004578.2,768-786).
gaatgggctcaggtattca

SEQ ID NO: 110322 - DNA, 19 bp, Homo sapiens
  siRNA target sequence for RAB4B (NM_016154.2,872-890).
cctctaactgtgatggtta

SEQ ID NO: 110323 - DNA, 19 bp, Homo sapiens
  siRNA target sequence for RAB4B (NM_016154.2,1040-1058).
cagttcattgagaataagt

SEQ ID NO: 110324 - DNA, 19 bp, Homo sapiens
  siRNA target sequence for RAB4B (NM_016154.2,1174-1192).
gtcagtgacgcggagttat

SEQ ID NO: 110325 - DNA, 19 bp, Homo sapiens
  siRNA target sequence for RAB4B (NM_016154.2,1176-1194).
cagtgacgcggagttatta

SEQ ID NO: 110326 - DNA, 19 bp, Homo sapiens
  siRNA target sequence for RAB4B (NM_016154.2,1460-1478).
cgcactatcctcaacaaga

SEQ ID NO: 110327 - DNA, 19 bp, Homo sapiens
  siRNA target sequence for RAB4B (NM_016154.2,1461-1479).
gcactatcctcaacaagat

SEQ ID NO: 110328 - DNA, 19 bp, Homo sapiens
  siRNA target sequence for RAB5A (NM_004162.3,432-450).
gccagttcaaactagtact

SEQ ID NO: 110329 - DNA, 19 bp, Homo sapiens
  siRNA target sequence for RAB5A (NM_004162.3,433-451).
ccagttcaaactagtactt

SEQ ID NO: 110330 - DNA, 19 bp, Homo sapiens
  siRNA target sequence for RAB5A (NM_004162.3,460-478).
gtccgctgttggcaaatca

SEQ ID NO: 110331 - DNA, 19 bp, Homo sapiens
  siRNA target sequence for RAB5A (NM_004162.3,480-498).
gcctagtgcttcgttttgt

SEQ ID NO: 110332 - DNA, 19 bp, Homo sapiens
  siRNA target sequence for RAB5A (NM_004162.3,482-500).
ctagtgcttcgttttgtga

SEQ ID NO: 110333 - DNA, 19 bp, Homo sapiens
  siRNA target sequence for RAB5A (NM_004162.3,499-517).
gaaaggccaatttcatgaa

SEQ ID NO: 110334 - DNA, 19 bp, Homo sapiens
  siRNA target sequence for RAB5A (NM_004162.3,553-571).
ccaaactgtatgtcttgat

SEQ ID NO: 110335 - DNA, 19 bp, Homo sapiens
  siRNA target sequence for RAB5A (NM_004162.3,566-584).
cttgatgacactacagtaa

SEQ ID NO: 110336 - DNA, 19 bp, Homo sapiens
  siRNA target sequence for RAB5A (NM_004162.3,574-592).
cactacagtaaagtttgaa

SEQ ID NO: 110337 - DNA, 19 bp, Homo sapiens
  siRNA target sequence for RAB5A (NM_004162.3,629-647).
ctagcaccaatgtactaca

SEQ ID NO: 110338 - DNA, 19 bp, Homo sapiens
  siRNA target sequence for RAB5A (NM_004162.3,662-680).
gccatagttgtatatgata

SEQ ID NO: 110339 - DNA, 19 bp, Homo sapiens
  siRNA target sequence for RAB5A (NM_004162.3,735-753).
ggcaagcaagtcctaacat

SEQ ID NO: 110340 - DNA, 19 bp, Homo sapiens
  siRNA target sequence for RAB5A (NM_004162.3,740-758).
gcaagtcctaacattgtaa

SEQ ID NO: 110341 - DNA, 19 bp, Homo sapiens
  siRNA target sequence for RAB5A (NM_004162.3,741-759).
caagtcctaacattgtaat

SEQ ID NO: 110342 - DNA, 19 bp, Homo sapiens
  siRNA target sequence for RAB5A (NM_004162.3,775-793).
caaggccgacctagcaaat

SEQ ID NO: 110343 - DNA, 19 bp, Homo sapiens
  siRNA target sequence for RAB5A (NM_004162.3,778-796).
ggccgacctagcaaataaa

SEQ ID NO: 110344 - DNA, 19 bp, Homo sapiens
  siRNA target sequence for RAB5A (NM_004162.3,859-877).
gacatccgctaaaacatca

SEQ ID NO: 110345 - DNA, 19 bp, Homo sapiens
  siRNA target sequence for RAB5A (NM_004162.3,861-879).
catccgctaaaacatcaat

SEQ ID NO: 110346 - DNA, 19 bp, Homo sapiens
  siRNA target sequence for RAB5A (NM_004162.3,864-882).
ccgctaaaacatcaatgaa

SEQ ID NO: 110347 - DNA, 19 bp, Homo sapiens
  siRNA target sequence for RAB5A (NM_004162.3,865-883).
cgctaaaacatcaatgaat

SEQ ID NO: 110348 - DNA, 19 bp, Homo sapiens
  siRNA target sequence for RAB5A (NM_004162.3,992-1010).
caaccaaccaggaatcagt

SEQ ID NO: 110349 - DNA, 19 bp, Homo sapiens
  siRNA target sequence for RAB5A (NM_004162.3,1000-1018).
caggaatcagtgttgtagt

SEQ ID NO: 110350 - DNA, 19 bp, Homo sapiens
  siRNA target sequence for RAB5B (NM_002868.2,250-268).
gaaagtcaagcctggtatt

SEQ ID NO: 110351 - DNA, 19 bp, Homo sapiens
  siRNA target sequence for RAB5B (NM_002868.2,254-272).
gtcaagcctggtattacgt

SEQ ID NO: 110352 - DNA, 19 bp, Homo sapiens
  siRNA target sequence for RAB5B (NM_002868.2,256-274).
caagcctggtattacgttt

SEQ ID NO: 110353 - DNA, 19 bp, Homo sapiens
  siRNA target sequence for RAB5B (NM_002868.2,261-279).
ctggtattacgttttgtca

SEQ ID NO: 110354 - DNA, 19 bp, Homo sapiens
  siRNA target sequence for RAB5B (NM_002868.2,329-347).
cacccagtccgtttgtcta

SEQ ID NO: 110355 - DNA, 19 bp, Homo sapiens
  siRNA target sequence for RAB5B (NM_002868.2,332-350).
ccagtccgtttgtctagat

SEQ ID NO: 110356 - DNA, 19 bp, Homo sapiens
  siRNA target sequence for RAB5B (NM_002868.2,439-457).
ctgcaatcgtggtttacga

SEQ ID NO: 110357 - DNA, 19 bp, Homo sapiens
  siRNA target sequence for RAB5B (NM_002868.2,446-464).
cgtggtttacgacattact

SEQ ID NO: 110358 - DNA, 19 bp, Homo sapiens
  siRNA target sequence for RAB5B (NM_002868.2,447-465).
gtggtttacgacattacta

SEQ ID NO: 110359 - DNA, 19 bp, Homo sapiens
  siRNA target sequence for RAB5B (NM_002868.2,519-537).
gccagtcctagcatcgtta

SEQ ID NO: 110360 - DNA, 19 bp, Homo sapiens
  siRNA target sequence for RAB5B (NM_002868.2,520-538).
ccagtcctagcatcgttat

SEQ ID NO: 110361 - DNA, 19 bp, Homo sapiens
  siRNA target sequence for RAB5B (NM_002868.2,521-539).
cagtcctagcatcgttatt

SEQ ID NO: 110362 - DNA, 19 bp, Homo sapiens
  siRNA target sequence for RAB5B (NM_002868.2,612-630).
gatgacaacagcttattgt

SEQ ID NO: 110363 - DNA, 19 bp, Homo sapiens
  siRNA target sequence for RAB5B (NM_002868.2,652-670).
cagctatgaacgtgaatga

SEQ ID NO: 110364 - DNA, 19 bp, Homo sapiens
  siRNA target sequence for RAB5B (NM_002868.2,655-673).
ctatgaacgtgaatgatct

SEQ ID NO: 110365 - DNA, 19 bp, Homo sapiens
  siRNA target sequence for RAB5C (NM_004583.1,173-191).
cagctgctgggaacaagat

SEQ ID NO: 110366 - DNA, 19 bp, Homo sapiens
  siRNA target sequence for RAB5C (NM_004583.1,181-199).
gggaacaagatctgtcaat

SEQ ID NO: 110367 - DNA, 19 bp, Homo sapiens
  siRNA target sequence for RAB5C (NM_004583.1,183-201).
gaacaagatctgtcaattt

SEQ ID NO: 110368 - DNA, 19 bp, Homo sapiens
  siRNA target sequence for RAB5C (NM_004583.1,425-443).
ccatcgtggtctatgacat

SEQ ID NO: 110369 - DNA, 19 bp, Homo sapiens
  siRNA target sequence for RAB5C (NM_004583.1,637-655).
gcaatgaacgtgaacgaaa

SEQ ID NO: 110370 - DNA, 19 bp, Homo sapiens
  siRNA target sequence for RAB5C (NM_004583.1,638-656).
caatgaacgtgaacgaaat

SEQ ID NO: 110371 - DNA, 19 bp, Homo sapiens
  siRNA target sequence for RAB6A (NM_198896.1,699-717).
cgaacagtacgattgcaat

SEQ ID NO: 110372 - DNA, 19 bp, Homo sapiens
  siRNA target sequence for RAB6A (NM_198896.1,700-718).
gaacagtacgattgcaatt

SEQ ID NO: 110373 - DNA, 19 bp, Homo sapiens
  siRNA target sequence for RAB6A (NM_198896.1,740-758).
gcggttcaggagcttgatt

SEQ ID NO: 110374 - DNA, 19 bp, Homo sapiens
  siRNA target sequence for RAB6B (NM_016577.1,340-358).
gtccgcagggggagatttt

SEQ ID NO: 110375 - DNA, 19 bp, Homo sapiens
  siRNA target sequence for RAB6B (NM_016577.1,409-427).
cgggaagacgtctctgatt

SEQ ID NO: 110376 - DNA, 19 bp, Homo sapiens
  siRNA target sequence for RAB6B (NM_016577.1,422-440).
ctgattacgaggttcatgt

SEQ ID NO: 110377 - DNA, 19 bp, Homo sapiens
  siRNA target sequence for RAB6B (NM_016577.1,443-461).
gacagcttcgacaacacat

SEQ ID NO: 110378 - DNA, 19 bp, Homo sapiens
  siRNA target sequence for RAB6B (NM_016577.1,478-496).
gattgacttcttgtcaaaa

SEQ ID NO: 110379 - DNA, 19 bp, Homo sapiens
  siRNA target sequence for RAB6B (NM_016577.1,731-749).
gataagaggcagataacca

SEQ ID NO: 110380 - DNA, 19 bp, Homo sapiens
  siRNA target sequence for RAB6B (NM_016577.1,776-794).
gaactgagcgtcatgttca

SEQ ID NO: 110381 - DNA, 19 bp, Homo sapiens
  siRNA target sequence for RAB7 (NM_004637.5,302-320).
ctcatgaaccagtatgtga

SEQ ID NO: 110382 - DNA, 19 bp, Homo sapiens
  siRNA target sequence for RAB7 (NM_004637.5,398-416).
ctagtcacaatgcagatat

SEQ ID NO: 110383 - DNA, 19 bp, Homo sapiens
  siRNA target sequence for RAB7 (NM_004637.5,480-498).
gctgcgttctggtatttga

SEQ ID NO: 110384 - DNA, 19 bp, Homo sapiens
  siRNA target sequence for RAB7 (NM_004637.5,483-501).
gcgttctggtatttgatgt

SEQ ID NO: 110385 - DNA, 19 bp, Homo sapiens
  siRNA target sequence for RAB7 (NM_004637.5,506-524).
gcccccaacacattcaaaa

SEQ ID NO: 110386 - DNA, 19 bp, Homo sapiens
  siRNA target sequence for RAB7 (NM_004637.5,564-582).
gtccccgagatcctgaaaa

SEQ ID NO: 110387 - DNA, 19 bp, Homo sapiens
  siRNA target sequence for RAB7 (NM_004637.5,567-585).
cccgagatcctgaaaactt

SEQ ID NO: 110388 - DNA, 19 bp, Homo sapiens
  siRNA target sequence for RAB7 (NM_004637.5,657-675).
ggtgctacagcaaaaacaa

SEQ ID NO: 110389 - DNA, 19 bp, Homo sapiens
  siRNA target sequence for RAB7 (NM_004637.5,660-678).
gctacagcaaaaacaacat

SEQ ID NO: 110390 - DNA, 19 bp, Homo sapiens
  siRNA target sequence for RAB7 (NM_004637.5,741-759).
cacggaatgcacttaagca

SEQ ID NO: 110391 - DNA, 19 bp, Homo sapiens
  siRNA target sequence for RAB7 (NM_004637.5,770-788).
gtggagctgtacaacgaat

SEQ ID NO: 110392 - DNA, 19 bp, Homo sapiens
  siRNA target sequence for RAB7L1 (NM_003929.1,48-66).
gccgcgaccacctgttcaa

SEQ ID NO: 110393 - DNA, 19 bp, Homo sapiens
  siRNA target sequence for RAB7L1 (NM_003929.1,132-150).
gcttcagcaaacactacaa

SEQ ID NO: 110394 - DNA, 19 bp, Homo sapiens
  siRNA target sequence for RAB7L1 (NM_003929.1,157-175).
ggtgggagtggattttgct

SEQ ID NO: 110395 - DNA, 19 bp, Homo sapiens
  siRNA target sequence for RAB7L1 (NM_003929.1,192-210).
ggtctgactacgagatagt

SEQ ID NO: 110396 - DNA, 19 bp, Homo sapiens
  siRNA target sequence for RAB7L1 (NM_003929.1,242-260).
gagcgcttcacctctatga

SEQ ID NO: 110397 - DNA, 19 bp, Homo sapiens
  siRNA target sequence for RAB7L1 (NM_003929.1,244-262).
gcgcttcacctctatgaca

SEQ ID NO: 110398 - DNA, 19 bp, Homo sapiens
  siRNA target sequence for RAB7L1 (NM_003929.1,253-271).
ctctatgacacgattgtat

SEQ ID NO: 110399 - DNA, 19 bp, Homo sapiens
  siRNA target sequence for RAB7L1 (NM_003929.1,255-273).
ctatgacacgattgtatta

SEQ ID NO: 110400 - DNA, 19 bp, Homo sapiens
  siRNA target sequence for RAB7L1 (NM_003929.1,452-470).
cagattgaccggttcagta

SEQ ID NO: 110401 - DNA, 19 bp, Homo sapiens
  siRNA target sequence for RAB7L1 (NM_003929.1,454-472).
gattgaccggttcagtaaa

SEQ ID NO: 110402 - DNA, 19 bp, Homo sapiens
  siRNA target sequence for RAB7L1 (NM_003929.1,534-552).
ctatgagagtcctcattga

SEQ ID NO: 110403 - DNA, 19 bp, Homo sapiens
  siRNA target sequence for RAB7L1 (NM_003929.1,594-612).
ccacccaaggggactacat

SEQ ID NO: 110404 - DNA, 19 bp, Homo sapiens
  siRNA target sequence for RAB7L1 (NM_003929.1,598-616).
ccaaggggactacatcaat

SEQ ID NO: 110405 - DNA, 19 bp, Homo sapiens
  siRNA target sequence for RAB9A (NM_004251.3,247-265).
cacttatgaacagatatgt

SEQ ID NO: 110406 - DNA, 19 bp, Homo sapiens
  siRNA target sequence for RAB9A (NM_004251.3,525-543).
gagagctttccttttgtga

SEQ ID NO: 110407 - DNA, 19 bp, Homo sapiens
  siRNA target sequence for RAB9A (NM_004251.3,612-630).
gacaacggcgactatcctt

SEQ ID NO: 110408 - DNA, 19 bp, Homo sapiens
  siRNA target sequence for RAB9A (NM_004251.3,614-632).
caacggcgactatccttat

SEQ ID NO: 110409 - DNA, 19 bp, Homo sapiens
  siRNA target sequence for RAB9A (NM_004251.3,734-752).
gacagacacagtcaatctt

SEQ ID NO: 110410 - DNA, 19 bp, Homo sapiens
  siRNA target sequence for RAB9B (NM_016370.1,351-369).
gcttatgaaccgttacgta

SEQ ID NO: 110411 - DNA, 19 bp, Homo sapiens
  siRNA target sequence for RAB9B (NM_016370.1,360-378).
ccgttacgtaaccaacaaa

SEQ ID NO: 110412 - DNA, 19 bp, Homo sapiens
  siRNA target sequence for RAB9B (NM_016370.1,367-385).
gtaaccaacaaatttgact

SEQ ID NO: 110413 - DNA, 19 bp, Homo sapiens
  siRNA target sequence for RAB9B (NM_016370.1,408-426).
ggtagagttcttaaatcga

SEQ ID NO: 110414 - DNA, 19 bp, Homo sapiens
  siRNA target sequence for RAB9B (NM_016370.1,436-454).
gtagatggacgctttgtaa

SEQ ID NO: 110415 - DNA, 19 bp, Homo sapiens
  siRNA target sequence for RAB9B (NM_016370.1,476-494).
cagggcaggaacgtttcaa

SEQ ID NO: 110416 - DNA, 19 bp, Homo sapiens
  siRNA target sequence for RAB9B (NM_016370.1,478-496).
gggcaggaacgtttcaaga

SEQ ID NO: 110417 - DNA, 19 bp, Homo sapiens
  siRNA target sequence for RAB9B (NM_016370.1,587-605).
ggcagaaagaatttattta

SEQ ID NO: 110418 - DNA, 19 bp, Homo sapiens
  siRNA target sequence for RAB9B (NM_016370.1,653-671).
gtaacaaggtagacaaaga

SEQ ID NO: 110419 - DNA, 19 bp, Homo sapiens
  siRNA target sequence for RAB9B (NM_016370.1,839-857).
gtcacaccattgacttgaa

SEQ ID NO: 110420 - DNA, 19 bp, Homo sapiens
  siRNA target sequence for RABL4 (NM_006860.2,528-546).
cagtgtggaactcttcatt

SEQ ID NO: 110421 - DNA, 19 bp, Homo sapiens
  siRNA target sequence for RABL4 (NM_006860.2,597-615).
ggagagtcccaatgtctta

SEQ ID NO: 110422 - DNA, 19 bp, Homo sapiens
  siRNA target sequence for RABL4 (NM_006860.2,598-616).
gagagtcccaatgtcttat

SEQ ID NO: 110423 - DNA, 19 bp, Homo sapiens
  siRNA target sequence for RABL4 (NM_006860.2,612-630).
cttatgtctcgtctatgat

SEQ ID NO: 110424 - DNA, 19 bp, Homo sapiens
  siRNA target sequence for RABL4 (NM_006860.2,624-642).
ctatgatgtgaccaatgaa

SEQ ID NO: 110425 - DNA, 19 bp, Homo sapiens
  siRNA target sequence for RABL4 (NM_006860.2,704-722).
ctctcccaggtgttttagt

SEQ ID NO: 110426 - DNA, 19 bp, Homo sapiens
  siRNA target sequence for RABL4 (NM_006860.2,811-829).
gaaacatccgtgaaagaga

SEQ ID NO: 110427 - DNA, 19 bp, Homo sapiens
  siRNA target sequence for RAC1 (NM_018890.2,473-491).
gaaacgtacggtaaggata

SEQ ID NO: 110428 - DNA, 19 bp, Homo sapiens
  siRNA target sequence for RAC1 (NM_018890.2,516-534).
cgattgccgatgtgttctt

SEQ ID NO: 110429 - DNA, 19 bp, Homo sapiens
  siRNA target sequence for RAC1 (NM_018890.2,517-535).
gattgccgatgtgttctta

SEQ ID NO: 110430 - DNA, 19 bp, Homo sapiens
  siRNA target sequence for RAC2 (NM_002872.3,369-387).
cgtcagcccagcctcttat

SEQ ID NO: 110431 - DNA, 19 bp, Homo sapiens
  siRNA target sequence for RAC3 (NM_005052.2,324-342).
cccaaactgacgtctttct

SEQ ID NO: 110432 - DNA, 19 bp, Homo sapiens
  siRNA target sequence for RAC3 (NM_005052.2,367-385).
ggcctccttcgagaatgtt

SEQ ID NO: 110433 - DNA, 19 bp, Homo sapiens
  siRNA target sequence for RALA (NM_005402.2,315-333).
gcccaagggtcagaattct

SEQ ID NO: 110434 - DNA, 19 bp, Homo sapiens
  siRNA target sequence for RALA (NM_005402.2,332-350).
ctttggctttacacaaagt

SEQ ID NO: 110435 - DNA, 19 bp, Homo sapiens
  siRNA target sequence for RALA (NM_005402.2,338-356).
ctttacacaaagtcatcat

SEQ ID NO: 110436 - DNA, 19 bp, Homo sapiens
  siRNA target sequence for RALA (NM_005402.2,478-496).
gaggaagtccagatcgata

SEQ ID NO: 110437 - DNA, 19 bp, Homo sapiens
  siRNA target sequence for RALA (NM_005402.2,481-499).
gaagtccagatcgatatct

SEQ ID NO: 110438 - DNA, 19 bp, Homo sapiens
  siRNA target sequence for RALA (NM_005402.2,486-504).
ccagatcgatatcttagat

SEQ ID NO: 110439 - DNA, 19 bp, Homo sapiens
  siRNA target sequence for RALA (NM_005402.2,487-505).
cagatcgatatcttagata

SEQ ID NO: 110440 - DNA, 19 bp, Homo sapiens
  siRNA target sequence for RALA (NM_005402.2,489-507).
gatcgatatcttagataca

SEQ ID NO: 110441 - DNA, 19 bp, Homo sapiens
  siRNA target sequence for RALA (NM_005402.2,516-534).
ggaggactacgctgcaatt

SEQ ID NO: 110442 - DNA, 19 bp, Homo sapiens
  siRNA target sequence for RALA (NM_005402.2,517-535).
gaggactacgctgcaatta

SEQ ID NO: 110443 - DNA, 19 bp, Homo sapiens
  siRNA target sequence for RALA (NM_005402.2,519-537).
ggactacgctgcaattaga

SEQ ID NO: 110444 - DNA, 19 bp, Homo sapiens
  siRNA target sequence for RALA (NM_005402.2,527-545).
ctgcaattagagacaacta

SEQ ID NO: 110445 - DNA, 19 bp, Homo sapiens
  siRNA target sequence for RALA (NM_005402.2,529-547).
gcaattagagacaactact

SEQ ID NO: 110446 - DNA, 19 bp, Homo sapiens
  siRNA target sequence for RALA (NM_005402.2,530-548).
caattagagacaactactt

SEQ ID NO: 110447 - DNA, 19 bp, Homo sapiens
  siRNA target sequence for RALA (NM_005402.2,559-577).
gaggggttcctctgtgttt

SEQ ID NO: 110448 - DNA, 19 bp, Homo sapiens
  siRNA target sequence for RALA (NM_005402.2,662-680).
catttctactggttggtaa

SEQ ID NO: 110449 - DNA, 19 bp, Homo sapiens
  siRNA target sequence for RALA (NM_005402.2,673-691).
gttggtaacaaatcagatt

SEQ ID NO: 110450 - DNA, 19 bp, Homo sapiens
  siRNA target sequence for RALA (NM_005402.2,677-695).
gtaacaaatcagatttaga

SEQ ID NO: 110451 - DNA, 19 bp, Homo sapiens
  siRNA target sequence for RALA (NM_005402.2,739-757).
gagcagtggaatgttaact

SEQ ID NO: 110452 - DNA, 19 bp, Homo sapiens
  siRNA target sequence for RALA (NM_005402.2,759-777).
cgtggaaacatctgctaaa

SEQ ID NO: 110453 - DNA, 19 bp, Homo sapiens
  siRNA target sequence for RALA (NM_005402.2,773-791).
ctaaaacacgagctaatgt

SEQ ID NO: 110454 - DNA, 19 bp, Homo sapiens
  siRNA target sequence for RALA (NM_005402.2,779-797).
cacgagctaatgttgacaa

SEQ ID NO: 110455 - DNA, 19 bp, Homo sapiens
  siRNA target sequence for RALA (NM_005402.2,784-802).
gctaatgttgacaaggtat

SEQ ID NO: 110456 - DNA, 19 bp, Homo sapiens
  siRNA target sequence for RALA (NM_005402.2,785-803).
ctaatgttgacaaggtatt

SEQ ID NO: 110457 - DNA, 19 bp, Homo sapiens
  siRNA target sequence for RALB (NM_002881.1,260-278).
gacgcttcagttcatgtat

SEQ ID NO: 110458 - DNA, 19 bp, Homo sapiens
  siRNA target sequence for RALB (NM_002881.1,262-280).
cgcttcagttcatgtatga

SEQ ID NO: 110459 - DNA, 19 bp, Homo sapiens
  siRNA target sequence for RALB (NM_002881.1,272-290).
catgtatgacgagtttgta

SEQ ID NO: 110460 - DNA, 19 bp, Homo sapiens
  siRNA target sequence for RALB (NM_002881.1,308-326).
caaagctgacagttataga

SEQ ID NO: 110461 - DNA, 19 bp, Homo sapiens
  siRNA target sequence for RALB (NM_002881.1,396-414).
gcagccattcgagataact

SEQ ID NO: 110462 - DNA, 19 bp, Homo sapiens
  siRNA target sequence for RALB (NM_002881.1,399-417).
gccattcgagataactact

SEQ ID NO: 110463 - DNA, 19 bp, Homo sapiens
  siRNA target sequence for RALB (NM_002881.1,400-418).
ccattcgagataactactt

SEQ ID NO: 110464 - DNA, 19 bp, Homo sapiens
  siRNA target sequence for RALB (NM_002881.1,401-419).
cattcgagataactacttt

SEQ ID NO: 110465 - DNA, 19 bp, Homo sapiens
  siRNA target sequence for RALB (NM_002881.1,446-464).
gttctcaatcacagaacat

SEQ ID NO: 110466 - DNA, 19 bp, Homo sapiens
  siRNA target sequence for RALB (NM_002881.1,449-467).
ctcaatcacagaacatgaa

SEQ ID NO: 110467 - DNA, 19 bp, Homo sapiens
  siRNA target sequence for RALB (NM_002881.1,455-473).
cacagaacatgaatccttt

SEQ ID NO: 110468 - DNA, 19 bp, Homo sapiens
  siRNA target sequence for RALB (NM_002881.1,506-524).
ccgtgtgaaggctgaagaa

SEQ ID NO: 110469 - DNA, 19 bp, Homo sapiens
  siRNA target sequence for RALB (NM_002881.1,540-558).
ctcgtcgtgggaaacaagt

SEQ ID NO: 110470 - DNA, 19 bp, Homo sapiens
  siRNA target sequence for RALB (NM_002881.1,672-690).
gtgttctttgacctaatga

SEQ ID NO: 110471 - DNA, 19 bp, Homo sapiens
  siRNA target sequence for RALB (NM_002881.1,674-692).
gttctttgacctaatgaga

SEQ ID NO: 110472 - DNA, 19 bp, Homo sapiens
  siRNA target sequence for RAN (NM_006325.2,192-210).
cgtgaaacgtcatttgact

SEQ ID NO: 110473 - DNA, 19 bp, Homo sapiens
  siRNA target sequence for RAN (NM_006325.2,200-218).
gtcatttgactggtgaatt

SEQ ID NO: 110474 - DNA, 19 bp, Homo sapiens
  siRNA target sequence for RANBP17 (NM_022897.2,21-39).
cgctgcacttccagagttt

SEQ ID NO: 110475 - DNA, 19 bp, Homo sapiens
  siRNA target sequence for RANBP17 (NM_022897.2,44-62).
gaattggaagtgttatgta

SEQ ID NO: 110476 - DNA, 19 bp, Homo sapiens
  siRNA target sequence for RANBP17 (NM_022897.2,70-88).
ctacatagggactgatctt

SEQ ID NO: 110477 - DNA, 19 bp, Homo sapiens
  siRNA target sequence for RANBP17 (NM_022897.2,114-132).
cactcttggaacttattga

SEQ ID NO: 110478 - DNA, 19 bp, Homo sapiens
  siRNA target sequence for RANBP17 (NM_022897.2,148-166).
cagcaagtgtcaactttta

SEQ ID NO: 110479 - DNA, 19 bp, Homo sapiens
  siRNA target sequence for RANBP17 (NM_022897.2,150-168).
gcaagtgtcaacttttatt

SEQ ID NO: 110480 - DNA, 19 bp, Homo sapiens
  siRNA target sequence for RANBP17 (NM_022897.2,229-247).
cagccgagtcagtccttta

SEQ ID NO: 110481 - DNA, 19 bp, Homo sapiens
  siRNA target sequence for RANBP17 (NM_022897.2,232-250).
ccgagtcagtcctttacct

SEQ ID NO: 110482 - DNA, 19 bp, Homo sapiens
  siRNA target sequence for RANBP17 (NM_022897.2,344-362).
gtcattgctaaaatcacta

SEQ ID NO: 110483 - DNA, 19 bp, Homo sapiens
  siRNA target sequence for RANBP17 (NM_022897.2,444-462).
ctgtggaacactgcataat

SEQ ID NO: 110484 - DNA, 19 bp, Homo sapiens
  siRNA target sequence for RANBP17 (NM_022897.2,448-466).
ggaacactgcataatagga

SEQ ID NO: 110485 - DNA, 19 bp, Homo sapiens
  siRNA target sequence for RANBP17 (NM_022897.2,480-498).
ctgaattgactcaggaaat

SEQ ID NO: 110486 - DNA, 19 bp, Homo sapiens
  siRNA target sequence for RANBP17 (NM_022897.2,499-517).
gaacctggttgattattct

SEQ ID NO: 110487 - DNA, 19 bp, Homo sapiens
  siRNA target sequence for RANBP17 (NM_022897.2,550-568).
ctcatttcgtgatacttct

SEQ ID NO: 110488 - DNA, 19 bp, Homo sapiens
  siRNA target sequence for RANBP17 (NM_022897.2,584-602).
gtgctagcatgctctcttt

SEQ ID NO: 110489 - DNA, 19 bp, Homo sapiens
  siRNA target sequence for RANBP17 (NM_022897.2,608-626).
gaggtgtttgccaaacctt

SEQ ID NO: 110490 - DNA, 19 bp, Homo sapiens
  siRNA target sequence for RANBP17 (NM_022897.2,680-698).
gtccttaactgccttaact

SEQ ID NO: 110491 - DNA, 19 bp, Homo sapiens
  siRNA target sequence for RANBP17 (NM_022897.2,725-743).
gaatctgcagatgatcttt

SEQ ID NO: 110492 - DNA, 19 bp, Homo sapiens
  siRNA target sequence for RANBP17 (NM_022897.2,789-807).
cagaaacattggatctttt

SEQ ID NO: 110493 - DNA, 19 bp, Homo sapiens
  siRNA target sequence for RANBP17 (NM_022897.2,800-818).
gatcttttcttcaatttgt

SEQ ID NO: 110494 - DNA, 19 bp, Homo sapiens
  siRNA target sequence for RANBP17 (NM_022897.2,869-887).
cagtttgcttcgacaagaa

SEQ ID NO: 110495 - DNA, 19 bp, Homo sapiens
  siRNA target sequence for RANBP17 (NM_022897.2,879-897).
cgacaagaaggtccttatt

SEQ ID NO: 110496 - DNA, 19 bp, Homo sapiens
  siRNA target sequence for RANBP17 (NM_022897.2,882-900).
caagaaggtccttatttaa

SEQ ID NO: 110497 - DNA, 19 bp, Homo sapiens
  siRNA target sequence for RANBP17 (NM_022897.2,914-932).
gccaagtaccttggtaatt

SEQ ID NO: 110498 - DNA, 19 bp, Homo sapiens
  siRNA target sequence for RANBP17 (NM_022897.2,919-937).
gtaccttggtaatttaatt

SEQ ID NO: 110499 - DNA, 19 bp, Homo sapiens
  siRNA target sequence for RANBP17 (NM_022897.2,976-994).
gtctgatccaggtaattat

SEQ ID NO: 110500 - DNA, 19 bp, Homo sapiens
  siRNA target sequence for RANBP17 (NM_022897.2,978-996).
ctgatccaggtaattatca

SEQ ID NO: 110501 - DNA, 19 bp, Homo sapiens
  siRNA target sequence for RANBP17 (NM_022897.2,983-1001).
ccaggtaattatcatgaat

SEQ ID NO: 110502 - DNA, 19 bp, Homo sapiens
  siRNA target sequence for RANBP17 (NM_022897.2,984-1002).
caggtaattatcatgaatt

SEQ ID NO: 110503 - DNA, 19 bp, Homo sapiens
  siRNA target sequence for RANBP17 (NM_022897.2,1007-1025).
cgatttttggctcgtttaa

SEQ ID NO: 110504 - DNA, 19 bp, Homo sapiens
  siRNA target sequence for RANBP17 (NM_022897.2,1008-1026).
gatttttggctcgtttaaa

SEQ ID NO: 110505 - DNA, 19 bp, Homo sapiens
  siRNA target sequence for RANBP17 (NM_022897.2,1015-1033).
ggctcgtttaaagacaaat

SEQ ID NO: 110506 - DNA, 19 bp, Homo sapiens
  siRNA target sequence for RANBP17 (NM_022897.2,1016-1034).
gctcgtttaaagacaaatt

SEQ ID NO: 110507 - DNA, 19 bp, Homo sapiens
  siRNA target sequence for RANBP17 (NM_022897.2,1071-1089).
ctgaagttattagattgat

SEQ ID NO: 110508 - DNA, 19 bp, Homo sapiens
  siRNA target sequence for RANBP17 (NM_022897.2,1130-1148).
gctcctaacagtgttcatt

SEQ ID NO: 110509 - DNA, 19 bp, Homo sapiens
  siRNA target sequence for RANBP17 (NM_022897.2,1200-1218).
caactgaaccccacctatt

SEQ ID NO: 110510 - DNA, 19 bp, Homo sapiens
  siRNA target sequence for RANBP17 (NM_022897.2,1205-1223).
gaaccccacctattagaca

SEQ ID NO: 110511 - DNA, 19 bp, Homo sapiens
  siRNA target sequence for RANBP17 (NM_022897.2,1213-1231).
cctattagacacttatgca

SEQ ID NO: 110512 - DNA, 19 bp, Homo sapiens
  siRNA target sequence for RANBP17 (NM_022897.2,1240-1258).
cacgaaggcctttatcact

SEQ ID NO: 110513 - DNA, 19 bp, Homo sapiens
  siRNA target sequence for RANBP17 (NM_022897.2,1389-1407).
ctcttcttgtgcagttatt

SEQ ID NO: 110514 - DNA, 19 bp, Homo sapiens
  siRNA target sequence for RANBP17 (NM_022897.2,1399-1417).
gcagttattcgaccaaaat

SEQ ID NO: 110515 - DNA, 19 bp, Homo sapiens
  siRNA target sequence for RANBP17 (NM_022897.2,1402-1420).
gttattcgaccaaaatgca

SEQ ID NO: 110516 - DNA, 19 bp, Homo sapiens
  siRNA target sequence for RANBP17 (NM_022897.2,1408-1426).
cgaccaaaatgcacagaat

SEQ ID NO: 110517 - DNA, 19 bp, Homo sapiens
  siRNA target sequence for RANBP17 (NM_022897.2,1409-1427).
gaccaaaatgcacagaatt

SEQ ID NO: 110518 - DNA, 19 bp, Homo sapiens
  siRNA target sequence for RANBP17 (NM_022897.2,1488-1506).
gtcttgcatggctggtata

SEQ ID NO: 110519 - DNA, 19 bp, Homo sapiens
  siRNA target sequence for RANBP17 (NM_022897.2,1490-1508).
cttgcatggctggtatact

SEQ ID NO: 110520 - DNA, 19 bp, Homo sapiens
  siRNA target sequence for RANBP17 (NM_022897.2,1523-1541).
gtaggaggaagattaacat

SEQ ID NO: 110521 - DNA, 19 bp, Homo sapiens
  siRNA target sequence for RANBP17 (NM_022897.2,1565-1583).
gctatggatggagaattat

SEQ ID NO: 110522 - DNA, 19 bp, Homo sapiens
  siRNA target sequence for RANBP17 (NM_022897.2,1600-1618).
gcttatatctttaatggat

SEQ ID NO: 110523 - DNA, 19 bp, Homo sapiens
  siRNA target sequence for RANBP17 (NM_022897.2,1621-1639).
cggattgcctcgatgttgt

SEQ ID NO: 110524 - DNA, 19 bp, Homo sapiens
  siRNA target sequence for RANBP17 (NM_022897.2,1622-1640).
ggattgcctcgatgttgta

SEQ ID NO: 110525 - DNA, 19 bp, Homo sapiens
  siRNA target sequence for RANBP17 (NM_022897.2,1623-1641).
gattgcctcgatgttgtaa

SEQ ID NO: 110526 - DNA, 19 bp, Homo sapiens
  siRNA target sequence for RANBP17 (NM_022897.2,1628-1646).
cctcgatgttgtaatgaga

SEQ ID NO: 110527 - DNA, 19 bp, Homo sapiens
  siRNA target sequence for RANBP17 (NM_022897.2,1629-1647).
ctcgatgttgtaatgagaa

SEQ ID NO: 110528 - DNA, 19 bp, Homo sapiens
  siRNA target sequence for RANBP17 (NM_022897.2,1666-1684).
gtggttcttggatcagttt

SEQ ID NO: 110529 - DNA, 19 bp, Homo sapiens
  siRNA target sequence for RANBP17 (NM_022897.2,1675-1693).
ggatcagtttcgtaaaaca

SEQ ID NO: 110530 - DNA, 19 bp, Homo sapiens
  siRNA target sequence for RANBP17 (NM_022897.2,1676-1694).
gatcagtttcgtaaaacat

SEQ ID NO: 110531 - DNA, 19 bp, Homo sapiens
  siRNA target sequence for RANBP17 (NM_022897.2,1681-1699).
gtttcgtaaaacatatgtt

SEQ ID NO: 110532 - DNA, 19 bp, Homo sapiens
  siRNA target sequence for RANBP17 (NM_022897.2,1692-1710).
catatgttggtgatcaact

SEQ ID NO: 110533 - DNA, 19 bp, Homo sapiens
  siRNA target sequence for RANBP17 (NM_022897.2,1697-1715).
gttggtgatcaacttcaaa

SEQ ID NO: 110534 - DNA, 19 bp, Homo sapiens
  siRNA target sequence for RANBP17 (NM_022897.2,1775-1793).
gttctagagacgttcatga

SEQ ID NO: 110535 - DNA, 19 bp, Homo sapiens
  siRNA target sequence for RANBP17 (NM_022897.2,1783-1801).
gacgttcatgacaaaaatt

SEQ ID NO: 110536 - DNA, 19 bp, Homo sapiens
  siRNA target sequence for RANBP17 (NM_022897.2,1785-1803).
cgttcatgacaaaaattgt

SEQ ID NO: 110537 - DNA, 19 bp, Homo sapiens
  siRNA target sequence for RANBP17 (NM_022897.2,1786-1804).
gttcatgacaaaaattgtt

SEQ ID NO: 110538 - DNA, 19 bp, Homo sapiens
  siRNA target sequence for RANBP17 (NM_022897.2,1802-1820).
gttacaaaccttaaatact

SEQ ID NO: 110539 - DNA, 19 bp, Homo sapiens
  siRNA target sequence for RANBP17 (NM_022897.2,1824-1842).
gaagatatgagcctgtaat

SEQ ID NO: 110540 - DNA, 19 bp, Homo sapiens
  siRNA target sequence for RANBP17 (NM_022897.2,2025-2043).
cgctcactcgccttctgat

SEQ ID NO: 110541 - DNA, 19 bp, Homo sapiens
  siRNA target sequence for RANBP17 (NM_022897.2,2044-2062).
ggtagatctgggtgaagat

SEQ ID NO: 110542 - DNA, 19 bp, Homo sapiens
  siRNA target sequence for RANBP17 (NM_022897.2,2134-2152).
caactttaaacaagaagat

SEQ ID NO: 110543 - DNA, 19 bp, Homo sapiens
  siRNA target sequence for RANBP17 (NM_022897.2,2150-2168).
gatgtaaagcgtatgttga

SEQ ID NO: 110544 - DNA, 19 bp, Homo sapiens
  siRNA target sequence for RANBP17 (NM_022897.2,2167-2185).
gatcgggctggcaagagat

SEQ ID NO: 110545 - DNA, 19 bp, Homo sapiens
  siRNA target sequence for RANBP17 (NM_022897.2,2256-2274).
cgtaccttccccttcttca

SEQ ID NO: 110546 - DNA, 19 bp, Homo sapiens
  siRNA target sequence for RANBP17 (NM_022897.2,2293-2311).
gtatggagagccaacatgt

SEQ ID NO: 110547 - DNA, 19 bp, Homo sapiens
  siRNA target sequence for RANBP17 (NM_022897.2,2313-2331).
caactcccatcttgaaact

SEQ ID NO: 110548 - DNA, 19 bp, Homo sapiens
  siRNA target sequence for RANBP17 (NM_022897.2,2336-2354).
gcagaacttatgcaaaaca

SEQ ID NO: 110549 - DNA, 19 bp, Homo sapiens
  siRNA target sequence for RANBP17 (NM_022897.2,2363-2381).
cgtttgaattttgatgtat

SEQ ID NO: 110550 - DNA, 19 bp, Homo sapiens
  siRNA target sequence for RANBP17 (NM_022897.2,2378-2396).
gtatcatctcctaatggaa

SEQ ID NO: 110551 - DNA, 19 bp, Homo sapiens
  siRNA target sequence for RANBP17 (NM_022897.2,2503-2521).
catctccatctgctattca

SEQ ID NO: 110552 - DNA, 19 bp, Homo sapiens
  siRNA target sequence for RANBP17 (NM_022897.2,2556-2574).
gctttggcgtcttcaagtt

SEQ ID NO: 110553 - DNA, 19 bp, Homo sapiens
  siRNA target sequence for RANBP17 (NM_022897.2,2575-2593).
gtatggggacaaccatttt

SEQ ID NO: 110554 - DNA, 19 bp, Homo sapiens
  siRNA target sequence for RANBP17 (NM_022897.2,2580-2598).
gggacaaccattttgacaa

SEQ ID NO: 110555 - DNA, 19 bp, Homo sapiens
  siRNA target sequence for RANBP17 (NM_022897.2,2581-2599).
ggacaaccattttgacaat

SEQ ID NO: 110556 - DNA, 19 bp, Homo sapiens
  siRNA target sequence for RANBP17 (NM_022897.2,2662-2680).
gaaactgagccagtcttat

SEQ ID NO: 110557 - DNA, 19 bp, Homo sapiens
  siRNA target sequence for RANBP17 (NM_022897.2,2718-2736).
gcttcatcatcaacttaga

SEQ ID NO: 110558 - DNA, 19 bp, Homo sapiens
  siRNA target sequence for RANBP17 (NM_022897.2,2739-2757).
ctcctgtactcatgtatgt

SEQ ID NO: 110559 - DNA, 19 bp, Homo sapiens
  siRNA target sequence for RANBP17 (NM_022897.2,2776-2794).
gggactcactactcttgat

SEQ ID NO: 110560 - DNA, 19 bp, Homo sapiens
  siRNA target sequence for RANBP17 (NM_022897.2,2811-2829).
gctgctgtaccagtttaga

SEQ ID NO: 110561 - DNA, 19 bp, Homo sapiens
  siRNA target sequence for RANBP17 (NM_022897.2,2817-2835).
gtaccagtttagactacat

SEQ ID NO: 110562 - DNA, 19 bp, Homo sapiens
  siRNA target sequence for RANBP17 (NM_022897.2,2846-2864).
ctcttcaagcacatagcaa

SEQ ID NO: 110563 - DNA, 19 bp, Homo sapiens
  siRNA target sequence for RANBP17 (NM_022897.2,2905-2923).
ggctggtcagagactatta

SEQ ID NO: 110564 - DNA, 19 bp, Homo sapiens
  siRNA target sequence for RANBP17 (NM_022897.2,2909-2927).
ggtcagagactattacatt

SEQ ID NO: 110565 - DNA, 19 bp, Homo sapiens
  siRNA target sequence for RANBP17 (NM_022897.2,3002-3020).
cggaaccagtggtcagtat

SEQ ID NO: 110566 - DNA, 19 bp, Homo sapiens
  siRNA target sequence for RANBP17 (NM_022897.2,3119-3137).
cttgcccagtgcttcagaa

SEQ ID NO: 110567 - DNA, 19 bp, Homo sapiens
  siRNA target sequence for RANBP17 (NM_022897.2,3129-3147).
gcttcagaaacctaatgga

SEQ ID NO: 110568 - DNA, 19 bp, Homo sapiens
  siRNA target sequence for RAP1A (NM_002884.1,365-383).
ctctgacagttcagtttgt

SEQ ID NO: 110569 - DNA, 19 bp, Homo sapiens
  siRNA target sequence for RAP1A (NM_002884.1,528-546).
gaagaacggccaaggtttt

SEQ ID NO: 110570 - DNA, 19 bp, Homo sapiens
  siRNA target sequence for RAP1A (NM_002884.1,531-549).
gaacggccaaggttttgca

SEQ ID NO: 110571 - DNA, 19 bp, Homo sapiens
  siRNA target sequence for RAP1A (NM_002884.1,537-555).
ccaaggttttgcactagta

SEQ ID NO: 110572 - DNA, 19 bp, Homo sapiens
  siRNA target sequence for RAP1A (NM_002884.1,538-556).
caaggttttgcactagtat

SEQ ID NO: 110573 - DNA, 19 bp, Homo sapiens
  siRNA target sequence for RAP1A (NM_002884.1,547-565).
gcactagtatattctatta

SEQ ID NO: 110574 - DNA, 19 bp, Homo sapiens
  siRNA target sequence for RAP1A (NM_002884.1,699-717).
gcagggccagaatttagca

SEQ ID NO: 110575 - DNA, 19 bp, Homo sapiens
  siRNA target sequence for RAP1A (NM_002884.1,700-718).
cagggccagaatttagcaa

SEQ ID NO: 110576 - DNA, 19 bp, Homo sapiens
  siRNA target sequence for RAP1A (NM_002884.1,715-733).
gcaagacagtggtgtaact

SEQ ID NO: 110577 - DNA, 19 bp, Homo sapiens
  siRNA target sequence for RAP1A (NM_002884.1,765-783).
gatcaatgttaatgagata

SEQ ID NO: 110578 - DNA, 19 bp, Homo sapiens
  siRNA target sequence for RAP1A (NM_002884.1,790-808).
gacctggtcagacagataa

SEQ ID NO: 110579 - DNA, 19 bp, Homo sapiens
  siRNA target sequence for RAP1A (NM_002884.1,796-814).
gtcagacagataaatagga

SEQ ID NO: 110580 - DNA, 19 bp, Homo sapiens
  siRNA target sequence for RAP1B (NM_015646.3,183-201).
gtctgctttgactgtacaa

SEQ ID NO: 110581 - DNA, 19 bp, Homo sapiens
  siRNA target sequence for RAP1B (NM_015646.3,231-249).
cgatcctacgatagaagat

SEQ ID NO: 110582 - DNA, 19 bp, Homo sapiens
  siRNA target sequence for RAP1B (NM_015646.3,658-676).
gctcgcaaaaagtcatcat

SEQ ID NO: 110583 - DNA, 19 bp, Homo sapiens
  siRNA target sequence for RAP2A (NM_021033.3,561-579).
gcgtgaagcggtatgagaa

SEQ ID NO: 110584 - DNA, 19 bp, Homo sapiens
  siRNA target sequence for RAP2A (NM_021033.3,562-580).
cgtgaagcggtatgagaaa

SEQ ID NO: 110585 - DNA, 19 bp, Homo sapiens
  siRNA target sequence for RAP2A (NM_021033.3,685-703).
ggaaacttccgctaagagt

SEQ ID NO: 110586 - DNA, 19 bp, Homo sapiens
  siRNA target sequence for RAP2A (NM_021033.3,686-704).
gaaacttccgctaagagta

SEQ ID NO: 110587 - DNA, 19 bp, Homo sapiens
  siRNA target sequence for RAP2A (NM_021033.3,693-711).
ccgctaagagtaaaacaat

SEQ ID NO: 110588 - DNA, 19 bp, Homo sapiens
  siRNA target sequence for RAP2B (NM_002886.2,553-571).
cccgaccatcgaagacttt

SEQ ID NO: 110589 - DNA, 19 bp, Homo sapiens
  siRNA target sequence for RAP2B (NM_002886.2,554-572).
ccgaccatcgaagactttt

SEQ ID NO: 110590 - DNA, 19 bp, Homo sapiens
  siRNA target sequence for RAP2B (NM_002886.2,555-573).
cgaccatcgaagactttta

SEQ ID NO: 110591 - DNA, 19 bp, Homo sapiens
  siRNA target sequence for RAP2B (NM_002886.2,884-902).
gagacgtcggccaaaaaca

SEQ ID NO: 110592 - DNA, 19 bp, Homo sapiens
  siRNA target sequence for RAP2B (NM_002886.2,886-904).
gacgtcggccaaaaacaaa

SEQ ID NO: 110593 - DNA, 19 bp, Homo sapiens
  siRNA target sequence for RAP2B (NM_002886.2,906-924).
cctcggtagacgagctatt

SEQ ID NO: 110594 - DNA, 19 bp, Homo sapiens
  siRNA target sequence for RAP2C (NM_021183.3,837-855).
cccttactgtgcagtttgt

SEQ ID NO: 110595 - DNA, 19 bp, Homo sapiens
  siRNA target sequence for RAP2C (NM_021183.3,978-996).
cctccatgagagatctcta

SEQ ID NO: 110596 - DNA, 19 bp, Homo sapiens
  siRNA target sequence for RAP2C (NM_021183.3,1024-1042).
ggtttatagcctggttaat

SEQ ID NO: 110597 - DNA, 19 bp, Homo sapiens
  siRNA target sequence for RAP2C (NM_021183.3,1057-1075).
ggatatcaagccaatgaga

SEQ ID NO: 110598 - DNA, 19 bp, Homo sapiens
  siRNA target sequence for RAP2C (NM_021183.3,1066-1084).
gccaatgagagatcaaatt

SEQ ID NO: 110599 - DNA, 19 bp, Homo sapiens
  siRNA target sequence for RAP2C (NM_021183.3,1177-1195).
cagagctctggctcaagaa

SEQ ID NO: 110600 - DNA, 19 bp, Homo sapiens
  siRNA target sequence for RAP2C (NM_021183.3,1259-1277).
gagatcgtcaggcaaatga

SEQ ID NO: 110601 - DNA, 19 bp, Homo sapiens
  siRNA target sequence for RAP2C (NM_021183.3,1264-1282).
cgtcaggcaaatgaactat

SEQ ID NO: 110602 - DNA, 19 bp, Homo sapiens
  siRNA target sequence for RAP2C (NM_021183.3,1300-1318).
gcaagatcagtgttgtaca

SEQ ID NO: 110603 - DNA, 19 bp, Homo sapiens
  siRNA target sequence for RAP2C (NM_021183.3,1301-1319).
caagatcagtgttgtacaa

SEQ ID NO: 110604 - DNA, 19 bp, Homo sapiens
  siRNA target sequence for RAP2C (NM_021183.3,1304-1322).
gatcagtgttgtacaactt

SEQ ID NO: 110605 - DNA, 19 bp, Homo sapiens
  siRNA target sequence for RASD1 (NM_016084.3,250-268).
gcgactcggagctgagtat

SEQ ID NO: 110606 - DNA, 19 bp, Homo sapiens
  siRNA target sequence for RASD1 (NM_016084.3,492-510).
ctcacaggagacgttttca

SEQ ID NO: 110607 - DNA, 19 bp, Homo sapiens
  siRNA target sequence for RASD1 (NM_016084.3,853-871).
gcgacgtgctgcacaagaa

SEQ ID NO: 110608 - DNA, 19 bp, Homo sapiens
  siRNA target sequence for RASD2 (NM_014310.3,364-382).
ggacttccaccgtaaggta

SEQ ID NO: 110609 - DNA, 19 bp, Homo sapiens
  siRNA target sequence for RASD2 (NM_014310.3,365-383).
gacttccaccgtaaggtat

SEQ ID NO: 110610 - DNA, 19 bp, Homo sapiens
  siRNA target sequence for RASD2 (NM_014310.3,800-818).
gccctgcatcgcaagatct

SEQ ID NO: 110611 - DNA, 19 bp, Homo sapiens
  siRNA target sequence for REM (NM_014012.4,474-492).
gatgattggtcttctgaat

SEQ ID NO: 110612 - DNA, 19 bp, Homo sapiens
  siRNA target sequence for REM (NM_014012.4,748-766).
gtgcctatgtcatcgtata

SEQ ID NO: 110613 - DNA, 19 bp, Homo sapiens
  siRNA target sequence for REM (NM_014012.4,777-795).
gaccgaggcagctttgaga

SEQ ID NO: 110614 - DNA, 19 bp, Homo sapiens
  siRNA target sequence for REM (NM_014012.4,925-943).
ctgtggtgttcgactgtaa

SEQ ID NO: 110615 - DNA, 19 bp, Homo sapiens
  siRNA target sequence for REM (NM_014012.4,927-945).
gtggtgttcgactgtaaat

SEQ ID NO: 110616 - DNA, 19 bp, Homo sapiens
  siRNA target sequence for REM (NM_014012.4,930-948).
gtgttcgactgtaaattca

SEQ ID NO: 110617 - DNA, 19 bp, Homo sapiens
  siRNA target sequence for RERG (NM_032918.1,343-361).
gcaagtcagctcttgtagt

SEQ ID NO: 110618 - DNA, 19 bp, Homo sapiens
  siRNA target sequence for RERG (NM_032918.1,352-370).
ctcttgtagtgagatttct

SEQ ID NO: 110619 - DNA, 19 bp, Homo sapiens
  siRNA target sequence for RERG (NM_032918.1,354-372).
cttgtagtgagatttctga

SEQ ID NO: 110620 - DNA, 19 bp, Homo sapiens
  siRNA target sequence for RERG (NM_032918.1,369-387).
ctgaccaaacggttcatct

SEQ ID NO: 110621 - DNA, 19 bp, Homo sapiens
  siRNA target sequence for RERG (NM_032918.1,379-397).
ggttcatctgggaatatga

SEQ ID NO: 110622 - DNA, 19 bp, Homo sapiens
  siRNA target sequence for RERG (NM_032918.1,380-398).
gttcatctgggaatatgat

SEQ ID NO: 110623 - DNA, 19 bp, Homo sapiens
  siRNA target sequence for RERG (NM_032918.1,396-414).
gatcccaccctcgaatcaa

SEQ ID NO: 110624 - DNA, 19 bp, Homo sapiens
  siRNA target sequence for RERG (NM_032918.1,430-448).
caaccatcgatgatgaagt

SEQ ID NO: 110625 - DNA, 19 bp, Homo sapiens
  siRNA target sequence for RERG (NM_032918.1,475-493).
ctggtcaggaagataccat

SEQ ID NO: 110626 - DNA, 19 bp, Homo sapiens
  siRNA target sequence for RERG (NM_032918.1,705-723).
gaattggcttgtgcttttt

SEQ ID NO: 110627 - DNA, 19 bp, Homo sapiens
  siRNA target sequence for RERG (NM_032918.1,755-773).
catcacagagatattctat

SEQ ID NO: 110628 - DNA, 19 bp, Homo sapiens
  siRNA target sequence for RERG (NM_032918.1,832-850).
gctccaccacgcatgtcaa

SEQ ID NO: 110629 - DNA, 19 bp, Homo sapiens
  siRNA target sequence for RERG (NM_032918.1,846-864).
gtcaagcaagccattaaca

SEQ ID NO: 110630 - DNA, 19 bp, Homo sapiens
  siRNA target sequence for RHEBL1 (NM_144593.1,250-268).
cgctgtgtagggaagacat

SEQ ID NO: 110631 - DNA, 19 bp, Homo sapiens
  siRNA target sequence for RHEBL1 (NM_144593.1,264-282).
gacatctttggcacatcaa

SEQ ID NO: 110632 - DNA, 19 bp, Homo sapiens
  siRNA target sequence for RHEBL1 (NM_144593.1,269-287).
ctttggcacatcaatttgt

SEQ ID NO: 110633 - DNA, 19 bp, Homo sapiens
  siRNA target sequence for RHEBL1 (NM_144593.1,317-335).
ctacagtggagaatactta

SEQ ID NO: 110634 - DNA, 19 bp, Homo sapiens
  siRNA target sequence for RHEBL1 (NM_144593.1,417-435).
gccctattcattcatcatt

SEQ ID NO: 110635 - DNA, 19 bp, Homo sapiens
  siRNA target sequence for RHEBL1 (NM_144593.1,432-450).
cattggggtccatggttat

SEQ ID NO: 110636 - DNA, 19 bp, Homo sapiens
  siRNA target sequence for RHEBL1 (NM_144593.1,445-463).
ggttatgtgcttgtgtatt

SEQ ID NO: 110637 - DNA, 19 bp, Homo sapiens
  siRNA target sequence for RHEBL1 (NM_144593.1,539-557).
gggtgccagtggttctagt

SEQ ID NO: 110638 - DNA, 19 bp, Homo sapiens
  siRNA target sequence for RHEBL1 (NM_144593.1,626-644).
cctggggtgcgacatttat

SEQ ID NO: 110639 - DNA, 19 bp, Homo sapiens
  siRNA target sequence for RHEBL1 (NM_144593.1,629-647).
ggggtgcgacatttatgga

SEQ ID NO: 110640 - DNA, 19 bp, Homo sapiens
  siRNA target sequence for RHEBL1 (NM_144593.1,648-666).
gtcatctgctcgagagaat

SEQ ID NO: 110641 - DNA, 19 bp, Homo sapiens
  siRNA target sequence for RHEBL1 (NM_144593.1,650-668).
catctgctcgagagaatca

SEQ ID NO: 110642 - DNA, 19 bp, Homo sapiens
  siRNA target sequence for RHO6 (NM_014470.2,128-146).
ccagtcgtggccagatgta

SEQ ID NO: 110643 - DNA, 19 bp, Homo sapiens
  siRNA target sequence for RHO6 (NM_014470.2,129-147).
cagtcgtggccagatgtaa

SEQ ID NO: 110644 - DNA, 19 bp, Homo sapiens
  siRNA target sequence for RHO6 (NM_014470.2,183-201).
ccgcgatgttgcaagtgtt

SEQ ID NO: 110645 - DNA, 19 bp, Homo sapiens
  siRNA target sequence for RHO6 (NM_014470.2,184-202).
cgcgatgttgcaagtgtta

SEQ ID NO: 110646 - DNA, 19 bp, Homo sapiens
  siRNA target sequence for RHO6 (NM_014470.2,194-212).
caagtgttagcgaaggatt

SEQ ID NO: 110647 - DNA, 19 bp, Homo sapiens
  siRNA target sequence for RHO6 (NM_014470.2,199-217).
gttagcgaaggattgctat

SEQ ID NO: 110648 - DNA, 19 bp, Homo sapiens
  siRNA target sequence for RHO6 (NM_014470.2,230-248).
gtgcccaccgtgttcgaaa

SEQ ID NO: 110649 - DNA, 19 bp, Homo sapiens
  siRNA target sequence for RHO6 (NM_014470.2,238-256).
cgtgttcgaaaattacaca

SEQ ID NO: 110650 - DNA, 19 bp, Homo sapiens
  siRNA target sequence for RHO6 (NM_014470.2,311-329).
ggatctccctactacgata

SEQ ID NO: 110651 - DNA, 19 bp, Homo sapiens
  siRNA target sequence for RHO6 (NM_014470.2,312-330).
gatctccctactacgataa

SEQ ID NO: 110652 - DNA, 19 bp, Homo sapiens
  siRNA target sequence for RHO6 (NM_014470.2,315-333).
ctccctactacgataatgt

SEQ ID NO: 110653 - DNA, 19 bp, Homo sapiens
  siRNA target sequence for RHO6 (NM_014470.2,351-369).
gcgactcggatgcagtatt

SEQ ID NO: 110654 - DNA, 19 bp, Homo sapiens
  siRNA target sequence for RHO6 (NM_014470.2,352-370).
cgactcggatgcagtatta

SEQ ID NO: 110655 - DNA, 19 bp, Homo sapiens
  siRNA target sequence for RHO6 (NM_014470.2,355-373).
ctcggatgcagtattacta

SEQ ID NO: 110656 - DNA, 19 bp, Homo sapiens
  siRNA target sequence for RHO6 (NM_014470.2,365-383).
gtattactatgttttgaca

SEQ ID NO: 110657 - DNA, 19 bp, Homo sapiens
  siRNA target sequence for RHO6 (NM_014470.2,404-422).
gacagcgcactcaagaagt

SEQ ID NO: 110658 - DNA, 19 bp, Homo sapiens
  siRNA target sequence for RHO6 (NM_014470.2,450-468).
ccagcacccgcgttttgct

SEQ ID NO: 110659 - DNA, 19 bp, Homo sapiens
  siRNA target sequence for RHO6 (NM_014470.2,735-753).
ccagtcgctctgaactcat

SEQ ID NO: 110660 - DNA, 19 bp, Homo sapiens
  siRNA target sequence for RHO6 (NM_014470.2,740-758).
cgctctgaactcatctctt

SEQ ID NO: 110661 - DNA, 19 bp, Homo sapiens
  siRNA target sequence for RHO6 (NM_014470.2,779-797).
gccaaaagctgttccatta

SEQ ID NO: 110662 - DNA, 19 bp, Homo sapiens
  siRNA target sequence for RHO6 (NM_014470.2,780-798).
ccaaaagctgttccattat

SEQ ID NO: 110663 - DNA, 19 bp, Homo sapiens
  siRNA target sequence for RHOBTB1 (NM_014836.3,344-362).
gaaagacccaacgttgaaa

SEQ ID NO: 110664 - DNA, 19 bp, Homo sapiens
  siRNA target sequence for RHOBTB1 (NM_014836.3,348-366).
gacccaacgttgaaactat

SEQ ID NO: 110665 - DNA, 19 bp, Homo sapiens
  siRNA target sequence for RHOBTB1 (NM_014836.3,350-368).
cccaacgttgaaactatca

SEQ ID NO: 110666 - DNA, 19 bp, Homo sapiens
  siRNA target sequence for RHOBTB1 (NM_014836.3,435-453).
ccacactcacgcagtatca

SEQ ID NO: 110667 - DNA, 19 bp, Homo sapiens
  siRNA target sequence for RHOBTB1 (NM_014836.3,571-589).
ggatacttttggtgatcat

SEQ ID NO: 110668 - DNA, 19 bp, Homo sapiens
  siRNA target sequence for RHOBTB1 (NM_014836.3,629-647).
gtggtcctctgtttttcga

SEQ ID NO: 110669 - DNA, 19 bp, Homo sapiens
  siRNA target sequence for RHOBTB1 (NM_014836.3,631-649).
ggtcctctgtttttcgatt

SEQ ID NO: 110670 - DNA, 19 bp, Homo sapiens
  siRNA target sequence for RHOBTB1 (NM_014836.3,637-655).
ctgtttttcgattgctaat

SEQ ID NO: 110671 - DNA, 19 bp, Homo sapiens
  siRNA target sequence for RHOBTB1 (NM_014836.3,766-784).
cctggaagctgttaatcga

SEQ ID NO: 110672 - DNA, 19 bp, Homo sapiens
  siRNA target sequence for RHOBTB1 (NM_014836.3,795-813).
cgttagcaaggcccataaa

SEQ ID NO: 110673 - DNA, 19 bp, Homo sapiens
  siRNA target sequence for RHOBTB1 (NM_014836.3,808-826).
cataaagagaggggatatt

SEQ ID NO: 110674 - DNA, 19 bp, Homo sapiens
  siRNA target sequence for RHOBTB1 (NM_014836.3,866-884).
ggcttaccatactatgaaa

SEQ ID NO: 110675 - DNA, 19 bp, Homo sapiens
  siRNA target sequence for RHOBTB1 (NM_014836.3,972-990).
ggaaatcccacctaaagaa

SEQ ID NO: 110676 - DNA, 19 bp, Homo sapiens
  siRNA target sequence for RHOBTB1 (NM_014836.3,1036-1054).
ccctccaccggtcatcaaa

SEQ ID NO: 110677 - DNA, 19 bp, Homo sapiens
  siRNA target sequence for RHOBTB1 (NM_014836.3,1037-1055).
cctccaccggtcatcaaaa

SEQ ID NO: 110678 - DNA, 19 bp, Homo sapiens
  siRNA target sequence for RHOBTB1 (NM_014836.3,1038-1056).
ctccaccggtcatcaaaat

SEQ ID NO: 110679 - DNA, 19 bp, Homo sapiens
  siRNA target sequence for RHOBTB1 (NM_014836.3,1110-1128).
ctctatgtgccgatgttct

SEQ ID NO: 110680 - DNA, 19 bp, Homo sapiens
  siRNA target sequence for RHOBTB1 (NM_014836.3,1116-1134).
gtgccgatgttctgttcat

SEQ ID NO: 110681 - DNA, 19 bp, Homo sapiens
  siRNA target sequence for RHOBTB1 (NM_014836.3,1141-1159).
ggaccaggaacacatcttt

SEQ ID NO: 110682 - DNA, 19 bp, Homo sapiens
  siRNA target sequence for RHOBTB1 (NM_014836.3,1153-1171).
catctttgcacatcgaatt

SEQ ID NO: 110683 - DNA, 19 bp, Homo sapiens
  siRNA target sequence for RHOBTB1 (NM_014836.3,1349-1367).
gccgaccagtggaagtctt

SEQ ID NO: 110684 - DNA, 19 bp, Homo sapiens
  siRNA target sequence for RHOBTB1 (NM_014836.3,1477-1495).
gcaagtcaaccccatttca

SEQ ID NO: 110685 - DNA, 19 bp, Homo sapiens
  siRNA target sequence for RHOBTB1 (NM_014836.3,1478-1496).
caagtcaaccccatttcaa

SEQ ID NO: 110686 - DNA, 19 bp, Homo sapiens
  siRNA target sequence for RHOBTB1 (NM_014836.3,1640-1658).
ctcgagatgttcgatttga

SEQ ID NO: 110687 - DNA, 19 bp, Homo sapiens
  siRNA target sequence for RHOBTB1 (NM_014836.3,1699-1717).
gaaccaggagattacgaaa

SEQ ID NO: 110688 - DNA, 19 bp, Homo sapiens
  siRNA target sequence for RHOBTB1 (NM_014836.3,1731-1749).
ggaaagccaatcggataaa

SEQ ID NO: 110689 - DNA, 19 bp, Homo sapiens
  siRNA target sequence for RHOBTB1 (NM_014836.3,1770-1788).
cgttctcggacgtgacatt

SEQ ID NO: 110690 - DNA, 19 bp, Homo sapiens
  siRNA target sequence for RHOBTB1 (NM_014836.3,1771-1789).
gttctcggacgtgacattt

SEQ ID NO: 110691 - DNA, 19 bp, Homo sapiens
  siRNA target sequence for RHOBTB1 (NM_014836.3,1776-1794).
cggacgtgacatttaaatt

SEQ ID NO: 110692 - DNA, 19 bp, Homo sapiens
  siRNA target sequence for RHOBTB1 (NM_014836.3,1897-1915).
ggtgtatctcccgaacata

SEQ ID NO: 110693 - DNA, 19 bp, Homo sapiens
  siRNA target sequence for RHOBTB1 (NM_014836.3,1904-1922).
ctcccgaacataaacaaga

SEQ ID NO: 110694 - DNA, 19 bp, Homo sapiens
  siRNA target sequence for RHOBTB1 (NM_014836.3,1906-1924).
cccgaacataaacaagata

SEQ ID NO: 110695 - DNA, 19 bp, Homo sapiens
  siRNA target sequence for RHOBTB1 (NM_014836.3,1907-1925).
ccgaacataaacaagatat

SEQ ID NO: 110696 - DNA, 19 bp, Homo sapiens
  siRNA target sequence for RHOBTB1 (NM_014836.3,1909-1927).
gaacataaacaagatatca

SEQ ID NO: 110697 - DNA, 19 bp, Homo sapiens
  siRNA target sequence for RHOBTB1 (NM_014836.3,1930-1948).
gcaagcagtattggattat

SEQ ID NO: 110698 - DNA, 19 bp, Homo sapiens
  siRNA target sequence for RHOBTB1 (NM_014836.3,1934-1952).
gcagtattggattatctct

SEQ ID NO: 110699 - DNA, 19 bp, Homo sapiens
  siRNA target sequence for RHOBTB1 (NM_014836.3,1935-1953).
cagtattggattatctcta

SEQ ID NO: 110700 - DNA, 19 bp, Homo sapiens
  siRNA target sequence for RHOBTB1 (NM_014836.3,1982-2000).
ctggacccgctggaattaa

SEQ ID NO: 110701 - DNA, 19 bp, Homo sapiens
  siRNA target sequence for RHOBTB1 (NM_014836.3,1984-2002).
ggacccgctggaattaatt

SEQ ID NO: 110702 - DNA, 19 bp, Homo sapiens
  siRNA target sequence for RHOBTB1 (NM_014836.3,2003-2021).
gccttggcaaacagatttt

SEQ ID NO: 110703 - DNA, 19 bp, Homo sapiens
  siRNA target sequence for RHOBTB1 (NM_014836.3,2206-2224).
ctccaagttccgtaaggaa

SEQ ID NO: 110704 - DNA, 19 bp, Homo sapiens
  siRNA target sequence for RHOBTB1 (NM_014836.3,2216-2234).
cgtaaggaaatcaaatcaa

SEQ ID NO: 110705 - DNA, 19 bp, Homo sapiens
  siRNA target sequence for RHOBTB1 (NM_014836.3,2238-2256).
ctgcagacaaccaggaata

SEQ ID NO: 110706 - DNA, 19 bp, Homo sapiens
  siRNA target sequence for RHOBTB2 (NM_015178.1,353-371).
ggccatcgaccaatatcgt

SEQ ID NO: 110707 - DNA, 19 bp, Homo sapiens
  siRNA target sequence for RHOBTB2 (NM_015178.1,397-415).
cccgagacgtggtagatga

SEQ ID NO: 110708 - DNA, 19 bp, Homo sapiens
  siRNA target sequence for RHOBTB2 (NM_015178.1,398-416).
ccgagacgtggtagatgat

SEQ ID NO: 110709 - DNA, 19 bp, Homo sapiens
  siRNA target sequence for RHOBTB2 (NM_015178.1,400-418).
gagacgtggtagatgatgt

SEQ ID NO: 110710 - DNA, 19 bp, Homo sapiens
  siRNA target sequence for RHOBTB2 (NM_015178.1,583-601).
cccgagcacctgtcatctt

SEQ ID NO: 110711 - DNA, 19 bp, Homo sapiens
  siRNA target sequence for RHOBTB2 (NM_015178.1,665-683).
cttggctaggcccatcaaa

SEQ ID NO: 110712 - DNA, 19 bp, Homo sapiens
  siRNA target sequence for RHOBTB2 (NM_015178.1,670-688).
ctaggcccatcaaacctaa

SEQ ID NO: 110713 - DNA, 19 bp, Homo sapiens
  siRNA target sequence for RHOBTB2 (NM_015178.1,674-692).
gcccatcaaacctaatgaa

SEQ ID NO: 110714 - DNA, 19 bp, Homo sapiens
  siRNA target sequence for RHOBTB2 (NM_015178.1,1010-1028).
ggagcgggtgcgcatcttt

SEQ ID NO: 110715 - DNA, 19 bp, Homo sapiens
  siRNA target sequence for RHOBTB2 (NM_015178.1,1286-1304).
caccagcgacgggatctta

SEQ ID NO: 110716 - DNA, 19 bp, Homo sapiens
  siRNA target sequence for RHOBTB2 (NM_015178.1,1495-1513).
cgggggagctagatgagaa

SEQ ID NO: 110717 - DNA, 19 bp, Homo sapiens
  siRNA target sequence for RHOBTB2 (NM_015178.1,1648-1666).
ggaccaaccgggttaagga

SEQ ID NO: 110718 - DNA, 19 bp, Homo sapiens
  siRNA target sequence for RHOBTB2 (NM_015178.1,1863-1881).
ctctacaccggcatgttca

SEQ ID NO: 110719 - DNA, 19 bp, Homo sapiens
  siRNA target sequence for RHOBTB2 (NM_015178.1,1888-1906).
gccccgacctggatgacat

SEQ ID NO: 110720 - DNA, 19 bp, Homo sapiens
  siRNA target sequence for RHOBTB2 (NM_015178.1,2154-2172).
ccagaaaaccaggagtatt

SEQ ID NO: 110721 - DNA, 19 bp, Homo sapiens
  siRNA target sequence for RIS (NM_016563.2,218-236).
gtcctcggtgtttggaaaa

SEQ ID NO: 110722 - DNA, 19 bp, Homo sapiens
  siRNA target sequence for RIS (NM_016563.2,319-337).
ccctgaccgtgaagtttct

SEQ ID NO: 110723 - DNA, 19 bp, Homo sapiens
  siRNA target sequence for RIS (NM_016563.2,321-339).
ctgaccgtgaagtttctga

SEQ ID NO: 110724 - DNA, 19 bp, Homo sapiens
  siRNA target sequence for RIS (NM_016563.2,338-356).
gaccaagaggtttatcagt

SEQ ID NO: 110725 - DNA, 19 bp, Homo sapiens
  siRNA target sequence for RIS (NM_016563.2,344-362).
gaggtttatcagtgaatat

SEQ ID NO: 110726 - DNA, 19 bp, Homo sapiens
  siRNA target sequence for RIS (NM_016563.2,518-536).
cagccgccagagctttgat

SEQ ID NO: 110727 - DNA, 19 bp, Homo sapiens
  siRNA target sequence for RIT1 (NM_006912.2,195-213).
ggctctcacgggagtacaa

SEQ ID NO: 110728 - DNA, 19 bp, Homo sapiens
  siRNA target sequence for RIT1 (NM_006912.2,196-214).
gctctcacgggagtacaaa

SEQ ID NO: 110729 - DNA, 19 bp, Homo sapiens
  siRNA target sequence for RIT1 (NM_006912.2,201-219).
cacgggagtacaaactagt

SEQ ID NO: 110730 - DNA, 19 bp, Homo sapiens
  siRNA target sequence for RIT1 (NM_006912.2,252-270).
ccatgaccatgcagttcat

SEQ ID NO: 110731 - DNA, 19 bp, Homo sapiens
  siRNA target sequence for RIT1 (NM_006912.2,277-295).
ccgattcccagaagatcat

SEQ ID NO: 110732 - DNA, 19 bp, Homo sapiens
  siRNA target sequence for RIT1 (NM_006912.2,322-340).
gatcaggatccgtattgat

SEQ ID NO: 110733 - DNA, 19 bp, Homo sapiens
  siRNA target sequence for RIT1 (NM_006912.2,325-343).
caggatccgtattgatgat

SEQ ID NO: 110734 - DNA, 19 bp, Homo sapiens
  siRNA target sequence for RIT1 (NM_006912.2,327-345).
ggatccgtattgatgatga

SEQ ID NO: 110735 - DNA, 19 bp, Homo sapiens
  siRNA target sequence for RIT1 (NM_006912.2,374-392).
gctggacaggcagagttta

SEQ ID NO: 110736 - DNA, 19 bp, Homo sapiens
  siRNA target sequence for RIT1 (NM_006912.2,420-438).
caggagaagggtttatcat

SEQ ID NO: 110737 - DNA, 19 bp, Homo sapiens
  siRNA target sequence for RIT1 (NM_006912.2,422-440).
ggagaagggtttatcatct

SEQ ID NO: 110738 - DNA, 19 bp, Homo sapiens
  siRNA target sequence for RIT1 (NM_006912.2,428-446).
gggtttatcatctgttact

SEQ ID NO: 110739 - DNA, 19 bp, Homo sapiens
  siRNA target sequence for RIT1 (NM_006912.2,430-448).
gtttatcatctgttactct

SEQ ID NO: 110740 - DNA, 19 bp, Homo sapiens
  siRNA target sequence for RIT1 (NM_006912.2,454-472).
ggatcgtcgaagtttccat

SEQ ID NO: 110741 - DNA, 19 bp, Homo sapiens
  siRNA target sequence for RIT1 (NM_006912.2,459-477).
gtcgaagtttccatgaagt

SEQ ID NO: 110742 - DNA, 19 bp, Homo sapiens
  siRNA target sequence for RIT1 (NM_006912.2,638-656).
gctgcataccgctactata

SEQ ID NO: 110743 - DNA, 19 bp, Homo sapiens
  siRNA target sequence for RIT1 (NM_006912.2,639-657).
ctgcataccgctactatat

SEQ ID NO: 110744 - DNA, 19 bp, Homo sapiens
  siRNA target sequence for RIT1 (NM_006912.2,642-660).
cataccgctactatattga

SEQ ID NO: 110745 - DNA, 19 bp, Homo sapiens
  siRNA target sequence for RIT1 (NM_006912.2,646-664).
ccgctactatattgatgat

SEQ ID NO: 110746 - DNA, 19 bp, Homo sapiens
  siRNA target sequence for RIT1 (NM_006912.2,649-667).
ctactatattgatgatgtt

SEQ ID NO: 110747 - DNA, 19 bp, Homo sapiens
  siRNA target sequence for RIT1 (NM_006912.2,677-695).
cttgtacgggagatacgta

SEQ ID NO: 110748 - DNA, 19 bp, Homo sapiens
  siRNA target sequence for RIT1 (NM_006912.2,713-731).
gtactggccatggagaaaa

SEQ ID NO: 110749 - DNA, 19 bp, Homo sapiens
  siRNA target sequence for RIT1 (NM_006912.2,720-738).
ccatggagaaaaaatctaa

SEQ ID NO: 110750 - DNA, 19 bp, Homo sapiens
  siRNA target sequence for RIT1 (NM_006912.2,741-759).
ccaaaaacagtgtatggaa

SEQ ID NO: 110751 - DNA, 19 bp, Homo sapiens
  siRNA target sequence for RIT2 (NM_002930.1,221-239).
gcgggtccagagagtacaa

SEQ ID NO: 110752 - DNA, 19 bp, Homo sapiens
  siRNA target sequence for RIT2 (NM_002930.1,277-295).
gcaatgacaatgcagttta

SEQ ID NO: 110753 - DNA, 19 bp, Homo sapiens
  siRNA target sequence for RIT2 (NM_002930.1,475-493).
gtcactgaccgtcaatcat

SEQ ID NO: 110754 - DNA, 19 bp, Homo sapiens
  siRNA target sequence for RIT2 (NM_002930.1,531-549).
ggtccgccacacctatgaa

SEQ ID NO: 110755 - DNA, 19 bp, Homo sapiens
  siRNA target sequence for RIT2 (NM_002930.1,532-550).
gtccgccacacctatgaaa

SEQ ID NO: 110756 - DNA, 19 bp, Homo sapiens
  siRNA target sequence for RIT2 (NM_002930.1,534-552).
ccgccacacctatgaaatt

SEQ ID NO: 110757 - DNA, 19 bp, Homo sapiens
  siRNA target sequence for RIT2 (NM_002930.1,589-607).
cagttccgccaggtttcta

SEQ ID NO: 110758 - DNA, 19 bp, Homo sapiens
  siRNA target sequence for RIT2 (NM_002930.1,591-609).
gttccgccaggtttctaca

SEQ ID NO: 110759 - DNA, 19 bp, Homo sapiens
  siRNA target sequence for RIT2 (NM_002930.1,664-682).
gcagccctcagattctgta

SEQ ID NO: 110760 - DNA, 19 bp, Homo sapiens
  siRNA target sequence for RRAD (NM_004165.1,541-559).
ctcatggtctacgacattt

SEQ ID NO: 110761 - DNA, 19 bp, Homo sapiens
  siRNA target sequence for RRAD (NM_004165.1,606-624).
gggggatgcctatgtcatt

SEQ ID NO: 110762 - DNA, 19 bp, Homo sapiens
  siRNA target sequence for RRAD (NM_004165.1,608-626).
gggatgcctatgtcattgt

SEQ ID NO: 110763 - DNA, 19 bp, Homo sapiens
  siRNA target sequence for RRAD (NM_004165.1,686-704).
ggcgtgcacggcaaacaga

SEQ ID NO: 110764 - DNA, 19 bp, Homo sapiens
  siRNA target sequence for RRAD (NM_004165.1,687-705).
gcgtgcacggcaaacagat

SEQ ID NO: 110765 - DNA, 19 bp, Homo sapiens
  siRNA target sequence for RRAD (NM_004165.1,692-710).
cacggcaaacagatgatgt

SEQ ID NO: 110766 - DNA, 19 bp, Homo sapiens
  siRNA target sequence for RRAD (NM_004165.1,782-800).
cctgcgcggtggtctttga

SEQ ID NO: 110767 - DNA, 19 bp, Homo sapiens
  siRNA target sequence for RRAD (NM_004165.1,824-842).
cggcattgcaccacaatgt

SEQ ID NO: 110768 - DNA, 19 bp, Homo sapiens
  siRNA target sequence for RRAD (NM_004165.1,1003-1021).
gcctttcgcgccaaatcca

SEQ ID NO: 110769 - DNA, 19 bp, Homo sapiens
  siRNA target sequence for RRAGA (NM_006570.3,330-348).
cgataatcttcgccaatta

SEQ ID NO: 110770 - DNA, 19 bp, Homo sapiens
  siRNA target sequence for RRAGA (NM_006570.3,478-496).
caccagccagcgagacaat

SEQ ID NO: 110771 - DNA, 19 bp, Homo sapiens
  siRNA target sequence for RRAGA (NM_006570.3,480-498).
ccagccagcgagacaatat

SEQ ID NO: 110772 - DNA, 19 bp, Homo sapiens
  siRNA target sequence for RRAGA (NM_006570.3,503-521).
cgtaacgtggaagttttga

SEQ ID NO: 110773 - DNA, 19 bp, Homo sapiens
  siRNA target sequence for RRAGA (NM_006570.3,504-522).
gtaacgtggaagttttgat

SEQ ID NO: 110774 - DNA, 19 bp, Homo sapiens
  siRNA target sequence for RRAGA (NM_006570.3,606-624).
ctcctgacgccaaaatctt

SEQ ID NO: 110775 - DNA, 19 bp, Homo sapiens
  siRNA target sequence for RRAGA (NM_006570.3,717-735).
cgctggagtgtgcttgttt

SEQ ID NO: 110776 - DNA, 19 bp, Homo sapiens
  siRNA target sequence for RRAGA (NM_006570.3,751-769).
ggatgagacgctctacaaa

SEQ ID NO: 110777 - DNA, 19 bp, Homo sapiens
  siRNA target sequence for RRAGA (NM_006570.3,847-865).
cattgaggccgatgaagtt

SEQ ID NO: 110778 - DNA, 19 bp, Homo sapiens
  siRNA target sequence for RRAGA (NM_006570.3,860-878).
gaagttctgctgttcgaaa

SEQ ID NO: 110779 - DNA, 19 bp, Homo sapiens
  siRNA target sequence for RRAGA (NM_006570.3,881-899).
gctacattcttggttattt

SEQ ID NO: 110780 - DNA, 19 bp, Homo sapiens
  siRNA target sequence for RRAGA (NM_006570.3,932-950).
caccggtttgagaagatca

SEQ ID NO: 110781 - DNA, 19 bp, Homo sapiens
  siRNA target sequence for RRAGB (NM_006064.2,569-587).
gtgctgttgatgggtaaaa

SEQ ID NO: 110782 - DNA, 19 bp, Homo sapiens
  siRNA target sequence for RRAGB (NM_006064.2,607-625).
catgaggtctattatcttt

SEQ ID NO: 110783 - DNA, 19 bp, Homo sapiens
  siRNA target sequence for RRAGB (NM_006064.2,654-672).
gccttggcgcaacaattga

SEQ ID NO: 110784 - DNA, 19 bp, Homo sapiens
  siRNA target sequence for RRAGB (NM_006064.2,655-673).
ccttggcgcaacaattgat

SEQ ID NO: 110785 - DNA, 19 bp, Homo sapiens
  siRNA target sequence for RRAGB (NM_006064.2,660-678).
gcgcaacaattgatgtaga

SEQ ID NO: 110786 - DNA, 19 bp, Homo sapiens
  siRNA target sequence for RRAGB (NM_006064.2,765-783).
ctagccaacgggacaacat

SEQ ID NO: 110787 - DNA, 19 bp, Homo sapiens
  siRNA target sequence for RRAGB (NM_006064.2,768-786).
gccaacgggacaacatctt

SEQ ID NO: 110788 - DNA, 19 bp, Homo sapiens
  siRNA target sequence for RRAGB (NM_006064.2,874-892).
ggccattctgcagaattct

SEQ ID NO: 110789 - DNA, 19 bp, Homo sapiens
  siRNA target sequence for RRAGB (NM_006064.2,891-909).
ctccagatgccaaaatatt

SEQ ID NO: 110790 - DNA, 19 bp, Homo sapiens
  siRNA target sequence for RRAGB (NM_006064.2,1000-1018).
cccattggaatgttcttgt

SEQ ID NO: 110791 - DNA, 19 bp, Homo sapiens
  siRNA target sequence for RRAGB (NM_006064.2,1054-1072).
ggcttggtccagcatagtt

SEQ ID NO: 110792 - DNA, 19 bp, Homo sapiens
  siRNA target sequence for RRAGB (NM_006064.2,1055-1073).
gcttggtccagcatagttt

SEQ ID NO: 110793 - DNA, 19 bp, Homo sapiens
  siRNA target sequence for RRAGB (NM_006064.2,1056-1074).
cttggtccagcatagttta

SEQ ID NO: 110794 - DNA, 19 bp, Homo sapiens
  siRNA target sequence for RRAGB (NM_006064.2,1059-1077).
ggtccagcatagtttatca

SEQ ID NO: 110795 - DNA, 19 bp, Homo sapiens
  siRNA target sequence for RRAGB (NM_006064.2,1135-1153).
cgaagctgatgaagtactt

SEQ ID NO: 110796 - DNA, 19 bp, Homo sapiens
  siRNA target sequence for RRAGB (NM_006064.2,1205-1223).
cagcgtgatgcccatagat

SEQ ID NO: 110797 - DNA, 19 bp, Homo sapiens
  siRNA target sequence for RRAGB (NM_006064.2,1207-1225).
gcgtgatgcccatagattt

SEQ ID NO: 110798 - DNA, 19 bp, Homo sapiens
  siRNA target sequence for RRAGB (NM_006064.2,1209-1227).
gtgatgcccatagatttga

SEQ ID NO: 110799 - DNA, 19 bp, Homo sapiens
  siRNA target sequence for RRAGB (NM_006064.2,1211-1229).
gatgcccatagatttgaga

SEQ ID NO: 110800 - DNA, 19 bp, Homo sapiens
  siRNA target sequence for RRAGB (NM_006064.2,1216-1234).
ccatagatttgagaaaata

SEQ ID NO: 110801 - DNA, 19 bp, Homo sapiens
  siRNA target sequence for RRAGB (NM_006064.2,1298-1316).
gaagtcaggaactctaact

SEQ ID NO: 110802 - DNA, 19 bp, Homo sapiens
  siRNA target sequence for RRAGB (NM_006064.2,1336-1354).
ctttacatccaacacttat

SEQ ID NO: 110803 - DNA, 19 bp, Homo sapiens
  siRNA target sequence for RRAGB (NM_016656.1,654-672).
gccttggcgcaacaatact

SEQ ID NO: 110804 - DNA, 19 bp, Homo sapiens
  siRNA target sequence for RRAGB (NM_016656.1,655-673).
ccttggcgcaacaatacta

SEQ ID NO: 110805 - DNA, 19 bp, Homo sapiens
  siRNA target sequence for RRAGB (NM_016656.1,666-684).
caatactagaccgtataca

SEQ ID NO: 110806 - DNA, 19 bp, Homo sapiens
  siRNA target sequence for RRAGB (NM_016656.1,676-694).
ccgtatacatagtcttcaa

SEQ ID NO: 110807 - DNA, 19 bp, Homo sapiens
  siRNA target sequence for RRAGB (NM_016656.1,677-695).
cgtatacatagtcttcaaa

SEQ ID NO: 110808 - DNA, 19 bp, Homo sapiens
  siRNA target sequence for RRAGB (NM_016656.1,724-742).
cgtagactctgttggaaat

SEQ ID NO: 110809 - DNA, 19 bp, Homo sapiens
  siRNA target sequence for RRAGB (NM_016656.1,744-762).
caaagacatttgatgtaga

SEQ ID NO: 110810 - DNA, 19 bp, Homo sapiens
  siRNA target sequence for RRAS2 (NM_012250.3,399-417).
catccagtcctattttgta

SEQ ID NO: 110811 - DNA, 19 bp, Homo sapiens
  siRNA target sequence for RRAS2 (NM_012250.3,408-426).
ctattttgtaacggattat

SEQ ID NO: 110812 - DNA, 19 bp, Homo sapiens
  siRNA target sequence for RRAS2 (NM_012250.3,420-438).
ggattatgatccaaccatt

SEQ ID NO: 110813 - DNA, 19 bp, Homo sapiens
  siRNA target sequence for RRAS2 (NM_012250.3,435-453).
cattgaagattcttacaca

SEQ ID NO: 110814 - DNA, 19 bp, Homo sapiens
  siRNA target sequence for RRAS2 (NM_012250.3,484-502).
cggctagatattttggata

SEQ ID NO: 110815 - DNA, 19 bp, Homo sapiens
  siRNA target sequence for RRAS2 (NM_012250.3,561-579).
cttcctgttggtcttttca

SEQ ID NO: 110816 - DNA, 19 bp, Homo sapiens
  siRNA target sequence for RRAS2 (NM_012250.3,573-591).
cttttcagtcacagataga

SEQ ID NO: 110817 - DNA, 19 bp, Homo sapiens
  siRNA target sequence for RRAS2 (NM_012250.3,582-600).
cacagatagaggcagtttt

SEQ ID NO: 110818 - DNA, 19 bp, Homo sapiens
  siRNA target sequence for RRAS2 (NM_012250.3,647-665).
gtgatgagttcccaatgat

SEQ ID NO: 110819 - DNA, 19 bp, Homo sapiens
  siRNA target sequence for RRAS2 (NM_012250.3,733-751).
gcacggcagcttaaggtaa

SEQ ID NO: 110820 - DNA, 19 bp, Homo sapiens
  siRNA target sequence for RRAS2 (NM_012250.3,736-754).
cggcagcttaaggtaacat

SEQ ID NO: 110821 - DNA, 19 bp, Homo sapiens
  siRNA target sequence for RRAS2 (NM_012250.3,737-755).
ggcagcttaaggtaacata

SEQ ID NO: 110822 - DNA, 19 bp, Homo sapiens
  siRNA target sequence for RRAS2 (NM_012250.3,739-757).
cagcttaaggtaacataca

SEQ ID NO: 110823 - DNA, 19 bp, Homo sapiens
  siRNA target sequence for RRAS2 (NM_012250.3,760-778).
gaggcatcagcaaagatta

SEQ ID NO: 110824 - DNA, 19 bp, Homo sapiens
  siRNA target sequence for RRAS2 (NM_012250.3,774-792).
gattaggatgaatgtagat

SEQ ID NO: 110825 - DNA, 19 bp, Homo sapiens
  siRNA target sequence for RRAS2 (NM_012250.3,805-823).
gaacttgtccgggttatca

SEQ ID NO: 110826 - DNA, 19 bp, Homo sapiens
  siRNA target sequence for RRAS2 (NM_012250.3,811-829).
gtccgggttatcaggaaat

SEQ ID NO: 110827 - DNA, 19 bp, Homo sapiens
  siRNA target sequence for RRAS2 (NM_012250.3,813-831).
ccgggttatcaggaaattt

SEQ ID NO: 110828 - DNA, 19 bp, Homo sapiens
  siRNA target sequence for RRAS2 (NM_012250.3,859-877).
gaaccaacacggaaagaaa

SEQ ID NO: 110829 - DNA, 19 bp, Homo sapiens
  siRNA target sequence for SARA1 (NM_020150.3,209-227).
gtattcttaggtttggata

SEQ ID NO: 110830 - DNA, 19 bp, Homo sapiens
  siRNA target sequence for SARA1 (NM_020150.3,214-232).
cttaggtttggataatgca

SEQ ID NO: 110831 - DNA, 19 bp, Homo sapiens
  siRNA target sequence for SARA1 (NM_020150.3,398-416).
gcaattaatgggattgtct

SEQ ID NO: 110832 - DNA, 19 bp, Homo sapiens
  siRNA target sequence for SARA1 (NM_020150.3,399-417).
caattaatgggattgtctt

SEQ ID NO: 110833 - DNA, 19 bp, Homo sapiens
  siRNA target sequence for SARA1 (NM_020150.3,441-459).
ctcgcctcgtggaatccaa

SEQ ID NO: 110834 - DNA, 19 bp, Homo sapiens
  siRNA target sequence for SARA1 (NM_020150.3,445-463).
cctcgtggaatccaaagtt

SEQ ID NO: 110835 - DNA, 19 bp, Homo sapiens
  siRNA target sequence for SARA1 (NM_020150.3,633-651).
ctcgccccatggaagtgtt

SEQ ID NO: 110836 - DNA, 19 bp, Homo sapiens
  siRNA target sequence for SARA1 (NM_020150.3,695-713).
cgctggctctcccagtata

SEQ ID NO: 110837 - DNA, 19 bp, Homo sapiens
  siRNA target sequence for SARA1 (NM_020150.3,697-715).
ctggctctcccagtatatt

SEQ ID NO: 110838 - DNA, 19 bp, Homo sapiens
  siRNA target sequence for SARA1 (NM_020150.3,701-719).
ctctcccagtatattgact

SEQ ID NO: 110839 - DNA, 19 bp, Homo sapiens
  siRNA target sequence for SARA2 (NM_016103.2,166-184).
gcagtgtgctacagttttt

SEQ ID NO: 110840 - DNA, 19 bp, Homo sapiens
  siRNA target sequence for SARA2 (NM_016103.2,167-185).
cagtgtgctacagttttta

SEQ ID NO: 110841 - DNA, 19 bp, Homo sapiens
  siRNA target sequence for SARA2 (NM_016103.2,173-191).
gctacagtttttaggatta

SEQ ID NO: 110842 - DNA, 19 bp, Homo sapiens
  siRNA target sequence for SARA2 (NM_016103.2,402-420).
gctatcaatggcattgtat

SEQ ID NO: 110843 - DNA, 19 bp, Homo sapiens
  siRNA target sequence for SARA2 (NM_016103.2,448-466).
ggctgttagagtcaaaaga

SEQ ID NO: 110844 - DNA, 19 bp, Homo sapiens
  siRNA target sequence for SARA2 (NM_016103.2,449-467).
gctgttagagtcaaaagaa

SEQ ID NO: 110845 - DNA, 19 bp, Homo sapiens
  siRNA target sequence for SARA2 (NM_016103.2,501-519).
gctaatgtgcctatactga

SEQ ID NO: 110846 - DNA, 19 bp, Homo sapiens
  siRNA target sequence for SARA2 (NM_016103.2,569-587).
gcgagagatgtttggttta

SEQ ID NO: 110847 - DNA, 19 bp, Homo sapiens
  siRNA target sequence for SARA2 (NM_016103.2,613-631).
gtatatctctgaaagaact

SEQ ID NO: 110848 - DNA, 19 bp, Homo sapiens
  siRNA target sequence for SARA2 (NM_016103.2,632-650).
gaatgcccgacccttagaa

SEQ ID NO: 110849 - DNA, 19 bp, Homo sapiens
  siRNA target sequence for SARA2 (NM_016103.2,636-654).
gcccgacccttagaagttt

SEQ ID NO: 110850 - DNA, 19 bp, Homo sapiens
  siRNA target sequence for SARA2 (NM_016103.2,637-655).
cccgacccttagaagtttt

SEQ ID NO: 110851 - DNA, 19 bp, Homo sapiens
  siRNA target sequence for SARA2 (NM_016103.2,639-657).
cgacccttagaagttttca

SEQ ID NO: 110852 - DNA, 19 bp, Homo sapiens
  siRNA target sequence for SARA2 (NM_016103.2,640-658).
gacccttagaagttttcat

SEQ ID NO: 110853 - DNA, 19 bp, Homo sapiens
  siRNA target sequence for SARA2 (NM_016103.2,659-677).
gtgtagtgtgctcaaaaga

SEQ ID NO: 110854 - DNA, 19 bp, Homo sapiens
  siRNA target sequence for SARA2 (NM_016103.2,661-679).
gtagtgtgctcaaaagaca

SEQ ID NO: 110855 - DNA, 19 bp, Homo sapiens
  siRNA target sequence for SARA2 (NM_016103.2,700-718).
gctggatggcacagtacat

SEQ ID NO: 110856 - DNA, 19 bp, Homo sapiens
  siRNA target sequence for SARA2 (NM_016103.2,701-719).
ctggatggcacagtacatt

SEQ ID NO: 110857 - DNA, 19 bp, Homo sapiens
  siRNA target sequence for SARA2 (NM_016103.2,703-721).
ggatggcacagtacattga

SEQ ID NO: 110858 - DNA, 19 bp, Homo sapiens
  siRNA target sequence for SARA2 (NM_016103.2,704-722).
gatggcacagtacattgat

SEQ ID NO: 110859 - DNA, 19 bp, Homo sapiens
  siRNA target sequence for SEPT1 (NM_052838.2,196-214).
ggagtacgtgggttttgct

SEQ ID NO: 110860 - DNA, 19 bp, Homo sapiens
  siRNA target sequence for SEPT1 (NM_052838.2,657-675).
gggcagtacacgagaaagt

SEQ ID NO: 110861 - DNA, 19 bp, Homo sapiens
  siRNA target sequence for SEPT1 (NM_052838.2,659-677).
gcagtacacgagaaagtca

SEQ ID NO: 110862 - DNA, 19 bp, Homo sapiens
  siRNA target sequence for SEPT1 (NM_052838.2,660-678).
cagtacacgagaaagtcaa

SEQ ID NO: 110863 - DNA, 19 bp, Homo sapiens
  siRNA target sequence for SEPT1 (NM_052838.2,793-811).
cgaatgtgactctgatgaa

SEQ ID NO: 110864 - DNA, 19 bp, Homo sapiens
  siRNA target sequence for SEPT1 (NM_052838.2,1103-1121).
gccagccgcagtaagcttt

SEQ ID NO: 110865 - DNA, 19 bp, Homo sapiens
  siRNA target sequence for SEPT10 (NM_144710.2,512-530).
ggccatgttggttttgaga

SEQ ID NO: 110866 - DNA, 19 bp, Homo sapiens
  siRNA target sequence for SEPT10 (NM_144710.2,942-960).
cacttgatctcttaaccat

SEQ ID NO: 110867 - DNA, 19 bp, Homo sapiens
  siRNA target sequence for SEPT10 (NM_144710.2,976-994).
caaggtaaacattatacca

SEQ ID NO: 110868 - DNA, 19 bp, Homo sapiens
  siRNA target sequence for SEPT10 (NM_144710.2,1170-1188).
gtatggatgaggtaaaagt

SEQ ID NO: 110869 - DNA, 19 bp, Homo sapiens
  siRNA target sequence for SEPT10 (NM_144710.2,1181-1199).
gtaaaagtcggaaacaaga

SEQ ID NO: 110870 - DNA, 19 bp, Homo sapiens
  siRNA target sequence for SEPT10 (NM_144710.2,1216-1234).
gtacccttggggtgttgta

SEQ ID NO: 110871 - DNA, 19 bp, Homo sapiens
  siRNA target sequence for SEPT10 (NM_144710.2,1219-1237).
cccttggggtgttgtacaa

SEQ ID NO: 110872 - DNA, 19 bp, Homo sapiens
  siRNA target sequence for SEPT10 (NM_144710.2,1273-1291).
gcgggaaatgctcatttgt

SEQ ID NO: 110873 - DNA, 19 bp, Homo sapiens
  siRNA target sequence for SEPT10 (NM_144710.2,1274-1292).
cgggaaatgctcatttgta

SEQ ID NO: 110874 - DNA, 19 bp, Homo sapiens
  siRNA target sequence for SEPT10 (NM_144710.2,1377-1395).
cagatgtgggcccagaaaa

SEQ ID NO: 110875 - DNA, 19 bp, Homo sapiens
  siRNA target sequence for SEPT10 (NM_144710.2,1396-1414).
caagccagtcagtgttcaa

SEQ ID NO: 110876 - DNA, 19 bp, Homo sapiens
  siRNA target sequence for SEPT10 (NM_144710.2,1417-1435).
gacctatgaagccaaaaga

SEQ ID NO: 110877 - DNA, 19 bp, Homo sapiens
  siRNA target sequence for SEPT10 (NM_144710.2,1536-1554).
gagagctacaggccaaatt

SEQ ID NO: 110878 - DNA, 19 bp, Homo sapiens
  siRNA target sequence for SEPT10 (NM_144710.2,1548-1566).
ccaaatttgagcaccttaa

SEQ ID NO: 110879 - DNA, 19 bp, Homo sapiens
  siRNA target sequence for SEPT10 (NM_144710.2,1712-1730).
gacaaggaccgtaagaact

SEQ ID NO: 110880 - DNA, 19 bp, Homo sapiens
  siRNA target sequence for SEPT10 (NM_144710.2,1718-1736).
gaccgtaagaactccaatt

SEQ ID NO: 110881 - DNA, 19 bp, Homo sapiens
  siRNA target sequence for SEPT10 (NM_144710.2,1721-1739).
cgtaagaactccaattttt

SEQ ID NO: 110882 - DNA, 19 bp, Homo sapiens
  siRNA target sequence for SEPT3 (NM_019106.4,246-264).
ccggtttcgacttcaacat

SEQ ID NO: 110883 - DNA, 19 bp, Homo sapiens
  siRNA target sequence for SEPT3 (NM_019106.4,393-411).
ctatcgggcatgtgataga

SEQ ID NO: 110884 - DNA, 19 bp, Homo sapiens
  siRNA target sequence for SEPT3 (NM_019106.4,496-514).
cattgagaagtacatcaat

SEQ ID NO: 110885 - DNA, 19 bp, Homo sapiens
  siRNA target sequence for SEPT3 (NM_019106.4,630-648).
gacctctggatcttgagtt

SEQ ID NO: 110886 - DNA, 19 bp, Homo sapiens
  siRNA target sequence for SEPT3 (NM_019106.4,633-651).
ctctggatcttgagttcat

SEQ ID NO: 110887 - DNA, 19 bp, Homo sapiens
  siRNA target sequence for SEPT3 (NM_019106.4,663-681).
gcaaggttgtgaacatcat

SEQ ID NO: 110888 - DNA, 19 bp, Homo sapiens
  siRNA target sequence for SEPT3 (NM_019106.4,901-919).
ggtcctcggccgaaaaact

SEQ ID NO: 110889 - DNA, 19 bp, Homo sapiens
  siRNA target sequence for SEPT3 (NM_019106.4,946-964).
cctcaaccactgtgagttt

SEQ ID NO: 110890 - DNA, 19 bp, Homo sapiens
  siRNA target sequence for SEPT3 (NM_019106.4,968-986).
ctgcttcgagactttgtca

SEQ ID NO: 110891 - DNA, 19 bp, Homo sapiens
  siRNA target sequence for SEPT6 (NM_015129.4,268-286).
ggcagcgaccgatatagct

SEQ ID NO: 110892 - DNA, 19 bp, Homo sapiens
  siRNA target sequence for SEPT6 (NM_015129.4,500-518).
gtccagctccagtctaata

SEQ ID NO: 110893 - DNA, 19 bp, Homo sapiens
  siRNA target sequence for SEPT6 (NM_015129.4,505-523).
gctccagtctaatacctat

SEQ ID NO: 110894 - DNA, 19 bp, Homo sapiens
  siRNA target sequence for SEPT6 (NM_015129.4,537-555).
gcaacgtgaggctaaagct

SEQ ID NO: 110895 - DNA, 19 bp, Homo sapiens
  siRNA target sequence for SEPT6 (NM_015129.4,548-566).
ctaaagctcacgatcgtta

SEQ ID NO: 110896 - DNA, 19 bp, Homo sapiens
  siRNA target sequence for SEPT6 (NM_015129.4,756-774).
ctctggacctagtgactat

SEQ ID NO: 110897 - DNA, 19 bp, Homo sapiens
  siRNA target sequence for SEPT6 (NM_015129.4,758-776).
ctggacctagtgactatga

SEQ ID NO: 110898 - DNA, 19 bp, Homo sapiens
  siRNA target sequence for SEPT6 (NM_015129.4,834-852).
cgaagagtgagctaacaaa

SEQ ID NO: 110899 - DNA, 19 bp, Homo sapiens
  siRNA target sequence for SEPT6 (NM_015129.4,886-904).
caacggagtccagatctat

SEQ ID NO: 110900 - DNA, 19 bp, Homo sapiens
  siRNA target sequence for SEPT6 (NM_015129.4,961-979).
cctgccgtttgctgtcatt

SEQ ID NO: 110901 - DNA, 19 bp, Homo sapiens
  siRNA target sequence for SEPT6 (NM_015129.4,1304-1322).
gtccagcgagtcaaagaga

SEQ ID NO: 110902 - DNA, 19 bp, Homo sapiens
  siRNA target sequence for SEPT6 (NM_015129.4,1550-1568).
ccatggctgtgtactgaat

SEQ ID NO: 110903 - DNA, 19 bp, Homo sapiens
  siRNA target sequence for SGNE1 (NM_003020.1,55-73).
gctatctggcctactgttt

SEQ ID NO: 110904 - DNA, 19 bp, Homo sapiens
  siRNA target sequence for SGNE1 (NM_003020.1,129-147).
gggtctcagaagcagatat

SEQ ID NO: 110905 - DNA, 19 bp, Homo sapiens
  siRNA target sequence for SGNE1 (NM_003020.1,324-342).
ctggagacaacattcctaa

SEQ ID NO: 110906 - DNA, 19 bp, Homo sapiens
  siRNA target sequence for SGNE1 (NM_003020.1,404-422).
gatgatggatgtctagaaa

SEQ ID NO: 110907 - DNA, 19 bp, Homo sapiens
  siRNA target sequence for SGNE1 (NM_003020.1,507-525).
gcaagtggaacaagaaact

SEQ ID NO: 110908 - DNA, 19 bp, Homo sapiens
  siRNA target sequence for SGNE1 (NM_003020.1,563-581).
cggaggagtgtcaatccat

SEQ ID NO: 110909 - DNA, 19 bp, Homo sapiens
  siRNA target sequence for SGNE1 (NM_003020.1,567-585).
ggagtgtcaatccatatct

SEQ ID NO: 110910 - DNA, 19 bp, Homo sapiens
  siRNA target sequence for SGNE1 (NM_003020.1,570-588).
gtgtcaatccatatctaca

SEQ ID NO: 110911 - DNA, 19 bp, Homo sapiens
  siRNA target sequence for SGNE1 (NM_003020.1,591-609).
gacagagactggataatgt

SEQ ID NO: 110912 - DNA, 19 bp, Homo sapiens
  siRNA target sequence for SRPR (NM_003139.2,314-332).
ggctgtttcgggacaagta

SEQ ID NO: 110913 - DNA, 19 bp, Homo sapiens
  siRNA target sequence for SRPR (NM_003139.2,644-662).
ctgagaacggagtagaact

SEQ ID NO: 110914 - DNA, 19 bp, Homo sapiens
  siRNA target sequence for SRPR (NM_003139.2,687-705).
gaagcgcgaggagttcatt

SEQ ID NO: 110915 - DNA, 19 bp, Homo sapiens
  siRNA target sequence for SRPR (NM_003139.2,955-973).
ggggctgctcaaaactcta

SEQ ID NO: 110916 - DNA, 19 bp, Homo sapiens
  siRNA target sequence for SRPR (NM_003139.2,1027-1045).
ggccttgtgggttcaaaga

SEQ ID NO: 110917 - DNA, 19 bp, Homo sapiens
  siRNA target sequence for SRPR (NM_003139.2,1046-1064).
gcttgagtcgtgaagacat

SEQ ID NO: 110918 - DNA, 19 bp, Homo sapiens
  siRNA target sequence for SRPR (NM_003139.2,1077-1095).
ggacaagatgcgtgatcat

SEQ ID NO: 110919 - DNA, 19 bp, Homo sapiens
  siRNA target sequence for SRPR (NM_003139.2,1087-1105).
cgtgatcatctcattgcta

SEQ ID NO: 110920 - DNA, 19 bp, Homo sapiens
  siRNA target sequence for SRPR (NM_003139.2,1088-1106).
gtgatcatctcattgctaa

SEQ ID NO: 110921 - DNA, 19 bp, Homo sapiens
  siRNA target sequence for SRPR (NM_003139.2,1126-1144).
gccgtccagctctgtgaat

SEQ ID NO: 110922 - DNA, 19 bp, Homo sapiens
  siRNA target sequence for SRPR (NM_003139.2,1190-1208).
cggtgacttccacagtaaa

SEQ ID NO: 110923 - DNA, 19 bp, Homo sapiens
  siRNA target sequence for SRPR (NM_003139.2,1194-1212).
gacttccacagtaaagcaa

SEQ ID NO: 110924 - DNA, 19 bp, Homo sapiens
  siRNA target sequence for SRPR (NM_003139.2,1247-1265).
cacagcgtcgtgtagacat

SEQ ID NO: 110925 - DNA, 19 bp, Homo sapiens
  siRNA target sequence for SRPR (NM_003139.2,1317-1335).
cttctgcggcgttaatgga

SEQ ID NO: 110926 - DNA, 19 bp, Homo sapiens
  siRNA target sequence for SRPR (NM_003139.2,1334-1352).
gagtggggaaatctactaa

SEQ ID NO: 110927 - DNA, 19 bp, Homo sapiens
  siRNA target sequence for SRPR (NM_003139.2,1338-1356).
ggggaaatctactaatctt

SEQ ID NO: 110928 - DNA, 19 bp, Homo sapiens
  siRNA target sequence for SRPR (NM_003139.2,1399-1417).
ctcattgctgcctgtgata

SEQ ID NO: 110929 - DNA, 19 bp, Homo sapiens
  siRNA target sequence for SRPR (NM_003139.2,1502-1520).
gcaccatggtgcagttgtt

SEQ ID NO: 110930 - DNA, 19 bp, Homo sapiens
  siRNA target sequence for SRPR (NM_003139.2,1616-1634).
caggccgcatgcaagacaa

SEQ ID NO: 110931 - DNA, 19 bp, Homo sapiens
  siRNA target sequence for SRPR (NM_003139.2,1651-1669).
gccctggccaaactcatta

SEQ ID NO: 110932 - DNA, 19 bp, Homo sapiens
  siRNA target sequence for SRPR (NM_003139.2,1756-1774).
gccttggctgaccattcta

SEQ ID NO: 110933 - DNA, 19 bp, Homo sapiens
  siRNA target sequence for SUCLG1 (NM_003849.1,88-106).
cctgccgcagaatggaatt

SEQ ID NO: 110934 - DNA, 19 bp, Homo sapiens
  siRNA target sequence for SUCLG1 (NM_003849.1,126-144).
cttctcggcaacatctcta

SEQ ID NO: 110935 - DNA, 19 bp, Homo sapiens
  siRNA target sequence for SUCLG1 (NM_003849.1,129-147).
ctcggcaacatctctatgt

SEQ ID NO: 110936 - DNA, 19 bp, Homo sapiens
  siRNA target sequence for SUCLG1 (NM_003849.1,132-150).
ggcaacatctctatgttga

SEQ ID NO: 110937 - DNA, 19 bp, Homo sapiens
  siRNA target sequence for SUCLG1 (NM_003849.1,133-151).
gcaacatctctatgttgat

SEQ ID NO: 110938 - DNA, 19 bp, Homo sapiens
  siRNA target sequence for SUCLG1 (NM_003849.1,134-152).
caacatctctatgttgata

SEQ ID NO: 110939 - DNA, 19 bp, Homo sapiens
  siRNA target sequence for SUCLG1 (NM_003849.1,283-301).
cttacctgtctttaatact

SEQ ID NO: 110940 - DNA, 19 bp, Homo sapiens
  siRNA target sequence for SUCLG1 (NM_003849.1,329-347).
gcaacggcttctgtcattt

SEQ ID NO: 110941 - DNA, 19 bp, Homo sapiens
  siRNA target sequence for SUCLG1 (NM_003849.1,333-351).
cggcttctgtcatttatgt

SEQ ID NO: 110942 - DNA, 19 bp, Homo sapiens
  siRNA target sequence for SUCLG1 (NM_003849.1,552-570).
ctggccatattcacaaaaa

SEQ ID NO: 110943 - DNA, 19 bp, Homo sapiens
  siRNA target sequence for SUCLG1 (NM_003849.1,597-615).
ctggcaccctgacttatga

SEQ ID NO: 110944 - DNA, 19 bp, Homo sapiens
  siRNA target sequence for SUCLG1 (NM_003849.1,708-726).
gcctcgaaatctttttgaa

SEQ ID NO: 110945 - DNA, 19 bp, Homo sapiens
  siRNA target sequence for SUCLG1 (NM_003849.1,734-752).
gccacagaaggcatcatat

SEQ ID NO: 110946 - DNA, 19 bp, Homo sapiens
  siRNA target sequence for SUCLG1 (NM_003849.1,918-936).
gtggagctaaagagaagat

SEQ ID NO: 110947 - DNA, 19 bp, Homo sapiens
  siRNA target sequence for SUCLG1 (NM_003849.1,993-1011).
ccacgatctacaaggaatt

SEQ ID NO: 110948 - DNA, 19 bp, Homo sapiens
  siRNA target sequence for SUCLG1 (NM_003849.1,997-1015).
gatctacaaggaatttgaa

SEQ ID NO: 110949 - DNA, 19 bp, Homo sapiens
  siRNA target sequence for TUBA1 (NM_006000.1,364-382).
ctatgcccgtggtcactat

SEQ ID NO: 110950 - DNA, 19 bp, Homo sapiens
  siRNA target sequence for TUBA1 (NM_006000.1,368-386).
gcccgtggtcactatacca

SEQ ID NO: 110951 - DNA, 19 bp, Homo sapiens
  siRNA target sequence for TUBA1 (NM_006000.1,369-387).
cccgtggtcactataccat

SEQ ID NO: 110952 - DNA, 19 bp, Homo sapiens
  siRNA target sequence for TUBA1 (NM_006000.1,370-388).
ccgtggtcactataccatt

SEQ ID NO: 110953 - DNA, 19 bp, Homo sapiens
  siRNA target sequence for TUBA1 (NM_006000.1,523-541).
gcggctctctgttgactat

SEQ ID NO: 110954 - DNA, 19 bp, Homo sapiens
  siRNA target sequence for TUBA4 (NM_025019.1,445-463).
gagtggctttctgttaact

SEQ ID NO: 110955 - DNA, 19 bp, Homo sapiens
  siRNA target sequence for TUBA4 (NM_025019.1,447-465).
gtggctttctgttaactat

SEQ ID NO: 110956 - DNA, 19 bp, Homo sapiens
  siRNA target sequence for TUBA8 (NM_018943.1,103-121).
ccaagcgggagttcagatt

SEQ ID NO: 110957 - DNA, 19 bp, Homo sapiens
  siRNA target sequence for TUBA8 (NM_018943.1,166-184).
ggcagacggcacttttgat

SEQ ID NO: 110958 - DNA, 19 bp, Homo sapiens
  siRNA target sequence for TUBA8 (NM_018943.1,186-204).
ctcaagctagcaagatcaa

SEQ ID NO: 110959 - DNA, 19 bp, Homo sapiens
  siRNA target sequence for TUBA8 (NM_018943.1,712-730).
ccgcaggaaccttgacatt

SEQ ID NO: 110960 - DNA, 19 bp, Homo sapiens
  siRNA target sequence for TUBA8 (NM_018943.1,727-745).
cattgagcgccctacctat

SEQ ID NO: 110961 - DNA, 19 bp, Homo sapiens
  siRNA target sequence for TUBA8 (NM_018943.1,992-1010).
ccgagacatggcaagtaca

SEQ ID NO: 110962 - DNA, 19 bp, Homo sapiens
  siRNA target sequence for TUBA8 (NM_018943.1,993-1011).
cgagacatggcaagtacat

SEQ ID NO: 110963 - DNA, 19 bp, Homo sapiens
  siRNA target sequence for TUBA8 (NM_018943.1,1381-1399).
gactgattcgtttgaagaa

SEQ ID NO: 110964 - DNA, 19 bp, Homo sapiens
  siRNA target sequence for TUBB1 (NM_030773.1,3-21).
gcgtgaaattgtccatatt

SEQ ID NO: 110965 - DNA, 19 bp, Homo sapiens
  siRNA target sequence for TUBB1 (NM_030773.1,156-174).
cgaagcctacggtaggaaa

SEQ ID NO: 110966 - DNA, 19 bp, Homo sapiens
  siRNA target sequence for TUBB1 (NM_030773.1,157-175).
gaagcctacggtaggaaat

SEQ ID NO: 110967 - DNA, 19 bp, Homo sapiens
  siRNA target sequence for TUBB1 (NM_030773.1,161-179).
cctacggtaggaaatatgt

SEQ ID NO: 110968 - DNA, 19 bp, Homo sapiens
  siRNA target sequence for TUBB1 (NM_030773.1,222-240).
cagcattcgatctagcaaa

SEQ ID NO: 110969 - DNA, 19 bp, Homo sapiens
  siRNA target sequence for TUBB1 (NM_030773.1,224-242).
gcattcgatctagcaaatt

SEQ ID NO: 110970 - DNA, 19 bp, Homo sapiens
  siRNA target sequence for TUBB1 (NM_030773.1,252-270).
ctttcaacccgacagtttt

SEQ ID NO: 110971 - DNA, 19 bp, Homo sapiens
  siRNA target sequence for TUBB1 (NM_030773.1,442-460).
ggcactctgctcatgaaca

SEQ ID NO: 110972 - DNA, 19 bp, Homo sapiens
  siRNA target sequence for TUBB1 (NM_030773.1,443-461).
gcactctgctcatgaacaa

SEQ ID NO: 110973 - DNA, 19 bp, Homo sapiens
  siRNA target sequence for TUBB1 (NM_030773.1,448-466).
ctgctcatgaacaagatta

SEQ ID NO: 110974 - DNA, 19 bp, Homo sapiens
  siRNA target sequence for TUBB1 (NM_030773.1,478-496).
ccggaccggatcatgaatt

SEQ ID NO: 110975 - DNA, 19 bp, Homo sapiens
  siRNA target sequence for TUBB1 (NM_030773.1,563-581).
ctatccaccagctgattga

SEQ ID NO: 110976 - DNA, 19 bp, Homo sapiens
  siRNA target sequence for TUBB1 (NM_030773.1,1118-1136).
ccatccaagagatctttaa

SEQ ID NO: 110977 - DNA, 19 bp, Homo sapiens
  siRNA target sequence for TUBB1 (NM_030773.1,1199-1217).
gcgaagggatggacataaa

SEQ ID NO: 110978 - DNA, 19 bp, Homo sapiens
  siRNA target sequence for TUBB1 (NM_030773.1,1205-1223).
ggatggacataaacgaatt

SEQ ID NO: 110979 - DNA, 19 bp, Homo sapiens
  siRNA target sequence for TUBB1 (NM_030773.1,1206-1224).
gatggacataaacgaattt

SEQ ID NO: 110980 - DNA, 19 bp, Homo sapiens
  siRNA target sequence for TUBB1 (NM_030773.1,1259-1277).
ccgagtaccaacaatttca

SEQ ID NO: 110981 - DNA, 19 bp, Homo sapiens
  siRNA target sequence for TUBB1 (NM_030773.1,1263-1281).
gtaccaacaatttcaagat

SEQ ID NO: 110982 - DNA, 19 bp, Homo sapiens
  siRNA target sequence for TUBB4 (NM_006086.1,250-268).
ctcttcaggcctgacaatt

SEQ ID NO: 110983 - DNA, 19 bp, Homo sapiens
  siRNA target sequence for TUBB4Q (NM_020040.2,733-751).
gtacccttctgctcagtaa

SEQ ID NO: 110984 - DNA, 19 bp, Homo sapiens
  siRNA target sequence for TUBD1 (NM_016261.1,91-109).
cagggactctgctctatga

SEQ ID NO: 110985 - DNA, 19 bp, Homo sapiens
  siRNA target sequence for TUBD1 (NM_016261.1,110-128).
gagagaatgaggcatatca

SEQ ID NO: 110986 - DNA, 19 bp, Homo sapiens
  siRNA target sequence for TUBD1 (NM_016261.1,185-203).
gggctgttcttgttgacat

SEQ ID NO: 110987 - DNA, 19 bp, Homo sapiens
  siRNA target sequence for TUBD1 (NM_016261.1,204-222).
ggaacccaaagttatcaat

SEQ ID NO: 110988 - DNA, 19 bp, Homo sapiens
  siRNA target sequence for TUBD1 (NM_016261.1,341-359).
ggcatgaagaatctataat

SEQ ID NO: 110989 - DNA, 19 bp, Homo sapiens
  siRNA target sequence for TUBD1 (NM_016261.1,399-417).
cagtggttttttcatcata

SEQ ID NO: 110990 - DNA, 19 bp, Homo sapiens
  siRNA target sequence for TUBD1 (NM_016261.1,432-450).
gggcacaggatcaggatta

SEQ ID NO: 110991 - DNA, 19 bp, Homo sapiens
  siRNA target sequence for TUBD1 (NM_016261.1,445-463).
ggattaggagctttcgtta

SEQ ID NO: 110992 - DNA, 19 bp, Homo sapiens
  siRNA target sequence for TUBD1 (NM_016261.1,454-472).
gctttcgttacacagaatt

SEQ ID NO: 110993 - DNA, 19 bp, Homo sapiens
  siRNA target sequence for TUBD1 (NM_016261.1,459-477).
cgttacacagaatttagaa

SEQ ID NO: 110994 - DNA, 19 bp, Homo sapiens
  siRNA target sequence for TUBD1 (NM_016261.1,475-493).
gaagatcagtactcaaact

SEQ ID NO: 110995 - DNA, 19 bp, Homo sapiens
  siRNA target sequence for TUBD1 (NM_016261.1,478-496).
gatcagtactcaaactcat

SEQ ID NO: 110996 - DNA, 19 bp, Homo sapiens
  siRNA target sequence for TUBD1 (NM_016261.1,527-545).
gaactggtgaggttattgt

SEQ ID NO: 110997 - DNA, 19 bp, Homo sapiens
  siRNA target sequence for TUBD1 (NM_016261.1,530-548).
ctggtgaggttattgttca

SEQ ID NO: 110998 - DNA, 19 bp, Homo sapiens
  siRNA target sequence for TUBD1 (NM_016261.1,532-550).
ggtgaggttattgttcaaa

SEQ ID NO: 110999 - DNA, 19 bp, Homo sapiens
  siRNA target sequence for TUBD1 (NM_016261.1,533-551).
gtgaggttattgttcaaaa

SEQ ID NO: 111000 - DNA, 19 bp, Homo sapiens
  siRNA target sequence for TUBD1 (NM_016261.1,535-553).
gaggttattgttcaaaact

SEQ ID NO: 111001 - DNA, 19 bp, Homo sapiens
  siRNA target sequence for TUBD1 (NM_016261.1,547-565).
caaaactacaactccattt

SEQ ID NO: 111002 - DNA, 19 bp, Homo sapiens
  siRNA target sequence for TUBD1 (NM_016261.1,552-570).
ctacaactccattttgaca

SEQ ID NO: 111003 - DNA, 19 bp, Homo sapiens
  siRNA target sequence for TUBD1 (NM_016261.1,558-576).
ctccattttgacactttct

SEQ ID NO: 111004 - DNA, 19 bp, Homo sapiens
  siRNA target sequence for TUBD1 (NM_016261.1,560-578).
ccattttgacactttctca

SEQ ID NO: 111005 - DNA, 19 bp, Homo sapiens
  siRNA target sequence for TUBD1 (NM_016261.1,593-611).
cagacgccctccttcttca

SEQ ID NO: 111006 - DNA, 19 bp, Homo sapiens
  siRNA target sequence for TUBD1 (NM_016261.1,613-631).
gagaatgatgccatccata

SEQ ID NO: 111007 - DNA, 19 bp, Homo sapiens
  siRNA target sequence for TUBD1 (NM_016261.1,619-637).
gatgccatccataagatct

SEQ ID NO: 111008 - DNA, 19 bp, Homo sapiens
  siRNA target sequence for TUBD1 (NM_016261.1,710-728).
gtgtgttccagcctactta

SEQ ID NO: 111009 - DNA, 19 bp, Homo sapiens
  siRNA target sequence for TUBD1 (NM_016261.1,714-732).
gttccagcctacttattct

SEQ ID NO: 111010 - DNA, 19 bp, Homo sapiens
  siRNA target sequence for TUBD1 (NM_016261.1,770-788).
gagacttaatggagcattt

SEQ ID NO: 111011 - DNA, 19 bp, Homo sapiens
  siRNA target sequence for TUBD1 (NM_016261.1,790-808).
gttccccatcctgaattca

SEQ ID NO: 111012 - DNA, 19 bp, Homo sapiens
  siRNA target sequence for TUBD1 (NM_016261.1,813-831).
gctgagtgttcgtaacatt

SEQ ID NO: 111013 - DNA, 19 bp, Homo sapiens
  siRNA target sequence for TUBD1 (NM_016261.1,832-850).
cctcacatgtctgagaatt

SEQ ID NO: 111014 - DNA, 19 bp, Homo sapiens
  siRNA target sequence for TUBD1 (NM_016261.1,855-873).
ggcatacaccacatttact

SEQ ID NO: 111015 - DNA, 19 bp, Homo sapiens
  siRNA target sequence for TUBD1 (NM_016261.1,877-895).
gctggcctcctcaagcatt

SEQ ID NO: 111016 - DNA, 19 bp, Homo sapiens
  siRNA target sequence for TUBD1 (NM_016261.1,924-942).
gatggaagaaggtattgat

SEQ ID NO: 111017 - DNA, 19 bp, Homo sapiens
  siRNA target sequence for TUBD1 (NM_016261.1,934-952).
ggtattgataggcatgtat

SEQ ID NO: 111018 - DNA, 19 bp, Homo sapiens
  siRNA target sequence for TUBD1 (NM_016261.1,967-985).
ggacttcctcctcttagta

SEQ ID NO: 111019 - DNA, 19 bp, Homo sapiens
  siRNA target sequence for TUBD1 (NM_016261.1,973-991).
cctcctcttagtaaaatgt

SEQ ID NO: 111020 - DNA, 19 bp, Homo sapiens
  siRNA target sequence for TUBD1 (NM_016261.1,1003-1021).
gacctgcattttaacactt

SEQ ID NO: 111021 - DNA, 19 bp, Homo sapiens
  siRNA target sequence for TUBD1 (NM_016261.1,1067-1085).
cagatgtggagggatttaa

SEQ ID NO: 111022 - DNA, 19 bp, Homo sapiens
  siRNA target sequence for TUBD1 (NM_016261.1,1107-1125).
ctggttgaagcctgttaat

SEQ ID NO: 111023 - DNA, 19 bp, Homo sapiens
  siRNA target sequence for TUBD1 (NM_016261.1,1110-1128).
gttgaagcctgttaatgct

SEQ ID NO: 111024 - DNA, 19 bp, Homo sapiens
  siRNA target sequence for TUBD1 (NM_016261.1,1126-1144).
gctttcaacgtgtggaaaa

SEQ ID NO: 111025 - DNA, 19 bp, Homo sapiens
  siRNA target sequence for TUBD1 (NM_016261.1,1191-1209).
caacagccagttcttagta

SEQ ID NO: 111026 - DNA, 19 bp, Homo sapiens
  siRNA target sequence for TUBD1 (NM_016261.1,1203-1221).
cttagtaaaaccacttgat

SEQ ID NO: 111027 - DNA, 19 bp, Homo sapiens
  siRNA target sequence for TUBD1 (NM_016261.1,1253-1271).
cttcaaaagcctacattca

SEQ ID NO: 111028 - DNA, 19 bp, Homo sapiens
  siRNA target sequence for TUBE1 (NM_016262.3,108-126).
cggtcaaccagaaaggaat

SEQ ID NO: 111029 - DNA, 19 bp, Homo sapiens
  siRNA target sequence for TUBE1 (NM_016262.3,182-200).
gatggtggaagtatttcca

SEQ ID NO: 111030 - DNA, 19 bp, Homo sapiens
  siRNA target sequence for TUBE1 (NM_016262.3,225-243).
cacgagcagtcttgattga

SEQ ID NO: 111031 - DNA, 19 bp, Homo sapiens
  siRNA target sequence for TUBE1 (NM_016262.3,227-245).
cgagcagtcttgattgata

SEQ ID NO: 111032 - DNA, 19 bp, Homo sapiens
  siRNA target sequence for TUBE1 (NM_016262.3,228-246).
gagcagtcttgattgatat

SEQ ID NO: 111033 - DNA, 19 bp, Homo sapiens
  siRNA target sequence for TUBE1 (NM_016262.3,251-269).
gaaggggtagtgaatgaaa

SEQ ID NO: 111034 - DNA, 19 bp, Homo sapiens
  siRNA target sequence for TUBE1 (NM_016262.3,255-273).
gggtagtgaatgaaattct

SEQ ID NO: 111035 - DNA, 19 bp, Homo sapiens
  siRNA target sequence for TUBE1 (NM_016262.3,277-295).
gggaccactgagagatgta

SEQ ID NO: 111036 - DNA, 19 bp, Homo sapiens
  siRNA target sequence for TUBE1 (NM_016262.3,278-296).
ggaccactgagagatgtat

SEQ ID NO: 111037 - DNA, 19 bp, Homo sapiens
  siRNA target sequence for TUBE1 (NM_016262.3,279-297).
gaccactgagagatgtatt

SEQ ID NO: 111038 - DNA, 19 bp, Homo sapiens
  siRNA target sequence for TUBE1 (NM_016262.3,282-300).
cactgagagatgtatttga

SEQ ID NO: 111039 - DNA, 19 bp, Homo sapiens
  siRNA target sequence for TUBE1 (NM_016262.3,284-302).
ctgagagatgtatttgata

SEQ ID NO: 111040 - DNA, 19 bp, Homo sapiens
  siRNA target sequence for TUBE1 (NM_016262.3,310-328).
gctcatcactgatatttct

SEQ ID NO: 111041 - DNA, 19 bp, Homo sapiens
  siRNA target sequence for TUBE1 (NM_016262.3,423-441).
gtgattgcttgcagtgttt

SEQ ID NO: 111042 - DNA, 19 bp, Homo sapiens
  siRNA target sequence for TUBE1 (NM_016262.3,425-443).
gattgcttgcagtgtttct

SEQ ID NO: 111043 - DNA, 19 bp, Homo sapiens
  siRNA target sequence for TUBE1 (NM_016262.3,572-590).
gtcataacctcaccttata

SEQ ID NO: 111044 - DNA, 19 bp, Homo sapiens
  siRNA target sequence for TUBE1 (NM_016262.3,574-592).
cataacctcaccttataat

SEQ ID NO: 111045 - DNA, 19 bp, Homo sapiens
  siRNA target sequence for TUBE1 (NM_016262.3,579-597).
cctcaccttataatagcat

SEQ ID NO: 111046 - DNA, 19 bp, Homo sapiens
  siRNA target sequence for TUBE1 (NM_016262.3,640-658).
gcccattgacaatcaatct

SEQ ID NO: 111047 - DNA, 19 bp, Homo sapiens
  siRNA target sequence for TUBE1 (NM_016262.3,641-659).
cccattgacaatcaatctt

SEQ ID NO: 111048 - DNA, 19 bp, Homo sapiens
  siRNA target sequence for TUBE1 (NM_016262.3,642-660).
ccattgacaatcaatcttt

SEQ ID NO: 111049 - DNA, 19 bp, Homo sapiens
  siRNA target sequence for TUBE1 (NM_016262.3,643-661).
cattgacaatcaatcttta

SEQ ID NO: 111050 - DNA, 19 bp, Homo sapiens
  siRNA target sequence for TUBE1 (NM_016262.3,725-743).
ccaaagagtctggttactt

SEQ ID NO: 111051 - DNA, 19 bp, Homo sapiens
  siRNA target sequence for TUBE1 (NM_016262.3,769-787).
gcataagaagccctttgat

SEQ ID NO: 111052 - DNA, 19 bp, Homo sapiens
  siRNA target sequence for TUBE1 (NM_016262.3,780-798).
cctttgatgcaatgaataa

SEQ ID NO: 111053 - DNA, 19 bp, Homo sapiens
  siRNA target sequence for TUBE1 (NM_016262.3,1089-1107).
cagatcttcgtagaaatat

SEQ ID NO: 111054 - DNA, 19 bp, Homo sapiens
  siRNA target sequence for TUBE1 (NM_016262.3,1192-1210).
ccattctcattcgttatta

SEQ ID NO: 111055 - DNA, 19 bp, Homo sapiens
  siRNA target sequence for TUBE1 (NM_016262.3,1203-1221).
cgttattagctttagcaaa

SEQ ID NO: 111056 - DNA, 19 bp, Homo sapiens
  siRNA target sequence for TUBE1 (NM_016262.3,1239-1257).
ccaccttcatggaactgaa

SEQ ID NO: 111057 - DNA, 19 bp, Homo sapiens
  siRNA target sequence for TUBE1 (NM_016262.3,1288-1306).
ggctcaccttcatcactat

SEQ ID NO: 111058 - DNA, 19 bp, Homo sapiens
  siRNA target sequence for TUBE1 (NM_016262.3,1384-1402).
ccaactggacgccacaaaa

SEQ ID NO: 111059 - DNA, 19 bp, Homo sapiens
  siRNA target sequence for TUBE1 (NM_016262.3,1388-1406).
ctggacgccacaaaaaaca

SEQ ID NO: 111060 - DNA, 19 bp, Homo sapiens
  siRNA target sequence for TUBE1 (NM_016262.3,1405-1423).
catgcctgtgcaggattta

SEQ ID NO: 111061 - DNA, 19 bp, Homo sapiens
  siRNA target sequence for TUBG1 (NM_001070.3,509-527).
gggttcctacctcttagaa

SEQ ID NO: 111062 - DNA, 19 bp, Homo sapiens
  siRNA target sequence for TUBG1 (NM_001070.3,554-572).
gctggtgcagacatactca

SEQ ID NO: 111063 - DNA, 19 bp, Homo sapiens
  siRNA target sequence for TUBG1 (NM_001070.3,605-623).
ggtggtccagccttacaat

SEQ ID NO: 111064 - DNA, 19 bp, Homo sapiens
  siRNA target sequence for TUBG2 (NM_016437.1,705-723).
cctcctggagcgactgaat

SEQ ID NO: 111065 - DNA, 19 bp, Homo sapiens
  siRNA target sequence for TUBG2 (NM_016437.1,741-759).
gctagtgcagacttattca

SEQ ID NO: 111066 - DNA, 19 bp, Homo sapiens
  siRNA target sequence for TUBG2 (NM_016437.1,1421-1439).
cctgccagcagtttgacaa

SEQ ID NO: 111067 - DNA, 19 bp, Homo sapiens
  siRNA target sequence for TUBG2 (NM_016437.1,1517-1535).
ggtctagggaggttgttca

SEQ ID NO: 111068 - DNA, 19 bp, Homo sapiens
  siRNA target sequence for VTS58635 (NM_033315.2,348-366).
gtgcgccagttcttgtaca

SEQ ID NO: 111069 - DNA, 19 bp, Homo sapiens
  siRNA target sequence for VTS58635 (NM_033315.2,564-582).
gacatctgctgctttgaca

SEQ ID NO: 111070 - DNA, 19 bp, Homo sapiens
  siRNA target sequence for ZNF179 (NM_007148.2,496-514).
gctgctggttcgcatcaat

SEQ ID NO: 111071 - DNA, 19 bp, Homo sapiens
  siRNA target sequence for ZNF179 (NM_007148.2,746-764).
ctcgccaggggcatatgga

SEQ ID NO: 111072 - DNA, 19 bp, Homo sapiens
  siRNA target sequence for ZNF179 (NM_007148.2,980-998).
gaggtgatgggcaagcatt

SEQ ID NO: 111073 - DNA, 19 bp, Homo sapiens
  siRNA target sequence for ZNF179 (NM_007148.2,1485-1503).
gggagttcgaggagtatgt

SEQ ID NO: 111074 - DNA, 19 bp, Homo sapiens
  siRNA target sequence for ZNF179 (NM_007148.2,1522-1540).
caccaagcgcatattctct

SEQ ID NO: 111075 - DNA, 19 bp, Homo sapiens
  siRNA target sequence for CNGA1 (NM_000087.1,73-91).
gtaaccatgcccaatgtga

SEQ ID NO: 111076 - DNA, 19 bp, Homo sapiens
  siRNA target sequence for CNGA1 (NM_000087.1,90-108).
gattgtaccagatattgaa

SEQ ID NO: 111077 - DNA, 19 bp, Homo sapiens
  siRNA target sequence for CNGA1 (NM_000087.1,137-155).
catgcagctccttttctga

SEQ ID NO: 111078 - DNA, 19 bp, Homo sapiens
  siRNA target sequence for CNGA1 (NM_000087.1,205-223).
catgcaaggggttccttta

SEQ ID NO: 111079 - DNA, 19 bp, Homo sapiens
  siRNA target sequence for CNGA1 (NM_000087.1,208-226).
gcaaggggttcctttagtt

SEQ ID NO: 111080 - DNA, 19 bp, Homo sapiens
  siRNA target sequence for CNGA1 (NM_000087.1,209-227).
caaggggttcctttagtta

SEQ ID NO: 111081 - DNA, 19 bp, Homo sapiens
  siRNA target sequence for CNGA1 (NM_000087.1,214-232).
ggttcctttagttataagt

SEQ ID NO: 111082 - DNA, 19 bp, Homo sapiens
  siRNA target sequence for CNGA1 (NM_000087.1,503-521).
cctcgggaaacacatatta

SEQ ID NO: 111083 - DNA, 19 bp, Homo sapiens
  siRNA target sequence for CNGA1 (NM_000087.1,506-524).
cgggaaacacatattacaa

SEQ ID NO: 111084 - DNA, 19 bp, Homo sapiens
  siRNA target sequence for CNGA1 (NM_000087.1,527-545).
ggctgttttgcatcacatt

SEQ ID NO: 111085 - DNA, 19 bp, Homo sapiens
  siRNA target sequence for CNGA1 (NM_000087.1,542-560).
cattacctgttatgtacaa

SEQ ID NO: 111086 - DNA, 19 bp, Homo sapiens
  siRNA target sequence for CNGA1 (NM_000087.1,581-599).
gagcatgttttgatgaact

SEQ ID NO: 111087 - DNA, 19 bp, Homo sapiens
  siRNA target sequence for CNGA1 (NM_000087.1,592-610).
gatgaacttcaatctgatt

SEQ ID NO: 111088 - DNA, 19 bp, Homo sapiens
  siRNA target sequence for CNGA1 (NM_000087.1,623-641).
ggctcattttggattacgt

SEQ ID NO: 111089 - DNA, 19 bp, Homo sapiens
  siRNA target sequence for CNGA1 (NM_000087.1,624-642).
gctcattttggattacgta

SEQ ID NO: 111090 - DNA, 19 bp, Homo sapiens
  siRNA target sequence for CNGA1 (NM_000087.1,625-643).
ctcattttggattacgtat

SEQ ID NO: 111091 - DNA, 19 bp, Homo sapiens
  siRNA target sequence for CNGA1 (NM_000087.1,633-651).
ggattacgtatcagacata

SEQ ID NO: 111092 - DNA, 19 bp, Homo sapiens
  siRNA target sequence for CNGA1 (NM_000087.1,639-657).
cgtatcagacatagtctat

SEQ ID NO: 111093 - DNA, 19 bp, Homo sapiens
  siRNA target sequence for CNGA1 (NM_000087.1,644-662).
cagacatagtctatttaat

SEQ ID NO: 111094 - DNA, 19 bp, Homo sapiens
  siRNA target sequence for CNGA1 (NM_000087.1,648-666).
catagtctatttaatcgat

SEQ ID NO: 111095 - DNA, 19 bp, Homo sapiens
  siRNA target sequence for CNGA1 (NM_000087.1,652-670).
gtctatttaatcgatatgt

SEQ ID NO: 111096 - DNA, 19 bp, Homo sapiens
  siRNA target sequence for CNGA1 (NM_000087.1,683-701).
ggacaggttacctagaaca

SEQ ID NO: 111097 - DNA, 19 bp, Homo sapiens
  siRNA target sequence for CNGA1 (NM_000087.1,749-767).
ccaacttgcaatttaaact

SEQ ID NO: 111098 - DNA, 19 bp, Homo sapiens
  siRNA target sequence for CNGA1 (NM_000087.1,772-790).
gttctgtcactgataccaa

SEQ ID NO: 111099 - DNA, 19 bp, Homo sapiens
  siRNA target sequence for CNGA1 (NM_000087.1,777-795).
gtcactgataccaactgat

SEQ ID NO: 111100 - DNA, 19 bp, Homo sapiens
  siRNA target sequence for CNGA1 (NM_000087.1,815-833).
ggtggaactatccagaaat

SEQ ID NO: 111101 - DNA, 19 bp, Homo sapiens
  siRNA target sequence for CNGA1 (NM_000087.1,816-834).
gtggaactatccagaaatt

SEQ ID NO: 111102 - DNA, 19 bp, Homo sapiens
  siRNA target sequence for CNGA1 (NM_000087.1,819-837).
gaactatccagaaattaga

SEQ ID NO: 111103 - DNA, 19 bp, Homo sapiens
  siRNA target sequence for CNGA1 (NM_000087.1,926-944).
ccaaccttgttatgtatat

SEQ ID NO: 111104 - DNA, 19 bp, Homo sapiens
  siRNA target sequence for CNGA1 (NM_000087.1,1016-1034).
catgggtctaccctgatat

SEQ ID NO: 111105 - DNA, 19 bp, Homo sapiens
  siRNA target sequence for CNGA1 (NM_000087.1,1019-1037).
gggtctaccctgatattaa

SEQ ID NO: 111106 - DNA, 19 bp, Homo sapiens
  siRNA target sequence for CNGA1 (NM_000087.1,1020-1038).
ggtctaccctgatattaat

SEQ ID NO: 111107 - DNA, 19 bp, Homo sapiens
  siRNA target sequence for CNGA1 (NM_000087.1,1023-1041).
ctaccctgatattaatgat

SEQ ID NO: 111108 - DNA, 19 bp, Homo sapiens
  siRNA target sequence for CNGA1 (NM_000087.1,1131-1149).
cgtgagggattctgagtat

SEQ ID NO: 111109 - DNA, 19 bp, Homo sapiens
  siRNA target sequence for CNGA1 (NM_000087.1,1150-1168).
gtctttgtggtggttgatt

SEQ ID NO: 111110 - DNA, 19 bp, Homo sapiens
  siRNA target sequence for CNGA1 (NM_000087.1,1156-1174).
gtggtggttgatttcctaa

SEQ ID NO: 111111 - DNA, 19 bp, Homo sapiens
  siRNA target sequence for CNGA1 (NM_000087.1,1158-1176).
ggtggttgatttcctaatt

SEQ ID NO: 111112 - DNA, 19 bp, Homo sapiens
  siRNA target sequence for CNGA1 (NM_000087.1,1161-1179).
ggttgatttcctaattgga

SEQ ID NO: 111113 - DNA, 19 bp, Homo sapiens
  siRNA target sequence for CNGA1 (NM_000087.1,1177-1195).
ggagtgttaatttttgcta

SEQ ID NO: 111114 - DNA, 19 bp, Homo sapiens
  siRNA target sequence for CNGA1 (NM_000087.1,1193-1211).
ctaccatcgttggtaacat

SEQ ID NO: 111115 - DNA, 19 bp, Homo sapiens
  siRNA target sequence for CNGA1 (NM_000087.1,1204-1222).
ggtaacataggttctatga

SEQ ID NO: 111116 - DNA, 19 bp, Homo sapiens
  siRNA target sequence for CNGA1 (NM_000087.1,1205-1223).
gtaacataggttctatgat

SEQ ID NO: 111117 - DNA, 19 bp, Homo sapiens
  siRNA target sequence for CNGA1 (NM_000087.1,1278-1296).
gcaatatatgcattttcga

SEQ ID NO: 111118 - DNA, 19 bp, Homo sapiens
  siRNA target sequence for CNGA1 (NM_000087.1,1372-1390).
gagaaagaagtcttaaagt

SEQ ID NO: 111119 - DNA, 19 bp, Homo sapiens
  siRNA target sequence for CNGA1 (NM_000087.1,1389-1407).
gtatctacctgataaacta

SEQ ID NO: 111120 - DNA, 19 bp, Homo sapiens
  siRNA target sequence for CNGA1 (NM_000087.1,1421-1439).
ccatcaacgttcacttaga

SEQ ID NO: 111121 - DNA, 19 bp, Homo sapiens
  siRNA target sequence for CNGA1 (NM_000087.1,1494-1512).
gttggtcttgaaattgcaa

SEQ ID NO: 111122 - DNA, 19 bp, Homo sapiens
  siRNA target sequence for CNGA1 (NM_000087.1,1521-1539).
ctacagtcctggagattat

SEQ ID NO: 111123 - DNA, 19 bp, Homo sapiens
  siRNA target sequence for CNGA1 (NM_000087.1,1562-1580).
gacgagagatgtacattat

SEQ ID NO: 111124 - DNA, 19 bp, Homo sapiens
  siRNA target sequence for CNGA1 (NM_000087.1,1564-1582).
cgagagatgtacattatca

SEQ ID NO: 111125 - DNA, 19 bp, Homo sapiens
  siRNA target sequence for CNGA1 (NM_000087.1,1565-1583).
gagagatgtacattatcaa

SEQ ID NO: 111126 - DNA, 19 bp, Homo sapiens
  siRNA target sequence for CNGA1 (NM_000087.1,1702-1720).
cgaagaacggccaatatta

SEQ ID NO: 111127 - DNA, 19 bp, Homo sapiens
  siRNA target sequence for CNGA1 (NM_000087.1,1703-1721).
gaagaacggccaatattaa

SEQ ID NO: 111128 - DNA, 19 bp, Homo sapiens
  siRNA target sequence for CNGA1 (NM_000087.1,1764-1782).
cctcatggaagctctaact

SEQ ID NO: 111129 - DNA, 19 bp, Homo sapiens
  siRNA target sequence for CNGA1 (NM_000087.1,1840-1858).
gatggtctactggatctaa

SEQ ID NO: 111130 - DNA, 19 bp, Homo sapiens
  siRNA target sequence for CNGA1 (NM_000087.1,1843-1861).
ggtctactggatctaaaca

SEQ ID NO: 111131 - DNA, 19 bp, Homo sapiens
  siRNA target sequence for CNGA1 (NM_000087.1,1849-1867).
ctggatctaaacattgcaa

SEQ ID NO: 111132 - DNA, 19 bp, Homo sapiens
  siRNA target sequence for CNGA1 (NM_000087.1,1851-1869).
ggatctaaacattgcaaat

SEQ ID NO: 111133 - DNA, 19 bp, Homo sapiens
  siRNA target sequence for CNGA1 (NM_000087.1,1940-1958).
ccaggtttgcccgaatctt

SEQ ID NO: 111134 - DNA, 19 bp, Homo sapiens
  siRNA target sequence for CNGA1 (NM_000087.1,2020-2038).
ctgaaaccgcttattgaca

SEQ ID NO: 111135 - DNA, 19 bp, Homo sapiens
  siRNA target sequence for CNGA1 (NM_000087.1,2026-2044).
ccgcttattgacacagaat

SEQ ID NO: 111136 - DNA, 19 bp, Homo sapiens
  siRNA target sequence for CNGA1 (NM_000087.1,2028-2046).
gcttattgacacagaattt

SEQ ID NO: 111137 - DNA, 19 bp, Homo sapiens
  siRNA target sequence for CNGA1 (NM_000087.1,2077-2095).
gggcccatcgactctacat

SEQ ID NO: 111138 - DNA, 19 bp, Homo sapiens
  siRNA target sequence for PDE10A (NM_006661.1,263-281).
gagaggaaatcccaacatt

SEQ ID NO: 111139 - DNA, 19 bp, Homo sapiens
  siRNA target sequence for PDE10A (NM_006661.1,329-347).
ccccaggtattagatgaat

SEQ ID NO: 111140 - DNA, 19 bp, Homo sapiens
  siRNA target sequence for PDE10A (NM_006661.1,441-459).
gcaggtaccaagatacgaa

SEQ ID NO: 111141 - DNA, 19 bp, Homo sapiens
  siRNA target sequence for PDE10A (NM_006661.1,442-460).
caggtaccaagatacgaat

SEQ ID NO: 111142 - DNA, 19 bp, Homo sapiens
  siRNA target sequence for PDE10A (NM_006661.1,444-462).
ggtaccaagatacgaatat

SEQ ID NO: 111143 - DNA, 19 bp, Homo sapiens
  siRNA target sequence for PDE10A (NM_006661.1,457-475).
gaatatgcagggagttgta

SEQ ID NO: 111144 - DNA, 19 bp, Homo sapiens
  siRNA target sequence for PDE10A (NM_006661.1,466-484).
gggagttgtatatgaacta

SEQ ID NO: 111145 - DNA, 19 bp, Homo sapiens
  siRNA target sequence for PDE10A (NM_006661.1,542-560).
gaactgagcagcatcatta

SEQ ID NO: 111146 - DNA, 19 bp, Homo sapiens
  siRNA target sequence for PDE10A (NM_006661.1,567-585).
ccacaaaagccgatggatt

SEQ ID NO: 111147 - DNA, 19 bp, Homo sapiens
  siRNA target sequence for PDE10A (NM_006661.1,577-595).
cgatggatttgcactgtat

SEQ ID NO: 111148 - DNA, 19 bp, Homo sapiens
  siRNA target sequence for PDE10A (NM_006661.1,582-600).
gatttgcactgtatttcct

SEQ ID NO: 111149 - DNA, 19 bp, Homo sapiens
  siRNA target sequence for PDE10A (NM_006661.1,599-617).
cttggagagtgcaataata

SEQ ID NO: 111150 - DNA, 19 bp, Homo sapiens
  siRNA target sequence for PDE10A (NM_006661.1,609-627).
gcaataatagcctgtgtat

SEQ ID NO: 111151 - DNA, 19 bp, Homo sapiens
  siRNA target sequence for PDE10A (NM_006661.1,610-628).
caataatagcctgtgtata

SEQ ID NO: 111152 - DNA, 19 bp, Homo sapiens
  siRNA target sequence for PDE10A (NM_006661.1,633-651).
cgccacctgggataaagga

SEQ ID NO: 111153 - DNA, 19 bp, Homo sapiens
  siRNA target sequence for PDE10A (NM_006661.1,715-733).
ggccaagtccaggaaaaca

SEQ ID NO: 111154 - DNA, 19 bp, Homo sapiens
  siRNA target sequence for PDE10A (NM_006661.1,751-769).
ccttggagatgaacgattt

SEQ ID NO: 111155 - DNA, 19 bp, Homo sapiens
  siRNA target sequence for PDE10A (NM_006661.1,755-773).
ggagatgaacgatttccaa

SEQ ID NO: 111156 - DNA, 19 bp, Homo sapiens
  siRNA target sequence for PDE10A (NM_006661.1,805-823).
ccagtctgttctttgctta

SEQ ID NO: 111157 - DNA, 19 bp, Homo sapiens
  siRNA target sequence for PDE10A (NM_006661.1,834-852).
ctgcaattggtgacttgat

SEQ ID NO: 111158 - DNA, 19 bp, Homo sapiens
  siRNA target sequence for PDE10A (NM_006661.1,913-931).
ggttgcaacagcaaatctt

SEQ ID NO: 111159 - DNA, 19 bp, Homo sapiens
  siRNA target sequence for PDE10A (NM_006661.1,933-951).
cctgggcttcagtagcaat

SEQ ID NO: 111160 - DNA, 19 bp, Homo sapiens
  siRNA target sequence for PDE10A (NM_006661.1,934-952).
ctgggcttcagtagcaata

SEQ ID NO: 111161 - DNA, 19 bp, Homo sapiens
  siRNA target sequence for PDE10A (NM_006661.1,936-954).
gggcttcagtagcaataca

SEQ ID NO: 111162 - DNA, 19 bp, Homo sapiens
  siRNA target sequence for PDE10A (NM_006661.1,937-955).
ggcttcagtagcaatacat

SEQ ID NO: 111163 - DNA, 19 bp, Homo sapiens
  siRNA target sequence for PDE10A (NM_006661.1,939-957).
cttcagtagcaatacatca

SEQ ID NO: 111164 - DNA, 19 bp, Homo sapiens
  siRNA target sequence for PDE10A (NM_006661.1,1006-1024).
cctactcgacgtatcaaaa

SEQ ID NO: 111165 - DNA, 19 bp, Homo sapiens
  siRNA target sequence for PDE10A (NM_006661.1,1007-1025).
ctactcgacgtatcaaaaa

SEQ ID NO: 111166 - DNA, 19 bp, Homo sapiens
  siRNA target sequence for PDE10A (NM_006661.1,1010-1028).
ctcgacgtatcaaaaacat

SEQ ID NO: 111167 - DNA, 19 bp, Homo sapiens
  siRNA target sequence for PDE10A (NM_006661.1,1012-1030).
cgacgtatcaaaaacatat

SEQ ID NO: 111168 - DNA, 19 bp, Homo sapiens
  siRNA target sequence for PDE10A (NM_006661.1,1015-1033).
cgtatcaaaaacatatttt

SEQ ID NO: 111169 - DNA, 19 bp, Homo sapiens
  siRNA target sequence for PDE10A (NM_006661.1,1058-1076).
ctacttgaacacataatga

SEQ ID NO: 111170 - DNA, 19 bp, Homo sapiens
  siRNA target sequence for PDE10A (NM_006661.1,1130-1148).
cataagaacaaggagttat

SEQ ID NO: 111171 - DNA, 19 bp, Homo sapiens
  siRNA target sequence for PDE10A (NM_006661.1,1185-1203).
gaaaacctgtcttcaagaa

SEQ ID NO: 111172 - DNA, 19 bp, Homo sapiens
  siRNA target sequence for PDE10A (NM_006661.1,1204-1222).
gaccaaagagataagattt

SEQ ID NO: 111173 - DNA, 19 bp, Homo sapiens
  siRNA target sequence for PDE10A (NM_006661.1,1260-1278).
caggggaagtcctgaacat

SEQ ID NO: 111174 - DNA, 19 bp, Homo sapiens
  siRNA target sequence for PDE10A (NM_006661.1,1292-1310).
gcagacccacgctttaaca

SEQ ID NO: 111175 - DNA, 19 bp, Homo sapiens
  siRNA target sequence for PDE10A (NM_006661.1,1420-1438).
cagtgccttctctaaaaca

SEQ ID NO: 111176 - DNA, 19 bp, Homo sapiens
  siRNA target sequence for PDE10A (NM_006661.1,1481-1499).
gccttacactgtgctaata

SEQ ID NO: 111177 - DNA, 19 bp, Homo sapiens
  siRNA target sequence for PDE10A (NM_006661.1,1482-1500).
ccttacactgtgctaatat

SEQ ID NO: 111178 - DNA, 19 bp, Homo sapiens
  siRNA target sequence for PDE10A (NM_006661.1,1514-1532).
cgccactcagagtgcattt

SEQ ID NO: 111179 - DNA, 19 bp, Homo sapiens
  siRNA target sequence for PDE10A (NM_006661.1,1515-1533).
gccactcagagtgcattta

SEQ ID NO: 111180 - DNA, 19 bp, Homo sapiens
  siRNA target sequence for PDE10A (NM_006661.1,1527-1545).
gcatttaccgggtaacgat

SEQ ID NO: 111181 - DNA, 19 bp, Homo sapiens
  siRNA target sequence for PDE10A (NM_006661.1,1587-1605).
ggcaaggtctcatgcaatt

SEQ ID NO: 111182 - DNA, 19 bp, Homo sapiens
  siRNA target sequence for PDE10A (NM_006661.1,1615-1633).
cgtgcgtctctgcaaagaa

SEQ ID NO: 111183 - DNA, 19 bp, Homo sapiens
  siRNA target sequence for PDE10A (NM_006661.1,1618-1636).
gcgtctctgcaaagaaatt

SEQ ID NO: 111184 - DNA, 19 bp, Homo sapiens
  siRNA target sequence for PDE10A (NM_006661.1,1677-1695).
ggcctggaatttttgtcta

SEQ ID NO: 111185 - DNA, 19 bp, Homo sapiens
  siRNA target sequence for PDE10A (NM_006661.1,1725-1743).
gctttgagcttgaaaagtt

SEQ ID NO: 111186 - DNA, 19 bp, Homo sapiens
  siRNA target sequence for PDE10A (NM_006661.1,1736-1754).
gaaaagttgtgtcgtttta

SEQ ID NO: 111187 - DNA, 19 bp, Homo sapiens
  siRNA target sequence for PDE10A (NM_006661.1,1744-1762).
gtgtcgttttattatgtct

SEQ ID NO: 111188 - DNA, 19 bp, Homo sapiens
  siRNA target sequence for PDE10A (NM_006661.1,1759-1777).
gtctgtgaagaagaactat

SEQ ID NO: 111189 - DNA, 19 bp, Homo sapiens
  siRNA target sequence for PDE10A (NM_006661.1,1825-1843).
ctgcatgtatgccatactt

SEQ ID NO: 111190 - DNA, 19 bp, Homo sapiens
  siRNA target sequence for PDE10A (NM_006661.1,1849-1867).
caatcacacgcttttcaca

SEQ ID NO: 111191 - DNA, 19 bp, Homo sapiens
  siRNA target sequence for PDE10A (NM_006661.1,2095-2113).
catccgcaaagccatcatt

SEQ ID NO: 111192 - DNA, 19 bp, Homo sapiens
  siRNA target sequence for PDE10A (NM_006661.1,2114-2132).
gccacagaccttgctttat

SEQ ID NO: 111193 - DNA, 19 bp, Homo sapiens
  siRNA target sequence for PDE10A (NM_006661.1,2164-2182).
gtaccagaccggatcacta

SEQ ID NO: 111194 - DNA, 19 bp, Homo sapiens
  siRNA target sequence for PDE10A (NM_006661.1,2170-2188).
gaccggatcactaaacctt

SEQ ID NO: 111195 - DNA, 19 bp, Homo sapiens
  siRNA target sequence for PDE10A (NM_006661.1,2172-2190).
ccggatcactaaaccttaa

SEQ ID NO: 111196 - DNA, 19 bp, Homo sapiens
  siRNA target sequence for PDE10A (NM_006661.1,2173-2191).
cggatcactaaaccttaat

SEQ ID NO: 111197 - DNA, 19 bp, Homo sapiens
  siRNA target sequence for PDE10A (NM_006661.1,2174-2192).
ggatcactaaaccttaata

SEQ ID NO: 111198 - DNA, 19 bp, Homo sapiens
  siRNA target sequence for PDE10A (NM_006661.1,2199-2217).
cacatagagaccgtgtaat

SEQ ID NO: 111199 - DNA, 19 bp, Homo sapiens
  siRNA target sequence for PDE10A (NM_006661.1,2261-2279).
ctgtggcccgttacaaaat

SEQ ID NO: 111200 - DNA, 19 bp, Homo sapiens
  siRNA target sequence for PDE10A (NM_006661.1,2274-2292).
caaaattgacggcaaatga

SEQ ID NO: 111201 - DNA, 19 bp, Homo sapiens
  siRNA target sequence for PDE10A (NM_006661.1,2281-2299).
gacggcaaatgatatatat

SEQ ID NO: 111202 - DNA, 19 bp, Homo sapiens
  siRNA target sequence for PDE10A (NM_006661.1,2284-2302).
ggcaaatgatatatatgca

SEQ ID NO: 111203 - DNA, 19 bp, Homo sapiens
  siRNA target sequence for PDE10A (NM_006661.1,2310-2328).
gggctgagggtgatgaaat

SEQ ID NO: 111204 - DNA, 19 bp, Homo sapiens
  siRNA target sequence for PDE10A (NM_006661.1,2338-2356).
gggaatacagcctattcct

SEQ ID NO: 111205 - DNA, 19 bp, Homo sapiens
  siRNA target sequence for PDE10A (NM_006661.1,2339-2357).
ggaatacagcctattccta

SEQ ID NO: 111206 - DNA, 19 bp, Homo sapiens
  siRNA target sequence for PDE10A (NM_006661.1,2340-2358).
gaatacagcctattcctat

SEQ ID NO: 111207 - DNA, 19 bp, Homo sapiens
  siRNA target sequence for PDE10A (NM_006661.1,2417-2435).
gtggccattccctgctata

SEQ ID NO: 111208 - DNA, 19 bp, Homo sapiens
  siRNA target sequence for PDE10A (NM_006661.1,2480-2498).
gcatgcagggataatctca

SEQ ID NO: 111209 - DNA, 19 bp, Homo sapiens
  siRNA target sequence for PDE5A (NM_001083.2,261-279).
gatcactgggactttacct

SEQ ID NO: 111210 - DNA, 19 bp, Homo sapiens
  siRNA target sequence for PDE5A (NM_001083.2,268-286).
gggactttaccttctcata

SEQ ID NO: 111211 - DNA, 19 bp, Homo sapiens
  siRNA target sequence for PDE5A (NM_001083.2,270-288).
gactttaccttctcatact

SEQ ID NO: 111212 - DNA, 19 bp, Homo sapiens
  siRNA target sequence for PDE5A (NM_001083.2,356-374).
gtgcaaggaaggtatcaga

SEQ ID NO: 111213 - DNA, 19 bp, Homo sapiens
  siRNA target sequence for PDE5A (NM_001083.2,565-583).
cccctccaaggtttgatca

SEQ ID NO: 111214 - DNA, 19 bp, Homo sapiens
  siRNA target sequence for PDE5A (NM_001083.2,566-584).
ccctccaaggtttgatcat

SEQ ID NO: 111215 - DNA, 19 bp, Homo sapiens
  siRNA target sequence for PDE5A (NM_001083.2,601-619).
gctcaagactcttggaatt

SEQ ID NO: 111216 - DNA, 19 bp, Homo sapiens
  siRNA target sequence for PDE5A (NM_001083.2,607-625).
gactcttggaattagtgaa

SEQ ID NO: 111217 - DNA, 19 bp, Homo sapiens
  siRNA target sequence for PDE5A (NM_001083.2,644-662).
ggatgtcacagccttatgt

SEQ ID NO: 111218 - DNA, 19 bp, Homo sapiens
  siRNA target sequence for PDE5A (NM_001083.2,650-668).
cacagccttatgtcacaaa

SEQ ID NO: 111219 - DNA, 19 bp, Homo sapiens
  siRNA target sequence for PDE5A (NM_001083.2,663-681).
cacaaaattttcttgcata

SEQ ID NO: 111220 - DNA, 19 bp, Homo sapiens
  siRNA target sequence for PDE5A (NM_001083.2,677-695).
gcatatccatggactgata

SEQ ID NO: 111221 - DNA, 19 bp, Homo sapiens
  siRNA target sequence for PDE5A (NM_001083.2,739-757).
ccaatgacaagtttcttat

SEQ ID NO: 111222 - DNA, 19 bp, Homo sapiens
  siRNA target sequence for PDE5A (NM_001083.2,814-832).
gtatccgcttagaatggaa

SEQ ID NO: 111223 - DNA, 19 bp, Homo sapiens
  siRNA target sequence for PDE5A (NM_001083.2,818-836).
ccgcttagaatggaacaaa

SEQ ID NO: 111224 - DNA, 19 bp, Homo sapiens
  siRNA target sequence for PDE5A (NM_001083.2,864-882).
ggtgagcccttgaacatca

SEQ ID NO: 111225 - DNA, 19 bp, Homo sapiens
  siRNA target sequence for PDE5A (NM_001083.2,865-883).
gtgagcccttgaacatcaa

SEQ ID NO: 111226 - DNA, 19 bp, Homo sapiens
  siRNA target sequence for PDE5A (NM_001083.2,935-953).
ctacaagacacaaagcatt

SEQ ID NO: 111227 - DNA, 19 bp, Homo sapiens
  siRNA target sequence for PDE5A (NM_001083.2,941-959).
gacacaaagcattctttgt

SEQ ID NO: 111228 - DNA, 19 bp, Homo sapiens
  siRNA target sequence for PDE5A (NM_001083.2,954-972).
ctttgtatgccaattaaga

SEQ ID NO: 111229 - DNA, 19 bp, Homo sapiens
  siRNA target sequence for PDE5A (NM_001083.2,1004-1022).
ggccatcaacaagaaatca

SEQ ID NO: 111230 - DNA, 19 bp, Homo sapiens
  siRNA target sequence for PDE5A (NM_001083.2,1023-1041).
ggaaacggtgggacattta

SEQ ID NO: 111231 - DNA, 19 bp, Homo sapiens
  siRNA target sequence for PDE5A (NM_001083.2,1028-1046).
cggtgggacatttactgaa

SEQ ID NO: 111232 - DNA, 19 bp, Homo sapiens
  siRNA target sequence for PDE5A (NM_001083.2,1029-1047).
ggtgggacatttactgaaa

SEQ ID NO: 111233 - DNA, 19 bp, Homo sapiens
  siRNA target sequence for PDE5A (NM_001083.2,1154-1172).
gcttgaccttgctagttta

SEQ ID NO: 111234 - DNA, 19 bp, Homo sapiens
  siRNA target sequence for PDE5A (NM_001083.2,1185-1203).
caacaatcattagaagtaa

SEQ ID NO: 111235 - DNA, 19 bp, Homo sapiens
  siRNA target sequence for PDE5A (NM_001083.2,1221-1239).
gccactattatctctttca

SEQ ID NO: 111236 - DNA, 19 bp, Homo sapiens
  siRNA target sequence for PDE5A (NM_001083.2,1275-1293).
gaagattgctccgattctt

SEQ ID NO: 111237 - DNA, 19 bp, Homo sapiens
  siRNA target sequence for PDE5A (NM_001083.2,1283-1301).
ctccgattctttttctagt

SEQ ID NO: 111238 - DNA, 19 bp, Homo sapiens
  siRNA target sequence for PDE5A (NM_001083.2,1385-1403).
gtatgctcagtatgtcaaa

SEQ ID NO: 111239 - DNA, 19 bp, Homo sapiens
  siRNA target sequence for PDE5A (NM_001083.2,1408-1426).
ctatggaaccacttaatat

SEQ ID NO: 111240 - DNA, 19 bp, Homo sapiens
  siRNA target sequence for PDE5A (NM_001083.2,1428-1446).
ccagatgtcagtaaggata

SEQ ID NO: 111241 - DNA, 19 bp, Homo sapiens
  siRNA target sequence for PDE5A (NM_001083.2,1429-1447).
cagatgtcagtaaggataa

SEQ ID NO: 111242 - DNA, 19 bp, Homo sapiens
  siRNA target sequence for PDE5A (NM_001083.2,1434-1452).
gtcagtaaggataaaagat

SEQ ID NO: 111243 - DNA, 19 bp, Homo sapiens
  siRNA target sequence for PDE5A (NM_001083.2,1482-1500).
gtaaaccagcagtgcatta

SEQ ID NO: 111244 - DNA, 19 bp, Homo sapiens
  siRNA target sequence for PDE5A (NM_001083.2,1552-1570).
gggtttgccaacttgttaa

SEQ ID NO: 111245 - DNA, 19 bp, Homo sapiens
  siRNA target sequence for PDE5A (NM_001083.2,1558-1576).
gccaacttgttaataagat

SEQ ID NO: 111246 - DNA, 19 bp, Homo sapiens
  siRNA target sequence for PDE5A (NM_001083.2,1591-1609).
gcaaggttaagcctttcaa

SEQ ID NO: 111247 - DNA, 19 bp, Homo sapiens
  siRNA target sequence for PDE5A (NM_001083.2,1610-1628).
ccgaaatgacgaacagttt

SEQ ID NO: 111248 - DNA, 19 bp, Homo sapiens
  siRNA target sequence for PDE5A (NM_001083.2,1664-1682).
ccagaacacgcagatgtat

SEQ ID NO: 111249 - DNA, 19 bp, Homo sapiens
  siRNA target sequence for PDE5A (NM_001083.2,1667-1685).
gaacacgcagatgtatgaa

SEQ ID NO: 111250 - DNA, 19 bp, Homo sapiens
  siRNA target sequence for PDE5A (NM_001083.2,1804-1822).
ctgcccagacccttaaaat

SEQ ID NO: 111251 - DNA, 19 bp, Homo sapiens
  siRNA target sequence for PDE5A (NM_001083.2,1863-1881).
gaaacagcactgtgtacaa

SEQ ID NO: 111252 - DNA, 19 bp, Homo sapiens
  siRNA target sequence for PDE5A (NM_001083.2,1967-1985).
gaattatcggaagaatgtt

SEQ ID NO: 111253 - DNA, 19 bp, Homo sapiens
  siRNA target sequence for PDE5A (NM_001083.2,1983-2001).
gttgcctatcataattgga

SEQ ID NO: 111254 - DNA, 19 bp, Homo sapiens
  siRNA target sequence for PDE5A (NM_001083.2,2000-2018).
gagacatgcctttaataca

SEQ ID NO: 111255 - DNA, 19 bp, Homo sapiens
  siRNA target sequence for PDE5A (NM_001083.2,2120-2138).
ggatcaccgtggtgtgaat

SEQ ID NO: 111256 - DNA, 19 bp, Homo sapiens
  siRNA target sequence for PDE5A (NM_001083.2,2121-2139).
gatcaccgtggtgtgaata

SEQ ID NO: 111257 - DNA, 19 bp, Homo sapiens
  siRNA target sequence for PDE5A (NM_001083.2,2124-2142).
caccgtggtgtgaataact

SEQ ID NO: 111258 - DNA, 19 bp, Homo sapiens
  siRNA target sequence for PDE5A (NM_001083.2,2130-2148).
ggtgtgaataactcttaca

SEQ ID NO: 111259 - DNA, 19 bp, Homo sapiens
  siRNA target sequence for PDE5A (NM_001083.2,2131-2149).
gtgtgaataactcttacat

SEQ ID NO: 111260 - DNA, 19 bp, Homo sapiens
  siRNA target sequence for PDE5A (NM_001083.2,2147-2165).
catacagcgaagtgaacat

SEQ ID NO: 111261 - DNA, 19 bp, Homo sapiens
  siRNA target sequence for PDE5A (NM_001083.2,2175-2193).
cagctttactgccattcaa

SEQ ID NO: 111262 - DNA, 19 bp, Homo sapiens
  siRNA target sequence for PDE5A (NM_001083.2,2178-2196).
ctttactgccattcaatca

SEQ ID NO: 111263 - DNA, 19 bp, Homo sapiens
  siRNA target sequence for PDE5A (NM_001083.2,2195-2213).
catggaacaccatcatttt

SEQ ID NO: 111264 - DNA, 19 bp, Homo sapiens
  siRNA target sequence for PDE5A (NM_001083.2,2219-2237).
gtgcctgatgattcttaat

SEQ ID NO: 111265 - DNA, 19 bp, Homo sapiens
  siRNA target sequence for PDE5A (NM_001083.2,2241-2259).
ccaggcaatcagattctca

SEQ ID NO: 111266 - DNA, 19 bp, Homo sapiens
  siRNA target sequence for PDE5A (NM_001083.2,2323-2341).
cagacctagcactgtacat

SEQ ID NO: 111267 - DNA, 19 bp, Homo sapiens
  siRNA target sequence for PDE5A (NM_001083.2,2325-2343).
gacctagcactgtacatta

SEQ ID NO: 111268 - DNA, 19 bp, Homo sapiens
  siRNA target sequence for PDE5A (NM_001083.2,2328-2346).
ctagcactgtacattaaga

SEQ ID NO: 111269 - DNA, 19 bp, Homo sapiens
  siRNA target sequence for PDE5A (NM_001083.2,2345-2363).
gaggcgaggagaatttttt

SEQ ID NO: 111270 - DNA, 19 bp, Homo sapiens
  siRNA target sequence for PDE5A (NM_001083.2,2429-2447).
gctgatgacagcttgtgat

SEQ ID NO: 111271 - DNA, 19 bp, Homo sapiens
  siRNA target sequence for PDE5A (NM_001083.2,2432-2450).
gatgacagcttgtgatctt

SEQ ID NO: 111272 - DNA, 19 bp, Homo sapiens
  siRNA target sequence for PDE5A (NM_001083.2,2461-2479).
caaaaccctggcctattca

SEQ ID NO: 111273 - DNA, 19 bp, Homo sapiens
  siRNA target sequence for PDE5A (NM_001083.2,2493-2511).
gaacttgtagcaactgaat

SEQ ID NO: 111274 - DNA, 19 bp, Homo sapiens
  siRNA target sequence for PDE5A (NM_001083.2,2549-2567).
catagaacccactgatcta

SEQ ID NO: 111275 - DNA, 19 bp, Homo sapiens
  siRNA target sequence for PDE5A (NM_001083.2,2553-2571).
gaacccactgatctaatga

SEQ ID NO: 111276 - DNA, 19 bp, Homo sapiens
  siRNA target sequence for PDE5A (NM_001083.2,2556-2574).
cccactgatctaatgaaca

SEQ ID NO: 111277 - DNA, 19 bp, Homo sapiens
  siRNA target sequence for PDE5A (NM_001083.2,2603-2621).
gcaagttgggttcatagat

SEQ ID NO: 111278 - DNA, 19 bp, Homo sapiens
  siRNA target sequence for PDE5A (NM_001083.2,2624-2642).
catctgcttgcaactgtat

SEQ ID NO: 111279 - DNA, 19 bp, Homo sapiens
  siRNA target sequence for PDE5A (NM_001083.2,2666-2684).
ggactgtttccctttgcta

SEQ ID NO: 111280 - DNA, 19 bp, Homo sapiens
  siRNA target sequence for C5orf3 (NM_018691.1,613-631).
gactccactgctaactgaa

SEQ ID NO: 111281 - DNA, 19 bp, Homo sapiens
  siRNA target sequence for C5orf3 (NM_018691.1,696-714).
gtgccaaaccagagagtaa

SEQ ID NO: 111282 - DNA, 19 bp, Homo sapiens
  siRNA target sequence for C5orf3 (NM_018691.1,698-716).
gccaaaccagagagtaaat

SEQ ID NO: 111283 - DNA, 19 bp, Homo sapiens
  siRNA target sequence for C5orf3 (NM_018691.1,930-948).
cagagacttcccttggaat

SEQ ID NO: 111284 - DNA, 19 bp, Homo sapiens
  siRNA target sequence for C5orf3 (NM_018691.1,1037-1055).
ggggcatttggtgtattct

SEQ ID NO: 111285 - DNA, 19 bp, Homo sapiens
  siRNA target sequence for C5orf3 (NM_018691.1,1049-1067).
gtattctctaccatctcta

SEQ ID NO: 111286 - DNA, 19 bp, Homo sapiens
  siRNA target sequence for C5orf3 (NM_018691.1,1162-1180).
ggatcctggatttaaaaga

SEQ ID NO: 111287 - DNA, 19 bp, Homo sapiens
  siRNA target sequence for C5orf3 (NM_018691.1,1190-1208).
ctgatgaaccgaaatgcta

SEQ ID NO: 111288 - DNA, 19 bp, Homo sapiens
  siRNA target sequence for C5orf3 (NM_018691.1,1198-1216).
ccgaaatgctacactatct

SEQ ID NO: 111289 - DNA, 19 bp, Homo sapiens
  siRNA target sequence for C5orf3 (NM_018691.1,1200-1218).
gaaatgctacactatctca

SEQ ID NO: 111290 - DNA, 19 bp, Homo sapiens
  siRNA target sequence for C5orf3 (NM_018691.1,1293-1311).
ctcattatgggctactctt

SEQ ID NO: 111291 - DNA, 19 bp, Homo sapiens
  siRNA target sequence for C5orf3 (NM_018691.1,1351-1369).
gatgctttcccaagaaagt

SEQ ID NO: 111292 - DNA, 19 bp, Homo sapiens
  siRNA target sequence for C5orf3 (NM_018691.1,1378-1396).
ggtgaaatctatccttaat

SEQ ID NO: 111293 - DNA, 19 bp, Homo sapiens
  siRNA target sequence for C5orf3 (NM_018691.1,1379-1397).
gtgaaatctatccttaatt

SEQ ID NO: 111294 - DNA, 19 bp, Homo sapiens
  siRNA target sequence for C5orf3 (NM_018691.1,1422-1440).
ctctaaaagttgaattaga

SEQ ID NO: 111295 - DNA, 19 bp, Homo sapiens
  siRNA target sequence for C5orf3 (NM_018691.1,1574-1592).
cttgccagggcaagaaata

SEQ ID NO: 111296 - DNA, 19 bp, Homo sapiens
  siRNA target sequence for C5orf3 (NM_018691.1,1660-1678).
gtcggaagcagaaaatact

SEQ ID NO: 111297 - DNA, 19 bp, Homo sapiens
  siRNA target sequence for C5orf3 (NM_018691.1,1746-1764).
ctgcctgctcaattgaact

SEQ ID NO: 111298 - DNA, 19 bp, Homo sapiens
  siRNA target sequence for C5orf3 (NM_018691.1,1748-1766).
gcctgctcaattgaactat

SEQ ID NO: 111299 - DNA, 19 bp, Homo sapiens
  siRNA target sequence for C5orf3 (NM_018691.1,1771-1789).
caaaacagctgcattggtt

SEQ ID NO: 111300 - DNA, 19 bp, Homo sapiens
  siRNA target sequence for C5orf3 (NM_018691.1,1836-1854).
ctctttcccagatgacaat

SEQ ID NO: 111301 - DNA, 19 bp, Homo sapiens
  siRNA target sequence for C5orf3 (NM_018691.1,1911-1929).
ctgctggggtcaaagaaat

SEQ ID NO: 111302 - DNA, 19 bp, Homo sapiens
  siRNA target sequence for C5orf3 (NM_018691.1,1937-1955).
gtccttaacccattaatca

SEQ ID NO: 111303 - DNA, 19 bp, Homo sapiens
  siRNA target sequence for C5orf3 (NM_018691.1,1939-1957).
ccttaacccattaatcact

SEQ ID NO: 111304 - DNA, 19 bp, Homo sapiens
  siRNA target sequence for C5orf3 (NM_018691.1,2026-2044).
gctagagatctctctcatt

SEQ ID NO: 111305 - DNA, 19 bp, Homo sapiens
  siRNA target sequence for C5orf3 (NM_018691.1,2080-2098).
gggccagaaacctttgtta

SEQ ID NO: 111306 - DNA, 19 bp, Homo sapiens
  siRNA target sequence for C5orf3 (NM_018691.1,2082-2100).
gccagaaacctttgttaga

SEQ ID NO: 111307 - DNA, 19 bp, Homo sapiens
  siRNA target sequence for LOC56851 (NM_020154.1,230-248).
gagcacgtcggtttcctta

SEQ ID NO: 111308 - DNA, 19 bp, Homo sapiens
  siRNA target sequence for LOC56851 (NM_020154.1,233-251).
cacgtcggtttccttaaga

SEQ ID NO: 111309 - DNA, 19 bp, Homo sapiens
  siRNA target sequence for LOC56851 (NM_020154.1,235-253).
cgtcggtttccttaagaca

SEQ ID NO: 111310 - DNA, 19 bp, Homo sapiens
  siRNA target sequence for LOC56851 (NM_020154.1,258-276).
ggagttttgtggttcatga

SEQ ID NO: 111311 - DNA, 19 bp, Homo sapiens
  siRNA target sequence for LOC56851 (NM_020154.1,282-300).
cttctggatcttatgtagt

SEQ ID NO: 111312 - DNA, 19 bp, Homo sapiens
  siRNA target sequence for LOC56851 (NM_020154.1,291-309).
cttatgtagtggaagttgt

SEQ ID NO: 111313 - DNA, 19 bp, Homo sapiens
  siRNA target sequence for LOC56851 (NM_020154.1,332-350).
cccgttcgagtggatatca

SEQ ID NO: 111314 - DNA, 19 bp, Homo sapiens
  siRNA target sequence for LOC56851 (NM_020154.1,334-352).
cgttcgagtggatatcact

SEQ ID NO: 111315 - DNA, 19 bp, Homo sapiens
  siRNA target sequence for LOC56851 (NM_020154.1,344-362).
gatatcacttcgaaaggaa

SEQ ID NO: 111316 - DNA, 19 bp, Homo sapiens
  siRNA target sequence for LOC56851 (NM_020154.1,367-385).
gagagcaagatatgtgaat

SEQ ID NO: 111317 - DNA, 19 bp, Homo sapiens
  siRNA target sequence for LOC56851 (NM_020154.1,369-387).
gagcaagatatgtgaatta

SEQ ID NO: 111318 - DNA, 19 bp, Homo sapiens
  siRNA target sequence for LOC56851 (NM_020154.1,441-459).
caggtccaccttcttactt

SEQ ID NO: 111319 - DNA, 19 bp, Homo sapiens
  siRNA target sequence for LOC56851 (NM_020154.1,475-493).
gtggggctggacagacttt

SEQ ID NO: 111320 - DNA, 19 bp, Homo sapiens
  siRNA target sequence for LOC56851 (NM_020154.1,494-512).
ctaatgaacccaatggtta

SEQ ID NO: 111321 - DNA, 19 bp, Homo sapiens
  siRNA target sequence for LOC56851 (NM_020154.1,520-538).
ggttcttcctttattgata

SEQ ID NO: 111322 - DNA, 19 bp, Homo sapiens
  siRNA target sequence for LOC56851 (NM_020154.1,521-539).
gttcttcctttattgatat

SEQ ID NO: 111323 - DNA, 19 bp, Homo sapiens
  siRNA target sequence for LOC56851 (NM_020154.1,551-569).
cctaaagtggtcaacacaa

SEQ ID NO: 111324 - DNA, 19 bp, Homo sapiens
  siRNA target sequence for LOC56851 (NM_020154.1,625-643).
ccatgagttgcctgatgtt

SEQ ID NO: 111325 - DNA, 19 bp, Homo sapiens
  siRNA target sequence for LOC56851 (NM_020154.1,626-644).
catgagttgcctgatgttt

SEQ ID NO: 111326 - DNA, 19 bp, Homo sapiens
  siRNA target sequence for LOC56851 (NM_020154.1,641-659).
gtttctgagttcatgacaa

SEQ ID NO: 111327 - DNA, 19 bp, Homo sapiens
  siRNA target sequence for BIRC1 (NM_004536.1,330-348).
gaggatctcccagtttgat

SEQ ID NO: 111328 - DNA, 19 bp, Homo sapiens
  siRNA target sequence for BIRC1 (NM_004536.1,336-354).
ctcccagtttgatcacaat

SEQ ID NO: 111329 - DNA, 19 bp, Homo sapiens
  siRNA target sequence for BIRC1 (NM_004536.1,338-356).
cccagtttgatcacaattt

SEQ ID NO: 111330 - DNA, 19 bp, Homo sapiens
  siRNA target sequence for BIRC1 (NM_004536.1,383-401).
gcctagatgcagttcagtt

SEQ ID NO: 111331 - DNA, 19 bp, Homo sapiens
  siRNA target sequence for BIRC1 (NM_004536.1,472-490).
cgcagtgaagcaaaaaggt

SEQ ID NO: 111332 - DNA, 19 bp, Homo sapiens
  siRNA target sequence for BIRC1 (NM_004536.1,513-531).
gccgtacagctcatggata

SEQ ID NO: 111333 - DNA, 19 bp, Homo sapiens
  siRNA target sequence for BIRC1 (NM_004536.1,571-589).
gtaaaatctgggattcagt

SEQ ID NO: 111334 - DNA, 19 bp, Homo sapiens
  siRNA target sequence for BIRC1 (NM_004536.1,627-645).
cacgagactccccatagaa

SEQ ID NO: 111335 - DNA, 19 bp, Homo sapiens
  siRNA target sequence for BIRC1 (NM_004536.1,629-647).
cgagactccccatagaaga

SEQ ID NO: 111336 - DNA, 19 bp, Homo sapiens
  siRNA target sequence for BIRC1 (NM_004536.1,654-672).
gaggtttcatccagattgt

SEQ ID NO: 111337 - DNA, 19 bp, Homo sapiens
  siRNA target sequence for BIRC1 (NM_004536.1,714-732).
cgacataagggtgaagaat

SEQ ID NO: 111338 - DNA, 19 bp, Homo sapiens
  siRNA target sequence for BIRC1 (NM_004536.1,798-816).
caggaactggccattttat

SEQ ID NO: 111339 - DNA, 19 bp, Homo sapiens
  siRNA target sequence for BIRC1 (NM_004536.1,800-818).
ggaactggccattttatgt

SEQ ID NO: 111340 - DNA, 19 bp, Homo sapiens
  siRNA target sequence for BIRC1 (NM_004536.1,849-867).
ggctggctttgtctttaca

SEQ ID NO: 111341 - DNA, 19 bp, Homo sapiens
  siRNA target sequence for BIRC1 (NM_004536.1,876-894).
ggacacggtacagtgtttt

SEQ ID NO: 111342 - DNA, 19 bp, Homo sapiens
  siRNA target sequence for BIRC1 (NM_004536.1,877-895).
gacacggtacagtgttttt

SEQ ID NO: 111343 - DNA, 19 bp, Homo sapiens
  siRNA target sequence for BIRC1 (NM_004536.1,973-991).
gaatttcttcggagtaaga

SEQ ID NO: 111344 - DNA, 19 bp, Homo sapiens
  siRNA target sequence for BIRC1 (NM_004536.1,1000-1018).
gaggaaattacccagtata

SEQ ID NO: 111345 - DNA, 19 bp, Homo sapiens
  siRNA target sequence for BIRC1 (NM_004536.1,1002-1020).
ggaaattacccagtatatt

SEQ ID NO: 111346 - DNA, 19 bp, Homo sapiens
  siRNA target sequence for BIRC1 (NM_004536.1,1029-1047).
caagggatttgttgacata

SEQ ID NO: 111347 - DNA, 19 bp, Homo sapiens
  siRNA target sequence for BIRC1 (NM_004536.1,1042-1060).
gacataacgggagaacatt

SEQ ID NO: 111348 - DNA, 19 bp, Homo sapiens
  siRNA target sequence for BIRC1 (NM_004536.1,1375-1393).
cagagccgtggtgaacttt

SEQ ID NO: 111349 - DNA, 19 bp, Homo sapiens
  siRNA target sequence for BIRC1 (NM_004536.1,1377-1395).
gagccgtggtgaactttgt

SEQ ID NO: 111350 - DNA, 19 bp, Homo sapiens
  siRNA target sequence for BIRC1 (NM_004536.1,1379-1397).
gccgtggtgaactttgtga

SEQ ID NO: 111351 - DNA, 19 bp, Homo sapiens
  siRNA target sequence for BIRC1 (NM_004536.1,1380-1398).
ccgtggtgaactttgtgaa

SEQ ID NO: 111352 - DNA, 19 bp, Homo sapiens
  siRNA target sequence for BIRC1 (NM_004536.1,1448-1466).
gtcctatagtgccagaaat

SEQ ID NO: 111353 - DNA, 19 bp, Homo sapiens
  siRNA target sequence for DHRS3 (NM_004753.3,151-169).
ccctctacagatgatctat

SEQ ID NO: 111354 - DNA, 19 bp, Homo sapiens
  siRNA target sequence for DHRS3 (NM_004753.3,153-171).
ctctacagatgatctatct

SEQ ID NO: 111355 - DNA, 19 bp, Homo sapiens
  siRNA target sequence for DHRS3 (NM_004753.3,912-930).
caatgcatgccctcgttat

SEQ ID NO: 111356 - DNA, 19 bp, Homo sapiens
  siRNA target sequence for DHRS3 (NM_004753.3,917-935).
catgccctcgttatcttga

SEQ ID NO: 111357 - DNA, 19 bp, Homo sapiens
  siRNA target sequence for DHRS3 (NM_004753.3,964-982).
ggagatccacaaattctca

SEQ ID NO: 111358 - DNA, 19 bp, Homo sapiens
  siRNA target sequence for DHRS3 (NM_004753.3,993-1011).
cctgcatgaacactttcaa

SEQ ID NO: 111359 - DNA, 19 bp, Homo sapiens
  siRNA target sequence for LTB4R (NM_181657.1,1746-1764).
cctcactaggtgtagagtt

SEQ ID NO: 111360 - DNA, 19 bp, Homo sapiens
  siRNA target sequence for LTB4R (NM_181657.1,1749-1767).
cactaggtgtagagttcat

SEQ ID NO: 111361 - DNA, 19 bp, Homo sapiens
  siRNA target sequence for LTB4R (NM_181657.1,1751-1769).
ctaggtgtagagttcatct

SEQ ID NO: 111362 - DNA, 19 bp, Homo sapiens
  siRNA target sequence for LTB4R (NM_181657.1,1988-2006).
cgcctgtgtcactatgtct

SEQ ID NO: 111363 - DNA, 19 bp, Homo sapiens
  siRNA target sequence for LTB4R (NM_181657.1,2189-2207).
gtagtgccctggaaaacga

SEQ ID NO: 111364 - DNA, 19 bp, Homo sapiens
  siRNA target sequence for NOX4 (NM_016931.2,266-284).
cgccaacgaaggggttaaa

SEQ ID NO: 111365 - DNA, 19 bp, Homo sapiens
  siRNA target sequence for NOX4 (NM_016931.2,268-286).
ccaacgaaggggttaaaca

SEQ ID NO: 111366 - DNA, 19 bp, Homo sapiens
  siRNA target sequence for NOX4 (NM_016931.2,337-355).
ccttcttgctgtataacca

SEQ ID NO: 111367 - DNA, 19 bp, Homo sapiens
  siRNA target sequence for NOX4 (NM_016931.2,338-356).
cttcttgctgtataaccaa

SEQ ID NO: 111368 - DNA, 19 bp, Homo sapiens
  siRNA target sequence for NOX4 (NM_016931.2,390-408).
gggctaggattgtgtctaa

SEQ ID NO: 111369 - DNA, 19 bp, Homo sapiens
  siRNA target sequence for NOX4 (NM_016931.2,414-432).
gcctcagcatctgttctta

SEQ ID NO: 111370 - DNA, 19 bp, Homo sapiens
  siRNA target sequence for NOX4 (NM_016931.2,437-455).
caactgcagccttatcctt

SEQ ID NO: 111371 - DNA, 19 bp, Homo sapiens
  siRNA target sequence for NOX4 (NM_016931.2,635-653).
gaattacagtgaagacttt

SEQ ID NO: 111372 - DNA, 19 bp, Homo sapiens
  siRNA target sequence for NOX4 (NM_016931.2,761-779).
gatcacagcctctacatat

SEQ ID NO: 111373 - DNA, 19 bp, Homo sapiens
  siRNA target sequence for NOX4 (NM_016931.2,768-786).
gcctctacatatgcaataa

SEQ ID NO: 111374 - DNA, 19 bp, Homo sapiens
  siRNA target sequence for NOX4 (NM_016931.2,770-788).
ctctacatatgcaataaga

SEQ ID NO: 111375 - DNA, 19 bp, Homo sapiens
  siRNA target sequence for NOX4 (NM_016931.2,772-790).
ctacatatgcaataagagt

SEQ ID NO: 111376 - DNA, 19 bp, Homo sapiens
  siRNA target sequence for NOX4 (NM_016931.2,781-799).
caataagagtttctaacta

SEQ ID NO: 111377 - DNA, 19 bp, Homo sapiens
  siRNA target sequence for NOX4 (NM_016931.2,787-805).
gagtttctaactatgatat

SEQ ID NO: 111378 - DNA, 19 bp, Homo sapiens
  siRNA target sequence for NOX4 (NM_016931.2,789-807).
gtttctaactatgatatct

SEQ ID NO: 111379 - DNA, 19 bp, Homo sapiens
  siRNA target sequence for NOX4 (NM_016931.2,848-866).
gctgacgttgcatgtttca

SEQ ID NO: 111380 - DNA, 19 bp, Homo sapiens
  siRNA target sequence for NOX4 (NM_016931.2,1460-1478).
gtatattgatggtcctttt

SEQ ID NO: 111381 - DNA, 19 bp, Homo sapiens
  siRNA target sequence for NOX4 (NM_016931.2,1483-1501).
gtccatttgaggaatcact

SEQ ID NO: 111382 - DNA, 19 bp, Homo sapiens
  siRNA target sequence for NOX4 (NM_016931.2,1535-1553).
cattggagtaactccattt

SEQ ID NO: 111383 - DNA, 19 bp, Homo sapiens
  siRNA target sequence for NOX4 (NM_016931.2,1539-1557).
ggagtaactccatttgcat

SEQ ID NO: 111384 - DNA, 19 bp, Homo sapiens
  siRNA target sequence for SLC22A4 (NM_003059.2,257-275).
ccaatggcttcaatggtat

SEQ ID NO: 111385 - DNA, 19 bp, Homo sapiens
  siRNA target sequence for SLC22A4 (NM_003059.2,668-686).
gcaggaagaacgttctctt

SEQ ID NO: 111386 - DNA, 19 bp, Homo sapiens
  siRNA target sequence for SLC22A4 (NM_003059.2,734-752).
ccatcagctgggagatgtt

SEQ ID NO: 111387 - DNA, 19 bp, Homo sapiens
  siRNA target sequence for SLC22A4 (NM_003059.2,747-765).
gatgttcactgtgttattt

SEQ ID NO: 111388 - DNA, 19 bp, Homo sapiens
  siRNA target sequence for SLC22A4 (NM_003059.2,795-813).
ctatgtggtagccttcata

SEQ ID NO: 111389 - DNA, 19 bp, Homo sapiens
  siRNA target sequence for SLC22A4 (NM_003059.2,810-828).
catactaggaacagaaatt

SEQ ID NO: 111390 - DNA, 19 bp, Homo sapiens
  siRNA target sequence for SLC22A4 (NM_003059.2,1037-1055).
gagaggctgaagatatcat

SEQ ID NO: 111391 - DNA, 19 bp, Homo sapiens
  siRNA target sequence for SLC22A4 (NM_003059.2,1064-1082).
ctgcaaaaatgaacaacat

SEQ ID NO: 111392 - DNA, 19 bp, Homo sapiens
  siRNA target sequence for SLC22A4 (NM_003059.2,1084-1102).
gctgtaccagcagtgatat

SEQ ID NO: 111393 - DNA, 19 bp, Homo sapiens
  siRNA target sequence for SLC22A4 (NM_003059.2,1085-1103).
ctgtaccagcagtgatatt

SEQ ID NO: 111394 - DNA, 19 bp, Homo sapiens
  siRNA target sequence for SLC22A4 (NM_003059.2,1090-1108).
ccagcagtgatatttgatt

SEQ ID NO: 111395 - DNA, 19 bp, Homo sapiens
  siRNA target sequence for SLC22A4 (NM_003059.2,1161-1179).
gttcaggactcggaatatt

SEQ ID NO: 111396 - DNA, 19 bp, Homo sapiens
  siRNA target sequence for SLC22A4 (NM_003059.2,1169-1187).
ctcggaatattgccataat

SEQ ID NO: 111397 - DNA, 19 bp, Homo sapiens
  siRNA target sequence for SLC22A4 (NM_003059.2,1171-1189).
cggaatattgccataatga

SEQ ID NO: 111398 - DNA, 19 bp, Homo sapiens
  siRNA target sequence for SLC22A4 (NM_003059.2,1180-1198).
gccataatgaccattatgt

SEQ ID NO: 111399 - DNA, 19 bp, Homo sapiens
  siRNA target sequence for SLC22A4 (NM_003059.2,1244-1262).
ctctggatgctcctaattt

SEQ ID NO: 111400 - DNA, 19 bp, Homo sapiens
  siRNA target sequence for SLC22A4 (NM_003059.2,1248-1266).
ggatgctcctaatttacat

SEQ ID NO: 111401 - DNA, 19 bp, Homo sapiens
  siRNA target sequence for SLC22A4 (NM_003059.2,1346-1364).
ccctgcccaggcgttatat

SEQ ID NO: 111402 - DNA, 19 bp, Homo sapiens
  siRNA target sequence for SLC22A4 (NM_003059.2,1348-1366).
ctgcccaggcgttatatca

SEQ ID NO: 111403 - DNA, 19 bp, Homo sapiens
  siRNA target sequence for SLC22A4 (NM_003059.2,1350-1368).
gcccaggcgttatatcata

SEQ ID NO: 111404 - DNA, 19 bp, Homo sapiens
  siRNA target sequence for SLC22A4 (NM_003059.2,1420-1438).
cctgtggattattacttct

SEQ ID NO: 111405 - DNA, 19 bp, Homo sapiens
  siRNA target sequence for SLC22A4 (NM_003059.2,1423-1441).
gtggattattacttcttat

SEQ ID NO: 111406 - DNA, 19 bp, Homo sapiens
  siRNA target sequence for SLC22A4 (NM_003059.2,1569-1587).
cagagtgggcagcatcatt

SEQ ID NO: 111407 - DNA, 19 bp, Homo sapiens
  siRNA target sequence for SLC22A4 (NM_003059.2,1606-1624).
ctcggtgcttacaacagaa

SEQ ID NO: 111408 - DNA, 19 bp, Homo sapiens
  siRNA target sequence for SLC22A4 (NM_003059.2,1704-1722).
gactcttccagaaacctta

SEQ ID NO: 111409 - DNA, 19 bp, Homo sapiens
  siRNA target sequence for SLC22A4 (NM_003059.2,1745-1763).
ggttcagatctgggaaaaa

SEQ ID NO: 111410 - DNA, 19 bp, Homo sapiens
  siRNA target sequence for ABT1 (NM_013375.2,156-174).
gggtagtgccaggtattgt

SEQ ID NO: 111411 - DNA, 19 bp, Homo sapiens
  siRNA target sequence for ABT1 (NM_013375.2,158-176).
gtagtgccaggtattgtgt

SEQ ID NO: 111412 - DNA, 19 bp, Homo sapiens
  siRNA target sequence for ABT1 (NM_013375.2,244-262).
ggtcggacgcgtcttcttt

SEQ ID NO: 111413 - DNA, 19 bp, Homo sapiens
  siRNA target sequence for ABT1 (NM_013375.2,435-453).
gcagccccttccgttatga

SEQ ID NO: 111414 - DNA, 19 bp, Homo sapiens
  siRNA target sequence for ABT1 (NM_013375.2,440-458).
cccttccgttatgatcttt

SEQ ID NO: 111415 - DNA, 19 bp, Homo sapiens
  siRNA target sequence for ABT1 (NM_013375.2,570-588).
gtgagaccgacttctatct

SEQ ID NO: 111416 - DNA, 19 bp, Homo sapiens
  siRNA target sequence for ABT1 (NM_013375.2,574-592).
gaccgacttctatcttcaa

SEQ ID NO: 111417 - DNA, 19 bp, Homo sapiens
  siRNA target sequence for AIP (NM_003977.1,142-160).
cgggaggacgggatccaaa

SEQ ID NO: 111418 - DNA, 19 bp, Homo sapiens
  siRNA target sequence for AIP (NM_003977.1,143-161).
gggaggacgggatccaaaa

SEQ ID NO: 111419 - DNA, 19 bp, Homo sapiens
  siRNA target sequence for AIP (NM_003977.1,144-162).
ggaggacgggatccaaaaa

SEQ ID NO: 111420 - DNA, 19 bp, Homo sapiens
  siRNA target sequence for AIP (NM_003977.1,147-165).
ggacgggatccaaaaacgt

SEQ ID NO: 111421 - DNA, 19 bp, Homo sapiens
  siRNA target sequence for AIP (NM_003977.1,153-171).
gatccaaaaacgtgtgata

SEQ ID NO: 111422 - DNA, 19 bp, Homo sapiens
  siRNA target sequence for AIP (NM_003977.1,189-207).
gctcccggactttcaagat

SEQ ID NO: 111423 - DNA, 19 bp, Homo sapiens
  siRNA target sequence for AIP (NM_003977.1,770-788).
ctgggtcccctgaatggat

SEQ ID NO: 111424 - DNA, 19 bp, Homo sapiens
  siRNA target sequence for AIP (NM_003977.1,811-829).
ccgctgctgctcaactact

SEQ ID NO: 111425 - DNA, 19 bp, Homo sapiens
  siRNA target sequence for AIP (NM_003977.1,881-899).
cttccatcctcaacaagta

SEQ ID NO: 111426 - DNA, 19 bp, Homo sapiens
  siRNA target sequence for BRDT (NM_001726.1,147-165).
cctcctccaccagaatata

SEQ ID NO: 111427 - DNA, 19 bp, Homo sapiens
  siRNA target sequence for BRDT (NM_001726.1,148-166).
ctcctccaccagaatatat

SEQ ID NO: 111428 - DNA, 19 bp, Homo sapiens
  siRNA target sequence for BRDT (NM_001726.1,176-194).
gaaaaatgggcgattgaca

SEQ ID NO: 111429 - DNA, 19 bp, Homo sapiens
  siRNA target sequence for BRDT (NM_001726.1,187-205).
gattgacaaatcaacttca

SEQ ID NO: 111430 - DNA, 19 bp, Homo sapiens
  siRNA target sequence for BRDT (NM_001726.1,191-209).
gacaaatcaacttcagtat

SEQ ID NO: 111431 - DNA, 19 bp, Homo sapiens
  siRNA target sequence for BRDT (NM_001726.1,296-314).
gcctgattattataccatt

SEQ ID NO: 111432 - DNA, 19 bp, Homo sapiens
  siRNA target sequence for BRDT (NM_001726.1,297-315).
cctgattattataccatta

SEQ ID NO: 111433 - DNA, 19 bp, Homo sapiens
  siRNA target sequence for BRDT (NM_001726.1,298-316).
ctgattattataccattat

SEQ ID NO: 111434 - DNA, 19 bp, Homo sapiens
  siRNA target sequence for BRDT (NM_001726.1,300-318).
gattattataccattataa

SEQ ID NO: 111435 - DNA, 19 bp, Homo sapiens
  siRNA target sequence for BRDT (NM_001726.1,350-368).
gcgcttggagaataaatat

SEQ ID NO: 111436 - DNA, 19 bp, Homo sapiens
  siRNA target sequence for BRDT (NM_001726.1,372-390).
gcgaaggcttcagaatgta

SEQ ID NO: 111437 - DNA, 19 bp, Homo sapiens
  siRNA target sequence for BRDT (NM_001726.1,382-400).
cagaatgtatagaagactt

SEQ ID NO: 111438 - DNA, 19 bp, Homo sapiens
  siRNA target sequence for BRDT (NM_001726.1,396-414).
gacttcaatacaatgttct

SEQ ID NO: 111439 - DNA, 19 bp, Homo sapiens
  siRNA target sequence for BRDT (NM_001726.1,441-459).
ggagatgacattgttctta

SEQ ID NO: 111440 - DNA, 19 bp, Homo sapiens
  siRNA target sequence for BRDT (NM_001726.1,469-487).
ctctagagaagctgtttat

SEQ ID NO: 111441 - DNA, 19 bp, Homo sapiens
  siRNA target sequence for BRDT (NM_001726.1,554-572).
cactcaacagaatatagct

SEQ ID NO: 111442 - DNA, 19 bp, Homo sapiens
  siRNA target sequence for BRDT (NM_001726.1,563-581).
gaatatagctgtttcttct

SEQ ID NO: 111443 - DNA, 19 bp, Homo sapiens
  siRNA target sequence for BRDT (NM_001726.1,598-616).
cacccagcgcaacagaaaa

SEQ ID NO: 111444 - DNA, 19 bp, Homo sapiens
  siRNA target sequence for BRDT (NM_001726.1,645-663).
gtatttcctaagacatcta

SEQ ID NO: 111445 - DNA, 19 bp, Homo sapiens
  siRNA target sequence for BRDT (NM_001726.1,698-716).
caactccagttcacaaact

SEQ ID NO: 111446 - DNA, 19 bp, Homo sapiens
  siRNA target sequence for BRDT (NM_001726.1,780-798).
gttaaagcaagtagtgaat

SEQ ID NO: 111447 - DNA, 19 bp, Homo sapiens
  siRNA target sequence for BRDT (NM_001726.1,793-811).
gtgaattttctccaacatt

SEQ ID NO: 111448 - DNA, 19 bp, Homo sapiens
  siRNA target sequence for BRDT (NM_001726.1,827-845).
ggcactgccacctataaaa

SEQ ID NO: 111449 - DNA, 19 bp, Homo sapiens
  siRNA target sequence for BRDT (NM_001726.1,930-948).
cactgtagtgagattctta

SEQ ID NO: 111450 - DNA, 19 bp, Homo sapiens
  siRNA target sequence for BRDT (NM_001726.1,934-952).
gtagtgagattcttaaaga

SEQ ID NO: 111451 - DNA, 19 bp, Homo sapiens
  siRNA target sequence for BRDT (NM_001726.1,976-994).
catatgcatggccctttta

SEQ ID NO: 111452 - DNA, 19 bp, Homo sapiens
  siRNA target sequence for BRDT (NM_001726.1,999-1017).
cctgttgacgttaatgctt

SEQ ID NO: 111453 - DNA, 19 bp, Homo sapiens
  siRNA target sequence for BRDT (NM_001726.1,1014-1032).
gctttgggactccataact

SEQ ID NO: 111454 - DNA, 19 bp, Homo sapiens
  siRNA target sequence for BRDT (NM_001726.1,1015-1033).
ctttgggactccataacta

SEQ ID NO: 111455 - DNA, 19 bp, Homo sapiens
  siRNA target sequence for BRDT (NM_001726.1,1019-1037).
gggactccataactactat

SEQ ID NO: 111456 - DNA, 19 bp, Homo sapiens
  siRNA target sequence for BRDT (NM_001726.1,1031-1049).
ctactatgacgttgtcaaa

SEQ ID NO: 111457 - DNA, 19 bp, Homo sapiens
  siRNA target sequence for BRDT (NM_001726.1,1034-1052).
ctatgacgttgtcaaaaat

SEQ ID NO: 111458 - DNA, 19 bp, Homo sapiens
  siRNA target sequence for BRDT (NM_001726.1,1054-1072).
cgatggatcttggaactat

SEQ ID NO: 111459 - DNA, 19 bp, Homo sapiens
  siRNA target sequence for BRDT (NM_001726.1,1119-1137).
gcggcagatgttagattaa

SEQ ID NO: 111460 - DNA, 19 bp, Homo sapiens
  siRNA target sequence for BRDT (NM_001726.1,1120-1138).
cggcagatgttagattaat

SEQ ID NO: 111461 - DNA, 19 bp, Homo sapiens
  siRNA target sequence for BRDT (NM_001726.1,1128-1146).
gttagattaatgttcatga

SEQ ID NO: 111462 - DNA, 19 bp, Homo sapiens
  siRNA target sequence for BRDT (NM_001726.1,1363-1381).
gagttaagcgtcttgcaaa

SEQ ID NO: 111463 - DNA, 19 bp, Homo sapiens
  siRNA target sequence for BRDT (NM_001726.1,1394-1412).
gcttaaagctgtacatcaa

SEQ ID NO: 111464 - DNA, 19 bp, Homo sapiens
  siRNA target sequence for BRDT (NM_001726.1,1434-1452).
gtacctttccgtaagctaa

SEQ ID NO: 111465 - DNA, 19 bp, Homo sapiens
  siRNA target sequence for BRDT (NM_001726.1,1437-1455).
cctttccgtaagctaaata

SEQ ID NO: 111466 - DNA, 19 bp, Homo sapiens
  siRNA target sequence for BRDT (NM_001726.1,1438-1456).
ctttccgtaagctaaataa

SEQ ID NO: 111467 - DNA, 19 bp, Homo sapiens
  siRNA target sequence for BRDT (NM_001726.1,1443-1461).
cgtaagctaaataaaaaga

SEQ ID NO: 111468 - DNA, 19 bp, Homo sapiens
  siRNA target sequence for BRDT (NM_001726.1,1496-1514).
ggttaataacagcaatgaa

SEQ ID NO: 111469 - DNA, 19 bp, Homo sapiens
  siRNA target sequence for BRDT (NM_001726.1,1592-1610).
gttcattggtctaaaatct

SEQ ID NO: 111470 - DNA, 19 bp, Homo sapiens
  siRNA target sequence for BRDT (NM_001726.1,1617-1635).
gaagataatgctaaaccta

SEQ ID NO: 111471 - DNA, 19 bp, Homo sapiens
  siRNA target sequence for BRDT (NM_001726.1,1663-1681).
gtctgaatataaacaaact

SEQ ID NO: 111472 - DNA, 19 bp, Homo sapiens
  siRNA target sequence for BRDT (NM_001726.1,1698-1716).
gggcgagtagttcacataa

SEQ ID NO: 111473 - DNA, 19 bp, Homo sapiens
  siRNA target sequence for BRDT (NM_001726.1,1699-1717).
ggcgagtagttcacataat

SEQ ID NO: 111474 - DNA, 19 bp, Homo sapiens
  siRNA target sequence for BRDT (NM_001726.1,1700-1718).
gcgagtagttcacataata

SEQ ID NO: 111475 - DNA, 19 bp, Homo sapiens
  siRNA target sequence for BRDT (NM_001726.1,1707-1725).
gttcacataatacaatcaa

SEQ ID NO: 111476 - DNA, 19 bp, Homo sapiens
  siRNA target sequence for BRDT (NM_001726.1,1728-1746).
gagccttctctgagcaatt

SEQ ID NO: 111477 - DNA, 19 bp, Homo sapiens
  siRNA target sequence for BRDT (NM_001726.1,1732-1750).
cttctctgagcaattccaa

SEQ ID NO: 111478 - DNA, 19 bp, Homo sapiens
  siRNA target sequence for BRDT (NM_001726.1,1753-1771).
ctgatgagatagagataga

SEQ ID NO: 111479 - DNA, 19 bp, Homo sapiens
  siRNA target sequence for BRDT (NM_001726.1,1755-1773).
gatgagatagagatagact

SEQ ID NO: 111480 - DNA, 19 bp, Homo sapiens
  siRNA target sequence for BRDT (NM_001726.1,1782-1800).
ctgaaagcatcaacactaa

SEQ ID NO: 111481 - DNA, 19 bp, Homo sapiens
  siRNA target sequence for BRDT (NM_001726.1,1884-1902).
gaacttcactcacagaaaa

SEQ ID NO: 111482 - DNA, 19 bp, Homo sapiens
  siRNA target sequence for BRDT (NM_001726.1,1919-1937).
gcggttactggatgttaat

SEQ ID NO: 111483 - DNA, 19 bp, Homo sapiens
  siRNA target sequence for BRDT (NM_001726.1,1920-1938).
cggttactggatgttaata

SEQ ID NO: 111484 - DNA, 19 bp, Homo sapiens
  siRNA target sequence for BRDT (NM_001726.1,1921-1939).
ggttactggatgttaataa

SEQ ID NO: 111485 - DNA, 19 bp, Homo sapiens
  siRNA target sequence for BRDT (NM_001726.1,1922-1940).
gttactggatgttaataat

SEQ ID NO: 111486 - DNA, 19 bp, Homo sapiens
  siRNA target sequence for BRDT (NM_001726.1,1926-1944).
ctggatgttaataatcagt

SEQ ID NO: 111487 - DNA, 19 bp, Homo sapiens
  siRNA target sequence for BRDT (NM_001726.1,1928-1946).
ggatgttaataatcagtta

SEQ ID NO: 111488 - DNA, 19 bp, Homo sapiens
  siRNA target sequence for BRDT (NM_001726.1,1951-1969).
ctagaaaacgtcaaacaaa

SEQ ID NO: 111489 - DNA, 19 bp, Homo sapiens
  siRNA target sequence for BRDT (NM_001726.1,1959-1977).
cgtcaaacaaaatctgata

SEQ ID NO: 111490 - DNA, 19 bp, Homo sapiens
  siRNA target sequence for BRDT (NM_001726.1,2107-2125).
cagaaatgttccctaagtt

SEQ ID NO: 111491 - DNA, 19 bp, Homo sapiens
  siRNA target sequence for BRDT (NM_001726.1,2114-2132).
gttccctaagtttacagaa

SEQ ID NO: 111492 - DNA, 19 bp, Homo sapiens
  siRNA target sequence for BRDT (NM_001726.1,2118-2136).
cctaagtttacagaagtaa

SEQ ID NO: 111493 - DNA, 19 bp, Homo sapiens
  siRNA target sequence for BRDT (NM_001726.1,2211-2229).
ggcgtcacacagataggat

SEQ ID NO: 111494 - DNA, 19 bp, Homo sapiens
  siRNA target sequence for BRDT (NM_001726.1,2213-2231).
cgtcacacagataggatat

SEQ ID NO: 111495 - DNA, 19 bp, Homo sapiens
  siRNA target sequence for BRDT (NM_001726.1,2255-2273).
caatactacccttgttcat

SEQ ID NO: 111496 - DNA, 19 bp, Homo sapiens
  siRNA target sequence for BRDT (NM_001726.1,2278-2296).
ccacaccttcacatgtaat

SEQ ID NO: 111497 - DNA, 19 bp, Homo sapiens
  siRNA target sequence for BRDT (NM_001726.1,2307-2325).
caccaccaattagcattta

SEQ ID NO: 111498 - DNA, 19 bp, Homo sapiens
  siRNA target sequence for BRDT (NM_001726.1,2432-2450).
gcatccatctggtgatagt

SEQ ID NO: 111499 - DNA, 19 bp, Homo sapiens
  siRNA target sequence for BRDT (NM_001726.1,2449-2467).
gtgacacaacgatgttaga

SEQ ID NO: 111500 - DNA, 19 bp, Homo sapiens
  siRNA target sequence for BRDT (NM_001726.1,2451-2469).
gacacaacgatgttagaat

SEQ ID NO: 111501 - DNA, 19 bp, Homo sapiens
  siRNA target sequence for BRDT (NM_001726.1,2453-2471).
cacaacgatgttagaatct

SEQ ID NO: 111502 - DNA, 19 bp, Homo sapiens
  siRNA target sequence for BRDT (NM_001726.1,2455-2473).
caacgatgttagaatctga

SEQ ID NO: 111503 - DNA, 19 bp, Homo sapiens
  siRNA target sequence for BRDT (NM_001726.1,2462-2480).
gttagaatctgaatgtcaa

SEQ ID NO: 111504 - DNA, 19 bp, Homo sapiens
  siRNA target sequence for BRDT (NM_001726.1,2476-2494).
gtcaagctcctgtacagaa

SEQ ID NO: 111505 - DNA, 19 bp, Homo sapiens
  siRNA target sequence for BRDT (NM_001726.1,2579-2597).
gctcttcaaccaatttaga

SEQ ID NO: 111506 - DNA, 19 bp, Homo sapiens
  siRNA target sequence for BRDT (NM_001726.1,2585-2603).
caaccaatttagaaaagca

SEQ ID NO: 111507 - DNA, 19 bp, Homo sapiens
  siRNA target sequence for BRDT (NM_001726.1,2637-2655).
gaactcatacggaagcatt

SEQ ID NO: 111508 - DNA, 19 bp, Homo sapiens
  siRNA target sequence for BRDT (NM_001726.1,2715-2733).
ggattgactgtagaatctt

SEQ ID NO: 111509 - DNA, 19 bp, Homo sapiens
  siRNA target sequence for BRDT (NM_001726.1,2716-2734).
gattgactgtagaatcttt

SEQ ID NO: 111510 - DNA, 19 bp, Homo sapiens
  siRNA target sequence for BRDT (NM_001726.1,2789-2807).
gtcatcagaagctcaagat

SEQ ID NO: 111511 - DNA, 19 bp, Homo sapiens
  siRNA target sequence for BRDT (NM_001726.1,2905-2923).
cccttcaaagtgacattat

SEQ ID NO: 111512 - DNA, 19 bp, Homo sapiens
  siRNA target sequence for BRDT (NM_001726.1,2907-2925).
cttcaaagtgacattatga

SEQ ID NO: 111513 - DNA, 19 bp, Homo sapiens
  siRNA target sequence for CRSP2 (NM_004229.2,270-288).
ctgagcaccctcattgaat

SEQ ID NO: 111514 - DNA, 19 bp, Homo sapiens
  siRNA target sequence for CRSP2 (NM_004229.2,304-322).
cctactcggagcttatggt

SEQ ID NO: 111515 - DNA, 19 bp, Homo sapiens
  siRNA target sequence for CRSP2 (NM_004229.2,330-348).
gacctactgccaaggaaat

SEQ ID NO: 111516 - DNA, 19 bp, Homo sapiens
  siRNA target sequence for CRSP2 (NM_004229.2,388-406).
gccggacacgccaactctt

SEQ ID NO: 111517 - DNA, 19 bp, Homo sapiens
  siRNA target sequence for CRSP2 (NM_004229.2,397-415).
gccaactcttcgttcgatt

SEQ ID NO: 111518 - DNA, 19 bp, Homo sapiens
  siRNA target sequence for CRSP2 (NM_004229.2,398-416).
ccaactcttcgttcgatta

SEQ ID NO: 111519 - DNA, 19 bp, Homo sapiens
  siRNA target sequence for CRSP2 (NM_004229.2,399-417).
caactcttcgttcgattat

SEQ ID NO: 111520 - DNA, 19 bp, Homo sapiens
  siRNA target sequence for CRSP2 (NM_004229.2,404-422).
cttcgttcgattattagct

SEQ ID NO: 111521 - DNA, 19 bp, Homo sapiens
  siRNA target sequence for CRSP2 (NM_004229.2,407-425).
cgttcgattattagcttta

SEQ ID NO: 111522 - DNA, 19 bp, Homo sapiens
  siRNA target sequence for CRSP2 (NM_004229.2,411-429).
cgattattagctttagtga

SEQ ID NO: 111523 - DNA, 19 bp, Homo sapiens
  siRNA target sequence for CRSP2 (NM_004229.2,412-430).
gattattagctttagtgaa

SEQ ID NO: 111524 - DNA, 19 bp, Homo sapiens
  siRNA target sequence for CRSP2 (NM_004229.2,455-473).
ggaaaaatgtgcgatgatt

SEQ ID NO: 111525 - DNA, 19 bp, Homo sapiens
  siRNA target sequence for CRSP2 (NM_004229.2,465-483).
gcgatgatttcaagctttt

SEQ ID NO: 111526 - DNA, 19 bp, Homo sapiens
  siRNA target sequence for CRSP2 (NM_004229.2,470-488).
gatttcaagctttttagat

SEQ ID NO: 111527 - DNA, 19 bp, Homo sapiens
  siRNA target sequence for CRSP2 (NM_004229.2,522-540).
cgcctggcctcgttagcta

SEQ ID NO: 111528 - DNA, 19 bp, Homo sapiens
  siRNA target sequence for CRSP2 (NM_004229.2,527-545).
ggcctcgttagctagagat

SEQ ID NO: 111529 - DNA, 19 bp, Homo sapiens
  siRNA target sequence for CRSP2 (NM_004229.2,578-596).
catcccatatgccattgat

SEQ ID NO: 111530 - DNA, 19 bp, Homo sapiens
  siRNA target sequence for CRSP2 (NM_004229.2,588-606).
gccattgatgtactaacta

SEQ ID NO: 111531 - DNA, 19 bp, Homo sapiens
  siRNA target sequence for CRSP2 (NM_004229.2,590-608).
cattgatgtactaactact

SEQ ID NO: 111532 - DNA, 19 bp, Homo sapiens
  siRNA target sequence for CRSP2 (NM_004229.2,621-639).
cggctgccaacctgcatta

SEQ ID NO: 111533 - DNA, 19 bp, Homo sapiens
  siRNA target sequence for CRSP2 (NM_004229.2,654-672).
cctccagacccaattacca

SEQ ID NO: 111534 - DNA, 19 bp, Homo sapiens
  siRNA target sequence for CRSP2 (NM_004229.2,655-673).
ctccagacccaattaccaa

SEQ ID NO: 111535 - DNA, 19 bp, Homo sapiens
  siRNA target sequence for CRSP2 (NM_004229.2,658-676).
cagacccaattaccaaaat

SEQ ID NO: 111536 - DNA, 19 bp, Homo sapiens
  siRNA target sequence for CRSP2 (NM_004229.2,691-709).
cactccatcagctgaatca

SEQ ID NO: 111537 - DNA, 19 bp, Homo sapiens
  siRNA target sequence for CRSP2 (NM_004229.2,714-732).
cttagacatcggcttgtaa

SEQ ID NO: 111538 - DNA, 19 bp, Homo sapiens
  siRNA target sequence for CRSP2 (NM_004229.2,741-759).
cttcctcctcagttagcaa

SEQ ID NO: 111539 - DNA, 19 bp, Homo sapiens
  siRNA target sequence for CRSP2 (NM_004229.2,863-881).
caagctagaaattctagtt

SEQ ID NO: 111540 - DNA, 19 bp, Homo sapiens
  siRNA target sequence for CRSP2 (NM_004229.2,903-921).
gggcgagctttggttcata

SEQ ID NO: 111541 - DNA, 19 bp, Homo sapiens
  siRNA target sequence for CRSP2 (NM_004229.2,907-925).
gagctttggttcatagcat

SEQ ID NO: 111542 - DNA, 19 bp, Homo sapiens
  siRNA target sequence for CRSP2 (NM_004229.2,915-933).
gttcatagcatgcaaatca

SEQ ID NO: 111543 - DNA, 19 bp, Homo sapiens
  siRNA target sequence for CRSP2 (NM_004229.2,995-1013).
gtacaactgcctacattct

SEQ ID NO: 111544 - DNA, 19 bp, Homo sapiens
  siRNA target sequence for CRSP2 (NM_004229.2,1003-1021).
gcctacattctttctgttt

SEQ ID NO: 111545 - DNA, 19 bp, Homo sapiens
  siRNA target sequence for CRSP2 (NM_004229.2,1044-1062).
cattcccaaactctaatgt

SEQ ID NO: 111546 - DNA, 19 bp, Homo sapiens
  siRNA target sequence for CRSP2 (NM_004229.2,1048-1066).
cccaaactctaatgttaat

SEQ ID NO: 111547 - DNA, 19 bp, Homo sapiens
  siRNA target sequence for CRSP2 (NM_004229.2,1091-1109).
gcaggtggaaaggtatcat

SEQ ID NO: 111548 - DNA, 19 bp, Homo sapiens
  siRNA target sequence for CRSP2 (NM_004229.2,1124-1142).
ctccctttcagtttggaat

SEQ ID NO: 111549 - DNA, 19 bp, Homo sapiens
  siRNA target sequence for CRSP2 (NM_004229.2,1127-1145).
cctttcagtttggaatcaa

SEQ ID NO: 111550 - DNA, 19 bp, Homo sapiens
  siRNA target sequence for CRSP2 (NM_004229.2,1168-1186).
gaacagcatctgttcacaa

SEQ ID NO: 111551 - DNA, 19 bp, Homo sapiens
  siRNA target sequence for CRSP2 (NM_004229.2,1171-1189).
cagcatctgttcacaaagt

SEQ ID NO: 111552 - DNA, 19 bp, Homo sapiens
  siRNA target sequence for CRSP2 (NM_004229.2,1173-1191).
gcatctgttcacaaagtta

SEQ ID NO: 111553 - DNA, 19 bp, Homo sapiens
  siRNA target sequence for CRSP2 (NM_004229.2,1177-1195).
ctgttcacaaagttacaat

SEQ ID NO: 111554 - DNA, 19 bp, Homo sapiens
  siRNA target sequence for CRSP2 (NM_004229.2,1248-1266).
cctttgccagcttctgatt

SEQ ID NO: 111555 - DNA, 19 bp, Homo sapiens
  siRNA target sequence for CRSP2 (NM_004229.2,1254-1272).
ccagcttctgattccaaat

SEQ ID NO: 111556 - DNA, 19 bp, Homo sapiens
  siRNA target sequence for CRSP2 (NM_004229.2,1261-1279).
ctgattccaaattagtaga

SEQ ID NO: 111557 - DNA, 19 bp, Homo sapiens
  siRNA target sequence for CRSP2 (NM_004229.2,1289-1307).
gaagatcgaccacttatca

SEQ ID NO: 111558 - DNA, 19 bp, Homo sapiens
  siRNA target sequence for CRSP2 (NM_004229.2,1295-1313).
cgaccacttatcaatagaa

SEQ ID NO: 111559 - DNA, 19 bp, Homo sapiens
  siRNA target sequence for CRSP2 (NM_004229.2,1296-1314).
gaccacttatcaatagaaa

SEQ ID NO: 111560 - DNA, 19 bp, Homo sapiens
  siRNA target sequence for CRSP2 (NM_004229.2,1373-1391).
cattcttagaggcttcaat

SEQ ID NO: 111561 - DNA, 19 bp, Homo sapiens
  siRNA target sequence for CRSP2 (NM_004229.2,1394-1412).
caatgaaaactcttccata

SEQ ID NO: 111562 - DNA, 19 bp, Homo sapiens
  siRNA target sequence for CRSP2 (NM_004229.2,1448-1466).
ggagccctgtggtaattca

SEQ ID NO: 111563 - DNA, 19 bp, Homo sapiens
  siRNA target sequence for CRSP2 (NM_004229.2,1590-1608).
ccctggattcagcaactta

SEQ ID NO: 111564 - DNA, 19 bp, Homo sapiens
  siRNA target sequence for CRSP2 (NM_004229.2,1591-1609).
cctggattcagcaacttaa

SEQ ID NO: 111565 - DNA, 19 bp, Homo sapiens
  siRNA target sequence for CRSP2 (NM_004229.2,1594-1612).
ggattcagcaacttaagtt

SEQ ID NO: 111566 - DNA, 19 bp, Homo sapiens
  siRNA target sequence for CRSP2 (NM_004229.2,1595-1613).
gattcagcaacttaagttt

SEQ ID NO: 111567 - DNA, 19 bp, Homo sapiens
  siRNA target sequence for CRSP2 (NM_004229.2,1628-1646).
gcgttgcaagcagtctata

SEQ ID NO: 111568 - DNA, 19 bp, Homo sapiens
  siRNA target sequence for CRSP2 (NM_004229.2,1629-1647).
cgttgcaagcagtctataa

SEQ ID NO: 111569 - DNA, 19 bp, Homo sapiens
  siRNA target sequence for CRSP2 (NM_004229.2,1630-1648).
gttgcaagcagtctataaa

SEQ ID NO: 111570 - DNA, 19 bp, Homo sapiens
  siRNA target sequence for CRSP2 (NM_004229.2,1656-1674).
cctacgataagcagtgaaa

SEQ ID NO: 111571 - DNA, 19 bp, Homo sapiens
  siRNA target sequence for CRSP2 (NM_004229.2,1660-1678).
cgataagcagtgaaacatt

SEQ ID NO: 111572 - DNA, 19 bp, Homo sapiens
  siRNA target sequence for CRSP2 (NM_004229.2,1694-1712).
ctcaactcatcctattgga

SEQ ID NO: 111573 - DNA, 19 bp, Homo sapiens
  siRNA target sequence for CRSP2 (NM_004229.2,1705-1723).
ctattggaaacctttctaa

SEQ ID NO: 111574 - DNA, 19 bp, Homo sapiens
  siRNA target sequence for CRSP2 (NM_004229.2,1720-1738).
ctaagaataaactgttcat

SEQ ID NO: 111575 - DNA, 19 bp, Homo sapiens
  siRNA target sequence for CRSP2 (NM_004229.2,1749-1767).
cgccttccacaatactaca

SEQ ID NO: 111576 - DNA, 19 bp, Homo sapiens
  siRNA target sequence for CRSP2 (NM_004229.2,1750-1768).
gccttccacaatactacat

SEQ ID NO: 111577 - DNA, 19 bp, Homo sapiens
  siRNA target sequence for CRSP2 (NM_004229.2,1751-1769).
ccttccacaatactacatt

SEQ ID NO: 111578 - DNA, 19 bp, Homo sapiens
  siRNA target sequence for CRSP2 (NM_004229.2,1804-1822).
cacaactgtcgtacaagta

SEQ ID NO: 111579 - DNA, 19 bp, Homo sapiens
  siRNA target sequence for CRSP2 (NM_004229.2,1806-1824).
caactgtcgtacaagtact

SEQ ID NO: 111580 - DNA, 19 bp, Homo sapiens
  siRNA target sequence for CRSP2 (NM_004229.2,1809-1827).
ctgtcgtacaagtactact

SEQ ID NO: 111581 - DNA, 19 bp, Homo sapiens
  siRNA target sequence for CRSP2 (NM_004229.2,1811-1829).
gtcgtacaagtactacttt

SEQ ID NO: 111582 - DNA, 19 bp, Homo sapiens
  siRNA target sequence for CRSP2 (NM_004229.2,1905-1923).
caggacttggtttttcgta

SEQ ID NO: 111583 - DNA, 19 bp, Homo sapiens
  siRNA target sequence for CRSP2 (NM_004229.2,1958-1976).
gcgcaagttgtctgatgat

SEQ ID NO: 111584 - DNA, 19 bp, Homo sapiens
  siRNA target sequence for CRSP2 (NM_004229.2,1974-1992).
gatccatgtccagtagaat

SEQ ID NO: 111585 - DNA, 19 bp, Homo sapiens
  siRNA target sequence for CRSP2 (NM_004229.2,1978-1996).
catgtccagtagaatccaa

SEQ ID NO: 111586 - DNA, 19 bp, Homo sapiens
  siRNA target sequence for CRSP2 (NM_004229.2,2023-2041).
gtgccttcaataaagtttt

SEQ ID NO: 111587 - DNA, 19 bp, Homo sapiens
  siRNA target sequence for CRSP2 (NM_004229.2,2045-2063).
ccacttcgtcgctatgtgt

SEQ ID NO: 111588 - DNA, 19 bp, Homo sapiens
  siRNA target sequence for CRSP2 (NM_004229.2,2051-2069).
cgtcgctatgtgtgataca

SEQ ID NO: 111589 - DNA, 19 bp, Homo sapiens
  siRNA target sequence for CRSP2 (NM_004229.2,2052-2070).
gtcgctatgtgtgatacaa

SEQ ID NO: 111590 - DNA, 19 bp, Homo sapiens
  siRNA target sequence for CRSP2 (NM_004229.2,2054-2072).
cgctatgtgtgatacaaat

SEQ ID NO: 111591 - DNA, 19 bp, Homo sapiens
  siRNA target sequence for CRSP2 (NM_004229.2,2155-2173).
gccatgcaattcgcttatt

SEQ ID NO: 111592 - DNA, 19 bp, Homo sapiens
  siRNA target sequence for CRSP2 (NM_004229.2,2156-2174).
ccatgcaattcgcttatta

SEQ ID NO: 111593 - DNA, 19 bp, Homo sapiens
  siRNA target sequence for CRSP2 (NM_004229.2,2157-2175).
catgcaattcgcttattaa

SEQ ID NO: 111594 - DNA, 19 bp, Homo sapiens
  siRNA target sequence for CRSP2 (NM_004229.2,2181-2199).
cctccctgtaagggtataa

SEQ ID NO: 111595 - DNA, 19 bp, Homo sapiens
  siRNA target sequence for CRSP2 (NM_004229.2,2185-2203).
cctgtaagggtataactga

SEQ ID NO: 111596 - DNA, 19 bp, Homo sapiens
  siRNA target sequence for CRSP2 (NM_004229.2,2223-2241).
gaccgctctcttcttgatt

SEQ ID NO: 111597 - DNA, 19 bp, Homo sapiens
  siRNA target sequence for CRSP2 (NM_004229.2,2249-2267).
ccgattacaaggtagaaat

SEQ ID NO: 111598 - DNA, 19 bp, Homo sapiens
  siRNA target sequence for CRSP2 (NM_004229.2,2250-2268).
cgattacaaggtagaaata

SEQ ID NO: 111599 - DNA, 19 bp, Homo sapiens
  siRNA target sequence for CRSP2 (NM_004229.2,2275-2293).
cttgggtagcagagttagt

SEQ ID NO: 111600 - DNA, 19 bp, Homo sapiens
  siRNA target sequence for CRSP2 (NM_004229.2,2279-2297).
ggtagcagagttagtgttt

SEQ ID NO: 111601 - DNA, 19 bp, Homo sapiens
  siRNA target sequence for CRSP2 (NM_004229.2,2338-2356).
gaccatcccggcacgttta

SEQ ID NO: 111602 - DNA, 19 bp, Homo sapiens
  siRNA target sequence for CRSP2 (NM_004229.2,2341-2359).
catcccggcacgtttacct

SEQ ID NO: 111603 - DNA, 19 bp, Homo sapiens
  siRNA target sequence for CRSP2 (NM_004229.2,2347-2365).
ggcacgtttacctgacata

SEQ ID NO: 111604 - DNA, 19 bp, Homo sapiens
  siRNA target sequence for CRSP2 (NM_004229.2,2429-2447).
gaatagcattgcacgatta

SEQ ID NO: 111605 - DNA, 19 bp, Homo sapiens
  siRNA target sequence for CRSP2 (NM_004229.2,2434-2452).
gcattgcacgattatatga

SEQ ID NO: 111606 - DNA, 19 bp, Homo sapiens
  siRNA target sequence for CRSP2 (NM_004229.2,2462-2480).
ggaatttgcacgttctcta

SEQ ID NO: 111607 - DNA, 19 bp, Homo sapiens
  siRNA target sequence for CRSP2 (NM_004229.2,2484-2502).
gacatacctgctcatctaa

SEQ ID NO: 111608 - DNA, 19 bp, Homo sapiens
  siRNA target sequence for CRSP2 (NM_004229.2,2486-2504).
catacctgctcatctaaat

SEQ ID NO: 111609 - DNA, 19 bp, Homo sapiens
  siRNA target sequence for CRSP2 (NM_004229.2,2512-2530).
cagaagttcgtgtttataa

SEQ ID NO: 111610 - DNA, 19 bp, Homo sapiens
  siRNA target sequence for CRSP2 (NM_004229.2,2535-2553).
cgaaaacttatcttgtgtt

SEQ ID NO: 111611 - DNA, 19 bp, Homo sapiens
  siRNA target sequence for CRSP2 (NM_004229.2,2561-2579).
caccaagggaagctcaatt

SEQ ID NO: 111612 - DNA, 19 bp, Homo sapiens
  siRNA target sequence for CRSP2 (NM_004229.2,2564-2582).
caagggaagctcaattagt

SEQ ID NO: 111613 - DNA, 19 bp, Homo sapiens
  siRNA target sequence for CRSP2 (NM_004229.2,2575-2593).
caattagtatccaatggaa

SEQ ID NO: 111614 - DNA, 19 bp, Homo sapiens
  siRNA target sequence for CRSP2 (NM_004229.2,2581-2599).
gtatccaatggaattcgat

SEQ ID NO: 111615 - DNA, 19 bp, Homo sapiens
  siRNA target sequence for CRSP2 (NM_004229.2,2590-2608).
ggaattcgatccatcaaaa

SEQ ID NO: 111616 - DNA, 19 bp, Homo sapiens
  siRNA target sequence for CRSP2 (NM_004229.2,2596-2614).
cgatccatcaaaaattcca

SEQ ID NO: 111617 - DNA, 19 bp, Homo sapiens
  siRNA target sequence for CRSP2 (NM_004229.2,2601-2619).
catcaaaaattccacattt

SEQ ID NO: 111618 - DNA, 19 bp, Homo sapiens
  siRNA target sequence for CRSP2 (NM_004229.2,2739-2757).
gatactcaggctccattaa

SEQ ID NO: 111619 - DNA, 19 bp, Homo sapiens
  siRNA target sequence for CRSP2 (NM_004229.2,2873-2891).
caggaacatgtattgcatt

SEQ ID NO: 111620 - DNA, 19 bp, Homo sapiens
  siRNA target sequence for CRSP2 (NM_004229.2,2876-2894).
gaacatgtattgcattgat

SEQ ID NO: 111621 - DNA, 19 bp, Homo sapiens
  siRNA target sequence for CRSP2 (NM_004229.2,2937-2955).
gcctatagtctttttgata

SEQ ID NO: 111622 - DNA, 19 bp, Homo sapiens
  siRNA target sequence for CRSP2 (NM_004229.2,2938-2956).
cctatagtctttttgataa

SEQ ID NO: 111623 - DNA, 19 bp, Homo sapiens
  siRNA target sequence for CRSP2 (NM_004229.2,2959-2977).
gcaaactagttgaaggttt

SEQ ID NO: 111624 - DNA, 19 bp, Homo sapiens
  siRNA target sequence for CRSP2 (NM_004229.2,3002-3020).
gttcctgaatatgtttgtt

SEQ ID NO: 111625 - DNA, 19 bp, Homo sapiens
  siRNA target sequence for CRSP2 (NM_004229.2,3036-3054).
gctcgaagaaggtctgtaa

SEQ ID NO: 111626 - DNA, 19 bp, Homo sapiens
  siRNA target sequence for CRSP2 (NM_004229.2,3037-3055).
ctcgaagaaggtctgtaaa

SEQ ID NO: 111627 - DNA, 19 bp, Homo sapiens
  siRNA target sequence for CRSP2 (NM_004229.2,3078-3096).
cctataggaggagatatga

SEQ ID NO: 111628 - DNA, 19 bp, Homo sapiens
  siRNA target sequence for CRSP2 (NM_004229.2,3079-3097).
ctataggaggagatatgat

SEQ ID NO: 111629 - DNA, 19 bp, Homo sapiens
  siRNA target sequence for CRSP2 (NM_004229.2,3168-3186).
ggtgcttatcctcttactt

SEQ ID NO: 111630 - DNA, 19 bp, Homo sapiens
  siRNA target sequence for CRSP2 (NM_004229.2,3187-3205).
caccccctacatcttatca

SEQ ID NO: 111631 - DNA, 19 bp, Homo sapiens
  siRNA target sequence for CRSP2 (NM_004229.2,3189-3207).
ccccctacatcttatcata

SEQ ID NO: 111632 - DNA, 19 bp, Homo sapiens
  siRNA target sequence for CRSP2 (NM_004229.2,3204-3222).
catagcacagtcaatcagt

SEQ ID NO: 111633 - DNA, 19 bp, Homo sapiens
  siRNA target sequence for CRSP2 (NM_004229.2,3334-3352).
cctcgcatggaatctcaat

SEQ ID NO: 111634 - DNA, 19 bp, Homo sapiens
  siRNA target sequence for CRSP2 (NM_004229.2,3335-3353).
ctcgcatggaatctcaata

SEQ ID NO: 111635 - DNA, 19 bp, Homo sapiens
  siRNA target sequence for CRSP2 (NM_004229.2,3395-3413).
ccctagttccccatacact

SEQ ID NO: 111636 - DNA, 19 bp, Homo sapiens
  siRNA target sequence for CRSP2 (NM_004229.2,3396-3414).
cctagttccccatacacta

SEQ ID NO: 111637 - DNA, 19 bp, Homo sapiens
  siRNA target sequence for CRSP2 (NM_004229.2,3507-3525).
gccaacccctcactacatt

SEQ ID NO: 111638 - DNA, 19 bp, Homo sapiens
  siRNA target sequence for CRSP2 (NM_004229.2,3530-3548).
ggttccagatgcttctcat

SEQ ID NO: 111639 - DNA, 19 bp, Homo sapiens
  siRNA target sequence for CRSP2 (NM_004229.2,3551-3569).
ccctcgagctggaacaagt

SEQ ID NO: 111640 - DNA, 19 bp, Homo sapiens
  siRNA target sequence for CRSP2 (NM_004229.2,3552-3570).
cctcgagctggaacaagtt

SEQ ID NO: 111641 - DNA, 19 bp, Homo sapiens
  siRNA target sequence for CRSP2 (NM_004229.2,3558-3576).
gctggaacaagttctcaaa

SEQ ID NO: 111642 - DNA, 19 bp, Homo sapiens
  siRNA target sequence for CRSP2 (NM_004229.2,3590-3608).
catgcctccacctcgtaaa

SEQ ID NO: 111643 - DNA, 19 bp, Homo sapiens
  siRNA target sequence for CRSP2 (NM_004229.2,3593-3611).
gcctccacctcgtaaacta

SEQ ID NO: 111644 - DNA, 19 bp, Homo sapiens
  siRNA target sequence for CRSP2 (NM_004229.2,3652-3670).
ctcacagtgccttgaacat

SEQ ID NO: 111645 - DNA, 19 bp, Homo sapiens
  siRNA target sequence for CRSP2 (NM_004229.2,3710-3728).
cctggcaggtagttacctt

SEQ ID NO: 111646 - DNA, 19 bp, Homo sapiens
  siRNA target sequence for CRSP2 (NM_004229.2,3711-3729).
ctggcaggtagttaccttt

SEQ ID NO: 111647 - DNA, 19 bp, Homo sapiens
  siRNA target sequence for CRSP2 (NM_004229.2,3730-3748).
gttctccacttgagagatt

SEQ ID NO: 111648 - DNA, 19 bp, Homo sapiens
  siRNA target sequence for CRSP2 (NM_004229.2,3750-3768).
cttggatcagtcatcatga

SEQ ID NO: 111649 - DNA, 19 bp, Homo sapiens
  siRNA target sequence for CRSP2 (NM_004229.2,3764-3782).
catgagacgacatcttcaa

SEQ ID NO: 111650 - DNA, 19 bp, Homo sapiens
  siRNA target sequence for CRSP2 (NM_004229.2,3798-3816).
gaaacgctgcagctgataa

SEQ ID NO: 111651 - DNA, 19 bp, Homo sapiens
  siRNA target sequence for CRSP2 (NM_004229.2,3806-3824).
gcagctgataaattctaat

SEQ ID NO: 111652 - DNA, 19 bp, Homo sapiens
  siRNA target sequence for CRSP2 (NM_004229.2,3825-3843).
gaacccggagtgatcatgt

SEQ ID NO: 111653 - DNA, 19 bp, Homo sapiens
  siRNA target sequence for CRSP2 (NM_004229.2,3828-3846).
cccggagtgatcatgttta

SEQ ID NO: 111654 - DNA, 19 bp, Homo sapiens
  siRNA target sequence for CRSP2 (NM_004229.2,3829-3847).
ccggagtgatcatgtttaa

SEQ ID NO: 111655 - DNA, 19 bp, Homo sapiens
  siRNA target sequence for CRSP2 (NM_004229.2,3873-3891).
gctcttagtcccaaaacca

SEQ ID NO: 111656 - DNA, 19 bp, Homo sapiens
  siRNA target sequence for CRSP2 (NM_004229.2,3893-3911).
ccaaacgcttcagctaaaa

SEQ ID NO: 111657 - DNA, 19 bp, Homo sapiens
  siRNA target sequence for CRSP2 (NM_004229.2,3937-3955).
ggaaacctgatgaacttca

SEQ ID NO: 111658 - DNA, 19 bp, Homo sapiens
  siRNA target sequence for CRSP2 (NM_004229.2,3938-3956).
gaaacctgatgaacttcaa

SEQ ID NO: 111659 - DNA, 19 bp, Homo sapiens
  siRNA target sequence for CRSP2 (NM_004229.2,3943-3961).
ctgatgaacttcaagtttt

SEQ ID NO: 111660 - DNA, 19 bp, Homo sapiens
  siRNA target sequence for CRSP2 (NM_004229.2,3990-4008).
ggaccaccatttaaagcta

SEQ ID NO: 111661 - DNA, 19 bp, Homo sapiens
  siRNA target sequence for CRSP2 (NM_004229.2,3991-4009).
gaccaccatttaaagctaa

SEQ ID NO: 111662 - DNA, 19 bp, Homo sapiens
  siRNA target sequence for CRSP2 (NM_004229.2,3996-4014).
ccatttaaagctaatacgt

SEQ ID NO: 111663 - DNA, 19 bp, Homo sapiens
  siRNA target sequence for CRSP2 (NM_004229.2,4022-4040).
cttcaccaagctattagga

SEQ ID NO: 111664 - DNA, 19 bp, Homo sapiens
  siRNA target sequence for CRSP2 (NM_004229.2,4104-4122).
gcaacacagctaaaatgga

SEQ ID NO: 111665 - DNA, 19 bp, Homo sapiens
  siRNA target sequence for CRSP2 (NM_004229.2,4248-4266).
ccccaagaacctgttagta

SEQ ID NO: 111666 - DNA, 19 bp, Homo sapiens
  siRNA target sequence for CRSP2 (NM_004229.2,4264-4282).
gtattatagttccaatcat

SEQ ID NO: 111667 - DNA, 19 bp, Homo sapiens
  siRNA target sequence for CRSP2 (NM_004229.2,4272-4290).
gttccaatcatttatgaca

SEQ ID NO: 111668 - DNA, 19 bp, Homo sapiens
  siRNA target sequence for CRSP2 (NM_004229.2,4428-4446).
gcagctgttcgtgatttaa

SEQ ID NO: 111669 - DNA, 19 bp, Homo sapiens
  siRNA target sequence for CRSP2 (NM_004229.2,4429-4447).
cagctgttcgtgatttaat

SEQ ID NO: 111670 - DNA, 19 bp, Homo sapiens
  siRNA target sequence for CRSP7 (NM_004831.2,115-133).
gagaaataccctattacca

SEQ ID NO: 111671 - DNA, 19 bp, Homo sapiens
  siRNA target sequence for CRSP7 (NM_004831.2,117-135).
gaaataccctattaccaaa

SEQ ID NO: 111672 - DNA, 19 bp, Homo sapiens
  siRNA target sequence for CRSP7 (NM_004831.2,171-189).
caacgacgtccgcaagaaa

SEQ ID NO: 111673 - DNA, 19 bp, Homo sapiens
  siRNA target sequence for CRSP7 (NM_004831.2,175-193).
gacgtccgcaagaaaacca

SEQ ID NO: 111674 - DNA, 19 bp, Homo sapiens
  siRNA target sequence for CRSP7 (NM_004831.2,804-822).
ccctcgctgctctttcagt

SEQ ID NO: 111675 - DNA, 19 bp, Homo sapiens
  siRNA target sequence for CRSP7 (NM_004831.2,1162-1180).
ggctcggacagtaaaaaga

SEQ ID NO: 111676 - DNA, 19 bp, Homo sapiens
  siRNA target sequence for CRSP7 (NM_004831.2,1163-1181).
gctcggacagtaaaaagaa

SEQ ID NO: 111677 - DNA, 19 bp, Homo sapiens
  siRNA target sequence for CRSP7 (NM_004831.2,1198-1216).
cgagactatacggttaact

SEQ ID NO: 111678 - DNA, 19 bp, Homo sapiens
  siRNA target sequence for CRSP7 (NM_004831.2,1199-1217).
gagactatacggttaactt

SEQ ID NO: 111679 - DNA, 19 bp, Homo sapiens
  siRNA target sequence for CRSP7 (NM_004831.2,1286-1304).
ccatgacgagacagatcaa

SEQ ID NO: 111680 - DNA, 19 bp, Homo sapiens
  siRNA target sequence for CRSP7 (NM_004831.2,1708-1726).
cagggtaactggtatgact

SEQ ID NO: 111681 - DNA, 19 bp, Homo sapiens
  siRNA target sequence for CRSP7 (NM_004831.2,1723-1741).
gactggacgcagtgcatat

SEQ ID NO: 111682 - DNA, 19 bp, Homo sapiens
  siRNA target sequence for CRSP8 (NM_004269.2,26-44).
gcggacgtgataaatgtca

SEQ ID NO: 111683 - DNA, 19 bp, Homo sapiens
  siRNA target sequence for CRSP8 (NM_004269.2,183-201).
cgcacttccaggacaactt

SEQ ID NO: 111684 - DNA, 19 bp, Homo sapiens
  siRNA target sequence for CRSP8 (NM_004269.2,184-202).
gcacttccaggacaactta

SEQ ID NO: 111685 - DNA, 19 bp, Homo sapiens
  siRNA target sequence for CRSP8 (NM_004269.2,281-299).
cataacagtgggctgttaa

SEQ ID NO: 111686 - DNA, 19 bp, Homo sapiens
  siRNA target sequence for CRSP8 (NM_004269.2,317-335).
gacaaaactcctctctata

SEQ ID NO: 111687 - DNA, 19 bp, Homo sapiens
  siRNA target sequence for CRSP8 (NM_004269.2,341-359).
ctccttcaagcatataagt

SEQ ID NO: 111688 - DNA, 19 bp, Homo sapiens
  siRNA target sequence for CRSP8 (NM_004269.2,350-368).
gcatataagtggtcaaaca

SEQ ID NO: 111689 - DNA, 19 bp, Homo sapiens
  siRNA target sequence for CRSP8 (NM_004269.2,351-369).
catataagtggtcaaacaa

SEQ ID NO: 111690 - DNA, 19 bp, Homo sapiens
  siRNA target sequence for CRSP8 (NM_004269.2,389-407).
ctagcatctggccttttaa

SEQ ID NO: 111691 - DNA, 19 bp, Homo sapiens
  siRNA target sequence for CRSP8 (NM_004269.2,469-487).
ggctcagcccacaactctt

SEQ ID NO: 111692 - DNA, 19 bp, Homo sapiens
  siRNA target sequence for CRSP8 (NM_004269.2,490-508).
cctaccacctcaatatgtt

SEQ ID NO: 111693 - DNA, 19 bp, Homo sapiens
  siRNA target sequence for CRSP8 (NM_004269.2,495-513).
cacctcaatatgttgatga

SEQ ID NO: 111694 - DNA, 19 bp, Homo sapiens
  siRNA target sequence for CRSP8 (NM_004269.2,565-583).
cagacccaatggaacatca

SEQ ID NO: 111695 - DNA, 19 bp, Homo sapiens
  siRNA target sequence for CRSP8 (NM_004269.2,634-652).
gcggagcctgttcattgat

SEQ ID NO: 111696 - DNA, 19 bp, Homo sapiens
  siRNA target sequence for CRSP8 (NM_004269.2,643-661).
gttcattgatcgaacaata

SEQ ID NO: 111697 - DNA, 19 bp, Homo sapiens
  siRNA target sequence for CRSP8 (NM_004269.2,646-664).
cattgatcgaacaatagta

SEQ ID NO: 111698 - DNA, 19 bp, Homo sapiens
  siRNA target sequence for CRSP8 (NM_004269.2,668-686).
ggatataacgagaatgtct

SEQ ID NO: 111699 - DNA, 19 bp, Homo sapiens
  siRNA target sequence for CRSP8 (NM_004269.2,669-687).
gatataacgagaatgtcta

SEQ ID NO: 111700 - DNA, 19 bp, Homo sapiens
  siRNA target sequence for CRSP8 (NM_004269.2,692-710).
gaagatggcaagcttgata

SEQ ID NO: 111701 - DNA, 19 bp, Homo sapiens
  siRNA target sequence for CRSP8 (NM_004269.2,695-713).
gatggcaagcttgatatat

SEQ ID NO: 111702 - DNA, 19 bp, Homo sapiens
  siRNA target sequence for CRSP8 (NM_004269.2,698-716).
ggcaagcttgatatatggt

SEQ ID NO: 111703 - DNA, 19 bp, Homo sapiens
  siRNA target sequence for CRSP8 (NM_004269.2,704-722).
cttgatatatggtccaaat

SEQ ID NO: 111704 - DNA, 19 bp, Homo sapiens
  siRNA target sequence for CRSP8 (NM_004269.2,707-725).
gatatatggtccaaatcca

SEQ ID NO: 111705 - DNA, 19 bp, Homo sapiens
  siRNA target sequence for CRSP8 (NM_004269.2,714-732).
ggtccaaatccaactatca

SEQ ID NO: 111706 - DNA, 19 bp, Homo sapiens
  siRNA target sequence for CRSP8 (NM_004269.2,806-824).
gtggtccgatccttcatga

SEQ ID NO: 111707 - DNA, 19 bp, Homo sapiens
  siRNA target sequence for CRSP8 (NM_004269.2,817-835).
cttcatgacctggttaaga

SEQ ID NO: 111708 - DNA, 19 bp, Homo sapiens
  siRNA target sequence for CRSP8 (NM_004269.2,825-843).
cctggttaagaagttacat

SEQ ID NO: 111709 - DNA, 19 bp, Homo sapiens
  siRNA target sequence for CRSP8 (NM_004269.2,826-844).
ctggttaagaagttacata

SEQ ID NO: 111710 - DNA, 19 bp, Homo sapiens
  siRNA target sequence for CRSP9 (NM_004270.3,169-187).
ctccaataaaagacagtta

SEQ ID NO: 111711 - DNA, 19 bp, Homo sapiens
  siRNA target sequence for CRSP9 (NM_004270.3,171-189).
ccaataaaagacagttaca

SEQ ID NO: 111712 - DNA, 19 bp, Homo sapiens
  siRNA target sequence for CRSP9 (NM_004270.3,172-190).
caataaaagacagttacat

SEQ ID NO: 111713 - DNA, 19 bp, Homo sapiens
  siRNA target sequence for CRSP9 (NM_004270.3,199-217).
gcaatcagttccaatgtga

SEQ ID NO: 111714 - DNA, 19 bp, Homo sapiens
  siRNA target sequence for CRSP9 (NM_004270.3,200-218).
caatcagttccaatgtgat

SEQ ID NO: 111715 - DNA, 19 bp, Homo sapiens
  siRNA target sequence for CRSP9 (NM_004270.3,359-377).
ccctgggagtataaaacga

SEQ ID NO: 111716 - DNA, 19 bp, Homo sapiens
  siRNA target sequence for CRSP9 (NM_004270.3,367-385).
gtataaaacgagaagagaa

SEQ ID NO: 111717 - DNA, 19 bp, Homo sapiens
  siRNA target sequence for CRSP9 (NM_004270.3,414-432).
cacgtgcatcatcttataa

SEQ ID NO: 111718 - DNA, 19 bp, Homo sapiens
  siRNA target sequence for CRSP9 (NM_004270.3,416-434).
cgtgcatcatcttataaat

SEQ ID NO: 111719 - DNA, 19 bp, Homo sapiens
  siRNA target sequence for CRSP9 (NM_004270.3,527-545).
gcacctggaacgagtaatt

SEQ ID NO: 111720 - DNA, 19 bp, Homo sapiens
  siRNA target sequence for CRSP9 (NM_004270.3,530-548).
cctggaacgagtaattgaa

SEQ ID NO: 111721 - DNA, 19 bp, Homo sapiens
  siRNA target sequence for CRSP9 (NM_004270.3,568-586).
cttctttgcctgatgattt

SEQ ID NO: 111722 - DNA, 19 bp, Homo sapiens
  siRNA target sequence for CRSP9 (NM_004270.3,604-622).
gaatgagagtaaaaactga

SEQ ID NO: 111723 - DNA, 19 bp, Homo sapiens
  siRNA target sequence for CRSP9 (NM_004270.3,657-675).
ggacagaatgaacatcaaa

SEQ ID NO: 111724 - DNA, 19 bp, Homo sapiens
  siRNA target sequence for CRSP9 (NM_004270.3,694-712).
ggagagatcagattataga

SEQ ID NO: 111725 - DNA, 19 bp, Homo sapiens
  siRNA target sequence for CRSP9 (NM_004270.3,721-739).
ctgccttgtgtgtcctaat

SEQ ID NO: 111726 - DNA, 19 bp, Homo sapiens
  siRNA target sequence for CRSP9 (NM_004270.3,724-742).
ccttgtgtgtcctaattga

SEQ ID NO: 111727 - DNA, 19 bp, Homo sapiens
  siRNA target sequence for CRSP9 (NM_004270.3,725-743).
cttgtgtgtcctaattgat

SEQ ID NO: 111728 - DNA, 19 bp, Homo sapiens
  siRNA target sequence for DTX1 (NM_004416.1,631-649).
ccgtgtgccaccacattga

SEQ ID NO: 111729 - DNA, 19 bp, Homo sapiens
  siRNA target sequence for DTX1 (NM_004416.1,852-870).
gcatggacggcctacgata

SEQ ID NO: 111730 - DNA, 19 bp, Homo sapiens
  siRNA target sequence for DTX1 (NM_004416.1,853-871).
catggacggcctacgatat

SEQ ID NO: 111731 - DNA, 19 bp, Homo sapiens
  siRNA target sequence for DTX1 (NM_004416.1,1457-1475).
cccggtgaagaacttgaat

SEQ ID NO: 111732 - DNA, 19 bp, Homo sapiens
  siRNA target sequence for DTX1 (NM_004416.1,1645-1663).
ccaagaagaagcaccttaa

SEQ ID NO: 111733 - DNA, 19 bp, Homo sapiens
  siRNA target sequence for DTX1 (NM_004416.1,2173-2191).
gaagactcatcttcactat

SEQ ID NO: 111734 - DNA, 19 bp, Homo sapiens
  siRNA target sequence for GCN5L2 (NM_021078.1,601-619).
gacaccaagcaggtctatt

SEQ ID NO: 111735 - DNA, 19 bp, Homo sapiens
  siRNA target sequence for GCN5L2 (NM_021078.1,605-623).
ccaagcaggtctatttcta

SEQ ID NO: 111736 - DNA, 19 bp, Homo sapiens
  siRNA target sequence for GCN5L2 (NM_021078.1,720-738).
gcagggtgtgctgaacttt

SEQ ID NO: 111737 - DNA, 19 bp, Homo sapiens
  siRNA target sequence for GCN5L2 (NM_021078.1,782-800).
cgatgttcgagctctcaaa

SEQ ID NO: 111738 - DNA, 19 bp, Homo sapiens
  siRNA target sequence for GCN5L2 (NM_021078.1,880-898).
gctacctacaaggtcaatt

SEQ ID NO: 111739 - DNA, 19 bp, Homo sapiens
  siRNA target sequence for GCN5L2 (NM_021078.1,881-899).
ctacctacaaggtcaatta

SEQ ID NO: 111740 - DNA, 19 bp, Homo sapiens
  siRNA target sequence for GCN5L2 (NM_021078.1,983-1001).
gccttctccggtccatttt

SEQ ID NO: 111741 - DNA, 19 bp, Homo sapiens
  siRNA target sequence for GCN5L2 (NM_021078.1,985-1003).
cttctccggtccattttca

SEQ ID NO: 111742 - DNA, 19 bp, Homo sapiens
  siRNA target sequence for GCN5L2 (NM_021078.1,1621-1639).
cgcatgcctaaggagtata

SEQ ID NO: 111743 - DNA, 19 bp, Homo sapiens
  siRNA target sequence for GCN5L2 (NM_021078.1,1710-1728).
catctgcttccgcatgttt

SEQ ID NO: 111744 - DNA, 19 bp, Homo sapiens
  siRNA target sequence for GCN5L2 (NM_021078.1,1813-1831).
cacctgaaggagtatcaca

SEQ ID NO: 111745 - DNA, 19 bp, Homo sapiens
  siRNA target sequence for GCN5L2 (NM_021078.1,1875-1893).
cgccatcggctacttcaaa

SEQ ID NO: 111746 - DNA, 19 bp, Homo sapiens
  siRNA target sequence for GCN5L2 (NM_021078.1,1876-1894).
gccatcggctacttcaaaa

SEQ ID NO: 111747 - DNA, 19 bp, Homo sapiens
  siRNA target sequence for GCN5L2 (NM_021078.1,1933-1951).
cgctacctgggctacatca

SEQ ID NO: 111748 - DNA, 19 bp, Homo sapiens
  siRNA target sequence for GCN5L2 (NM_021078.1,1934-1952).
gctacctgggctacatcaa

SEQ ID NO: 111749 - DNA, 19 bp, Homo sapiens
  siRNA target sequence for GCN5L2 (NM_021078.1,2221-2239).
ctctacacaaccctcaaaa

SEQ ID NO: 111750 - DNA, 19 bp, Homo sapiens
  siRNA target sequence for GCN5L2 (NM_021078.1,2303-2321).
cggaggcccctgactacta

SEQ ID NO: 111751 - DNA, 19 bp, Homo sapiens
  siRNA target sequence for GCN5L2 (NM_021078.1,2515-2533).
gagggaggcctcattgaca

SEQ ID NO: 111752 - DNA, 19 bp, Homo sapiens
  siRNA target sequence for GTF2A1 (NM_015859.1,407-425).
ggcgaactcggcaaataca

SEQ ID NO: 111753 - DNA, 19 bp, Homo sapiens
  siRNA target sequence for GTF2A1 (NM_015859.1,408-426).
gcgaactcggcaaatacaa

SEQ ID NO: 111754 - DNA, 19 bp, Homo sapiens
  siRNA target sequence for GTF2A1 (NM_015859.1,424-442).
caaacaccgtgcctaaatt

SEQ ID NO: 111755 - DNA, 19 bp, Homo sapiens
  siRNA target sequence for GTF2A1 (NM_015859.1,513-531).
caagtactgatggaactaa

SEQ ID NO: 111756 - DNA, 19 bp, Homo sapiens
  siRNA target sequence for GTF2A1 (NM_015859.1,565-583).
gggcagtagatggatttca

SEQ ID NO: 111757 - DNA, 19 bp, Homo sapiens
  siRNA target sequence for GTF2A1 (NM_015859.1,566-584).
ggcagtagatggatttcat

SEQ ID NO: 111758 - DNA, 19 bp, Homo sapiens
  siRNA target sequence for GTF2A1 (NM_015859.1,599-617).
gcttctactgcaagttcaa

SEQ ID NO: 111759 - DNA, 19 bp, Homo sapiens
  siRNA target sequence for GTF2A1 (NM_015859.1,705-723).
cagacccagcaggttctta

SEQ ID NO: 111760 - DNA, 19 bp, Homo sapiens
  siRNA target sequence for GTF2A1 (NM_015859.1,710-728).
ccagcaggttcttattcct

SEQ ID NO: 111761 - DNA, 19 bp, Homo sapiens
  siRNA target sequence for GTF2A1 (NM_015859.1,742-760).
ccacagcaccacaagttat

SEQ ID NO: 111762 - DNA, 19 bp, Homo sapiens
  siRNA target sequence for GTF2A1 (NM_015859.1,743-761).
cacagcaccacaagttatt

SEQ ID NO: 111763 - DNA, 19 bp, Homo sapiens
  siRNA target sequence for GTF2A1 (NM_015859.1,766-784).
cagattctaagttgataca

SEQ ID NO: 111764 - DNA, 19 bp, Homo sapiens
  siRNA target sequence for GTF2A1 (NM_015859.1,772-790).
ctaagttgatacagcatat

SEQ ID NO: 111765 - DNA, 19 bp, Homo sapiens
  siRNA target sequence for GTF2A1 (NM_015859.1,853-871).
ctcctgttcagcagatatt

SEQ ID NO: 111766 - DNA, 19 bp, Homo sapiens
  siRNA target sequence for GTF2A1 (NM_015859.1,909-927).
gccaatggtgcccaatata

SEQ ID NO: 111767 - DNA, 19 bp, Homo sapiens
  siRNA target sequence for GTF2A1 (NM_015859.1,916-934).
gtgcccaatatatctttca

SEQ ID NO: 111768 - DNA, 19 bp, Homo sapiens
  siRNA target sequence for GTF2A1 (NM_015859.1,991-1009).
gagtacaagctcctgttat

SEQ ID NO: 111769 - DNA, 19 bp, Homo sapiens
  siRNA target sequence for GTF2A1 (NM_015859.1,1068-1086).
cagcctcagcaaatcttat

SEQ ID NO: 111770 - DNA, 19 bp, Homo sapiens
  siRNA target sequence for GTF2A1 (NM_015859.1,1204-1222).
ctccattggtcttacaagt

SEQ ID NO: 111771 - DNA, 19 bp, Homo sapiens
  siRNA target sequence for GTF2A1 (NM_015859.1,1224-1242).
gatggaactggggatacat

SEQ ID NO: 111772 - DNA, 19 bp, Homo sapiens
  siRNA target sequence for GTF2A1 (NM_015859.1,1340-1358).
gcccctcaatagtgaagat

SEQ ID NO: 111773 - DNA, 19 bp, Homo sapiens
  siRNA target sequence for GTF2A1 (NM_015859.1,1342-1360).
ccctcaatagtgaagatga

SEQ ID NO: 111774 - DNA, 19 bp, Homo sapiens
  siRNA target sequence for GTF2A1 (NM_015859.1,1373-1391).
ggaaggacaggaactcttt

SEQ ID NO: 111775 - DNA, 19 bp, Homo sapiens
  siRNA target sequence for GTF2A1 (NM_015859.1,1394-1412).
cacagaaaatgttgttgta

SEQ ID NO: 111776 - DNA, 19 bp, Homo sapiens
  siRNA target sequence for GTF2A1 (NM_015859.1,1410-1428).
gtatgccaatatgataaga

SEQ ID NO: 111777 - DNA, 19 bp, Homo sapiens
  siRNA target sequence for GTF2A1 (NM_015859.1,1414-1432).
gccaatatgataagataca

SEQ ID NO: 111778 - DNA, 19 bp, Homo sapiens
  siRNA target sequence for GTF2A1 (NM_015859.1,1488-1506).
ggaagagattatatatttt

SEQ ID NO: 111779 - DNA, 19 bp, Homo sapiens
  siRNA target sequence for HCF-2 (NM_013320.1,33-51).
caactggaggcgagtttct

SEQ ID NO: 111780 - DNA, 19 bp, Homo sapiens
  siRNA target sequence for HCF-2 (NM_013320.1,154-172).
gagctgcacgtctacaaca

SEQ ID NO: 111781 - DNA, 19 bp, Homo sapiens
  siRNA target sequence for HCF-2 (NM_013320.1,165-183).
ctacaacacggctacgaat

SEQ ID NO: 111782 - DNA, 19 bp, Homo sapiens
  siRNA target sequence for HCF-2 (NM_013320.1,189-207).
gtttctgccagctgttaga

SEQ ID NO: 111783 - DNA, 19 bp, Homo sapiens
  siRNA target sequence for HCF-2 (NM_013320.1,197-215).
cagctgttagaggagatat

SEQ ID NO: 111784 - DNA, 19 bp, Homo sapiens
  siRNA target sequence for HCF-2 (NM_013320.1,225-243).
ctgtgctgcccatggattt

SEQ ID NO: 111785 - DNA, 19 bp, Homo sapiens
  siRNA target sequence for HCF-2 (NM_013320.1,227-245).
gtgctgcccatggatttgt

SEQ ID NO: 111786 - DNA, 19 bp, Homo sapiens
  siRNA target sequence for HCF-2 (NM_013320.1,253-271).
ggtaccagaatattagtat

SEQ ID NO: 111787 - DNA, 19 bp, Homo sapiens
  siRNA target sequence for HCF-2 (NM_013320.1,254-272).
gtaccagaatattagtatt

SEQ ID NO: 111788 - DNA, 19 bp, Homo sapiens
  siRNA target sequence for HCF-2 (NM_013320.1,322-340).
caagcaagtcgttggttat

SEQ ID NO: 111789 - DNA, 19 bp, Homo sapiens
  siRNA target sequence for HCF-2 (NM_013320.1,325-343).
gcaagtcgttggttatgga

SEQ ID NO: 111790 - DNA, 19 bp, Homo sapiens
  siRNA target sequence for HCF-2 (NM_013320.1,329-347).
gtcgttggttatggaaaaa

SEQ ID NO: 111791 - DNA, 19 bp, Homo sapiens
  siRNA target sequence for HCF-2 (NM_013320.1,397-415).
ggacatagcttctctttat

SEQ ID NO: 111792 - DNA, 19 bp, Homo sapiens
  siRNA target sequence for HCF-2 (NM_013320.1,398-416).
gacatagcttctctttata

SEQ ID NO: 111793 - DNA, 19 bp, Homo sapiens
  siRNA target sequence for HCF-2 (NM_013320.1,404-422).
gcttctctttatatggtaa

SEQ ID NO: 111794 - DNA, 19 bp, Homo sapiens
  siRNA target sequence for HCF-2 (NM_013320.1,408-426).
ctctttatatggtaacaaa

SEQ ID NO: 111795 - DNA, 19 bp, Homo sapiens
  siRNA target sequence for HCF-2 (NM_013320.1,448-466).
gcaaacgaaagcgaagatt

SEQ ID NO: 111796 - DNA, 19 bp, Homo sapiens
  siRNA target sequence for HCF-2 (NM_013320.1,458-476).
gcgaagattcaaacaataa

SEQ ID NO: 111797 - DNA, 19 bp, Homo sapiens
  siRNA target sequence for HCF-2 (NM_013320.1,459-477).
cgaagattcaaacaataat

SEQ ID NO: 111798 - DNA, 19 bp, Homo sapiens
  siRNA target sequence for HCF-2 (NM_013320.1,588-606).
ccacacagctgttatatat

SEQ ID NO: 111799 - DNA, 19 bp, Homo sapiens
  siRNA target sequence for HCF-2 (NM_013320.1,675-693).
cctatggcagcttgactta

SEQ ID NO: 111800 - DNA, 19 bp, Homo sapiens
  siRNA target sequence for HCF-2 (NM_013320.1,682-700).
cagcttgacttagaaacta

SEQ ID NO: 111801 - DNA, 19 bp, Homo sapiens
  siRNA target sequence for HCF-2 (NM_013320.1,751-769).
cttcatacagccagtgtta

SEQ ID NO: 111802 - DNA, 19 bp, Homo sapiens
  siRNA target sequence for HCF-2 (NM_013320.1,761-779).
ccagtgttataggaaacaa

SEQ ID NO: 111803 - DNA, 19 bp, Homo sapiens
  siRNA target sequence for HCF-2 (NM_013320.1,876-894).
cctaaatctggatacaaca

SEQ ID NO: 111804 - DNA, 19 bp, Homo sapiens
  siRNA target sequence for HCF-2 (NM_013320.1,897-915).
gtggaccaccctagtatca

SEQ ID NO: 111805 - DNA, 19 bp, Homo sapiens
  siRNA target sequence for HCF-2 (NM_013320.1,899-917).
ggaccaccctagtatcaga

SEQ ID NO: 111806 - DNA, 19 bp, Homo sapiens
  siRNA target sequence for HCF-2 (NM_013320.1,916-934).
gattctcaggaagataaaa

SEQ ID NO: 111807 - DNA, 19 bp, Homo sapiens
  siRNA target sequence for HCF-2 (NM_013320.1,962-980).
gccactgtgctgttgcaat

SEQ ID NO: 111808 - DNA, 19 bp, Homo sapiens
  siRNA target sequence for HCF-2 (NM_013320.1,977-995).
caatcggcactcgattgta

SEQ ID NO: 111809 - DNA, 19 bp, Homo sapiens
  siRNA target sequence for HCF-2 (NM_013320.1,981-999).
cggcactcgattgtatttt

SEQ ID NO: 111810 - DNA, 19 bp, Homo sapiens
  siRNA target sequence for HCF-2 (NM_013320.1,1027-1045).
gcactgaatagtcaagttt

SEQ ID NO: 111811 - DNA, 19 bp, Homo sapiens
  siRNA target sequence for HCF-2 (NM_013320.1,1053-1071).
ggatctttggtatcttgat

SEQ ID NO: 111812 - DNA, 19 bp, Homo sapiens
  siRNA target sequence for HCF-2 (NM_013320.1,1062-1080).
gtatcttgatactgagaaa

SEQ ID NO: 111813 - DNA, 19 bp, Homo sapiens
  siRNA target sequence for HCF-2 (NM_013320.1,1085-1103).
cggcaccatctcaagtaca

SEQ ID NO: 111814 - DNA, 19 bp, Homo sapiens
  siRNA target sequence for HCF-2 (NM_013320.1,1116-1134).
cactaccaactcctttcat

SEQ ID NO: 111815 - DNA, 19 bp, Homo sapiens
  siRNA target sequence for HCF-2 (NM_013320.1,1118-1136).
ctaccaactcctttcatgt

SEQ ID NO: 111816 - DNA, 19 bp, Homo sapiens
  siRNA target sequence for HCF-2 (NM_013320.1,1201-1219).
caagctgcatcatcagatt

SEQ ID NO: 111817 - DNA, 19 bp, Homo sapiens
  siRNA target sequence for HCF-2 (NM_013320.1,1204-1222).
gctgcatcatcagattctt

SEQ ID NO: 111818 - DNA, 19 bp, Homo sapiens
  siRNA target sequence for HCF-2 (NM_013320.1,1220-1238).
cttcagcagcaccaaatat

SEQ ID NO: 111819 - DNA, 19 bp, Homo sapiens
  siRNA target sequence for HCF-2 (NM_013320.1,1284-1302).
cgttcctaacagtatcaat

SEQ ID NO: 111820 - DNA, 19 bp, Homo sapiens
  siRNA target sequence for HCF-2 (NM_013320.1,1385-1403).
cggattctaatgccatttt

SEQ ID NO: 111821 - DNA, 19 bp, Homo sapiens
  siRNA target sequence for HCF-2 (NM_013320.1,1386-1404).
ggattctaatgccatttta

SEQ ID NO: 111822 - DNA, 19 bp, Homo sapiens
  siRNA target sequence for HCF-2 (NM_013320.1,1418-1436).
catcaaatgcttctaatca

SEQ ID NO: 111823 - DNA, 19 bp, Homo sapiens
  siRNA target sequence for HCF-2 (NM_013320.1,1421-1439).
caaatgcttctaatcataa

SEQ ID NO: 111824 - DNA, 19 bp, Homo sapiens
  siRNA target sequence for HCF-2 (NM_013320.1,1444-1462).
catgtggtggatatgctaa

SEQ ID NO: 111825 - DNA, 19 bp, Homo sapiens
  siRNA target sequence for HCF-2 (NM_013320.1,1566-1584).
cagcacacaaactatggta

SEQ ID NO: 111826 - DNA, 19 bp, Homo sapiens
  siRNA target sequence for HCF-2 (NM_013320.1,1582-1600).
gtaacccagcagaccatta

SEQ ID NO: 111827 - DNA, 19 bp, Homo sapiens
  siRNA target sequence for HCF-2 (NM_013320.1,1593-1611).
gaccattaaaactgaatca

SEQ ID NO: 111828 - DNA, 19 bp, Homo sapiens
  siRNA target sequence for HCF-2 (NM_013320.1,1604-1622).
ctgaatcatccagtacaaa

SEQ ID NO: 111829 - DNA, 19 bp, Homo sapiens
  siRNA target sequence for HCF-2 (NM_013320.1,1626-1644).
ggcagttgttaaagatgaa

SEQ ID NO: 111830 - DNA, 19 bp, Homo sapiens
  siRNA target sequence for HCF-2 (NM_013320.1,1639-1657).
gatgaaacttcactaacaa

SEQ ID NO: 111831 - DNA, 19 bp, Homo sapiens
  siRNA target sequence for HCF-2 (NM_013320.1,1739-1757).
caacgccgttttctaaaga

SEQ ID NO: 111832 - DNA, 19 bp, Homo sapiens
  siRNA target sequence for HCF-2 (NM_013320.1,1805-1823).
ggtgtgatgtgggaatttt

SEQ ID NO: 111833 - DNA, 19 bp, Homo sapiens
  siRNA target sequence for HCF-2 (NM_013320.1,1837-1855).
gctttggtgagccagtttt

SEQ ID NO: 111834 - DNA, 19 bp, Homo sapiens
  siRNA target sequence for HCF-2 (NM_013320.1,1870-1888).
gggaagcaaagcatctcaa

SEQ ID NO: 111835 - DNA, 19 bp, Homo sapiens
  siRNA target sequence for HCF-2 (NM_013320.1,1910-1928).
ctgactacagcttgcttaa

SEQ ID NO: 111836 - DNA, 19 bp, Homo sapiens
  siRNA target sequence for HCF-2 (NM_013320.1,1912-1930).
gactacagcttgcttaaga

SEQ ID NO: 111837 - DNA, 19 bp, Homo sapiens
  siRNA target sequence for HCF-2 (NM_013320.1,1923-1941).
gcttaagaaacaagatctt

SEQ ID NO: 111838 - DNA, 19 bp, Homo sapiens
  siRNA target sequence for HCF-2 (NM_013320.1,2170-2188).
cagatacaagataatccaa

SEQ ID NO: 111839 - DNA, 19 bp, Homo sapiens
  siRNA target sequence for HCF-2 (NM_013320.1,2194-2212).
cttgtgttcatgaggattt

SEQ ID NO: 111840 - DNA, 19 bp, Homo sapiens
  siRNA target sequence for HCF-2 (NM_013320.1,2197-2215).
gtgttcatgaggatttatt

SEQ ID NO: 111841 - DNA, 19 bp, Homo sapiens
  siRNA target sequence for HCF-2 (NM_013320.1,2218-2236).
ggtcttaagacatcatgta

SEQ ID NO: 111842 - DNA, 19 bp, Homo sapiens
  siRNA target sequence for HCF-2 (NM_013320.1,2219-2237).
gtcttaagacatcatgtat

SEQ ID NO: 111843 - DNA, 19 bp, Homo sapiens
  siRNA target sequence for HCF-2 (NM_013320.1,2226-2244).
gacatcatgtatagtaact

SEQ ID NO: 111844 - DNA, 19 bp, Homo sapiens
  siRNA target sequence for HCF-2 (NM_013320.1,2292-2310).
cattgtgttcaggatatca

SEQ ID NO: 111845 - DNA, 19 bp, Homo sapiens
  siRNA target sequence for HCF-2 (NM_013320.1,2352-2370).
gtggcttcaaggtaacaat

SEQ ID NO: 111846 - DNA, 19 bp, Homo sapiens
  siRNA target sequence for HCF-2 (NM_013320.1,2354-2372).
ggcttcaaggtaacaataa

SEQ ID NO: 111847 - DNA, 19 bp, Homo sapiens
  siRNA target sequence for HCF-2 (NM_013320.1,2356-2374).
cttcaaggtaacaataaga

SEQ ID NO: 111848 - DNA, 19 bp, Homo sapiens
  siRNA target sequence for HSGT1 (NM_007265.1,277-295).
gagtcaagggactcagata

SEQ ID NO: 111849 - DNA, 19 bp, Homo sapiens
  siRNA target sequence for HSGT1 (NM_007265.1,284-302).
gggactcagataaacataa

SEQ ID NO: 111850 - DNA, 19 bp, Homo sapiens
  siRNA target sequence for HSGT1 (NM_007265.1,371-389).
ggcagaatcagcctttcaa

SEQ ID NO: 111851 - DNA, 19 bp, Homo sapiens
  siRNA target sequence for HSGT1 (NM_007265.1,379-397).
cagcctttcaatcttaaat

SEQ ID NO: 111852 - DNA, 19 bp, Homo sapiens
  siRNA target sequence for HSGT1 (NM_007265.1,387-405).
caatcttaaatataaacct

SEQ ID NO: 111853 - DNA, 19 bp, Homo sapiens
  siRNA target sequence for HSGT1 (NM_007265.1,413-431).
gaggtgttcctgctcatat

SEQ ID NO: 111854 - DNA, 19 bp, Homo sapiens
  siRNA target sequence for HSGT1 (NM_007265.1,432-450).
gtttggcgtgacaaagttt

SEQ ID NO: 111855 - DNA, 19 bp, Homo sapiens
  siRNA target sequence for HSGT1 (NM_007265.1,454-472).
gataacattgaggatgaat

SEQ ID NO: 111856 - DNA, 19 bp, Homo sapiens
  siRNA target sequence for HSGT1 (NM_007265.1,473-491).
ggtttattgtttatgtaat

SEQ ID NO: 111857 - DNA, 19 bp, Homo sapiens
  siRNA target sequence for HSGT1 (NM_007265.1,548-566).
gtgaattcttgttaataga

SEQ ID NO: 111858 - DNA, 19 bp, Homo sapiens
  siRNA target sequence for HSGT1 (NM_007265.1,598-616).
cctgaaaatagcaccaata

SEQ ID NO: 111859 - DNA, 19 bp, Homo sapiens
  siRNA target sequence for HSGT1 (NM_007265.1,630-648).
ccatggggaattgtgtatt

SEQ ID NO: 111860 - DNA, 19 bp, Homo sapiens
  siRNA target sequence for HSGT1 (NM_007265.1,631-649).
catggggaattgtgtatta

SEQ ID NO: 111861 - DNA, 19 bp, Homo sapiens
  siRNA target sequence for HSGT1 (NM_007265.1,690-708).
caccacacccccaacaatt

SEQ ID NO: 111862 - DNA, 19 bp, Homo sapiens
  siRNA target sequence for HSGT1 (NM_007265.1,701-719).
caacaattccacaagcatt

SEQ ID NO: 111863 - DNA, 19 bp, Homo sapiens
  siRNA target sequence for HSGT1 (NM_007265.1,704-722).
caattccacaagcattgaa

SEQ ID NO: 111864 - DNA, 19 bp, Homo sapiens
  siRNA target sequence for HSGT1 (NM_007265.1,854-872).
gcattgtggcagtgctaaa

SEQ ID NO: 111865 - DNA, 19 bp, Homo sapiens
  siRNA target sequence for HSGT1 (NM_007265.1,937-955).
cgagcttgtcgtgttttca

SEQ ID NO: 111866 - DNA, 19 bp, Homo sapiens
  siRNA target sequence for HSGT1 (NM_007265.1,940-958).
gcttgtcgtgttttcaaga

SEQ ID NO: 111867 - DNA, 19 bp, Homo sapiens
  siRNA target sequence for HSGT1 (NM_007265.1,944-962).
gtcgtgttttcaagacatt

SEQ ID NO: 111868 - DNA, 19 bp, Homo sapiens
  siRNA target sequence for HSGT1 (NM_007265.1,946-964).
cgtgttttcaagacattct

SEQ ID NO: 111869 - DNA, 19 bp, Homo sapiens
  siRNA target sequence for HSGT1 (NM_007265.1,984-1002).
gacatcggtcacattcact

SEQ ID NO: 111870 - DNA, 19 bp, Homo sapiens
  siRNA target sequence for HSGT1 (NM_007265.1,986-1004).
catcggtcacattcactaa

SEQ ID NO: 111871 - DNA, 19 bp, Homo sapiens
  siRNA target sequence for HSGT1 (NM_007265.1,1007-1025).
gtctatatgcacaattggt

SEQ ID NO: 111872 - DNA, 19 bp, Homo sapiens
  siRNA target sequence for HSGT1 (NM_007265.1,1087-1105).
cagtaccgagcccatgaat

SEQ ID NO: 111873 - DNA, 19 bp, Homo sapiens
  siRNA target sequence for HSGT1 (NM_007265.1,1098-1116).
ccatgaattgggcatgaaa

SEQ ID NO: 111874 - DNA, 19 bp, Homo sapiens
  siRNA target sequence for HSGT1 (NM_007265.1,1123-1141).
catggatttgagatcttat

SEQ ID NO: 111875 - DNA, 19 bp, Homo sapiens
  siRNA target sequence for HSGT1 (NM_007265.1,1132-1150).
gagatcttatgctccaaat

SEQ ID NO: 111876 - DNA, 19 bp, Homo sapiens
  siRNA target sequence for HSGT1 (NM_007265.1,1145-1163).
ccaaatgtagcccacattt

SEQ ID NO: 111877 - DNA, 19 bp, Homo sapiens
  siRNA target sequence for HSGT1 (NM_007265.1,1151-1169).
gtagcccacatttttctga

SEQ ID NO: 111878 - DNA, 19 bp, Homo sapiens
  siRNA target sequence for HSGT1 (NM_007265.1,1208-1226).
ccagtttccttgaaagtct

SEQ ID NO: 111879 - DNA, 19 bp, Homo sapiens
  siRNA target sequence for HSGT1 (NM_007265.1,1225-1243).
ctgaaaaagaatgattact

SEQ ID NO: 111880 - DNA, 19 bp, Homo sapiens
  siRNA target sequence for HSGT1 (NM_007265.1,1354-1372).
ggtgaagaaatcttaacct

SEQ ID NO: 111881 - DNA, 19 bp, Homo sapiens
  siRNA target sequence for HSGT1 (NM_007265.1,1371-1389).
cttattacagacaatacca

SEQ ID NO: 111882 - DNA, 19 bp, Homo sapiens
  siRNA target sequence for HSGT1 (NM_007265.1,1378-1396).
cagacaataccatttgata

SEQ ID NO: 111883 - DNA, 19 bp, Homo sapiens
  siRNA target sequence for HSGT1 (NM_007265.1,1380-1398).
gacaataccatttgatata

SEQ ID NO: 111884 - DNA, 19 bp, Homo sapiens
  siRNA target sequence for HSGT1 (NM_007265.1,1410-1428).
gaaagaagcagctaatctt

SEQ ID NO: 111885 - DNA, 19 bp, Homo sapiens
  siRNA target sequence for HSGT1 (NM_007265.1,1539-1557).
ggagcagaactatgactta

SEQ ID NO: 111886 - DNA, 19 bp, Homo sapiens
  siRNA target sequence for HSGT1 (NM_007265.1,1542-1560).
gcagaactatgacttaact

SEQ ID NO: 111887 - DNA, 19 bp, Homo sapiens
  siRNA target sequence for HSGT1 (NM_007265.1,1696-1714).
gggccaaggcctaatgagt

SEQ ID NO: 111888 - DNA, 19 bp, Homo sapiens
  siRNA target sequence for HSGT1 (NM_007265.1,1743-1761).
ctttgaatgtttagatagt

SEQ ID NO: 111889 - DNA, 19 bp, Homo sapiens
  siRNA target sequence for HSGT1 (NM_007265.1,1810-1828).
ctgaaaggaacacttgata

SEQ ID NO: 111890 - DNA, 19 bp, Homo sapiens
  siRNA target sequence for HSGT1 (NM_007265.1,1816-1834).
ggaacacttgataatctca

SEQ ID NO: 111891 - DNA, 19 bp, Homo sapiens
  siRNA target sequence for HSGT1 (NM_007265.1,1817-1835).
gaacacttgataatctcaa

SEQ ID NO: 111892 - DNA, 19 bp, Homo sapiens
  siRNA target sequence for HSGT1 (NM_007265.1,1922-1940).
cccagactaccgataacaa

SEQ ID NO: 111893 - DNA, 19 bp, Homo sapiens
  siRNA target sequence for HSGT1 (NM_007265.1,1923-1941).
ccagactaccgataacaat

SEQ ID NO: 111894 - DNA, 19 bp, Homo sapiens
  siRNA target sequence for HSGT1 (NM_007265.1,1924-1942).
cagactaccgataacaatt

SEQ ID NO: 111895 - DNA, 19 bp, Homo sapiens
  siRNA target sequence for HSGT1 (NM_007265.1,1926-1944).
gactaccgataacaattca

SEQ ID NO: 111896 - DNA, 19 bp, Homo sapiens
  siRNA target sequence for HSGT1 (NM_007265.1,1928-1946).
ctaccgataacaattcaga

SEQ ID NO: 111897 - DNA, 19 bp, Homo sapiens
  siRNA target sequence for HSGT1 (NM_007265.1,1958-1976).
ctggtacgggagaatctgt

SEQ ID NO: 111898 - DNA, 19 bp, Homo sapiens
  siRNA target sequence for HSGT1 (NM_007265.1,1960-1978).
ggtacgggagaatctgtta

SEQ ID NO: 111899 - DNA, 19 bp, Homo sapiens
  siRNA target sequence for HSGT1 (NM_007265.1,1961-1979).
gtacgggagaatctgttat

SEQ ID NO: 111900 - DNA, 19 bp, Homo sapiens
  siRNA target sequence for HSGT1 (NM_007265.1,2008-2026).
gtttcaaatatattggaat

SEQ ID NO: 111901 - DNA, 19 bp, Homo sapiens
  siRNA target sequence for HSGT1 (NM_007265.1,2057-2075).
ctgcttccaatcttttaca

SEQ ID NO: 111902 - DNA, 19 bp, Homo sapiens
  siRNA target sequence for HSGT1 (NM_007265.1,2059-2077).
gcttccaatcttttacaaa

SEQ ID NO: 111903 - DNA, 19 bp, Homo sapiens
  siRNA target sequence for HSGT1 (NM_007265.1,2107-2125).
gatcacagaccaacaagta

SEQ ID NO: 111904 - DNA, 19 bp, Homo sapiens
  siRNA target sequence for HTATIP2 (NM_006410.3,135-153).
cgaagcttcgggaagactt

SEQ ID NO: 111905 - DNA, 19 bp, Homo sapiens
  siRNA target sequence for HTATIP2 (NM_006410.3,163-181).
gaataaatccgtctttatt

SEQ ID NO: 111906 - DNA, 19 bp, Homo sapiens
  siRNA target sequence for HTATIP2 (NM_006410.3,201-219).
ccggcagagtgctcttaaa

SEQ ID NO: 111907 - DNA, 19 bp, Homo sapiens
  siRNA target sequence for HTATIP2 (NM_006410.3,205-223).
cagagtgctcttaaaggaa

SEQ ID NO: 111908 - DNA, 19 bp, Homo sapiens
  siRNA target sequence for HTATIP2 (NM_006410.3,207-225).
gagtgctcttaaaggaaat

SEQ ID NO: 111909 - DNA, 19 bp, Homo sapiens
  siRNA target sequence for HTATIP2 (NM_006410.3,279-297).
ccttcgacgaggaagctta

SEQ ID NO: 111910 - DNA, 19 bp, Homo sapiens
  siRNA target sequence for HTATIP2 (NM_006410.3,280-298).
cttcgacgaggaagcttat

SEQ ID NO: 111911 - DNA, 19 bp, Homo sapiens
  siRNA target sequence for HTATIP2 (NM_006410.3,343-361).
ctacgcctctgcctttcaa

SEQ ID NO: 111912 - DNA, 19 bp, Homo sapiens
  siRNA target sequence for HTATIP2 (NM_006410.3,429-447).
gtgttgaccgagattatgt

SEQ ID NO: 111913 - DNA, 19 bp, Homo sapiens
  siRNA target sequence for HTATIP2 (NM_006410.3,473-491).
gctggagggtgcaaacatt

SEQ ID NO: 111914 - DNA, 19 bp, Homo sapiens
  siRNA target sequence for HTATIP2 (NM_006410.3,476-494).
ggagggtgcaaacatttca

SEQ ID NO: 111915 - DNA, 19 bp, Homo sapiens
  siRNA target sequence for HTATIP2 (NM_006410.3,496-514).
cttgctatcctctaaagga

SEQ ID NO: 111916 - DNA, 19 bp, Homo sapiens
  siRNA target sequence for HTATIP2 (NM_006410.3,504-522).
cctctaaaggagctgataa

SEQ ID NO: 111917 - DNA, 19 bp, Homo sapiens
  siRNA target sequence for HTATIP2 (NM_006410.3,610-628).
gcctggagttctgttatgt

SEQ ID NO: 111918 - DNA, 19 bp, Homo sapiens
  siRNA target sequence for HTATIP2 (NM_006410.3,650-668).
ggtgaatggctggttagaa

SEQ ID NO: 111919 - DNA, 19 bp, Homo sapiens
  siRNA target sequence for HTATIP2 (NM_006410.3,651-669).
gtgaatggctggttagaaa

SEQ ID NO: 111920 - DNA, 19 bp, Homo sapiens
  siRNA target sequence for HTATIP2 (NM_006410.3,653-671).
gaatggctggttagaaagt

SEQ ID NO: 111921 - DNA, 19 bp, Homo sapiens
  siRNA target sequence for MYCBP (NM_012333.2,131-149).
ggtagccttatatgaagaa

SEQ ID NO: 111922 - DNA, 19 bp, Homo sapiens
  siRNA target sequence for MYCBP (NM_012333.2,159-177).
cctaacagtgctttggatt

SEQ ID NO: 111923 - DNA, 19 bp, Homo sapiens
  siRNA target sequence for MYCBP (NM_012333.2,237-255).
ctagaactggccgaaatga

SEQ ID NO: 111924 - DNA, 19 bp, Homo sapiens
  siRNA target sequence for MYCBP (NM_012333.2,260-278).
gaagtatgaagctattgta

SEQ ID NO: 111925 - DNA, 19 bp, Homo sapiens
  siRNA target sequence for MYCBP (NM_012333.2,301-319).
caaagcttgctcagtatga

SEQ ID NO: 111926 - DNA, 19 bp, Homo sapiens
  siRNA target sequence for NCOA1 (NM_003743.3,414-432).
gaaaacagtcgatcagata

SEQ ID NO: 111927 - DNA, 19 bp, Homo sapiens
  siRNA target sequence for NCOA1 (NM_003743.3,467-485).
caactgatgacgatgtaca

SEQ ID NO: 111928 - DNA, 19 bp, Homo sapiens
  siRNA target sequence for NCOA1 (NM_003743.3,472-490).
gatgacgatgtacagaaat

SEQ ID NO: 111929 - DNA, 19 bp, Homo sapiens
  siRNA target sequence for NCOA1 (NM_003743.3,495-513).
catctcatcaagtagtcaa

SEQ ID NO: 111930 - DNA, 19 bp, Homo sapiens
  siRNA target sequence for NCOA1 (NM_003743.3,585-603).
ctgtgaagggagaattgta

SEQ ID NO: 111931 - DNA, 19 bp, Homo sapiens
  siRNA target sequence for NCOA1 (NM_003743.3,615-633).
gaatgtaaccagctactta

SEQ ID NO: 111932 - DNA, 19 bp, Homo sapiens
  siRNA target sequence for NCOA1 (NM_003743.3,619-637).
gtaaccagctacttaggtt

SEQ ID NO: 111933 - DNA, 19 bp, Homo sapiens
  siRNA target sequence for NCOA1 (NM_003743.3,623-641).
ccagctacttaggttacaa

SEQ ID NO: 111934 - DNA, 19 bp, Homo sapiens
  siRNA target sequence for NCOA1 (NM_003743.3,626-644).
gctacttaggttacaatca

SEQ ID NO: 111935 - DNA, 19 bp, Homo sapiens
  siRNA target sequence for NCOA1 (NM_003743.3,717-735).
gctaccaaaatcactagta

SEQ ID NO: 111936 - DNA, 19 bp, Homo sapiens
  siRNA target sequence for NCOA1 (NM_003743.3,718-736).
ctaccaaaatcactagtaa

SEQ ID NO: 111937 - DNA, 19 bp, Homo sapiens
  siRNA target sequence for NCOA1 (NM_003743.3,757-775).
gaggcaacacgacgaaata

SEQ ID NO: 111938 - DNA, 19 bp, Homo sapiens
  siRNA target sequence for NCOA1 (NM_003743.3,767-785).
gacgaaatagccatacctt

SEQ ID NO: 111939 - DNA, 19 bp, Homo sapiens
  siRNA target sequence for NCOA1 (NM_003743.3,769-787).
cgaaatagccataccttta

SEQ ID NO: 111940 - DNA, 19 bp, Homo sapiens
  siRNA target sequence for NCOA1 (NM_003743.3,842-860).
cttgccagcgttatgaagt

SEQ ID NO: 111941 - DNA, 19 bp, Homo sapiens
  siRNA target sequence for NCOA1 (NM_003743.3,845-863).
gccagcgttatgaagtaat

SEQ ID NO: 111942 - DNA, 19 bp, Homo sapiens
  siRNA target sequence for NCOA1 (NM_003743.3,964-982).
gctattacgggtgtagaat

SEQ ID NO: 111943 - DNA, 19 bp, Homo sapiens
  siRNA target sequence for NCOA1 (NM_003743.3,971-989).
cgggtgtagaatcctttat

SEQ ID NO: 111944 - DNA, 19 bp, Homo sapiens
  siRNA target sequence for NCOA1 (NM_003743.3,1170-1188).
ctccagcccctcctataga

SEQ ID NO: 111945 - DNA, 19 bp, Homo sapiens
  siRNA target sequence for NCOA1 (NM_003743.3,1175-1193).
gcccctcctatagattcat

SEQ ID NO: 111946 - DNA, 19 bp, Homo sapiens
  siRNA target sequence for NCOA1 (NM_003743.3,1177-1195).
ccctcctatagattcatat

SEQ ID NO: 111947 - DNA, 19 bp, Homo sapiens
  siRNA target sequence for NCOA1 (NM_003743.3,1178-1196).
cctcctatagattcatatt

SEQ ID NO: 111948 - DNA, 19 bp, Homo sapiens
  siRNA target sequence for NCOA1 (NM_003743.3,1197-1215).
gaatgatgggacaatgctt

SEQ ID NO: 111949 - DNA, 19 bp, Homo sapiens
  siRNA target sequence for NCOA1 (NM_003743.3,1221-1239).
ccacaccaagtgtaaactt

SEQ ID NO: 111950 - DNA, 19 bp, Homo sapiens
  siRNA target sequence for NCOA1 (NM_003743.3,1222-1240).
cacaccaagtgtaaacttt

SEQ ID NO: 111951 - DNA, 19 bp, Homo sapiens
  siRNA target sequence for NCOA1 (NM_003743.3,1226-1244).
ccaagtgtaaactttgcta

SEQ ID NO: 111952 - DNA, 19 bp, Homo sapiens
  siRNA target sequence for NCOA1 (NM_003743.3,1253-1271).
gtccagacatgcaaccttt

SEQ ID NO: 111953 - DNA, 19 bp, Homo sapiens
  siRNA target sequence for NCOA1 (NM_003743.3,1258-1276).
gacatgcaacctttcatca

SEQ ID NO: 111954 - DNA, 19 bp, Homo sapiens
  siRNA target sequence for NCOA1 (NM_003743.3,1310-1328).
ggctttctcctcaagatga

SEQ ID NO: 111955 - DNA, 19 bp, Homo sapiens
  siRNA target sequence for NCOA1 (NM_003743.3,1318-1336).
cctcaagatgacactaatt

SEQ ID NO: 111956 - DNA, 19 bp, Homo sapiens
  siRNA target sequence for NCOA1 (NM_003743.3,1329-1347).
cactaattctggaatgtca

SEQ ID NO: 111957 - DNA, 19 bp, Homo sapiens
  siRNA target sequence for NCOA1 (NM_003743.3,1344-1362).
gtcaattccccgagtaaat

SEQ ID NO: 111958 - DNA, 19 bp, Homo sapiens
  siRNA target sequence for NCOA1 (NM_003743.3,1364-1382).
cctcggtcaatcctagtat

SEQ ID NO: 111959 - DNA, 19 bp, Homo sapiens
  siRNA target sequence for NCOA1 (NM_003743.3,1368-1386).
ggtcaatcctagtatctct

SEQ ID NO: 111960 - DNA, 19 bp, Homo sapiens
  siRNA target sequence for NCOA1 (NM_003743.3,1437-1455).
catggtatccaccagaata

SEQ ID NO: 111961 - DNA, 19 bp, Homo sapiens
  siRNA target sequence for NCOA1 (NM_003743.3,1477-1495).
cttcatagcagcagtcata

SEQ ID NO: 111962 - DNA, 19 bp, Homo sapiens
  siRNA target sequence for NCOA1 (NM_003743.3,1480-1498).
catagcagcagtcatagta

SEQ ID NO: 111963 - DNA, 19 bp, Homo sapiens
  siRNA target sequence for NCOA1 (NM_003743.3,1485-1503).
cagcagtcatagtaattct

SEQ ID NO: 111964 - DNA, 19 bp, Homo sapiens
  siRNA target sequence for NCOA1 (NM_003743.3,1530-1548).
ctcacccggaagtcagatt

SEQ ID NO: 111965 - DNA, 19 bp, Homo sapiens
  siRNA target sequence for NCOA1 (NM_003743.3,1553-1571).
ccaatgttgccttaaacca

SEQ ID NO: 111966 - DNA, 19 bp, Homo sapiens
  siRNA target sequence for NCOA1 (NM_003743.3,1554-1572).
caatgttgccttaaaccaa

SEQ ID NO: 111967 - DNA, 19 bp, Homo sapiens
  siRNA target sequence for NCOA1 (NM_003743.3,1590-1608).
gagcagtaatccctcttta

SEQ ID NO: 111968 - DNA, 19 bp, Homo sapiens
  siRNA target sequence for NCOA1 (NM_003743.3,1700-1718).
ggcccaggatgccaaacaa

SEQ ID NO: 111969 - DNA, 19 bp, Homo sapiens
  siRNA target sequence for NCOA1 (NM_003743.3,1701-1719).
gcccaggatgccaaacaat

SEQ ID NO: 111970 - DNA, 19 bp, Homo sapiens
  siRNA target sequence for NCOA1 (NM_003743.3,1707-1725).
gatgccaaacaattccttt

SEQ ID NO: 111971 - DNA, 19 bp, Homo sapiens
  siRNA target sequence for NCOA1 (NM_003743.3,1753-1771).
cccgttggcatgacaagta

SEQ ID NO: 111972 - DNA, 19 bp, Homo sapiens
  siRNA target sequence for NCOA1 (NM_003743.3,1755-1773).
cgttggcatgacaagtagt

SEQ ID NO: 111973 - DNA, 19 bp, Homo sapiens
  siRNA target sequence for NCOA1 (NM_003743.3,1764-1782).
gacaagtagtgcctgtaat

SEQ ID NO: 111974 - DNA, 19 bp, Homo sapiens
  siRNA target sequence for NCOA1 (NM_003743.3,1817-1835).
catctttacagggtatgaa

SEQ ID NO: 111975 - DNA, 19 bp, Homo sapiens
  siRNA target sequence for NCOA1 (NM_003743.3,1820-1838).
ctttacagggtatgaatga

SEQ ID NO: 111976 - DNA, 19 bp, Homo sapiens
  siRNA target sequence for NCOA1 (NM_003743.3,1888-1906).
cagatgagctcacagaatt

SEQ ID NO: 111977 - DNA, 19 bp, Homo sapiens
  siRNA target sequence for NCOA1 (NM_003743.3,1902-1920).
gaattcacctagcagatta

SEQ ID NO: 111978 - DNA, 19 bp, Homo sapiens
  siRNA target sequence for NCOA1 (NM_003743.3,1907-1925).
cacctagcagattaaatat

SEQ ID NO: 111979 - DNA, 19 bp, Homo sapiens
  siRNA target sequence for NCOA1 (NM_003743.3,1910-1928).
ctagcagattaaatataca

SEQ ID NO: 111980 - DNA, 19 bp, Homo sapiens
  siRNA target sequence for NCOA1 (NM_003743.3,1940-1958).
ctgagtccaaagataacaa

SEQ ID NO: 111981 - DNA, 19 bp, Homo sapiens
  siRNA target sequence for NCOA1 (NM_003743.3,1956-1974).
caaagagattgcctcaatt

SEQ ID NO: 111982 - DNA, 19 bp, Homo sapiens
  siRNA target sequence for NCOA1 (NM_003743.3,2030-2048).
cagggcttctgcataacaa

SEQ ID NO: 111983 - DNA, 19 bp, Homo sapiens
  siRNA target sequence for NCOA1 (NM_003743.3,2079-2097).
ctctcaaaccagtcacaaa

SEQ ID NO: 111984 - DNA, 19 bp, Homo sapiens
  siRNA target sequence for NCOA1 (NM_003743.3,2081-2099).
ctcaaaccagtcacaaact

SEQ ID NO: 111985 - DNA, 19 bp, Homo sapiens
  siRNA target sequence for NCOA1 (NM_003743.3,2098-2116).
ctagtgcagcttttgacaa

SEQ ID NO: 111986 - DNA, 19 bp, Homo sapiens
  siRNA target sequence for NCOA1 (NM_003743.3,2101-2119).
gtgcagcttttgacaacaa

SEQ ID NO: 111987 - DNA, 19 bp, Homo sapiens
  siRNA target sequence for NCOA1 (NM_003743.3,2137-2155).
cggcatgctgatatagaca

SEQ ID NO: 111988 - DNA, 19 bp, Homo sapiens
  siRNA target sequence for NCOA1 (NM_003743.3,2252-2270).
cagaacggcataaaattct

SEQ ID NO: 111989 - DNA, 19 bp, Homo sapiens
  siRNA target sequence for NCOA1 (NM_003743.3,2287-2305).
gagggtagcccctcagata

SEQ ID NO: 111990 - DNA, 19 bp, Homo sapiens
  siRNA target sequence for NCOA1 (NM_003743.3,2290-2308).
ggtagcccctcagatatca

SEQ ID NO: 111991 - DNA, 19 bp, Homo sapiens
  siRNA target sequence for NCOA1 (NM_003743.3,2316-2334).
gtctgtcgagcctgataaa

SEQ ID NO: 111992 - DNA, 19 bp, Homo sapiens
  siRNA target sequence for NCOA1 (NM_003743.3,2318-2336).
ctgtcgagcctgataaaaa

SEQ ID NO: 111993 - DNA, 19 bp, Homo sapiens
  siRNA target sequence for NCOA1 (NM_003743.3,2440-2458).
cagctcctacgctatcttt

SEQ ID NO: 111994 - DNA, 19 bp, Homo sapiens
  siRNA target sequence for NCOA1 (NM_003743.3,2442-2460).
gctcctacgctatctttta

SEQ ID NO: 111995 - DNA, 19 bp, Homo sapiens
  siRNA target sequence for NCOA1 (NM_003743.3,2445-2463).
cctacgctatcttttagat

SEQ ID NO: 111996 - DNA, 19 bp, Homo sapiens
  siRNA target sequence for NCOA1 (NM_003743.3,2446-2464).
ctacgctatcttttagata

SEQ ID NO: 111997 - DNA, 19 bp, Homo sapiens
  siRNA target sequence for NCOA1 (NM_003743.3,2450-2468).
gctatcttttagataaaga

SEQ ID NO: 111998 - DNA, 19 bp, Homo sapiens
  siRNA target sequence for NCOA1 (NM_003743.3,2539-2557).
cagatggatccatgtaata

SEQ ID NO: 111999 - DNA, 19 bp, Homo sapiens
  siRNA target sequence for NCOA1 (NM_003743.3,2541-2559).
gatggatccatgtaataca

SEQ ID NO: 112000 - DNA, 19 bp, Homo sapiens
  siRNA target sequence for NCOA1 (NM_003743.3,2713-2731).
ggtgcggtcaccagtgtaa

SEQ ID NO: 112001 - DNA, 19 bp, Homo sapiens
  siRNA target sequence for NCOA1 (NM_003743.3,2717-2735).
cggtcaccagtgtaaccat

SEQ ID NO: 112002 - DNA, 19 bp, Homo sapiens
  siRNA target sequence for NCOA1 (NM_003743.3,2721-2739).
caccagtgtaaccatcaaa

SEQ ID NO: 112003 - DNA, 19 bp, Homo sapiens
  siRNA target sequence for NCOA1 (NM_003743.3,2784-2802).
cacttccaggctaaataga

SEQ ID NO: 112004 - DNA, 19 bp, Homo sapiens
  siRNA target sequence for NCOA1 (NM_003743.3,2885-2903).
cagtgacagctataaatca

SEQ ID NO: 112005 - DNA, 19 bp, Homo sapiens
  siRNA target sequence for NCOA1 (NM_003743.3,2887-2905).
gtgacagctataaatcaga

SEQ ID NO: 112006 - DNA, 19 bp, Homo sapiens
  siRNA target sequence for NCOA1 (NM_003743.3,2893-2911).
gctataaatcagagtaaat

SEQ ID NO: 112007 - DNA, 19 bp, Homo sapiens
  siRNA target sequence for NCOA1 (NM_003743.3,2914-2932).
gaagaccagtgtattagct

SEQ ID NO: 112008 - DNA, 19 bp, Homo sapiens
  siRNA target sequence for NCOA1 (NM_003743.3,2920-2938).
cagtgtattagctcacaat

SEQ ID NO: 112009 - DNA, 19 bp, Homo sapiens
  siRNA target sequence for NCOA1 (NM_003743.3,2924-2942).
gtattagctcacaattaga

SEQ ID NO: 112010 - DNA, 19 bp, Homo sapiens
  siRNA target sequence for NCOA1 (NM_003743.3,3038-3056).
ctgagctagctgaactaga

SEQ ID NO: 112011 - DNA, 19 bp, Homo sapiens
  siRNA target sequence for NCOA1 (NM_003743.3,3062-3080).
ctctgggaattgacaaact

SEQ ID NO: 112012 - DNA, 19 bp, Homo sapiens
  siRNA target sequence for NCOA1 (NM_003743.3,3066-3084).
gggaattgacaaacttgtt

SEQ ID NO: 112013 - DNA, 19 bp, Homo sapiens
  siRNA target sequence for NCOA1 (NM_003743.3,3087-3105).
ggggggtggattagatgta

SEQ ID NO: 112014 - DNA, 19 bp, Homo sapiens
  siRNA target sequence for NCOA1 (NM_003743.3,3088-3106).
gggggtggattagatgtat

SEQ ID NO: 112015 - DNA, 19 bp, Homo sapiens
  siRNA target sequence for NCOA1 (NM_003743.3,3089-3107).
ggggtggattagatgtatt

SEQ ID NO: 112016 - DNA, 19 bp, Homo sapiens
  siRNA target sequence for NCOA1 (NM_003743.3,3090-3108).
gggtggattagatgtatta

SEQ ID NO: 112017 - DNA, 19 bp, Homo sapiens
  siRNA target sequence for NCOA1 (NM_003743.3,3095-3113).
gattagatgtattatcaga

SEQ ID NO: 112018 - DNA, 19 bp, Homo sapiens
  siRNA target sequence for NCOA1 (NM_003743.3,3114-3132).
gagatttccaccacaacaa

SEQ ID NO: 112019 - DNA, 19 bp, Homo sapiens
  siRNA target sequence for NCOA1 (NM_003743.3,3133-3151).
gcaacgccacctttgatca

SEQ ID NO: 112020 - DNA, 19 bp, Homo sapiens
  siRNA target sequence for NCOA1 (NM_003743.3,3142-3160).
cctttgatcatggaagaaa

SEQ ID NO: 112021 - DNA, 19 bp, Homo sapiens
  siRNA target sequence for NCOA1 (NM_003743.3,3255-3273).
ggggacgatgcctgttcaa

SEQ ID NO: 112022 - DNA, 19 bp, Homo sapiens
  siRNA target sequence for NCOA1 (NM_003743.3,3257-3275).
ggacgatgcctgttcaagt

SEQ ID NO: 112023 - DNA, 19 bp, Homo sapiens
  siRNA target sequence for NCOA1 (NM_003743.3,3258-3276).
gacgatgcctgttcaagta

SEQ ID NO: 112024 - DNA, 19 bp, Homo sapiens
  siRNA target sequence for NCOA1 (NM_003743.3,3315-3333).
gcagcccaggcaaactcta

SEQ ID NO: 112025 - DNA, 19 bp, Homo sapiens
  siRNA target sequence for NCOA1 (NM_003743.3,3399-3417).
gcagttgatacaccaaaat

SEQ ID NO: 112026 - DNA, 19 bp, Homo sapiens
  siRNA target sequence for NCOA1 (NM_003743.3,3454-3472).
cctgttggcatcaatatga

SEQ ID NO: 112027 - DNA, 19 bp, Homo sapiens
  siRNA target sequence for NCOA1 (NM_003743.3,3457-3475).
gttggcatcaatatgagat

SEQ ID NO: 112028 - DNA, 19 bp, Homo sapiens
  siRNA target sequence for NCOA1 (NM_003743.3,3508-3526).
cccctgaatgctcaaatgt

SEQ ID NO: 112029 - DNA, 19 bp, Homo sapiens
  siRNA target sequence for NCOA1 (NM_003743.3,3509-3527).
ccctgaatgctcaaatgtt

SEQ ID NO: 112030 - DNA, 19 bp, Homo sapiens
  siRNA target sequence for NCOA1 (NM_003743.3,3710-3728).
caccaaactatggtacaaa

SEQ ID NO: 112031 - DNA, 19 bp, Homo sapiens
  siRNA target sequence for NCOA1 (NM_003743.3,3749-3767).
ctaccagcccgttttcaca

SEQ ID NO: 112032 - DNA, 19 bp, Homo sapiens
  siRNA target sequence for NCOA1 (NM_003743.3,3753-3771).
cagcccgttttcacaacta

SEQ ID NO: 112033 - DNA, 19 bp, Homo sapiens
  siRNA target sequence for NCOA1 (NM_003743.3,3821-3839).
gaggcatgacaggaaacat

SEQ ID NO: 112034 - DNA, 19 bp, Homo sapiens
  siRNA target sequence for NCOA1 (NM_003743.3,3930-3948).
caactttgctccatctcta

SEQ ID NO: 112035 - DNA, 19 bp, Homo sapiens
  siRNA target sequence for NCOA1 (NM_003743.3,4018-4036).
cctgcctccgggtatcagt

SEQ ID NO: 112036 - DNA, 19 bp, Homo sapiens
  siRNA target sequence for NCOA1 (NM_003743.3,4057-4075).
cagcaaggagcgataggaa

SEQ ID NO: 112037 - DNA, 19 bp, Homo sapiens
  siRNA target sequence for NCOA1 (NM_003743.3,4063-4081).
ggagcgataggaaacaaca

SEQ ID NO: 112038 - DNA, 19 bp, Homo sapiens
  siRNA target sequence for NCOA1 (NM_003743.3,4067-4085).
cgataggaaacaacaatgt

SEQ ID NO: 112039 - DNA, 19 bp, Homo sapiens
  siRNA target sequence for NCOA1 (NM_003743.3,4164-4182).
ggcaggtggaaatacgaat

SEQ ID NO: 112040 - DNA, 19 bp, Homo sapiens
  siRNA target sequence for NCOA1 (NM_003743.3,4178-4196).
cgaatgttcagaacatgaa

SEQ ID NO: 112041 - DNA, 19 bp, Homo sapiens
  siRNA target sequence for NCOA1 (NM_003743.3,4386-4404).
cgtccagtgtacagtgaat

SEQ ID NO: 112042 - DNA, 19 bp, Homo sapiens
  siRNA target sequence for NCOA1 (NM_003743.3,4438-4456).
ggtccactgggaactcaaa

SEQ ID NO: 112043 - DNA, 19 bp, Homo sapiens
  siRNA target sequence for NCOA2 (NM_006540.1,165-183).
gagtgggatgggagaaaat

SEQ ID NO: 112044 - DNA, 19 bp, Homo sapiens
  siRNA target sequence for NCOA2 (NM_006540.1,261-279).
cactgaaaaacgtaatcgt

SEQ ID NO: 112045 - DNA, 19 bp, Homo sapiens
  siRNA target sequence for NCOA2 (NM_006540.1,362-380).
ctgacaaatgtgcaatctt

SEQ ID NO: 112046 - DNA, 19 bp, Homo sapiens
  siRNA target sequence for NCOA2 (NM_006540.1,396-414).
gcaaattcgtcagatcaaa

SEQ ID NO: 112047 - DNA, 19 bp, Homo sapiens
  siRNA target sequence for NCOA2 (NM_006540.1,451-469).
gtgcagaagtcagatgtat

SEQ ID NO: 112048 - DNA, 19 bp, Homo sapiens
  siRNA target sequence for NCOA2 (NM_006540.1,558-576).
ggaaggcaacgttgtgttt

SEQ ID NO: 112049 - DNA, 19 bp, Homo sapiens
  siRNA target sequence for NCOA2 (NM_006540.1,593-611).
cacagtatctaaggtataa

SEQ ID NO: 112050 - DNA, 19 bp, Homo sapiens
  siRNA target sequence for NCOA2 (NM_006540.1,597-615).
gtatctaaggtataaccaa

SEQ ID NO: 112051 - DNA, 19 bp, Homo sapiens
  siRNA target sequence for NCOA2 (NM_006540.1,684-702).
cctgctgccaaagtctata

SEQ ID NO: 112052 - DNA, 19 bp, Homo sapiens
  siRNA target sequence for NCOA2 (NM_006540.1,687-705).
gctgccaaagtctatagta

SEQ ID NO: 112053 - DNA, 19 bp, Homo sapiens
  siRNA target sequence for NCOA2 (NM_006540.1,688-706).
ctgccaaagtctatagtaa

SEQ ID NO: 112054 - DNA, 19 bp, Homo sapiens
  siRNA target sequence for NCOA2 (NM_006540.1,737-755).
ggcggaacagccatacctt

SEQ ID NO: 112055 - DNA, 19 bp, Homo sapiens
  siRNA target sequence for NCOA2 (NM_006540.1,744-762).
cagccataccttcaattgt

SEQ ID NO: 112056 - DNA, 19 bp, Homo sapiens
  siRNA target sequence for NCOA2 (NM_006540.1,763-781).
cggatgctggtaaaacctt

SEQ ID NO: 112057 - DNA, 19 bp, Homo sapiens
  siRNA target sequence for NCOA2 (NM_006540.1,765-783).
gatgctggtaaaaccttta

SEQ ID NO: 112058 - DNA, 19 bp, Homo sapiens
  siRNA target sequence for NCOA2 (NM_006540.1,816-834).
ggaagctcatcagaaatat

SEQ ID NO: 112059 - DNA, 19 bp, Homo sapiens
  siRNA target sequence for NCOA2 (NM_006540.1,985-1003).
gatctccaaggcaagatca

SEQ ID NO: 112060 - DNA, 19 bp, Homo sapiens
  siRNA target sequence for NCOA2 (NM_006540.1,1102-1120).
gaatctgtgtcctatgcta

SEQ ID NO: 112061 - DNA, 19 bp, Homo sapiens
  siRNA target sequence for NCOA2 (NM_006540.1,1124-1142).
ggcatcatcatgaagtact

SEQ ID NO: 112062 - DNA, 19 bp, Homo sapiens
  siRNA target sequence for NCOA2 (NM_006540.1,1150-1168).
ggattggcattcagtcaaa

SEQ ID NO: 112063 - DNA, 19 bp, Homo sapiens
  siRNA target sequence for NCOA2 (NM_006540.1,1151-1169).
gattggcattcagtcaaat

SEQ ID NO: 112064 - DNA, 19 bp, Homo sapiens
  siRNA target sequence for NCOA2 (NM_006540.1,1155-1173).
ggcattcagtcaaatctat

SEQ ID NO: 112065 - DNA, 19 bp, Homo sapiens
  siRNA target sequence for NCOA2 (NM_006540.1,1185-1203).
gtctgatggcactcttgtt

SEQ ID NO: 112066 - DNA, 19 bp, Homo sapiens
  siRNA target sequence for NCOA2 (NM_006540.1,1249-1267).
gaacctcaacttgtaatat

SEQ ID NO: 112067 - DNA, 19 bp, Homo sapiens
  siRNA target sequence for NCOA2 (NM_006540.1,1252-1270).
cctcaacttgtaatatctt

SEQ ID NO: 112068 - DNA, 19 bp, Homo sapiens
  siRNA target sequence for NCOA2 (NM_006540.1,1282-1300).
cacagagagcagaatgtgt

SEQ ID NO: 112069 - DNA, 19 bp, Homo sapiens
  siRNA target sequence for NCOA2 (NM_006540.1,1342-1360).
ccactgaatccaattagct

SEQ ID NO: 112070 - DNA, 19 bp, Homo sapiens
  siRNA target sequence for NCOA2 (NM_006540.1,1415-1433).
ccctcagtagcaatataaa

SEQ ID NO: 112071 - DNA, 19 bp, Homo sapiens
  siRNA target sequence for NCOA2 (NM_006540.1,1532-1550).
ctcctcagggtagtaacta

SEQ ID NO: 112072 - DNA, 19 bp, Homo sapiens
  siRNA target sequence for NCOA2 (NM_006540.1,1544-1562).
gtaactatgcactcaaaat

SEQ ID NO: 112073 - DNA, 19 bp, Homo sapiens
  siRNA target sequence for NCOA2 (NM_006540.1,1819-1837).
gcttcaccagacctaaaaa

SEQ ID NO: 112074 - DNA, 19 bp, Homo sapiens
  siRNA target sequence for NCOA2 (NM_006540.1,1820-1838).
cttcaccagacctaaaaat

SEQ ID NO: 112075 - DNA, 19 bp, Homo sapiens
  siRNA target sequence for NCOA2 (NM_006540.1,1854-1872).
ctccccagttaatatgaat

SEQ ID NO: 112076 - DNA, 19 bp, Homo sapiens
  siRNA target sequence for NCOA2 (NM_006540.1,1895-1913).
gaagcttggactcaaaaga

SEQ ID NO: 112077 - DNA, 19 bp, Homo sapiens
  siRNA target sequence for NCOA2 (NM_006540.1,1935-1953).
gccctctgaaggtacaact

SEQ ID NO: 112078 - DNA, 19 bp, Homo sapiens
  siRNA target sequence for NCOA2 (NM_006540.1,2094-2112).
gctgaccaccaaatctgat

SEQ ID NO: 112079 - DNA, 19 bp, Homo sapiens
  siRNA target sequence for NCOA2 (NM_006540.1,2099-2117).
ccaccaaatctgatcagat

SEQ ID NO: 112080 - DNA, 19 bp, Homo sapiens
  siRNA target sequence for NCOA2 (NM_006540.1,2141-2159).
ctttgtcggatacaaacaa

SEQ ID NO: 112081 - DNA, 19 bp, Homo sapiens
  siRNA target sequence for NCOA2 (NM_006540.1,2265-2283).
ggacttggccaagttaaca

SEQ ID NO: 112082 - DNA, 19 bp, Homo sapiens
  siRNA target sequence for NCOA2 (NM_006540.1,2390-2408).
cactacttcgctatttgct

SEQ ID NO: 112083 - DNA, 19 bp, Homo sapiens
  siRNA target sequence for NCOA2 (NM_006540.1,2395-2413).
cttcgctatttgctagata

SEQ ID NO: 112084 - DNA, 19 bp, Homo sapiens
  siRNA target sequence for NCOA2 (NM_006540.1,2400-2418).
ctatttgctagataaagat

SEQ ID NO: 112085 - DNA, 19 bp, Homo sapiens
  siRNA target sequence for NCOA2 (NM_006540.1,2482-2500).
gatcctgccagtaacacaa

SEQ ID NO: 112086 - DNA, 19 bp, Homo sapiens
  siRNA target sequence for NCOA2 (NM_006540.1,2485-2503).
cctgccagtaacacaaaat

SEQ ID NO: 112087 - DNA, 19 bp, Homo sapiens
  siRNA target sequence for NCOA2 (NM_006540.1,2667-2685).
caagcaagccatcatcaat

SEQ ID NO: 112088 - DNA, 19 bp, Homo sapiens
  siRNA target sequence for NCOA2 (NM_006540.1,2788-2806).
gggcaactgggcaggttat

SEQ ID NO: 112089 - DNA, 19 bp, Homo sapiens
  siRNA target sequence for NCOA2 (NM_006540.1,2789-2807).
ggcaactgggcaggttatt

SEQ ID NO: 112090 - DNA, 19 bp, Homo sapiens
  siRNA target sequence for NCOA2 (NM_006540.1,2827-2845).
cttgacatcacattgcaaa

SEQ ID NO: 112091 - DNA, 19 bp, Homo sapiens
  siRNA target sequence for NCOA2 (NM_006540.1,2869-2887).
ccaccaatcagaaacagta

SEQ ID NO: 112092 - DNA, 19 bp, Homo sapiens
  siRNA target sequence for NCOA2 (NM_006540.1,2912-2930).
caggaatgatgggtaatca

SEQ ID NO: 112093 - DNA, 19 bp, Homo sapiens
  siRNA target sequence for NCOA2 (NM_006540.1,2922-2940).
gggtaatcaagggatgata

SEQ ID NO: 112094 - DNA, 19 bp, Homo sapiens
  siRNA target sequence for NCOA2 (NM_006540.1,2964-2982).
cagtagcacaggaatgatt

SEQ ID NO: 112095 - DNA, 19 bp, Homo sapiens
  siRNA target sequence for NCOA2 (NM_006540.1,2969-2987).
gcacaggaatgattggtaa

SEQ ID NO: 112096 - DNA, 19 bp, Homo sapiens
  siRNA target sequence for NCOA2 (NM_006540.1,2990-3008).
gtgcttctcggcctactat

SEQ ID NO: 112097 - DNA, 19 bp, Homo sapiens
  siRNA target sequence for NCOA2 (NM_006540.1,3169-3187).
cagtctcaggtcatgaata

SEQ ID NO: 112098 - DNA, 19 bp, Homo sapiens
  siRNA target sequence for NCOA2 (NM_006540.1,3171-3189).
gtctcaggtcatgaatata

SEQ ID NO: 112099 - DNA, 19 bp, Homo sapiens
  siRNA target sequence for NCOA2 (NM_006540.1,3191-3209).
ggccatctgaattagagat

SEQ ID NO: 112100 - DNA, 19 bp, Homo sapiens
  siRNA target sequence for NCOA2 (NM_006540.1,3194-3212).
catctgaattagagatgaa

SEQ ID NO: 112101 - DNA, 19 bp, Homo sapiens
  siRNA target sequence for NCOA2 (NM_006540.1,3213-3231).
catggggggacctcagtat

SEQ ID NO: 112102 - DNA, 19 bp, Homo sapiens
  siRNA target sequence for NCOA2 (NM_006540.1,3224-3242).
ctcagtatagccaacaaca

SEQ ID NO: 112103 - DNA, 19 bp, Homo sapiens
  siRNA target sequence for NCOA2 (NM_006540.1,3241-3259).
caagctcctccaaatcaga

SEQ ID NO: 112104 - DNA, 19 bp, Homo sapiens
  siRNA target sequence for NCOA2 (NM_006540.1,3263-3281).
ccccatggcctgaaagcat

SEQ ID NO: 112105 - DNA, 19 bp, Homo sapiens
  siRNA target sequence for NCOA2 (NM_006540.1,3332-3350).
gcagttctccagatgactt

SEQ ID NO: 112106 - DNA, 19 bp, Homo sapiens
  siRNA target sequence for NCOA2 (NM_006540.1,3417-3435).
ggccttgcggaattttgat

SEQ ID NO: 112107 - DNA, 19 bp, Homo sapiens
  siRNA target sequence for NCOA2 (NM_006540.1,3591-3609).
ggcccagggtagctattct

SEQ ID NO: 112108 - DNA, 19 bp, Homo sapiens
  siRNA target sequence for NCOA2 (NM_006540.1,3608-3626).
ctcccatgcaagatccaaa

SEQ ID NO: 112109 - DNA, 19 bp, Homo sapiens
  siRNA target sequence for NCOA2 (NM_006540.1,3611-3629).
ccatgcaagatccaaactt

SEQ ID NO: 112110 - DNA, 19 bp, Homo sapiens
  siRNA target sequence for NCOA2 (NM_006540.1,3639-3657).
gggacagcggcctagttat

SEQ ID NO: 112111 - DNA, 19 bp, Homo sapiens
  siRNA target sequence for NCOA2 (NM_006540.1,3708-3726).
gcagaaccagccaaatcaa

SEQ ID NO: 112112 - DNA, 19 bp, Homo sapiens
  siRNA target sequence for NCOA2 (NM_006540.1,3711-3729).
gaaccagccaaatcaacta

SEQ ID NO: 112113 - DNA, 19 bp, Homo sapiens
  siRNA target sequence for NCOA2 (NM_006540.1,3714-3732).
ccagccaaatcaactaaga

SEQ ID NO: 112114 - DNA, 19 bp, Homo sapiens
  siRNA target sequence for NCOA2 (NM_006540.1,3770-3788).
gccagccacttatgaatca

SEQ ID NO: 112115 - DNA, 19 bp, Homo sapiens
  siRNA target sequence for NCOA2 (NM_006540.1,3771-3789).
ccagccacttatgaatcaa

SEQ ID NO: 112116 - DNA, 19 bp, Homo sapiens
  siRNA target sequence for NCOA2 (NM_006540.1,3772-3790).
cagccacttatgaatcaaa

SEQ ID NO: 112117 - DNA, 19 bp, Homo sapiens
  siRNA target sequence for NCOA2 (NM_006540.1,3775-3793).
ccacttatgaatcaaatca

SEQ ID NO: 112118 - DNA, 19 bp, Homo sapiens
  siRNA target sequence for NCOA2 (NM_006540.1,3794-3812).
gcaatgtttccaatgtgaa

SEQ ID NO: 112119 - DNA, 19 bp, Homo sapiens
  siRNA target sequence for NCOA2 (NM_006540.1,3835-3853).
ccaacacaggcacctatta

SEQ ID NO: 112120 - DNA, 19 bp, Homo sapiens
  siRNA target sequence for NCOA2 (NM_006540.1,3934-3952).
gttcagcaacgaactttga

SEQ ID NO: 112121 - DNA, 19 bp, Homo sapiens
  siRNA target sequence for NCOA2 (NM_006540.1,3940-3958).
caacgaactttgatgatga

SEQ ID NO: 112122 - DNA, 19 bp, Homo sapiens
  siRNA target sequence for NCOA2 (NM_006540.1,3957-3975).
gagaggacaagggttgaat

SEQ ID NO: 112123 - DNA, 19 bp, Homo sapiens
  siRNA target sequence for NCOA2 (NM_006540.1,3961-3979).
ggacaagggttgaatatga

SEQ ID NO: 112124 - DNA, 19 bp, Homo sapiens
  siRNA target sequence for NCOA2 (NM_006540.1,4001-4019).
gtggtatgccagcaactat

SEQ ID NO: 112125 - DNA, 19 bp, Homo sapiens
  siRNA target sequence for NCOA2 (NM_006540.1,4003-4021).
ggtatgccagcaactatga

SEQ ID NO: 112126 - DNA, 19 bp, Homo sapiens
  siRNA target sequence for NCOA2 (NM_006540.1,4032-4050).
gattccccaggcaaatgca

SEQ ID NO: 112127 - DNA, 19 bp, Homo sapiens
  siRNA target sequence for NCOA2 (NM_006540.1,4066-4084).
cctccaaactacggaataa

SEQ ID NO: 112128 - DNA, 19 bp, Homo sapiens
  siRNA target sequence for NCOA2 (NM_006540.1,4297-4315).
gcaaacaccagcatgtaca

SEQ ID NO: 112129 - DNA, 19 bp, Homo sapiens
  siRNA target sequence for NCOA2 (NM_006540.1,4443-4461).
gggtcccgagcaggttaat

SEQ ID NO: 112130 - DNA, 19 bp, Homo sapiens
  siRNA target sequence for NCOA2 (NM_006540.1,4508-4526).
gaatggatatgattaagca

SEQ ID NO: 112131 - DNA, 19 bp, Homo sapiens
  siRNA target sequence for NCOA3 (NM_006534.2,230-248).
gatccactggccagtgatt

SEQ ID NO: 112132 - DNA, 19 bp, Homo sapiens
  siRNA target sequence for NCOA3 (NM_006534.2,238-256).
ggccagtgattcacgaaaa

SEQ ID NO: 112133 - DNA, 19 bp, Homo sapiens
  siRNA target sequence for NCOA3 (NM_006534.2,257-275).
cgcaaattgccatgtgata

SEQ ID NO: 112134 - DNA, 19 bp, Homo sapiens
  siRNA target sequence for NCOA3 (NM_006534.2,344-362).
gaattggctgagctgatat

SEQ ID NO: 112135 - DNA, 19 bp, Homo sapiens
  siRNA target sequence for NCOA3 (NM_006534.2,355-373).
gctgatatctgccaatctt

SEQ ID NO: 112136 - DNA, 19 bp, Homo sapiens
  siRNA target sequence for NCOA3 (NM_006534.2,358-376).
gatatctgccaatcttagt

SEQ ID NO: 112137 - DNA, 19 bp, Homo sapiens
  siRNA target sequence for NCOA3 (NM_006534.2,363-381).
ctgccaatcttagtgatat

SEQ ID NO: 112138 - DNA, 19 bp, Homo sapiens
  siRNA target sequence for NCOA3 (NM_006534.2,366-384).
ccaatcttagtgatattga

SEQ ID NO: 112139 - DNA, 19 bp, Homo sapiens
  siRNA target sequence for NCOA3 (NM_006534.2,375-393).
gtgatattgacaatttcaa

SEQ ID NO: 112140 - DNA, 19 bp, Homo sapiens
  siRNA target sequence for NCOA3 (NM_006534.2,488-506).
gttcaaaaagccgatgtat

SEQ ID NO: 112141 - DNA, 19 bp, Homo sapiens
  siRNA target sequence for NCOA3 (NM_006534.2,517-535).
gcagggagttattgataaa

SEQ ID NO: 112142 - DNA, 19 bp, Homo sapiens
  siRNA target sequence for NCOA3 (NM_006534.2,538-556).
ctccttaggaccgctttta

SEQ ID NO: 112143 - DNA, 19 bp, Homo sapiens
  siRNA target sequence for NCOA3 (NM_006534.2,540-558).
ccttaggaccgcttttact

SEQ ID NO: 112144 - DNA, 19 bp, Homo sapiens
  siRNA target sequence for NCOA3 (NM_006534.2,541-559).
cttaggaccgcttttactt

SEQ ID NO: 112145 - DNA, 19 bp, Homo sapiens
  siRNA target sequence for NCOA3 (NM_006534.2,593-611).
cgagacggaaacattgtat

SEQ ID NO: 112146 - DNA, 19 bp, Homo sapiens
  siRNA target sequence for NCOA3 (NM_006534.2,594-612).
gagacggaaacattgtatt

SEQ ID NO: 112147 - DNA, 19 bp, Homo sapiens
  siRNA target sequence for NCOA3 (NM_006534.2,669-687).
caagtgtttacaatatctt

SEQ ID NO: 112148 - DNA, 19 bp, Homo sapiens
  siRNA target sequence for NCOA3 (NM_006534.2,796-814).
ccgtatgttgatgaaaaca

SEQ ID NO: 112149 - DNA, 19 bp, Homo sapiens
  siRNA target sequence for NCOA3 (NM_006534.2,856-874).
gcgccagagatatgaaaca

SEQ ID NO: 112150 - DNA, 19 bp, Homo sapiens
  siRNA target sequence for NCOA3 (NM_006534.2,857-875).
cgccagagatatgaaacaa

SEQ ID NO: 112151 - DNA, 19 bp, Homo sapiens
  siRNA target sequence for NCOA3 (NM_006534.2,894-912).
ctcagccacgagctatgat

SEQ ID NO: 112152 - DNA, 19 bp, Homo sapiens
  siRNA target sequence for NCOA3 (NM_006534.2,950-968).
gtggcacgccgcattacta

SEQ ID NO: 112153 - DNA, 19 bp, Homo sapiens
  siRNA target sequence for NCOA3 (NM_006534.2,952-970).
ggcacgccgcattactaca

SEQ ID NO: 112154 - DNA, 19 bp, Homo sapiens
  siRNA target sequence for NCOA3 (NM_006534.2,990-1008).
caaaccctgagagctttat

SEQ ID NO: 112155 - DNA, 19 bp, Homo sapiens
  siRNA target sequence for NCOA3 (NM_006534.2,995-1013).
cctgagagctttattacca

SEQ ID NO: 112156 - DNA, 19 bp, Homo sapiens
  siRNA target sequence for NCOA3 (NM_006534.2,1003-1021).
ctttattaccagacatgat

SEQ ID NO: 112157 - DNA, 19 bp, Homo sapiens
  siRNA target sequence for NCOA3 (NM_006534.2,1033-1051).
ggttgtcaatatagataca

SEQ ID NO: 112158 - DNA, 19 bp, Homo sapiens
  siRNA target sequence for NCOA3 (NM_006534.2,1034-1052).
gttgtcaatatagatacaa

SEQ ID NO: 112159 - DNA, 19 bp, Homo sapiens
  siRNA target sequence for NCOA3 (NM_006534.2,1037-1055).
gtcaatatagatacaaatt

SEQ ID NO: 112160 - DNA, 19 bp, Homo sapiens
  siRNA target sequence for NCOA3 (NM_006534.2,1039-1057).
caatatagatacaaattca

SEQ ID NO: 112161 - DNA, 19 bp, Homo sapiens
  siRNA target sequence for NCOA3 (NM_006534.2,1074-1092).
ggcctggctttgaagatat

SEQ ID NO: 112162 - DNA, 19 bp, Homo sapiens
  siRNA target sequence for NCOA3 (NM_006534.2,1075-1093).
gcctggctttgaagatata

SEQ ID NO: 112163 - DNA, 19 bp, Homo sapiens
  siRNA target sequence for NCOA3 (NM_006534.2,1109-1127).
cagagattttttagtctaa

SEQ ID NO: 112164 - DNA, 19 bp, Homo sapiens
  siRNA target sequence for NCOA3 (NM_006534.2,1144-1162).
gtcccagaaacgtcactat

SEQ ID NO: 112165 - DNA, 19 bp, Homo sapiens
  siRNA target sequence for NCOA3 (NM_006534.2,1146-1164).
cccagaaacgtcactatca

SEQ ID NO: 112166 - DNA, 19 bp, Homo sapiens
  siRNA target sequence for NCOA3 (NM_006534.2,1190-1208).
gaaaccccagtatatcgat

SEQ ID NO: 112167 - DNA, 19 bp, Homo sapiens
  siRNA target sequence for NCOA3 (NM_006534.2,1212-1230).
cgttggctgatggaactat

SEQ ID NO: 112168 - DNA, 19 bp, Homo sapiens
  siRNA target sequence for NCOA3 (NM_006534.2,1252-1270).
caaactcttccgaaatcct

SEQ ID NO: 112169 - DNA, 19 bp, Homo sapiens
  siRNA target sequence for NCOA3 (NM_006534.2,1258-1276).
cttccgaaatcctgtaaca

SEQ ID NO: 112170 - DNA, 19 bp, Homo sapiens
  siRNA target sequence for NCOA3 (NM_006534.2,1280-1298).
gatcgacatggctttgtct

SEQ ID NO: 112171 - DNA, 19 bp, Homo sapiens
  siRNA target sequence for NCOA3 (NM_006534.2,1486-1504).
gatgagtggagctaggtat

SEQ ID NO: 112172 - DNA, 19 bp, Homo sapiens
  siRNA target sequence for NCOA3 (NM_006534.2,1508-1526).
ggttccagtaacatagctt

SEQ ID NO: 112173 - DNA, 19 bp, Homo sapiens
  siRNA target sequence for NCOA3 (NM_006534.2,1629-1647).
caaaccagcagaatatcat

SEQ ID NO: 112174 - DNA, 19 bp, Homo sapiens
  siRNA target sequence for NCOA3 (NM_006534.2,1645-1663).
catgatttctcctcgtaat

SEQ ID NO: 112175 - DNA, 19 bp, Homo sapiens
  siRNA target sequence for NCOA3 (NM_006534.2,1940-1958).
ccagtggagagttcaatgt

SEQ ID NO: 112176 - DNA, 19 bp, Homo sapiens
  siRNA target sequence for NCOA3 (NM_006534.2,1981-1999).
cctcagtgacaaagaaagt

SEQ ID NO: 112177 - DNA, 19 bp, Homo sapiens
  siRNA target sequence for NCOA3 (NM_006534.2,1982-2000).
ctcagtgacaaagaaagta

SEQ ID NO: 112178 - DNA, 19 bp, Homo sapiens
  siRNA target sequence for NCOA3 (NM_006534.2,2049-2067).
gcaaaggtcataaaaaatt

SEQ ID NO: 112179 - DNA, 19 bp, Homo sapiens
  siRNA target sequence for NCOA3 (NM_006534.2,2119-2137).
caactcccccctagattca

SEQ ID NO: 112180 - DNA, 19 bp, Homo sapiens
  siRNA target sequence for NCOA3 (NM_006534.2,2125-2143).
ccccctagattcaagttgt

SEQ ID NO: 112181 - DNA, 19 bp, Homo sapiens
  siRNA target sequence for NCOA3 (NM_006534.2,2126-2144).
cccctagattcaagttgta

SEQ ID NO: 112182 - DNA, 19 bp, Homo sapiens
  siRNA target sequence for NCOA3 (NM_006534.2,2127-2145).
ccctagattcaagttgtaa

SEQ ID NO: 112183 - DNA, 19 bp, Homo sapiens
  siRNA target sequence for NCOA3 (NM_006534.2,2128-2146).
cctagattcaagttgtaaa

SEQ ID NO: 112184 - DNA, 19 bp, Homo sapiens
  siRNA target sequence for NCOA3 (NM_006534.2,2177-2195).
ggagtctcctcctctacat

SEQ ID NO: 112185 - DNA, 19 bp, Homo sapiens
  siRNA target sequence for NCOA3 (NM_006534.2,2291-2309).
gctgaggtagccaagatta

SEQ ID NO: 112186 - DNA, 19 bp, Homo sapiens
  siRNA target sequence for NCOA3 (NM_006534.2,2330-2348).
gacaccagcagtataactt

SEQ ID NO: 112187 - DNA, 19 bp, Homo sapiens
  siRNA target sequence for NCOA3 (NM_006534.2,2335-2353).
cagcagtataacttcttgt

SEQ ID NO: 112188 - DNA, 19 bp, Homo sapiens
  siRNA target sequence for NCOA3 (NM_006534.2,2355-2373).
gggacggaaatgttgtcaa

SEQ ID NO: 112189 - DNA, 19 bp, Homo sapiens
  siRNA target sequence for NCOA3 (NM_006534.2,2381-2399).
cagctaagtcctaagaaga

SEQ ID NO: 112190 - DNA, 19 bp, Homo sapiens
  siRNA target sequence for NCOA3 (NM_006534.2,2401-2419).
ggagaataatgcacttctt

SEQ ID NO: 112191 - DNA, 19 bp, Homo sapiens
  siRNA target sequence for NCOA3 (NM_006534.2,2448-2466).
gtgatgcactctctaaaga

SEQ ID NO: 112192 - DNA, 19 bp, Homo sapiens
  siRNA target sequence for NCOA3 (NM_006534.2,2524-2542).
cattcctagctcaagtcaa

SEQ ID NO: 112193 - DNA, 19 bp, Homo sapiens
  siRNA target sequence for NCOA3 (NM_006534.2,2529-2547).
ctagctcaagtcaagagaa

SEQ ID NO: 112194 - DNA, 19 bp, Homo sapiens
  siRNA target sequence for NCOA3 (NM_006534.2,2583-2601).
gatctggagacttggataa

SEQ ID NO: 112195 - DNA, 19 bp, Homo sapiens
  siRNA target sequence for NCOA3 (NM_006534.2,2586-2604).
ctggagacttggataatct

SEQ ID NO: 112196 - DNA, 19 bp, Homo sapiens
  siRNA target sequence for NCOA3 (NM_006534.2,2589-2607).
gagacttggataatctaga

SEQ ID NO: 112197 - DNA, 19 bp, Homo sapiens
  siRNA target sequence for NCOA3 (NM_006534.2,2682-2700).
ctaagcaacaggtgtttca

SEQ ID NO: 112198 - DNA, 19 bp, Homo sapiens
  siRNA target sequence for NCOA3 (NM_006534.2,2692-2710).
ggtgtttcaaggaactaat

SEQ ID NO: 112199 - DNA, 19 bp, Homo sapiens
  siRNA target sequence for NCOA3 (NM_006534.2,2693-2711).
gtgtttcaaggaactaatt

SEQ ID NO: 112200 - DNA, 19 bp, Homo sapiens
  siRNA target sequence for NCOA3 (NM_006534.2,2730-2748).
cacagtctgtgcagtctat

SEQ ID NO: 112201 - DNA, 19 bp, Homo sapiens
  siRNA target sequence for NCOA3 (NM_006534.2,2745-2763).
ctattcgtcctccatataa

SEQ ID NO: 112202 - DNA, 19 bp, Homo sapiens
  siRNA target sequence for NCOA3 (NM_006534.2,2824-2842).
cagtgctttccccatgtta

SEQ ID NO: 112203 - DNA, 19 bp, Homo sapiens
  siRNA target sequence for NCOA3 (NM_006534.2,2881-2899).
ggatagtcaggaaaattat

SEQ ID NO: 112204 - DNA, 19 bp, Homo sapiens
  siRNA target sequence for NCOA3 (NM_006534.2,2915-2933).
gggccaaaccgaaatgtga

SEQ ID NO: 112205 - DNA, 19 bp, Homo sapiens
  siRNA target sequence for NCOA3 (NM_006534.2,2957-2975).
ggagactggggcttaccaa

SEQ ID NO: 112206 - DNA, 19 bp, Homo sapiens
  siRNA target sequence for NCOA3 (NM_006534.2,2958-2976).
gagactggggcttaccaaa

SEQ ID NO: 112207 - DNA, 19 bp, Homo sapiens
  siRNA target sequence for NCOA3 (NM_006534.2,3024-3042).
gaccaggaggagattataa

SEQ ID NO: 112208 - DNA, 19 bp, Homo sapiens
  siRNA target sequence for NCOA3 (NM_006534.2,3029-3047).
ggaggagattataatactt

SEQ ID NO: 112209 - DNA, 19 bp, Homo sapiens
  siRNA target sequence for NCOA3 (NM_006534.2,3089-3107).
cctcttcggtctaatagca

SEQ ID NO: 112210 - DNA, 19 bp, Homo sapiens
  siRNA target sequence for NCOA3 (NM_006534.2,3090-3108).
ctcttcggtctaatagcat

SEQ ID NO: 112211 - DNA, 19 bp, Homo sapiens
  siRNA target sequence for NCOA3 (NM_006534.2,3111-3129).
caggtgcgagaccagtatt

SEQ ID NO: 112212 - DNA, 19 bp, Homo sapiens
  siRNA target sequence for NCOA3 (NM_006534.2,3114-3132).
gtgcgagaccagtattgca

SEQ ID NO: 112213 - DNA, 19 bp, Homo sapiens
  siRNA target sequence for NCOA3 (NM_006534.2,3247-3265).
gttgtccatggaacaagtt

SEQ ID NO: 112214 - DNA, 19 bp, Homo sapiens
  siRNA target sequence for NCOA3 (NM_006534.2,3253-3271).
catggaacaagtttctcat

SEQ ID NO: 112215 - DNA, 19 bp, Homo sapiens
  siRNA target sequence for NCOA3 (NM_006534.2,3346-3364).
gagtgacgaaagagcatta

SEQ ID NO: 112216 - DNA, 19 bp, Homo sapiens
  siRNA target sequence for NCOA3 (NM_006534.2,3348-3366).
gtgacgaaagagcattatt

SEQ ID NO: 112217 - DNA, 19 bp, Homo sapiens
  siRNA target sequence for NCOA3 (NM_006534.2,3518-3536).
gatcagaaggcaggattat

SEQ ID NO: 112218 - DNA, 19 bp, Homo sapiens
  siRNA target sequence for NCOA3 (NM_006534.2,3593-3611).
ggacaatcaccatctttta

SEQ ID NO: 112219 - DNA, 19 bp, Homo sapiens
  siRNA target sequence for NCOA3 (NM_006534.2,3596-3614).
caatcaccatcttttaact

SEQ ID NO: 112220 - DNA, 19 bp, Homo sapiens
  siRNA target sequence for NCOA3 (NM_006534.2,3631-3649).
gaaccagcaaggcaatttt

SEQ ID NO: 112221 - DNA, 19 bp, Homo sapiens
  siRNA target sequence for NCOA3 (NM_006534.2,3665-3683).
cacccacgagccaacatca

SEQ ID NO: 112222 - DNA, 19 bp, Homo sapiens
  siRNA target sequence for NCOA3 (NM_006534.2,3700-3718).
cacccccaagcaacttaga

SEQ ID NO: 112223 - DNA, 19 bp, Homo sapiens
  siRNA target sequence for NCOA3 (NM_006534.2,3742-3760).
gggccagcagtttttgaat

SEQ ID NO: 112224 - DNA, 19 bp, Homo sapiens
  siRNA target sequence for NCOA3 (NM_006534.2,3763-3781).
gagccgacaggcacttgaa

SEQ ID NO: 112225 - DNA, 19 bp, Homo sapiens
  siRNA target sequence for NCOA3 (NM_006534.2,3765-3783).
gccgacaggcacttgaatt

SEQ ID NO: 112226 - DNA, 19 bp, Homo sapiens
  siRNA target sequence for NCOA3 (NM_006534.2,3767-3785).
cgacaggcacttgaattga

SEQ ID NO: 112227 - DNA, 19 bp, Homo sapiens
  siRNA target sequence for NCOA3 (NM_006534.2,3768-3786).
gacaggcacttgaattgaa

SEQ ID NO: 112228 - DNA, 19 bp, Homo sapiens
  siRNA target sequence for NCOA3 (NM_006534.2,3770-3788).
caggcacttgaattgaaaa

SEQ ID NO: 112229 - DNA, 19 bp, Homo sapiens
  siRNA target sequence for NCOA3 (NM_006534.2,4106-4124).
cctccgcaacagtttccat

SEQ ID NO: 112230 - DNA, 19 bp, Homo sapiens
  siRNA target sequence for NCOA3 (NM_006534.2,4107-4125).
ctccgcaacagtttccata

SEQ ID NO: 112231 - DNA, 19 bp, Homo sapiens
  siRNA target sequence for NCOA3 (NM_006534.2,4182-4200).
gtcctcccaatgcaatgat

SEQ ID NO: 112232 - DNA, 19 bp, Homo sapiens
  siRNA target sequence for NCOA3 (NM_006534.2,4184-4202).
cctcccaatgcaatgatgt

SEQ ID NO: 112233 - DNA, 19 bp, Homo sapiens
  siRNA target sequence for NCOA3 (NM_006534.2,4193-4211).
gcaatgatgtcgtcaagaa

SEQ ID NO: 112234 - DNA, 19 bp, Homo sapiens
  siRNA target sequence for NCOA3 (NM_006534.2,4250-4268).
gctgcatccatctatcagt

SEQ ID NO: 112235 - DNA, 19 bp, Homo sapiens
  siRNA target sequence for NCOA3 (NM_006534.2,4304-4322).
gccaggaacagctcctttt

SEQ ID NO: 112236 - DNA, 19 bp, Homo sapiens
  siRNA target sequence for NCOA3 (NM_006534.2,4346-4364).
gggaatcctgcagtgtata

SEQ ID NO: 112237 - DNA, 19 bp, Homo sapiens
  siRNA target sequence for NCOA3 (NM_006534.2,4348-4366).
gaatcctgcagtgtatagt

SEQ ID NO: 112238 - DNA, 19 bp, Homo sapiens
  siRNA target sequence for NCOA3 (NM_006534.2,4440-4458).
ctatgggtcctgatcagaa

SEQ ID NO: 112239 - DNA, 19 bp, Homo sapiens
  siRNA target sequence for NCOA4 (NM_005437.1,161-179).
gagtggcagctccagtaat

SEQ ID NO: 112240 - DNA, 19 bp, Homo sapiens
  siRNA target sequence for NCOA4 (NM_005437.1,215-233).
ggacttggagcttgctatt

SEQ ID NO: 112241 - DNA, 19 bp, Homo sapiens
  siRNA target sequence for NCOA4 (NM_005437.1,218-236).
cttggagcttgctattggt

SEQ ID NO: 112242 - DNA, 19 bp, Homo sapiens
  siRNA target sequence for NCOA4 (NM_005437.1,246-264).
cgggctgaacagcaaatta

SEQ ID NO: 112243 - DNA, 19 bp, Homo sapiens
  siRNA target sequence for NCOA4 (NM_005437.1,315-333).
cacctggaatgtcttagaa

SEQ ID NO: 112244 - DNA, 19 bp, Homo sapiens
  siRNA target sequence for NCOA4 (NM_005437.1,365-383).
ccttatttatcagcttaaa

SEQ ID NO: 112245 - DNA, 19 bp, Homo sapiens
  siRNA target sequence for NCOA4 (NM_005437.1,408-426).
cagcagctctactcgttat

SEQ ID NO: 112246 - DNA, 19 bp, Homo sapiens
  siRNA target sequence for NCOA4 (NM_005437.1,421-439).
cgttattgggccagttcaa

SEQ ID NO: 112247 - DNA, 19 bp, Homo sapiens
  siRNA target sequence for NCOA4 (NM_005437.1,422-440).
gttattgggccagttcaat

SEQ ID NO: 112248 - DNA, 19 bp, Homo sapiens
  siRNA target sequence for NCOA4 (NM_005437.1,428-446).
gggccagttcaattgtctt

SEQ ID NO: 112249 - DNA, 19 bp, Homo sapiens
  siRNA target sequence for NCOA4 (NM_005437.1,429-447).
ggccagttcaattgtctta

SEQ ID NO: 112250 - DNA, 19 bp, Homo sapiens
  siRNA target sequence for NCOA4 (NM_005437.1,437-455).
caattgtcttactcatcaa

SEQ ID NO: 112251 - DNA, 19 bp, Homo sapiens
  siRNA target sequence for NCOA4 (NM_005437.1,463-481).
gtacccaaaacaaagatct

SEQ ID NO: 112252 - DNA, 19 bp, Homo sapiens
  siRNA target sequence for NCOA4 (NM_005437.1,473-491).
caaagatctagccaatcaa

SEQ ID NO: 112253 - DNA, 19 bp, Homo sapiens
  siRNA target sequence for NCOA4 (NM_005437.1,524-542).
gacccttaagcctgaagat

SEQ ID NO: 112254 - DNA, 19 bp, Homo sapiens
  siRNA target sequence for NCOA4 (NM_005437.1,527-545).
ccttaagcctgaagattca

SEQ ID NO: 112255 - DNA, 19 bp, Homo sapiens
  siRNA target sequence for NCOA4 (NM_005437.1,544-562).
caactgtcctgctctttga

SEQ ID NO: 112256 - DNA, 19 bp, Homo sapiens
  siRNA target sequence for NCOA4 (NM_005437.1,638-656).
gatggctcatgctagttca

SEQ ID NO: 112257 - DNA, 19 bp, Homo sapiens
  siRNA target sequence for NCOA4 (NM_005437.1,1205-1223).
caaaggtgtggagattgaa

SEQ ID NO: 112258 - DNA, 19 bp, Homo sapiens
  siRNA target sequence for NCOA4 (NM_005437.1,1525-1543).
gtcctagaaaagaagtaat

SEQ ID NO: 112259 - DNA, 19 bp, Homo sapiens
  siRNA target sequence for NCOA4 (NM_005437.1,1567-1585).
caatgactccttctagaat

SEQ ID NO: 112260 - DNA, 19 bp, Homo sapiens
  siRNA target sequence for NCOA4 (NM_005437.1,1690-1708).
gagctggcaaacagaagtt

SEQ ID NO: 112261 - DNA, 19 bp, Homo sapiens
  siRNA target sequence for NCOA4 (NM_005437.1,1706-1724).
gtttaaaagccccatgaat

SEQ ID NO: 112262 - DNA, 19 bp, Homo sapiens
  siRNA target sequence for NCOA4 (NM_005437.1,1758-1776).
gtcctgccaggaaagaaga

SEQ ID NO: 112263 - DNA, 19 bp, Homo sapiens
  siRNA target sequence for NCOA4 (NM_005437.1,1779-1797).
ggcaacctcagccagttat

SEQ ID NO: 112264 - DNA, 19 bp, Homo sapiens
  siRNA target sequence for NCOA4 (NM_005437.1,1833-1851).
gcccaggaagtattactta

SEQ ID NO: 112265 - DNA, 19 bp, Homo sapiens
  siRNA target sequence for NCOA4 (NM_005437.1,1834-1852).
cccaggaagtattacttaa

SEQ ID NO: 112266 - DNA, 19 bp, Homo sapiens
  siRNA target sequence for NCOA4 (NM_005437.1,1857-1875).
cctctacaggaggaacata

SEQ ID NO: 112267 - DNA, 19 bp, Homo sapiens
  siRNA target sequence for NCOA4 (NM_005437.1,1877-1895).
cttccccccagaccattat

SEQ ID NO: 112268 - DNA, 19 bp, Homo sapiens
  siRNA target sequence for NRIP1 (NM_003489.1,315-333).
gatgtgcaccaggattcta

SEQ ID NO: 112269 - DNA, 19 bp, Homo sapiens
  siRNA target sequence for NRIP1 (NM_003489.1,320-338).
gcaccaggattctattgtt

SEQ ID NO: 112270 - DNA, 19 bp, Homo sapiens
  siRNA target sequence for NRIP1 (NM_003489.1,385-403).
caggtactgccgttgacaa

SEQ ID NO: 112271 - DNA, 19 bp, Homo sapiens
  siRNA target sequence for NRIP1 (NM_003489.1,387-405).
ggtactgccgttgacaaaa

SEQ ID NO: 112272 - DNA, 19 bp, Homo sapiens
  siRNA target sequence for NRIP1 (NM_003489.1,388-406).
gtactgccgttgacaaaaa

SEQ ID NO: 112273 - DNA, 19 bp, Homo sapiens
  siRNA target sequence for NRIP1 (NM_003489.1,426-444).
gaggatcagaactttaaca

SEQ ID NO: 112274 - DNA, 19 bp, Homo sapiens
  siRNA target sequence for NRIP1 (NM_003489.1,428-446).
ggatcagaactttaacatt

SEQ ID NO: 112275 - DNA, 19 bp, Homo sapiens
  siRNA target sequence for NRIP1 (NM_003489.1,464-482).
cacctgtcaaagtaatggt

SEQ ID NO: 112276 - DNA, 19 bp, Homo sapiens
  siRNA target sequence for NRIP1 (NM_003489.1,481-499).
gtccagttctcaatacaca

SEQ ID NO: 112277 - DNA, 19 bp, Homo sapiens
  siRNA target sequence for NRIP1 (NM_003489.1,486-504).
gttctcaatacacatacat

SEQ ID NO: 112278 - DNA, 19 bp, Homo sapiens
  siRNA target sequence for NRIP1 (NM_003489.1,588-606).
ctgtctgattctatcatga

SEQ ID NO: 112279 - DNA, 19 bp, Homo sapiens
  siRNA target sequence for NRIP1 (NM_003489.1,665-683).
caaacaggatagcacatta

SEQ ID NO: 112280 - DNA, 19 bp, Homo sapiens
  siRNA target sequence for NRIP1 (NM_003489.1,776-794).
cctcagtcatgattcttta

SEQ ID NO: 112281 - DNA, 19 bp, Homo sapiens
  siRNA target sequence for NRIP1 (NM_003489.1,818-836).
ctatggtgttgcatcaagt

SEQ ID NO: 112282 - DNA, 19 bp, Homo sapiens
  siRNA target sequence for NRIP1 (NM_003489.1,914-932).
cctcatcagagataggttt

SEQ ID NO: 112283 - DNA, 19 bp, Homo sapiens
  siRNA target sequence for NRIP1 (NM_003489.1,1052-1070).
ctcacctaaacctagtgtt

SEQ ID NO: 112284 - DNA, 19 bp, Homo sapiens
  siRNA target sequence for NRIP1 (NM_003489.1,1107-1125).
gcccatttgcagcagtatt

SEQ ID NO: 112285 - DNA, 19 bp, Homo sapiens
  siRNA target sequence for NRIP1 (NM_003489.1,1109-1127).
ccatttgcagcagtattct

SEQ ID NO: 112286 - DNA, 19 bp, Homo sapiens
  siRNA target sequence for NRIP1 (NM_003489.1,1126-1144).
ctcgagaacacgctttaaa

SEQ ID NO: 112287 - DNA, 19 bp, Homo sapiens
  siRNA target sequence for NRIP1 (NM_003489.1,1128-1146).
cgagaacacgctttaaaaa

SEQ ID NO: 112288 - DNA, 19 bp, Homo sapiens
  siRNA target sequence for NRIP1 (NM_003489.1,1136-1154).
cgctttaaaaacgcaaaat

SEQ ID NO: 112289 - DNA, 19 bp, Homo sapiens
  siRNA target sequence for NRIP1 (NM_003489.1,1250-1268).
gtcaagccatcttaatggt

SEQ ID NO: 112290 - DNA, 19 bp, Homo sapiens
  siRNA target sequence for NRIP1 (NM_003489.1,1266-1284).
ggtcaggcaagaacatcat

SEQ ID NO: 112291 - DNA, 19 bp, Homo sapiens
  siRNA target sequence for NRIP1 (NM_003489.1,1404-1422).
caagctgctaacaatagtt

SEQ ID NO: 112292 - DNA, 19 bp, Homo sapiens
  siRNA target sequence for NRIP1 (NM_003489.1,1410-1428).
gctaacaatagtttgcttt

SEQ ID NO: 112293 - DNA, 19 bp, Homo sapiens
  siRNA target sequence for NRIP1 (NM_003489.1,1450-1468).
ctatacctaagccaatgaa

SEQ ID NO: 112294 - DNA, 19 bp, Homo sapiens
  siRNA target sequence for NRIP1 (NM_003489.1,1496-1514).
catttttgaggaaagtagt

SEQ ID NO: 112295 - DNA, 19 bp, Homo sapiens
  siRNA target sequence for NRIP1 (NM_003489.1,1518-1536).
cctacaactattgatgaat

SEQ ID NO: 112296 - DNA, 19 bp, Homo sapiens
  siRNA target sequence for NRIP1 (NM_003489.1,1607-1625).
catagacttgtcttgcaaa

SEQ ID NO: 112297 - DNA, 19 bp, Homo sapiens
  siRNA target sequence for NRIP1 (NM_003489.1,1665-1683).
ctggataacttcactcaat

SEQ ID NO: 112298 - DNA, 19 bp, Homo sapiens
  siRNA target sequence for NRIP1 (NM_003489.1,1680-1698).
caatccttgctaaacactt

SEQ ID NO: 112299 - DNA, 19 bp, Homo sapiens
  siRNA target sequence for NRIP1 (NM_003489.1,1705-1723).
caaaagtcccagatgtaga

SEQ ID NO: 112300 - DNA, 19 bp, Homo sapiens
  siRNA target sequence for NRIP1 (NM_003489.1,1710-1728).
gtcccagatgtagatatca

SEQ ID NO: 112301 - DNA, 19 bp, Homo sapiens
  siRNA target sequence for NRIP1 (NM_003489.1,1712-1730).
cccagatgtagatatcaaa

SEQ ID NO: 112302 - DNA, 19 bp, Homo sapiens
  siRNA target sequence for NRIP1 (NM_003489.1,1745-1763).
ctcaaagaattctaagcta

SEQ ID NO: 112303 - DNA, 19 bp, Homo sapiens
  siRNA target sequence for NRIP1 (NM_003489.1,1747-1765).
caaagaattctaagctaaa

SEQ ID NO: 112304 - DNA, 19 bp, Homo sapiens
  siRNA target sequence for NRIP1 (NM_003489.1,1840-1858).
gccctcagggagtacacaa

SEQ ID NO: 112305 - DNA, 19 bp, Homo sapiens
  siRNA target sequence for NRIP1 (NM_003489.1,1860-1878).
gatgtgagcaagttcaata

SEQ ID NO: 112306 - DNA, 19 bp, Homo sapiens
  siRNA target sequence for NRIP1 (NM_003489.1,1865-1883).
gagcaagttcaatacacaa

SEQ ID NO: 112307 - DNA, 19 bp, Homo sapiens
  siRNA target sequence for NRIP1 (NM_003489.1,1972-1990).
cagggtctcccatcaatct

SEQ ID NO: 112308 - DNA, 19 bp, Homo sapiens
  siRNA target sequence for NRIP1 (NM_003489.1,1974-1992).
gggtctcccatcaatctct

SEQ ID NO: 112309 - DNA, 19 bp, Homo sapiens
  siRNA target sequence for NRIP1 (NM_003489.1,2002-2020).
ctctggtcatcaaatggaa

SEQ ID NO: 112310 - DNA, 19 bp, Homo sapiens
  siRNA target sequence for NRIP1 (NM_003489.1,2017-2035).
ggaattccccaccatatgt

SEQ ID NO: 112311 - DNA, 19 bp, Homo sapiens
  siRNA target sequence for NRIP1 (NM_003489.1,2038-2056).
gcagtactcagtctgaaaa

SEQ ID NO: 112312 - DNA, 19 bp, Homo sapiens
  siRNA target sequence for NRIP1 (NM_003489.1,2164-2182).
gtgccagtaagctgttaca

SEQ ID NO: 112313 - DNA, 19 bp, Homo sapiens
  siRNA target sequence for NRIP1 (NM_003489.1,2237-2255).
cagcaaacagctgttaact

SEQ ID NO: 112314 - DNA, 19 bp, Homo sapiens
  siRNA target sequence for NRIP1 (NM_003489.1,2263-2281).
cagataaaccgataggtat

SEQ ID NO: 112315 - DNA, 19 bp, Homo sapiens
  siRNA target sequence for NRIP1 (NM_003489.1,2271-2289).
ccgataggtatgattgata

SEQ ID NO: 112316 - DNA, 19 bp, Homo sapiens
  siRNA target sequence for NRIP1 (NM_003489.1,2508-2526).
cactcagagagagctttaa

SEQ ID NO: 112317 - DNA, 19 bp, Homo sapiens
  siRNA target sequence for NRIP1 (NM_003489.1,2561-2579).
gccttgtgatgacttacaa

SEQ ID NO: 112318 - DNA, 19 bp, Homo sapiens
  siRNA target sequence for NRIP1 (NM_003489.1,2673-2691).
ccagtgtccgaagacttta

SEQ ID NO: 112319 - DNA, 19 bp, Homo sapiens
  siRNA target sequence for NRIP1 (NM_003489.1,2674-2692).
cagtgtccgaagactttaa

SEQ ID NO: 112320 - DNA, 19 bp, Homo sapiens
  siRNA target sequence for NRIP1 (NM_003489.1,2739-2757).
ctgctaagtcgattgctaa

SEQ ID NO: 112321 - DNA, 19 bp, Homo sapiens
  siRNA target sequence for NRIP1 (NM_003489.1,2746-2764).
gtcgattgctaagacaaaa

SEQ ID NO: 112322 - DNA, 19 bp, Homo sapiens
  siRNA target sequence for NRIP1 (NM_003489.1,2749-2767).
gattgctaagacaaaatca

SEQ ID NO: 112323 - DNA, 19 bp, Homo sapiens
  siRNA target sequence for NRIP1 (NM_003489.1,2795-2813).
caggagtcacagaaataat

SEQ ID NO: 112324 - DNA, 19 bp, Homo sapiens
  siRNA target sequence for NRIP1 (NM_003489.1,2820-2838).
gcacttctagaatcaaaga

SEQ ID NO: 112325 - DNA, 19 bp, Homo sapiens
  siRNA target sequence for NRIP1 (NM_003489.1,2826-2844).
ctagaatcaaagaatcttt

SEQ ID NO: 112326 - DNA, 19 bp, Homo sapiens
  siRNA target sequence for NRIP1 (NM_003489.1,2858-2876).
gaaaaggaagctttatact

SEQ ID NO: 112327 - DNA, 19 bp, Homo sapiens
  siRNA target sequence for NRIP1 (NM_003489.1,2941-2959).
gtgccccagaagtactgta

SEQ ID NO: 112328 - DNA, 19 bp, Homo sapiens
  siRNA target sequence for NRIP1 (NM_003489.1,2955-2973).
ctgtatgggtccttgctta

SEQ ID NO: 112329 - DNA, 19 bp, Homo sapiens
  siRNA target sequence for NRIP1 (NM_003489.1,3137-3155).
cccgcacagaagtaactct

SEQ ID NO: 112330 - DNA, 19 bp, Homo sapiens
  siRNA target sequence for NRIP1 (NM_003489.1,3152-3170).
ctctgtggctgacagtaaa

SEQ ID NO: 112331 - DNA, 19 bp, Homo sapiens
  siRNA target sequence for NRIP1 (NM_003489.1,3156-3174).
gtggctgacagtaaaaaga

SEQ ID NO: 112332 - DNA, 19 bp, Homo sapiens
  siRNA target sequence for NRIP1 (NM_003489.1,3202-3220).
gcaaacctgaatttagcat

SEQ ID NO: 112333 - DNA, 19 bp, Homo sapiens
  siRNA target sequence for NRIP1 (NM_003489.1,3207-3225).
cctgaatttagcatttctt

SEQ ID NO: 112334 - DNA, 19 bp, Homo sapiens
  siRNA target sequence for NRIP1 (NM_003489.1,3258-3276).
cccagcagttgcatggata

SEQ ID NO: 112335 - DNA, 19 bp, Homo sapiens
  siRNA target sequence for NRIP1 (NM_003489.1,3269-3287).
catggataacaggacattt

SEQ ID NO: 112336 - DNA, 19 bp, Homo sapiens
  siRNA target sequence for NRIP1 (NM_003489.1,3272-3290).
ggataacaggacattttca

SEQ ID NO: 112337 - DNA, 19 bp, Homo sapiens
  siRNA target sequence for NRIP1 (NM_003489.1,3399-3417).
gagaaaggacccattaagt

SEQ ID NO: 112338 - DNA, 19 bp, Homo sapiens
  siRNA target sequence for NRIP1 (NM_003489.1,3408-3426).
cccattaagtgggttatca

SEQ ID NO: 112339 - DNA, 19 bp, Homo sapiens
  siRNA target sequence for NRIP1 (NM_003489.1,3433-3451).
cggagaagaatgagtatga

SEQ ID NO: 112340 - DNA, 19 bp, Homo sapiens
  siRNA target sequence for NRIP1 (NM_003489.1,3472-3490).
ccaaaaccaacccaatact

SEQ ID NO: 112341 - DNA, 19 bp, Homo sapiens
  siRNA target sequence for NRIP1 (NM_003489.1,3478-3496).
ccaacccaatactatatta

SEQ ID NO: 112342 - DNA, 19 bp, Homo sapiens
  siRNA target sequence for NRIP1 (NM_003489.1,3628-3646).
cgaaagcttctttctttaa

SEQ ID NO: 112343 - DNA, 19 bp, Homo sapiens
  siRNA target sequence for NRIP1 (NM_003489.1,3698-3716).
cagcgcaaatggagaagtt

SEQ ID NO: 112344 - DNA, 19 bp, Homo sapiens
  siRNA target sequence for NRIP1 (NM_003489.1,3728-3746).
gggaagcgtgctaacgata

SEQ ID NO: 112345 - DNA, 19 bp, Homo sapiens
  siRNA target sequence for NRIP1 (NM_003489.1,3729-3747).
ggaagcgtgctaacgataa

SEQ ID NO: 112346 - DNA, 19 bp, Homo sapiens
  siRNA target sequence for NRIP1 (NM_003489.1,3730-3748).
gaagcgtgctaacgataaa

SEQ ID NO: 112347 - DNA, 19 bp, Homo sapiens
  siRNA target sequence for NRIP1 (NM_003489.1,3733-3751).
gcgtgctaacgataaagaa

SEQ ID NO: 112348 - DNA, 19 bp, Homo sapiens
  siRNA target sequence for NRIP1 (NM_003489.1,3734-3752).
cgtgctaacgataaagaaa

SEQ ID NO: 112349 - DNA, 19 bp, Homo sapiens
  siRNA target sequence for NRIP1 (NM_003489.1,3742-3760).
cgataaagaaagaatcaga

SEQ ID NO: 112350 - DNA, 19 bp, Homo sapiens
  siRNA target sequence for PCBD (NM_000281.1,109-127).
gccgtgatgccatcttcaa

SEQ ID NO: 112351 - DNA, 19 bp, Homo sapiens
  siRNA target sequence for PCBD (NM_000281.1,129-147).
cagtttcatttcaaagact

SEQ ID NO: 112352 - DNA, 19 bp, Homo sapiens
  siRNA target sequence for PCBD (NM_000281.1,217-235).
ggtttaacgtgtacaacaa

SEQ ID NO: 112353 - DNA, 19 bp, Homo sapiens
  siRNA target sequence for PCBD (NM_000281.1,273-291).
ctttcagaacgggacataa

SEQ ID NO: 112354 - DNA, 19 bp, Homo sapiens
  siRNA target sequence for PCBD (NM_000281.1,298-316).
ccagcttcatcgaacaagt

SEQ ID NO: 112355 - DNA, 19 bp, Homo sapiens
  siRNA target sequence for PCBD (NM_000281.1,299-317).
cagcttcatcgaacaagta

SEQ ID NO: 112356 - DNA, 19 bp, Homo sapiens
  siRNA target sequence for PCBD (NM_000281.1,315-333).
gtagcagtgtccatgacat

SEQ ID NO: 112357 - DNA, 19 bp, Homo sapiens
  siRNA target sequence for PMF1 (NM_007221.1,148-166).
ggcagctaccagagattca

SEQ ID NO: 112358 - DNA, 19 bp, Homo sapiens
  siRNA target sequence for PMF1 (NM_007221.1,150-168).
cagctaccagagattcact

SEQ ID NO: 112359 - DNA, 19 bp, Homo sapiens
  siRNA target sequence for PMF1 (NM_007221.1,219-237).
ctatgacaagtttatagct

SEQ ID NO: 112360 - DNA, 19 bp, Homo sapiens
  siRNA target sequence for PMF1 (NM_007221.1,248-266).
catctatccgggaggaaat

SEQ ID NO: 112361 - DNA, 19 bp, Homo sapiens
  siRNA target sequence for PMF1 (NM_007221.1,301-319).
gtcttgaatgccttggata

SEQ ID NO: 112362 - DNA, 19 bp, Homo sapiens
  siRNA target sequence for POU2AF1 (NM_006235.1,831-849).
caccttacaccgagtatgt

SEQ ID NO: 112363 - DNA, 19 bp, Homo sapiens
  siRNA target sequence for POU2AF1 (NM_006235.1,873-891).
cctactcagctgacatgta

SEQ ID NO: 112364 - DNA, 19 bp, Homo sapiens
  siRNA target sequence for POU2AF1 (NM_006235.1,874-892).
ctactcagctgacatgtat

SEQ ID NO: 112365 - DNA, 19 bp, Homo sapiens
  siRNA target sequence for RNF14 (NM_004290.3,330-348).
gctggccctggcaagtatt

SEQ ID NO: 112366 - DNA, 19 bp, Homo sapiens
  siRNA target sequence for RNF14 (NM_004290.3,335-353).
ccctggcaagtatttacga

SEQ ID NO: 112367 - DNA, 19 bp, Homo sapiens
  siRNA target sequence for RNF14 (NM_004290.3,336-354).
cctggcaagtatttacgat

SEQ ID NO: 112368 - DNA, 19 bp, Homo sapiens
  siRNA target sequence for RNF14 (NM_004290.3,351-369).
cgatggagatgaatttaga

SEQ ID NO: 112369 - DNA, 19 bp, Homo sapiens
  siRNA target sequence for RNF14 (NM_004290.3,391-409).
ggagaaaccaggatctatt

SEQ ID NO: 112370 - DNA, 19 bp, Homo sapiens
  siRNA target sequence for RNF14 (NM_004290.3,503-521).
ctccacttgtgctgaactt

SEQ ID NO: 112371 - DNA, 19 bp, Homo sapiens
  siRNA target sequence for RNF14 (NM_004290.3,607-625).
ctatgcaagcacttagaca

SEQ ID NO: 112372 - DNA, 19 bp, Homo sapiens
  siRNA target sequence for RNF14 (NM_004290.3,668-686).
ggatgcaatttcttaagga

SEQ ID NO: 112373 - DNA, 19 bp, Homo sapiens
  siRNA target sequence for RNF14 (NM_004290.3,669-687).
gatgcaatttcttaaggaa

SEQ ID NO: 112374 - DNA, 19 bp, Homo sapiens
  siRNA target sequence for RNF14 (NM_004290.3,688-706).
gagaccctagcatacttga

SEQ ID NO: 112375 - DNA, 19 bp, Homo sapiens
  siRNA target sequence for RNF14 (NM_004290.3,692-710).
ccctagcatacttgaatat

SEQ ID NO: 112376 - DNA, 19 bp, Homo sapiens
  siRNA target sequence for RNF14 (NM_004290.3,693-711).
cctagcatacttgaatatt

SEQ ID NO: 112377 - DNA, 19 bp, Homo sapiens
  siRNA target sequence for RNF14 (NM_004290.3,697-715).
gcatacttgaatattgtct

SEQ ID NO: 112378 - DNA, 19 bp, Homo sapiens
  siRNA target sequence for RNF14 (NM_004290.3,778-796).
cccaacacagagctagatt

SEQ ID NO: 112379 - DNA, 19 bp, Homo sapiens
  siRNA target sequence for RNF14 (NM_004290.3,911-929).
ctcagcagataaaatgctt

SEQ ID NO: 112380 - DNA, 19 bp, Homo sapiens
  siRNA target sequence for RNF14 (NM_004290.3,913-931).
cagcagataaaatgcttta

SEQ ID NO: 112381 - DNA, 19 bp, Homo sapiens
  siRNA target sequence for RNF14 (NM_004290.3,977-995).
gtagtgaatgcatgtactt

SEQ ID NO: 112382 - DNA, 19 bp, Homo sapiens
  siRNA target sequence for RNF14 (NM_004290.3,980-998).
gtgaatgcatgtacttctt

SEQ ID NO: 112383 - DNA, 19 bp, Homo sapiens
  siRNA target sequence for RNF14 (NM_004290.3,1117-1135).
cctggtcaggtcaaagagt

SEQ ID NO: 112384 - DNA, 19 bp, Homo sapiens
  siRNA target sequence for RNF14 (NM_004290.3,1118-1136).
ctggtcaggtcaaagagtt

SEQ ID NO: 112385 - DNA, 19 bp, Homo sapiens
  siRNA target sequence for RNF14 (NM_004290.3,1134-1152).
gttagtggaagcagagtta

SEQ ID NO: 112386 - DNA, 19 bp, Homo sapiens
  siRNA target sequence for RNF14 (NM_004290.3,1387-1405).
caagcggatgaggctaata

SEQ ID NO: 112387 - DNA, 19 bp, Homo sapiens
  siRNA target sequence for RNF14 (NM_004290.3,1390-1408).
gcggatgaggctaataaaa

SEQ ID NO: 112388 - DNA, 19 bp, Homo sapiens
  siRNA target sequence for RNF14 (NM_004290.3,1425-1443).
gtatggtaagagagtgatt

SEQ ID NO: 112389 - DNA, 19 bp, Homo sapiens
  siRNA target sequence for RNF14 (NM_004290.3,1513-1531).
ggaactcccatagagaaat

SEQ ID NO: 112390 - DNA, 19 bp, Homo sapiens
  siRNA target sequence for RNF14 (NM_004290.3,1534-1552).
gacggatgtaacaagatga

SEQ ID NO: 112391 - DNA, 19 bp, Homo sapiens
  siRNA target sequence for RNF14 (NM_004290.3,1556-1574).
gtactggctgtatgcaata

SEQ ID NO: 112392 - DNA, 19 bp, Homo sapiens
  siRNA target sequence for RNF14 (NM_004290.3,1561-1579).
ggctgtatgcaatatttct

SEQ ID NO: 112393 - DNA, 19 bp, Homo sapiens
  siRNA target sequence for RNF14 (NM_004290.3,1636-1654).
cctggttcaccatgtttta

SEQ ID NO: 112394 - DNA, 19 bp, Homo sapiens
  siRNA target sequence for RNF14 (NM_004290.3,1637-1655).
ctggttcaccatgttttaa

SEQ ID NO: 112395 - DNA, 19 bp, Homo sapiens
  siRNA target sequence for RNF14 (NM_004290.3,1649-1667).
gttttaaccggctgtttta

SEQ ID NO: 112396 - DNA, 19 bp, Homo sapiens
  siRNA target sequence for SMARCD2 (NM_003077.2,818-836).
gacacaaaagcgaaagctt

SEQ ID NO: 112397 - DNA, 19 bp, Homo sapiens
  siRNA target sequence for SMARCD2 (NM_003077.2,828-846).
cgaaagcttcggatctaca

SEQ ID NO: 112398 - DNA, 19 bp, Homo sapiens
  siRNA target sequence for SMARCD2 (NM_003077.2,834-852).
cttcggatctacatttcca

SEQ ID NO: 112399 - DNA, 19 bp, Homo sapiens
  siRNA target sequence for SMARCD2 (NM_003077.2,837-855).
cggatctacatttccaata

SEQ ID NO: 112400 - DNA, 19 bp, Homo sapiens
  siRNA target sequence for SMARCD2 (NM_003077.2,1043-1061).
gctgtacgggcctgacaat

SEQ ID NO: 112401 - DNA, 19 bp, Homo sapiens
  siRNA target sequence for SMARCD2 (NM_003077.2,1255-1273).
ccctgtggctttacatcaa

SEQ ID NO: 112402 - DNA, 19 bp, Homo sapiens
  siRNA target sequence for SMARCD2 (NM_003077.2,1294-1312).
ggcacgagcgggagtacat

SEQ ID NO: 112403 - DNA, 19 bp, Homo sapiens
  siRNA target sequence for SMARCD2 (NM_003077.2,1324-1342).
gttacttccgccagatctt

SEQ ID NO: 112404 - DNA, 19 bp, Homo sapiens
  siRNA target sequence for SMARCD2 (NM_003077.2,1680-1698).
cgccgagacctcaagatca

SEQ ID NO: 112405 - DNA, 19 bp, Homo sapiens
  siRNA target sequence for SMARCD2 (NM_003077.2,1681-1699).
gccgagacctcaagatcat

SEQ ID NO: 112406 - DNA, 19 bp, Homo sapiens
  siRNA target sequence for SMARCD2 (NM_003077.2,1683-1701).
cgagacctcaagatcatca

SEQ ID NO: 112407 - DNA, 19 bp, Homo sapiens
  siRNA target sequence for SMARCD3 (NM_003078.2,585-603).
gcggaagctgcgactctat

SEQ ID NO: 112408 - DNA, 19 bp, Homo sapiens
  siRNA target sequence for SMARCD3 (NM_003078.2,587-605).
ggaagctgcgactctatat

SEQ ID NO: 112409 - DNA, 19 bp, Homo sapiens
  siRNA target sequence for SMARCD3 (NM_003078.2,600-618).
ctatatctccaacactttt

SEQ ID NO: 112410 - DNA, 19 bp, Homo sapiens
  siRNA target sequence for SMARCD3 (NM_003078.2,753-771).
cgagctggacaaagatctt

SEQ ID NO: 112411 - DNA, 19 bp, Homo sapiens
  siRNA target sequence for SMARCD3 (NM_003078.2,1126-1144).
ccccctgacccaattgtca

SEQ ID NO: 112412 - DNA, 19 bp, Homo sapiens
  siRNA target sequence for SMARCD3 (NM_003078.2,1127-1145).
cccctgacccaattgtcat

SEQ ID NO: 112413 - DNA, 19 bp, Homo sapiens
  siRNA target sequence for SMARCD3 (NM_003078.2,1185-1203).
gacggcgtgctatgacatt

SEQ ID NO: 112414 - DNA, 19 bp, Homo sapiens
  siRNA target sequence for SMARCD3 (NM_003078.2,1187-1205).
cggcgtgctatgacattga

SEQ ID NO: 112415 - DNA, 19 bp, Homo sapiens
  siRNA target sequence for SMARCD3 (NM_003078.2,1280-1298).
gtgctctggacagtaagat

SEQ ID NO: 112416 - DNA, 19 bp, Homo sapiens
  siRNA target sequence for SMARCD3 (NM_003078.2,1495-1513).
gccgtcagtcgctacttct

SEQ ID NO: 112417 - DNA, 19 bp, Homo sapiens
  siRNA target sequence for SMARCD3 (NM_003078.2,1496-1514).
ccgtcagtcgctacttcta

SEQ ID NO: 112418 - DNA, 19 bp, Homo sapiens
  siRNA target sequence for SNW1 (NM_012245.2,30-48).
ggcgctcaccagcttttta

SEQ ID NO: 112419 - DNA, 19 bp, Homo sapiens
  siRNA target sequence for SNW1 (NM_012245.2,53-71).
cacctactcagctatctca

SEQ ID NO: 112420 - DNA, 19 bp, Homo sapiens
  siRNA target sequence for SNW1 (NM_012245.2,173-191).
gctggatacctcggttatt

SEQ ID NO: 112421 - DNA, 19 bp, Homo sapiens
  siRNA target sequence for SNW1 (NM_012245.2,174-192).
ctggatacctcggttatta

SEQ ID NO: 112422 - DNA, 19 bp, Homo sapiens
  siRNA target sequence for SNW1 (NM_012245.2,176-194).
ggatacctcggttattaga

SEQ ID NO: 112423 - DNA, 19 bp, Homo sapiens
  siRNA target sequence for SNW1 (NM_012245.2,182-200).
ctcggttattagaggattt

SEQ ID NO: 112424 - DNA, 19 bp, Homo sapiens
  siRNA target sequence for SNW1 (NM_012245.2,236-254).
cccagtatccactggatat

SEQ ID NO: 112425 - DNA, 19 bp, Homo sapiens
  siRNA target sequence for SNW1 (NM_012245.2,352-370).
gacaaggtcatttatagca

SEQ ID NO: 112426 - DNA, 19 bp, Homo sapiens
  siRNA target sequence for SNW1 (NM_012245.2,360-378).
catttatagcaaatacact

SEQ ID NO: 112427 - DNA, 19 bp, Homo sapiens
  siRNA target sequence for SNW1 (NM_012245.2,385-403).
gttccaaaggaggttatga

SEQ ID NO: 112428 - DNA, 19 bp, Homo sapiens
  siRNA target sequence for SNW1 (NM_012245.2,431-449).
ccgatgaagaagctattaa

SEQ ID NO: 112429 - DNA, 19 bp, Homo sapiens
  siRNA target sequence for SNW1 (NM_012245.2,432-450).
cgatgaagaagctattaaa

SEQ ID NO: 112430 - DNA, 19 bp, Homo sapiens
  siRNA target sequence for SNW1 (NM_012245.2,465-483).
gacaagagtagccttagaa

SEQ ID NO: 112431 - DNA, 19 bp, Homo sapiens
  siRNA target sequence for SNW1 (NM_012245.2,577-595).
caaggagtggcattcaact

SEQ ID NO: 112432 - DNA, 19 bp, Homo sapiens
  siRNA target sequence for SNW1 (NM_012245.2,653-671).
ctccaaggttcaagattaa

SEQ ID NO: 112433 - DNA, 19 bp, Homo sapiens
  siRNA target sequence for SNW1 (NM_012245.2,703-721).
cctgcgcctgtcatgcatt

SEQ ID NO: 112434 - DNA, 19 bp, Homo sapiens
  siRNA target sequence for SNW1 (NM_012245.2,728-746).
gccgaaagatgactgtaaa

SEQ ID NO: 112435 - DNA, 19 bp, Homo sapiens
  siRNA target sequence for SNW1 (NM_012245.2,761-779).
ggaagattcctccttgtat

SEQ ID NO: 112436 - DNA, 19 bp, Homo sapiens
  siRNA target sequence for SNW1 (NM_012245.2,769-787).
cctccttgtatttctaact

SEQ ID NO: 112437 - DNA, 19 bp, Homo sapiens
  siRNA target sequence for SNW1 (NM_012245.2,801-819).
gggttatacaattccatta

SEQ ID NO: 112438 - DNA, 19 bp, Homo sapiens
  siRNA target sequence for SNW1 (NM_012245.2,803-821).
gttatacaattccattaga

SEQ ID NO: 112439 - DNA, 19 bp, Homo sapiens
  siRNA target sequence for SNW1 (NM_012245.2,848-866).
gactacagacagtacacat

SEQ ID NO: 112440 - DNA, 19 bp, Homo sapiens
  siRNA target sequence for SNW1 (NM_012245.2,855-873).
gacagtacacataaatgaa

SEQ ID NO: 112441 - DNA, 19 bp, Homo sapiens
  siRNA target sequence for SNW1 (NM_012245.2,1094-1112).
ggcatgacaggcgaaaaga

SEQ ID NO: 112442 - DNA, 19 bp, Homo sapiens
  siRNA target sequence for SNW1 (NM_012245.2,1096-1114).
catgacaggcgaaaagaga

SEQ ID NO: 112443 - DNA, 19 bp, Homo sapiens
  siRNA target sequence for SNW1 (NM_012245.2,1223-1241).
ctcggacttccaatgaagt

SEQ ID NO: 112444 - DNA, 19 bp, Homo sapiens
  siRNA target sequence for SNW1 (NM_012245.2,1226-1244).
ggacttccaatgaagttca

SEQ ID NO: 112445 - DNA, 19 bp, Homo sapiens
  siRNA target sequence for SNW1 (NM_012245.2,1229-1247).
cttccaatgaagttcagta

SEQ ID NO: 112446 - DNA, 19 bp, Homo sapiens
  siRNA target sequence for SNW1 (NM_012245.2,1232-1250).
ccaatgaagttcagtatga

SEQ ID NO: 112447 - DNA, 19 bp, Homo sapiens
  siRNA target sequence for SNW1 (NM_012245.2,1252-1270).
caaaggctcttcaaccaat

SEQ ID NO: 112448 - DNA, 19 bp, Homo sapiens
  siRNA target sequence for SNW1 (NM_012245.2,1256-1274).
ggctcttcaaccaatccaa

SEQ ID NO: 112449 - DNA, 19 bp, Homo sapiens
  siRNA target sequence for SNW1 (NM_012245.2,1510-1528).
gaggaagatccttttggtt

SEQ ID NO: 112450 - DNA, 19 bp, Homo sapiens
  siRNA target sequence for SNW1 (NM_012245.2,1520-1538).
cttttggtttggacaagtt

SEQ ID NO: 112451 - DNA, 19 bp, Homo sapiens
  siRNA target sequence for SNW1 (NM_012245.2,1557-1575).
gcatggtggctctaaaaga

SEQ ID NO: 112452 - DNA, 19 bp, Homo sapiens
  siRNA target sequence for TAF7 (NM_005642.2,857-875).
caaggacagactgacaatt

SEQ ID NO: 112453 - DNA, 19 bp, Homo sapiens
  siRNA target sequence for TAF7 (NM_005642.2,865-883).
gactgacaattgagttaca

SEQ ID NO: 112454 - DNA, 19 bp, Homo sapiens
  siRNA target sequence for TAF7 (NM_005642.2,886-904).
ctgatgggcgtcatggaat

SEQ ID NO: 112455 - DNA, 19 bp, Homo sapiens
  siRNA target sequence for TAF7 (NM_005642.2,910-928).
gagtggaccgtgttccatt

SEQ ID NO: 112456 - DNA, 19 bp, Homo sapiens
  siRNA target sequence for TAF7 (NM_005642.2,921-939).
gttccattggcctcaaaat

SEQ ID NO: 112457 - DNA, 19 bp, Homo sapiens
  siRNA target sequence for TAF7 (NM_005642.2,957-975).
gttatggaaagcttgaaaa

SEQ ID NO: 112458 - DNA, 19 bp, Homo sapiens
  siRNA target sequence for TAF7 (NM_005642.2,1133-1151).
ctggaaccacggaattact

SEQ ID NO: 112459 - DNA, 19 bp, Homo sapiens
  siRNA target sequence for TAF7 (NM_005642.2,1135-1153).
ggaaccacggaattactct

SEQ ID NO: 112460 - DNA, 19 bp, Homo sapiens
  siRNA target sequence for TAF7 (NM_005642.2,1273-1291).
gtactcggtgggaaataat

SEQ ID NO: 112461 - DNA, 19 bp, Homo sapiens
  siRNA target sequence for TAF7 (NM_005642.2,1323-1341).
caaggcctggatatctctt

SEQ ID NO: 112462 - DNA, 19 bp, Homo sapiens
  siRNA target sequence for TAF7 (NM_005642.2,1389-1407).
gatgagcttcgggagatat

SEQ ID NO: 112463 - DNA, 19 bp, Homo sapiens
  siRNA target sequence for TAF7 (NM_005642.2,1392-1410).
gagcttcgggagatattca

SEQ ID NO: 112464 - DNA, 19 bp, Homo sapiens
  siRNA target sequence for TAF7 (NM_005642.2,1394-1412).
gcttcgggagatattcaat

SEQ ID NO: 112465 - DNA, 19 bp, Homo sapiens
  siRNA target sequence for TAF7 (NM_005642.2,1508-1526).
gctacaggacaagctaaat

SEQ ID NO: 112466 - DNA, 19 bp, Homo sapiens
  siRNA target sequence for TAF7 (NM_005642.2,1547-1565).
ggaaaatgaaggaaccaat

SEQ ID NO: 112467 - DNA, 19 bp, Homo sapiens
  siRNA target sequence for TAF7 (NM_005642.2,1589-1607).
gcagattgacaacatgaaa

SEQ ID NO: 112468 - DNA, 19 bp, Homo sapiens
  siRNA target sequence for TAF7 (NM_005642.2,1625-1643).
ccaggacagggcaaaacga

SEQ ID NO: 112469 - DNA, 19 bp, Homo sapiens
  siRNA target sequence for TAF7 (NM_005642.2,1674-1692).
ctggctctcaagaacagat

SEQ ID NO: 112470 - DNA, 19 bp, Homo sapiens
  siRNA target sequence for TAF7 (NM_005642.2,1676-1694).
ggctctcaagaacagattt

SEQ ID NO: 112471 - DNA, 19 bp, Homo sapiens
  siRNA target sequence for TAF7 (NM_005642.2,1704-1722).
ctggatgagctcaaacaaa

SEQ ID NO: 112472 - DNA, 19 bp, Homo sapiens
  siRNA target sequence for TAF7 (NM_005642.2,1742-1760).
gcaactcagctctttgcaa

SEQ ID NO: 112473 - DNA, 19 bp, Homo sapiens
  siRNA target sequence for TAZ (NM_015472.3,375-393).
cctgccggagtctttcttt

SEQ ID NO: 112474 - DNA, 19 bp, Homo sapiens
  siRNA target sequence for TAZ (NM_015472.3,376-394).
ctgccggagtctttcttta

SEQ ID NO: 112475 - DNA, 19 bp, Homo sapiens
  siRNA target sequence for TAZ (NM_015472.3,653-671).
ggtacttcctcaatcacat

SEQ ID NO: 112476 - DNA, 19 bp, Homo sapiens
  siRNA target sequence for TAZ (NM_015472.3,654-672).
gtacttcctcaatcacata

SEQ ID NO: 112477 - DNA, 19 bp, Homo sapiens
  siRNA target sequence for TAZ (NM_015472.3,792-810).
gccaaatctcgtgatgaat

SEQ ID NO: 112478 - DNA, 19 bp, Homo sapiens
  siRNA target sequence for TAZ (NM_015472.3,877-895).
cccgcagggctcatgagta

SEQ ID NO: 112479 - DNA, 19 bp, Homo sapiens
  siRNA target sequence for TAZ (NM_015472.3,1098-1116).
gagatccatcactaataat

SEQ ID NO: 112480 - DNA, 19 bp, Homo sapiens
  siRNA target sequence for TAZ (NM_015472.3,1134-1152).
caatggagggccatatcat

SEQ ID NO: 112481 - DNA, 19 bp, Homo sapiens
  siRNA target sequence for TAZ (NM_015472.3,1264-1282).
ggacaaacacccatgaaca

SEQ ID NO: 112482 - DNA, 19 bp, Homo sapiens
  siRNA target sequence for TAZ (NM_015472.3,1265-1283).
gacaaacacccatgaacat

SEQ ID NO: 112483 - DNA, 19 bp, Homo sapiens
  siRNA target sequence for TAZ (NM_015472.3,1328-1346).
caggaacaaacgttgactt

SEQ ID NO: 112484 - DNA, 19 bp, Homo sapiens
  siRNA target sequence for TAZ (NM_015472.3,1342-1360).
gacttaggaactttggaat

SEQ ID NO: 112485 - DNA, 19 bp, Homo sapiens
  siRNA target sequence for TAZ (NM_015472.3,1376-1394).
ccctcttcaatgatgtaga

SEQ ID NO: 112486 - DNA, 19 bp, Homo sapiens
  siRNA target sequence for TAZ (NM_015472.3,1395-1413).
gtctgctctgaacaaaagt

SEQ ID NO: 112487 - DNA, 19 bp, Homo sapiens
  siRNA target sequence for TCERG1 (NM_006706.2,45-63).
gcgagagtgaacgattcaa

SEQ ID NO: 112488 - DNA, 19 bp, Homo sapiens
  siRNA target sequence for TCERG1 (NM_006706.2,115-133).
ggctcccccaccaaatgca

SEQ ID NO: 112489 - DNA, 19 bp, Homo sapiens
  siRNA target sequence for TCERG1 (NM_006706.2,168-186).
ctccaccttttggtatgat

SEQ ID NO: 112490 - DNA, 19 bp, Homo sapiens
  siRNA target sequence for TCERG1 (NM_006706.2,217-235).
ctttggacgtcctcctttt

SEQ ID NO: 112491 - DNA, 19 bp, Homo sapiens
  siRNA target sequence for TCERG1 (NM_006706.2,344-362).
cctcctccgggtatgatgt

SEQ ID NO: 112492 - DNA, 19 bp, Homo sapiens
  siRNA target sequence for TCERG1 (NM_006706.2,345-363).
ctcctccgggtatgatgtt

SEQ ID NO: 112493 - DNA, 19 bp, Homo sapiens
  siRNA target sequence for TCERG1 (NM_006706.2,410-428).
cctcctacggaggagatat

SEQ ID NO: 112494 - DNA, 19 bp, Homo sapiens
  siRNA target sequence for TCERG1 (NM_006706.2,419-437).
gaggagatatgggttgaaa

SEQ ID NO: 112495 - DNA, 19 bp, Homo sapiens
  siRNA target sequence for TCERG1 (NM_006706.2,421-439).
ggagatatgggttgaaaat

SEQ ID NO: 112496 - DNA, 19 bp, Homo sapiens
  siRNA target sequence for TCERG1 (NM_006706.2,444-462).
ctccagatgggaaggttta

SEQ ID NO: 112497 - DNA, 19 bp, Homo sapiens
  siRNA target sequence for TCERG1 (NM_006706.2,453-471).
ggaaggtttattattataa

SEQ ID NO: 112498 - DNA, 19 bp, Homo sapiens
  siRNA target sequence for TCERG1 (NM_006706.2,503-521).
ccagatggagttaaggtta

SEQ ID NO: 112499 - DNA, 19 bp, Homo sapiens
  siRNA target sequence for TCERG1 (NM_006706.2,504-522).
cagatggagttaaggttat

SEQ ID NO: 112500 - DNA, 19 bp, Homo sapiens
  siRNA target sequence for TCERG1 (NM_006706.2,517-535).
ggttattcagcaatcagaa

SEQ ID NO: 112501 - DNA, 19 bp, Homo sapiens
  siRNA target sequence for TCERG1 (NM_006706.2,821-839).
cctgcagtatccacttcaa

SEQ ID NO: 112502 - DNA, 19 bp, Homo sapiens
  siRNA target sequence for TCERG1 (NM_006706.2,824-842).
gcagtatccacttcaacat

SEQ ID NO: 112503 - DNA, 19 bp, Homo sapiens
  siRNA target sequence for TCERG1 (NM_006706.2,953-971).
gttgccacgcctacagtta

SEQ ID NO: 112504 - DNA, 19 bp, Homo sapiens
  siRNA target sequence for TCERG1 (NM_006706.2,957-975).
ccacgcctacagttagtgt

SEQ ID NO: 112505 - DNA, 19 bp, Homo sapiens
  siRNA target sequence for TCERG1 (NM_006706.2,961-979).
gcctacagttagtgtttca

SEQ ID NO: 112506 - DNA, 19 bp, Homo sapiens
  siRNA target sequence for TCERG1 (NM_006706.2,962-980).
cctacagttagtgtttcaa

SEQ ID NO: 112507 - DNA, 19 bp, Homo sapiens
  siRNA target sequence for TCERG1 (NM_006706.2,1069-1087).
gccaacaacagcaatacct

SEQ ID NO: 112508 - DNA, 19 bp, Homo sapiens
  siRNA target sequence for TCERG1 (NM_006706.2,1089-1107).
cttttccaccagtaatggt

SEQ ID NO: 112509 - DNA, 19 bp, Homo sapiens
  siRNA target sequence for TCERG1 (NM_006706.2,1146-1164).
cacttccaggtgtagcaat

SEQ ID NO: 112510 - DNA, 19 bp, Homo sapiens
  siRNA target sequence for TCERG1 (NM_006706.2,1180-1198).
ctgcccgtatgtaaagaca

SEQ ID NO: 112511 - DNA, 19 bp, Homo sapiens
  siRNA target sequence for TCERG1 (NM_006706.2,1206-1224).
ccaccaagaccggtgtatt

SEQ ID NO: 112512 - DNA, 19 bp, Homo sapiens
  siRNA target sequence for TCERG1 (NM_006706.2,1242-1260).
ctatcgtacccatgataca

SEQ ID NO: 112513 - DNA, 19 bp, Homo sapiens
  siRNA target sequence for TCERG1 (NM_006706.2,1508-1526).
gagcctataaaggagataa

SEQ ID NO: 112514 - DNA, 19 bp, Homo sapiens
  siRNA target sequence for TCERG1 (NM_006706.2,1638-1656).
gtgatgagcgggtcttctt

SEQ ID NO: 112515 - DNA, 19 bp, Homo sapiens
  siRNA target sequence for TCERG1 (NM_006706.2,1640-1658).
gatgagcgggtcttctttt

SEQ ID NO: 112516 - DNA, 19 bp, Homo sapiens
  siRNA target sequence for TCERG1 (NM_006706.2,1643-1661).
gagcgggtcttcttttata

SEQ ID NO: 112517 - DNA, 19 bp, Homo sapiens
  siRNA target sequence for TCERG1 (NM_006706.2,1645-1663).
gcgggtcttcttttataat

SEQ ID NO: 112518 - DNA, 19 bp, Homo sapiens
  siRNA target sequence for TCERG1 (NM_006706.2,1665-1683).
ccaccactcgtctttctat

SEQ ID NO: 112519 - DNA, 19 bp, Homo sapiens
  siRNA target sequence for TCERG1 (NM_006706.2,1686-1704).
gggaccgacctgatgatct

SEQ ID NO: 112520 - DNA, 19 bp, Homo sapiens
  siRNA target sequence for TCERG1 (NM_006706.2,1705-1723).
gattggcagggcagatgtt

SEQ ID NO: 112521 - DNA, 19 bp, Homo sapiens
  siRNA target sequence for TCERG1 (NM_006706.2,1738-1756).
ggagccccctcataaaaaa

SEQ ID NO: 112522 - DNA, 19 bp, Homo sapiens
  siRNA target sequence for TCERG1 (NM_006706.2,1741-1759).
gccccctcataaaaaagga

SEQ ID NO: 112523 - DNA, 19 bp, Homo sapiens
  siRNA target sequence for TCERG1 (NM_006706.2,1797-1815).
caatgctgtcgatccaaaa

SEQ ID NO: 112524 - DNA, 19 bp, Homo sapiens
  siRNA target sequence for TCERG1 (NM_006706.2,1810-1828).
ccaaaagtggcaattctct

SEQ ID NO: 112525 - DNA, 19 bp, Homo sapiens
  siRNA target sequence for TCERG1 (NM_006706.2,1825-1843).
ctctatgagtgcaattaaa

SEQ ID NO: 112526 - DNA, 19 bp, Homo sapiens
  siRNA target sequence for TCERG1 (NM_006706.2,1827-1845).
ctatgagtgcaattaaaga

SEQ ID NO: 112527 - DNA, 19 bp, Homo sapiens
  siRNA target sequence for TCERG1 (NM_006706.2,1901-1919).
cggaagagagacgataata

SEQ ID NO: 112528 - DNA, 19 bp, Homo sapiens
  siRNA target sequence for TCERG1 (NM_006706.2,1913-1931).
gataataaagacattgact

SEQ ID NO: 112529 - DNA, 19 bp, Homo sapiens
  siRNA target sequence for TCERG1 (NM_006706.2,2039-2057).
ggggtgtctgctttttcaa

SEQ ID NO: 112530 - DNA, 19 bp, Homo sapiens
  siRNA target sequence for TCERG1 (NM_006706.2,2273-2291).
gccaagcatgctaaagatt

SEQ ID NO: 112531 - DNA, 19 bp, Homo sapiens
  siRNA target sequence for TCERG1 (NM_006706.2,2275-2293).
caagcatgctaaagattca

SEQ ID NO: 112532 - DNA, 19 bp, Homo sapiens
  siRNA target sequence for TCERG1 (NM_006706.2,2321-2339).
gaccgagaagccttgttta

SEQ ID NO: 112533 - DNA, 19 bp, Homo sapiens
  siRNA target sequence for TCERG1 (NM_006706.2,2323-2341).
ccgagaagccttgtttaat

SEQ ID NO: 112534 - DNA, 19 bp, Homo sapiens
  siRNA target sequence for TCERG1 (NM_006706.2,2325-2343).
gagaagccttgtttaatga

SEQ ID NO: 112535 - DNA, 19 bp, Homo sapiens
  siRNA target sequence for TCERG1 (NM_006706.2,2327-2345).
gaagccttgtttaatgagt

SEQ ID NO: 112536 - DNA, 19 bp, Homo sapiens
  siRNA target sequence for TCERG1 (NM_006706.2,2401-2419).
gattaaatcggatttcttt

SEQ ID NO: 112537 - DNA, 19 bp, Homo sapiens
  siRNA target sequence for TCERG1 (NM_006706.2,2452-2470).
gtctcgatggagcaaagta

SEQ ID NO: 112538 - DNA, 19 bp, Homo sapiens
  siRNA target sequence for TCERG1 (NM_006706.2,2500-2518).
caaagcagtagatagttca

SEQ ID NO: 112539 - DNA, 19 bp, Homo sapiens
  siRNA target sequence for TCERG1 (NM_006706.2,2504-2522).
gcagtagatagttcatcaa

SEQ ID NO: 112540 - DNA, 19 bp, Homo sapiens
  siRNA target sequence for TCERG1 (NM_006706.2,2505-2523).
cagtagatagttcatcaat

SEQ ID NO: 112541 - DNA, 19 bp, Homo sapiens
  siRNA target sequence for TCERG1 (NM_006706.2,2653-2671).
ggcccgttcagaacaaaca

SEQ ID NO: 112542 - DNA, 19 bp, Homo sapiens
  siRNA target sequence for TCERG1 (NM_006706.2,2654-2672).
gcccgttcagaacaaacaa

SEQ ID NO: 112543 - DNA, 19 bp, Homo sapiens
  siRNA target sequence for TCERG1 (NM_006706.2,2656-2674).
ccgttcagaacaaacaaaa

SEQ ID NO: 112544 - DNA, 19 bp, Homo sapiens
  siRNA target sequence for TCERG1 (NM_006706.2,2762-2780).
gatgtgtcatggtctgata

SEQ ID NO: 112545 - DNA, 19 bp, Homo sapiens
  siRNA target sequence for TCERG1 (NM_006706.2,2784-2802).
gtaggaccctccgaaaaga

SEQ ID NO: 112546 - DNA, 19 bp, Homo sapiens
  siRNA target sequence for TCERG1 (NM_006706.2,2787-2805).
ggaccctccgaaaagatca

SEQ ID NO: 112547 - DNA, 19 bp, Homo sapiens
  siRNA target sequence for TCERG1 (NM_006706.2,2905-2923).
gcaacttctggatgaaact

SEQ ID NO: 112548 - DNA, 19 bp, Homo sapiens
  siRNA target sequence for TCERG1 (NM_006706.2,2915-2933).
gatgaaacttctgcaatta

SEQ ID NO: 112549 - DNA, 19 bp, Homo sapiens
  siRNA target sequence for TCERG1 (NM_006706.2,2974-2992).
ggaagatcctcgatgtatt

SEQ ID NO: 112550 - DNA, 19 bp, Homo sapiens
  siRNA target sequence for TCERG1 (NM_006706.2,2975-2993).
gaagatcctcgatgtatta

SEQ ID NO: 112551 - DNA, 19 bp, Homo sapiens
  siRNA target sequence for TCERG1 (NM_006706.2,2978-2996).
gatcctcgatgtattaagt

SEQ ID NO: 112552 - DNA, 19 bp, Homo sapiens
  siRNA target sequence for TCERG1 (NM_006706.2,2981-2999).
cctcgatgtattaagttct

SEQ ID NO: 112553 - DNA, 19 bp, Homo sapiens
  siRNA target sequence for TCERG1 (NM_006706.2,3035-3053).
gaatatatcagagacaaat

SEQ ID NO: 112554 - DNA, 19 bp, Homo sapiens
  siRNA target sequence for TCERG1 (NM_006706.2,3043-3061).
cagagacaaatatatcaca

SEQ ID NO: 112555 - DNA, 19 bp, Homo sapiens
  siRNA target sequence for TCERG1 (NM_006706.2,3092-3110).
gagaccaaatttataacat

SEQ ID NO: 112556 - DNA, 19 bp, Homo sapiens
  siRNA target sequence for TCERG1 (NM_006706.2,3138-3156).
cagatcagcacctgaaaga

SEQ ID NO: 112557 - DNA, 19 bp, Homo sapiens
  siRNA target sequence for TCERG1 (NM_006706.2,3214-3232).
ggagaggcgtaaactgatt

SEQ ID NO: 112558 - DNA, 19 bp, Homo sapiens
  siRNA target sequence for TCERG1 (NM_006706.2,3229-3247).
gattgtggcatatgttgat

SEQ ID NO: 112559 - DNA, 19 bp, Homo sapiens
  siRNA target sequence for TCERG1 (NM_006706.2,3292-3310).
gcccacgagacgatcaaca

SEQ ID NO: 112560 - DNA, 19 bp, Homo sapiens
  siRNA target sequence for TCERG1 (NM_006706.2,3293-3311).
cccacgagacgatcaacaa

SEQ ID NO: 112561 - DNA, 19 bp, Homo sapiens
  siRNA target sequence for TCERG1 (NM_006706.2,3295-3313).
cacgagacgatcaacaaaa

SEQ ID NO: 112562 - DNA, 19 bp, Homo sapiens
  siRNA target sequence for TGFB1I1 (NM_015927.3,316-334).
cggttgcttcaggaactta

SEQ ID NO: 112563 - DNA, 19 bp, Homo sapiens
  siRNA target sequence for TGFB1I1 (NM_015927.3,317-335).
ggttgcttcaggaacttaa

SEQ ID NO: 112564 - DNA, 19 bp, Homo sapiens
  siRNA target sequence for TGFB1I1 (NM_015927.3,318-336).
gttgcttcaggaacttaat

SEQ ID NO: 112565 - DNA, 19 bp, Homo sapiens
  siRNA target sequence for TGFB1I1 (NM_015927.3,497-515).
ctctggagctggatagact

SEQ ID NO: 112566 - DNA, 19 bp, Homo sapiens
  siRNA target sequence for TGFB1I1 (NM_015927.3,530-548).
ctgacttccgcgttcaaaa

SEQ ID NO: 112567 - DNA, 19 bp, Homo sapiens
  siRNA target sequence for TGFB1I1 (NM_015927.3,534-552).
cttccgcgttcaaaaccat

SEQ ID NO: 112568 - DNA, 19 bp, Homo sapiens
  siRNA target sequence for TGFB1I1 (NM_015927.3,718-736).
ggctcctgcaataaaccta

SEQ ID NO: 112569 - DNA, 19 bp, Homo sapiens
  siRNA target sequence for TGFB1I1 (NM_015927.3,876-894).
gcgcttctcgccaagatgt

SEQ ID NO: 112570 - DNA, 19 bp, Homo sapiens
  siRNA target sequence for TNRC11 (NM_005120.1,250-268).
ctgacggccttgaatgtaa

SEQ ID NO: 112571 - DNA, 19 bp, Homo sapiens
  siRNA target sequence for TNRC11 (NM_005120.1,576-594).
gtacttagccaaatacaca

SEQ ID NO: 112572 - DNA, 19 bp, Homo sapiens
  siRNA target sequence for TNRC11 (NM_005120.1,607-625).
cgggctgcctggctcatta

SEQ ID NO: 112573 - DNA, 19 bp, Homo sapiens
  siRNA target sequence for TNRC11 (NM_005120.1,608-626).
gggctgcctggctcattaa

SEQ ID NO: 112574 - DNA, 19 bp, Homo sapiens
  siRNA target sequence for TNRC11 (NM_005120.1,682-700).
gttgaccctttcatggaat

SEQ ID NO: 112575 - DNA, 19 bp, Homo sapiens
  siRNA target sequence for TNRC11 (NM_005120.1,708-726).
gatcatcaccaagtactta

SEQ ID NO: 112576 - DNA, 19 bp, Homo sapiens
  siRNA target sequence for TNRC11 (NM_005120.1,803-821).
ggcccttgccccatgatgt

SEQ ID NO: 112577 - DNA, 19 bp, Homo sapiens
  siRNA target sequence for TNRC11 (NM_005120.1,914-932).
gggtgcttgagtgttttga

SEQ ID NO: 112578 - DNA, 19 bp, Homo sapiens
  siRNA target sequence for TNRC11 (NM_005120.1,987-1005).
ccgatactctggggaattt

SEQ ID NO: 112579 - DNA, 19 bp, Homo sapiens
  siRNA target sequence for TNRC11 (NM_005120.1,1087-1105).
cactcatctcatgttatat

SEQ ID NO: 112580 - DNA, 19 bp, Homo sapiens
  siRNA target sequence for TNRC11 (NM_005120.1,1169-1187).
cctcgactccctttagtga

SEQ ID NO: 112581 - DNA, 19 bp, Homo sapiens
  siRNA target sequence for TNRC11 (NM_005120.1,1178-1196).
cctttagtgacctgcttat

SEQ ID NO: 112582 - DNA, 19 bp, Homo sapiens
  siRNA target sequence for TNRC11 (NM_005120.1,1359-1377).
catgccagagggtaacagt

SEQ ID NO: 112583 - DNA, 19 bp, Homo sapiens
  siRNA target sequence for TNRC11 (NM_005120.1,1434-1452).
gcggggacaggcagttgaa

SEQ ID NO: 112584 - DNA, 19 bp, Homo sapiens
  siRNA target sequence for TNRC11 (NM_005120.1,1453-1471).
gttcgctggtctttcgata

SEQ ID NO: 112585 - DNA, 19 bp, Homo sapiens
  siRNA target sequence for TNRC11 (NM_005120.1,1456-1474).
cgctggtctttcgataaat

SEQ ID NO: 112586 - DNA, 19 bp, Homo sapiens
  siRNA target sequence for TNRC11 (NM_005120.1,1504-1522).
ggacgggtacttcatactt

SEQ ID NO: 112587 - DNA, 19 bp, Homo sapiens
  siRNA target sequence for TNRC11 (NM_005120.1,1505-1523).
gacgggtacttcatacttt

SEQ ID NO: 112588 - DNA, 19 bp, Homo sapiens
  siRNA target sequence for TNRC11 (NM_005120.1,1530-1548).
gctggacagccatagtttt

SEQ ID NO: 112589 - DNA, 19 bp, Homo sapiens
  siRNA target sequence for TNRC11 (NM_005120.1,1533-1551).
ggacagccatagttttgaa

SEQ ID NO: 112590 - DNA, 19 bp, Homo sapiens
  siRNA target sequence for TNRC11 (NM_005120.1,1586-1604).
gtaaccgaatctttggatt

SEQ ID NO: 112591 - DNA, 19 bp, Homo sapiens
  siRNA target sequence for TNRC11 (NM_005120.1,1648-1666).
gctgtggtgtcattgctat

SEQ ID NO: 112592 - DNA, 19 bp, Homo sapiens
  siRNA target sequence for TNRC11 (NM_005120.1,1653-1671).
ggtgtcattgctatgtgaa

SEQ ID NO: 112593 - DNA, 19 bp, Homo sapiens
  siRNA target sequence for TNRC11 (NM_005120.1,1654-1672).
gtgtcattgctatgtgaat

SEQ ID NO: 112594 - DNA, 19 bp, Homo sapiens
  siRNA target sequence for TNRC11 (NM_005120.1,1761-1779).
gcgttgtggagaatcagaa

SEQ ID NO: 112595 - DNA, 19 bp, Homo sapiens
  siRNA target sequence for TNRC11 (NM_005120.1,1909-1927).
gagcgggtggaattcttta

SEQ ID NO: 112596 - DNA, 19 bp, Homo sapiens
  siRNA target sequence for TNRC11 (NM_005120.1,1912-1930).
cgggtggaattctttaact

SEQ ID NO: 112597 - DNA, 19 bp, Homo sapiens
  siRNA target sequence for TNRC11 (NM_005120.1,1913-1931).
gggtggaattctttaactt

SEQ ID NO: 112598 - DNA, 19 bp, Homo sapiens
  siRNA target sequence for TNRC11 (NM_005120.1,1914-1932).
ggtggaattctttaactta

SEQ ID NO: 112599 - DNA, 19 bp, Homo sapiens
  siRNA target sequence for TNRC11 (NM_005120.1,1917-1935).
ggaattctttaacttagta

SEQ ID NO: 112600 - DNA, 19 bp, Homo sapiens
  siRNA target sequence for TNRC11 (NM_005120.1,1971-1989).
ctcccacaacatgtatact

SEQ ID NO: 112601 - DNA, 19 bp, Homo sapiens
  siRNA target sequence for TNRC11 (NM_005120.1,2040-2058).
gcctccctctccctttgat

SEQ ID NO: 112602 - DNA, 19 bp, Homo sapiens
  siRNA target sequence for TNRC11 (NM_005120.1,2119-2137).
gatccagggctctcagaat

SEQ ID NO: 112603 - DNA, 19 bp, Homo sapiens
  siRNA target sequence for TNRC11 (NM_005120.1,2132-2150).
cagaatctatggacattga

SEQ ID NO: 112604 - DNA, 19 bp, Homo sapiens
  siRNA target sequence for TNRC11 (NM_005120.1,2181-2199).
ggagaagcctgatttctca

SEQ ID NO: 112605 - DNA, 19 bp, Homo sapiens
  siRNA target sequence for TNRC11 (NM_005120.1,2188-2206).
cctgatttctcattgttct

SEQ ID NO: 112606 - DNA, 19 bp, Homo sapiens
  siRNA target sequence for TNRC11 (NM_005120.1,2306-2324).
cccttggggttctttacga

SEQ ID NO: 112607 - DNA, 19 bp, Homo sapiens
  siRNA target sequence for TNRC11 (NM_005120.1,2400-2418).
gcggttggtcgtactgttt

SEQ ID NO: 112608 - DNA, 19 bp, Homo sapiens
  siRNA target sequence for TNRC11 (NM_005120.1,2496-2514).
caaagggacagcagaaact

SEQ ID NO: 112609 - DNA, 19 bp, Homo sapiens
  siRNA target sequence for TNRC11 (NM_005120.1,2755-2773).
cagcatgtgcagttcatct

SEQ ID NO: 112610 - DNA, 19 bp, Homo sapiens
  siRNA target sequence for TNRC11 (NM_005120.1,2772-2790).
cttcgacctcatggaatat

SEQ ID NO: 112611 - DNA, 19 bp, Homo sapiens
  siRNA target sequence for TNRC11 (NM_005120.1,2775-2793).
cgacctcatggaatattca

SEQ ID NO: 112612 - DNA, 19 bp, Homo sapiens
  siRNA target sequence for TNRC11 (NM_005120.1,2884-2902).
ctggtgggcagctacacta

SEQ ID NO: 112613 - DNA, 19 bp, Homo sapiens
  siRNA target sequence for TNRC11 (NM_005120.1,2887-2905).
gtgggcagctacactacta

SEQ ID NO: 112614 - DNA, 19 bp, Homo sapiens
  siRNA target sequence for TNRC11 (NM_005120.1,3048-3066).
gcgctgtatccttgcttat

SEQ ID NO: 112615 - DNA, 19 bp, Homo sapiens
  siRNA target sequence for TNRC11 (NM_005120.1,3053-3071).
gtatccttgcttatctcta

SEQ ID NO: 112616 - DNA, 19 bp, Homo sapiens
  siRNA target sequence for TNRC11 (NM_005120.1,3057-3075).
ccttgcttatctctatgat

SEQ ID NO: 112617 - DNA, 19 bp, Homo sapiens
  siRNA target sequence for TNRC11 (NM_005120.1,3166-3184).
gtggagccatcggaatcaa

SEQ ID NO: 112618 - DNA, 19 bp, Homo sapiens
  siRNA target sequence for TNRC11 (NM_005120.1,3168-3186).
ggagccatcggaatcaaat

SEQ ID NO: 112619 - DNA, 19 bp, Homo sapiens
  siRNA target sequence for TNRC11 (NM_005120.1,3346-3364).
cccgatagggtgaatgaca

SEQ ID NO: 112620 - DNA, 19 bp, Homo sapiens
  siRNA target sequence for TNRC11 (NM_005120.1,3347-3365).
ccgatagggtgaatgacat

SEQ ID NO: 112621 - DNA, 19 bp, Homo sapiens
  siRNA target sequence for TNRC11 (NM_005120.1,3382-3400).
gagctgaccggctattgca

SEQ ID NO: 112622 - DNA, 19 bp, Homo sapiens
  siRNA target sequence for TNRC11 (NM_005120.1,3441-3459).
gtgctgctcctctaacaat

SEQ ID NO: 112623 - DNA, 19 bp, Homo sapiens
  siRNA target sequence for TNRC11 (NM_005120.1,3477-3495).
cgatctcctctgcaatgtt

SEQ ID NO: 112624 - DNA, 19 bp, Homo sapiens
  siRNA target sequence for TNRC11 (NM_005120.1,3496-3514).
gatgtcagtgacctatctt

SEQ ID NO: 112625 - DNA, 19 bp, Homo sapiens
  siRNA target sequence for TNRC11 (NM_005120.1,3596-3614).
ccatcccttcactccttaa

SEQ ID NO: 112626 - DNA, 19 bp, Homo sapiens
  siRNA target sequence for TNRC11 (NM_005120.1,3609-3627).
ccttaatgctgcttgtagt

SEQ ID NO: 112627 - DNA, 19 bp, Homo sapiens
  siRNA target sequence for TNRC11 (NM_005120.1,3800-3818).
ccgtgtttgctgttctcaa

SEQ ID NO: 112628 - DNA, 19 bp, Homo sapiens
  siRNA target sequence for TNRC11 (NM_005120.1,3816-3834).
caaggctgtgtttgtactt

SEQ ID NO: 112629 - DNA, 19 bp, Homo sapiens
  siRNA target sequence for TNRC11 (NM_005120.1,3838-3856).
gatgcggaactgaaaggtt

SEQ ID NO: 112630 - DNA, 19 bp, Homo sapiens
  siRNA target sequence for TNRC11 (NM_005120.1,3959-3977).
cagccagtctggatgtcta

SEQ ID NO: 112631 - DNA, 19 bp, Homo sapiens
  siRNA target sequence for TNRC11 (NM_005120.1,4066-4084).
caagacccagtgttgagta

SEQ ID NO: 112632 - DNA, 19 bp, Homo sapiens
  siRNA target sequence for TNRC11 (NM_005120.1,4099-4117).
cgcctcatgcagctcattt

SEQ ID NO: 112633 - DNA, 19 bp, Homo sapiens
  siRNA target sequence for TNRC11 (NM_005120.1,4298-4316).
ccacaatcgaggttttcca

SEQ ID NO: 112634 - DNA, 19 bp, Homo sapiens
  siRNA target sequence for TNRC11 (NM_005120.1,4459-4477).
gtccagggacatgtgttaa

SEQ ID NO: 112635 - DNA, 19 bp, Homo sapiens
  siRNA target sequence for TNRC11 (NM_005120.1,4658-4676).
gccaggtgcaccagattgt

SEQ ID NO: 112636 - DNA, 19 bp, Homo sapiens
  siRNA target sequence for TNRC11 (NM_005120.1,4666-4684).
caccagattgtgaataatt

SEQ ID NO: 112637 - DNA, 19 bp, Homo sapiens
  siRNA target sequence for TNRC11 (NM_005120.1,4685-4703).
ggcgagatgaccagtactt

SEQ ID NO: 112638 - DNA, 19 bp, Homo sapiens
  siRNA target sequence for TNRC11 (NM_005120.1,4686-4704).
gcgagatgaccagtactta

SEQ ID NO: 112639 - DNA, 19 bp, Homo sapiens
  siRNA target sequence for TNRC11 (NM_005120.1,4854-4872).
cgacatgcagtccaacaat

SEQ ID NO: 112640 - DNA, 19 bp, Homo sapiens
  siRNA target sequence for TNRC11 (NM_005120.1,4899-4917).
gctgagcgtgctcatcaat

SEQ ID NO: 112641 - DNA, 19 bp, Homo sapiens
  siRNA target sequence for TNRC11 (NM_005120.1,4955-4973).
gtagcatggaggaaaacaa

SEQ ID NO: 112642 - DNA, 19 bp, Homo sapiens
  siRNA target sequence for TNRC11 (NM_005120.1,5102-5120).
cacagggctcccttatcga

SEQ ID NO: 112643 - DNA, 19 bp, Homo sapiens
  siRNA target sequence for TNRC11 (NM_005120.1,5104-5122).
cagggctcccttatcgata

SEQ ID NO: 112644 - DNA, 19 bp, Homo sapiens
  siRNA target sequence for TNRC11 (NM_005120.1,5108-5126).
gctcccttatcgataccaa

SEQ ID NO: 112645 - DNA, 19 bp, Homo sapiens
  siRNA target sequence for TNRC11 (NM_005120.1,5143-5161).
ggcttcgattccatcttca

SEQ ID NO: 112646 - DNA, 19 bp, Homo sapiens
  siRNA target sequence for TNRC11 (NM_005120.1,5144-5162).
gcttcgattccatcttcaa

SEQ ID NO: 112647 - DNA, 19 bp, Homo sapiens
  siRNA target sequence for TNRC11 (NM_005120.1,5176-5194).
caggtttccaccaaacaga

SEQ ID NO: 112648 - DNA, 19 bp, Homo sapiens
  siRNA target sequence for TNRC11 (NM_005120.1,5199-5217).
ctcgccctgggatcttttt

SEQ ID NO: 112649 - DNA, 19 bp, Homo sapiens
  siRNA target sequence for TNRC11 (NM_005120.1,5201-5219).
cgccctgggatctttttga

SEQ ID NO: 112650 - DNA, 19 bp, Homo sapiens
  siRNA target sequence for TNRC11 (NM_005120.1,5613-5631).
cccaaaccctggttctata

SEQ ID NO: 112651 - DNA, 19 bp, Homo sapiens
  siRNA target sequence for TNRC11 (NM_005120.1,5614-5632).
ccaaaccctggttctataa

SEQ ID NO: 112652 - DNA, 19 bp, Homo sapiens
  siRNA target sequence for TNRC11 (NM_005120.1,5627-5645).
ctataacacaccttaacta

SEQ ID NO: 112653 - DNA, 19 bp, Homo sapiens
  siRNA target sequence for TNRC11 (NM_005120.1,5719-5737).
cgtcctgtgcgcttaccaa

SEQ ID NO: 112654 - DNA, 19 bp, Homo sapiens
  siRNA target sequence for TNRC11 (NM_005120.1,5720-5738).
gtcctgtgcgcttaccaat

SEQ ID NO: 112655 - DNA, 19 bp, Homo sapiens
  siRNA target sequence for TNRC11 (NM_005120.1,5792-5810).
ctggcgtcatgggtttaga

SEQ ID NO: 112656 - DNA, 19 bp, Homo sapiens
  siRNA target sequence for TNRC11 (NM_005120.1,5809-5827).
gaaccctcctcttataaga

SEQ ID NO: 112657 - DNA, 19 bp, Homo sapiens
  siRNA target sequence for TNRC11 (NM_005120.1,5961-5979).
gacttcccagggctatact

SEQ ID NO: 112658 - DNA, 19 bp, Homo sapiens
  siRNA target sequence for TNRC11 (NM_005120.1,5967-5985).
ccagggctatactccttat

SEQ ID NO: 112659 - DNA, 19 bp, Homo sapiens
  siRNA target sequence for TNRC11 (NM_005120.1,5970-5988).
gggctatactccttatgtt

SEQ ID NO: 112660 - DNA, 19 bp, Homo sapiens
  siRNA target sequence for TNRC11 (NM_005120.1,5971-5989).
ggctatactccttatgttt

SEQ ID NO: 112661 - DNA, 19 bp, Homo sapiens
  siRNA target sequence for TNRC11 (NM_005120.1,6069-6087).
cacccacccttctaccaat

SEQ ID NO: 112662 - DNA, 19 bp, Homo sapiens
  siRNA target sequence for TNRC11 (NM_005120.1,6083-6101).
ccaatcctactcttgtaga

SEQ ID NO: 112663 - DNA, 19 bp, Homo sapiens
  siRNA target sequence for TNRC11 (NM_005120.1,6084-6102).
caatcctactcttgtagat

SEQ ID NO: 112664 - DNA, 19 bp, Homo sapiens
  siRNA target sequence for TNRC11 (NM_005120.1,6169-6187).
ggactgacctccactcaaa

SEQ ID NO: 112665 - DNA, 19 bp, Homo sapiens
  siRNA target sequence for TNRC11 (NM_005120.1,6177-6195).
ctccactcaaaggttttca

SEQ ID NO: 112666 - DNA, 19 bp, Homo sapiens
  siRNA target sequence for TNRC11 (NM_005120.1,6207-6225).
gcagcagacacccatgata

SEQ ID NO: 112667 - DNA, 19 bp, Homo sapiens
  siRNA target sequence for TNRC11 (NM_005120.1,6261-6279).
ggcaggcgtccgttcaaca

SEQ ID NO: 112668 - DNA, 19 bp, Homo sapiens
  siRNA target sequence for TNRC11 (NM_005120.1,6602-6620).
ctttggtccggcaacttca

SEQ ID NO: 112669 - DNA, 19 bp, Homo sapiens
  siRNA target sequence for TNRC11 (NM_005120.1,6606-6624).
ggtccggcaacttcaacaa

SEQ ID NO: 112670 - DNA, 19 bp, Homo sapiens
  siRNA target sequence for TNRC11 (NM_005120.1,6646-6664).
cagcccagtaccaacatat

SEQ ID NO: 112671 - DNA, 19 bp, Homo sapiens
  siRNA target sequence for TNRC11 (NM_005120.1,6648-6666).
gcccagtaccaacatattt

SEQ ID NO: 112672 - DNA, 19 bp, Homo sapiens
  siRNA target sequence for TNRC11 (NM_005120.1,6651-6669).
cagtaccaacatatttgga

SEQ ID NO: 112673 - DNA, 19 bp, Homo sapiens
  siRNA target sequence for TRAP95 (NM_005481.2,264-282).
cctggtcctgccgaaatct

SEQ ID NO: 112674 - DNA, 19 bp, Homo sapiens
  siRNA target sequence for TRAP95 (NM_005481.2,452-470).
gccgacgggcagatcaagt

SEQ ID NO: 112675 - DNA, 19 bp, Homo sapiens
  siRNA target sequence for TRAP95 (NM_005481.2,482-500).
gcggaccacctggctaata

SEQ ID NO: 112676 - DNA, 19 bp, Homo sapiens
  siRNA target sequence for TRAP95 (NM_005481.2,861-879).
cgcccgtgcagttctacaa

SEQ ID NO: 112677 - DNA, 19 bp, Homo sapiens
  siRNA target sequence for TRAP95 (NM_005481.2,964-982).
caaccgcaaggacaagttt

SEQ ID NO: 112678 - DNA, 19 bp, Homo sapiens
  siRNA target sequence for TRAP95 (NM_005481.2,1131-1149).
ccgtggttggcgacaaaca

SEQ ID NO: 112679 - DNA, 19 bp, Homo sapiens
  siRNA target sequence for TRAP95 (NM_005481.2,1141-1159).
cgacaaacagcccacaatt

SEQ ID NO: 112680 - DNA, 19 bp, Homo sapiens
  siRNA target sequence for TRAP95 (NM_005481.2,1160-1178).
ctcaaatggcggatcctat

SEQ ID NO: 112681 - DNA, 19 bp, Homo sapiens
  siRNA target sequence for TRAP95 (NM_005481.2,1263-1281).
ccagcgacacacagttcta

SEQ ID NO: 112682 - DNA, 19 bp, Homo sapiens
  siRNA target sequence for TRAP95 (NM_005481.2,1633-1651).
cgtgcagcccagtatggta

SEQ ID NO: 112683 - DNA, 19 bp, Homo sapiens
  siRNA target sequence for TRAP95 (NM_005481.2,1914-1932).
ccgacgtcgacattgacaa

SEQ ID NO: 112684 - DNA, 19 bp, Homo sapiens
  siRNA target sequence for TRAP95 (NM_005481.2,1945-1963).
cctcaagacggaggaattt

SEQ ID NO: 112685 - DNA, 19 bp, Homo sapiens
  siRNA target sequence for TRAP95 (NM_005481.2,2108-2126).
ggcatgcttcgggaattga

SEQ ID NO: 112686 - DNA, 19 bp, Homo sapiens
  siRNA target sequence for TRAP95 (NM_005481.2,2109-2127).
gcatgcttcgggaattgat

SEQ ID NO: 112687 - DNA, 19 bp, Homo sapiens
  siRNA target sequence for TRAP95 (NM_005481.2,2520-2538).
gccccacggaggaatgcaa

SEQ ID NO: 112688 - DNA, 19 bp, Homo sapiens
  siRNA target sequence for TRAP95 (NM_005481.2,2570-2588).
ctcaagtcgcccaacagaa

SEQ ID NO: 112689 - DNA, 19 bp, Homo sapiens
  siRNA target sequence for TRAP95 (NM_005481.2,2626-2644).
gaactgcctggctgttgaa

SEQ ID NO: 112690 - DNA, 19 bp, Homo sapiens
  siRNA target sequence for TRIM32 (NM_012210.2,173-191).
ctccgggaagtgctagaat

SEQ ID NO: 112691 - DNA, 19 bp, Homo sapiens
  siRNA target sequence for TRIM32 (NM_012210.2,308-326).
gtccgctgtcccttttgca

SEQ ID NO: 112692 - DNA, 19 bp, Homo sapiens
  siRNA target sequence for TRIM32 (NM_012210.2,317-335).
cccttttgcagcaagatta

SEQ ID NO: 112693 - DNA, 19 bp, Homo sapiens
  siRNA target sequence for TRIM32 (NM_012210.2,377-395).
gtgctaaagatcattgata

SEQ ID NO: 112694 - DNA, 19 bp, Homo sapiens
  siRNA target sequence for TRIM32 (NM_012210.2,379-397).
gctaaagatcattgataca

SEQ ID NO: 112695 - DNA, 19 bp, Homo sapiens
  siRNA target sequence for TRIM32 (NM_012210.2,477-495).
gtggtttggtgttatgtga

SEQ ID NO: 112696 - DNA, 19 bp, Homo sapiens
  siRNA target sequence for TRIM32 (NM_012210.2,532-550).
ctgtacactccctgtcaaa

SEQ ID NO: 112697 - DNA, 19 bp, Homo sapiens
  siRNA target sequence for TRIM32 (NM_012210.2,534-552).
gtacactccctgtcaaaga

SEQ ID NO: 112698 - DNA, 19 bp, Homo sapiens
  siRNA target sequence for TRIM32 (NM_012210.2,594-612).
ctcgtctgcgggaacttat

SEQ ID NO: 112699 - DNA, 19 bp, Homo sapiens
  siRNA target sequence for TRIM32 (NM_012210.2,658-676).
ggaccttcaggcaaggtat

SEQ ID NO: 112700 - DNA, 19 bp, Homo sapiens
  siRNA target sequence for TRIM32 (NM_012210.2,659-677).
gaccttcaggcaaggtata

SEQ ID NO: 112701 - DNA, 19 bp, Homo sapiens
  siRNA target sequence for TRIM32 (NM_012210.2,661-679).
ccttcaggcaaggtataaa

SEQ ID NO: 112702 - DNA, 19 bp, Homo sapiens
  siRNA target sequence for TRIM32 (NM_012210.2,731-749).
gctcgctctcggaagttct

SEQ ID NO: 112703 - DNA, 19 bp, Homo sapiens
  siRNA target sequence for TRIM32 (NM_012210.2,868-886).
gatcaagcaggcagatgta

SEQ ID NO: 112704 - DNA, 19 bp, Homo sapiens
  siRNA target sequence for TRIM32 (NM_012210.2,973-991).
ccttaaggtaggtcatgtt

SEQ ID NO: 112705 - DNA, 19 bp, Homo sapiens
  siRNA target sequence for TRIM32 (NM_012210.2,1076-1094).
gctgcctctacctctgtta

SEQ ID NO: 112706 - DNA, 19 bp, Homo sapiens
  siRNA target sequence for TRIM32 (NM_012210.2,1170-1188).
ctgaggcagcctccaatat

SEQ ID NO: 112707 - DNA, 19 bp, Homo sapiens
  siRNA target sequence for TRIM32 (NM_012210.2,1270-1288).
gaccagtcaaggtgaagta

SEQ ID NO: 112708 - DNA, 19 bp, Homo sapiens
  siRNA target sequence for TRIM32 (NM_012210.2,1294-1312).
cgctgaccgtggtaactat

SEQ ID NO: 112709 - DNA, 19 bp, Homo sapiens
  siRNA target sequence for TRIM32 (NM_012210.2,1298-1316).
gaccgtggtaactatcgta

SEQ ID NO: 112710 - DNA, 19 bp, Homo sapiens
  siRNA target sequence for TRIM32 (NM_012210.2,1300-1318).
ccgtggtaactatcgtata

SEQ ID NO: 112711 - DNA, 19 bp, Homo sapiens
  siRNA target sequence for TRIM32 (NM_012210.2,1302-1320).
gtggtaactatcgtataca

SEQ ID NO: 112712 - DNA, 19 bp, Homo sapiens
  siRNA target sequence for TRIM32 (NM_012210.2,1305-1323).
gtaactatcgtatacaagt

SEQ ID NO: 112713 - DNA, 19 bp, Homo sapiens
  siRNA target sequence for TRIM32 (NM_012210.2,1360-1378).
cagccccagtggcattgat

SEQ ID NO: 112714 - DNA, 19 bp, Homo sapiens
  siRNA target sequence for TRIM32 (NM_012210.2,1365-1383).
ccagtggcattgatagctt

SEQ ID NO: 112715 - DNA, 19 bp, Homo sapiens
  siRNA target sequence for TRIM32 (NM_012210.2,1366-1384).
cagtggcattgatagcttt

SEQ ID NO: 112716 - DNA, 19 bp, Homo sapiens
  siRNA target sequence for TRIM32 (NM_012210.2,1543-1561).
caaaccatggggtatcaca

SEQ ID NO: 112717 - DNA, 19 bp, Homo sapiens
  siRNA target sequence for TRIM32 (NM_012210.2,1567-1585).
gccatctggccagtttgta

SEQ ID NO: 112718 - DNA, 19 bp, Homo sapiens
  siRNA target sequence for TRIM32 (NM_012210.2,1569-1587).
catctggccagtttgtagt

SEQ ID NO: 112719 - DNA, 19 bp, Homo sapiens
  siRNA target sequence for TRIM32 (NM_012210.2,1635-1653).
gatcaggggtggtcaaata

SEQ ID NO: 112720 - DNA, 19 bp, Homo sapiens
  siRNA target sequence for TRIM32 (NM_012210.2,1701-1719).
ctgagggcaccgtctactt

SEQ ID NO: 112721 - DNA, 19 bp, Homo sapiens
  siRNA target sequence for TRIM32 (NM_012210.2,1703-1721).
gagggcaccgtctacttca

SEQ ID NO: 112722 - DNA, 19 bp, Homo sapiens
  siRNA target sequence for TRIM32 (NM_012210.2,1811-1829).
cagctgggtcgccagatta

SEQ ID NO: 112723 - DNA, 19 bp, Homo sapiens
  siRNA target sequence for TRIM32 (NM_012210.2,1821-1839).
gccagattagccacttctt

SEQ ID NO: 112724 - DNA, 19 bp, Homo sapiens
  siRNA target sequence for TRIM32 (NM_012210.2,1912-1930).
cagtagtcgcaaggaaatt

SEQ ID NO: 112725 - DNA, 19 bp, Homo sapiens
  siRNA target sequence for TRIM32 (NM_012210.2,1914-1932).
gtagtcgcaaggaaattct

SEQ ID NO: 112726 - DNA, 19 bp, Homo sapiens
  siRNA target sequence for TRIM32 (NM_012210.2,2040-2058).
gggatcattgcatcaagat

SEQ ID NO: 112727 - DNA, 19 bp, Homo sapiens
  siRNA target sequence for TRIM32 (NM_012210.2,2064-2082).
gctaccatctgagaagata

SEQ ID NO: 112728 - DNA, 19 bp, Homo sapiens
  siRNA target sequence for TRIM32 (NM_012210.2,2065-2083).
ctaccatctgagaagatat

SEQ ID NO: 112729 - DNA, 19 bp, Homo sapiens
  siRNA target sequence for TRIP11 (NM_004239.1,436-454).
ctggccagatatcaaactt

SEQ ID NO: 112730 - DNA, 19 bp, Homo sapiens
  siRNA target sequence for TRIP11 (NM_004239.1,440-458).
ccagatatcaaactttaca

SEQ ID NO: 112731 - DNA, 19 bp, Homo sapiens
  siRNA target sequence for TRIP11 (NM_004239.1,441-459).
cagatatcaaactttacaa

SEQ ID NO: 112732 - DNA, 19 bp, Homo sapiens
  siRNA target sequence for TRIP11 (NM_004239.1,495-513).
gcagaattacctgattcta

SEQ ID NO: 112733 - DNA, 19 bp, Homo sapiens
  siRNA target sequence for TRIP11 (NM_004239.1,507-525).
gattctaggacaaaggaaa

SEQ ID NO: 112734 - DNA, 19 bp, Homo sapiens
  siRNA target sequence for TRIP11 (NM_004239.1,566-584).
gcttaagaaactttgtact

SEQ ID NO: 112735 - DNA, 19 bp, Homo sapiens
  siRNA target sequence for TRIP11 (NM_004239.1,572-590).
gaaactttgtactgatcta

SEQ ID NO: 112736 - DNA, 19 bp, Homo sapiens
  siRNA target sequence for TRIP11 (NM_004239.1,634-652).
ctacaagttaccgaaatca

SEQ ID NO: 112737 - DNA, 19 bp, Homo sapiens
  siRNA target sequence for TRIP11 (NM_004239.1,637-655).
caagttaccgaaatcaact

SEQ ID NO: 112738 - DNA, 19 bp, Homo sapiens
  siRNA target sequence for TRIP11 (NM_004239.1,794-812).
cgcttatgggattagtcat

SEQ ID NO: 112739 - DNA, 19 bp, Homo sapiens
  siRNA target sequence for TRIP11 (NM_004239.1,823-841).
ctttccatgacgatgacat

SEQ ID NO: 112740 - DNA, 19 bp, Homo sapiens
  siRNA target sequence for TRIP11 (NM_004239.1,839-857).
catggactttggtgatata

SEQ ID NO: 112741 - DNA, 19 bp, Homo sapiens
  siRNA target sequence for TRIP11 (NM_004239.1,842-860).
ggactttggtgatataatt

SEQ ID NO: 112742 - DNA, 19 bp, Homo sapiens
  siRNA target sequence for TRIP11 (NM_004239.1,881-899).
ccgactctcaaatgaagtt

SEQ ID NO: 112743 - DNA, 19 bp, Homo sapiens
  siRNA target sequence for TRIP11 (NM_004239.1,1028-1046).
ccgaagtcaggaaattgat

SEQ ID NO: 112744 - DNA, 19 bp, Homo sapiens
  siRNA target sequence for TRIP11 (NM_004239.1,1110-1128).
cgacgacatcgagaagaat

SEQ ID NO: 112745 - DNA, 19 bp, Homo sapiens
  siRNA target sequence for TRIP11 (NM_004239.1,1111-1129).
gacgacatcgagaagaatt

SEQ ID NO: 112746 - DNA, 19 bp, Homo sapiens
  siRNA target sequence for TRIP11 (NM_004239.1,1113-1131).
cgacatcgagaagaattaa

SEQ ID NO: 112747 - DNA, 19 bp, Homo sapiens
  siRNA target sequence for TRIP11 (NM_004239.1,1180-1198).
gtggctctggagttataga

SEQ ID NO: 112748 - DNA, 19 bp, Homo sapiens
  siRNA target sequence for TRIP11 (NM_004239.1,1217-1235).
ctatgagatgcaaaaaact

SEQ ID NO: 112749 - DNA, 19 bp, Homo sapiens
  siRNA target sequence for TRIP11 (NM_004239.1,1226-1244).
gcaaaaaactattcaagtt

SEQ ID NO: 112750 - DNA, 19 bp, Homo sapiens
  siRNA target sequence for TRIP11 (NM_004239.1,1415-1433).
gaaattggaatgtagtaaa

SEQ ID NO: 112751 - DNA, 19 bp, Homo sapiens
  siRNA target sequence for TRIP11 (NM_004239.1,1449-1467).
gtgaagcaaagtgatacta

SEQ ID NO: 112752 - DNA, 19 bp, Homo sapiens
  siRNA target sequence for TRIP11 (NM_004239.1,1454-1472).
gcaaagtgatactatgaca

SEQ ID NO: 112753 - DNA, 19 bp, Homo sapiens
  siRNA target sequence for TRIP11 (NM_004239.1,1538-1556).
gtctgatgccgaaaatgaa

SEQ ID NO: 112754 - DNA, 19 bp, Homo sapiens
  siRNA target sequence for TRIP11 (NM_004239.1,1554-1572).
gaaataatgagattgagta

SEQ ID NO: 112755 - DNA, 19 bp, Homo sapiens
  siRNA target sequence for TRIP11 (NM_004239.1,1570-1588).
gtagtttaaaccaggataa

SEQ ID NO: 112756 - DNA, 19 bp, Homo sapiens
  siRNA target sequence for TRIP11 (NM_004239.1,1622-1640).
gcgtatcgaagttttagaa

SEQ ID NO: 112757 - DNA, 19 bp, Homo sapiens
  siRNA target sequence for TRIP11 (NM_004239.1,1623-1641).
cgtatcgaagttttagaaa

SEQ ID NO: 112758 - DNA, 19 bp, Homo sapiens
  siRNA target sequence for TRIP11 (NM_004239.1,1624-1642).
gtatcgaagttttagaaaa

SEQ ID NO: 112759 - DNA, 19 bp, Homo sapiens
  siRNA target sequence for TRIP11 (NM_004239.1,1649-1667).
gtcattactgagtcaagaa

SEQ ID NO: 112760 - DNA, 19 bp, Homo sapiens
  siRNA target sequence for TRIP11 (NM_004239.1,1731-1749).
gctacaagagacataagtt

SEQ ID NO: 112761 - DNA, 19 bp, Homo sapiens
  siRNA target sequence for TRIP11 (NM_004239.1,1926-1944).
gaaggagatagcatcatca

SEQ ID NO: 112762 - DNA, 19 bp, Homo sapiens
  siRNA target sequence for TRIP11 (NM_004239.1,1929-1947).
ggagatagcatcatcagta

SEQ ID NO: 112763 - DNA, 19 bp, Homo sapiens
  siRNA target sequence for TRIP11 (NM_004239.1,1936-1954).
gcatcatcagtaaactgaa

SEQ ID NO: 112764 - DNA, 19 bp, Homo sapiens
  siRNA target sequence for TRIP11 (NM_004239.1,1952-1970).
gaaacaagatctaaatgat

SEQ ID NO: 112765 - DNA, 19 bp, Homo sapiens
  siRNA target sequence for TRIP11 (NM_004239.1,1981-1999).
gagttcatcaacttgaaga

SEQ ID NO: 112766 - DNA, 19 bp, Homo sapiens
  siRNA target sequence for TRIP11 (NM_004239.1,2064-2082).
gccctaaatgatttacatt

SEQ ID NO: 112767 - DNA, 19 bp, Homo sapiens
  siRNA target sequence for TRIP11 (NM_004239.1,2121-2139).
gtagatcagctaaataaat

SEQ ID NO: 112768 - DNA, 19 bp, Homo sapiens
  siRNA target sequence for TRIP11 (NM_004239.1,2186-2204).
ggagcatattagacaaaat

SEQ ID NO: 112769 - DNA, 19 bp, Homo sapiens
  siRNA target sequence for TRIP11 (NM_004239.1,2213-2231).
gctttctagaataaggaat

SEQ ID NO: 112770 - DNA, 19 bp, Homo sapiens
  siRNA target sequence for TRIP11 (NM_004239.1,2232-2250).
gagttaatgcagtctctaa

SEQ ID NO: 112771 - DNA, 19 bp, Homo sapiens
  siRNA target sequence for TRIP11 (NM_004239.1,2234-2252).
gttaatgcagtctctaaat

SEQ ID NO: 112772 - DNA, 19 bp, Homo sapiens
  siRNA target sequence for TRIP11 (NM_004239.1,2245-2263).
ctctaaatcaagactctaa

SEQ ID NO: 112773 - DNA, 19 bp, Homo sapiens
  siRNA target sequence for TRIP11 (NM_004239.1,2256-2274).
gactctaatagtaatttta

SEQ ID NO: 112774 - DNA, 19 bp, Homo sapiens
  siRNA target sequence for TRIP11 (NM_004239.1,2394-2412).
gaaaagttagttttagcat

SEQ ID NO: 112775 - DNA, 19 bp, Homo sapiens
  siRNA target sequence for TRIP11 (NM_004239.1,2443-2461).
gtcttgctggtaacaatca

SEQ ID NO: 112776 - DNA, 19 bp, Homo sapiens
  siRNA target sequence for TRIP11 (NM_004239.1,2516-2534).
gatagaggcagaattgtgt

SEQ ID NO: 112777 - DNA, 19 bp, Homo sapiens
  siRNA target sequence for TRIP11 (NM_004239.1,2592-2610).
ctgtcaaatgcacgtaatt

SEQ ID NO: 112778 - DNA, 19 bp, Homo sapiens
  siRNA target sequence for TRIP11 (NM_004239.1,2596-2614).
caaatgcacgtaatttgaa

SEQ ID NO: 112779 - DNA, 19 bp, Homo sapiens
  siRNA target sequence for TRIP11 (NM_004239.1,2601-2619).
gcacgtaatttgaatacct

SEQ ID NO: 112780 - DNA, 19 bp, Homo sapiens
  siRNA target sequence for TRIP11 (NM_004239.1,2623-2641).
ccttacagctggaacatga

SEQ ID NO: 112781 - DNA, 19 bp, Homo sapiens
  siRNA target sequence for TRIP11 (NM_004239.1,2630-2648).
gctggaacatgagcattta

SEQ ID NO: 112782 - DNA, 19 bp, Homo sapiens
  siRNA target sequence for TRIP11 (NM_004239.1,2640-2658).
gagcatttaattaaactca

SEQ ID NO: 112783 - DNA, 19 bp, Homo sapiens
  siRNA target sequence for TRIP11 (NM_004239.1,2738-2756).
cgttttgtcatctagttta

SEQ ID NO: 112784 - DNA, 19 bp, Homo sapiens
  siRNA target sequence for TRIP11 (NM_004239.1,3006-3024).
gaccctaaaacccttgata

SEQ ID NO: 112785 - DNA, 19 bp, Homo sapiens
  siRNA target sequence for TRIP11 (NM_004239.1,3008-3026).
ccctaaaacccttgatagt

SEQ ID NO: 112786 - DNA, 19 bp, Homo sapiens
  siRNA target sequence for TRIP11 (NM_004239.1,3010-3028).
ctaaaacccttgatagtgt

SEQ ID NO: 112787 - DNA, 19 bp, Homo sapiens
  siRNA target sequence for TRIP11 (NM_004239.1,3062-3080).
cacgatcaaggaacatctt

SEQ ID NO: 112788 - DNA, 19 bp, Homo sapiens
  siRNA target sequence for TRIP11 (NM_004239.1,3064-3082).
cgatcaaggaacatcttga

SEQ ID NO: 112789 - DNA, 19 bp, Homo sapiens
  siRNA target sequence for TRIP11 (NM_004239.1,3117-3135).
gatcaaaaccagagtaaga

SEQ ID NO: 112790 - DNA, 19 bp, Homo sapiens
  siRNA target sequence for TRIP11 (NM_004239.1,3300-3318).
gaaagacaggacattcaaa

SEQ ID NO: 112791 - DNA, 19 bp, Homo sapiens
  siRNA target sequence for TRIP11 (NM_004239.1,3359-3377).
ccttaatatagaaaatgga

SEQ ID NO: 112792 - DNA, 19 bp, Homo sapiens
  siRNA target sequence for TRIP11 (NM_004239.1,3376-3394).
gaagtgaaaagcatgattt

SEQ ID NO: 112793 - DNA, 19 bp, Homo sapiens
  siRNA target sequence for TRIP11 (NM_004239.1,3520-3538).
gtaaactaactcagattat

SEQ ID NO: 112794 - DNA, 19 bp, Homo sapiens
  siRNA target sequence for TRIP11 (NM_004239.1,3545-3563).
gaaagatttggagatacaa

SEQ ID NO: 112795 - DNA, 19 bp, Homo sapiens
  siRNA target sequence for TRIP11 (NM_004239.1,3570-3588).
catgctagaatttcttcaa

SEQ ID NO: 112796 - DNA, 19 bp, Homo sapiens
  siRNA target sequence for TRIP11 (NM_004239.1,3624-3642).
caactgcaggcttatgcta

SEQ ID NO: 112797 - DNA, 19 bp, Homo sapiens
  siRNA target sequence for TRIP11 (NM_004239.1,3629-3647).
gcaggcttatgctatggaa

SEQ ID NO: 112798 - DNA, 19 bp, Homo sapiens
  siRNA target sequence for TRIP11 (NM_004239.1,3630-3648).
caggcttatgctatggaaa

SEQ ID NO: 112799 - DNA, 19 bp, Homo sapiens
  siRNA target sequence for TRIP11 (NM_004239.1,3685-3703).
gggaaaatagccatctaaa

SEQ ID NO: 112800 - DNA, 19 bp, Homo sapiens
  siRNA target sequence for TRIP11 (NM_004239.1,3694-3712).
gccatctaaaaacagaata

SEQ ID NO: 112801 - DNA, 19 bp, Homo sapiens
  siRNA target sequence for TRIP11 (NM_004239.1,3695-3713).
ccatctaaaaacagaatat

SEQ ID NO: 112802 - DNA, 19 bp, Homo sapiens
  siRNA target sequence for TRIP11 (NM_004239.1,3844-3862).
cacgtatcattcgagaaaa

SEQ ID NO: 112803 - DNA, 19 bp, Homo sapiens
  siRNA target sequence for TRIP11 (NM_004239.1,3899-3917).
gactttattggcagtttta

SEQ ID NO: 112804 - DNA, 19 bp, Homo sapiens
  siRNA target sequence for TRIP11 (NM_004239.1,3981-3999).
caggaacgtgacaagttaa

SEQ ID NO: 112805 - DNA, 19 bp, Homo sapiens
  siRNA target sequence for TRIP11 (NM_004239.1,3983-4001).
ggaacgtgacaagttaaaa

SEQ ID NO: 112806 - DNA, 19 bp, Homo sapiens
  siRNA target sequence for TRIP11 (NM_004239.1,4038-4056).
gtgatgaccacagtacaaa

SEQ ID NO: 112807 - DNA, 19 bp, Homo sapiens
  siRNA target sequence for TRIP11 (NM_004239.1,4159-4177).
ctggcctgatccaaagtta

SEQ ID NO: 112808 - DNA, 19 bp, Homo sapiens
  siRNA target sequence for TRIP11 (NM_004239.1,4162-4180).
gcctgatccaaagttatga

SEQ ID NO: 112809 - DNA, 19 bp, Homo sapiens
  siRNA target sequence for TRIP11 (NM_004239.1,4211-4229).
gcaggaattagcacaagtt

SEQ ID NO: 112810 - DNA, 19 bp, Homo sapiens
  siRNA target sequence for TRIP11 (NM_004239.1,4238-4256).
cattgggcagctttgcaat

SEQ ID NO: 112811 - DNA, 19 bp, Homo sapiens
  siRNA target sequence for TRIP11 (NM_004239.1,4259-4277).
caaggatcttcttttagga

SEQ ID NO: 112812 - DNA, 19 bp, Homo sapiens
  siRNA target sequence for TRIP11 (NM_004239.1,4521-4539).
gaacaaaccgattcagaaa

SEQ ID NO: 112813 - DNA, 19 bp, Homo sapiens
  siRNA target sequence for TRIP11 (NM_004239.1,4609-4627).
ccaaaagtgatcaactact

SEQ ID NO: 112814 - DNA, 19 bp, Homo sapiens
  siRNA target sequence for TRIP11 (NM_004239.1,4705-4723).
gaatattaattctagagat

SEQ ID NO: 112815 - DNA, 19 bp, Homo sapiens
  siRNA target sequence for TRIP11 (NM_004239.1,4721-4739).
gatggacattggcaaacta

SEQ ID NO: 112816 - DNA, 19 bp, Homo sapiens
  siRNA target sequence for TRIP11 (NM_004239.1,4797-4815).
gcgttacaagagactaaca

SEQ ID NO: 112817 - DNA, 19 bp, Homo sapiens
  siRNA target sequence for TRIP11 (NM_004239.1,4798-4816).
cgttacaagagactaacat

SEQ ID NO: 112818 - DNA, 19 bp, Homo sapiens
  siRNA target sequence for TRIP11 (NM_004239.1,4825-4843).
ctatgatgctgcgagaaaa

SEQ ID NO: 112819 - DNA, 19 bp, Homo sapiens
  siRNA target sequence for TRIP11 (NM_004239.1,4836-4854).
cgagaaaaagagtttgagt

SEQ ID NO: 112820 - DNA, 19 bp, Homo sapiens
  siRNA target sequence for TRIP11 (NM_004239.1,4881-4899).
gcttttgaacagctattga

SEQ ID NO: 112821 - DNA, 19 bp, Homo sapiens
  siRNA target sequence for TRIP11 (NM_004239.1,4882-4900).
cttttgaacagctattgaa

SEQ ID NO: 112822 - DNA, 19 bp, Homo sapiens
  siRNA target sequence for TRIP11 (NM_004239.1,4914-4932).
ggcaagactggagagttaa

SEQ ID NO: 112823 - DNA, 19 bp, Homo sapiens
  siRNA target sequence for TRIP11 (NM_004239.1,4915-4933).
gcaagactggagagttaaa

SEQ ID NO: 112824 - DNA, 19 bp, Homo sapiens
  siRNA target sequence for TRIP11 (NM_004239.1,4924-4942).
gagagttaaatcagctttt

SEQ ID NO: 112825 - DNA, 19 bp, Homo sapiens
  siRNA target sequence for TRIP11 (NM_004239.1,4926-4944).
gagttaaatcagcttttaa

SEQ ID NO: 112826 - DNA, 19 bp, Homo sapiens
  siRNA target sequence for TRIP11 (NM_004239.1,5003-5021).
catgttggccctgaaacaa

SEQ ID NO: 112827 - DNA, 19 bp, Homo sapiens
  siRNA target sequence for TRIP11 (NM_004239.1,5102-5120).
gagattgcgtaatcatctt

SEQ ID NO: 112828 - DNA, 19 bp, Homo sapiens
  siRNA target sequence for TRIP11 (NM_004239.1,5104-5122).
gattgcgtaatcatctttt

SEQ ID NO: 112829 - DNA, 19 bp, Homo sapiens
  siRNA target sequence for TRIP11 (NM_004239.1,5108-5126).
gcgtaatcatcttttagaa

SEQ ID NO: 112830 - DNA, 19 bp, Homo sapiens
  siRNA target sequence for TRIP11 (NM_004239.1,5137-5155).
cttatacccgtgaagcttt

SEQ ID NO: 112831 - DNA, 19 bp, Homo sapiens
  siRNA target sequence for TRIP11 (NM_004239.1,5166-5184).
gatagagaggctaaactaa

SEQ ID NO: 112832 - DNA, 19 bp, Homo sapiens
  siRNA target sequence for TRIP11 (NM_004239.1,5170-5188).
gagaggctaaactaagaaa

SEQ ID NO: 112833 - DNA, 19 bp, Homo sapiens
  siRNA target sequence for TRIP11 (NM_004239.1,5174-5192).
ggctaaactaagaaagaaa

SEQ ID NO: 112834 - DNA, 19 bp, Homo sapiens
  siRNA target sequence for TRIP11 (NM_004239.1,5204-5222).
ggaggaaaagctagtttca

SEQ ID NO: 112835 - DNA, 19 bp, Homo sapiens
  siRNA target sequence for TRIP11 (NM_004239.1,5205-5223).
gaggaaaagctagtttcat

SEQ ID NO: 112836 - DNA, 19 bp, Homo sapiens
  siRNA target sequence for TRIP11 (NM_004239.1,5217-5235).
gtttcatcctctaatgcaa

SEQ ID NO: 112837 - DNA, 19 bp, Homo sapiens
  siRNA target sequence for TRIP11 (NM_004239.1,5225-5243).
ctctaatgcaatggaaaat

SEQ ID NO: 112838 - DNA, 19 bp, Homo sapiens
  siRNA target sequence for TRIP11 (NM_004239.1,5337-5355).
gtctctcaggaacaagtaa

SEQ ID NO: 112839 - DNA, 19 bp, Homo sapiens
  siRNA target sequence for TRIP11 (NM_004239.1,5390-5408).
ggtactagagcatttccaa

SEQ ID NO: 112840 - DNA, 19 bp, Homo sapiens
  siRNA target sequence for TRIP11 (NM_004239.1,5412-5430).
gaggaaaaagctatgtatt

SEQ ID NO: 112841 - DNA, 19 bp, Homo sapiens
  siRNA target sequence for TRIP11 (NM_004239.1,5431-5449).
ctgctgaactcgaaaagca

SEQ ID NO: 112842 - DNA, 19 bp, Homo sapiens
  siRNA target sequence for TRIP11 (NM_004239.1,5447-5465).
gcaaaaacagcttatagct

SEQ ID NO: 112843 - DNA, 19 bp, Homo sapiens
  siRNA target sequence for TRIP11 (NM_004239.1,5546-5564).
ggattcagcatcaagactt

SEQ ID NO: 112844 - DNA, 19 bp, Homo sapiens
  siRNA target sequence for TRIP11 (NM_004239.1,5547-5565).
gattcagcatcaagactta

SEQ ID NO: 112845 - DNA, 19 bp, Homo sapiens
  siRNA target sequence for TRIP11 (NM_004239.1,5566-5584).
cagaacagttagatgtaaa

SEQ ID NO: 112846 - DNA, 19 bp, Homo sapiens
  siRNA target sequence for TRIP11 (NM_004239.1,5893-5911).
cacctttgagaccaaatca

SEQ ID NO: 112847 - DNA, 19 bp, Homo sapiens
  siRNA target sequence for TRIP11 (NM_004239.1,5902-5920).
gaccaaatcagcaatctgt

SEQ ID NO: 112848 - DNA, 19 bp, Homo sapiens
  siRNA target sequence for TRIP11 (NM_004239.1,5917-5935).
ctgtggttaatagttcttt

SEQ ID NO: 112849 - DNA, 19 bp, Homo sapiens
  siRNA target sequence for TRIP11 (NM_004239.1,5921-5939).
ggttaatagttctttttca

SEQ ID NO: 112850 - DNA, 19 bp, Homo sapiens
  siRNA target sequence for TRIP11 (NM_004239.1,5986-6004).
caccaccaaagctttctgt

SEQ ID NO: 112851 - DNA, 19 bp, Homo sapiens
  siRNA target sequence for TRIP11 (NM_004239.1,6052-6070).
caaatgcaccagaaagttt

SEQ ID NO: 112852 - DNA, 19 bp, Homo sapiens
  siRNA target sequence for TRIP11 (NM_004239.1,6096-6114).
ggtagaagaacagatgtaa

SEQ ID NO: 112853 - DNA, 19 bp, Homo sapiens
  siRNA target sequence for TRIP11 (NM_004239.1,6136-6154).
cggcagctgtacctcttat

SEQ ID NO: 112854 - DNA, 19 bp, Homo sapiens
  siRNA target sequence for TRIP11 (NM_004239.1,6200-6218).
gaaacccatctcagatgtt

SEQ ID NO: 112855 - DNA, 19 bp, Homo sapiens
  siRNA target sequence for TRIP4 (NM_016213.2,95-113).
cagcagttgcggaagactt

SEQ ID NO: 112856 - DNA, 19 bp, Homo sapiens
  siRNA target sequence for TRIP4 (NM_016213.2,139-157).
cattcagtacgttttgtca

SEQ ID NO: 112857 - DNA, 19 bp, Homo sapiens
  siRNA target sequence for TRIP4 (NM_016213.2,175-193).
gatacgagaatatgttact

SEQ ID NO: 112858 - DNA, 19 bp, Homo sapiens
  siRNA target sequence for TRIP4 (NM_016213.2,225-243).
gtcaattcatagaagaact

SEQ ID NO: 112859 - DNA, 19 bp, Homo sapiens
  siRNA target sequence for TRIP4 (NM_016213.2,249-267).
ccaaatggcaaaagaatga

SEQ ID NO: 112860 - DNA, 19 bp, Homo sapiens
  siRNA target sequence for TRIP4 (NM_016213.2,292-310).
gcagcagtgcttcaaaaaa

SEQ ID NO: 112861 - DNA, 19 bp, Homo sapiens
  siRNA target sequence for TRIP4 (NM_016213.2,412-430).
gactgcagaggttaaaaca

SEQ ID NO: 112862 - DNA, 19 bp, Homo sapiens
  siRNA target sequence for TRIP4 (NM_016213.2,421-439).
ggttaaaacaccttttgat

SEQ ID NO: 112863 - DNA, 19 bp, Homo sapiens
  siRNA target sequence for TRIP4 (NM_016213.2,462-480).
gcaactccgtaaagaagaa

SEQ ID NO: 112864 - DNA, 19 bp, Homo sapiens
  siRNA target sequence for TRIP4 (NM_016213.2,629-647).
ggctcaggcccttgcttat

SEQ ID NO: 112865 - DNA, 19 bp, Homo sapiens
  siRNA target sequence for TRIP4 (NM_016213.2,655-673).
cactctggtgtgtactcat

SEQ ID NO: 112866 - DNA, 19 bp, Homo sapiens
  siRNA target sequence for TRIP4 (NM_016213.2,671-689).
catgaggaacaagatattt

SEQ ID NO: 112867 - DNA, 19 bp, Homo sapiens
  siRNA target sequence for TRIP4 (NM_016213.2,692-710).
cagcgtgactcaaacaaga

SEQ ID NO: 112868 - DNA, 19 bp, Homo sapiens
  siRNA target sequence for TRIP4 (NM_016213.2,816-834).
gtctggagaaggctatcaa

SEQ ID NO: 112869 - DNA, 19 bp, Homo sapiens
  siRNA target sequence for TRIP4 (NM_016213.2,827-845).
gctatcaagcataaagaca

SEQ ID NO: 112870 - DNA, 19 bp, Homo sapiens
  siRNA target sequence for TRIP4 (NM_016213.2,856-874).
gtttgacagaactagtatt

SEQ ID NO: 112871 - DNA, 19 bp, Homo sapiens
  siRNA target sequence for TRIP4 (NM_016213.2,880-898).
gacccaagtcattgatgat

SEQ ID NO: 112872 - DNA, 19 bp, Homo sapiens
  siRNA target sequence for TRIP4 (NM_016213.2,928-946).
ccaatggttgtccaaactt

SEQ ID NO: 112873 - DNA, 19 bp, Homo sapiens
  siRNA target sequence for TRIP4 (NM_016213.2,995-1013).
cacgcctctcgactttcta

SEQ ID NO: 112874 - DNA, 19 bp, Homo sapiens
  siRNA target sequence for TRIP4 (NM_016213.2,998-1016).
gcctctcgactttctaaga

SEQ ID NO: 112875 - DNA, 19 bp, Homo sapiens
  siRNA target sequence for TRIP4 (NM_016213.2,999-1017).
cctctcgactttctaagaa

SEQ ID NO: 112876 - DNA, 19 bp, Homo sapiens
  siRNA target sequence for TRIP4 (NM_016213.2,1075-1093).
gtatcatagcagactagat

SEQ ID NO: 112877 - DNA, 19 bp, Homo sapiens
  siRNA target sequence for TRIP4 (NM_016213.2,1132-1150).
gccactgaccaaattggat

SEQ ID NO: 112878 - DNA, 19 bp, Homo sapiens
  siRNA target sequence for TRIP4 (NM_016213.2,1133-1151).
ccactgaccaaattggata

SEQ ID NO: 112879 - DNA, 19 bp, Homo sapiens
  siRNA target sequence for TRIP4 (NM_016213.2,1167-1185).
ctttgggagttctggtaaa

SEQ ID NO: 112880 - DNA, 19 bp, Homo sapiens
  siRNA target sequence for TRIP4 (NM_016213.2,1178-1196).
ctggtaaatcccaacatgt

SEQ ID NO: 112881 - DNA, 19 bp, Homo sapiens
  siRNA target sequence for TRIP4 (NM_016213.2,1246-1264).
gaaggctttccgttcttca

SEQ ID NO: 112882 - DNA, 19 bp, Homo sapiens
  siRNA target sequence for TRIP4 (NM_016213.2,1255-1273).
ccgttcttcaggatttgga

SEQ ID NO: 112883 - DNA, 19 bp, Homo sapiens
  siRNA target sequence for TRIP4 (NM_016213.2,1263-1281).
caggatttggactagagtt

SEQ ID NO: 112884 - DNA, 19 bp, Homo sapiens
  siRNA target sequence for TRIP4 (NM_016213.2,1303-1321).
gcgaatccaggatcaagaa

SEQ ID NO: 112885 - DNA, 19 bp, Homo sapiens
  siRNA target sequence for TRIP4 (NM_016213.2,1304-1322).
cgaatccaggatcaagaat

SEQ ID NO: 112886 - DNA, 19 bp, Homo sapiens
  siRNA target sequence for TRIP4 (NM_016213.2,1305-1323).
gaatccaggatcaagaatt

SEQ ID NO: 112887 - DNA, 19 bp, Homo sapiens
  siRNA target sequence for TRIP4 (NM_016213.2,1432-1450).
cagaggacgactttggata

SEQ ID NO: 112888 - DNA, 19 bp, Homo sapiens
  siRNA target sequence for TRIP4 (NM_016213.2,1447-1465).
gatagcagccacagctaaa

SEQ ID NO: 112889 - DNA, 19 bp, Homo sapiens
  siRNA target sequence for TRIP4 (NM_016213.2,1498-1516).
ggctacatatcgtcttctt

SEQ ID NO: 112890 - DNA, 19 bp, Homo sapiens
  siRNA target sequence for TRIP4 (NM_016213.2,1531-1549).
ggaatttcctaatgactat

SEQ ID NO: 112891 - DNA, 19 bp, Homo sapiens
  siRNA target sequence for TRIP4 (NM_016213.2,1569-1587).
gctgtgtggacctaattga

SEQ ID NO: 112892 - DNA, 19 bp, Homo sapiens
  siRNA target sequence for TRIP4 (NM_016213.2,1760-1778).
gggttaatgaagcagaata

SEQ ID NO: 112893 - DNA, 19 bp, Homo sapiens
  siRNA target sequence for UTF1 (NM_003577.1,363-381).
ccgctacaagttccttaaa

SEQ ID NO: 112894 - DNA, 19 bp, Homo sapiens
  siRNA target sequence for UTF1 (NM_003577.1,365-383).
gctacaagttccttaaaga

SEQ ID NO: 112895 - DNA, 19 bp, Homo sapiens
  siRNA target sequence for VGLL1 (NM_016267.2,283-301).
gcagcgtagtggatgaaca

SEQ ID NO: 112896 - DNA, 19 bp, Homo sapiens
  siRNA target sequence for VGLL1 (NM_016267.2,312-330).
gctctgagcaatatcaaga

SEQ ID NO: 112897 - DNA, 19 bp, Homo sapiens
  siRNA target sequence for VGLL1 (NM_016267.2,367-385).
gtgtgatgctgaaaaacga

SEQ ID NO: 112898 - DNA, 19 bp, Homo sapiens
  siRNA target sequence for VGLL1 (NM_016267.2,442-460).
cagaagtacctgtcacaaa

SEQ ID NO: 112899 - DNA, 19 bp, Homo sapiens
  siRNA target sequence for VGLL1 (NM_016267.2,493-511).
gtcccatggctgtgaatca

SEQ ID NO: 112900 - DNA, 19 bp, Homo sapiens
  siRNA target sequence for VGLL1 (NM_016267.2,496-514).
ccatggctgtgaatcagtt

SEQ ID NO: 112901 - DNA, 19 bp, Homo sapiens
  siRNA target sequence for VGLL1 (NM_016267.2,552-570).
ggggagctgtggcatttct

SEQ ID NO: 112902 - DNA, 19 bp, Homo sapiens
  siRNA target sequence for VGLL1 (NM_016267.2,664-682).
gtgagcctctcctaagtct

SEQ ID NO: 112903 - DNA, 19 bp, Homo sapiens
  siRNA target sequence for VGLL1 (NM_016267.2,787-805).
ctcccggctcagttcacta

SEQ ID NO: 112904 - DNA, 19 bp, Homo sapiens
  siRNA target sequence for VGLL1 (NM_016267.2,789-807).
cccggctcagttcactata

SEQ ID NO: 112905 - DNA, 19 bp, Homo sapiens
  siRNA target sequence for VGLL1 (NM_016267.2,790-808).
ccggctcagttcactataa

SEQ ID NO: 112906 - DNA, 19 bp, Homo sapiens
  siRNA target sequence for VGLL1 (NM_016267.2,792-810).
ggctcagttcactataaga

SEQ ID NO: 112907 - DNA, 19 bp, Homo sapiens
  siRNA target sequence for VGLL1 (NM_016267.2,793-811).
gctcagttcactataagaa

SEQ ID NO: 112908 - DNA, 19 bp, Homo sapiens
  siRNA target sequence for VGLL1 (NM_016267.2,794-812).
ctcagttcactataagaaa

SEQ ID NO: 112909 - DNA, 19 bp, Homo sapiens
  siRNA target sequence for VGLL1 (NM_016267.2,796-814).
cagttcactataagaaact

SEQ ID NO: 112910 - DNA, 19 bp, Homo sapiens
  siRNA target sequence for VGLL1 (NM_016267.2,798-816).
gttcactataagaaactat

SEQ ID NO: 112911 - DNA, 19 bp, Homo sapiens
  siRNA target sequence for VGLL1 (NM_016267.2,836-854).
cagtaccagccttccaaat

SEQ ID NO: 112912 - DNA, 19 bp, Homo sapiens
  siRNA target sequence for VGLL1 (NM_016267.2,838-856).
gtaccagccttccaaatga

SEQ ID NO: 112913 - DNA, 19 bp, Homo sapiens
  siRNA target sequence for VGLL1 (NM_016267.2,913-931).
ggggccacccacatcgata

SEQ ID NO: 112914 - DNA, 19 bp, Homo sapiens
  siRNA target sequence for CALR (NM_004343.2,199-217).
cagattttggcaaattcgt

SEQ ID NO: 112915 - DNA, 19 bp, Homo sapiens
  siRNA target sequence for CALR (NM_004343.2,239-257).
cggtgacgaggagaaagat

SEQ ID NO: 112916 - DNA, 19 bp, Homo sapiens
  siRNA target sequence for CALR (NM_004343.2,275-293).
ccaggatgcacgcttttat

SEQ ID NO: 112917 - DNA, 19 bp, Homo sapiens
  siRNA target sequence for CALR (NM_004343.2,278-296).
ggatgcacgcttttatgct

SEQ ID NO: 112918 - DNA, 19 bp, Homo sapiens
  siRNA target sequence for CALR (NM_004343.2,311-329).
cgagcctttcagcaacaaa

SEQ ID NO: 112919 - DNA, 19 bp, Homo sapiens
  siRNA target sequence for CALR (NM_004343.2,347-365).
gcagttcacggtgaaacat

SEQ ID NO: 112920 - DNA, 19 bp, Homo sapiens
  siRNA target sequence for CALR (NM_004343.2,435-453).
cacggagactcagaataca

SEQ ID NO: 112921 - DNA, 19 bp, Homo sapiens
  siRNA target sequence for CALR (NM_004343.2,501-519).
catgtcatcttcaactaca

SEQ ID NO: 112922 - DNA, 19 bp, Homo sapiens
  siRNA target sequence for CALR (NM_004343.2,610-628).
cctatgaggtgaagattga

SEQ ID NO: 112923 - DNA, 19 bp, Homo sapiens
  siRNA target sequence for CALR (NM_004343.2,775-793).
gggacaagcccgagcatat

SEQ ID NO: 112924 - DNA, 19 bp, Homo sapiens
  siRNA target sequence for CALR (NM_004343.2,931-949).
cttggatccacccagaaat

SEQ ID NO: 112925 - DNA, 19 bp, Homo sapiens
  siRNA target sequence for CALR (NM_004343.2,967-985).
ctcccgatcccagtatcta

SEQ ID NO: 112926 - DNA, 19 bp, Homo sapiens
  siRNA target sequence for CALR (NM_004343.2,977-995).
cagtatctatgcctatgat

SEQ ID NO: 112927 - DNA, 19 bp, Homo sapiens
  siRNA target sequence for CALR (NM_004343.2,979-997).
gtatctatgcctatgataa

SEQ ID NO: 112928 - DNA, 19 bp, Homo sapiens
  siRNA target sequence for CALR (NM_004343.2,1101-1119).
gagacgtggggcgtaacaa

SEQ ID NO: 112929 - DNA, 19 bp, Homo sapiens
  siRNA target sequence for CREG (NM_003851.1,329-347).
gcagcggcgtgccctattt

SEQ ID NO: 112930 - DNA, 19 bp, Homo sapiens
  siRNA target sequence for CREG (NM_003851.1,332-350).
gcggcgtgccctatttcta

SEQ ID NO: 112931 - DNA, 19 bp, Homo sapiens
  siRNA target sequence for CREG (NM_003851.1,381-399).
cctgcaggagaatccatat

SEQ ID NO: 112932 - DNA, 19 bp, Homo sapiens
  siRNA target sequence for CREG (NM_003851.1,458-476).
cacaaagtcccctttgtgt

SEQ ID NO: 112933 - DNA, 19 bp, Homo sapiens
  siRNA target sequence for CREG (NM_003851.1,532-550).
gcaaagcattcgttattca

SEQ ID NO: 112934 - DNA, 19 bp, Homo sapiens
  siRNA target sequence for CREG (NM_003851.1,533-551).
caaagcattcgttattcat

SEQ ID NO: 112935 - DNA, 19 bp, Homo sapiens
  siRNA target sequence for CREG (NM_003851.1,556-574).
caccctgagatgaaaacct

SEQ ID NO: 112936 - DNA, 19 bp, Homo sapiens
  siRNA target sequence for CREG (NM_003851.1,578-596).
cttccagccataattggtt

SEQ ID NO: 112937 - DNA, 19 bp, Homo sapiens
  siRNA target sequence for CREG (NM_003851.1,601-619).
gctaagttgaatataacca

SEQ ID NO: 112938 - DNA, 19 bp, Homo sapiens
  siRNA target sequence for CREG (NM_003851.1,660-678).
gacaccagaagaatattat

SEQ ID NO: 112939 - DNA, 19 bp, Homo sapiens
  siRNA target sequence for CREG (NM_003851.1,662-680).
caccagaagaatattataa

SEQ ID NO: 112940 - DNA, 19 bp, Homo sapiens
  siRNA target sequence for HD (NM_002111.4,402-420).
cgctgcaccgaccaaagaa

SEQ ID NO: 112941 - DNA, 19 bp, Homo sapiens
  siRNA target sequence for HD (NM_002111.4,403-421).
gctgcaccgaccaaagaaa

SEQ ID NO: 112942 - DNA, 19 bp, Homo sapiens
  siRNA target sequence for HD (NM_002111.4,439-457).
gaaagaccgtgtgaatcat

SEQ ID NO: 112943 - DNA, 19 bp, Homo sapiens
  siRNA target sequence for HD (NM_002111.4,461-479).
ctgacaatatgtgaaaaca

SEQ ID NO: 112944 - DNA, 19 bp, Homo sapiens
  siRNA target sequence for HD (NM_002111.4,485-503).
gcacagtctgtcagaaatt

SEQ ID NO: 112945 - DNA, 19 bp, Homo sapiens
  siRNA target sequence for HD (NM_002111.4,527-545).
ggcatcgctatggaacttt

SEQ ID NO: 112946 - DNA, 19 bp, Homo sapiens
  siRNA target sequence for HD (NM_002111.4,528-546).
gcatcgctatggaactttt

SEQ ID NO: 112947 - DNA, 19 bp, Homo sapiens
  siRNA target sequence for HD (NM_002111.4,529-547).
catcgctatggaacttttt

SEQ ID NO: 112948 - DNA, 19 bp, Homo sapiens
  siRNA target sequence for HD (NM_002111.4,591-609).
ctgacgaatgcctcaacaa

SEQ ID NO: 112949 - DNA, 19 bp, Homo sapiens
  siRNA target sequence for HD (NM_002111.4,595-613).
cgaatgcctcaacaaagtt

SEQ ID NO: 112950 - DNA, 19 bp, Homo sapiens
  siRNA target sequence for HD (NM_002111.4,596-614).
gaatgcctcaacaaagtta

SEQ ID NO: 112951 - DNA, 19 bp, Homo sapiens
  siRNA target sequence for HD (NM_002111.4,621-639).
ctttgatggattctaatct

SEQ ID NO: 112952 - DNA, 19 bp, Homo sapiens
  siRNA target sequence for HD (NM_002111.4,655-673).
cgagctctataaggaaatt

SEQ ID NO: 112953 - DNA, 19 bp, Homo sapiens
  siRNA target sequence for HD (NM_002111.4,656-674).
gagctctataaggaaatta

SEQ ID NO: 112954 - DNA, 19 bp, Homo sapiens
  siRNA target sequence for HD (NM_002111.4,737-755).
ctggttcggcctcagaaat

SEQ ID NO: 112955 - DNA, 19 bp, Homo sapiens
  siRNA target sequence for HD (NM_002111.4,740-758).
gttcggcctcagaaatgca

SEQ ID NO: 112956 - DNA, 19 bp, Homo sapiens
  siRNA target sequence for HD (NM_002111.4,839-857).
gcagctgttcccaaaatta

SEQ ID NO: 112957 - DNA, 19 bp, Homo sapiens
  siRNA target sequence for HD (NM_002111.4,1000-1018).
gacacaatatttctatagt

SEQ ID NO: 112958 - DNA, 19 bp, Homo sapiens
  siRNA target sequence for HD (NM_002111.4,1165-1183).
cggagtgacaaggaaagaa

SEQ ID NO: 112959 - DNA, 19 bp, Homo sapiens
  siRNA target sequence for HD (NM_002111.4,1207-1225).
gcagcttgtccaggtttat

SEQ ID NO: 112960 - DNA, 19 bp, Homo sapiens
  siRNA target sequence for HD (NM_002111.4,1249-1267).
gcaccaagaccacaatgtt

SEQ ID NO: 112961 - DNA, 19 bp, Homo sapiens
  siRNA target sequence for HD (NM_002111.4,1395-1413).
gccgtagtgggagtattgt

SEQ ID NO: 112962 - DNA, 19 bp, Homo sapiens
  siRNA target sequence for HD (NM_002111.4,1403-1421).
gggagtattgtggaactta

SEQ ID NO: 112963 - DNA, 19 bp, Homo sapiens
  siRNA target sequence for HD (NM_002111.4,1404-1422).
ggagtattgtggaacttat

SEQ ID NO: 112964 - DNA, 19 bp, Homo sapiens
  siRNA target sequence for HD (NM_002111.4,1614-1632).
ggtcagcaggtcatgacat

SEQ ID NO: 112965 - DNA, 19 bp, Homo sapiens
  siRNA target sequence for HD (NM_002111.4,1846-1864).
caccgaagggcctgattca

SEQ ID NO: 112966 - DNA, 19 bp, Homo sapiens
  siRNA target sequence for HD (NM_002111.4,1875-1893).
cttcagacagttctgaaat

SEQ ID NO: 112967 - DNA, 19 bp, Homo sapiens
  siRNA target sequence for HD (NM_002111.4,1884-1902).
gttctgaaattgtgttaga

SEQ ID NO: 112968 - DNA, 19 bp, Homo sapiens
  siRNA target sequence for HD (NM_002111.4,1904-1922).
ggtaccgacaaccagtatt

SEQ ID NO: 112969 - DNA, 19 bp, Homo sapiens
  siRNA target sequence for HD (NM_002111.4,1905-1923).
gtaccgacaaccagtattt

SEQ ID NO: 112970 - DNA, 19 bp, Homo sapiens
  siRNA target sequence for HD (NM_002111.4,2010-2028).
cttccatggcccttcaaca

SEQ ID NO: 112971 - DNA, 19 bp, Homo sapiens
  siRNA target sequence for HD (NM_002111.4,2143-2161).
ccgcatcaaaggtgacatt

SEQ ID NO: 112972 - DNA, 19 bp, Homo sapiens
  siRNA target sequence for HD (NM_002111.4,2197-2215).
ccattgtgtccgcctttta

SEQ ID NO: 112973 - DNA, 19 bp, Homo sapiens
  siRNA target sequence for HD (NM_002111.4,2321-2339).
gccctccacccggaatctt

SEQ ID NO: 112974 - DNA, 19 bp, Homo sapiens
  siRNA target sequence for HD (NM_002111.4,2324-2342).
ctccacccggaatctttct

SEQ ID NO: 112975 - DNA, 19 bp, Homo sapiens
  siRNA target sequence for HD (NM_002111.4,2327-2345).
cacccggaatctttcttca

SEQ ID NO: 112976 - DNA, 19 bp, Homo sapiens
  siRNA target sequence for HD (NM_002111.4,2341-2359).
cttcagcaaactctataaa

SEQ ID NO: 112977 - DNA, 19 bp, Homo sapiens
  siRNA target sequence for HD (NM_002111.4,2516-2534).
gattggatgggcaccatta

SEQ ID NO: 112978 - DNA, 19 bp, Homo sapiens
  siRNA target sequence for HD (NM_002111.4,2763-2781).
cccttgcagagattgactt

SEQ ID NO: 112979 - DNA, 19 bp, Homo sapiens
  siRNA target sequence for HD (NM_002111.4,2861-2879).
caagaacgagtgctcaata

SEQ ID NO: 112980 - DNA, 19 bp, Homo sapiens
  siRNA target sequence for HD (NM_002111.4,2927-2945).
gttgccgcagcatcactaa

SEQ ID NO: 112981 - DNA, 19 bp, Homo sapiens
  siRNA target sequence for HD (NM_002111.4,2954-2972).
gtcccaaagctgttttata

SEQ ID NO: 112982 - DNA, 19 bp, Homo sapiens
  siRNA target sequence for HD (NM_002111.4,3004-3022).
ggccgtggcaagagatcaa

SEQ ID NO: 112983 - DNA, 19 bp, Homo sapiens
  siRNA target sequence for HD (NM_002111.4,3005-3023).
gccgtggcaagagatcaaa

SEQ ID NO: 112984 - DNA, 19 bp, Homo sapiens
  siRNA target sequence for HD (NM_002111.4,3024-3042).
gcagtgtttacctgaaact

SEQ ID NO: 112985 - DNA, 19 bp, Homo sapiens
  siRNA target sequence for HD (NM_002111.4,3027-3045).
gtgtttacctgaaacttct

SEQ ID NO: 112986 - DNA, 19 bp, Homo sapiens
  siRNA target sequence for HD (NM_002111.4,3055-3073).
gacgcagcctccatctcat

SEQ ID NO: 112987 - DNA, 19 bp, Homo sapiens
  siRNA target sequence for HD (NM_002111.4,3057-3075).
cgcagcctccatctcattt

SEQ ID NO: 112988 - DNA, 19 bp, Homo sapiens
  siRNA target sequence for HD (NM_002111.4,3084-3102).
gcacaataaccagaatata

SEQ ID NO: 112989 - DNA, 19 bp, Homo sapiens
  siRNA target sequence for HD (NM_002111.4,3126-3144).
gcataacagacgtcactat

SEQ ID NO: 112990 - DNA, 19 bp, Homo sapiens
  siRNA target sequence for HD (NM_002111.4,3134-3152).
gacgtcactatggaaaata

SEQ ID NO: 112991 - DNA, 19 bp, Homo sapiens
  siRNA target sequence for HD (NM_002111.4,3154-3172).
cctttcaagagttattgca

SEQ ID NO: 112992 - DNA, 19 bp, Homo sapiens
  siRNA target sequence for HD (NM_002111.4,3173-3191).
gcagtttctcatgaactaa

SEQ ID NO: 112993 - DNA, 19 bp, Homo sapiens
  siRNA target sequence for HD (NM_002111.4,3174-3192).
cagtttctcatgaactaat

SEQ ID NO: 112994 - DNA, 19 bp, Homo sapiens
  siRNA target sequence for HD (NM_002111.4,3202-3220).
caccagagcactcacattt

SEQ ID NO: 112995 - DNA, 19 bp, Homo sapiens
  siRNA target sequence for HD (NM_002111.4,3205-3223).
cagagcactcacatttgga

SEQ ID NO: 112996 - DNA, 19 bp, Homo sapiens
  siRNA target sequence for HD (NM_002111.4,3252-3270).
ctgccttcccagtttgcat

SEQ ID NO: 112997 - DNA, 19 bp, Homo sapiens
  siRNA target sequence for HD (NM_002111.4,3407-3425).
catcaagatgctttgattt

SEQ ID NO: 112998 - DNA, 19 bp, Homo sapiens
  siRNA target sequence for HD (NM_002111.4,3629-3647).
gctcctggacccgcaataa

SEQ ID NO: 112999 - DNA, 19 bp, Homo sapiens
  siRNA target sequence for HD (NM_002111.4,3630-3648).
ctcctggacccgcaataaa

SEQ ID NO: 113000 - DNA, 19 bp, Homo sapiens
  siRNA target sequence for HD (NM_002111.4,3776-3794).
gcttctagacaatctgata

SEQ ID NO: 113001 - DNA, 19 bp, Homo sapiens
  siRNA target sequence for HD (NM_002111.4,3800-3818).
ggtcctgttacaacaagta

SEQ ID NO: 113002 - DNA, 19 bp, Homo sapiens
  siRNA target sequence for HD (NM_002111.4,3803-3821).
cctgttacaacaagtaaat

SEQ ID NO: 113003 - DNA, 19 bp, Homo sapiens
  siRNA target sequence for HD (NM_002111.4,3828-3846).
cactggggagtttctatca

SEQ ID NO: 113004 - DNA, 19 bp, Homo sapiens
  siRNA target sequence for HD (NM_002111.4,3832-3850).
ggggagtttctatcatctt

SEQ ID NO: 113005 - DNA, 19 bp, Homo sapiens
  siRNA target sequence for HD (NM_002111.4,3869-3887).
catgatgtcctgaaagcta

SEQ ID NO: 113006 - DNA, 19 bp, Homo sapiens
  siRNA target sequence for HD (NM_002111.4,3885-3903).
ctacacacgctaactacaa

SEQ ID NO: 113007 - DNA, 19 bp, Homo sapiens
  siRNA target sequence for HD (NM_002111.4,4006-4024).
cattgggaagtgtgttgaa

SEQ ID NO: 113008 - DNA, 19 bp, Homo sapiens
  siRNA target sequence for HD (NM_002111.4,4031-4049).
ctaggatacctgaaatcct

SEQ ID NO: 113009 - DNA, 19 bp, Homo sapiens
  siRNA target sequence for HD (NM_002111.4,4039-4057).
cctgaaatcctgctttagt

SEQ ID NO: 113010 - DNA, 19 bp, Homo sapiens
  siRNA target sequence for HD (NM_002111.4,4050-4068).
gctttagtcgagaaccaat

SEQ ID NO: 113011 - DNA, 19 bp, Homo sapiens
  siRNA target sequence for HD (NM_002111.4,4064-4082).
ccaatgatggcaactgttt

SEQ ID NO: 113012 - DNA, 19 bp, Homo sapiens
  siRNA target sequence for HD (NM_002111.4,4072-4090).
ggcaactgtttgtgttcaa

SEQ ID NO: 113013 - DNA, 19 bp, Homo sapiens
  siRNA target sequence for HD (NM_002111.4,4306-4324).
cgacacctcgggatggttt

SEQ ID NO: 113014 - DNA, 19 bp, Homo sapiens
  siRNA target sequence for HD (NM_002111.4,4309-4327).
cacctcgggatggtttgat

SEQ ID NO: 113015 - DNA, 19 bp, Homo sapiens
  siRNA target sequence for HD (NM_002111.4,4311-4329).
cctcgggatggtttgatgt

SEQ ID NO: 113016 - DNA, 19 bp, Homo sapiens
  siRNA target sequence for HD (NM_002111.4,4364-4382).
ctcacgagtgtcacaaaga

SEQ ID NO: 113017 - DNA, 19 bp, Homo sapiens
  siRNA target sequence for HD (NM_002111.4,4377-4395).
caaagaaccgtgcagataa

SEQ ID NO: 113018 - DNA, 19 bp, Homo sapiens
  siRNA target sequence for HD (NM_002111.4,4381-4399).
gaaccgtgcagataagaat

SEQ ID NO: 113019 - DNA, 19 bp, Homo sapiens
  siRNA target sequence for HD (NM_002111.4,4385-4403).
cgtgcagataagaatgcta

SEQ ID NO: 113020 - DNA, 19 bp, Homo sapiens
  siRNA target sequence for HD (NM_002111.4,4423-4441).
gtttgaacctcttgttata

SEQ ID NO: 113021 - DNA, 19 bp, Homo sapiens
  siRNA target sequence for HD (NM_002111.4,4454-4472).
cagtacacgactacaacat

SEQ ID NO: 113022 - DNA, 19 bp, Homo sapiens
  siRNA target sequence for HD (NM_002111.4,4456-4474).
gtacacgactacaacatgt

SEQ ID NO: 113023 - DNA, 19 bp, Homo sapiens
  siRNA target sequence for HD (NM_002111.4,4484-4502).
cagaagcaggttttagatt

SEQ ID NO: 113024 - DNA, 19 bp, Homo sapiens
  siRNA target sequence for HD (NM_002111.4,4507-4525).
ggcgcagctggttcagtta

SEQ ID NO: 113025 - DNA, 19 bp, Homo sapiens
  siRNA target sequence for HD (NM_002111.4,4516-4534).
ggttcagttacgggttaat

SEQ ID NO: 113026 - DNA, 19 bp, Homo sapiens
  siRNA target sequence for HD (NM_002111.4,4517-4535).
gttcagttacgggttaatt

SEQ ID NO: 113027 - DNA, 19 bp, Homo sapiens
  siRNA target sequence for HD (NM_002111.4,4522-4540).
gttacgggttaattactgt

SEQ ID NO: 113028 - DNA, 19 bp, Homo sapiens
  siRNA target sequence for HD (NM_002111.4,4547-4565).
gattcagatcaggtgttta

SEQ ID NO: 113029 - DNA, 19 bp, Homo sapiens
  siRNA target sequence for HD (NM_002111.4,4673-4691).
cgctatcattcaaaacaga

SEQ ID NO: 113030 - DNA, 19 bp, Homo sapiens
  siRNA target sequence for HD (NM_002111.4,4690-4708).
gatcattggaattcctaaa

SEQ ID NO: 113031 - DNA, 19 bp, Homo sapiens
  siRNA target sequence for HD (NM_002111.4,4787-4805).
gtccacgacctctttgtat

SEQ ID NO: 113032 - DNA, 19 bp, Homo sapiens
  siRNA target sequence for HD (NM_002111.4,4789-4807).
ccacgacctctttgtatta

SEQ ID NO: 113033 - DNA, 19 bp, Homo sapiens
  siRNA target sequence for HD (NM_002111.4,4790-4808).
cacgacctctttgtattaa

SEQ ID NO: 113034 - DNA, 19 bp, Homo sapiens
  siRNA target sequence for HD (NM_002111.4,4792-4810).
cgacctctttgtattaaga

SEQ ID NO: 113035 - DNA, 19 bp, Homo sapiens
  siRNA target sequence for HD (NM_002111.4,4802-4820).
gtattaagaggaacaaata

SEQ ID NO: 113036 - DNA, 19 bp, Homo sapiens
  siRNA target sequence for HD (NM_002111.4,4862-4880).
gtggtgtcaatgttactga

SEQ ID NO: 113037 - DNA, 19 bp, Homo sapiens
  siRNA target sequence for HD (NM_002111.4,4963-4981).
gcgactgtctcgacagata

SEQ ID NO: 113038 - DNA, 19 bp, Homo sapiens
  siRNA target sequence for HD (NM_002111.4,5020-5038).
gcacattgactctcatgaa

SEQ ID NO: 113039 - DNA, 19 bp, Homo sapiens
  siRNA target sequence for HD (NM_002111.4,5039-5057).
gcccttggagtgttaaata

SEQ ID NO: 113040 - DNA, 19 bp, Homo sapiens
  siRNA target sequence for HD (NM_002111.4,5085-5103).
ccctccgtccggtagacat

SEQ ID NO: 113041 - DNA, 19 bp, Homo sapiens
  siRNA target sequence for HD (NM_002111.4,5090-5108).
cgtccggtagacatgcttt

SEQ ID NO: 113042 - DNA, 19 bp, Homo sapiens
  siRNA target sequence for HD (NM_002111.4,5143-5161).
gtccgtgagcactgttcaa

SEQ ID NO: 113043 - DNA, 19 bp, Homo sapiens
  siRNA target sequence for HD (NM_002111.4,5145-5163).
ccgtgagcactgttcaact

SEQ ID NO: 113044 - DNA, 19 bp, Homo sapiens
  siRNA target sequence for HD (NM_002111.4,5250-5268).
ccttctctccgtatttaat

SEQ ID NO: 113045 - DNA, 19 bp, Homo sapiens
  siRNA target sequence for HD (NM_002111.4,5297-5315).
gatggggacagtacttcaa

SEQ ID NO: 113046 - DNA, 19 bp, Homo sapiens
  siRNA target sequence for HD (NM_002111.4,5307-5325).
gtacttcaacgctagaaga

SEQ ID NO: 113047 - DNA, 19 bp, Homo sapiens
  siRNA target sequence for HD (NM_002111.4,5310-5328).
cttcaacgctagaagaaca

SEQ ID NO: 113048 - DNA, 19 bp, Homo sapiens
  siRNA target sequence for HD (NM_002111.4,5373-5391).
caaggtttctattacaact

SEQ ID NO: 113049 - DNA, 19 bp, Homo sapiens
  siRNA target sequence for HD (NM_002111.4,5387-5405).
caactggttggtattcttt

SEQ ID NO: 113050 - DNA, 19 bp, Homo sapiens
  siRNA target sequence for HD (NM_002111.4,5443-5461).
gagtgagcagcaacatact

SEQ ID NO: 113051 - DNA, 19 bp, Homo sapiens
  siRNA target sequence for HD (NM_002111.4,5445-5463).
gtgagcagcaacatacttt

SEQ ID NO: 113052 - DNA, 19 bp, Homo sapiens
  siRNA target sequence for HD (NM_002111.4,5449-5467).
gcagcaacatactttctat

SEQ ID NO: 113053 - DNA, 19 bp, Homo sapiens
  siRNA target sequence for HD (NM_002111.4,5477-5495).
ctaggcacactgctaatgt

SEQ ID NO: 113054 - DNA, 19 bp, Homo sapiens
  siRNA target sequence for HD (NM_002111.4,5496-5514).
gtctgatccacatcttcaa

SEQ ID NO: 113055 - DNA, 19 bp, Homo sapiens
  siRNA target sequence for HD (NM_002111.4,5570-5588).
ggctgtggcggcagtttct

SEQ ID NO: 113056 - DNA, 19 bp, Homo sapiens
  siRNA target sequence for HD (NM_002111.4,5571-5589).
gctgtggcggcagtttcta

SEQ ID NO: 113057 - DNA, 19 bp, Homo sapiens
  siRNA target sequence for HD (NM_002111.4,5612-5630).
cgggctcgttccatgatca

SEQ ID NO: 113058 - DNA, 19 bp, Homo sapiens
  siRNA target sequence for HD (NM_002111.4,5650-5668).
gctgctctggtgtcagata

SEQ ID NO: 113059 - DNA, 19 bp, Homo sapiens
  siRNA target sequence for HD (NM_002111.4,5835-5853).
gaagaggggctctcattct

SEQ ID NO: 113060 - DNA, 19 bp, Homo sapiens
  siRNA target sequence for HD (NM_002111.4,5882-5900).
catgactccgagcacttaa

SEQ ID NO: 113061 - DNA, 19 bp, Homo sapiens
  siRNA target sequence for HD (NM_002111.4,5885-5903).
gactccgagcacttaacgt

SEQ ID NO: 113062 - DNA, 19 bp, Homo sapiens
  siRNA target sequence for HD (NM_002111.4,5896-5914).
cttaacgtggctcattgta

SEQ ID NO: 113063 - DNA, 19 bp, Homo sapiens
  siRNA target sequence for HD (NM_002111.4,5904-5922).
ggctcattgtaaatcacat

SEQ ID NO: 113064 - DNA, 19 bp, Homo sapiens
  siRNA target sequence for HD (NM_002111.4,5994-6012).
ctgccagcggcctgttcat

SEQ ID NO: 113065 - DNA, 19 bp, Homo sapiens
  siRNA target sequence for HD (NM_002111.4,6349-6367).
catgcaagactcacttagt

SEQ ID NO: 113066 - DNA, 19 bp, Homo sapiens
  siRNA target sequence for HD (NM_002111.4,6428-6446).
gtgagtccggacaaagact

SEQ ID NO: 113067 - DNA, 19 bp, Homo sapiens
  siRNA target sequence for HD (NM_002111.4,6447-6465).
ggtacgttcatcttgtcaa

SEQ ID NO: 113068 - DNA, 19 bp, Homo sapiens
  siRNA target sequence for HD (NM_002111.4,6448-6466).
gtacgttcatcttgtcaaa

SEQ ID NO: 113069 - DNA, 19 bp, Homo sapiens
  siRNA target sequence for HD (NM_002111.4,6539-6557).
gatatgaatgccttcatga

SEQ ID NO: 113070 - DNA, 19 bp, Homo sapiens
  siRNA target sequence for HD (NM_002111.4,6580-6598).
cctgctagctccatgctta

SEQ ID NO: 113071 - DNA, 19 bp, Homo sapiens
  siRNA target sequence for HD (NM_002111.4,6581-6599).
ctgctagctccatgcttaa

SEQ ID NO: 113072 - DNA, 19 bp, Homo sapiens
  siRNA target sequence for HD (NM_002111.4,6600-6618).
gcctagggatgagtgaaat

SEQ ID NO: 113073 - DNA, 19 bp, Homo sapiens
  siRNA target sequence for HD (NM_002111.4,6601-6619).
cctagggatgagtgaaatt

SEQ ID NO: 113074 - DNA, 19 bp, Homo sapiens
  siRNA target sequence for HD (NM_002111.4,6750-6768).
cctactggagcaagttgaa

SEQ ID NO: 113075 - DNA, 19 bp, Homo sapiens
  siRNA target sequence for HD (NM_002111.4,6759-6777).
gcaagttgaatgatctgtt

SEQ ID NO: 113076 - DNA, 19 bp, Homo sapiens
  siRNA target sequence for HD (NM_002111.4,7194-7212).
caaacacacagaatcctaa

SEQ ID NO: 113077 - DNA, 19 bp, Homo sapiens
  siRNA target sequence for HD (NM_002111.4,7202-7220).
cagaatcctaagtatatca

SEQ ID NO: 113078 - DNA, 19 bp, Homo sapiens
  siRNA target sequence for HD (NM_002111.4,7204-7222).
gaatcctaagtatatcact

SEQ ID NO: 113079 - DNA, 19 bp, Homo sapiens
  siRNA target sequence for HD (NM_002111.4,7276-7294).
cttgggtcataaaaggaat

SEQ ID NO: 113080 - DNA, 19 bp, Homo sapiens
  siRNA target sequence for HD (NM_002111.4,7417-7435).
caaaccgggaggggatttt

SEQ ID NO: 113081 - DNA, 19 bp, Homo sapiens
  siRNA target sequence for HD (NM_002111.4,7525-7543).
gaccagtcgtactcagttt

SEQ ID NO: 113082 - DNA, 19 bp, Homo sapiens
  siRNA target sequence for HD (NM_002111.4,7527-7545).
ccagtcgtactcagtttga

SEQ ID NO: 113083 - DNA, 19 bp, Homo sapiens
  siRNA target sequence for HD (NM_002111.4,7528-7546).
cagtcgtactcagtttgaa

SEQ ID NO: 113084 - DNA, 19 bp, Homo sapiens
  siRNA target sequence for HD (NM_002111.4,7530-7548).
gtcgtactcagtttgaaga

SEQ ID NO: 113085 - DNA, 19 bp, Homo sapiens
  siRNA target sequence for HD (NM_002111.4,7532-7550).
cgtactcagtttgaagaaa

SEQ ID NO: 113086 - DNA, 19 bp, Homo sapiens
  siRNA target sequence for HD (NM_002111.4,7606-7624).
ggagagcccaccagaagaa

SEQ ID NO: 113087 - DNA, 19 bp, Homo sapiens
  siRNA target sequence for HD (NM_002111.4,7678-7696).
ggtgctcagtgcaatgact

SEQ ID NO: 113088 - DNA, 19 bp, Homo sapiens
  siRNA target sequence for HD (NM_002111.4,7744-7762).
ccggaacaagcctctgaaa

SEQ ID NO: 113089 - DNA, 19 bp, Homo sapiens
  siRNA target sequence for HD (NM_002111.4,7806-7824).
ggattgtggagcaagagat

SEQ ID NO: 113090 - DNA, 19 bp, Homo sapiens
  siRNA target sequence for HD (NM_002111.4,7807-7825).
gattgtggagcaagagatt

SEQ ID NO: 113091 - DNA, 19 bp, Homo sapiens
  siRNA target sequence for HD (NM_002111.4,7826-7844).
caagcaatggtttcaaaga

SEQ ID NO: 113092 - DNA, 19 bp, Homo sapiens
  siRNA target sequence for HD (NM_002111.4,7857-7875).
ccacccatcatttatatca

SEQ ID NO: 113093 - DNA, 19 bp, Homo sapiens
  siRNA target sequence for HD (NM_002111.4,7974-7992).
ggagcatgagctacaaact

SEQ ID NO: 113094 - DNA, 19 bp, Homo sapiens
  siRNA target sequence for HD (NM_002111.4,7994-8012).
ggccaggtgtccatacact

SEQ ID NO: 113095 - DNA, 19 bp, Homo sapiens
  siRNA target sequence for HD (NM_002111.4,8156-8174).
cactcctgttcgcagtttt

SEQ ID NO: 113096 - DNA, 19 bp, Homo sapiens
  siRNA target sequence for HD (NM_002111.4,8160-8178).
cctgttcgcagtttttgct

SEQ ID NO: 113097 - DNA, 19 bp, Homo sapiens
  siRNA target sequence for HD (NM_002111.4,8161-8179).
ctgttcgcagtttttgctt

SEQ ID NO: 113098 - DNA, 19 bp, Homo sapiens
  siRNA target sequence for HD (NM_002111.4,8166-8184).
cgcagtttttgcttgagtt

SEQ ID NO: 113099 - DNA, 19 bp, Homo sapiens
  siRNA target sequence for HD (NM_002111.4,8267-8285).
gtggtctcagacttgttca

SEQ ID NO: 113100 - DNA, 19 bp, Homo sapiens
  siRNA target sequence for HD (NM_002111.4,8286-8304).
ccgagcgcaaccagtttga

SEQ ID NO: 113101 - DNA, 19 bp, Homo sapiens
  siRNA target sequence for HD (NM_002111.4,8562-8580).
cggtcatcagcgactatct

SEQ ID NO: 113102 - DNA, 19 bp, Homo sapiens
  siRNA target sequence for HD (NM_002111.4,8602-8620).
cgcccactgcgtgaacatt

SEQ ID NO: 113103 - DNA, 19 bp, Homo sapiens
  siRNA target sequence for HD (NM_002111.4,8604-8622).
cccactgcgtgaacattca

SEQ ID NO: 113104 - DNA, 19 bp, Homo sapiens
  siRNA target sequence for HD (NM_002111.4,8649-8667).
gtgccactgcgttttacct

SEQ ID NO: 113105 - DNA, 19 bp, Homo sapiens
  siRNA target sequence for HD (NM_002111.4,8655-8673).
ctgcgttttacctcattga

SEQ ID NO: 113106 - DNA, 19 bp, Homo sapiens
  siRNA target sequence for HD (NM_002111.4,8657-8675).
gcgttttacctcattgaga

SEQ ID NO: 113107 - DNA, 19 bp, Homo sapiens
  siRNA target sequence for HD (NM_002111.4,8706-8724).
cagcatcaataatacagat

SEQ ID NO: 113108 - DNA, 19 bp, Homo sapiens
  siRNA target sequence for HD (NM_002111.4,8948-8966).
gtcagtccgggtagaactt

SEQ ID NO: 113109 - DNA, 19 bp, Homo sapiens
  siRNA target sequence for HD (NM_002111.4,8989-9007).
cgacagcgagtcagtgatt

SEQ ID NO: 113110 - DNA, 19 bp, Homo sapiens
  siRNA target sequence for HD (NM_002111.4,8992-9010).
cagcgagtcagtgattgtt

SEQ ID NO: 113111 - DNA, 19 bp, Homo sapiens
  siRNA target sequence for HD (NM_002111.4,9016-9034).
ggagcgggtatctgttctt

SEQ ID NO: 113112 - DNA, 19 bp, Homo sapiens
  siRNA target sequence for HD (NM_002111.4,9017-9035).
gagcgggtatctgttcttt

SEQ ID NO: 113113 - DNA, 19 bp, Homo sapiens
  siRNA target sequence for HD (NM_002111.4,9085-9103).
gatcctgccccagtttcta

SEQ ID NO: 113114 - DNA, 19 bp, Homo sapiens
  siRNA target sequence for HD (NM_002111.4,9116-9134).
ccaccccaggacatcatga

SEQ ID NO: 113115 - DNA, 19 bp, Homo sapiens
  siRNA target sequence for HD (NM_002111.4,9140-9158).
gtcatcggagagtttctgt

SEQ ID NO: 113116 - DNA, 19 bp, Homo sapiens
  siRNA target sequence for HD (NM_002111.4,9189-9207).
ccaccgtggtgtataaggt

SEQ ID NO: 113117 - DNA, 19 bp, Homo sapiens
  siRNA target sequence for HD (NM_002111.4,9407-9425).
gtggacgtgaaccttttct

SEQ ID NO: 113118 - DNA, 19 bp, Homo sapiens
  siRNA target sequence for HD (NM_002111.4,9535-9553).
gctgctgacttgtttacga

SEQ ID NO: 113119 - DNA, 19 bp, Homo sapiens
  siRNA target sequence for HD (NM_002111.4,9538-9556).
gctgacttgtttacgaaat

SEQ ID NO: 113120 - DNA, 19 bp, Homo sapiens
  siRNA target sequence for HSBP1 (NM_001537.1,265-283).
cctgccacgcaaaagagtt

SEQ ID NO: 113121 - DNA, 19 bp, Homo sapiens
  siRNA target sequence for ID3 (NM_002167.2,692-710).
gtcatctccaacgacaaaa

SEQ ID NO: 113122 - DNA, 19 bp, Homo sapiens
  siRNA target sequence for ID4 (NM_001546.2,557-575).
gcctgcagtgcgatatgaa

SEQ ID NO: 113123 - DNA, 19 bp, Homo sapiens
  siRNA target sequence for L3MBTL2 (NM_031488.3,441-459).
gaaaaccaccgaccaaaaa

SEQ ID NO: 113124 - DNA, 19 bp, Homo sapiens
  siRNA target sequence for L3MBTL2 (NM_031488.3,480-498).
ctgcctggtctgccaaaat

SEQ ID NO: 113125 - DNA, 19 bp, Homo sapiens
  siRNA target sequence for L3MBTL2 (NM_031488.3,484-502).
ctggtctgccaaaattgga

SEQ ID NO: 113126 - DNA, 19 bp, Homo sapiens
  siRNA target sequence for L3MBTL2 (NM_031488.3,596-614).
ctgaaggatcacagttaca

SEQ ID NO: 113127 - DNA, 19 bp, Homo sapiens
  siRNA target sequence for L3MBTL2 (NM_031488.3,637-655).
caagcacgtcccactctat

SEQ ID NO: 113128 - DNA, 19 bp, Homo sapiens
  siRNA target sequence for L3MBTL2 (NM_031488.3,769-787).
ggtgctgcttcggtatgaa

SEQ ID NO: 113129 - DNA, 19 bp, Homo sapiens
  siRNA target sequence for L3MBTL2 (NM_031488.3,921-939).
ggaagggctacctcatgaa

SEQ ID NO: 113130 - DNA, 19 bp, Homo sapiens
  siRNA target sequence for L3MBTL2 (NM_031488.3,957-975).
ggacgcttcccgtggattt

SEQ ID NO: 113131 - DNA, 19 bp, Homo sapiens
  siRNA target sequence for L3MBTL2 (NM_031488.3,960-978).
cgcttcccgtggatttcca

SEQ ID NO: 113132 - DNA, 19 bp, Homo sapiens
  siRNA target sequence for L3MBTL2 (NM_031488.3,1409-1427).
gatggatacctgatgatct

SEQ ID NO: 113133 - DNA, 19 bp, Homo sapiens
  siRNA target sequence for L3MBTL2 (NM_031488.3,1531-1549).
gctcacaccgccaaaaggt

SEQ ID NO: 113134 - DNA, 19 bp, Homo sapiens
  siRNA target sequence for L3MBTL2 (NM_031488.3,1532-1550).
ctcacaccgccaaaaggtt

SEQ ID NO: 113135 - DNA, 19 bp, Homo sapiens
  siRNA target sequence for L3MBTL2 (NM_031488.3,1534-1552).
cacaccgccaaaaggttat

SEQ ID NO: 113136 - DNA, 19 bp, Homo sapiens
  siRNA target sequence for L3MBTL2 (NM_031488.3,1536-1554).
caccgccaaaaggttatga

SEQ ID NO: 113137 - DNA, 19 bp, Homo sapiens
  siRNA target sequence for L3MBTL2 (NM_031488.3,1548-1566).
gttatgaggcacagacttt

SEQ ID NO: 113138 - DNA, 19 bp, Homo sapiens
  siRNA target sequence for L3MBTL2 (NM_031488.3,1563-1581).
ctttcaactgggagaacta

SEQ ID NO: 113139 - DNA, 19 bp, Homo sapiens
  siRNA target sequence for L3MBTL2 (NM_031488.3,1606-1624).
cgctccatcgagactcttt

SEQ ID NO: 113140 - DNA, 19 bp, Homo sapiens
  siRNA target sequence for L3MBTL2 (NM_031488.3,1607-1625).
gctccatcgagactcttta

SEQ ID NO: 113141 - DNA, 19 bp, Homo sapiens
  siRNA target sequence for L3MBTL2 (NM_031488.3,1610-1628).
ccatcgagactctttaaca

SEQ ID NO: 113142 - DNA, 19 bp, Homo sapiens
  siRNA target sequence for L3MBTL2 (NM_031488.3,1611-1629).
catcgagactctttaacat

SEQ ID NO: 113143 - DNA, 19 bp, Homo sapiens
  siRNA target sequence for L3MBTL2 (NM_031488.3,1627-1645).
catggattgcccaaaccat

SEQ ID NO: 113144 - DNA, 19 bp, Homo sapiens
  siRNA target sequence for L3MBTL2 (NM_031488.3,2092-2110).
gcccgacaaggcttcaagt

SEQ ID NO: 113145 - DNA, 19 bp, Homo sapiens
  siRNA target sequence for L3MBTL2 (NM_031488.3,2121-2139).
ctgtctccgtcgagaacat

SEQ ID NO: 113146 - DNA, 19 bp, Homo sapiens
  siRNA target sequence for L3MBTL2 (NM_031488.3,2123-2141).
gtctccgtcgagaacatca

SEQ ID NO: 113147 - DNA, 19 bp, Homo sapiens
  siRNA target sequence for NAB2 (NM_005967.1,381-399).
cgggtgaggaggagtttct

SEQ ID NO: 113148 - DNA, 19 bp, Homo sapiens
  siRNA target sequence for NAB2 (NM_005967.1,528-546).
gcatcccgctcttcaagat

SEQ ID NO: 113149 - DNA, 19 bp, Homo sapiens
  siRNA target sequence for NAB2 (NM_005967.1,956-974).
ctgctaaagctgaataaga

SEQ ID NO: 113150 - DNA, 19 bp, Homo sapiens
  siRNA target sequence for NAB2 (NM_005967.1,984-1002).
ggagcgttgggcacatctt

SEQ ID NO: 113151 - DNA, 19 bp, Homo sapiens
  siRNA target sequence for NAB2 (NM_005967.1,985-1003).
gagcgttgggcacatcttt

SEQ ID NO: 113152 - DNA, 19 bp, Homo sapiens
  siRNA target sequence for NAB2 (NM_005967.1,1034-1052).
gaggagatccgcaaataca

SEQ ID NO: 113153 - DNA, 19 bp, Homo sapiens
  siRNA target sequence for NAB2 (NM_005967.1,1153-1171).
ggacaacacgctcttatta

SEQ ID NO: 113154 - DNA, 19 bp, Homo sapiens
  siRNA target sequence for NAB2 (NM_005967.1,1211-1229).
cgagagagcacctacttgt

SEQ ID NO: 113155 - DNA, 19 bp, Homo sapiens
  siRNA target sequence for PAWR (NM_002583.1,753-771).
ccgcagagtgcttagatga

SEQ ID NO: 113156 - DNA, 19 bp, Homo sapiens
  siRNA target sequence for PAWR (NM_002583.1,756-774).
cagagtgcttagatgagta

SEQ ID NO: 113157 - DNA, 19 bp, Homo sapiens
  siRNA target sequence for PAWR (NM_002583.1,832-850).
gaacactattcagaatgaa

SEQ ID NO: 113158 - DNA, 19 bp, Homo sapiens
  siRNA target sequence for PAWR (NM_002583.1,908-926).
gtttcaggcagatataaaa

SEQ ID NO: 113159 - DNA, 19 bp, Homo sapiens
  siRNA target sequence for PAWR (NM_002583.1,947-965).
gaagatgtctcaagtagat

SEQ ID NO: 113160 - DNA, 19 bp, Homo sapiens
  siRNA target sequence for PAWR (NM_002583.1,981-999).
gaagtgggttccctagata

SEQ ID NO: 113161 - DNA, 19 bp, Homo sapiens
  siRNA target sequence for PAWR (NM_002583.1,984-1002).
gtgggttccctagatataa

SEQ ID NO: 113162 - DNA, 19 bp, Homo sapiens
  siRNA target sequence for PAWR (NM_002583.1,986-1004).
gggttccctagatataaca

SEQ ID NO: 113163 - DNA, 19 bp, Homo sapiens
  siRNA target sequence for PAWR (NM_002583.1,996-1014).
gatataacagggatgcaaa

SEQ ID NO: 113164 - DNA, 19 bp, Homo sapiens
  siRNA target sequence for PAWR (NM_002583.1,1022-1040).
ggtactctggtttcaagta

SEQ ID NO: 113165 - DNA, 19 bp, Homo sapiens
  siRNA target sequence for PAWR (NM_002583.1,1067-1085).
cttgaaaaggaagtagtaa

SEQ ID NO: 113166 - DNA, 19 bp, Homo sapiens
  siRNA target sequence for PAWR (NM_002583.1,1112-1130).
gtgagactgatgcaagata

SEQ ID NO: 113167 - DNA, 19 bp, Homo sapiens
  siRNA target sequence for PBXIP1 (NM_020524.2,633-651).
ggcatctccctcaacatgt

SEQ ID NO: 113168 - DNA, 19 bp, Homo sapiens
  siRNA target sequence for PBXIP1 (NM_020524.2,1224-1242).
gctgaggcacaggcattaa

SEQ ID NO: 113169 - DNA, 19 bp, Homo sapiens
  siRNA target sequence for PBXIP1 (NM_020524.2,1235-1253).
ggcattaaggcaagagtta

SEQ ID NO: 113170 - DNA, 19 bp, Homo sapiens
  siRNA target sequence for PBXIP1 (NM_020524.2,1521-1539).
gagcactggaaacataaga

SEQ ID NO: 113171 - DNA, 19 bp, Homo sapiens
  siRNA target sequence for PBXIP1 (NM_020524.2,1905-1923).
gcctctctgctaagaacat

SEQ ID NO: 113172 - DNA, 19 bp, Homo sapiens
  siRNA target sequence for PBXIP1 (NM_020524.2,1909-1927).
ctctgctaagaacatactt

SEQ ID NO: 113173 - DNA, 19 bp, Homo sapiens
  siRNA target sequence for PBXIP1 (NM_020524.2,2018-2036).
cctccgcttccgggatttt

SEQ ID NO: 113174 - DNA, 19 bp, Homo sapiens
  siRNA target sequence for PFDN5 (NM_002624.2,181-199).
gtctgaacgtgctgaacaa

SEQ ID NO: 113175 - DNA, 19 bp, Homo sapiens
  siRNA target sequence for PFDN5 (NM_002624.2,202-220).
gcaacgaggggaaagaatt

SEQ ID NO: 113176 - DNA, 19 bp, Homo sapiens
  siRNA target sequence for PFDN5 (NM_002624.2,203-221).
caacgaggggaaagaatta

SEQ ID NO: 113177 - DNA, 19 bp, Homo sapiens
  siRNA target sequence for PFDN5 (NM_002624.2,225-243).
gtcccactgacgagttcta

SEQ ID NO: 113178 - DNA, 19 bp, Homo sapiens
  siRNA target sequence for PFDN5 (NM_145896.1,200-218).
gagcaacgaggatgtatgt

SEQ ID NO: 113179 - DNA, 19 bp, Homo sapiens
  siRNA target sequence for PLRG1 (NM_002669.1,40-58).
gtgttcaggtcgttgaaga

SEQ ID NO: 113180 - DNA, 19 bp, Homo sapiens
  siRNA target sequence for PLRG1 (NM_002669.1,57-75).
gaggacccatgacatgttt

SEQ ID NO: 113181 - DNA, 19 bp, Homo sapiens
  siRNA target sequence for PLRG1 (NM_002669.1,112-130).
gagagtcacaaacgaaaaa

SEQ ID NO: 113182 - DNA, 19 bp, Homo sapiens
  siRNA target sequence for PLRG1 (NM_002669.1,134-152).
caatcaagcttcgtaatga

SEQ ID NO: 113183 - DNA, 19 bp, Homo sapiens
  siRNA target sequence for PLRG1 (NM_002669.1,138-156).
caagcttcgtaatgagtat

SEQ ID NO: 113184 - DNA, 19 bp, Homo sapiens
  siRNA target sequence for PLRG1 (NM_002669.1,165-183).
gttgcatatgcctacttca

SEQ ID NO: 113185 - DNA, 19 bp, Homo sapiens
  siRNA target sequence for PLRG1 (NM_002669.1,211-229).
cagaatgcaacggattcat

SEQ ID NO: 113186 - DNA, 19 bp, Homo sapiens
  siRNA target sequence for PLRG1 (NM_002669.1,218-236).
caacggattcatatgttca

SEQ ID NO: 113187 - DNA, 19 bp, Homo sapiens
  siRNA target sequence for PLRG1 (NM_002669.1,345-363).
gagaatgccaagtgaatca

SEQ ID NO: 113188 - DNA, 19 bp, Homo sapiens
  siRNA target sequence for PLRG1 (NM_002669.1,402-420).
caaggctgatgcaaatcgt

SEQ ID NO: 113189 - DNA, 19 bp, Homo sapiens
  siRNA target sequence for PLRG1 (NM_002669.1,424-442).
gcccctagtggaagtgaat

SEQ ID NO: 113190 - DNA, 19 bp, Homo sapiens
  siRNA target sequence for PLRG1 (NM_002669.1,425-443).
cccctagtggaagtgaata

SEQ ID NO: 113191 - DNA, 19 bp, Homo sapiens
  siRNA target sequence for PLRG1 (NM_002669.1,476-494).
ctacagcgatgaattcaat

SEQ ID NO: 113192 - DNA, 19 bp, Homo sapiens
  siRNA target sequence for PLRG1 (NM_002669.1,481-499).
gcgatgaattcaattgtca

SEQ ID NO: 113193 - DNA, 19 bp, Homo sapiens
  siRNA target sequence for PLRG1 (NM_002669.1,482-500).
cgatgaattcaattgtcat

SEQ ID NO: 113194 - DNA, 19 bp, Homo sapiens
  siRNA target sequence for PLRG1 (NM_002669.1,524-542).
ctgcactgatggctaaaaa

SEQ ID NO: 113195 - DNA, 19 bp, Homo sapiens
  siRNA target sequence for PLRG1 (NM_002669.1,536-554).
ctaaaaaagcccctacaat

SEQ ID NO: 113196 - DNA, 19 bp, Homo sapiens
  siRNA target sequence for PLRG1 (NM_002669.1,615-633).
ctgggttcgatgtattgct

SEQ ID NO: 113197 - DNA, 19 bp, Homo sapiens
  siRNA target sequence for PLRG1 (NM_002669.1,632-650).
ctgtggaacctggaaatca

SEQ ID NO: 113198 - DNA, 19 bp, Homo sapiens
  siRNA target sequence for PLRG1 (NM_002669.1,670-688).
gctgacagaactataaaga

SEQ ID NO: 113199 - DNA, 19 bp, Homo sapiens
  siRNA target sequence for PLRG1 (NM_002669.1,671-689).
ctgacagaactataaagat

SEQ ID NO: 113200 - DNA, 19 bp, Homo sapiens
  siRNA target sequence for PLRG1 (NM_002669.1,696-714).
cttggctagtggcaaatta

SEQ ID NO: 113201 - DNA, 19 bp, Homo sapiens
  siRNA target sequence for PLRG1 (NM_002669.1,699-717).
ggctagtggcaaattaaaa

SEQ ID NO: 113202 - DNA, 19 bp, Homo sapiens
  siRNA target sequence for PLRG1 (NM_002669.1,720-738).
gtcattgactgggcatatt

SEQ ID NO: 113203 - DNA, 19 bp, Homo sapiens
  siRNA target sequence for PLRG1 (NM_002669.1,726-744).
gactgggcatattagtact

SEQ ID NO: 113204 - DNA, 19 bp, Homo sapiens
  siRNA target sequence for PLRG1 (NM_002669.1,764-782).
gcacaaggagcccatatct

SEQ ID NO: 113205 - DNA, 19 bp, Homo sapiens
  siRNA target sequence for PLRG1 (NM_002669.1,767-785).
caaggagcccatatctgtt

SEQ ID NO: 113206 - DNA, 19 bp, Homo sapiens
  siRNA target sequence for PLRG1 (NM_002669.1,815-833).
gctgggatctcgaatacaa

SEQ ID NO: 113207 - DNA, 19 bp, Homo sapiens
  siRNA target sequence for PLRG1 (NM_002669.1,816-834).
ctgggatctcgaatacaat

SEQ ID NO: 113208 - DNA, 19 bp, Homo sapiens
  siRNA target sequence for PLRG1 (NM_002669.1,818-836).
gggatctcgaatacaataa

SEQ ID NO: 113209 - DNA, 19 bp, Homo sapiens
  siRNA target sequence for PLRG1 (NM_002669.1,825-843).
cgaatacaataaggttata

SEQ ID NO: 113210 - DNA, 19 bp, Homo sapiens
  siRNA target sequence for PLRG1 (NM_002669.1,837-855).
ggttatacggcattatcat

SEQ ID NO: 113211 - DNA, 19 bp, Homo sapiens
  siRNA target sequence for PLRG1 (NM_002669.1,846-864).
gcattatcatggacattta

SEQ ID NO: 113212 - DNA, 19 bp, Homo sapiens
  siRNA target sequence for PLRG1 (NM_002669.1,915-933).
ctgtagtcgagattcaact

SEQ ID NO: 113213 - DNA, 19 bp, Homo sapiens
  siRNA target sequence for PLRG1 (NM_002669.1,961-979).
gccagtgtacacacattat

SEQ ID NO: 113214 - DNA, 19 bp, Homo sapiens
  siRNA target sequence for PLRG1 (NM_002669.1,963-981).
cagtgtacacacattatct

SEQ ID NO: 113215 - DNA, 19 bp, Homo sapiens
  siRNA target sequence for PLRG1 (NM_002669.1,1021-1039).
gcagaaccacaaattatta

SEQ ID NO: 113216 - DNA, 19 bp, Homo sapiens
  siRNA target sequence for PLRG1 (NM_002669.1,1047-1065).
ccatgatactacaattcga

SEQ ID NO: 113217 - DNA, 19 bp, Homo sapiens
  siRNA target sequence for PLRG1 (NM_002669.1,1048-1066).
catgatactacaattcgat

SEQ ID NO: 113218 - DNA, 19 bp, Homo sapiens
  siRNA target sequence for PLRG1 (NM_002669.1,1134-1152).
ggttttacatccaagacat

SEQ ID NO: 113219 - DNA, 19 bp, Homo sapiens
  siRNA target sequence for PLRG1 (NM_002669.1,1225-1243).
ctttccggtcataatgcta

SEQ ID NO: 113220 - DNA, 19 bp, Homo sapiens
  siRNA target sequence for PLRG1 (NM_002669.1,1240-1258).
gctattattaacacattga

SEQ ID NO: 113221 - DNA, 19 bp, Homo sapiens
  siRNA target sequence for PLRG1 (NM_002669.1,1253-1271).
cattgacggtaaattctga

SEQ ID NO: 113222 - DNA, 19 bp, Homo sapiens
  siRNA target sequence for PLRG1 (NM_002669.1,1369-1387).
gggtctttggacagtgaat

SEQ ID NO: 113223 - DNA, 19 bp, Homo sapiens
  siRNA target sequence for PLRG1 (NM_002669.1,1380-1398).
cagtgaatcaggaatattt

SEQ ID NO: 113224 - DNA, 19 bp, Homo sapiens
  siRNA target sequence for PLRG1 (NM_002669.1,1405-1423).
gcttttgatcagtctgaaa

SEQ ID NO: 113225 - DNA, 19 bp, Homo sapiens
  siRNA target sequence for PLRG1 (NM_002669.1,1416-1434).
gtctgaaagtcgattacta

SEQ ID NO: 113226 - DNA, 19 bp, Homo sapiens
  siRNA target sequence for PLRG1 (NM_002669.1,1445-1463).
ctgataaaaccattaaagt

SEQ ID NO: 113227 - DNA, 19 bp, Homo sapiens
  siRNA target sequence for PLRG1 (NM_002669.1,1516-1534).
ccagaaattatcaagagaa

SEQ ID NO: 113228 - DNA, 19 bp, Homo sapiens
  siRNA target sequence for RAI (NM_006663.1,1122-1140).
ctacccacaagaaacagta

SEQ ID NO: 113229 - DNA, 19 bp, Homo sapiens
  siRNA target sequence for RAI (NM_006663.1,1758-1776).
cagacgtcgagcagagtat

SEQ ID NO: 113230 - DNA, 19 bp, Homo sapiens
  siRNA target sequence for RAI (NM_006663.1,1979-1997).
cctcaaaggagtaaagtct

SEQ ID NO: 113231 - DNA, 19 bp, Homo sapiens
  siRNA target sequence for RNF12 (NM_016120.2,282-300).
ccgattggatcgagaagaa

SEQ ID NO: 113232 - DNA, 19 bp, Homo sapiens
  siRNA target sequence for RNF12 (NM_016120.2,301-319).
gctttctatcaatttgtaa

SEQ ID NO: 113233 - DNA, 19 bp, Homo sapiens
  siRNA target sequence for RNF12 (NM_016120.2,372-390).
caccccaggtgaaagtact

SEQ ID NO: 113234 - DNA, 19 bp, Homo sapiens
  siRNA target sequence for RNF12 (NM_016120.2,430-448).
ggcccaccaccgcaaaact

SEQ ID NO: 113235 - DNA, 19 bp, Homo sapiens
  siRNA target sequence for RNF12 (NM_016120.2,432-450).
cccaccaccgcaaaactca

SEQ ID NO: 113236 - DNA, 19 bp, Homo sapiens
  siRNA target sequence for RNF12 (NM_016120.2,486-504).
gtctaatggtgactctata

SEQ ID NO: 113237 - DNA, 19 bp, Homo sapiens
  siRNA target sequence for RNF12 (NM_016120.2,493-511).
ggtgactctataatagact

SEQ ID NO: 113238 - DNA, 19 bp, Homo sapiens
  siRNA target sequence for RNF12 (NM_016120.2,525-543).
cagacaaactggaaataca

SEQ ID NO: 113239 - DNA, 19 bp, Homo sapiens
  siRNA target sequence for RNF12 (NM_016120.2,553-571).
gggcaaagaggaaaccaat

SEQ ID NO: 113240 - DNA, 19 bp, Homo sapiens
  siRNA target sequence for RNF12 (NM_016120.2,583-601).
gtgagtcggactaatccaa

SEQ ID NO: 113241 - DNA, 19 bp, Homo sapiens
  siRNA target sequence for RNF12 (NM_016120.2,615-633).
cagattcagtttagagata

SEQ ID NO: 113242 - DNA, 19 bp, Homo sapiens
  siRNA target sequence for RNF12 (NM_016120.2,617-635).
gattcagtttagagataaa

SEQ ID NO: 113243 - DNA, 19 bp, Homo sapiens
  siRNA target sequence for RNF12 (NM_016120.2,738-756).
ggaaaacccacgatctgaa

SEQ ID NO: 113244 - DNA, 19 bp, Homo sapiens
  siRNA target sequence for RNF12 (NM_016120.2,739-757).
gaaaacccacgatctgaat

SEQ ID NO: 113245 - DNA, 19 bp, Homo sapiens
  siRNA target sequence for RNF12 (NM_016120.2,744-762).
cccacgatctgaatcaaca

SEQ ID NO: 113246 - DNA, 19 bp, Homo sapiens
  siRNA target sequence for RNF12 (NM_016120.2,745-763).
ccacgatctgaatcaacat

SEQ ID NO: 113247 - DNA, 19 bp, Homo sapiens
  siRNA target sequence for RNF12 (NM_016120.2,794-812).
caactgaagcgttaacaga

SEQ ID NO: 113248 - DNA, 19 bp, Homo sapiens
  siRNA target sequence for RNF12 (NM_016120.2,896-914).
ggtcacctctgcatccaat

SEQ ID NO: 113249 - DNA, 19 bp, Homo sapiens
  siRNA target sequence for RNF12 (NM_016120.2,904-922).
ctgcatccaatgagtgaaa

SEQ ID NO: 113250 - DNA, 19 bp, Homo sapiens
  siRNA target sequence for RNF12 (NM_016120.2,928-946).
cgaagatctcatcatagta

SEQ ID NO: 113251 - DNA, 19 bp, Homo sapiens
  siRNA target sequence for RNF12 (NM_016120.2,929-947).
gaagatctcatcatagtat

SEQ ID NO: 113252 - DNA, 19 bp, Homo sapiens
  siRNA target sequence for RNF12 (NM_016120.2,984-1002).
gacggagggaagttctaga

SEQ ID NO: 113253 - DNA, 19 bp, Homo sapiens
  siRNA target sequence for RNF12 (NM_016120.2,1004-1022).
cccggcaccatgtgacatt

SEQ ID NO: 113254 - DNA, 19 bp, Homo sapiens
  siRNA target sequence for RNF12 (NM_016120.2,1006-1024).
cggcaccatgtgacattga

SEQ ID NO: 113255 - DNA, 19 bp, Homo sapiens
  siRNA target sequence for RNF12 (NM_016120.2,1120-1138).
gctgccagtggtgaatcta

SEQ ID NO: 113256 - DNA, 19 bp, Homo sapiens
  siRNA target sequence for RNF12 (NM_016120.2,1160-1178).
caaccatagtccttgatct

SEQ ID NO: 113257 - DNA, 19 bp, Homo sapiens
  siRNA target sequence for RNF12 (NM_016120.2,1163-1181).
ccatagtccttgatcttca

SEQ ID NO: 113258 - DNA, 19 bp, Homo sapiens
  siRNA target sequence for RNF12 (NM_016120.2,1164-1182).
catagtccttgatcttcaa

SEQ ID NO: 113259 - DNA, 19 bp, Homo sapiens
  siRNA target sequence for RNF12 (NM_016120.2,1170-1188).
ccttgatcttcaagtaaga

SEQ ID NO: 113260 - DNA, 19 bp, Homo sapiens
  siRNA target sequence for RNF12 (NM_016120.2,1190-1208).
gagttcgtcctggagaata

SEQ ID NO: 113261 - DNA, 19 bp, Homo sapiens
  siRNA target sequence for RNF12 (NM_016120.2,1204-1222).
gaatatcggcagagagata

SEQ ID NO: 113262 - DNA, 19 bp, Homo sapiens
  siRNA target sequence for RNF12 (NM_016120.2,1292-1310).
gaggttttaggcgtacatt

SEQ ID NO: 113263 - DNA, 19 bp, Homo sapiens
  siRNA target sequence for RNF12 (NM_016120.2,1294-1312).
ggttttaggcgtacatttt

SEQ ID NO: 113264 - DNA, 19 bp, Homo sapiens
  siRNA target sequence for RNF12 (NM_016120.2,1330-1348).
ggtgtgagaacctatgtca

SEQ ID NO: 113265 - DNA, 19 bp, Homo sapiens
  siRNA target sequence for RNF12 (NM_016120.2,1358-1376).
gaattcccattcgtagaat

SEQ ID NO: 113266 - DNA, 19 bp, Homo sapiens
  siRNA target sequence for RNF12 (NM_016120.2,1377-1395).
cttaaatactggtttaagt

SEQ ID NO: 113267 - DNA, 19 bp, Homo sapiens
  siRNA target sequence for RNF12 (NM_016120.2,1398-1416).
gactacatctgttgcaatt

SEQ ID NO: 113268 - DNA, 19 bp, Homo sapiens
  siRNA target sequence for RNF12 (NM_016120.2,1421-1439).
ccatgttaaggcagataat

SEQ ID NO: 113269 - DNA, 19 bp, Homo sapiens
  siRNA target sequence for RNF12 (NM_016120.2,1444-1462).
ggttttggtgagttaagct

SEQ ID NO: 113270 - DNA, 19 bp, Homo sapiens
  siRNA target sequence for RNF12 (NM_016120.2,1450-1468).
ggtgagttaagctatttta

SEQ ID NO: 113271 - DNA, 19 bp, Homo sapiens
  siRNA target sequence for RNF12 (NM_016120.2,1493-1511).
ctactggctcagtctcaaa

SEQ ID NO: 113272 - DNA, 19 bp, Homo sapiens
  siRNA target sequence for RNF12 (NM_016120.2,1499-1517).
gctcagtctcaaatcgaaa

SEQ ID NO: 113273 - DNA, 19 bp, Homo sapiens
  siRNA target sequence for RNF12 (NM_016120.2,1500-1518).
ctcagtctcaaatcgaaat

SEQ ID NO: 113274 - DNA, 19 bp, Homo sapiens
  siRNA target sequence for RNF12 (NM_016120.2,1502-1520).
cagtctcaaatcgaaatat

SEQ ID NO: 113275 - DNA, 19 bp, Homo sapiens
  siRNA target sequence for RNF12 (NM_016120.2,1647-1665).
cagttccggtggtgaaagt

SEQ ID NO: 113276 - DNA, 19 bp, Homo sapiens
  siRNA target sequence for RNF12 (NM_016120.2,1657-1675).
ggtgaaagttcagaaacta

SEQ ID NO: 113277 - DNA, 19 bp, Homo sapiens
  siRNA target sequence for RNF12 (NM_016120.2,1667-1685).
cagaaactagctcagattt

SEQ ID NO: 113278 - DNA, 19 bp, Homo sapiens
  siRNA target sequence for RNF12 (NM_016120.2,1669-1687).
gaaactagctcagatttat

SEQ ID NO: 113279 - DNA, 19 bp, Homo sapiens
  siRNA target sequence for RNF12 (NM_016120.2,1795-1813).
cttagcctggctcagtttt

SEQ ID NO: 113280 - DNA, 19 bp, Homo sapiens
  siRNA target sequence for RNF12 (NM_016120.2,1850-1868).
gactcaccaaagaacagat

SEQ ID NO: 113281 - DNA, 19 bp, Homo sapiens
  siRNA target sequence for RNF12 (NM_016120.2,1917-1935).
ctgtagtgtttgcattaca

SEQ ID NO: 113282 - DNA, 19 bp, Homo sapiens
  siRNA target sequence for RNF12 (NM_016120.2,1919-1937).
gtagtgtttgcattacaga

SEQ ID NO: 113283 - DNA, 19 bp, Homo sapiens
  siRNA target sequence for RNF12 (NM_016120.2,1950-1968).
caacaaacttcgtaaacta

SEQ ID NO: 113284 - DNA, 19 bp, Homo sapiens
  siRNA target sequence for RNF12 (NM_016120.2,1998-2016).
catcgatcgctggttatct

SEQ ID NO: 113285 - DNA, 19 bp, Homo sapiens
  siRNA target sequence for RNF12 (NM_016120.2,2005-2023).
cgctggttatctgagaatt

SEQ ID NO: 113286 - DNA, 19 bp, Homo sapiens
  siRNA target sequence for RNF12 (NM_016120.2,2041-2059).
cgcagagcagtcttagctt

SEQ ID NO: 113287 - DNA, 19 bp, Homo sapiens
  siRNA target sequence for RNF12 (NM_016120.2,2060-2078).
ctggtaacagagaaagtgt

SEQ ID NO: 113288 - DNA, 19 bp, Homo sapiens
  siRNA target sequence for RYBP (NM_012234.3,212-230).
cccgaccaggccaaaaaga

SEQ ID NO: 113289 - DNA, 19 bp, Homo sapiens
  siRNA target sequence for RYBP (NM_012234.3,294-312).
gctgaagcctttaaatgca

SEQ ID NO: 113290 - DNA, 19 bp, Homo sapiens
  siRNA target sequence for RYBP (NM_012234.3,344-362).
cagaaaacctcggatcaat

SEQ ID NO: 113291 - DNA, 19 bp, Homo sapiens
  siRNA target sequence for RYBP (NM_012234.3,476-494).
ggaaattagtcctagtgtt

SEQ ID NO: 113292 - DNA, 19 bp, Homo sapiens
  siRNA target sequence for RYBP (NM_012234.3,477-495).
gaaattagtcctagtgtta

SEQ ID NO: 113293 - DNA, 19 bp, Homo sapiens
  siRNA target sequence for RYBP (NM_012234.3,566-584).
cagcatacagtctgcaaat

SEQ ID NO: 113294 - DNA, 19 bp, Homo sapiens
  siRNA target sequence for RYBP (NM_012234.3,592-610).
caaagaccagcgaaacaaa

SEQ ID NO: 113295 - DNA, 19 bp, Homo sapiens
  siRNA target sequence for RYBP (NM_012234.3,678-696).
ggcaacgtcaccgtcatta

SEQ ID NO: 113296 - DNA, 19 bp, Homo sapiens
  siRNA target sequence for RYBP (NM_012234.3,848-866).
gtcagcagtcaatgatgaa

SEQ ID NO: 113297 - DNA, 19 bp, Homo sapiens
  siRNA target sequence for SAP18 (NM_005870.3,81-99).
gcgttacccaggaggaaat

SEQ ID NO: 113298 - DNA, 19 bp, Homo sapiens
  siRNA target sequence for SAP18 (NM_005870.3,247-265).
gatggatgcaaccttgaaa

SEQ ID NO: 113299 - DNA, 19 bp, Homo sapiens
  siRNA target sequence for SAP18 (NM_005870.3,273-291).
caagcttagtaaaagaagt

SEQ ID NO: 113300 - DNA, 19 bp, Homo sapiens
  siRNA target sequence for SAP18 (NM_005870.3,322-340).
cttcaattttgcaatcgtt

SEQ ID NO: 113301 - DNA, 19 bp, Homo sapiens
  siRNA target sequence for SAP18 (NM_005870.3,325-343).
caattttgcaatcgttttt

SEQ ID NO: 113302 - DNA, 19 bp, Homo sapiens
  siRNA target sequence for SAP18 (NM_005870.3,357-375).
gacctggctatcgagttaa

SEQ ID NO: 113303 - DNA, 19 bp, Homo sapiens
  siRNA target sequence for SAP18 (NM_005870.3,360-378).
ctggctatcgagttaagga

SEQ ID NO: 113304 - DNA, 19 bp, Homo sapiens
  siRNA target sequence for SAP18 (NM_005870.3,426-444).
ccctgcagtcgcagaagtt

SEQ ID NO: 113305 - DNA, 19 bp, Homo sapiens
  siRNA target sequence for SAP18 (NM_005870.3,506-524).
gggcgcatgagaccatatt

SEQ ID NO: 113306 - DNA, 19 bp, Homo sapiens
  siRNA target sequence for SAP30 (NM_003864.1,554-572).
gcgcaaggcatctttacat

SEQ ID NO: 113307 - DNA, 19 bp, Homo sapiens
  siRNA target sequence for SAP30 (NM_003864.1,555-573).
cgcaaggcatctttacata

SEQ ID NO: 113308 - DNA, 19 bp, Homo sapiens
  siRNA target sequence for SAP30 (NM_003864.1,598-616).
cagagtgttcgaaacagaa

SEQ ID NO: 113309 - DNA, 19 bp, Homo sapiens
  siRNA target sequence for SAP30 (NM_003864.1,647-665).
gtgattcacctgttcaaga

SEQ ID NO: 113310 - DNA, 19 bp, Homo sapiens
  siRNA target sequence for SAP30 (NM_003864.1,674-692).
ccccagaggttgatttata

SEQ ID NO: 113311 - DNA, 19 bp, Homo sapiens
  siRNA target sequence for SAP30 (NM_003864.1,677-695).
cagaggttgatttatacca

SEQ ID NO: 113312 - DNA, 19 bp, Homo sapiens
  siRNA target sequence for SAP30 (NM_003864.1,679-697).
gaggttgatttataccaat

SEQ ID NO: 113313 - DNA, 19 bp, Homo sapiens
  siRNA target sequence for SAP30 (NM_003864.1,681-699).
ggttgatttataccaatta

SEQ ID NO: 113314 - DNA, 19 bp, Homo sapiens
  siRNA target sequence for SAP30 (NM_003864.1,743-761).
caaccagaccaggacttaa

SEQ ID NO: 113315 - DNA, 19 bp, Homo sapiens
  siRNA target sequence for SAP30 (NM_003864.1,792-810).
ccactttaggtctattcca

SEQ ID NO: 113316 - DNA, 19 bp, Homo sapiens
  siRNA target sequence for SAP30 (NM_003864.1,800-818).
ggtctattccagtgaatga

SEQ ID NO: 113317 - DNA, 19 bp, Homo sapiens
  siRNA target sequence for SIAH2 (NM_005067.4,621-639).
cacctggtgtgtaaccaat

SEQ ID NO: 113318 - DNA, 19 bp, Homo sapiens
  siRNA target sequence for SIAH2 (NM_005067.4,897-915).
cacgcccacaagagcatta

SEQ ID NO: 113319 - DNA, 19 bp, Homo sapiens
  siRNA target sequence for SIAH2 (NM_005067.4,900-918).
gcccacaagagcattacca

SEQ ID NO: 113320 - DNA, 19 bp, Homo sapiens
  siRNA target sequence for SIAH2 (NM_005067.4,928-946).
gagaagacatcgtctttct

SEQ ID NO: 113321 - DNA, 19 bp, Homo sapiens
  siRNA target sequence for SIAH2 (NM_005067.4,1094-1112).
caagcaagccgagaacttt

SEQ ID NO: 113322 - DNA, 19 bp, Homo sapiens
  siRNA target sequence for SIAH2 (NM_005067.4,1210-1228).
gcgactgccttgttttcga

SEQ ID NO: 113323 - DNA, 19 bp, Homo sapiens
  siRNA target sequence for SIAH2 (NM_005067.4,1229-1247).
cacagccatagcacatctt

SEQ ID NO: 113324 - DNA, 19 bp, Homo sapiens
  siRNA target sequence for SIAH2 (NM_005067.4,1231-1249).
cagccatagcacatctttt

SEQ ID NO: 113325 - DNA, 19 bp, Homo sapiens
  siRNA target sequence for SIAH2 (NM_005067.4,1274-1292).
caatgttactatttctaca

SEQ ID NO: 113326 - DNA, 19 bp, Homo sapiens
  siRNA target sequence for SUFU (NM_016169.2,340-358).
cagaccccttggactatgt

SEQ ID NO: 113327 - DNA, 19 bp, Homo sapiens
  siRNA target sequence for SUFU (NM_016169.2,400-418).
ccgagcactggcactacat

SEQ ID NO: 113328 - DNA, 19 bp, Homo sapiens
  siRNA target sequence for SUFU (NM_016169.2,402-420).
gagcactggcactacatca

SEQ ID NO: 113329 - DNA, 19 bp, Homo sapiens
  siRNA target sequence for SUFU (NM_016169.2,452-470).
cagagtccatgagtttaca

SEQ ID NO: 113330 - DNA, 19 bp, Homo sapiens
  siRNA target sequence for SUFU (NM_016169.2,648-666).
gataacagtgagtcaagaa

SEQ ID NO: 113331 - DNA, 19 bp, Homo sapiens
  siRNA target sequence for SUFU (NM_016169.2,718-736).
cctttggggtagttacctt

SEQ ID NO: 113332 - DNA, 19 bp, Homo sapiens
  siRNA target sequence for SUFU (NM_016169.2,815-833).
gcggacagtgcctattgct

SEQ ID NO: 113333 - DNA, 19 bp, Homo sapiens
  siRNA target sequence for SUFU (NM_016169.2,1041-1059).
cgactctctggcaaagaca

SEQ ID NO: 113334 - DNA, 19 bp, Homo sapiens
  siRNA target sequence for SUFU (NM_016169.2,1196-1214).
cagctccacggccatcatt

SEQ ID NO: 113335 - DNA, 19 bp, Homo sapiens
  siRNA target sequence for SUFU (NM_016169.2,1245-1263).
gagagcgtacatctgaaat

SEQ ID NO: 113336 - DNA, 19 bp, Homo sapiens
  siRNA target sequence for SUFU (NM_016169.2,1249-1267).
gcgtacatctgaaattcaa

SEQ ID NO: 113337 - DNA, 19 bp, Homo sapiens
  siRNA target sequence for SUFU (NM_016169.2,1314-1332).
ctgcatggacggcacttta

SEQ ID NO: 113338 - DNA, 19 bp, Homo sapiens
  siRNA target sequence for SUFU (NM_016169.2,1316-1334).
gcatggacggcactttaca

SEQ ID NO: 113339 - DNA, 19 bp, Homo sapiens
  siRNA target sequence for SUFU (NM_016169.2,1317-1335).
catggacggcactttacat

SEQ ID NO: 113340 - DNA, 19 bp, Homo sapiens
  siRNA target sequence for SUFU (NM_016169.2,1320-1338).
ggacggcactttacatata

SEQ ID NO: 113341 - DNA, 19 bp, Homo sapiens
  siRNA target sequence for SUFU (NM_016169.2,1321-1339).
gacggcactttacatataa

SEQ ID NO: 113342 - DNA, 19 bp, Homo sapiens
  siRNA target sequence for SUFU (NM_016169.2,1323-1341).
cggcactttacatataaaa

SEQ ID NO: 113343 - DNA, 19 bp, Homo sapiens
  siRNA target sequence for SUFU (NM_016169.2,1325-1343).
gcactttacatataaaagt

SEQ ID NO: 113344 - DNA, 19 bp, Homo sapiens
  siRNA target sequence for SUFU (NM_016169.2,1399-1417).
ccactgaggagcatcctta

SEQ ID NO: 113345 - DNA, 19 bp, Homo sapiens
  siRNA target sequence for SUFU (NM_016169.2,1431-1449).
ccctggttacaaattctgt

SEQ ID NO: 113346 - DNA, 19 bp, Homo sapiens
  siRNA target sequence for SUFU (NM_016169.2,1448-1466).
gttgaccgaagagtttgta

SEQ ID NO: 113347 - DNA, 19 bp, Homo sapiens
  siRNA target sequence for TTRAP (NM_016614.2,358-376).
cagcatgttctctctcatt

SEQ ID NO: 113348 - DNA, 19 bp, Homo sapiens
  siRNA target sequence for TTRAP (NM_016614.2,381-399).
ggaatattgatggattaga

SEQ ID NO: 113349 - DNA, 19 bp, Homo sapiens
  siRNA target sequence for TTRAP (NM_016614.2,382-400).
gaatattgatggattagat

SEQ ID NO: 113350 - DNA, 19 bp, Homo sapiens
  siRNA target sequence for TTRAP (NM_016614.2,389-407).
gatggattagatctaaaca

SEQ ID NO: 113351 - DNA, 19 bp, Homo sapiens
  siRNA target sequence for TTRAP (NM_016614.2,431-449).
gtgtgttcctacttagctt

SEQ ID NO: 113352 - DNA, 19 bp, Homo sapiens
  siRNA target sequence for TTRAP (NM_016614.2,435-453).
gttcctacttagctttgta

SEQ ID NO: 113353 - DNA, 19 bp, Homo sapiens
  siRNA target sequence for TTRAP (NM_016614.2,451-469).
gtacagcccagatgtgata

SEQ ID NO: 113354 - DNA, 19 bp, Homo sapiens
  siRNA target sequence for TTRAP (NM_016614.2,457-475).
cccagatgtgatatttcta

SEQ ID NO: 113355 - DNA, 19 bp, Homo sapiens
  siRNA target sequence for TTRAP (NM_016614.2,479-497).
gaagttattcccccatatt

SEQ ID NO: 113356 - DNA, 19 bp, Homo sapiens
  siRNA target sequence for TTRAP (NM_016614.2,482-500).
gttattcccccatattata

SEQ ID NO: 113357 - DNA, 19 bp, Homo sapiens
  siRNA target sequence for TTRAP (NM_016614.2,491-509).
ccatattatagctacctaa

SEQ ID NO: 113358 - DNA, 19 bp, Homo sapiens
  siRNA target sequence for TTRAP (NM_016614.2,505-523).
cctaaagaagagatcaagt

SEQ ID NO: 113359 - DNA, 19 bp, Homo sapiens
  siRNA target sequence for TTRAP (NM_016614.2,516-534).
gatcaagtaattatgagat

SEQ ID NO: 113360 - DNA, 19 bp, Homo sapiens
  siRNA target sequence for TTRAP (NM_016614.2,564-582).
cagctataatgttgaagaa

SEQ ID NO: 113361 - DNA, 19 bp, Homo sapiens
  siRNA target sequence for TTRAP (NM_016614.2,566-584).
gctataatgttgaagaaat

SEQ ID NO: 113362 - DNA, 19 bp, Homo sapiens
  siRNA target sequence for TTRAP (NM_016614.2,680-698).
gagctttgccttatgacat

SEQ ID NO: 113363 - DNA, 19 bp, Homo sapiens
  siRNA target sequence for TTRAP (NM_016614.2,720-738).
ggcatgctgcggaacgaat

SEQ ID NO: 113364 - DNA, 19 bp, Homo sapiens
  siRNA target sequence for TTRAP (NM_016614.2,726-744).
ctgcggaacgaatgaatca

SEQ ID NO: 113365 - DNA, 19 bp, Homo sapiens
  siRNA target sequence for TTRAP (NM_016614.2,728-746).
gcggaacgaatgaatcagt

SEQ ID NO: 113366 - DNA, 19 bp, Homo sapiens
  siRNA target sequence for TTRAP (NM_016614.2,729-747).
cggaacgaatgaatcagtt

SEQ ID NO: 113367 - DNA, 19 bp, Homo sapiens
  siRNA target sequence for TTRAP (NM_016614.2,730-748).
ggaacgaatgaatcagtta

SEQ ID NO: 113368 - DNA, 19 bp, Homo sapiens
  siRNA target sequence for TTRAP (NM_016614.2,739-757).
gaatcagttaaaaatggtt

SEQ ID NO: 113369 - DNA, 19 bp, Homo sapiens
  siRNA target sequence for TTRAP (NM_016614.2,780-798).
cagagtcagctacagttat

SEQ ID NO: 113370 - DNA, 19 bp, Homo sapiens
  siRNA target sequence for TTRAP (NM_016614.2,782-800).
gagtcagctacagttatat

SEQ ID NO: 113371 - DNA, 19 bp, Homo sapiens
  siRNA target sequence for TTRAP (NM_016614.2,803-821).
gcaggagatacaaatctaa

SEQ ID NO: 113372 - DNA, 19 bp, Homo sapiens
  siRNA target sequence for TTRAP (NM_016614.2,845-863).
ggtggtttacccaacaaca

SEQ ID NO: 113373 - DNA, 19 bp, Homo sapiens
  siRNA target sequence for TTRAP (NM_016614.2,880-898).
gtttttgggcaaacctaaa

SEQ ID NO: 113374 - DNA, 19 bp, Homo sapiens
  siRNA target sequence for TTRAP (NM_016614.2,893-911).
cctaaacattgccagtata

SEQ ID NO: 113375 - DNA, 19 bp, Homo sapiens
  siRNA target sequence for TTRAP (NM_016614.2,907-925).
gtatacatgggatacacaa

SEQ ID NO: 113376 - DNA, 19 bp, Homo sapiens
  siRNA target sequence for TTRAP (NM_016614.2,917-935).
gatacacaaatgaactcta

SEQ ID NO: 113377 - DNA, 19 bp, Homo sapiens
  siRNA target sequence for TTRAP (NM_016614.2,951-969).
ctgcttgtaaacttcgttt

SEQ ID NO: 113378 - DNA, 19 bp, Homo sapiens
  siRNA target sequence for TTRAP (NM_016614.2,965-983).
cgttttgatcgaatatttt

SEQ ID NO: 113379 - DNA, 19 bp, Homo sapiens
  siRNA target sequence for TTRAP (NM_016614.2,1090-1108).
gtgcaacttagatataata

SEQ ID NO: 113380 - DNA, 19 bp, Homo sapiens
  siRNA target sequence for TZFP (NM_014383.1,283-301).
cggccagcactctgtgata

SEQ ID NO: 113381 - DNA, 19 bp, Homo sapiens
  siRNA target sequence for TZFP (NM_014383.1,285-303).
gccagcactctgtgatact

SEQ ID NO: 113382 - DNA, 19 bp, Homo sapiens
  siRNA target sequence for TZFP (NM_014383.1,287-305).
cagcactctgtgatactct

SEQ ID NO: 113383 - DNA, 19 bp, Homo sapiens
  siRNA target sequence for TZFP (NM_014383.1,547-565).
cgaggggacagggctaaaa

SEQ ID NO: 113384 - DNA, 19 bp, Homo sapiens
  siRNA target sequence for TZFP (NM_014383.1,548-566).
gaggggacagggctaaaaa

SEQ ID NO: 113385 - DNA, 19 bp, Homo sapiens
  siRNA target sequence for TZFP (NM_014383.1,849-867).
gtggttgagggaaaatcca

SEQ ID NO: 113386 - DNA, 19 bp, Homo sapiens
  siRNA target sequence for TZFP (NM_014383.1,1027-1045).
ggcattcccttctaccata

SEQ ID NO: 113387 - DNA, 19 bp, Homo sapiens
  siRNA target sequence for TZFP (NM_014383.1,1092-1110).
gatcccactgtccctaaat

SEQ ID NO: 113388 - DNA, 19 bp, Homo sapiens
  siRNA target sequence for YAF2 (NM_005748.2,223-241).
cctcctacacagtcaaaga

SEQ ID NO: 113389 - DNA, 19 bp, Homo sapiens
  siRNA target sequence for YAF2 (NM_005748.2,344-362).
ggagtagtgctcagcattt

SEQ ID NO: 113390 - DNA, 19 bp, Homo sapiens
  siRNA target sequence for YAF2 (NM_005748.2,377-395).
gagatctgacagtcattat

SEQ ID NO: 113391 - DNA, 19 bp, Homo sapiens
  siRNA target sequence for YAF2 (NM_005748.2,420-438).
gtcaccgcctgcatctagt

SEQ ID NO: 113392 - DNA, 19 bp, Homo sapiens
  siRNA target sequence for YAF2 (NM_005748.2,448-466).
gcagatcaacacagtcaaa

SEQ ID NO: 113393 - DNA, 19 bp, Homo sapiens
  siRNA target sequence for YAF2 (NM_005748.2,467-485).
gcggctctagctctgataa

SEQ ID NO: 113394 - DNA, 19 bp, Homo sapiens
  siRNA target sequence for YAF2 (NM_005748.2,471-489).
ctctagctctgataacaca

SEQ ID NO: 113395 - DNA, 19 bp, Homo sapiens
  siRNA target sequence for YAF2 (NM_005748.2,496-514).
ggaatgtccaggtcatctt

SEQ ID NO: 113396 - DNA, 19 bp, Homo sapiens
  siRNA target sequence for ZFPM2 (NM_012082.2,194-212).
gcgaagaagtggaatactt

SEQ ID NO: 113397 - DNA, 19 bp, Homo sapiens
  siRNA target sequence for ZFPM2 (NM_012082.2,195-213).
cgaagaagtggaatacttt

SEQ ID NO: 113398 - DNA, 19 bp, Homo sapiens
  siRNA target sequence for ZFPM2 (NM_012082.2,345-363).
gaaagatggggaacgaaaa

SEQ ID NO: 113399 - DNA, 19 bp, Homo sapiens
  siRNA target sequence for ZFPM2 (NM_012082.2,559-577).
ggtcagctttggtgtacaa

SEQ ID NO: 113400 - DNA, 19 bp, Homo sapiens
  siRNA target sequence for ZFPM2 (NM_012082.2,562-580).
cagctttggtgtacaacta

SEQ ID NO: 113401 - DNA, 19 bp, Homo sapiens
  siRNA target sequence for ZFPM2 (NM_012082.2,593-611).
ctgagggtgaagagctaat

SEQ ID NO: 113402 - DNA, 19 bp, Homo sapiens
  siRNA target sequence for ZFPM2 (NM_012082.2,686-704).
cacgcctgctggactcaat

SEQ ID NO: 113403 - DNA, 19 bp, Homo sapiens
  siRNA target sequence for ZFPM2 (NM_012082.2,751-769).
gctattgtcaataaggata

SEQ ID NO: 113404 - DNA, 19 bp, Homo sapiens
  siRNA target sequence for ZFPM2 (NM_012082.2,752-770).
ctattgtcaataaggatat

SEQ ID NO: 113405 - DNA, 19 bp, Homo sapiens
  siRNA target sequence for ZFPM2 (NM_012082.2,820-838).
caggcccatttgatgtact

SEQ ID NO: 113406 - DNA, 19 bp, Homo sapiens
  siRNA target sequence for ZFPM2 (NM_012082.2,1012-1030).
ccccctggtgctagtctaa

SEQ ID NO: 113407 - DNA, 19 bp, Homo sapiens
  siRNA target sequence for ZFPM2 (NM_012082.2,1014-1032).
ccctggtgctagtctaaaa

SEQ ID NO: 113408 - DNA, 19 bp, Homo sapiens
  siRNA target sequence for ZFPM2 (NM_012082.2,1015-1033).
cctggtgctagtctaaaat

SEQ ID NO: 113409 - DNA, 19 bp, Homo sapiens
  siRNA target sequence for ZFPM2 (NM_012082.2,1018-1036).
ggtgctagtctaaaatgca

SEQ ID NO: 113410 - DNA, 19 bp, Homo sapiens
  siRNA target sequence for ZFPM2 (NM_012082.2,1052-1070).
ctgctgattccgtgatcaa

SEQ ID NO: 113411 - DNA, 19 bp, Homo sapiens
  siRNA target sequence for ZFPM2 (NM_012082.2,1054-1072).
gctgattccgtgatcaact

SEQ ID NO: 113412 - DNA, 19 bp, Homo sapiens
  siRNA target sequence for ZFPM2 (NM_012082.2,1055-1073).
ctgattccgtgatcaactt

SEQ ID NO: 113413 - DNA, 19 bp, Homo sapiens
  siRNA target sequence for ZFPM2 (NM_012082.2,1108-1126).
gccttccgatgtaatcact

SEQ ID NO: 113414 - DNA, 19 bp, Homo sapiens
  siRNA target sequence for ZFPM2 (NM_012082.2,1145-1163).
ctcagagggagttattgca

SEQ ID NO: 113415 - DNA, 19 bp, Homo sapiens
  siRNA target sequence for ZFPM2 (NM_012082.2,1389-1407).
gatacagcctacaacaaat

SEQ ID NO: 113416 - DNA, 19 bp, Homo sapiens
  siRNA target sequence for ZFPM2 (NM_012082.2,1606-1624).
ctgaggcatggcagtagta

SEQ ID NO: 113417 - DNA, 19 bp, Homo sapiens
  siRNA target sequence for ZFPM2 (NM_012082.2,1625-1643).
gctaccctcccgtcattta

SEQ ID NO: 113418 - DNA, 19 bp, Homo sapiens
  siRNA target sequence for ZFPM2 (NM_012082.2,1657-1675).
cccaagggggctacttgtt

SEQ ID NO: 113419 - DNA, 19 bp, Homo sapiens
  siRNA target sequence for ZFPM2 (NM_012082.2,1658-1676).
ccaagggggctacttgttt

SEQ ID NO: 113420 - DNA, 19 bp, Homo sapiens
  siRNA target sequence for ZFPM2 (NM_012082.2,1659-1677).
caagggggctacttgtttt

SEQ ID NO: 113421 - DNA, 19 bp, Homo sapiens
  siRNA target sequence for ZFPM2 (NM_012082.2,1663-1681).
ggggctacttgttttgagt

SEQ ID NO: 113422 - DNA, 19 bp, Homo sapiens
  siRNA target sequence for ZFPM2 (NM_012082.2,1667-1685).
ctacttgttttgagtgtaa

SEQ ID NO: 113423 - DNA, 19 bp, Homo sapiens
  siRNA target sequence for ZFPM2 (NM_012082.2,1670-1688).
cttgttttgagtgtaacat

SEQ ID NO: 113424 - DNA, 19 bp, Homo sapiens
  siRNA target sequence for ZFPM2 (NM_012082.2,1678-1696).
gagtgtaacataacattca

SEQ ID NO: 113425 - DNA, 19 bp, Homo sapiens
  siRNA target sequence for ZFPM2 (NM_012082.2,1691-1709).
cattcaataatttggataa

SEQ ID NO: 113426 - DNA, 19 bp, Homo sapiens
  siRNA target sequence for ZFPM2 (NM_012082.2,1714-1732).
ctagtgcacaaaaagcatt

SEQ ID NO: 113427 - DNA, 19 bp, Homo sapiens
  siRNA target sequence for ZFPM2 (NM_012082.2,1778-1796).
ctagtgtgtcagaaaagat

SEQ ID NO: 113428 - DNA, 19 bp, Homo sapiens
  siRNA target sequence for ZFPM2 (NM_012082.2,1820-1838).
ctggccaaacctccataaa

SEQ ID NO: 113429 - DNA, 19 bp, Homo sapiens
  siRNA target sequence for ZFPM2 (NM_012082.2,1824-1842).
ccaaacctccataaacctt

SEQ ID NO: 113430 - DNA, 19 bp, Homo sapiens
  siRNA target sequence for ZFPM2 (NM_012082.2,1875-1893).
gaatccacttcttcaaaca

SEQ ID NO: 113431 - DNA, 19 bp, Homo sapiens
  siRNA target sequence for ZFPM2 (NM_012082.2,1957-1975).
gacttttccactcaaacta

SEQ ID NO: 113432 - DNA, 19 bp, Homo sapiens
  siRNA target sequence for ZFPM2 (NM_012082.2,2114-2132).
gccggcacgaaacatacat

SEQ ID NO: 113433 - DNA, 19 bp, Homo sapiens
  siRNA target sequence for ZFPM2 (NM_012082.2,2126-2144).
catacatggtccacaaaca

SEQ ID NO: 113434 - DNA, 19 bp, Homo sapiens
  siRNA target sequence for ZFPM2 (NM_012082.2,2130-2148).
catggtccacaaacagtat

SEQ ID NO: 113435 - DNA, 19 bp, Homo sapiens
  siRNA target sequence for ZFPM2 (NM_012082.2,2181-2199).
gaggtctgcttccaacaaa

SEQ ID NO: 113436 - DNA, 19 bp, Homo sapiens
  siRNA target sequence for ZFPM2 (NM_012082.2,2228-2246).
cacgcaagcgcagaaagat

SEQ ID NO: 113437 - DNA, 19 bp, Homo sapiens
  siRNA target sequence for ZFPM2 (NM_012082.2,2230-2248).
cgcaagcgcagaaagatgt

SEQ ID NO: 113438 - DNA, 19 bp, Homo sapiens
  siRNA target sequence for ZFPM2 (NM_012082.2,2231-2249).
gcaagcgcagaaagatgta

SEQ ID NO: 113439 - DNA, 19 bp, Homo sapiens
  siRNA target sequence for ZFPM2 (NM_012082.2,2260-2278).
ctacctgagcaggaacaaa

SEQ ID NO: 113440 - DNA, 19 bp, Homo sapiens
  siRNA target sequence for ZFPM2 (NM_012082.2,2285-2303).
cactggttcagcagagatt

SEQ ID NO: 113441 - DNA, 19 bp, Homo sapiens
  siRNA target sequence for ZFPM2 (NM_012082.2,2308-2326).
gacgtagccaacctcaata

SEQ ID NO: 113442 - DNA, 19 bp, Homo sapiens
  siRNA target sequence for ZFPM2 (NM_012082.2,2314-2332).
gccaacctcaataatcctt

SEQ ID NO: 113443 - DNA, 19 bp, Homo sapiens
  siRNA target sequence for ZFPM2 (NM_012082.2,2373-2391).
ctaccacccaagatgtgat

SEQ ID NO: 113444 - DNA, 19 bp, Homo sapiens
  siRNA target sequence for ZFPM2 (NM_012082.2,2401-2419).
ggaattgtctctaaacact

SEQ ID NO: 113445 - DNA, 19 bp, Homo sapiens
  siRNA target sequence for ZFPM2 (NM_012082.2,2426-2444).
cttctctgacgatcaacaa

SEQ ID NO: 113446 - DNA, 19 bp, Homo sapiens
  siRNA target sequence for ZFPM2 (NM_012082.2,2499-2517).
gatggacgtgcccatagat

SEQ ID NO: 113447 - DNA, 19 bp, Homo sapiens
  siRNA target sequence for ZFPM2 (NM_012082.2,2604-2622).
gatcagtttcaataaggta

SEQ ID NO: 113448 - DNA, 19 bp, Homo sapiens
  siRNA target sequence for ZFPM2 (NM_012082.2,2613-2631).
caataaggtagaaaactat

SEQ ID NO: 113449 - DNA, 19 bp, Homo sapiens
  siRNA target sequence for ZFPM2 (NM_012082.2,2663-2681).
ctgcacatcagcgtaatga

SEQ ID NO: 113450 - DNA, 19 bp, Homo sapiens
  siRNA target sequence for ZFPM2 (NM_012082.2,2689-2707).
caactggacggcaaagtgt

SEQ ID NO: 113451 - DNA, 19 bp, Homo sapiens
  siRNA target sequence for ZFPM2 (NM_012082.2,2745-2763).
cagctacgaaagaagcata

SEQ ID NO: 113452 - DNA, 19 bp, Homo sapiens
  siRNA target sequence for ZFPM2 (NM_012082.2,2801-2819).
cccccaatggaaacttatt

SEQ ID NO: 113453 - DNA, 19 bp, Homo sapiens
  siRNA target sequence for ZFPM2 (NM_012082.2,2803-2821).
cccaatggaaacttatttt

SEQ ID NO: 113454 - DNA, 19 bp, Homo sapiens
  siRNA target sequence for ZFPM2 (NM_012082.2,2842-2860).
caaggcttgaaggtcttta

SEQ ID NO: 113455 - DNA, 19 bp, Homo sapiens
  siRNA target sequence for ZFPM2 (NM_012082.2,2846-2864).
gcttgaaggtctttagtga

SEQ ID NO: 113456 - DNA, 19 bp, Homo sapiens
  siRNA target sequence for ZFPM2 (NM_012082.2,2874-2892).
gctcattgctacaaaagaa

SEQ ID NO: 113457 - DNA, 19 bp, Homo sapiens
  siRNA target sequence for ZFPM2 (NM_012082.2,2980-2998).
ggaatcaagccaagtgatt

SEQ ID NO: 113458 - DNA, 19 bp, Homo sapiens
  siRNA target sequence for ZFPM2 (NM_012082.2,2981-2999).
gaatcaagccaagtgatta

SEQ ID NO: 113459 - DNA, 19 bp, Homo sapiens
  siRNA target sequence for ZFPM2 (NM_012082.2,2985-3003).
caagccaagtgattatatt

SEQ ID NO: 113460 - DNA, 19 bp, Homo sapiens
  siRNA target sequence for ZFPM2 (NM_012082.2,3007-3025).
ggttctcttgtcatccata

SEQ ID NO: 113461 - DNA, 19 bp, Homo sapiens
  siRNA target sequence for ZFPM2 (NM_012082.2,3008-3026).
gttctcttgtcatccataa

SEQ ID NO: 113462 - DNA, 19 bp, Homo sapiens
  siRNA target sequence for ZFPM2 (NM_012082.2,3033-3051).
catcgagcaaagcagaaat

SEQ ID NO: 113463 - DNA, 19 bp, Homo sapiens
  siRNA target sequence for ZFPM2 (NM_012082.2,3097-3115).
gctgcgctgaagaaagatt

SEQ ID NO: 113464 - DNA, 19 bp, Homo sapiens
  siRNA target sequence for ZFPM2 (NM_012082.2,3101-3119).
cgctgaagaaagattctct

SEQ ID NO: 113465 - DNA, 19 bp, Homo sapiens
  siRNA target sequence for ZFPM2 (NM_012082.2,3132-3150).
caaaaatcgaggaatggta

SEQ ID NO: 113466 - DNA, 19 bp, Homo sapiens
  siRNA target sequence for ZFPM2 (NM_012082.2,3139-3157).
cgaggaatggtaatagtga

SEQ ID NO: 113467 - DNA, 19 bp, Homo sapiens
  siRNA target sequence for ZFPM2 (NM_012082.2,3229-3247).
cacgaagacgaccacaaat

SEQ ID NO: 113468 - DNA, 19 bp, Homo sapiens
  siRNA target sequence for ZFPM2 (NM_012082.2,3231-3249).
cgaagacgaccacaaatct

SEQ ID NO: 113469 - DNA, 19 bp, Homo sapiens
  siRNA target sequence for ZFPM2 (NM_012082.2,3316-3334).
gaggaacagttgtctagta

SEQ ID NO: 113470 - DNA, 19 bp, Homo sapiens
  siRNA target sequence for ZFPM2 (NM_012082.2,3318-3336).
ggaacagttgtctagtata

SEQ ID NO: 113471 - DNA, 19 bp, Homo sapiens
  siRNA target sequence for ZFPM2 (NM_012082.2,3327-3345).
gtctagtatagcaaaaggt

SEQ ID NO: 113472 - DNA, 19 bp, Homo sapiens
  siRNA target sequence for ZFPM2 (NM_012082.2,3337-3355).
gcaaaaggtgtgaatggtt

SEQ ID NO: 113473 - DNA, 19 bp, Homo sapiens
  siRNA target sequence for ZFPM2 (NM_012082.2,3365-3383).
ctccaaccagtgggaaata

SEQ ID NO: 113474 - DNA, 19 bp, Homo sapiens
  siRNA target sequence for ZFPM2 (NM_012082.2,3386-3404).
gccggctatgtgatatcca

SEQ ID NO: 113475 - DNA, 19 bp, Homo sapiens
  siRNA target sequence for ZFPM2 (NM_012082.2,3395-3413).
gtgatatccagttcaacaa

SEQ ID NO: 113476 - DNA, 19 bp, Homo sapiens
  siRNA target sequence for NMI (NM_004688.1,430-448).
gttacaagaggctaccaaa

SEQ ID NO: 113477 - DNA, 19 bp, Homo sapiens
  siRNA target sequence for NMI (NM_004688.1,434-452).
caagaggctaccaaagaat

SEQ ID NO: 113478 - DNA, 19 bp, Homo sapiens
  siRNA target sequence for NMI (NM_004688.1,457-475).
gattaaagaggatattcct

SEQ ID NO: 113479 - DNA, 19 bp, Homo sapiens
  siRNA target sequence for NMI (NM_004688.1,556-574).
gagctcgaaagttccttat

SEQ ID NO: 113480 - DNA, 19 bp, Homo sapiens
  siRNA target sequence for NMI (NM_004688.1,558-576).
gctcgaaagttccttatga

SEQ ID NO: 113481 - DNA, 19 bp, Homo sapiens
  siRNA target sequence for NMI (NM_004688.1,561-579).
cgaaagttccttatgagat

SEQ ID NO: 113482 - DNA, 19 bp, Homo sapiens
  siRNA target sequence for NMI (NM_004688.1,562-580).
gaaagttccttatgagata

SEQ ID NO: 113483 - DNA, 19 bp, Homo sapiens
  siRNA target sequence for NMI (NM_004688.1,634-652).
ggtaagcatgagtaaacat

SEQ ID NO: 113484 - DNA, 19 bp, Homo sapiens
  siRNA target sequence for NMI (NM_004688.1,687-705).
cggccaagccagttccatt

SEQ ID NO: 113485 - DNA, 19 bp, Homo sapiens
  siRNA target sequence for NMI (NM_004688.1,691-709).
caagccagttccattaaat

SEQ ID NO: 113486 - DNA, 19 bp, Homo sapiens
  siRNA target sequence for NMI (NM_004688.1,714-732).
gagtcagattccaggttta

SEQ ID NO: 113487 - DNA, 19 bp, Homo sapiens
  siRNA target sequence for NMI (NM_004688.1,724-742).
ccaggtttatgtagaagtt

SEQ ID NO: 113488 - DNA, 19 bp, Homo sapiens
  siRNA target sequence for NMI (NM_004688.1,854-872).
gaccgcgtggactatgaca

SEQ ID NO: 113489 - DNA, 19 bp, Homo sapiens
  siRNA target sequence for NMI (NM_004688.1,912-930).
gagtggctgacaagatttt

SEQ ID NO: 113490 - DNA, 19 bp, Homo sapiens
  siRNA target sequence for NMI (NM_004688.1,941-959).
gaataccctctttatataa

SEQ ID NO: 113491 - DNA, 19 bp, Homo sapiens
  siRNA target sequence for NMI (NM_004688.1,970-988).
ccatagagttactgtttct

SEQ ID NO: 113492 - DNA, 19 bp, Homo sapiens
  siRNA target sequence for NMI (NM_004688.1,1094-1112).
gtggaggatttaattaaca

SEQ ID NO: 113493 - DNA, 19 bp, Homo sapiens
  siRNA target sequence for NMI (NM_004688.1,1148-1166).
gtagatgtggtcaagtgtt

SEQ ID NO: 113494 - DNA, 19 bp, Homo sapiens
  siRNA target sequence for PCAF (NM_003884.3,664-682).
cccgaatcgccgtgaagaa

SEQ ID NO: 113495 - DNA, 19 bp, Homo sapiens
  siRNA target sequence for PCAF (NM_003884.3,665-683).
ccgaatcgccgtgaagaaa

SEQ ID NO: 113496 - DNA, 19 bp, Homo sapiens
  siRNA target sequence for PCAF (NM_003884.3,750-768).
gccgaggagtcttgtaaat

SEQ ID NO: 113497 - DNA, 19 bp, Homo sapiens
  siRNA target sequence for PCAF (NM_003884.3,752-770).
cgaggagtcttgtaaatgt

SEQ ID NO: 113498 - DNA, 19 bp, Homo sapiens
  siRNA target sequence for PCAF (NM_003884.3,811-829).
gagccgacctgcagcaaat

SEQ ID NO: 113499 - DNA, 19 bp, Homo sapiens
  siRNA target sequence for PCAF (NM_003884.3,815-833).
cgacctgcagcaaataatt

SEQ ID NO: 113500 - DNA, 19 bp, Homo sapiens
  siRNA target sequence for PCAF (NM_003884.3,825-843).
caaataattgtcagtctaa

SEQ ID NO: 113501 - DNA, 19 bp, Homo sapiens
  siRNA target sequence for PCAF (NM_003884.3,846-864).
gaatcctgtcggagttgta

SEQ ID NO: 113502 - DNA, 19 bp, Homo sapiens
  siRNA target sequence for PCAF (NM_003884.3,870-888).
gccctagctgctcatgttt

SEQ ID NO: 113503 - DNA, 19 bp, Homo sapiens
  siRNA target sequence for PCAF (NM_003884.3,925-943).
gactcctgggaatagtatt

SEQ ID NO: 113504 - DNA, 19 bp, Homo sapiens
  siRNA target sequence for PCAF (NM_003884.3,929-947).
cctgggaatagtattggat

SEQ ID NO: 113505 - DNA, 19 bp, Homo sapiens
  siRNA target sequence for PCAF (NM_003884.3,944-962).
ggatgtggaatatctcttt

SEQ ID NO: 113506 - DNA, 19 bp, Homo sapiens
  siRNA target sequence for PCAF (NM_003884.3,945-963).
gatgtggaatatctcttta

SEQ ID NO: 113507 - DNA, 19 bp, Homo sapiens
  siRNA target sequence for PCAF (NM_003884.3,988-1006).
cagataccaaacaagttta

SEQ ID NO: 113508 - DNA, 19 bp, Homo sapiens
  siRNA target sequence for PCAF (NM_003884.3,1014-1032).
ctatttaagctcttgagaa

SEQ ID NO: 113509 - DNA, 19 bp, Homo sapiens
  siRNA target sequence for PCAF (NM_003884.3,1022-1040).
gctcttgagaaagtctatt

SEQ ID NO: 113510 - DNA, 19 bp, Homo sapiens
  siRNA target sequence for PCAF (NM_003884.3,1106-1124).
cattgaacagggtgtgaat

SEQ ID NO: 113511 - DNA, 19 bp, Homo sapiens
  siRNA target sequence for PCAF (NM_003884.3,1168-1186).
ggcaaacaatagttgagtt

SEQ ID NO: 113512 - DNA, 19 bp, Homo sapiens
  siRNA target sequence for PCAF (NM_003884.3,1179-1197).
gttgagttggcaaaaatgt

SEQ ID NO: 113513 - DNA, 19 bp, Homo sapiens
  siRNA target sequence for PCAF (NM_003884.3,1199-1217).
cctaaaccgcatcaactat

SEQ ID NO: 113514 - DNA, 19 bp, Homo sapiens
  siRNA target sequence for PCAF (NM_003884.3,1200-1218).
ctaaaccgcatcaactatt

SEQ ID NO: 113515 - DNA, 19 bp, Homo sapiens
  siRNA target sequence for PCAF (NM_003884.3,1275-1293).
ggatacaaagagaactaca

SEQ ID NO: 113516 - DNA, 19 bp, Homo sapiens
  siRNA target sequence for PCAF (NM_003884.3,1364-1382).
gtttgggagaacattgctt

SEQ ID NO: 113517 - DNA, 19 bp, Homo sapiens
  siRNA target sequence for PCAF (NM_003884.3,1383-1401).
cgctcggtcttcactgtta

SEQ ID NO: 113518 - DNA, 19 bp, Homo sapiens
  siRNA target sequence for PCAF (NM_003884.3,1384-1402).
gctcggtcttcactgttat

SEQ ID NO: 113519 - DNA, 19 bp, Homo sapiens
  siRNA target sequence for PCAF (NM_003884.3,1465-1483).
ctctaatcctcactcattt

SEQ ID NO: 113520 - DNA, 19 bp, Homo sapiens
  siRNA target sequence for PCAF (NM_003884.3,1580-1598).
gctaggcatccaaacagtt

SEQ ID NO: 113521 - DNA, 19 bp, Homo sapiens
  siRNA target sequence for PCAF (NM_003884.3,1584-1602).
ggcatccaaacagttatca

SEQ ID NO: 113522 - DNA, 19 bp, Homo sapiens
  siRNA target sequence for PCAF (NM_003884.3,1586-1604).
catccaaacagttatcaat

SEQ ID NO: 113523 - DNA, 19 bp, Homo sapiens
  siRNA target sequence for PCAF (NM_003884.3,1614-1632).
gtggctgggacaatttcat

SEQ ID NO: 113524 - DNA, 19 bp, Homo sapiens
  siRNA target sequence for PCAF (NM_003884.3,1620-1638).
gggacaatttcatacaatt

SEQ ID NO: 113525 - DNA, 19 bp, Homo sapiens
  siRNA target sequence for PCAF (NM_003884.3,1765-1783).
ccaagaaaccccgagttat

SEQ ID NO: 113526 - DNA, 19 bp, Homo sapiens
  siRNA target sequence for PCAF (NM_003884.3,1785-1803).
ggggatattccgatggaat

SEQ ID NO: 113527 - DNA, 19 bp, Homo sapiens
  siRNA target sequence for PCAF (NM_003884.3,1787-1805).
ggatattccgatggaatta

SEQ ID NO: 113528 - DNA, 19 bp, Homo sapiens
  siRNA target sequence for PCAF (NM_003884.3,1788-1806).
gatattccgatggaattaa

SEQ ID NO: 113529 - DNA, 19 bp, Homo sapiens
  siRNA target sequence for PCAF (NM_003884.3,1913-1931).
gcgcaggggtgtaattgaa

SEQ ID NO: 113530 - DNA, 19 bp, Homo sapiens
  siRNA target sequence for PCAF (NM_003884.3,1916-1934).
caggggtgtaattgaattt

SEQ ID NO: 113531 - DNA, 19 bp, Homo sapiens
  siRNA target sequence for PCAF (NM_003884.3,1918-1936).
ggggtgtaattgaatttca

SEQ ID NO: 113532 - DNA, 19 bp, Homo sapiens
  siRNA target sequence for PCAF (NM_003884.3,1995-2013).
ggcctacagaacgttttct

SEQ ID NO: 113533 - DNA, 19 bp, Homo sapiens
  siRNA target sequence for PCAF (NM_003884.3,2024-2042).
gccccgaatgccaaaagaa

SEQ ID NO: 113534 - DNA, 19 bp, Homo sapiens
  siRNA target sequence for PCAF (NM_003884.3,2025-2043).
ccccgaatgccaaaagaat

SEQ ID NO: 113535 - DNA, 19 bp, Homo sapiens
  siRNA target sequence for PCAF (NM_003884.3,2026-2044).
cccgaatgccaaaagaata

SEQ ID NO: 113536 - DNA, 19 bp, Homo sapiens
  siRNA target sequence for PCAF (NM_003884.3,2028-2046).
cgaatgccaaaagaataca

SEQ ID NO: 113537 - DNA, 19 bp, Homo sapiens
  siRNA target sequence for PCAF (NM_003884.3,2029-2047).
gaatgccaaaagaatacat

SEQ ID NO: 113538 - DNA, 19 bp, Homo sapiens
  siRNA target sequence for PCAF (NM_003884.3,2080-2098).
cccttgctttaattaaaga

SEQ ID NO: 113539 - DNA, 19 bp, Homo sapiens
  siRNA target sequence for PCAF (NM_003884.3,2135-2153).
cccatctcaaggattcaca

SEQ ID NO: 113540 - DNA, 19 bp, Homo sapiens
  siRNA target sequence for PCAF (NM_003884.3,2187-2205).
caagtcaagggctatggaa

SEQ ID NO: 113541 - DNA, 19 bp, Homo sapiens
  siRNA target sequence for PCAF (NM_003884.3,2206-2224).
cacacctgatgaatcattt

SEQ ID NO: 113542 - DNA, 19 bp, Homo sapiens
  siRNA target sequence for PCAF (NM_003884.3,2283-2301).
gcaattggatactttaaga

SEQ ID NO: 113543 - DNA, 19 bp, Homo sapiens
  siRNA target sequence for PCAF (NM_003884.3,2284-2302).
caattggatactttaagaa

SEQ ID NO: 113544 - DNA, 19 bp, Homo sapiens
  siRNA target sequence for PCAF (NM_003884.3,2346-2364).
gttggctatatcaaggatt

SEQ ID NO: 113545 - DNA, 19 bp, Homo sapiens
  siRNA target sequence for PCAF (NM_003884.3,2384-2402).
gggatgtgagctaaatcca

SEQ ID NO: 113546 - DNA, 19 bp, Homo sapiens
  siRNA target sequence for PCAF (NM_003884.3,2403-2421).
cggatcccgtacacagaat

SEQ ID NO: 113547 - DNA, 19 bp, Homo sapiens
  siRNA target sequence for PCAF (NM_003884.3,2404-2422).
ggatcccgtacacagaatt

SEQ ID NO: 113548 - DNA, 19 bp, Homo sapiens
  siRNA target sequence for PCAF (NM_003884.3,2405-2423).
gatcccgtacacagaattt

SEQ ID NO: 113549 - DNA, 19 bp, Homo sapiens
  siRNA target sequence for PCAF (NM_003884.3,2408-2426).
cccgtacacagaattttct

SEQ ID NO: 113550 - DNA, 19 bp, Homo sapiens
  siRNA target sequence for PCAF (NM_003884.3,2410-2428).
cgtacacagaattttctgt

SEQ ID NO: 113551 - DNA, 19 bp, Homo sapiens
  siRNA target sequence for PCAF (NM_003884.3,2425-2443).
ctgtcatcattaaaaagca

SEQ ID NO: 113552 - DNA, 19 bp, Homo sapiens
  siRNA target sequence for PCAF (NM_003884.3,2480-2498).
ggcacaaattcgaaaagtt

SEQ ID NO: 113553 - DNA, 19 bp, Homo sapiens
  siRNA target sequence for PCAF (NM_003884.3,2481-2499).
gcacaaattcgaaaagttt

SEQ ID NO: 113554 - DNA, 19 bp, Homo sapiens
  siRNA target sequence for PCAF (NM_003884.3,2482-2500).
cacaaattcgaaaagttta

SEQ ID NO: 113555 - DNA, 19 bp, Homo sapiens
  siRNA target sequence for PCAF (NM_003884.3,2527-2545).
gagttcgacagattcctat

SEQ ID NO: 113556 - DNA, 19 bp, Homo sapiens
  siRNA target sequence for PCAF (NM_003884.3,2551-2569).
gcattcctggaattagaga

SEQ ID NO: 113557 - DNA, 19 bp, Homo sapiens
  siRNA target sequence for PCAF (NM_003884.3,2614-2632).
gagaccctgaccagcttta

SEQ ID NO: 113558 - DNA, 19 bp, Homo sapiens
  siRNA target sequence for PCAF (NM_003884.3,2740-2758).
ggttccccatggatctgaa

SEQ ID NO: 113559 - DNA, 19 bp, Homo sapiens
  siRNA target sequence for PCAF (NM_003884.3,2817-2835).
gacttacagcgagtcttta

SEQ ID NO: 113560 - DNA, 19 bp, Homo sapiens
  siRNA target sequence for PCAF (NM_003884.3,2823-2841).
cagcgagtctttaccaatt

SEQ ID NO: 113561 - DNA, 19 bp, Homo sapiens
  siRNA target sequence for PCAF (NM_003884.3,2826-2844).
cgagtctttaccaattgca

SEQ ID NO: 113562 - DNA, 19 bp, Homo sapiens
  siRNA target sequence for PCAF (NM_003884.3,2827-2845).
gagtctttaccaattgcaa

SEQ ID NO: 113563 - DNA, 19 bp, Homo sapiens
  siRNA target sequence for PIR (NM_003662.1,234-252).
gggtcctccaagaaagtta

SEQ ID NO: 113564 - DNA, 19 bp, Homo sapiens
  siRNA target sequence for PIR (NM_003662.1,317-335).
cagacccgagttaaaaaat

SEQ ID NO: 113565 - DNA, 19 bp, Homo sapiens
  siRNA target sequence for PIR (NM_003662.1,319-337).
gacccgagttaaaaaatct

SEQ ID NO: 113566 - DNA, 19 bp, Homo sapiens
  siRNA target sequence for PIR (NM_003662.1,336-354).
ctggatccgtttttactgt

SEQ ID NO: 113567 - DNA, 19 bp, Homo sapiens
  siRNA target sequence for PIR (NM_003662.1,338-356).
ggatccgtttttactgttt

SEQ ID NO: 113568 - DNA, 19 bp, Homo sapiens
  siRNA target sequence for PIR (NM_003662.1,343-361).
cgtttttactgtttgatga

SEQ ID NO: 113569 - DNA, 19 bp, Homo sapiens
  siRNA target sequence for PIR (NM_003662.1,399-417).
ccacatcgaggttttgaaa

SEQ ID NO: 113570 - DNA, 19 bp, Homo sapiens
  siRNA target sequence for PIR (NM_003662.1,405-423).
cgaggttttgaaacagtat

SEQ ID NO: 113571 - DNA, 19 bp, Homo sapiens
  siRNA target sequence for PIR (NM_003662.1,445-463).
gcatggcccatgaagactt

SEQ ID NO: 113572 - DNA, 19 bp, Homo sapiens
  siRNA target sequence for PIR (NM_003662.1,569-587).
cctacaactgtgggttaat

SEQ ID NO: 113573 - DNA, 19 bp, Homo sapiens
  siRNA target sequence for PIR (NM_003662.1,570-588).
ctacaactgtgggttaatt

SEQ ID NO: 113574 - DNA, 19 bp, Homo sapiens
  siRNA target sequence for PIR (NM_003662.1,573-591).
caactgtgggttaatttga

SEQ ID NO: 113575 - DNA, 19 bp, Homo sapiens
  siRNA target sequence for PIR (NM_003662.1,616-634).
ctcagtaccaggaactgaa

SEQ ID NO: 113576 - DNA, 19 bp, Homo sapiens
  siRNA target sequence for PIR (NM_003662.1,647-665).
ccctaaacccagtaaggat

SEQ ID NO: 113577 - DNA, 19 bp, Homo sapiens
  siRNA target sequence for PIR (NM_003662.1,702-720).
ggaataaagtccaaggttt

SEQ ID NO: 113578 - DNA, 19 bp, Homo sapiens
  siRNA target sequence for PIR (NM_003662.1,955-973).
ctggggagccattaagaga

SEQ ID NO: 113579 - DNA, 19 bp, Homo sapiens
  siRNA target sequence for HDAC11 (NM_024827.1,152-170).
gcaaagtgatcaatttcct

SEQ ID NO: 113580 - DNA, 19 bp, Homo sapiens
  siRNA target sequence for HDAC11 (NM_024827.1,153-171).
caaagtgatcaatttccta

SEQ ID NO: 113581 - DNA, 19 bp, Homo sapiens
  siRNA target sequence for HDAC11 (NM_024827.1,246-264).
gcacacgaggcgctatctt

SEQ ID NO: 113582 - DNA, 19 bp, Homo sapiens
  siRNA target sequence for HDAC11 (NM_024827.1,247-265).
cacacgaggcgctatctta

SEQ ID NO: 113583 - DNA, 19 bp, Homo sapiens
  siRNA target sequence for HDAC11 (NM_024827.1,249-267).
cacgaggcgctatcttaat

SEQ ID NO: 113584 - DNA, 19 bp, Homo sapiens
  siRNA target sequence for HDAC11 (NM_024827.1,251-269).
cgaggcgctatcttaatga

SEQ ID NO: 113585 - DNA, 19 bp, Homo sapiens
  siRNA target sequence for HDAC11 (NM_024827.1,500-518).
cgctcgccatcaagtttct

SEQ ID NO: 113586 - DNA, 19 bp, Homo sapiens
  siRNA target sequence for HDAC11 (NM_024827.1,540-558).
ctccagggctaccatcatt

SEQ ID NO: 113587 - DNA, 19 bp, Homo sapiens
  siRNA target sequence for HDAC11 (NM_024827.1,542-560).
ccagggctaccatcattga

SEQ ID NO: 113588 - DNA, 19 bp, Homo sapiens
  siRNA target sequence for HDAC11 (NM_024827.1,543-561).
cagggctaccatcattgat

SEQ ID NO: 113589 - DNA, 19 bp, Homo sapiens
  siRNA target sequence for HDAC11 (NM_024827.1,545-563).
gggctaccatcattgatct

SEQ ID NO: 113590 - DNA, 19 bp, Homo sapiens
  siRNA target sequence for HDAC11 (NM_024827.1,546-564).
ggctaccatcattgatctt

SEQ ID NO: 113591 - DNA, 19 bp, Homo sapiens
  siRNA target sequence for HDAC11 (NM_024827.1,548-566).
ctaccatcattgatcttga

SEQ ID NO: 113592 - DNA, 19 bp, Homo sapiens
  siRNA target sequence for HDAC11 (NM_024827.1,607-625).
gacaagcgtgtgtacatca

SEQ ID NO: 113593 - DNA, 19 bp, Homo sapiens
  siRNA target sequence for HDAC11 (NM_024827.1,707-725).
gcacagaggatgatgagta

SEQ ID NO: 113594 - DNA, 19 bp, Homo sapiens
  siRNA target sequence for HDAC11 (NM_024827.1,776-794).
ccgacgtggtggtatacaa

SEQ ID NO: 113595 - DNA, 19 bp, Homo sapiens
  siRNA target sequence for HDAC11 (NM_024827.1,777-795).
cgacgtggtggtatacaat

SEQ ID NO: 113596 - DNA, 19 bp, Homo sapiens
  siRNA target sequence for HDAC11 (NM_024827.1,957-975).
cattgctgactccatactt

SEQ ID NO: 113597 - DNA, 19 bp, Homo sapiens
  siRNA target sequence for HDAC3 (NM_003883.2,111-129).
gagctggacaccctatgaa

SEQ ID NO: 113598 - DNA, 19 bp, Homo sapiens
  siRNA target sequence for HDAC3 (NM_003883.2,163-181).
cctgcattacggtctctat

SEQ ID NO: 113599 - DNA, 19 bp, Homo sapiens
  siRNA target sequence for HDAC3 (NM_003883.2,167-185).
cattacggtctctataaga

SEQ ID NO: 113600 - DNA, 19 bp, Homo sapiens
  siRNA target sequence for HDAC3 (NM_003883.2,238-256).
ccactccgaggactacatt

SEQ ID NO: 113601 - DNA, 19 bp, Homo sapiens
  siRNA target sequence for HDAC3 (NM_003883.2,293-311).
ggcttcaccaagagtctta

SEQ ID NO: 113602 - DNA, 19 bp, Homo sapiens
  siRNA target sequence for HDAC3 (NM_003883.2,294-312).
gcttcaccaagagtcttaa

SEQ ID NO: 113603 - DNA, 19 bp, Homo sapiens
  siRNA target sequence for HDAC3 (NM_003883.2,295-313).
cttcaccaagagtcttaat

SEQ ID NO: 113604 - DNA, 19 bp, Homo sapiens
  siRNA target sequence for HDAC3 (NM_003883.2,328-346).
cgatgactgcccagtgttt

SEQ ID NO: 113605 - DNA, 19 bp, Homo sapiens
  siRNA target sequence for HDAC3 (NM_003883.2,361-379).
gttctgctcgcgttacaca

SEQ ID NO: 113606 - DNA, 19 bp, Homo sapiens
  siRNA target sequence for HDAC3 (NM_003883.2,412-430).
caacaagatctgtgatatt

SEQ ID NO: 113607 - DNA, 19 bp, Homo sapiens
  siRNA target sequence for HDAC3 (NM_003883.2,489-507).
gctatgtcaacgacattgt

SEQ ID NO: 113608 - DNA, 19 bp, Homo sapiens
  siRNA target sequence for HDAC3 (NM_003883.2,538-556).
ccctcgggtgctctacatt

SEQ ID NO: 113609 - DNA, 19 bp, Homo sapiens
  siRNA target sequence for HDAC3 (NM_003883.2,540-558).
ctcgggtgctctacattga

SEQ ID NO: 113610 - DNA, 19 bp, Homo sapiens
  siRNA target sequence for HDAC3 (NM_003883.2,632-650).
cacaaatacggaaattact

SEQ ID NO: 113611 - DNA, 19 bp, Homo sapiens
  siRNA target sequence for HDAC3 (NM_003883.2,657-675).
ctggcacaggtgacatgta

SEQ ID NO: 113612 - DNA, 19 bp, Homo sapiens
  siRNA target sequence for HDAC3 (NM_003883.2,663-681).
caggtgacatgtatgaagt

SEQ ID NO: 113613 - DNA, 19 bp, Homo sapiens
  siRNA target sequence for HDAC3 (NM_003883.2,732-750).
gcattgatgaccagagtta

SEQ ID NO: 113614 - DNA, 19 bp, Homo sapiens
  siRNA target sequence for HDAC3 (NM_003883.2,758-776).
cttttccagccggttatca

SEQ ID NO: 113615 - DNA, 19 bp, Homo sapiens
  siRNA target sequence for HDAC3 (NM_003883.2,834-852).
ctctgggctgtgatcgatt

SEQ ID NO: 113616 - DNA, 19 bp, Homo sapiens
  siRNA target sequence for HDAC3 (NM_003883.2,849-867).
gattgggctgctttaacct

SEQ ID NO: 113617 - DNA, 19 bp, Homo sapiens
  siRNA target sequence for HDAC3 (NM_003883.2,881-899).
catggggaatgcgttgaat

SEQ ID NO: 113618 - DNA, 19 bp, Homo sapiens
  siRNA target sequence for HDAC3 (NM_003883.2,887-905).
gaatgcgttgaatatgtca

SEQ ID NO: 113619 - DNA, 19 bp, Homo sapiens
  siRNA target sequence for HDAC3 (NM_003883.2,934-952).
gggtggtggtggttatact

SEQ ID NO: 113620 - DNA, 19 bp, Homo sapiens
  siRNA target sequence for HDAC3 (NM_003883.2,945-963).
gttatactgtccgaaatgt

SEQ ID NO: 113621 - DNA, 19 bp, Homo sapiens
  siRNA target sequence for HDAC3 (NM_003883.2,997-1015).
ggtagaagaggccattagt

SEQ ID NO: 113622 - DNA, 19 bp, Homo sapiens
  siRNA target sequence for HDAC3 (NM_003883.2,1018-1036).
ggagcttccctatagtgaa

SEQ ID NO: 113623 - DNA, 19 bp, Homo sapiens
  siRNA target sequence for HDAC3 (NM_003883.2,1022-1040).
cttccctatagtgaatact

SEQ ID NO: 113624 - DNA, 19 bp, Homo sapiens
  siRNA target sequence for HDAC3 (NM_003883.2,1032-1050).
gtgaatacttcgagtactt

SEQ ID NO: 113625 - DNA, 19 bp, Homo sapiens
  siRNA target sequence for HDAC3 (NM_003883.2,1083-1101).
gcacccgcatcgagaatca

SEQ ID NO: 113626 - DNA, 19 bp, Homo sapiens
  siRNA target sequence for HDAC3 (NM_003883.2,1086-1104).
cccgcatcgagaatcagaa

SEQ ID NO: 113627 - DNA, 19 bp, Homo sapiens
  siRNA target sequence for HDAC3 (NM_003883.2,1126-1144).
gatccgccagacaatcttt

SEQ ID NO: 113628 - DNA, 19 bp, Homo sapiens
  siRNA target sequence for HDAC3 (NM_003883.2,1129-1147).
ccgccagacaatctttgaa

SEQ ID NO: 113629 - DNA, 19 bp, Homo sapiens
  siRNA target sequence for HDAC3 (NM_003883.2,1130-1148).
cgccagacaatctttgaaa

SEQ ID NO: 113630 - DNA, 19 bp, Homo sapiens
  siRNA target sequence for HDAC3 (NM_003883.2,1173-1191).
ctagtgtccagattcatga

SEQ ID NO: 113631 - DNA, 19 bp, Homo sapiens
  siRNA target sequence for HDAC3 (NM_003883.2,1248-1266).
ggggtcctgaggagaacta

SEQ ID NO: 113632 - DNA, 19 bp, Homo sapiens
  siRNA target sequence for HDAC3 (NM_003883.2,1250-1268).
ggtcctgaggagaactata

SEQ ID NO: 113633 - DNA, 19 bp, Homo sapiens
  siRNA target sequence for HDAC3 (NM_003883.2,1275-1293).
cagaggcacccaatgagtt

SEQ ID NO: 113634 - DNA, 19 bp, Homo sapiens
  siRNA target sequence for HDAC3 (NM_003883.2,1279-1297).
ggcacccaatgagttctat

SEQ ID NO: 113635 - DNA, 19 bp, Homo sapiens
  siRNA target sequence for HDAC3 (NM_003883.2,1281-1299).
cacccaatgagttctatga

SEQ ID NO: 113636 - DNA, 19 bp, Homo sapiens
  siRNA target sequence for HDAC3 (NM_003883.2,1301-1319).
ggagaccatgacaatgaca

SEQ ID NO: 113637 - DNA, 19 bp, Homo sapiens
  siRNA target sequence for HDAC4 (NM_006037.2,1292-1310).
ccagcacagaagtgaagat

SEQ ID NO: 113638 - DNA, 19 bp, Homo sapiens
  siRNA target sequence for HDAC4 (NM_006037.2,1348-1366).
ctggcccaccggaatctga

SEQ ID NO: 113639 - DNA, 19 bp, Homo sapiens
  siRNA target sequence for HDAC4 (NM_006037.2,1450-1468).
ggagtgtcgacctcctata

SEQ ID NO: 113640 - DNA, 19 bp, Homo sapiens
  siRNA target sequence for HDAC4 (NM_006037.2,1451-1469).
gagtgtcgacctcctataa

SEQ ID NO: 113641 - DNA, 19 bp, Homo sapiens
  siRNA target sequence for HDAC4 (NM_006037.2,1526-1544).
cttctgaaccgaatctgaa

SEQ ID NO: 113642 - DNA, 19 bp, Homo sapiens
  siRNA target sequence for HDAC4 (NM_006037.2,2750-2768).
cgacaggcctcgtgtatga

SEQ ID NO: 113643 - DNA, 19 bp, Homo sapiens
  siRNA target sequence for HDAC4 (NM_006037.2,3741-3759).
cgcctcggaagcatgtgtt

SEQ ID NO: 113644 - DNA, 19 bp, Homo sapiens
  siRNA target sequence for HDAC4 (NM_006037.2,3808-3826).
cagcaaagacccaatgcaa

SEQ ID NO: 113645 - DNA, 19 bp, Homo sapiens
  siRNA target sequence for HDAC5 (NM_005474.3,341-359).
cgggaaccatccttggaaa

SEQ ID NO: 113646 - DNA, 19 bp, Homo sapiens
  siRNA target sequence for HDAC5 (NM_005474.3,948-966).
gagcccaccatgcttcttt

SEQ ID NO: 113647 - DNA, 19 bp, Homo sapiens
  siRNA target sequence for HDAC5 (NM_005474.3,1003-1021).
gacgcctccctcctacaaa

SEQ ID NO: 113648 - DNA, 19 bp, Homo sapiens
  siRNA target sequence for HDAC5 (NM_005474.3,1100-1118).
cgttcaaggctaaaacaga

SEQ ID NO: 113649 - DNA, 19 bp, Homo sapiens
  siRNA target sequence for HDAC5 (NM_005474.3,1154-1172).
cgcaaggatgggactgtta

SEQ ID NO: 113650 - DNA, 19 bp, Homo sapiens
  siRNA target sequence for HDAC5 (NM_005474.3,1155-1173).
gcaaggatgggactgttat

SEQ ID NO: 113651 - DNA, 19 bp, Homo sapiens
  siRNA target sequence for HDAC5 (NM_005474.3,1221-1239).
gggcgtcgtccgtgtgtaa

SEQ ID NO: 113652 - DNA, 19 bp, Homo sapiens
  siRNA target sequence for HDAC5 (NM_005474.3,1223-1241).
gcgtcgtccgtgtgtaaca

SEQ ID NO: 113653 - DNA, 19 bp, Homo sapiens
  siRNA target sequence for HDAC5 (NM_005474.3,1539-1557).
cgctgaccggcaagttcat

SEQ ID NO: 113654 - DNA, 19 bp, Homo sapiens
  siRNA target sequence for HDAC5 (NM_005474.3,2168-2186).
cctggtgctggatacaaaa

SEQ ID NO: 113655 - DNA, 19 bp, Homo sapiens
  siRNA target sequence for HDAC5 (NM_005474.3,2174-2192).
gctggatacaaaaaactgt

SEQ ID NO: 113656 - DNA, 19 bp, Homo sapiens
  siRNA target sequence for HDAC5 (NM_005474.3,2175-2193).
ctggatacaaaaaactgtt

SEQ ID NO: 113657 - DNA, 19 bp, Homo sapiens
  siRNA target sequence for HDAC5 (NM_005474.3,2502-2520).
gcaaagccacgctagatga

SEQ ID NO: 113658 - DNA, 19 bp, Homo sapiens
  siRNA target sequence for HDAC5 (NM_005474.3,2976-2994).
ctctgcatcgctatgacaa

SEQ ID NO: 113659 - DNA, 19 bp, Homo sapiens
  siRNA target sequence for HDAC5 (NM_005474.3,3047-3065).
ggcgtggggtacaatgtga

SEQ ID NO: 113660 - DNA, 19 bp, Homo sapiens
  siRNA target sequence for HDAC5 (NM_005474.3,3187-3205).
cgggtttgatgctgttgaa

SEQ ID NO: 113661 - DNA, 19 bp, Homo sapiens
  siRNA target sequence for HDAC5 (NM_005474.3,3234-3252).
ctgtcaccgccagatgttt

SEQ ID NO: 113662 - DNA, 19 bp, Homo sapiens
  siRNA target sequence for HDAC5 (NM_005474.3,3432-3450).
cagtggccacgctagagaa

SEQ ID NO: 113663 - DNA, 19 bp, Homo sapiens
  siRNA target sequence for HDAC7A (NM_015401.1,699-717).
cgctataagcccaagaagt

SEQ ID NO: 113664 - DNA, 19 bp, Homo sapiens
  siRNA target sequence for HDAC7A (NM_015401.1,1212-1230).
cactttgcccagtccttaa

SEQ ID NO: 113665 - DNA, 19 bp, Homo sapiens
  siRNA target sequence for HDAC7A (NM_015401.1,1363-1381).
ctcacgtccaggtgatcaa

SEQ ID NO: 113666 - DNA, 19 bp, Homo sapiens
  siRNA target sequence for HDAC7A (NM_015401.1,1365-1383).
cacgtccaggtgatcaaga

SEQ ID NO: 113667 - DNA, 19 bp, Homo sapiens
  siRNA target sequence for HDAC7A (NM_015401.1,1769-1787).
caccacagggctgatctat

SEQ ID NO: 113668 - DNA, 19 bp, Homo sapiens
  siRNA target sequence for HDAC7A (NM_015401.1,2036-2054).
cctggcacagcggatgttt

SEQ ID NO: 113669 - DNA, 19 bp, Homo sapiens
  siRNA target sequence for HDAC7A (NM_015401.1,2040-2058).
gcacagcggatgtttgtga

SEQ ID NO: 113670 - DNA, 19 bp, Homo sapiens
  siRNA target sequence for HDAC7A (NM_015401.1,2041-2059).
cacagcggatgtttgtgat

SEQ ID NO: 113671 - DNA, 19 bp, Homo sapiens
  siRNA target sequence for HDAC7A (NM_015401.1,2152-2170).
ctgacctcgccttcaaagt

SEQ ID NO: 113672 - DNA, 19 bp, Homo sapiens
  siRNA target sequence for HDAC7A (NM_015401.1,2173-2191).
cttctcgtgagctaaagaa

SEQ ID NO: 113673 - DNA, 19 bp, Homo sapiens
  siRNA target sequence for HDAC7A (NM_015401.1,2178-2196).
cgtgagctaaagaatggtt

SEQ ID NO: 113674 - DNA, 19 bp, Homo sapiens
  siRNA target sequence for HDAC7A (NM_015401.1,2179-2197).
gtgagctaaagaatggttt

SEQ ID NO: 113675 - DNA, 19 bp, Homo sapiens
  siRNA target sequence for HDAC7A (NM_015401.1,2467-2485).
gcggtgagggcttcaatgt

SEQ ID NO: 113676 - DNA, 19 bp, Homo sapiens
  siRNA target sequence for HDAC7A (NM_015401.1,2645-2663).
gggtggctaccatgtttct

SEQ ID NO: 113677 - DNA, 19 bp, Homo sapiens
  siRNA target sequence for HDAC7A (NM_015401.1,2654-2672).
ccatgtttctgccaaatgt

SEQ ID NO: 113678 - DNA, 19 bp, Homo sapiens
  siRNA target sequence for HDAC7A (NM_015401.1,2655-2673).
catgtttctgccaaatgtt

SEQ ID NO: 113679 - DNA, 19 bp, Homo sapiens
  siRNA target sequence for HDAC7A (NM_015401.1,2665-2683).
ccaaatgttttggatacat

SEQ ID NO: 113680 - DNA, 19 bp, Homo sapiens
  siRNA target sequence for HDAC7A (NM_015401.1,2951-2969).
gccaggggctgacaaagaa

SEQ ID NO: 113681 - DNA, 19 bp, Homo sapiens
  siRNA target sequence for HDAC8 (NM_018486.1,78-96).
gtcgctggtcccggtttat

SEQ ID NO: 113682 - DNA, 19 bp, Homo sapiens
  siRNA target sequence for HDAC8 (NM_018486.1,80-98).
cgctggtcccggtttatat

SEQ ID NO: 113683 - DNA, 19 bp, Homo sapiens
  siRNA target sequence for HDAC8 (NM_018486.1,82-100).
ctggtcccggtttatatct

SEQ ID NO: 113684 - DNA, 19 bp, Homo sapiens
  siRNA target sequence for HDAC8 (NM_018486.1,84-102).
ggtcccggtttatatctat

SEQ ID NO: 113685 - DNA, 19 bp, Homo sapiens
  siRNA target sequence for HDAC8 (NM_018486.1,85-103).
gtcccggtttatatctata

SEQ ID NO: 113686 - DNA, 19 bp, Homo sapiens
  siRNA target sequence for HDAC8 (NM_018486.1,87-105).
cccggtttatatctatagt

SEQ ID NO: 113687 - DNA, 19 bp, Homo sapiens
  siRNA target sequence for HDAC8 (NM_018486.1,106-124).
cccgagtatgtcagtatgt

SEQ ID NO: 113688 - DNA, 19 bp, Homo sapiens
  siRNA target sequence for HDAC8 (NM_018486.1,108-126).
cgagtatgtcagtatgtgt

SEQ ID NO: 113689 - DNA, 19 bp, Homo sapiens
  siRNA target sequence for HDAC8 (NM_018486.1,154-172).
gccagtatggtgcattctt

SEQ ID NO: 113690 - DNA, 19 bp, Homo sapiens
  siRNA target sequence for HDAC8 (NM_018486.1,158-176).
gtatggtgcattctttgat

SEQ ID NO: 113691 - DNA, 19 bp, Homo sapiens
  siRNA target sequence for HDAC8 (NM_018486.1,162-180).
ggtgcattctttgattgaa

SEQ ID NO: 113692 - DNA, 19 bp, Homo sapiens
  siRNA target sequence for HDAC8 (NM_018486.1,248-266).
ccttccacactgatgctta

SEQ ID NO: 113693 - DNA, 19 bp, Homo sapiens
  siRNA target sequence for HDAC8 (NM_018486.1,249-267).
cttccacactgatgcttat

SEQ ID NO: 113694 - DNA, 19 bp, Homo sapiens
  siRNA target sequence for HDAC8 (NM_018486.1,291-309).
ccaagagggcgatgatgat

SEQ ID NO: 113695 - DNA, 19 bp, Homo sapiens
  siRNA target sequence for HDAC8 (NM_018486.1,372-390).
ctatgcagcagctatagga

SEQ ID NO: 113696 - DNA, 19 bp, Homo sapiens
  siRNA target sequence for HDAC8 (NM_018486.1,517-535).
gtcctgggaatattacgat

SEQ ID NO: 113697 - DNA, 19 bp, Homo sapiens
  siRNA target sequence for HDAC8 (NM_018486.1,533-551).
gattgcgacggaaatttga

SEQ ID NO: 113698 - DNA, 19 bp, Homo sapiens
  siRNA target sequence for HDAC8 (NM_018486.1,542-560).
ggaaatttgagcgtattct

SEQ ID NO: 113699 - DNA, 19 bp, Homo sapiens
  siRNA target sequence for HDAC8 (NM_018486.1,554-572).
gtattctctacgtggattt

SEQ ID NO: 113700 - DNA, 19 bp, Homo sapiens
  siRNA target sequence for HDAC8 (NM_018486.1,595-613).
gtagaagacgcattcagtt

SEQ ID NO: 113701 - DNA, 19 bp, Homo sapiens
  siRNA target sequence for HDAC8 (NM_018486.1,598-616).
gaagacgcattcagtttca

SEQ ID NO: 113702 - DNA, 19 bp, Homo sapiens
  siRNA target sequence for HDAC8 (NM_018486.1,706-724).
ggacggtactacagtgtaa

SEQ ID NO: 113703 - DNA, 19 bp, Homo sapiens
  siRNA target sequence for HDAC8 (NM_018486.1,710-728).
ggtactacagtgtaaatgt

SEQ ID NO: 113704 - DNA, 19 bp, Homo sapiens
  siRNA target sequence for HDAC8 (NM_018486.1,765-783).
ccagatctgtgaaagtgta

SEQ ID NO: 113705 - DNA, 19 bp, Homo sapiens
  siRNA target sequence for HDAC8 (NM_018486.1,768-786).
gatctgtgaaagtgtacta

SEQ ID NO: 113706 - DNA, 19 bp, Homo sapiens
  siRNA target sequence for HDAC8 (NM_018486.1,834-852).
gggagctgacacaatagct

SEQ ID NO: 113707 - DNA, 19 bp, Homo sapiens
  siRNA target sequence for HDAC8 (NM_018486.1,859-877).
cccatgtgctcctttaaca

SEQ ID NO: 113708 - DNA, 19 bp, Homo sapiens
  siRNA target sequence for HDAC8 (NM_018486.1,889-907).
ggaattggcaagtgtctta

SEQ ID NO: 113709 - DNA, 19 bp, Homo sapiens
  siRNA target sequence for HDAC8 (NM_018486.1,890-908).
gaattggcaagtgtcttaa

SEQ ID NO: 113710 - DNA, 19 bp, Homo sapiens
  siRNA target sequence for HDAC8 (NM_018486.1,924-942).
gcagttggcaacactcatt

SEQ ID NO: 113711 - DNA, 19 bp, Homo sapiens
  siRNA target sequence for HDAC8 (NM_018486.1,976-994).
gctcgatgctggacatact

SEQ ID NO: 113712 - DNA, 19 bp, Homo sapiens
  siRNA target sequence for HDAC8 (NM_018486.1,977-995).
ctcgatgctggacatactt

SEQ ID NO: 113713 - DNA, 19 bp, Homo sapiens
  siRNA target sequence for HDAC8 (NM_018486.1,1002-1020).
ggtcatcctagggaaaaca

SEQ ID NO: 113714 - DNA, 19 bp, Homo sapiens
  siRNA target sequence for HDAC8 (NM_018486.1,1005-1023).
catcctagggaaaacacta

SEQ ID NO: 113715 - DNA, 19 bp, Homo sapiens
  siRNA target sequence for HDAC8 (NM_018486.1,1032-1050).
gatcccagatcatgagttt

SEQ ID NO: 113716 - DNA, 19 bp, Homo sapiens
  siRNA target sequence for HDAC8 (NM_018486.1,1058-1076).
catatggtcctgattatgt

SEQ ID NO: 113717 - DNA, 19 bp, Homo sapiens
  siRNA target sequence for HDAC8 (NM_018486.1,1118-1136).
cccaccgaatccaacaaat

SEQ ID NO: 113718 - DNA, 19 bp, Homo sapiens
  siRNA target sequence for HDAC8 (NM_018486.1,1129-1147).
caacaaatcctcaactaca

SEQ ID NO: 113719 - DNA, 19 bp, Homo sapiens
  siRNA target sequence for HDAC9 (NM_014707.1,268-286).
gttgtccgtgagaagcaat

SEQ ID NO: 113720 - DNA, 19 bp, Homo sapiens
  siRNA target sequence for HDAC9 (NM_014707.1,327-345).
ccagaagcagcttctgata

SEQ ID NO: 113721 - DNA, 19 bp, Homo sapiens
  siRNA target sequence for HDAC9 (NM_014707.1,597-615).
gttcctactgagtaaatca

SEQ ID NO: 113722 - DNA, 19 bp, Homo sapiens
  siRNA target sequence for HDAC9 (NM_014707.1,620-638).
cgaaagacactccaactaa

SEQ ID NO: 113723 - DNA, 19 bp, Homo sapiens
  siRNA target sequence for HDAC9 (NM_014707.1,621-639).
gaaagacactccaactaat

SEQ ID NO: 113724 - DNA, 19 bp, Homo sapiens
  siRNA target sequence for HDAC9 (NM_014707.1,625-643).
gacactccaactaatggaa

SEQ ID NO: 113725 - DNA, 19 bp, Homo sapiens
  siRNA target sequence for HDAC9 (NM_014707.1,690-708).
ccaccacacatcattggat

SEQ ID NO: 113726 - DNA, 19 bp, Homo sapiens
  siRNA target sequence for HDAC9 (NM_014707.1,739-757).
ccatcctacaagtacacat

SEQ ID NO: 113727 - DNA, 19 bp, Homo sapiens
  siRNA target sequence for HDAC9 (NM_014707.1,740-758).
catcctacaagtacacatt

SEQ ID NO: 113728 - DNA, 19 bp, Homo sapiens
  siRNA target sequence for HDAC9 (NM_014707.1,825-843).
ggtgcggtccaggttaaaa

SEQ ID NO: 113729 - DNA, 19 bp, Homo sapiens
  siRNA target sequence for HDAC9 (NM_014707.1,881-899).
ggcggaaggatggaaatgt

SEQ ID NO: 113730 - DNA, 19 bp, Homo sapiens
  siRNA target sequence for HDAC9 (NM_014707.1,882-900).
gcggaaggatggaaatgtt

SEQ ID NO: 113731 - DNA, 19 bp, Homo sapiens
  siRNA target sequence for HDAC9 (NM_014707.1,908-926).
cattcaagaagcgaatgtt

SEQ ID NO: 113732 - DNA, 19 bp, Homo sapiens
  siRNA target sequence for HDAC9 (NM_014707.1,993-1011).
gccaactggaagtgttact

SEQ ID NO: 113733 - DNA, 19 bp, Homo sapiens
  siRNA target sequence for HDAC9 (NM_014707.1,998-1016).
ctggaagtgttactgaaaa

SEQ ID NO: 113734 - DNA, 19 bp, Homo sapiens
  siRNA target sequence for HDAC9 (NM_014707.1,1040-1058).
cccctcatgccgagcaaat

SEQ ID NO: 113735 - DNA, 19 bp, Homo sapiens
  siRNA target sequence for HDAC9 (NM_014707.1,1043-1061).
ctcatgccgagcaaatggt

SEQ ID NO: 113736 - DNA, 19 bp, Homo sapiens
  siRNA target sequence for HDAC9 (NM_014707.1,1045-1063).
catgccgagcaaatggttt

SEQ ID NO: 113737 - DNA, 19 bp, Homo sapiens
  siRNA target sequence for HDAC9 (NM_014707.1,1049-1067).
ccgagcaaatggtttcaca

SEQ ID NO: 113738 - DNA, 19 bp, Homo sapiens
  siRNA target sequence for HDAC9 (NM_014707.1,1068-1086).
gcaacgcattctaattcat

SEQ ID NO: 113739 - DNA, 19 bp, Homo sapiens
  siRNA target sequence for HDAC9 (NM_014707.1,1094-1112).
ccatgaacctgctaagtct

SEQ ID NO: 113740 - DNA, 19 bp, Homo sapiens
  siRNA target sequence for HDAC9 (NM_014707.1,1095-1113).
catgaacctgctaagtctt

SEQ ID NO: 113741 - DNA, 19 bp, Homo sapiens
  siRNA target sequence for HDAC9 (NM_014707.1,1098-1116).
gaacctgctaagtctttat

SEQ ID NO: 113742 - DNA, 19 bp, Homo sapiens
  siRNA target sequence for HDAC9 (NM_014707.1,1127-1145).
ctttgcccaacattacctt

SEQ ID NO: 113743 - DNA, 19 bp, Homo sapiens
  siRNA target sequence for HDAC9 (NM_014707.1,1329-1347).
ggctctcctgcagcattta

SEQ ID NO: 113744 - DNA, 19 bp, Homo sapiens
  siRNA target sequence for HDAC9 (NM_014707.1,1338-1356).
gcagcatttattattgaaa

SEQ ID NO: 113745 - DNA, 19 bp, Homo sapiens
  siRNA target sequence for HDAC9 (NM_014707.1,1367-1385).
gacagcaaaagcttcttgt

SEQ ID NO: 113746 - DNA, 19 bp, Homo sapiens
  siRNA target sequence for HDAC9 (NM_014707.1,1417-1435).
cccttggcaacaaaagaga

SEQ ID NO: 113747 - DNA, 19 bp, Homo sapiens
  siRNA target sequence for HDAC9 (NM_014707.1,1527-1545).
ggctcagctggtcattcaa

SEQ ID NO: 113748 - DNA, 19 bp, Homo sapiens
  siRNA target sequence for HDAC9 (NM_014707.1,1602-1620).
gaacaaactgctttcgaaa

SEQ ID NO: 113749 - DNA, 19 bp, Homo sapiens
  siRNA target sequence for HDAC9 (NM_014707.1,1605-1623).
caaactgctttcgaaatct

SEQ ID NO: 113750 - DNA, 19 bp, Homo sapiens
  siRNA target sequence for HDAC9 (NM_014707.1,1846-1864).
ggggagcaggctgctttta

SEQ ID NO: 113751 - DNA, 19 bp, Homo sapiens
  siRNA target sequence for HDAC9 (NM_014707.1,1870-1888).
caggtaataggcaaagatt

SEQ ID NO: 113752 - DNA, 19 bp, Homo sapiens
  siRNA target sequence for HDAC9 (NM_014707.1,1872-1890).
ggtaataggcaaagattta

SEQ ID NO: 113753 - DNA, 19 bp, Homo sapiens
  siRNA target sequence for HDAC9 (NM_014707.1,1895-1913).
caggatttgtaattaaagt

SEQ ID NO: 113754 - DNA, 19 bp, Homo sapiens
  siRNA target sequence for HDAC9 (NM_014707.1,1897-1915).
ggatttgtaattaaagtca

SEQ ID NO: 113755 - DNA, 19 bp, Homo sapiens
  siRNA target sequence for HDAC9 (NM_058176.1,1931-1949).
cggttggcatggatggatt

SEQ ID NO: 113756 - DNA, 19 bp, Homo sapiens
  siRNA target sequence for HDAC9 (NM_058176.1,1932-1950).
ggttggcatggatggatta

SEQ ID NO: 113757 - DNA, 19 bp, Homo sapiens
  siRNA target sequence for HDAC9 (NM_058176.1,2119-2137).
catgctggacgaatacaga

SEQ ID NO: 113758 - DNA, 19 bp, Homo sapiens
  siRNA target sequence for HDAC9 (NM_058176.1,2123-2141).
ctggacgaatacagagtat

SEQ ID NO: 113759 - DNA, 19 bp, Homo sapiens
  siRNA target sequence for HDAC9 (NM_058176.1,2125-2143).
ggacgaatacagagtatct

SEQ ID NO: 113760 - DNA, 19 bp, Homo sapiens
  siRNA target sequence for HDAC9 (NM_058176.1,2145-2163).
gtcacgactgcaagaaact

SEQ ID NO: 113761 - DNA, 19 bp, Homo sapiens
  siRNA target sequence for HDAC9 (NM_058176.1,2184-2202).
gcgaattcaaggtcgaaaa

SEQ ID NO: 113762 - DNA, 19 bp, Homo sapiens
  siRNA target sequence for HDAC9 (NM_058176.1,2302-2320).
ctaggtgatgactctcaaa

SEQ ID NO: 113763 - DNA, 19 bp, Homo sapiens
  siRNA target sequence for HDAC9 (NM_058176.1,2569-2587).
gaccaactaaatataagca

SEQ ID NO: 113764 - DNA, 19 bp, Homo sapiens
  siRNA target sequence for HDAC9 (NM_058176.1,2585-2603).
gcaagatattgattgtaga

SEQ ID NO: 113765 - DNA, 19 bp, Homo sapiens
  siRNA target sequence for HDAC9 (NM_058176.1,2631-2649).
ccagcaggccttttatgct

SEQ ID NO: 113766 - DNA, 19 bp, Homo sapiens
  siRNA target sequence for HDAC9 (NM_058176.1,2655-2673).
cagcatcctgtacatttca

SEQ ID NO: 113767 - DNA, 19 bp, Homo sapiens
  siRNA target sequence for HDAC9 (NM_058176.1,2672-2690).
cactccatcgctatgatga

SEQ ID NO: 113768 - DNA, 19 bp, Homo sapiens
  siRNA target sequence for HDAC9 (NM_058176.1,2739-2757).
ccttggagaagggtacaat

SEQ ID NO: 113769 - DNA, 19 bp, Homo sapiens
  siRNA target sequence for HDAC9 (NM_058176.1,2740-2758).
cttggagaagggtacaata

SEQ ID NO: 113770 - DNA, 19 bp, Homo sapiens
  siRNA target sequence for HDAC9 (NM_058176.1,2744-2762).
gagaagggtacaatataaa

SEQ ID NO: 113771 - DNA, 19 bp, Homo sapiens
  siRNA target sequence for HDAC9 (NM_058176.1,2746-2764).
gaagggtacaatataaata

SEQ ID NO: 113772 - DNA, 19 bp, Homo sapiens
  siRNA target sequence for HDAC9 (NM_058176.1,2838-2856).
gcctgtggccaaagagttt

SEQ ID NO: 113773 - DNA, 19 bp, Homo sapiens
  siRNA target sequence for HDAC9 (NM_058176.1,2915-2933).
ctctaggagggtacaaagt

SEQ ID NO: 113774 - DNA, 19 bp, Homo sapiens
  siRNA target sequence for HDAC9 (NM_058176.1,2917-2935).
ctaggagggtacaaagtga

SEQ ID NO: 113775 - DNA, 19 bp, Homo sapiens
  siRNA target sequence for HDAC9 (NM_058176.1,2928-2946).
caaagtgacggcaaaatgt

SEQ ID NO: 113776 - DNA, 19 bp, Homo sapiens
  siRNA target sequence for HDAC9 (NM_058176.1,2950-2968).
ggtcatttgacgaagcaat

SEQ ID NO: 113777 - DNA, 19 bp, Homo sapiens
  siRNA target sequence for HDAC9 (NM_058176.1,2960-2978).
cgaagcaattgatgacatt

SEQ ID NO: 113778 - DNA, 19 bp, Homo sapiens
  siRNA target sequence for HDAC9 (NM_058176.1,3106-3124).
caccaaagcccgaatatga

SEQ ID NO: 113779 - DNA, 19 bp, Homo sapiens
  siRNA target sequence for HDAC9 (NM_058176.1,3108-3126).
ccaaagcccgaatatgaat

SEQ ID NO: 113780 - DNA, 19 bp, Homo sapiens
  siRNA target sequence for HDAC9 (NM_058177.1,2720-2738).
caaatgaggttcggtttat

SEQ ID NO: 113781 - DNA, 19 bp, Homo sapiens
  siRNA target sequence for HDAC9 (NM_058177.1,2725-2743).
gaggttcggtttatttctt

SEQ ID NO: 113782 - DNA, 19 bp, Homo sapiens
  siRNA target sequence for HDAC9 (NM_058177.1,2741-2759).
ctttagagccccactttta

SEQ ID NO: 113783 - DNA, 19 bp, Homo sapiens
  siRNA target sequence for MYBBP1A (NM_014520.1,95-113).
gaccgctatggcctattga

SEQ ID NO: 113784 - DNA, 19 bp, Homo sapiens
  siRNA target sequence for MYBBP1A (NM_014520.1,219-237).
cgaaggggtccgagatgaa

SEQ ID NO: 113785 - DNA, 19 bp, Homo sapiens
  siRNA target sequence for MYBBP1A (NM_014520.1,220-238).
gaaggggtccgagatgaaa

SEQ ID NO: 113786 - DNA, 19 bp, Homo sapiens
  siRNA target sequence for MYBBP1A (NM_014520.1,223-241).
ggggtccgagatgaaatat

SEQ ID NO: 113787 - DNA, 19 bp, Homo sapiens
  siRNA target sequence for MYBBP1A (NM_014520.1,242-260).
gccctgaagcgtctaatca

SEQ ID NO: 113788 - DNA, 19 bp, Homo sapiens
  siRNA target sequence for MYBBP1A (NM_014520.1,268-286).
cggggtcgggcgagaaaca

SEQ ID NO: 113789 - DNA, 19 bp, Homo sapiens
  siRNA target sequence for MYBBP1A (NM_014520.1,315-333).
cacagctgttacagtcttt

SEQ ID NO: 113790 - DNA, 19 bp, Homo sapiens
  siRNA target sequence for MYBBP1A (NM_014520.1,441-459).
gagtgctcgccctctttca

SEQ ID NO: 113791 - DNA, 19 bp, Homo sapiens
  siRNA target sequence for MYBBP1A (NM_014520.1,443-461).
gtgctcgccctctttcagt

SEQ ID NO: 113792 - DNA, 19 bp, Homo sapiens
  siRNA target sequence for MYBBP1A (NM_014520.1,519-537).
ccctggcccagtaccaaaa

SEQ ID NO: 113793 - DNA, 19 bp, Homo sapiens
  siRNA target sequence for MYBBP1A (NM_014520.1,625-643).
cctcaaagccgacttgaat

SEQ ID NO: 113794 - DNA, 19 bp, Homo sapiens
  siRNA target sequence for MYBBP1A (NM_014520.1,635-653).
gacttgaatataatactca

SEQ ID NO: 113795 - DNA, 19 bp, Homo sapiens
  siRNA target sequence for MYBBP1A (NM_014520.1,722-740).
gtgggatccgtgaacctat

SEQ ID NO: 113796 - DNA, 19 bp, Homo sapiens
  siRNA target sequence for MYBBP1A (NM_014520.1,725-743).
ggatccgtgaacctattct

SEQ ID NO: 113797 - DNA, 19 bp, Homo sapiens
  siRNA target sequence for MYBBP1A (NM_014520.1,1049-1067).
ctcccaaagcagttcaagt

SEQ ID NO: 113798 - DNA, 19 bp, Homo sapiens
  siRNA target sequence for MYBBP1A (NM_014520.1,1051-1069).
cccaaagcagttcaagttt

SEQ ID NO: 113799 - DNA, 19 bp, Homo sapiens
  siRNA target sequence for MYBBP1A (NM_014520.1,1071-1089).
ccccagagatggacgatta

SEQ ID NO: 113800 - DNA, 19 bp, Homo sapiens
  siRNA target sequence for MYBBP1A (NM_014520.1,1074-1092).
cagagatggacgattacgt

SEQ ID NO: 113801 - DNA, 19 bp, Homo sapiens
  siRNA target sequence for MYBBP1A (NM_014520.1,1358-1376).
gtgttccggctgaggaaat

SEQ ID NO: 113802 - DNA, 19 bp, Homo sapiens
  siRNA target sequence for MYBBP1A (NM_014520.1,1448-1466).
gtggccaggttttgtttgt

SEQ ID NO: 113803 - DNA, 19 bp, Homo sapiens
  siRNA target sequence for MYBBP1A (NM_014520.1,2073-2091).
cgcgtgccctgcagctaat

SEQ ID NO: 113804 - DNA, 19 bp, Homo sapiens
  siRNA target sequence for MYBBP1A (NM_014520.1,2074-2092).
gcgtgccctgcagctaatt

SEQ ID NO: 113805 - DNA, 19 bp, Homo sapiens
  siRNA target sequence for MYBBP1A (NM_014520.1,2076-2094).
gtgccctgcagctaattct

SEQ ID NO: 113806 - DNA, 19 bp, Homo sapiens
  siRNA target sequence for MYBBP1A (NM_014520.1,3066-3084).
ccatcctggtccagcatat

SEQ ID NO: 113807 - DNA, 19 bp, Homo sapiens
  siRNA target sequence for MYBBP1A (NM_014520.1,3507-3525).
cccagagccccatcagtaa

SEQ ID NO: 113808 - DNA, 19 bp, Homo sapiens
  siRNA target sequence for MYBBP1A (NM_014520.1,3556-3574).
gacgaagaagcgcaagaaa

SEQ ID NO: 113809 - DNA, 19 bp, Homo sapiens
  siRNA target sequence for NFKBIA (NM_020529.1,357-375).
cactgaccatggaagtgat

SEQ ID NO: 113810 - DNA, 19 bp, Homo sapiens
  siRNA target sequence for NFKBIA (NM_020529.1,512-530).
cgagactttcgaggaaata

SEQ ID NO: 113811 - DNA, 19 bp, Homo sapiens
  siRNA target sequence for NFKBIA (NM_020529.1,643-661).
ccacacgtgtctacactta

SEQ ID NO: 113812 - DNA, 19 bp, Homo sapiens
  siRNA target sequence for NFKBIA (NM_020529.1,684-702).
gcatcgtggagcttttggt

SEQ ID NO: 113813 - DNA, 19 bp, Homo sapiens
  siRNA target sequence for NFKBIA (NM_020529.1,706-724).
cttgggtgctgatgtcaat

SEQ ID NO: 113814 - DNA, 19 bp, Homo sapiens
  siRNA target sequence for NFKBIA (NM_020529.1,763-781).
cgcagtggacctgcaaaat

SEQ ID NO: 113815 - DNA, 19 bp, Homo sapiens
  siRNA target sequence for NFKBIA (NM_020529.1,901-919).
gggccagctgacactagaa

SEQ ID NO: 113816 - DNA, 19 bp, Homo sapiens
  siRNA target sequence for NFKBIA (NM_020529.1,902-920).
ggccagctgacactagaaa

SEQ ID NO: 113817 - DNA, 19 bp, Homo sapiens
  siRNA target sequence for NFKBIA (NM_020529.1,907-925).
gctgacactagaaaacctt

SEQ ID NO: 113818 - DNA, 19 bp, Homo sapiens
  siRNA target sequence for NFKBIA (NM_020529.1,1006-1024).
ctatgatgactgtgtgttt

SEQ ID NO: 113819 - DNA, 19 bp, Homo sapiens
  siRNA target sequence for NFKBIA (NM_020529.1,1028-1046).
ggccagcgtctgacgttat

SEQ ID NO: 113820 - DNA, 19 bp, Homo sapiens
  siRNA target sequence for RNF19 (NM_015435.3,721-739).
gccttttgcggcattctaa

SEQ ID NO: 113821 - DNA, 19 bp, Homo sapiens
  siRNA target sequence for RNF19 (NM_015435.3,722-740).
ccttttgcggcattctaaa

SEQ ID NO: 113822 - DNA, 19 bp, Homo sapiens
  siRNA target sequence for RNF19 (NM_015435.3,730-748).
ggcattctaaagacagatt

SEQ ID NO: 113823 - DNA, 19 bp, Homo sapiens
  siRNA target sequence for RNF19 (NM_015435.3,731-749).
gcattctaaagacagattt

SEQ ID NO: 113824 - DNA, 19 bp, Homo sapiens
  siRNA target sequence for RNF19 (NM_015435.3,741-759).
gacagatttcctgatataa

SEQ ID NO: 113825 - DNA, 19 bp, Homo sapiens
  siRNA target sequence for RNF19 (NM_015435.3,785-803).
ggattgcttacgacaatat

SEQ ID NO: 113826 - DNA, 19 bp, Homo sapiens
  siRNA target sequence for RNF19 (NM_015435.3,861-879).
cggtttaatccccatgata

SEQ ID NO: 113827 - DNA, 19 bp, Homo sapiens
  siRNA target sequence for RNF19 (NM_015435.3,872-890).
ccatgatattcgcttgata

SEQ ID NO: 113828 - DNA, 19 bp, Homo sapiens
  siRNA target sequence for RNF19 (NM_015435.3,873-891).
catgatattcgcttgatat

SEQ ID NO: 113829 - DNA, 19 bp, Homo sapiens
  siRNA target sequence for RNF19 (NM_015435.3,876-894).
gatattcgcttgatattaa

SEQ ID NO: 113830 - DNA, 19 bp, Homo sapiens
  siRNA target sequence for RNF19 (NM_015435.3,884-902).
cttgatattaagtgatgat

SEQ ID NO: 113831 - DNA, 19 bp, Homo sapiens
  siRNA target sequence for RNF19 (NM_015435.3,948-966).
gttgcagatcctgattgta

SEQ ID NO: 113832 - DNA, 19 bp, Homo sapiens
  siRNA target sequence for RNF19 (NM_015435.3,990-1008).
ggatatgctgtgatagcat

SEQ ID NO: 113833 - DNA, 19 bp, Homo sapiens
  siRNA target sequence for RNF19 (NM_015435.3,991-1009).
gatatgctgtgatagcatt

SEQ ID NO: 113834 - DNA, 19 bp, Homo sapiens
  siRNA target sequence for RNF19 (NM_015435.3,996-1014).
gctgtgatagcatttggat

SEQ ID NO: 113835 - DNA, 19 bp, Homo sapiens
  siRNA target sequence for RNF19 (NM_015435.3,1015-1033).
gtgccagctgtccaaaatt

SEQ ID NO: 113836 - DNA, 19 bp, Homo sapiens
  siRNA target sequence for RNF19 (NM_015435.3,1017-1035).
gccagctgtccaaaattaa

SEQ ID NO: 113837 - DNA, 19 bp, Homo sapiens
  siRNA target sequence for RNF19 (NM_015435.3,1049-1067).
gggctgtggaacagagttt

SEQ ID NO: 113838 - DNA, 19 bp, Homo sapiens
  siRNA target sequence for RNF19 (NM_015435.3,1129-1147).
gagcccagagcttacgttt

SEQ ID NO: 113839 - DNA, 19 bp, Homo sapiens
  siRNA target sequence for RNF19 (NM_015435.3,1133-1151).
ccagagcttacgtttgaga

SEQ ID NO: 113840 - DNA, 19 bp, Homo sapiens
  siRNA target sequence for RNF19 (NM_015435.3,1139-1157).
cttacgtttgagaactata

SEQ ID NO: 113841 - DNA, 19 bp, Homo sapiens
  siRNA target sequence for RNF19 (NM_015435.3,1143-1161).
cgtttgagaactatacgtt

SEQ ID NO: 113842 - DNA, 19 bp, Homo sapiens
  siRNA target sequence for RNF19 (NM_015435.3,1158-1176).
cgttcttcatccattagtt

SEQ ID NO: 113843 - DNA, 19 bp, Homo sapiens
  siRNA target sequence for RNF19 (NM_015435.3,1159-1177).
gttcttcatccattagtta

SEQ ID NO: 113844 - DNA, 19 bp, Homo sapiens
  siRNA target sequence for RNF19 (NM_015435.3,1165-1183).
catccattagttatagtca

SEQ ID NO: 113845 - DNA, 19 bp, Homo sapiens
  siRNA target sequence for RNF19 (NM_015435.3,1222-1240).
cacgatgtgctgcttatat

SEQ ID NO: 113846 - DNA, 19 bp, Homo sapiens
  siRNA target sequence for RNF19 (NM_015435.3,1345-1363).
gtccatcaggatgtacttt

SEQ ID NO: 113847 - DNA, 19 bp, Homo sapiens
  siRNA target sequence for RNF19 (NM_015435.3,1347-1365).
ccatcaggatgtacttttt

SEQ ID NO: 113848 - DNA, 19 bp, Homo sapiens
  siRNA target sequence for RNF19 (NM_015435.3,1431-1449).
cctgtcggaatcgctttaa

SEQ ID NO: 113849 - DNA, 19 bp, Homo sapiens
  siRNA target sequence for RNF19 (NM_015435.3,1432-1450).
ctgtcggaatcgctttaat

SEQ ID NO: 113850 - DNA, 19 bp, Homo sapiens
  siRNA target sequence for RNF19 (NM_015435.3,1436-1454).
cggaatcgctttaatagct

SEQ ID NO: 113851 - DNA, 19 bp, Homo sapiens
  siRNA target sequence for RNF19 (NM_015435.3,1461-1479).
gctattcctgcaatgatta

SEQ ID NO: 113852 - DNA, 19 bp, Homo sapiens
  siRNA target sequence for RNF19 (NM_015435.3,1508-1526).
gattcacaatcgctatgaa

SEQ ID NO: 113853 - DNA, 19 bp, Homo sapiens
  siRNA target sequence for RNF19 (NM_015435.3,1572-1590).
ggtgtaacgttgtctgtaa

SEQ ID NO: 113854 - DNA, 19 bp, Homo sapiens
  siRNA target sequence for RNF19 (NM_015435.3,1573-1591).
gtgtaacgttgtctgtaat

SEQ ID NO: 113855 - DNA, 19 bp, Homo sapiens
  siRNA target sequence for RNF19 (NM_015435.3,1623-1641).
ggtatcggtgttcctatta

SEQ ID NO: 113856 - DNA, 19 bp, Homo sapiens
  siRNA target sequence for RNF19 (NM_015435.3,1624-1642).
gtatcggtgttcctattat

SEQ ID NO: 113857 - DNA, 19 bp, Homo sapiens
  siRNA target sequence for RNF19 (NM_015435.3,1628-1646).
cggtgttcctattatgtta

SEQ ID NO: 113858 - DNA, 19 bp, Homo sapiens
  siRNA target sequence for RNF19 (NM_015435.3,1632-1650).
gttcctattatgttagctt

SEQ ID NO: 113859 - DNA, 19 bp, Homo sapiens
  siRNA target sequence for RNF19 (NM_015435.3,1655-1673).
ctatggcgtagttccaatt

SEQ ID NO: 113860 - DNA, 19 bp, Homo sapiens
  siRNA target sequence for RNF19 (NM_015435.3,1660-1678).
gcgtagttccaatttctct

SEQ ID NO: 113861 - DNA, 19 bp, Homo sapiens
  siRNA target sequence for RNF19 (NM_015435.3,1661-1679).
cgtagttccaatttctctt

SEQ ID NO: 113862 - DNA, 19 bp, Homo sapiens
  siRNA target sequence for RNF19 (NM_015435.3,1845-1863).
gggctgactggcagtttga

SEQ ID NO: 113863 - DNA, 19 bp, Homo sapiens
  siRNA target sequence for RNF19 (NM_015435.3,1847-1865).
gctgactggcagtttgagt

SEQ ID NO: 113864 - DNA, 19 bp, Homo sapiens
  siRNA target sequence for RNF19 (NM_015435.3,1873-1891).
gaagccacatggatcgaat

SEQ ID NO: 113865 - DNA, 19 bp, Homo sapiens
  siRNA target sequence for RNF19 (NM_015435.3,1877-1895).
ccacatggatcgaatagga

SEQ ID NO: 113866 - DNA, 19 bp, Homo sapiens
  siRNA target sequence for RNF19 (NM_015435.3,1902-1920).
cgagacaacctgagtgaaa

SEQ ID NO: 113867 - DNA, 19 bp, Homo sapiens
  siRNA target sequence for RNF19 (NM_015435.3,1938-1956).
ctagctggagccagtataa

SEQ ID NO: 113868 - DNA, 19 bp, Homo sapiens
  siRNA target sequence for RNF19 (NM_015435.3,1971-1989).
ggaagtgccatggtaaact

SEQ ID NO: 113869 - DNA, 19 bp, Homo sapiens
  siRNA target sequence for RNF19 (NM_015435.3,2003-2021).
ggaagtacaagcagatgta

SEQ ID NO: 113870 - DNA, 19 bp, Homo sapiens
  siRNA target sequence for RNF19 (NM_015435.3,2036-2054).
cagtctaagtggagaatct

SEQ ID NO: 113871 - DNA, 19 bp, Homo sapiens
  siRNA target sequence for RNF19 (NM_015435.3,2063-2081).
cagcttgggaacagttagt

SEQ ID NO: 113872 - DNA, 19 bp, Homo sapiens
  siRNA target sequence for RNF19 (NM_015435.3,2069-2087).
gggaacagttagtgataat

SEQ ID NO: 113873 - DNA, 19 bp, Homo sapiens
  siRNA target sequence for RNF19 (NM_015435.3,2163-2181).
gtgcaagtagatattgagt

SEQ ID NO: 113874 - DNA, 19 bp, Homo sapiens
  siRNA target sequence for RNF19 (NM_015435.3,2269-2287).
gtggcttgcctgaaggtaa

SEQ ID NO: 113875 - DNA, 19 bp, Homo sapiens
  siRNA target sequence for RNF19 (NM_015435.3,2273-2291).
cttgcctgaaggtaaatct

SEQ ID NO: 113876 - DNA, 19 bp, Homo sapiens
  siRNA target sequence for RNF19 (NM_015435.3,2276-2294).
gcctgaaggtaaatctagt

SEQ ID NO: 113877 - DNA, 19 bp, Homo sapiens
  siRNA target sequence for RNF19 (NM_015435.3,2396-2414).
ggatgcacagttgttagaa

SEQ ID NO: 113878 - DNA, 19 bp, Homo sapiens
  siRNA target sequence for RNF19 (NM_015435.3,2401-2419).
cacagttgttagaacaaca

SEQ ID NO: 113879 - DNA, 19 bp, Homo sapiens
  siRNA target sequence for RNF19 (NM_015435.3,2415-2433).
caacaaagcacgaactcaa

SEQ ID NO: 113880 - DNA, 19 bp, Homo sapiens
  siRNA target sequence for RNF19 (NM_015435.3,2422-2440).
gcacgaactcaagtgaatt

SEQ ID NO: 113881 - DNA, 19 bp, Homo sapiens
  siRNA target sequence for RNF19 (NM_015435.3,2425-2443).
cgaactcaagtgaatttga

SEQ ID NO: 113882 - DNA, 19 bp, Homo sapiens
  siRNA target sequence for RNF19 (NM_015435.3,2468-2486).
gccttctgtagcagattct

SEQ ID NO: 113883 - DNA, 19 bp, Homo sapiens
  siRNA target sequence for RNF19 (NM_015435.3,2481-2499).
gattctcactctagtcatt

SEQ ID NO: 113884 - DNA, 19 bp, Homo sapiens
  siRNA target sequence for RNF19 (NM_015435.3,2526-2544).
gaaagcatgaaaacttctt

SEQ ID NO: 113885 - DNA, 19 bp, Homo sapiens
  siRNA target sequence for RNF19 (NM_015435.3,2531-2549).
catgaaaacttcttgtagt

SEQ ID NO: 113886 - DNA, 19 bp, Homo sapiens
  siRNA target sequence for RNF19 (NM_015435.3,2534-2552).
gaaaacttcttgtagtcat

SEQ ID NO: 113887 - DNA, 19 bp, Homo sapiens
  siRNA target sequence for RNF19 (NM_015435.3,2553-2571).
ggttccagtgattatcaca

SEQ ID NO: 113888 - DNA, 19 bp, Homo sapiens
  siRNA target sequence for RNF19 (NM_015435.3,2570-2588).
cacccgctttgctactgtt

SEQ ID NO: 113889 - DNA, 19 bp, Homo sapiens
  siRNA target sequence for RNF19 (NM_015435.3,2574-2592).
cgctttgctactgttaaca

SEQ ID NO: 113890 - DNA, 19 bp, Homo sapiens
  siRNA target sequence for RNF19 (NM_015435.3,2630-2648).
cccacatcagtgtagcatt

SEQ ID NO: 113891 - DNA, 19 bp, Homo sapiens
  siRNA target sequence for RNF19 (NM_015435.3,2631-2649).
ccacatcagtgtagcattt

SEQ ID NO: 113892 - DNA, 19 bp, Homo sapiens
  siRNA target sequence for RNF19 (NM_015435.3,2682-2700).
gtttcacagttgaatcata

SEQ ID NO: 113893 - DNA, 19 bp, Homo sapiens
  siRNA target sequence for RNF19 (NM_015435.3,2788-2806).
cacatcagacaatggaatt

SEQ ID NO: 113894 - DNA, 19 bp, Homo sapiens
  siRNA target sequence for RNF19 (NM_015435.3,2801-2819).
ggaattaaaagttgcaatt

SEQ ID NO: 113895 - DNA, 19 bp, Homo sapiens
  siRNA target sequence for RNF19 (NM_015435.3,2811-2829).
gttgcaattcagactgaaa

SEQ ID NO: 113896 - DNA, 19 bp, Homo sapiens
  siRNA target sequence for VHL (NM_000551.2,637-655).
gttgacggacagcctattt

SEQ ID NO: 113897 - DNA, 19 bp, Homo sapiens
  siRNA target sequence for VHL (NM_000551.2,717-735).
cctagtcaagcctgagaat

SEQ ID NO: 113898 - DNA, 19 bp, Homo sapiens
  siRNA target sequence for VHL (NM_000551.2,718-736).
ctagtcaagcctgagaatt

SEQ ID NO: 113899 - DNA, 19 bp, Homo sapiens
  siRNA target sequence for VHL (NM_000551.2,758-776).
ggtcgctctacgaagatct

SEQ ID NO: 113900 - DNA, 19 bp, Homo sapiens
  siRNA target sequence for VHL (NM_000551.2,822-840).
ggagcgcattgcacatcaa

SEQ ID NO: 113901 - DNA, 19 bp, Homo sapiens
  siRNA target sequence for VHL (NM_198156.1,540-558).
ccacagctaccgagtgtat

SEQ ID NO: 113902 - DNA, 19 bp, Homo sapiens
  siRNA target sequence for VHL (NM_198156.1,541-559).
cacagctaccgagtgtata

SEQ ID NO: 113903 - DNA, 19 bp, Homo sapiens
  siRNA target sequence for VHL (NM_198156.1,543-561).
cagctaccgagtgtatact

SEQ ID NO: 113904 - DNA, 19 bp, Homo sapiens
  siRNA target sequence for VHL (NM_198156.1,545-563).
gctaccgagtgtatactct

SEQ ID NO: 113905 - DNA, 19 bp, Homo sapiens
  siRNA target sequence for GSN (NM_000177.3,286-304).
ccgtgcccaccaaccttta

SEQ ID NO: 113906 - DNA, 19 bp, Homo sapiens
  siRNA target sequence for GSN (NM_000177.3,287-305).
cgtgcccaccaacctttat

SEQ ID NO: 113907 - DNA, 19 bp, Homo sapiens
  siRNA target sequence for GSN (NM_000177.3,290-308).
gcccaccaacctttatgga

SEQ ID NO: 113908 - DNA, 19 bp, Homo sapiens
  siRNA target sequence for GSN (NM_000177.3,535-553).
ctggcctgaagtacaagaa

SEQ ID NO: 113909 - DNA, 19 bp, Homo sapiens
  siRNA target sequence for GSN (NM_000177.3,740-758).
cagcaatcggtatgaaaga

SEQ ID NO: 113910 - DNA, 19 bp, Homo sapiens
  siRNA target sequence for GSN (NM_000177.3,742-760).
gcaatcggtatgaaagact

SEQ ID NO: 113911 - DNA, 19 bp, Homo sapiens
  siRNA target sequence for GSN (NM_000177.3,1046-1064).
cctggaccacggcaaagat

SEQ ID NO: 113912 - DNA, 19 bp, Homo sapiens
  siRNA target sequence for GSN (NM_000177.3,1424-1442).
cgtggaccctgccacatat

SEQ ID NO: 113913 - DNA, 19 bp, Homo sapiens
  siRNA target sequence for GSN (NM_000177.3,1435-1453).
ccacatatggacagttcta

SEQ ID NO: 113914 - DNA, 19 bp, Homo sapiens
  siRNA target sequence for GSN (NM_000177.3,1436-1454).
cacatatggacagttctat

SEQ ID NO: 113915 - DNA, 19 bp, Homo sapiens
  siRNA target sequence for GSN (NM_000177.3,1456-1474).
gaggcgacagctacatcat

SEQ ID NO: 113916 - DNA, 19 bp, Homo sapiens
  siRNA target sequence for GSN (NM_000177.3,1461-1479).
gacagctacatcattctgt

SEQ ID NO: 113917 - DNA, 19 bp, Homo sapiens
  siRNA target sequence for GSN (NM_000177.3,1503-1521).
caggggcagataatctata

SEQ ID NO: 113918 - DNA, 19 bp, Homo sapiens
  siRNA target sequence for GSN (NM_000177.3,1814-1832).
ctccaacgatgcctttgtt

SEQ ID NO: 113919 - DNA, 19 bp, Homo sapiens
  siRNA target sequence for GSN (NM_000177.3,1816-1834).
ccaacgatgcctttgttct

SEQ ID NO: 113920 - DNA, 19 bp, Homo sapiens
  siRNA target sequence for GSN (NM_000177.3,1820-1838).
cgatgcctttgttctgaaa

SEQ ID NO: 113921 - DNA, 19 bp, Homo sapiens
  siRNA target sequence for GSN (NM_000177.3,1821-1839).
gatgcctttgttctgaaaa

SEQ ID NO: 113922 - DNA, 19 bp, Homo sapiens
  siRNA target sequence for GSN (NM_000177.3,2176-2194).
gggttggaaaggattctca

SEQ ID NO: 113923 - DNA, 19 bp, Homo sapiens
  siRNA target sequence for GSN (NM_000177.3,2177-2195).
ggttggaaaggattctcaa

SEQ ID NO: 113924 - DNA, 19 bp, Homo sapiens
  siRNA target sequence for GSN (NM_000177.3,2327-2345).
ccttggctgggatgatgat

SEQ ID NO: 113925 - DNA, 19 bp, Homo sapiens
  siRNA target sequence for GSN (NM_000177.3,2331-2349).
ggctgggatgatgattact

SEQ ID NO: 113926 - DNA, 19 bp, Homo sapiens
  siRNA target sequence for CAPG (NM_001747.1,665-683).
gcccaggtggagattgtca

SEQ ID NO: 113927 - DNA, 19 bp, Homo sapiens
  siRNA target sequence for CAPG (NM_001747.1,792-810).
ccgcagctctgtataaggt

SEQ ID NO: 113928 - DNA, 19 bp, Homo sapiens
  siRNA target sequence for CAPG (NM_001747.1,866-884).
gcccttgaactgctgatat

SEQ ID NO: 113929 - DNA, 19 bp, Homo sapiens
  siRNA target sequence for CAPG (NM_001747.1,868-886).
ccttgaactgctgatatct

SEQ ID NO: 113930 - DNA, 19 bp, Homo sapiens
  siRNA target sequence for CAPG (NM_001747.1,914-932).
ctctgtggcaagatctata

SEQ ID NO: 113931 - DNA, 19 bp, Homo sapiens
  siRNA target sequence for CAPG (NM_001747.1,941-959).
gggcgaaaagcgaatgaga

SEQ ID NO: 113932 - DNA, 19 bp, Homo sapiens
  siRNA target sequence for CAPG (NM_001747.1,983-1001).
gtggccgagggcttcatct

SEQ ID NO: 113933 - DNA, 19 bp, Homo sapiens
  siRNA target sequence for CAPPA3 (NM_033328.2,185-203).
ggacaaggaaagagtaatt

SEQ ID NO: 113934 - DNA, 19 bp, Homo sapiens
  siRNA target sequence for CAPPA3 (NM_033328.2,198-216).
gtaattcgcagactgttat

SEQ ID NO: 113935 - DNA, 19 bp, Homo sapiens
  siRNA target sequence for CAPPA3 (NM_033328.2,225-243).
cctccaggggaatttgtaa

SEQ ID NO: 113936 - DNA, 19 bp, Homo sapiens
  siRNA target sequence for CAPPA3 (NM_033328.2,264-282).
ctgcttatccgtgatgaaa

SEQ ID NO: 113937 - DNA, 19 bp, Homo sapiens
  siRNA target sequence for CAPPA3 (NM_033328.2,347-365).
ctgcatcgatggaaatcca

SEQ ID NO: 113938 - DNA, 19 bp, Homo sapiens
  siRNA target sequence for CAPPA3 (NM_033328.2,371-389).
cttgtctcaccacaatgta

SEQ ID NO: 113939 - DNA, 19 bp, Homo sapiens
  siRNA target sequence for CAPPA3 (NM_033328.2,392-410).
gggcgactaccgatttttt

SEQ ID NO: 113940 - DNA, 19 bp, Homo sapiens
  siRNA target sequence for CAPPA3 (NM_033328.2,394-412).
gcgactaccgattttttga

SEQ ID NO: 113941 - DNA, 19 bp, Homo sapiens
  siRNA target sequence for CAPPA3 (NM_033328.2,470-488).
ccaaagtcatggtatcatt

SEQ ID NO: 113942 - DNA, 19 bp, Homo sapiens
  siRNA target sequence for CAPPA3 (NM_033328.2,475-493).
gtcatggtatcattcagaa

SEQ ID NO: 113943 - DNA, 19 bp, Homo sapiens
  siRNA target sequence for CAPPA3 (NM_033328.2,522-540).
ctgtgcgccttaaaactgt

SEQ ID NO: 113944 - DNA, 19 bp, Homo sapiens
  siRNA target sequence for CAPPA3 (NM_033328.2,524-542).
gtgcgccttaaaactgtat

SEQ ID NO: 113945 - DNA, 19 bp, Homo sapiens
  siRNA target sequence for CAPPA3 (NM_033328.2,526-544).
gcgccttaaaactgtatgt

SEQ ID NO: 113946 - DNA, 19 bp, Homo sapiens
  siRNA target sequence for CAPPA3 (NM_033328.2,528-546).
gccttaaaactgtatgtga

SEQ ID NO: 113947 - DNA, 19 bp, Homo sapiens
  siRNA target sequence for CAPPA3 (NM_033328.2,549-567).
gaccactatccaaaaggaa

SEQ ID NO: 113948 - DNA, 19 bp, Homo sapiens
  siRNA target sequence for CAPPA3 (NM_033328.2,605-623).
gtacttgatagcttgcatt

SEQ ID NO: 113949 - DNA, 19 bp, Homo sapiens
  siRNA target sequence for CAPPA3 (NM_033328.2,608-626).
cttgatagcttgcattgaa

SEQ ID NO: 113950 - DNA, 19 bp, Homo sapiens
  siRNA target sequence for CAPPA3 (NM_033328.2,619-637).
gcattgaagatcacaacta

SEQ ID NO: 113951 - DNA, 19 bp, Homo sapiens
  siRNA target sequence for CAPPA3 (NM_033328.2,686-704).
ccaagttaacccatttcta

SEQ ID NO: 113952 - DNA, 19 bp, Homo sapiens
  siRNA target sequence for CAPPA3 (NM_033328.2,696-714).
ccatttctaacccaagtaa

SEQ ID NO: 113953 - DNA, 19 bp, Homo sapiens
  siRNA target sequence for CAPPA3 (NM_033328.2,729-747).
gtgcaagctcacttcttca

SEQ ID NO: 113954 - DNA, 19 bp, Homo sapiens
  siRNA target sequence for CAPPA3 (NM_033328.2,748-766).
ggtgtgtcaaccttcatat

SEQ ID NO: 113955 - DNA, 19 bp, Homo sapiens
  siRNA target sequence for CAPPA3 (NM_033328.2,751-769).
gtgtcaaccttcatattga

SEQ ID NO: 113956 - DNA, 19 bp, Homo sapiens
  siRNA target sequence for CAPPA3 (NM_033328.2,753-771).
gtcaaccttcatattgaaa

SEQ ID NO: 113957 - DNA, 19 bp, Homo sapiens
  siRNA target sequence for CAPPA3 (NM_033328.2,755-773).
caaccttcatattgaaata

SEQ ID NO: 113958 - DNA, 19 bp, Homo sapiens
  siRNA target sequence for CAPPA3 (NM_033328.2,793-811).
gcttggaaatagttaacca

SEQ ID NO: 113959 - DNA, 19 bp, Homo sapiens
  siRNA target sequence for CAPPA3 (NM_033328.2,794-812).
cttggaaatagttaaccaa

SEQ ID NO: 113960 - DNA, 19 bp, Homo sapiens
  siRNA target sequence for CAPPA3 (NM_033328.2,813-831).
gctcaactggctctaagtt

SEQ ID NO: 113961 - DNA, 19 bp, Homo sapiens
  siRNA target sequence for CAPPA3 (NM_033328.2,814-832).
ctcaactggctctaagttt

SEQ ID NO: 113962 - DNA, 19 bp, Homo sapiens
  siRNA target sequence for CAPPA3 (NM_033328.2,851-869).
gcaagagaacaaatttcaa

SEQ ID NO: 113963 - DNA, 19 bp, Homo sapiens
  siRNA target sequence for CAPPA3 (NM_033328.2,901-919).
ccaatgaagccctgagaaa

SEQ ID NO: 113964 - DNA, 19 bp, Homo sapiens
  siRNA target sequence for CAPPA3 (NM_033328.2,902-920).
caatgaagccctgagaaaa

SEQ ID NO: 113965 - DNA, 19 bp, Homo sapiens
  siRNA target sequence for CAPPA3 (NM_033328.2,939-957).
ccagtgacccgcactctta

SEQ ID NO: 113966 - DNA, 19 bp, Homo sapiens
  siRNA target sequence for CAPPA3 (NM_033328.2,940-958).
cagtgacccgcactcttat

SEQ ID NO: 113967 - DNA, 19 bp, Homo sapiens
  siRNA target sequence for CAPPA3 (NM_033328.2,960-978).
gactggcacaggatactct

SEQ ID NO: 113968 - DNA, 19 bp, Homo sapiens
  siRNA target sequence for CAPPA3 (NM_033328.2,970-988).
ggatactctctgacttgaa

SEQ ID NO: 113969 - DNA, 19 bp, Homo sapiens
  siRNA target sequence for CAPPA3 (NM_033328.2,971-989).
gatactctctgacttgaat

SEQ ID NO: 113970 - DNA, 19 bp, Homo sapiens
  siRNA target sequence for CAPPA3 (NM_033328.2,990-1008).
ctggtgatgtatcctaaat

SEQ ID NO: 113971 - DNA, 19 bp, Homo sapiens
  siRNA target sequence for CAPPA3 (NM_033328.2,995-1013).
gatgtatcctaaattagga

SEQ ID NO: 113972 - DNA, 19 bp, Homo sapiens
  siRNA target sequence for CAPPA3 (NM_033328.2,1035-1053).
gtgttgtgcaactggataa

SEQ ID NO: 113973 - DNA, 19 bp, Homo sapiens
  siRNA target sequence for CAPZA1 (NM_006135.1,39-57).
ggtacgcatagctgctaaa

SEQ ID NO: 113974 - DNA, 19 bp, Homo sapiens
  siRNA target sequence for CAPZA1 (NM_006135.1,40-58).
gtacgcatagctgctaaat

SEQ ID NO: 113975 - DNA, 19 bp, Homo sapiens
  siRNA target sequence for CAPZA1 (NM_006135.1,43-61).
cgcatagctgctaaattca

SEQ ID NO: 113976 - DNA, 19 bp, Homo sapiens
  siRNA target sequence for CAPZA1 (NM_006135.1,44-62).
gcatagctgctaaattcat

SEQ ID NO: 113977 - DNA, 19 bp, Homo sapiens
  siRNA target sequence for CAPZA1 (NM_006135.1,103-121).
gacgttcggctactactta

SEQ ID NO: 113978 - DNA, 19 bp, Homo sapiens
  siRNA target sequence for CAPZA1 (NM_006135.1,105-123).
cgttcggctactacttaat

SEQ ID NO: 113979 - DNA, 19 bp, Homo sapiens
  siRNA target sequence for CAPZA1 (NM_006135.1,183-201).
gttcacgcctgtgaagata

SEQ ID NO: 113980 - DNA, 19 bp, Homo sapiens
  siRNA target sequence for CAPZA1 (NM_006135.1,186-204).
cacgcctgtgaagatagaa

SEQ ID NO: 113981 - DNA, 19 bp, Homo sapiens
  siRNA target sequence for CAPZA1 (NM_006135.1,191-209).
ctgtgaagatagaaggata

SEQ ID NO: 113982 - DNA, 19 bp, Homo sapiens
  siRNA target sequence for CAPZA1 (NM_006135.1,244-262).
ctgggtaatagcagatttt

SEQ ID NO: 113983 - DNA, 19 bp, Homo sapiens
  siRNA target sequence for CAPZA1 (NM_006135.1,248-266).
gtaatagcagatttttaga

SEQ ID NO: 113984 - DNA, 19 bp, Homo sapiens
  siRNA target sequence for CAPZA1 (NM_006135.1,349-367).
ctgaagtcttggagagaat

SEQ ID NO: 113985 - DNA, 19 bp, Homo sapiens
  siRNA target sequence for CAPZA1 (NM_006135.1,389-407).
cctatgtgaaagaccatta

SEQ ID NO: 113986 - DNA, 19 bp, Homo sapiens
  siRNA target sequence for CAPZA1 (NM_006135.1,420-438).
ctgtactgtttatgctaaa

SEQ ID NO: 113987 - DNA, 19 bp, Homo sapiens
  siRNA target sequence for CAPZA1 (NM_006135.1,444-462).
cgatgggcaacagactatt

SEQ ID NO: 113988 - DNA, 19 bp, Homo sapiens
  siRNA target sequence for CAPZA1 (NM_006135.1,450-468).
gcaacagactattattgca

SEQ ID NO: 113989 - DNA, 19 bp, Homo sapiens
  siRNA target sequence for CAPZA1 (NM_006135.1,451-469).
caacagactattattgcat

SEQ ID NO: 113990 - DNA, 19 bp, Homo sapiens
  siRNA target sequence for CAPZA1 (NM_006135.1,456-474).
gactattattgcatgtatt

SEQ ID NO: 113991 - DNA, 19 bp, Homo sapiens
  siRNA target sequence for CAPZA1 (NM_006135.1,458-476).
ctattattgcatgtattga

SEQ ID NO: 113992 - DNA, 19 bp, Homo sapiens
  siRNA target sequence for CAPZA1 (NM_006135.1,564-582).
ggttggcgtgcttaagatt

SEQ ID NO: 113993 - DNA, 19 bp, Homo sapiens
  siRNA target sequence for CAPZA1 (NM_006135.1,604-622).
ggcaatgttcagttggtta

SEQ ID NO: 113994 - DNA, 19 bp, Homo sapiens
  siRNA target sequence for CAPZA1 (NM_006135.1,618-636).
ggttagtcataaagatgta

SEQ ID NO: 113995 - DNA, 19 bp, Homo sapiens
  siRNA target sequence for CAPZA1 (NM_006135.1,631-649).
gatgtacaggattcactaa

SEQ ID NO: 113996 - DNA, 19 bp, Homo sapiens
  siRNA target sequence for CAPZA1 (NM_006135.1,678-696).
ggagtttattaaaatcata

SEQ ID NO: 113997 - DNA, 19 bp, Homo sapiens
  siRNA target sequence for CAPZA1 (NM_006135.1,714-732).
gtatcagacagcaattagt

SEQ ID NO: 113998 - DNA, 19 bp, Homo sapiens
  siRNA target sequence for CAPZA1 (NM_006135.1,718-736).
cagacagcaattagtgaaa

SEQ ID NO: 113999 - DNA, 19 bp, Homo sapiens
  siRNA target sequence for CAPZA1 (NM_006135.1,787-805).
ccagttacccgcaccaaaa

SEQ ID NO: 114000 - DNA, 19 bp, Homo sapiens
  siRNA target sequence for CAPZA1 (NM_006135.1,788-806).
cagttacccgcaccaaaat

SEQ ID NO: 114001 - DNA, 19 bp, Homo sapiens
  siRNA target sequence for CAPZA1 (NM_006135.1,808-826).
gactggaacaagatactca

SEQ ID NO: 114002 - DNA, 19 bp, Homo sapiens
  siRNA target sequence for CAPZA2 (NM_006136.1,57-75).
ggtgcgtatagcagcaaaa

SEQ ID NO: 114003 - DNA, 19 bp, Homo sapiens
  siRNA target sequence for CAPZA2 (NM_006136.1,58-76).
gtgcgtatagcagcaaaat

SEQ ID NO: 114004 - DNA, 19 bp, Homo sapiens
  siRNA target sequence for CAPZA2 (NM_006136.1,463-481).
gatggacagcaaaccatta

SEQ ID NO: 114005 - DNA, 19 bp, Homo sapiens
  siRNA target sequence for CAPZA2 (NM_006136.1,497-515).
gccatcagttccaagcaaa

SEQ ID NO: 114006 - DNA, 19 bp, Homo sapiens
  siRNA target sequence for CAPZA2 (NM_006136.1,537-555).
gaggtcagaatggaagttt

SEQ ID NO: 114007 - DNA, 19 bp, Homo sapiens
  siRNA target sequence for CAPZA2 (NM_006136.1,577-595).
caagtggttggcatcttga

SEQ ID NO: 114008 - DNA, 19 bp, Homo sapiens
  siRNA target sequence for CAPZA2 (NM_006136.1,628-646).
gttcagctagtgagtcata

SEQ ID NO: 114009 - DNA, 19 bp, Homo sapiens
  siRNA target sequence for CAPZA2 (NM_006136.1,663-681).
cctaacagtgtctaatgaa

SEQ ID NO: 114010 - DNA, 19 bp, Homo sapiens
  siRNA target sequence for CAPZA2 (NM_006136.1,749-767).
gtgagaattatcagacaat

SEQ ID NO: 114011 - DNA, 19 bp, Homo sapiens
  siRNA target sequence for CAPZA2 (NM_006136.1,764-782).
caatgtcggacactacttt

SEQ ID NO: 114012 - DNA, 19 bp, Homo sapiens
  siRNA target sequence for CAPZA2 (NM_006136.1,768-786).
gtcggacactactttcaaa

SEQ ID NO: 114013 - DNA, 19 bp, Homo sapiens
  siRNA target sequence for CAPZA2 (NM_006136.1,806-824).
cagttacacgcactaagat

SEQ ID NO: 114014 - DNA, 19 bp, Homo sapiens
  siRNA target sequence for CAPZA2 (NM_006136.1,815-833).
gcactaagattgattggaa

SEQ ID NO: 114015 - DNA, 19 bp, Homo sapiens
  siRNA target sequence for CAPZA2 (NM_006136.1,826-844).
gattggaacaagatcctta

SEQ ID NO: 114016 - DNA, 19 bp, Homo sapiens
  siRNA target sequence for CAPZB (NM_004930.1,88-106).
gacctggtccccagtctat

SEQ ID NO: 114017 - DNA, 19 bp, Homo sapiens
  siRNA target sequence for CAPZB (NM_004930.1,90-108).
cctggtccccagtctatgt

SEQ ID NO: 114018 - DNA, 19 bp, Homo sapiens
  siRNA target sequence for CAPZB (NM_004930.1,156-174).
caaggtggtgggaaaggat

SEQ ID NO: 114019 - DNA, 19 bp, Homo sapiens
  siRNA target sequence for CAPZB (NM_004930.1,199-217).
gatggggactcctataggt

SEQ ID NO: 114020 - DNA, 19 bp, Homo sapiens
  siRNA target sequence for CAPZB (NM_004930.1,218-236).
caccatggagtaacaagta

SEQ ID NO: 114021 - DNA, 19 bp, Homo sapiens
  siRNA target sequence for CAPZB (NM_004930.1,266-284).
cgtcagctcggctgagaaa

SEQ ID NO: 114022 - DNA, 19 bp, Homo sapiens
  siRNA target sequence for CAPZB (NM_004930.1,316-334).
cagtatcgagacctgtatt

SEQ ID NO: 114023 - DNA, 19 bp, Homo sapiens
  siRNA target sequence for CAPZB (NM_004930.1,386-404).
ctggagtgatcctcataaa

SEQ ID NO: 114024 - DNA, 19 bp, Homo sapiens
  siRNA target sequence for CAPZB (NM_004930.1,388-406).
ggagtgatcctcataaaga

SEQ ID NO: 114025 - DNA, 19 bp, Homo sapiens
  siRNA target sequence for CAPZB (NM_004930.1,389-407).
gagtgatcctcataaagaa

SEQ ID NO: 114026 - DNA, 19 bp, Homo sapiens
  siRNA target sequence for CAPZB (NM_004930.1,415-433).
gatggatcaaagaagatca

SEQ ID NO: 114027 - DNA, 19 bp, Homo sapiens
  siRNA target sequence for CAPZB (NM_004930.1,449-467).
ccatccacgtggtagaagt

SEQ ID NO: 114028 - DNA, 19 bp, Homo sapiens
  siRNA target sequence for CAPZB (NM_004930.1,484-502).
ggtcgcaccgcccattaca

SEQ ID NO: 114029 - DNA, 19 bp, Homo sapiens
  siRNA target sequence for CAPZB (NM_004930.1,485-503).
gtcgcaccgcccattacaa

SEQ ID NO: 114030 - DNA, 19 bp, Homo sapiens
  siRNA target sequence for CAPZB (NM_004930.1,677-695).
gtacgctgaacgagatcta

SEQ ID NO: 114031 - DNA, 19 bp, Homo sapiens
  siRNA target sequence for CAPZB (NM_004930.1,680-698).
cgctgaacgagatctactt

SEQ ID NO: 114032 - DNA, 19 bp, Homo sapiens
  siRNA target sequence for CAPZB (NM_004930.1,738-756).
gcagacttttgcagacaaa

SEQ ID NO: 114033 - DNA, 19 bp, Homo sapiens
  siRNA target sequence for CAPZB (NM_004930.1,739-757).
cagacttttgcagacaaat

SEQ ID NO: 114034 - DNA, 19 bp, Homo sapiens
  siRNA target sequence for EVL (NM_016337.1,210-228).
gagtcgttggagtcaagtt

SEQ ID NO: 114035 - DNA, 19 bp, Homo sapiens
  siRNA target sequence for EVL (NM_016337.1,238-256).
gcaggttgtgatcaattat

SEQ ID NO: 114036 - DNA, 19 bp, Homo sapiens
  siRNA target sequence for EVL (NM_016337.1,239-257).
caggttgtgatcaattatt

SEQ ID NO: 114037 - DNA, 19 bp, Homo sapiens
  siRNA target sequence for EVL (NM_016337.1,321-339).
gccaggtctacggcttaaa

SEQ ID NO: 114038 - DNA, 19 bp, Homo sapiens
  siRNA target sequence for EVL (NM_016337.1,323-341).
caggtctacggcttaaact

SEQ ID NO: 114039 - DNA, 19 bp, Homo sapiens
  siRNA target sequence for EVL (NM_016337.1,325-343).
ggtctacggcttaaacttt

SEQ ID NO: 114040 - DNA, 19 bp, Homo sapiens
  siRNA target sequence for EVL (NM_016337.1,511-529).
gcgtcaggaatctctagaa

SEQ ID NO: 114041 - DNA, 19 bp, Homo sapiens
  siRNA target sequence for EVL (NM_016337.1,512-530).
cgtcaggaatctctagaaa

SEQ ID NO: 114042 - DNA, 19 bp, Homo sapiens
  siRNA target sequence for EVL (NM_016337.1,1107-1125).
caaagagccccgaagctaa

SEQ ID NO: 114043 - DNA, 19 bp, Homo sapiens
  siRNA target sequence for EVL (NM_016337.1,1167-1185).
ctgggagcgtgaatgacat

SEQ ID NO: 114044 - DNA, 19 bp, Homo sapiens
  siRNA target sequence for HRIHFB2122 (NM_007032.3,179-197).
cgcccgatctgctcaactt

SEQ ID NO: 114045 - DNA, 19 bp, Homo sapiens
  siRNA target sequence for HRIHFB2122 (NM_007032.3,181-199).
cccgatctgctcaacttca

SEQ ID NO: 114046 - DNA, 19 bp, Homo sapiens
  siRNA target sequence for HRIHFB2122 (NM_007032.3,182-200).
ccgatctgctcaacttcaa

SEQ ID NO: 114047 - DNA, 19 bp, Homo sapiens
  siRNA target sequence for HRIHFB2122 (NM_007032.3,402-420).
cgcggtgcagcgcaactat

SEQ ID NO: 114048 - DNA, 19 bp, Homo sapiens
  siRNA target sequence for HRIHFB2122 (NM_007032.3,435-453).
caccaaggatgctgtctat

SEQ ID NO: 114049 - DNA, 19 bp, Homo sapiens
  siRNA target sequence for HRIHFB2122 (NM_007032.3,491-509).
ggatcgaggctctgagaaa

SEQ ID NO: 114050 - DNA, 19 bp, Homo sapiens
  siRNA target sequence for HRIHFB2122 (NM_007032.3,510-528).
gaccgtacgtccaacttca

SEQ ID NO: 114051 - DNA, 19 bp, Homo sapiens
  siRNA target sequence for HRIHFB2122 (NM_007032.3,542-560).
ccaagctctcggactctaa

SEQ ID NO: 114052 - DNA, 19 bp, Homo sapiens
  siRNA target sequence for HRIHFB2122 (NM_007032.3,1707-1725).
ggtgctgcttcgcgtaaaa

SEQ ID NO: 114053 - DNA, 19 bp, Homo sapiens
  siRNA target sequence for HRIHFB2122 (NM_007032.3,1711-1729).
ctgcttcgcgtaaaagaaa

SEQ ID NO: 114054 - DNA, 19 bp, Homo sapiens
  siRNA target sequence for HRIHFB2122 (NM_138632.1,1195-1213).
gatcactgtgcccgtttta

SEQ ID NO: 114055 - DNA, 19 bp, Homo sapiens
  siRNA target sequence for HRIHFB2122 (NM_138632.1,1226-1244).
ctgagctctgagaggttat

SEQ ID NO: 114056 - DNA, 19 bp, Homo sapiens
  siRNA target sequence for ARP3BETA (NM_020445.1,108-126).
cactgagccccagttcatt

SEQ ID NO: 114057 - DNA, 19 bp, Homo sapiens
  siRNA target sequence for ARP3BETA (NM_020445.1,229-247).
gaagccatcgataaaccta

SEQ ID NO: 114058 - DNA, 19 bp, Homo sapiens
  siRNA target sequence for ARP3BETA (NM_020445.1,233-251).
ccatcgataaacctacata

SEQ ID NO: 114059 - DNA, 19 bp, Homo sapiens
  siRNA target sequence for ARP3BETA (NM_020445.1,237-255).
cgataaacctacatatgct

SEQ ID NO: 114060 - DNA, 19 bp, Homo sapiens
  siRNA target sequence for ARP3BETA (NM_020445.1,263-281).
ggccgatacgacatggaat

SEQ ID NO: 114061 - DNA, 19 bp, Homo sapiens
  siRNA target sequence for ARP3BETA (NM_020445.1,289-307).
gactgggatcttatggaaa

SEQ ID NO: 114062 - DNA, 19 bp, Homo sapiens
  siRNA target sequence for ARP3BETA (NM_020445.1,1036-1054).
cgactgcagagggatttga

SEQ ID NO: 114063 - DNA, 19 bp, Homo sapiens
  siRNA target sequence for ARP3BETA (NM_020445.1,1193-1211).
cgactcccgagttctttca

SEQ ID NO: 114064 - DNA, 19 bp, Homo sapiens
  siRNA target sequence for FLNA (NM_001456.1,825-843).
ccagcaagcccgttaccaa

SEQ ID NO: 114065 - DNA, 19 bp, Homo sapiens
  siRNA target sequence for FLNA (NM_001456.1,826-844).
cagcaagcccgttaccaat

SEQ ID NO: 114066 - DNA, 19 bp, Homo sapiens
  siRNA target sequence for FLNA (NM_001456.1,1161-1179).
caaaagtgaccgccaataa

SEQ ID NO: 114067 - DNA, 19 bp, Homo sapiens
  siRNA target sequence for FLNA (NM_001456.1,1170-1188).
ccgccaataacgacaagaa

SEQ ID NO: 114068 - DNA, 19 bp, Homo sapiens
  siRNA target sequence for FLNA (NM_001456.1,1217-1235).
gaggtgacggggactcata

SEQ ID NO: 114069 - DNA, 19 bp, Homo sapiens
  siRNA target sequence for FLNA (NM_001456.1,1222-1240).
gacggggactcataaggtt

SEQ ID NO: 114070 - DNA, 19 bp, Homo sapiens
  siRNA target sequence for FLNA (NM_001456.1,1227-1245).
ggactcataaggttactgt

SEQ ID NO: 114071 - DNA, 19 bp, Homo sapiens
  siRNA target sequence for FLNA (NM_001456.1,1283-1301).
gaggtgtacgtggataagt

SEQ ID NO: 114072 - DNA, 19 bp, Homo sapiens
  siRNA target sequence for FLNA (NM_001456.1,1285-1303).
ggtgtacgtggataagtca

SEQ ID NO: 114073 - DNA, 19 bp, Homo sapiens
  siRNA target sequence for FLNA (NM_001456.1,1307-1325).
ggtgacgccagcaaagtga

SEQ ID NO: 114074 - DNA, 19 bp, Homo sapiens
  siRNA target sequence for FLNA (NM_001456.1,1413-1431).
gcgaggtcgaggttgtgat

SEQ ID NO: 114075 - DNA, 19 bp, Homo sapiens
  siRNA target sequence for FLNA (NM_001456.1,1781-1799).
gtgtatggcttcgagtatt

SEQ ID NO: 114076 - DNA, 19 bp, Homo sapiens
  siRNA target sequence for FLNA (NM_001456.1,1887-1905).
ccgagtgtggcaatcagaa

SEQ ID NO: 114077 - DNA, 19 bp, Homo sapiens
  siRNA target sequence for FLNA (NM_001456.1,2226-2244).
caggtgtggccgtcaacaa

SEQ ID NO: 114078 - DNA, 19 bp, Homo sapiens
  siRNA target sequence for FLNA (NM_001456.1,2647-2665).
catcatccgcaatgacaat

SEQ ID NO: 114079 - DNA, 19 bp, Homo sapiens
  siRNA target sequence for FLNA (NM_001456.1,2846-2864).
cccacccacttcacagtaa

SEQ ID NO: 114080 - DNA, 19 bp, Homo sapiens
  siRNA target sequence for FLNA (NM_001456.1,2847-2865).
ccacccacttcacagtaaa

SEQ ID NO: 114081 - DNA, 19 bp, Homo sapiens
  siRNA target sequence for FLNA (NM_001456.1,2848-2866).
cacccacttcacagtaaat

SEQ ID NO: 114082 - DNA, 19 bp, Homo sapiens
  siRNA target sequence for FLNA (NM_001456.1,3000-3018).
gtccagtaggcgtcaatgt

SEQ ID NO: 114083 - DNA, 19 bp, Homo sapiens
  siRNA target sequence for FLNA (NM_001456.1,3002-3020).
ccagtaggcgtcaatgtca

SEQ ID NO: 114084 - DNA, 19 bp, Homo sapiens
  siRNA target sequence for FLNA (NM_001456.1,3010-3028).
cgtcaatgtcacttatgga

SEQ ID NO: 114085 - DNA, 19 bp, Homo sapiens
  siRNA target sequence for FLNA (NM_001456.1,3137-3155).
caggagttcacagtcaaat

SEQ ID NO: 114086 - DNA, 19 bp, Homo sapiens
  siRNA target sequence for FLNA (NM_001456.1,3812-3830).
gatggcacgcacaccatta

SEQ ID NO: 114087 - DNA, 19 bp, Homo sapiens
  siRNA target sequence for FLNA (NM_001456.1,3815-3833).
ggcacgcacaccattacct

SEQ ID NO: 114088 - DNA, 19 bp, Homo sapiens
  siRNA target sequence for FLNA (NM_001456.1,3816-3834).
gcacgcacaccattaccta

SEQ ID NO: 114089 - DNA, 19 bp, Homo sapiens
  siRNA target sequence for FLNA (NM_001456.1,3820-3838).
gcacaccattacctacatt

SEQ ID NO: 114090 - DNA, 19 bp, Homo sapiens
  siRNA target sequence for FLNA (NM_001456.1,3949-3967).
gtgctatgggcctggtatt

SEQ ID NO: 114091 - DNA, 19 bp, Homo sapiens
  siRNA target sequence for FLNA (NM_001456.1,4106-4124).
cgtggcgatggcatgtaca

SEQ ID NO: 114092 - DNA, 19 bp, Homo sapiens
  siRNA target sequence for FLNA (NM_001456.1,4107-4125).
gtggcgatggcatgtacaa

SEQ ID NO: 114093 - DNA, 19 bp, Homo sapiens
  siRNA target sequence for FLNA (NM_001456.1,4110-4128).
gcgatggcatgtacaaagt

SEQ ID NO: 114094 - DNA, 19 bp, Homo sapiens
  siRNA target sequence for FLNA (NM_001456.1,4253-4271).
cacgggccaggcatccaaa

SEQ ID NO: 114095 - DNA, 19 bp, Homo sapiens
  siRNA target sequence for FLNA (NM_001456.1,4398-4416).
gctgctcggtcgagtacat

SEQ ID NO: 114096 - DNA, 19 bp, Homo sapiens
  siRNA target sequence for FLNA (NM_001456.1,4614-4632).
ccccattgcaggtcaaagt

SEQ ID NO: 114097 - DNA, 19 bp, Homo sapiens
  siRNA target sequence for FLNA (NM_001456.1,4685-4703).
ggcacccagaccgtcaatt

SEQ ID NO: 114098 - DNA, 19 bp, Homo sapiens
  siRNA target sequence for FLNA (NM_001456.1,4686-4704).
gcacccagaccgtcaatta

SEQ ID NO: 114099 - DNA, 19 bp, Homo sapiens
  siRNA target sequence for FLNA (NM_001456.1,4687-4705).
cacccagaccgtcaattat

SEQ ID NO: 114100 - DNA, 19 bp, Homo sapiens
  siRNA target sequence for FLNA (NM_001456.1,4689-4707).
cccagaccgtcaattatgt

SEQ ID NO: 114101 - DNA, 19 bp, Homo sapiens
  siRNA target sequence for FLNA (NM_001456.1,4969-4987).
ccatgacggcacgtataca

SEQ ID NO: 114102 - DNA, 19 bp, Homo sapiens
  siRNA target sequence for FLNA (NM_001456.1,5288-5306).
ggcactttcgacatcttct

SEQ ID NO: 114103 - DNA, 19 bp, Homo sapiens
  siRNA target sequence for FLNA (NM_001456.1,5289-5307).
gcactttcgacatcttcta

SEQ ID NO: 114104 - DNA, 19 bp, Homo sapiens
  siRNA target sequence for FLNA (NM_001456.1,5628-5646).
ccatcactgacaacaaaga

SEQ ID NO: 114105 - DNA, 19 bp, Homo sapiens
  siRNA target sequence for FLNA (NM_001456.1,6185-6203).
ggccacgtggggatttcat

SEQ ID NO: 114106 - DNA, 19 bp, Homo sapiens
  siRNA target sequence for FLNA (NM_001456.1,6186-6204).
gccacgtggggatttcatt

SEQ ID NO: 114107 - DNA, 19 bp, Homo sapiens
  siRNA target sequence for FLNA (NM_001456.1,6364-6382).
gcctgcagagtttatcatt

SEQ ID NO: 114108 - DNA, 19 bp, Homo sapiens
  siRNA target sequence for FLNA (NM_001456.1,6632-6650).
gccaacgttggtagtcatt

SEQ ID NO: 114109 - DNA, 19 bp, Homo sapiens
  siRNA target sequence for FLNA (NM_001456.1,6634-6652).
caacgttggtagtcattgt

SEQ ID NO: 114110 - DNA, 19 bp, Homo sapiens
  siRNA target sequence for FLNA (NM_001456.1,7009-7027).
caaggctgagatctctttt

SEQ ID NO: 114111 - DNA, 19 bp, Homo sapiens
  siRNA target sequence for FLNA (NM_001456.1,7102-7120).
gttcaacgaggaacacatt

SEQ ID NO: 114112 - DNA, 19 bp, Homo sapiens
  siRNA target sequence for FLNA (NM_001456.1,7303-7321).
gtgctatgtcacagaaatt

SEQ ID NO: 114113 - DNA, 19 bp, Homo sapiens
  siRNA target sequence for FLNA (NM_001456.1,7305-7323).
gctatgtcacagaaattga

SEQ ID NO: 114114 - DNA, 19 bp, Homo sapiens
  siRNA target sequence for FLNA (NM_001456.1,7373-7391).
ctgattgacgtcaagttca

SEQ ID NO: 114115 - DNA, 19 bp, Homo sapiens
  siRNA target sequence for FLNA (NM_001456.1,7616-7634).
ggctaccgcgtcacctata

SEQ ID NO: 114116 - DNA, 19 bp, Homo sapiens
  siRNA target sequence for FLNA (NM_001456.1,7750-7768).
cctccacgagacatcatca

SEQ ID NO: 114117 - DNA, 19 bp, Homo sapiens
  siRNA target sequence for FLNA (NM_001456.1,7761-7779).
catcatcagtgtttgtaga

SEQ ID NO: 114118 - DNA, 19 bp, Homo sapiens
  siRNA target sequence for FSCN3 (NM_020369.1,306-324).
ctttgaggcatgcaagaat

SEQ ID NO: 114119 - DNA, 19 bp, Homo sapiens
  siRNA target sequence for FSCN3 (NM_020369.1,332-350).
ctgcaactgcgaagagttt

SEQ ID NO: 114120 - DNA, 19 bp, Homo sapiens
  siRNA target sequence for FSCN3 (NM_020369.1,452-470).
gtgatggcaccgtgtgtta

SEQ ID NO: 114121 - DNA, 19 bp, Homo sapiens
  siRNA target sequence for FSCN3 (NM_020369.1,546-564).
cctaatctctggtcgttat

SEQ ID NO: 114122 - DNA, 19 bp, Homo sapiens
  siRNA target sequence for FSCN3 (NM_020369.1,797-815).
cctctacacaccacttctt

SEQ ID NO: 114123 - DNA, 19 bp, Homo sapiens
  siRNA target sequence for FSCN3 (NM_020369.1,908-926).
gagaaggaggcatgttata

SEQ ID NO: 114124 - DNA, 19 bp, Homo sapiens
  siRNA target sequence for FSCN3 (NM_020369.1,1040-1058).
ggttcatctcagtcatcta

SEQ ID NO: 114125 - DNA, 19 bp, Homo sapiens
  siRNA target sequence for FSCN3 (NM_020369.1,1076-1094).
ctgcttctgagcgcttaaa

SEQ ID NO: 114126 - DNA, 19 bp, Homo sapiens
  siRNA target sequence for FSCN3 (NM_020369.1,1156-1174).
gccaatggctactacctat

SEQ ID NO: 114127 - DNA, 19 bp, Homo sapiens
  siRNA target sequence for FSCN3 (NM_020369.1,1181-1199).
ggcgccacagggcagtaat

SEQ ID NO: 114128 - DNA, 19 bp, Homo sapiens
  siRNA target sequence for FSCN3 (NM_020369.1,1424-1442).
cgggccatgacctcataca

SEQ ID NO: 114129 - DNA, 19 bp, Homo sapiens
  siRNA target sequence for FSCN3 (NM_020369.1,1458-1476).
gcccgaccgcattcatcta

SEQ ID NO: 114130 - DNA, 19 bp, Homo sapiens
  siRNA target sequence for FSCN3 (NM_020369.1,1460-1478).
ccgaccgcattcatctact

SEQ ID NO: 114131 - DNA, 19 bp, Homo sapiens
  siRNA target sequence for FSCN3 (NM_020369.1,1461-1479).
cgaccgcattcatctacta

SEQ ID NO: 114132 - DNA, 19 bp, Homo sapiens
  siRNA target sequence for FSCN3 (NM_020369.1,1481-1499).
cctgccgaccgggtatcta

SEQ ID NO: 114133 - DNA, 19 bp, Homo sapiens
  siRNA target sequence for FSCN3 (NM_020369.1,1518-1536).
gggatccttctggtcaata

SEQ ID NO: 114134 - DNA, 19 bp, Homo sapiens
  siRNA target sequence for FSCN3 (NM_020369.1,1519-1537).
ggatccttctggtcaataa

SEQ ID NO: 114135 - DNA, 19 bp, Homo sapiens
  siRNA target sequence for FSCN3 (NM_020369.1,1593-1611).
gcttcaggggagcaactta

SEQ ID NO: 114136 - DNA, 19 bp, Homo sapiens
  siRNA target sequence for MACF1 (NM_012090.3,266-284).
cggagtgagcgatcttaca

SEQ ID NO: 114137 - DNA, 19 bp, Homo sapiens
  siRNA target sequence for MACF1 (NM_012090.3,347-365).
ccactgcatgagcagaaaa

SEQ ID NO: 114138 - DNA, 19 bp, Homo sapiens
  siRNA target sequence for MACF1 (NM_012090.3,432-450).
gggaccgggttcagaagaa

SEQ ID NO: 114139 - DNA, 19 bp, Homo sapiens
  siRNA target sequence for MACF1 (NM_012090.3,434-452).
gaccgggttcagaagaaaa

SEQ ID NO: 114140 - DNA, 19 bp, Homo sapiens
  siRNA target sequence for MACF1 (NM_012090.3,437-455).
cgggttcagaagaaaacgt

SEQ ID NO: 114141 - DNA, 19 bp, Homo sapiens
  siRNA target sequence for MACF1 (NM_012090.3,438-456).
gggttcagaagaaaacgtt

SEQ ID NO: 114142 - DNA, 19 bp, Homo sapiens
  siRNA target sequence for MACF1 (NM_012090.3,492-510).
gcaagcacatcaatgatct

SEQ ID NO: 114143 - DNA, 19 bp, Homo sapiens
  siRNA target sequence for MACF1 (NM_012090.3,556-574).
ggtcctctcaggcatcaaa

SEQ ID NO: 114144 - DNA, 19 bp, Homo sapiens
  siRNA target sequence for MACF1 (NM_012090.3,589-607).
gggcaggatgcgttttcat

SEQ ID NO: 114145 - DNA, 19 bp, Homo sapiens
  siRNA target sequence for MACF1 (NM_012090.3,646-664).
gcagcgacaggtgaaacta

SEQ ID NO: 114146 - DNA, 19 bp, Homo sapiens
  siRNA target sequence for MACF1 (NM_012090.3,729-747).
ccattattttgcatttcca

SEQ ID NO: 114147 - DNA, 19 bp, Homo sapiens
  siRNA target sequence for MACF1 (NM_012090.3,760-778).
ctacattagtggagaatca

SEQ ID NO: 114148 - DNA, 19 bp, Homo sapiens
  siRNA target sequence for MACF1 (NM_012090.3,886-904).
gatgttcaatgcactcatt

SEQ ID NO: 114149 - DNA, 19 bp, Homo sapiens
  siRNA target sequence for MACF1 (NM_012090.3,909-927).
gataccgacccgatctagt

SEQ ID NO: 114150 - DNA, 19 bp, Homo sapiens
  siRNA target sequence for MACF1 (NM_012090.3,915-933).
gacccgatctagtagacat

SEQ ID NO: 114151 - DNA, 19 bp, Homo sapiens
  siRNA target sequence for MACF1 (NM_012090.3,934-952).
ggagagggtgcaaatccaa

SEQ ID NO: 114152 - DNA, 19 bp, Homo sapiens
  siRNA target sequence for MACF1 (NM_012090.3,939-957).
gggtgcaaatccaaagtaa

SEQ ID NO: 114153 - DNA, 19 bp, Homo sapiens
  siRNA target sequence for MACF1 (NM_012090.3,1206-1224).
caatactgatgtcagataa

SEQ ID NO: 114154 - DNA, 19 bp, Homo sapiens
  siRNA target sequence for MACF1 (NM_012090.3,1211-1229).
ctgatgtcagataaaactt

SEQ ID NO: 114155 - DNA, 19 bp, Homo sapiens
  siRNA target sequence for MACF1 (NM_012090.3,1213-1231).
gatgtcagataaaactttt

SEQ ID NO: 114156 - DNA, 19 bp, Homo sapiens
  siRNA target sequence for MACF1 (NM_012090.3,1234-1252).
ccaaaaccctgttgaacta

SEQ ID NO: 114157 - DNA, 19 bp, Homo sapiens
  siRNA target sequence for MACF1 (NM_012090.3,1417-1435).
gtggggaaagctcatcata

SEQ ID NO: 114158 - DNA, 19 bp, Homo sapiens
  siRNA target sequence for MACF1 (NM_012090.3,1483-1501).
ggaattgctgctacagatt

SEQ ID NO: 114159 - DNA, 19 bp, Homo sapiens
  siRNA target sequence for MACF1 (NM_012090.3,1548-1566).
cactagctaagaatacact

SEQ ID NO: 114160 - DNA, 19 bp, Homo sapiens
  siRNA target sequence for MACF1 (NM_012090.3,1596-1614).
gacaaccggtacaatgtga

SEQ ID NO: 114161 - DNA, 19 bp, Homo sapiens
  siRNA target sequence for MACF1 (NM_012090.3,1786-1804).
ccggaagggtcatttcact

SEQ ID NO: 114162 - DNA, 19 bp, Homo sapiens
  siRNA target sequence for MACF1 (NM_012090.3,1787-1805).
cggaagggtcatttcactt

SEQ ID NO: 114163 - DNA, 19 bp, Homo sapiens
  siRNA target sequence for MACF1 (NM_012090.3,1792-1810).
gggtcatttcacttcactt

SEQ ID NO: 114164 - DNA, 19 bp, Homo sapiens
  siRNA target sequence for MACF1 (NM_012090.3,1801-1819).
cacttcacttgaattggtt

SEQ ID NO: 114165 - DNA, 19 bp, Homo sapiens
  siRNA target sequence for MACF1 (NM_012090.3,1897-1915).
gttccgaaagcctatgact

SEQ ID NO: 114166 - DNA, 19 bp, Homo sapiens
  siRNA target sequence for MACF1 (NM_012090.3,1955-1973).
ggcaatctccgatttgtgt

SEQ ID NO: 114167 - DNA, 19 bp, Homo sapiens
  siRNA target sequence for MACF1 (NM_012090.3,1956-1974).
gcaatctccgatttgtgta

SEQ ID NO: 114168 - DNA, 19 bp, Homo sapiens
  siRNA target sequence for MACF1 (NM_012090.3,1957-1975).
caatctccgatttgtgtat

SEQ ID NO: 114169 - DNA, 19 bp, Homo sapiens
  siRNA target sequence for MACF1 (NM_012090.3,1963-1981).
ccgatttgtgtatgaacta

SEQ ID NO: 114170 - DNA, 19 bp, Homo sapiens
  siRNA target sequence for MACF1 (NM_012090.3,2048-2066).
gtggagttgcagctagaaa

SEQ ID NO: 114171 - DNA, 19 bp, Homo sapiens
  siRNA target sequence for MACF1 (NM_012090.3,2077-2095).
catccatacgagtgtagaa

SEQ ID NO: 114172 - DNA, 19 bp, Homo sapiens
  siRNA target sequence for MACF1 (NM_012090.3,2113-2131).
caaggaggccaggttgtat

SEQ ID NO: 114173 - DNA, 19 bp, Homo sapiens
  siRNA target sequence for MACF1 (NM_012090.3,2161-2179).
cagctatgctgaaactctt

SEQ ID NO: 114174 - DNA, 19 bp, Homo sapiens
  siRNA target sequence for MACF1 (NM_012090.3,2193-2211).
cacagtattgtaaattgaa

SEQ ID NO: 114175 - DNA, 19 bp, Homo sapiens
  siRNA target sequence for MACF1 (NM_012090.3,2270-2288).
gctacagctgagttgatct

SEQ ID NO: 114176 - DNA, 19 bp, Homo sapiens
  siRNA target sequence for MACF1 (NM_012090.3,2309-2327).
gaggaactagcatatgact

SEQ ID NO: 114177 - DNA, 19 bp, Homo sapiens
  siRNA target sequence for MACF1 (NM_012090.3,2324-2342).
gactggagtgacaacaatt

SEQ ID NO: 114178 - DNA, 19 bp, Homo sapiens
  siRNA target sequence for MACF1 (NM_012090.3,2331-2349).
gtgacaacaattccaatat

SEQ ID NO: 114179 - DNA, 19 bp, Homo sapiens
  siRNA target sequence for MACF1 (NM_012090.3,2410-2428).
gtttcgttctctacaagat

SEQ ID NO: 114180 - DNA, 19 bp, Homo sapiens
  siRNA target sequence for MACF1 (NM_012090.3,2426-2444).
gatacagcagaactacttt

SEQ ID NO: 114181 - DNA, 19 bp, Homo sapiens
  siRNA target sequence for MACF1 (NM_012090.3,2430-2448).
cagcagaactactttcact

SEQ ID NO: 114182 - DNA, 19 bp, Homo sapiens
  siRNA target sequence for MACF1 (NM_012090.3,2545-2563).
gcatgtgaaagagaatact

SEQ ID NO: 114183 - DNA, 19 bp, Homo sapiens
  siRNA target sequence for MACF1 (NM_012090.3,2589-2607).
cacgagagctggagtcatt

SEQ ID NO: 114184 - DNA, 19 bp, Homo sapiens
  siRNA target sequence for MACF1 (NM_012090.3,2624-2642).
gattccattaaacgaaaat

SEQ ID NO: 114185 - DNA, 19 bp, Homo sapiens
  siRNA target sequence for MACF1 (NM_012090.3,2664-2682).
gcttatcccgccttgaaga

SEQ ID NO: 114186 - DNA, 19 bp, Homo sapiens
  siRNA target sequence for MACF1 (NM_012090.3,2717-2735).
cttatacagtccaagagtt

SEQ ID NO: 114187 - DNA, 19 bp, Homo sapiens
  siRNA target sequence for MACF1 (NM_012090.3,2750-2768).
gttgggagatcaaaaacca

SEQ ID NO: 114188 - DNA, 19 bp, Homo sapiens
  siRNA target sequence for MACF1 (NM_012090.3,2767-2785).
catcgttcagctaaaacca

SEQ ID NO: 114189 - DNA, 19 bp, Homo sapiens
  siRNA target sequence for MACF1 (NM_012090.3,2788-2806).
cagtccagaccatgtgtta

SEQ ID NO: 114190 - DNA, 19 bp, Homo sapiens
  siRNA target sequence for MACF1 (NM_012090.3,2801-2819).
gtgttaaagaacaccattt

SEQ ID NO: 114191 - DNA, 19 bp, Homo sapiens
  siRNA target sequence for MACF1 (NM_012090.3,2842-2860).
caggcagatcgagattact

SEQ ID NO: 114192 - DNA, 19 bp, Homo sapiens
  siRNA target sequence for MACF1 (NM_012090.3,2844-2862).
ggcagatcgagattactat

SEQ ID NO: 114193 - DNA, 19 bp, Homo sapiens
  siRNA target sequence for MACF1 (NM_012090.3,2846-2864).
cagatcgagattactattt

SEQ ID NO: 114194 - DNA, 19 bp, Homo sapiens
  siRNA target sequence for MACF1 (NM_012090.3,2851-2869).
cgagattactatttgcaaa

SEQ ID NO: 114195 - DNA, 19 bp, Homo sapiens
  siRNA target sequence for MACF1 (NM_012090.3,2859-2877).
ctatttgcaaaaatgatga

SEQ ID NO: 114196 - DNA, 19 bp, Homo sapiens
  siRNA target sequence for MACF1 (NM_012090.3,2898-2916).
ctcagcggaccaaatggaa

SEQ ID NO: 114197 - DNA, 19 bp, Homo sapiens
  siRNA target sequence for MACF1 (NM_012090.3,2903-2921).
cggaccaaatggaaagtga

SEQ ID NO: 114198 - DNA, 19 bp, Homo sapiens
  siRNA target sequence for MACF1 (NM_012090.3,2971-2989).
ccccccacccaataaggat

SEQ ID NO: 114199 - DNA, 19 bp, Homo sapiens
  siRNA target sequence for MACF1 (NM_012090.3,3002-3020).
gccagcagggtcgaacaat

SEQ ID NO: 114200 - DNA, 19 bp, Homo sapiens
  siRNA target sequence for MACF1 (NM_012090.3,3004-3022).
cagcagggtcgaacaatct

SEQ ID NO: 114201 - DNA, 19 bp, Homo sapiens
  siRNA target sequence for MACF1 (NM_012090.3,3006-3024).
gcagggtcgaacaatctta

SEQ ID NO: 114202 - DNA, 19 bp, Homo sapiens
  siRNA target sequence for MACF1 (NM_012090.3,3007-3025).
cagggtcgaacaatcttat

SEQ ID NO: 114203 - DNA, 19 bp, Homo sapiens
  siRNA target sequence for MACF1 (NM_012090.3,3009-3027).
gggtcgaacaatcttatca

SEQ ID NO: 114204 - DNA, 19 bp, Homo sapiens
  siRNA target sequence for MACF1 (NM_012090.3,3011-3029).
gtcgaacaatcttatcaga

SEQ ID NO: 114205 - DNA, 19 bp, Homo sapiens
  siRNA target sequence for MACF1 (NM_012090.3,3047-3065).
catcagctgcatgttaaca

SEQ ID NO: 114206 - DNA, 19 bp, Homo sapiens
  siRNA target sequence for MACF1 (NM_012090.3,3064-3082).
caccaaaagccttatctct

SEQ ID NO: 114207 - DNA, 19 bp, Homo sapiens
  siRNA target sequence for MACF1 (NM_012090.3,3116-3134).
cagacctggaacctagaaa

SEQ ID NO: 114208 - DNA, 19 bp, Homo sapiens
  siRNA target sequence for MACF1 (NM_012090.3,3153-3171).
caggggagtgccatcagat

SEQ ID NO: 114209 - DNA, 19 bp, Homo sapiens
  siRNA target sequence for MACF1 (NM_012090.3,3155-3173).
ggggagtgccatcagatta

SEQ ID NO: 114210 - DNA, 19 bp, Homo sapiens
  siRNA target sequence for MACF1 (NM_012090.3,3156-3174).
gggagtgccatcagattat

SEQ ID NO: 114211 - DNA, 19 bp, Homo sapiens
  siRNA target sequence for MACF1 (NM_012090.3,3162-3180).
gccatcagattatgaagaa

SEQ ID NO: 114212 - DNA, 19 bp, Homo sapiens
  siRNA target sequence for MACF1 (NM_012090.3,3181-3199).
ccttcaggcccactatgaa

SEQ ID NO: 114213 - DNA, 19 bp, Homo sapiens
  siRNA target sequence for MACF1 (NM_012090.3,3398-3416).
cagagggtggtcaaacgaa

SEQ ID NO: 114214 - DNA, 19 bp, Homo sapiens
  siRNA target sequence for MACF1 (NM_012090.3,3402-3420).
gggtggtcaaacgaattca

SEQ ID NO: 114215 - DNA, 19 bp, Homo sapiens
  siRNA target sequence for MACF1 (NM_012090.3,3452-3470).
gcctggcaggacaatgcat

SEQ ID NO: 114216 - DNA, 19 bp, Homo sapiens
  siRNA target sequence for MACF1 (NM_012090.3,3453-3471).
cctggcaggacaatgcatt

SEQ ID NO: 114217 - DNA, 19 bp, Homo sapiens
  siRNA target sequence for MACF1 (NM_012090.3,3454-3472).
ctggcaggacaatgcatta

SEQ ID NO: 114218 - DNA, 19 bp, Homo sapiens
  siRNA target sequence for MACF1 (NM_012090.3,3458-3476).
caggacaatgcattaagga

SEQ ID NO: 114219 - DNA, 19 bp, Homo sapiens
  siRNA target sequence for MACF1 (NM_012090.3,3460-3478).
ggacaatgcattaaggatt

SEQ ID NO: 114220 - DNA, 19 bp, Homo sapiens
  siRNA target sequence for MACF1 (NM_012090.3,3534-3552).
cagtttctatgaaatgtga

SEQ ID NO: 114221 - DNA, 19 bp, Homo sapiens
  siRNA target sequence for MACF1 (NM_012090.3,3562-3580).
ccatcagtctccatctagt

SEQ ID NO: 114222 - DNA, 19 bp, Homo sapiens
  siRNA target sequence for MACF1 (NM_012090.3,3563-3581).
catcagtctccatctagtt

SEQ ID NO: 114223 - DNA, 19 bp, Homo sapiens
  siRNA target sequence for MACF1 (NM_012090.3,3568-3586).
gtctccatctagttcaagt

SEQ ID NO: 114224 - DNA, 19 bp, Homo sapiens
  siRNA target sequence for MACF1 (NM_012090.3,3625-3643).
gaagatggaccatgtctat

SEQ ID NO: 114225 - DNA, 19 bp, Homo sapiens
  siRNA target sequence for MACF1 (NM_012090.3,3640-3658).
ctatggtctctctactgta

SEQ ID NO: 114226 - DNA, 19 bp, Homo sapiens
  siRNA target sequence for MACF1 (NM_012090.3,3647-3665).
ctctctactgtatatctga

SEQ ID NO: 114227 - DNA, 19 bp, Homo sapiens
  siRNA target sequence for MACF1 (NM_012090.3,3654-3672).
ctgtatatctgaataagtt

SEQ ID NO: 114228 - DNA, 19 bp, Homo sapiens
  siRNA target sequence for MACF1 (NM_012090.3,3670-3688).
gttaaagacagttgatgtt

SEQ ID NO: 114229 - DNA, 19 bp, Homo sapiens
  siRNA target sequence for MACF1 (NM_012090.3,3676-3694).
gacagttgatgttatagta

SEQ ID NO: 114230 - DNA, 19 bp, Homo sapiens
  siRNA target sequence for MACF1 (NM_012090.3,3721-3739).
ggtcaaaggttatgagatt

SEQ ID NO: 114231 - DNA, 19 bp, Homo sapiens
  siRNA target sequence for MACF1 (NM_012090.3,3787-3805).
ggcccattggtcgacatta

SEQ ID NO: 114232 - DNA, 19 bp, Homo sapiens
  siRNA target sequence for MACF1 (NM_012090.3,3829-3847).
ggacaagaattcagtgttt

SEQ ID NO: 114233 - DNA, 19 bp, Homo sapiens
  siRNA target sequence for MACF1 (NM_012090.3,3931-3949).
ggagcgctatcaggaaaaa

SEQ ID NO: 114234 - DNA, 19 bp, Homo sapiens
  siRNA target sequence for MACF1 (NM_012090.3,3967-3985).
gcgttggcaccgagtcatt

SEQ ID NO: 114235 - DNA, 19 bp, Homo sapiens
  siRNA target sequence for MACF1 (NM_012090.3,4001-4019).
cgccaatctgagctagaaa

SEQ ID NO: 114236 - DNA, 19 bp, Homo sapiens
  siRNA target sequence for MACF1 (NM_012090.3,4003-4021).
ccaatctgagctagaaagt

SEQ ID NO: 114237 - DNA, 19 bp, Homo sapiens
  siRNA target sequence for MACF1 (NM_012090.3,4004-4022).
caatctgagctagaaagta

SEQ ID NO: 114238 - DNA, 19 bp, Homo sapiens
  siRNA target sequence for MACF1 (NM_012090.3,4055-4073).
catggaactctcatcaagt

SEQ ID NO: 114239 - DNA, 19 bp, Homo sapiens
  siRNA target sequence for MACF1 (NM_012090.3,4156-4174).
ccagcagacggccctattt

SEQ ID NO: 114240 - DNA, 19 bp, Homo sapiens
  siRNA target sequence for MACF1 (NM_012090.3,4165-4183).
ggccctatttgcagaaatt

SEQ ID NO: 114241 - DNA, 19 bp, Homo sapiens
  siRNA target sequence for MACF1 (NM_012090.3,4167-4185).
ccctatttgcagaaattga

SEQ ID NO: 114242 - DNA, 19 bp, Homo sapiens
  siRNA target sequence for MACF1 (NM_012090.3,4193-4211).
cagacaaaactggatcaat

SEQ ID NO: 114243 - DNA, 19 bp, Homo sapiens
  siRNA target sequence for MACF1 (NM_012090.3,4224-4242).
cccagcagtactctactat

SEQ ID NO: 114244 - DNA, 19 bp, Homo sapiens
  siRNA target sequence for MACF1 (NM_012090.3,4225-4243).
ccagcagtactctactatt

SEQ ID NO: 114245 - DNA, 19 bp, Homo sapiens
  siRNA target sequence for MACF1 (NM_012090.3,4228-4246).
gcagtactctactattgta

SEQ ID NO: 114246 - DNA, 19 bp, Homo sapiens
  siRNA target sequence for MACF1 (NM_012090.3,4229-4247).
cagtactctactattgtaa

SEQ ID NO: 114247 - DNA, 19 bp, Homo sapiens
  siRNA target sequence for MACF1 (NM_012090.3,4524-4542).
ccctagcgaggaatacaca

SEQ ID NO: 114248 - DNA, 19 bp, Homo sapiens
  siRNA target sequence for MACF1 (NM_012090.3,4525-4543).
cctagcgaggaatacacaa

SEQ ID NO: 114249 - DNA, 19 bp, Homo sapiens
  siRNA target sequence for MACF1 (NM_012090.3,4561-4579).
cgagaccaaagaatcaaca

SEQ ID NO: 114250 - DNA, 19 bp, Homo sapiens
  siRNA target sequence for MACF1 (NM_012090.3,4648-4666).
ctctgaagctattaaaaca

SEQ ID NO: 114251 - DNA, 19 bp, Homo sapiens
  siRNA target sequence for MACF1 (NM_012090.3,4683-4701).
ccaagcatggtcataagct

SEQ ID NO: 114252 - DNA, 19 bp, Homo sapiens
  siRNA target sequence for MACF1 (NM_012090.3,4691-4709).
ggtcataagctctcagaaa

SEQ ID NO: 114253 - DNA, 19 bp, Homo sapiens
  siRNA target sequence for MACF1 (NM_012090.3,4692-4710).
gtcataagctctcagaaaa

SEQ ID NO: 114254 - DNA, 19 bp, Homo sapiens
  siRNA target sequence for MACF1 (NM_012090.3,4733-4751).
caattgaatgccctaaaca

SEQ ID NO: 114255 - DNA, 19 bp, Homo sapiens
  siRNA target sequence for MACF1 (NM_012090.3,4815-4833).
ctcaccagacagaacaaaa

SEQ ID NO: 114256 - DNA, 19 bp, Homo sapiens
  siRNA target sequence for MACF1 (NM_012090.3,4865-4883).
cagcaactggaggatcttt

SEQ ID NO: 114257 - DNA, 19 bp, Homo sapiens
  siRNA target sequence for MACF1 (NM_012090.3,5005-5023).
gaatcgtgccacctcattt

SEQ ID NO: 114258 - DNA, 19 bp, Homo sapiens
  siRNA target sequence for MACF1 (NM_012090.3,5269-5287).
cctggattgggtaacttca

SEQ ID NO: 114259 - DNA, 19 bp, Homo sapiens
  siRNA target sequence for MACF1 (NM_012090.3,5272-5290).
ggattgggtaacttcagta

SEQ ID NO: 114260 - DNA, 19 bp, Homo sapiens
  siRNA target sequence for MACF1 (NM_012090.3,5579-5597).
ctaaaggaacaatactcta

SEQ ID NO: 114261 - DNA, 19 bp, Homo sapiens
  siRNA target sequence for MACF1 (NM_012090.3,5754-5772).
cccttccctccctgctaaa

SEQ ID NO: 114262 - DNA, 19 bp, Homo sapiens
  siRNA target sequence for MACF1 (NM_012090.3,5956-5974).
ctcaaagtgtacacgatta

SEQ ID NO: 114263 - DNA, 19 bp, Homo sapiens
  siRNA target sequence for MACF1 (NM_012090.3,5992-6010).
gctgttaggccagtatcat

SEQ ID NO: 114264 - DNA, 19 bp, Homo sapiens
  siRNA target sequence for MACF1 (NM_012090.3,5995-6013).
gttaggccagtatcatcaa

SEQ ID NO: 114265 - DNA, 19 bp, Homo sapiens
  siRNA target sequence for MACF1 (NM_012090.3,6071-6089).
gagaagctcctctcagata

SEQ ID NO: 114266 - DNA, 19 bp, Homo sapiens
  siRNA target sequence for MACF1 (NM_012090.3,6076-6094).
gctcctctcagatactgtt

SEQ ID NO: 114267 - DNA, 19 bp, Homo sapiens
  siRNA target sequence for MACF1 (NM_012090.3,6234-6252).
cagaccacaggcatgttca

SEQ ID NO: 114268 - DNA, 19 bp, Homo sapiens
  siRNA target sequence for MACF1 (NM_012090.3,6370-6388).
gagcctgttgcagtctatt

SEQ ID NO: 114269 - DNA, 19 bp, Homo sapiens
  siRNA target sequence for MACF1 (NM_012090.3,6384-6402).
ctattggggaagttgaaca

SEQ ID NO: 114270 - DNA, 19 bp, Homo sapiens
  siRNA target sequence for MACF1 (NM_012090.3,6456-6474).
ccttagccacaaatatgaa

SEQ ID NO: 114271 - DNA, 19 bp, Homo sapiens
  siRNA target sequence for MACF1 (NM_012090.3,6545-6563).
gagacagcagacagtacta

SEQ ID NO: 114272 - DNA, 19 bp, Homo sapiens
  siRNA target sequence for MACF1 (NM_012090.3,6753-6771).
cagatcaagatattacaca

SEQ ID NO: 114273 - DNA, 19 bp, Homo sapiens
  siRNA target sequence for MACF1 (NM_012090.3,6815-6833).
caacaggagaacctagata

SEQ ID NO: 114274 - DNA, 19 bp, Homo sapiens
  siRNA target sequence for MACF1 (NM_012090.3,6932-6950).
gagctacagaagacagtta

SEQ ID NO: 114275 - DNA, 19 bp, Homo sapiens
  siRNA target sequence for MACF1 (NM_012090.3,7056-7074).
cacctacggaaacttctat

SEQ ID NO: 114276 - DNA, 19 bp, Homo sapiens
  siRNA target sequence for MACF1 (NM_012090.3,7071-7089).
ctatgagtgctaaagagtt

SEQ ID NO: 114277 - DNA, 19 bp, Homo sapiens
  siRNA target sequence for MACF1 (NM_012090.3,7167-7185).
gcaaaggtacttctttaga

SEQ ID NO: 114278 - DNA, 19 bp, Homo sapiens
  siRNA target sequence for MACF1 (NM_012090.3,7333-7351).
cttgaagtatgagaaacta

SEQ ID NO: 114279 - DNA, 19 bp, Homo sapiens
  siRNA target sequence for MACF1 (NM_012090.3,7385-7403).
caggctatcctcaacagaa

SEQ ID NO: 114280 - DNA, 19 bp, Homo sapiens
  siRNA target sequence for MACF1 (NM_012090.3,7401-7419).
gaatggaggaggttcacaa

SEQ ID NO: 114281 - DNA, 19 bp, Homo sapiens
  siRNA target sequence for MACF1 (NM_012090.3,7457-7475).
gaggaagtcctgaaatcca

SEQ ID NO: 114282 - DNA, 19 bp, Homo sapiens
  siRNA target sequence for MACF1 (NM_012090.3,7518-7536).
cccaagctgaatctaacaa

SEQ ID NO: 114283 - DNA, 19 bp, Homo sapiens
  siRNA target sequence for MACF1 (NM_012090.3,7546-7564).
ggctgagttggaacagaat

SEQ ID NO: 114284 - DNA, 19 bp, Homo sapiens
  siRNA target sequence for MACF1 (NM_012090.3,7547-7565).
gctgagttggaacagaatt

SEQ ID NO: 114285 - DNA, 19 bp, Homo sapiens
  siRNA target sequence for MACF1 (NM_012090.3,7683-7701).
gggccactgaggttactgt

SEQ ID NO: 114286 - DNA, 19 bp, Homo sapiens
  siRNA target sequence for MACF1 (NM_012090.3,7824-7842).
ctattgaccccaacatgtt

SEQ ID NO: 114287 - DNA, 19 bp, Homo sapiens
  siRNA target sequence for MACF1 (NM_012090.3,8015-8033).
gagctgactgacaaactca

SEQ ID NO: 114288 - DNA, 19 bp, Homo sapiens
  siRNA target sequence for MACF1 (NM_012090.3,8035-8053).
ctcccgttccagccaaatt

SEQ ID NO: 114289 - DNA, 19 bp, Homo sapiens
  siRNA target sequence for MACF1 (NM_012090.3,8046-8064).
gccaaattgaccaagctat

SEQ ID NO: 114290 - DNA, 19 bp, Homo sapiens
  siRNA target sequence for MACF1 (NM_012090.3,8160-8178).
cccaaccagaggctgtaaa

SEQ ID NO: 114291 - DNA, 19 bp, Homo sapiens
  siRNA target sequence for MACF1 (NM_012090.3,8188-8206).
ggaagagaccagtgaaatt

SEQ ID NO: 114292 - DNA, 19 bp, Homo sapiens
  siRNA target sequence for MACF1 (NM_012090.3,8192-8210).
gagaccagtgaaattcgat

SEQ ID NO: 114293 - DNA, 19 bp, Homo sapiens
  siRNA target sequence for MACF1 (NM_012090.3,8337-8355).
ctctccaaggtttagaaga

SEQ ID NO: 114294 - DNA, 19 bp, Homo sapiens
  siRNA target sequence for MACF1 (NM_012090.3,8360-8378).
gcagccgatcgcattaaca

SEQ ID NO: 114295 - DNA, 19 bp, Homo sapiens
  siRNA target sequence for MACF1 (NM_012090.3,8407-8425).
gcagttccagcaaatgttt

SEQ ID NO: 114296 - DNA, 19 bp, Homo sapiens
  siRNA target sequence for MACF1 (NM_012090.3,8410-8428).
gttccagcaaatgtttgat

SEQ ID NO: 114297 - DNA, 19 bp, Homo sapiens
  siRNA target sequence for MACF1 (NM_012090.3,8436-8454).
ggacctggttggatgataa

SEQ ID NO: 114298 - DNA, 19 bp, Homo sapiens
  siRNA target sequence for MACF1 (NM_012090.3,8437-8455).
gacctggttggatgataaa

SEQ ID NO: 114299 - DNA, 19 bp, Homo sapiens
  siRNA target sequence for MACF1 (NM_012090.3,8476-8494).
ctgcccaatttctgcaaaa

SEQ ID NO: 114300 - DNA, 19 bp, Homo sapiens
  siRNA target sequence for MACF1 (NM_012090.3,8588-8606).
ggggaatctctacttcttt

SEQ ID NO: 114301 - DNA, 19 bp, Homo sapiens
  siRNA target sequence for MACF1 (NM_012090.3,8670-8688).
gggaagagcttagtaaaaa

SEQ ID NO: 114302 - DNA, 19 bp, Homo sapiens
  siRNA target sequence for MACF1 (NM_012090.3,8761-8779).
ccttgtgccatggatagaa

SEQ ID NO: 114303 - DNA, 19 bp, Homo sapiens
  siRNA target sequence for MACF1 (NM_012090.3,8767-8785).
gccatggatagaagattgt

SEQ ID NO: 114304 - DNA, 19 bp, Homo sapiens
  siRNA target sequence for MACF1 (NM_012090.3,8768-8786).
ccatggatagaagattgta

SEQ ID NO: 114305 - DNA, 19 bp, Homo sapiens
  siRNA target sequence for MACF1 (NM_012090.3,8769-8787).
catggatagaagattgtaa

SEQ ID NO: 114306 - DNA, 19 bp, Homo sapiens
  siRNA target sequence for MACF1 (NM_012090.3,8836-8854).
gtccagtctcctaagatca

SEQ ID NO: 114307 - DNA, 19 bp, Homo sapiens
  siRNA target sequence for MACF1 (NM_012090.3,8838-8856).
ccagtctcctaagatcaaa

SEQ ID NO: 114308 - DNA, 19 bp, Homo sapiens
  siRNA target sequence for MACF1 (NM_012090.3,9024-9042).
cagggtcactcgaagaaat

SEQ ID NO: 114309 - DNA, 19 bp, Homo sapiens
  siRNA target sequence for MACF1 (NM_012090.3,9026-9044).
gggtcactcgaagaaatga

SEQ ID NO: 114310 - DNA, 19 bp, Homo sapiens
  siRNA target sequence for MACF1 (NM_012090.3,9028-9046).
gtcactcgaagaaatgact

SEQ ID NO: 114311 - DNA, 19 bp, Homo sapiens
  siRNA target sequence for MACF1 (NM_012090.3,9311-9329).
caagagttcctcgaagtta

SEQ ID NO: 114312 - DNA, 19 bp, Homo sapiens
  siRNA target sequence for MACF1 (NM_012090.3,9316-9334).
gttcctcgaagttaagcaa

SEQ ID NO: 114313 - DNA, 19 bp, Homo sapiens
  siRNA target sequence for MACF1 (NM_012090.3,9377-9395).
gggattggccagtttcact

SEQ ID NO: 114314 - DNA, 19 bp, Homo sapiens
  siRNA target sequence for MACF1 (NM_012090.3,9396-9414).
gccgggtccgagagatgtt

SEQ ID NO: 114315 - DNA, 19 bp, Homo sapiens
  siRNA target sequence for MACF1 (NM_012090.3,9398-9416).
cgggtccgagagatgttct

SEQ ID NO: 114316 - DNA, 19 bp, Homo sapiens
  siRNA target sequence for MACF1 (NM_012090.3,9404-9422).
cgagagatgttctctcaat

SEQ ID NO: 114317 - DNA, 19 bp, Homo sapiens
  siRNA target sequence for MACF1 (NM_012090.3,9499-9517).
ggatgtccggctattcctt

SEQ ID NO: 114318 - DNA, 19 bp, Homo sapiens
  siRNA target sequence for MACF1 (NM_012090.3,9500-9518).
gatgtccggctattcctta

SEQ ID NO: 114319 - DNA, 19 bp, Homo sapiens
  siRNA target sequence for MACF1 (NM_012090.3,9503-9521).
gtccggctattccttaaca

SEQ ID NO: 114320 - DNA, 19 bp, Homo sapiens
  siRNA target sequence for MACF1 (NM_012090.3,9505-9523).
ccggctattccttaacaaa

SEQ ID NO: 114321 - DNA, 19 bp, Homo sapiens
  siRNA target sequence for MACF1 (NM_012090.3,9506-9524).
cggctattccttaacaaaa

SEQ ID NO: 114322 - DNA, 19 bp, Homo sapiens
  siRNA target sequence for MACF1 (NM_012090.3,9527-9545).
cacgtcctcaaattagaca

SEQ ID NO: 114323 - DNA, 19 bp, Homo sapiens
  siRNA target sequence for MACF1 (NM_012090.3,9529-9547).
cgtcctcaaattagacata

SEQ ID NO: 114324 - DNA, 19 bp, Homo sapiens
  siRNA target sequence for MACF1 (NM_012090.3,9561-9579).
cagagtgtcgacatatgct

SEQ ID NO: 114325 - DNA, 19 bp, Homo sapiens
  siRNA target sequence for MACF1 (NM_012090.3,9589-9607).
ggggactctggatttgtta

SEQ ID NO: 114326 - DNA, 19 bp, Homo sapiens
  siRNA target sequence for MACF1 (NM_012090.3,9702-9720).
gccgtgtagaggacttcta

SEQ ID NO: 114327 - DNA, 19 bp, Homo sapiens
  siRNA target sequence for MACF1 (NM_012090.3,9704-9722).
cgtgtagaggacttctaca

SEQ ID NO: 114328 - DNA, 19 bp, Homo sapiens
  siRNA target sequence for MACF1 (NM_012090.3,9792-9810).
ggaccgaagtggaaatcat

SEQ ID NO: 114329 - DNA, 19 bp, Homo sapiens
  siRNA target sequence for MACF1 (NM_012090.3,9814-9832).
ccaacaattagcagatttt

SEQ ID NO: 114330 - DNA, 19 bp, Homo sapiens
  siRNA target sequence for MACF1 (NM_012090.3,9890-9908).
ggacttggccagggattaa

SEQ ID NO: 114331 - DNA, 19 bp, Homo sapiens
  siRNA target sequence for MACF1 (NM_012090.3,9891-9909).
gacttggccagggattaat

SEQ ID NO: 114332 - DNA, 19 bp, Homo sapiens
  siRNA target sequence for MACF1 (NM_012090.3,9930-9948).
gtgatgtacagggtttaga

SEQ ID NO: 114333 - DNA, 19 bp, Homo sapiens
  siRNA target sequence for MACF1 (NM_012090.3,9964-9982).
gatcaatgctcgatggaat

SEQ ID NO: 114334 - DNA, 19 bp, Homo sapiens
  siRNA target sequence for MACF1 (NM_012090.3,9967-9985).
caatgctcgatggaataca

SEQ ID NO: 114335 - DNA, 19 bp, Homo sapiens
  siRNA target sequence for MACF1 (NM_012090.3,9971-9989).
gctcgatggaatacattga

SEQ ID NO: 114336 - DNA, 19 bp, Homo sapiens
  siRNA target sequence for MACF1 (NM_012090.3,9997-10015).
ggtcgcacaaagaattgca

SEQ ID NO: 114337 - DNA, 19 bp, Homo sapiens
  siRNA target sequence for MACF1 (NM_012090.3,10033-10051).
gttgcattgtgggaagttt

SEQ ID NO: 114338 - DNA, 19 bp, Homo sapiens
  siRNA target sequence for MACF1 (NM_012090.3,10122-10140).
catctgctgagtataaagt

SEQ ID NO: 114339 - DNA, 19 bp, Homo sapiens
  siRNA target sequence for MACF1 (NM_012090.3,10179-10197).
ggctcctagatgatcgaaa

SEQ ID NO: 114340 - DNA, 19 bp, Homo sapiens
  siRNA target sequence for MACF1 (NM_012090.3,10286-10304).
gagagtcttgaaagtagat

SEQ ID NO: 114341 - DNA, 19 bp, Homo sapiens
  siRNA target sequence for MACF1 (NM_012090.3,10305-10323).
ggactgaactactcagtaa

SEQ ID NO: 114342 - DNA, 19 bp, Homo sapiens
  siRNA target sequence for MACF1 (NM_012090.3,10324-10342).
ggcagcagccaggcaaaaa

SEQ ID NO: 114343 - DNA, 19 bp, Homo sapiens
  siRNA target sequence for MACF1 (NM_012090.3,10386-10404).
cagctgagcctatttctga

SEQ ID NO: 114344 - DNA, 19 bp, Homo sapiens
  siRNA target sequence for MACF1 (NM_012090.3,10393-10411).
gcctatttctgacttctta

SEQ ID NO: 114345 - DNA, 19 bp, Homo sapiens
  siRNA target sequence for MACF1 (NM_012090.3,10423-10441).
gaaaaagcttgctaactca

SEQ ID NO: 114346 - DNA, 19 bp, Homo sapiens
  siRNA target sequence for MACF1 (NM_012090.3,10589-10607).
cagggtgtgctgtcagaaa

SEQ ID NO: 114347 - DNA, 19 bp, Homo sapiens
  siRNA target sequence for MACF1 (NM_012090.3,10622-10640).
caggcccgatacagtgaaa

SEQ ID NO: 114348 - DNA, 19 bp, Homo sapiens
  siRNA target sequence for MACF1 (NM_012090.3,10624-10642).
ggcccgatacagtgaaatt

SEQ ID NO: 114349 - DNA, 19 bp, Homo sapiens
  siRNA target sequence for MACF1 (NM_012090.3,10626-10644).
cccgatacagtgaaattca

SEQ ID NO: 114350 - DNA, 19 bp, Homo sapiens
  siRNA target sequence for MACF1 (NM_012090.3,10627-10645).
ccgatacagtgaaattcaa

SEQ ID NO: 114351 - DNA, 19 bp, Homo sapiens
  siRNA target sequence for MACF1 (NM_012090.3,10629-10647).
gatacagtgaaattcaaga

SEQ ID NO: 114352 - DNA, 19 bp, Homo sapiens
  siRNA target sequence for MACF1 (NM_012090.3,10659-10677).
ggaaggcagccctacttga

SEQ ID NO: 114353 - DNA, 19 bp, Homo sapiens
  siRNA target sequence for MACF1 (NM_012090.3,10679-10697).
caagctctgtctaatgcta

SEQ ID NO: 114354 - DNA, 19 bp, Homo sapiens
  siRNA target sequence for MACF1 (NM_012090.3,10757-10775).
ctcagttcagtgttcgtaa

SEQ ID NO: 114355 - DNA, 19 bp, Homo sapiens
  siRNA target sequence for MACF1 (NM_012090.3,10761-10779).
gttcagtgttcgtaaagga

SEQ ID NO: 114356 - DNA, 19 bp, Homo sapiens
  siRNA target sequence for MACF1 (NM_012090.3,10764-10782).
cagtgttcgtaaaggattt

SEQ ID NO: 114357 - DNA, 19 bp, Homo sapiens
  siRNA target sequence for MACF1 (NM_012090.3,10766-10784).
gtgttcgtaaaggatttca

SEQ ID NO: 114358 - DNA, 19 bp, Homo sapiens
  siRNA target sequence for MACF1 (NM_012090.3,10820-10838).
ctggctttaaatgaagaaa

SEQ ID NO: 114359 - DNA, 19 bp, Homo sapiens
  siRNA target sequence for MACF1 (NM_012090.3,10881-10899).
gtcaggctcttctaaaaca

SEQ ID NO: 114360 - DNA, 19 bp, Homo sapiens
  siRNA target sequence for MACF1 (NM_012090.3,10960-10978).
cgcagacatcacagttact

SEQ ID NO: 114361 - DNA, 19 bp, Homo sapiens
  siRNA target sequence for MACF1 (NM_012090.3,10961-10979).
gcagacatcacagttacta

SEQ ID NO: 114362 - DNA, 19 bp, Homo sapiens
  siRNA target sequence for MACF1 (NM_012090.3,10983-11001).
ccaaggccctcagaacttt

SEQ ID NO: 114363 - DNA, 19 bp, Homo sapiens
  siRNA target sequence for MACF1 (NM_012090.3,10984-11002).
caaggccctcagaacttta

SEQ ID NO: 114364 - DNA, 19 bp, Homo sapiens
  siRNA target sequence for MACF1 (NM_012090.3,11025-11043).
ccaagttccagtctactta

SEQ ID NO: 114365 - DNA, 19 bp, Homo sapiens
  siRNA target sequence for MACF1 (NM_012090.3,11203-11221).
ggtgagccgtgctctctta

SEQ ID NO: 114366 - DNA, 19 bp, Homo sapiens
  siRNA target sequence for MACF1 (NM_012090.3,11241-11259).
ccagagaagggctggataa

SEQ ID NO: 114367 - DNA, 19 bp, Homo sapiens
  siRNA target sequence for MACF1 (NM_012090.3,11274-11292).
ctaacgagcagtacaaact

SEQ ID NO: 114368 - DNA, 19 bp, Homo sapiens
  siRNA target sequence for MACF1 (NM_012090.3,11413-11431).
gatggctctgggtccaatt

SEQ ID NO: 114369 - DNA, 19 bp, Homo sapiens
  siRNA target sequence for MACF1 (NM_012090.3,11482-11500).
ctccattgacattattcga

SEQ ID NO: 114370 - DNA, 19 bp, Homo sapiens
  siRNA target sequence for MACF1 (NM_012090.3,11529-11547).
gtcaccgtagtgaaatctt

SEQ ID NO: 114371 - DNA, 19 bp, Homo sapiens
  siRNA target sequence for MACF1 (NM_012090.3,11618-11636).
gccattagcctactcaatt

SEQ ID NO: 114372 - DNA, 19 bp, Homo sapiens
  siRNA target sequence for MACF1 (NM_012090.3,11722-11740).
ggaaactcgggcactaata

SEQ ID NO: 114373 - DNA, 19 bp, Homo sapiens
  siRNA target sequence for MACF1 (NM_012090.3,11731-11749).
ggcactaatagcacagtta

SEQ ID NO: 114374 - DNA, 19 bp, Homo sapiens
  siRNA target sequence for MACF1 (NM_012090.3,11752-11770).
ctctccagccattgatcat

SEQ ID NO: 114375 - DNA, 19 bp, Homo sapiens
  siRNA target sequence for MACF1 (NM_012090.3,11803-11821).
gcaattaagggaatctatt

SEQ ID NO: 114376 - DNA, 19 bp, Homo sapiens
  siRNA target sequence for MACF1 (NM_012090.3,11828-11846).
cacaaacctcatattgaca

SEQ ID NO: 114377 - DNA, 19 bp, Homo sapiens
  siRNA target sequence for MACF1 (NM_012090.3,11835-11853).
ctcatattgacaaactact

SEQ ID NO: 114378 - DNA, 19 bp, Homo sapiens
  siRNA target sequence for MACF1 (NM_012090.3,11861-11879).
ggcccacaactaaaggaat

SEQ ID NO: 114379 - DNA, 19 bp, Homo sapiens
  siRNA target sequence for MACF1 (NM_012090.3,11862-11880).
gcccacaactaaaggaatt

SEQ ID NO: 114380 - DNA, 19 bp, Homo sapiens
  siRNA target sequence for MACF1 (NM_012090.3,11863-11881).
cccacaactaaaggaatta

SEQ ID NO: 114381 - DNA, 19 bp, Homo sapiens
  siRNA target sequence for MACF1 (NM_012090.3,12007-12025).
gattacagagtttcatgat

SEQ ID NO: 114382 - DNA, 19 bp, Homo sapiens
  siRNA target sequence for MACF1 (NM_012090.3,12043-12061).
ggagacactggagaatctt

SEQ ID NO: 114383 - DNA, 19 bp, Homo sapiens
  siRNA target sequence for MACF1 (NM_012090.3,12093-12111).
ctgctgaagtagacaagat

SEQ ID NO: 114384 - DNA, 19 bp, Homo sapiens
  siRNA target sequence for MACF1 (NM_012090.3,12229-12247).
caaggatctggctgcaaaa

SEQ ID NO: 114385 - DNA, 19 bp, Homo sapiens
  siRNA target sequence for MACF1 (NM_012090.3,12232-12250).
ggatctggctgcaaaagaa

SEQ ID NO: 114386 - DNA, 19 bp, Homo sapiens
  siRNA target sequence for MACF1 (NM_012090.3,12380-12398).
ctgaccaccatcaaagaca

SEQ ID NO: 114387 - DNA, 19 bp, Homo sapiens
  siRNA target sequence for MACF1 (NM_012090.3,12441-12459).
cttccatcatcaaacaaca

SEQ ID NO: 114388 - DNA, 19 bp, Homo sapiens
  siRNA target sequence for MACF1 (NM_012090.3,12468-12486).
ctgctgagactattaagga

SEQ ID NO: 114389 - DNA, 19 bp, Homo sapiens
  siRNA target sequence for MACF1 (NM_012090.3,12525-12543).
ggatccttggagcagattt

SEQ ID NO: 114390 - DNA, 19 bp, Homo sapiens
  siRNA target sequence for MACF1 (NM_012090.3,12529-12547).
ccttggagcagatttgatt

SEQ ID NO: 114391 - DNA, 19 bp, Homo sapiens
  siRNA target sequence for MACF1 (NM_012090.3,12589-12607).
cattgatgagatgaataat

SEQ ID NO: 114392 - DNA, 19 bp, Homo sapiens
  siRNA target sequence for MACF1 (NM_012090.3,12609-12627).
cttgggagaacttaaacaa

SEQ ID NO: 114393 - DNA, 19 bp, Homo sapiens
  siRNA target sequence for MACF1 (NM_012090.3,12759-12777).
gcactgacctcaatactgt

SEQ ID NO: 114394 - DNA, 19 bp, Homo sapiens
  siRNA target sequence for MACF1 (NM_012090.3,12760-12778).
cactgacctcaatactgtt

SEQ ID NO: 114395 - DNA, 19 bp, Homo sapiens
  siRNA target sequence for MACF1 (NM_012090.3,12766-12784).
cctcaatactgttaaagat

SEQ ID NO: 114396 - DNA, 19 bp, Homo sapiens
  siRNA target sequence for MACF1 (NM_012090.3,12774-12792).
ctgttaaagatcagttaaa

SEQ ID NO: 114397 - DNA, 19 bp, Homo sapiens
  siRNA target sequence for MACF1 (NM_012090.3,12802-12820).
ggagttcaaagtagaagtt

SEQ ID NO: 114398 - DNA, 19 bp, Homo sapiens
  siRNA target sequence for MACF1 (NM_012090.3,12803-12821).
gagttcaaagtagaagttt

SEQ ID NO: 114399 - DNA, 19 bp, Homo sapiens
  siRNA target sequence for MACF1 (NM_012090.3,12860-12878).
ggtgaactgatgttaaaga

SEQ ID NO: 114400 - DNA, 19 bp, Homo sapiens
  siRNA target sequence for MACF1 (NM_012090.3,12892-12910).
gacggacagagacattata

SEQ ID NO: 114401 - DNA, 19 bp, Homo sapiens
  siRNA target sequence for MACF1 (NM_012090.3,12895-12913).
ggacagagacattatacga

SEQ ID NO: 114402 - DNA, 19 bp, Homo sapiens
  siRNA target sequence for MACF1 (NM_012090.3,12966-12984).
cccaccgacagcacaaact

SEQ ID NO: 114403 - DNA, 19 bp, Homo sapiens
  siRNA target sequence for MACF1 (NM_012090.3,12967-12985).
ccaccgacagcacaaacta

SEQ ID NO: 114404 - DNA, 19 bp, Homo sapiens
  siRNA target sequence for MACF1 (NM_012090.3,12970-12988).
ccgacagcacaaactagaa

SEQ ID NO: 114405 - DNA, 19 bp, Homo sapiens
  siRNA target sequence for MACF1 (NM_012090.3,13070-13088).
gatgctcagagaccaataa

SEQ ID NO: 114406 - DNA, 19 bp, Homo sapiens
  siRNA target sequence for MACF1 (NM_012090.3,13098-13116).
caaaagtcattgaagttga

SEQ ID NO: 114407 - DNA, 19 bp, Homo sapiens
  siRNA target sequence for MACF1 (NM_012090.3,13234-13252).
cttaaggagccgtttggaa

SEQ ID NO: 114408 - DNA, 19 bp, Homo sapiens
  siRNA target sequence for MACF1 (NM_012090.3,13270-13288).
ggagtcagtgttacagaaa

SEQ ID NO: 114409 - DNA, 19 bp, Homo sapiens
  siRNA target sequence for MACF1 (NM_012090.3,13271-13289).
gagtcagtgttacagaaaa

SEQ ID NO: 114410 - DNA, 19 bp, Homo sapiens
  siRNA target sequence for MACF1 (NM_012090.3,13334-13352).
cagggcttccacagtgaaa

SEQ ID NO: 114411 - DNA, 19 bp, Homo sapiens
  siRNA target sequence for MACF1 (NM_012090.3,13338-13356).
gcttccacagtgaaattga

SEQ ID NO: 114412 - DNA, 19 bp, Homo sapiens
  siRNA target sequence for MACF1 (NM_012090.3,13339-13357).
cttccacagtgaaattgaa

SEQ ID NO: 114413 - DNA, 19 bp, Homo sapiens
  siRNA target sequence for MACF1 (NM_012090.3,13363-13381).
cctcttggaacttactaga

SEQ ID NO: 114414 - DNA, 19 bp, Homo sapiens
  siRNA target sequence for MACF1 (NM_012090.3,13364-13382).
ctcttggaacttactagaa

SEQ ID NO: 114415 - DNA, 19 bp, Homo sapiens
  siRNA target sequence for MACF1 (NM_012090.3,13389-13407).
gccagctttctgcatctaa

SEQ ID NO: 114416 - DNA, 19 bp, Homo sapiens
  siRNA target sequence for MACF1 (NM_012090.3,13433-13451).
gctagggaacagcttgata

SEQ ID NO: 114417 - DNA, 19 bp, Homo sapiens
  siRNA target sequence for MACF1 (NM_012090.3,13444-13462).
gcttgatacacatatggaa

SEQ ID NO: 114418 - DNA, 19 bp, Homo sapiens
  siRNA target sequence for MACF1 (NM_012090.3,13494-13512).
cttataatcaactacttga

SEQ ID NO: 114419 - DNA, 19 bp, Homo sapiens
  siRNA target sequence for MACF1 (NM_012090.3,13517-13535).
ggcagactcatgcttctaa

SEQ ID NO: 114420 - DNA, 19 bp, Homo sapiens
  siRNA target sequence for MACF1 (NM_012090.3,13680-13698).
ccctacaagaatttatcaa

SEQ ID NO: 114421 - DNA, 19 bp, Homo sapiens
  siRNA target sequence for MACF1 (NM_012090.3,13761-13779).
ctgtcctttcccagataga

SEQ ID NO: 114422 - DNA, 19 bp, Homo sapiens
  siRNA target sequence for MACF1 (NM_012090.3,13838-13856).
gatcaaactgggaatcaat

SEQ ID NO: 114423 - DNA, 19 bp, Homo sapiens
  siRNA target sequence for MACF1 (NM_012090.3,13845-13863).
ctgggaatcaattaaagtt

SEQ ID NO: 114424 - DNA, 19 bp, Homo sapiens
  siRNA target sequence for MACF1 (NM_012090.3,13933-13951).
ggttgtccagcgatctatt

SEQ ID NO: 114425 - DNA, 19 bp, Homo sapiens
  siRNA target sequence for MACF1 (NM_012090.3,13956-13974).
gagggcgatcactagatga

SEQ ID NO: 114426 - DNA, 19 bp, Homo sapiens
  siRNA target sequence for MACF1 (NM_012090.3,13980-13998).
ggaagcgggcaaaacaatt

SEQ ID NO: 114427 - DNA, 19 bp, Homo sapiens
  siRNA target sequence for MACF1 (NM_012090.3,14020-14038).
gattgactggctagaagat

SEQ ID NO: 114428 - DNA, 19 bp, Homo sapiens
  siRNA target sequence for MACF1 (NM_012090.3,14058-14076).
cagaactagagatatccaa

SEQ ID NO: 114429 - DNA, 19 bp, Homo sapiens
  siRNA target sequence for MACF1 (NM_012090.3,14174-14192).
ggcagagcactgaaagaaa

SEQ ID NO: 114430 - DNA, 19 bp, Homo sapiens
  siRNA target sequence for MACF1 (NM_012090.3,14205-14223).
ccgaagatagtcagaaact

SEQ ID NO: 114431 - DNA, 19 bp, Homo sapiens
  siRNA target sequence for MACF1 (NM_012090.3,14206-14224).
cgaagatagtcagaaactt

SEQ ID NO: 114432 - DNA, 19 bp, Homo sapiens
  siRNA target sequence for MACF1 (NM_012090.3,14218-14236).
gaaacttgacaatttccta

SEQ ID NO: 114433 - DNA, 19 bp, Homo sapiens
  siRNA target sequence for MACF1 (NM_012090.3,14504-14522).
ggccgagagctgattgaga

SEQ ID NO: 114434 - DNA, 19 bp, Homo sapiens
  siRNA target sequence for MACF1 (NM_012090.3,14506-14524).
ccgagagctgattgagaat

SEQ ID NO: 114435 - DNA, 19 bp, Homo sapiens
  siRNA target sequence for MACF1 (NM_012090.3,14619-14637).
ggcttgagcaggccttaaa

SEQ ID NO: 114436 - DNA, 19 bp, Homo sapiens
  siRNA target sequence for MACF1 (NM_012090.3,14620-14638).
gcttgagcaggccttaaaa

SEQ ID NO: 114437 - DNA, 19 bp, Homo sapiens
  siRNA target sequence for MACF1 (NM_012090.3,14674-14692).
gttggagtggctttctgaa

SEQ ID NO: 114438 - DNA, 19 bp, Homo sapiens
  siRNA target sequence for MACF1 (NM_012090.3,14763-14781).
cccataaggaattcatgaa

SEQ ID NO: 114439 - DNA, 19 bp, Homo sapiens
  siRNA target sequence for MACF1 (NM_012090.3,14797-14815).
gcgagtggacgttaactca

SEQ ID NO: 114440 - DNA, 19 bp, Homo sapiens
  siRNA target sequence for MACF1 (NM_012090.3,14982-15000).
ctgagctcctggaagaact

SEQ ID NO: 114441 - DNA, 19 bp, Homo sapiens
  siRNA target sequence for MACF1 (NM_012090.3,15054-15072).
caatcccgcagaacattga

SEQ ID NO: 114442 - DNA, 19 bp, Homo sapiens
  siRNA target sequence for MACF1 (NM_012090.3,15091-15109).
cgctgagcatcagacattt

SEQ ID NO: 114443 - DNA, 19 bp, Homo sapiens
  siRNA target sequence for MACF1 (NM_012090.3,15143-15161).
gaccgggtcaccaagacat

SEQ ID NO: 114444 - DNA, 19 bp, Homo sapiens
  siRNA target sequence for MACF1 (NM_012090.3,15146-15164).
cgggtcaccaagacataca

SEQ ID NO: 114445 - DNA, 19 bp, Homo sapiens
  siRNA target sequence for MACF1 (NM_012090.3,15147-15165).
gggtcaccaagacatacaa

SEQ ID NO: 114446 - DNA, 19 bp, Homo sapiens
  siRNA target sequence for MACF1 (NM_012090.3,15183-15201).
ctactcacgcgcctttcat

SEQ ID NO: 114447 - DNA, 19 bp, Homo sapiens
  siRNA target sequence for MACF1 (NM_012090.3,15186-15204).
ctcacgcgcctttcataga

SEQ ID NO: 114448 - DNA, 19 bp, Homo sapiens
  siRNA target sequence for MACF1 (NM_012090.3,15188-15206).
cacgcgcctttcatagaga

SEQ ID NO: 114449 - DNA, 19 bp, Homo sapiens
  siRNA target sequence for MACF1 (NM_012090.3,15190-15208).
cgcgcctttcatagagaaa

SEQ ID NO: 114450 - DNA, 19 bp, Homo sapiens
  siRNA target sequence for MACF1 (NM_012090.3,15191-15209).
gcgcctttcatagagaaat

SEQ ID NO: 114451 - DNA, 19 bp, Homo sapiens
  siRNA target sequence for MACF1 (NM_012090.3,15251-15269).
cctcccatgccaatccttt

SEQ ID NO: 114452 - DNA, 19 bp, Homo sapiens
  siRNA target sequence for MACF1 (NM_012090.3,15346-15364).
gcggcaaaggaaactgaat

SEQ ID NO: 114453 - DNA, 19 bp, Homo sapiens
  siRNA target sequence for MACF1 (NM_012090.3,15349-15367).
gcaaaggaaactgaatgat

SEQ ID NO: 114454 - DNA, 19 bp, Homo sapiens
  siRNA target sequence for MACF1 (NM_012090.3,15402-15420).
ccaactttgactttgatgt

SEQ ID NO: 114455 - DNA, 19 bp, Homo sapiens
  siRNA target sequence for MACF1 (NM_012090.3,15419-15437).
gtctggaggaaaaagtata

SEQ ID NO: 114456 - DNA, 19 bp, Homo sapiens
  siRNA target sequence for MACF1 (NM_012090.3,15433-15451).
gtatatgcgttggatgaat

SEQ ID NO: 114457 - DNA, 19 bp, Homo sapiens
  siRNA target sequence for MACF1 (NM_012090.3,15516-15534).
cacgtcaggagtttatcga

SEQ ID NO: 114458 - DNA, 19 bp, Homo sapiens
  siRNA target sequence for MACF1 (NM_012090.3,15675-15693).
caacaaccgatgcagataa

SEQ ID NO: 114459 - DNA, 19 bp, Homo sapiens
  siRNA target sequence for MACF1 (NM_012090.3,15681-15699).
ccgatgcagataaaatcga

SEQ ID NO: 114460 - DNA, 19 bp, Homo sapiens
  siRNA target sequence for MACF1 (NM_012090.3,15861-15879).
ccttggatgaatttttagt

SEQ ID NO: 114461 - DNA, 19 bp, Homo sapiens
  siRNA target sequence for MACF1 (NM_012090.3,15895-15913).
ccgagcacgaggtagaact

SEQ ID NO: 114462 - DNA, 19 bp, Homo sapiens
  siRNA target sequence for MACF1 (NM_012090.3,15896-15914).
cgagcacgaggtagaacta

SEQ ID NO: 114463 - DNA, 19 bp, Homo sapiens
  siRNA target sequence for MACF1 (NM_012090.3,15897-15915).
gagcacgaggtagaactaa

SEQ ID NO: 114464 - DNA, 19 bp, Homo sapiens
  siRNA target sequence for MACF1 (NM_012090.3,15899-15917).
gcacgaggtagaactaaca

SEQ ID NO: 114465 - DNA, 19 bp, Homo sapiens
  siRNA target sequence for MACF1 (NM_012090.3,15900-15918).
cacgaggtagaactaacat

SEQ ID NO: 114466 - DNA, 19 bp, Homo sapiens
  siRNA target sequence for MACF1 (NM_012090.3,15906-15924).
gtagaactaacattgaact

SEQ ID NO: 114467 - DNA, 19 bp, Homo sapiens
  siRNA target sequence for MACF1 (NM_012090.3,15986-16004).
ggtcgaaggtccaaaccat

SEQ ID NO: 114468 - DNA, 19 bp, Homo sapiens
  siRNA target sequence for MACF1 (NM_012090.3,16038-16056).
ccagtgctagtcagagtaa

SEQ ID NO: 114469 - DNA, 19 bp, Homo sapiens
  siRNA target sequence for MACF1 (NM_012090.3,16145-16163).
ccaacaccaacttttcatt

SEQ ID NO: 114470 - DNA, 19 bp, Homo sapiens
  siRNA target sequence for MACF1 (NM_012090.3,16181-16199).
gctggtgataccagcaata

SEQ ID NO: 114471 - DNA, 19 bp, Homo sapiens
  siRNA target sequence for MACF1 (NM_012090.3,16235-16253).
cgggcagaccctaaaaagt

SEQ ID NO: 114472 - DNA, 19 bp, Homo sapiens
  siRNA target sequence for MACF1 (NM_012090.3,16237-16255).
ggcagaccctaaaaagtct

SEQ ID NO: 114473 - DNA, 19 bp, Homo sapiens
  siRNA target sequence for MACF1 (NM_012090.3,16320-16338).
gtgacgcttctgactttga

SEQ ID NO: 114474 - DNA, 19 bp, Homo sapiens
  siRNA target sequence for MACF1 (NM_012090.3,16329-16347).
ctgactttgacctcttaga

SEQ ID NO: 114475 - DNA, 19 bp, Homo sapiens
  siRNA target sequence for MACF1 (NM_012090.3,16407-16425).
ccaggagagggctaaacaa

SEQ ID NO: 114476 - DNA, 19 bp, Homo sapiens
  siRNA target sequence for MACF1 (NM_033044.2,208-226).
cccctgagacgggtgaaaa

SEQ ID NO: 114477 - DNA, 19 bp, Homo sapiens
  siRNA target sequence for MACF1 (NM_033044.2,217-235).
cgggtgaaaacctctcttt

SEQ ID NO: 114478 - DNA, 19 bp, Homo sapiens
  siRNA target sequence for MACF1 (NM_033044.2,334-352).
gcagaggccctctttctgt

SEQ ID NO: 114479 - DNA, 19 bp, Homo sapiens
  siRNA target sequence for MACF1 (NM_033044.2,442-460).
cccctagtgagaactgtat

SEQ ID NO: 114480 - DNA, 19 bp, Homo sapiens
  siRNA target sequence for MACF1 (NM_033044.2,444-462).
cctagtgagaactgtatta

SEQ ID NO: 114481 - DNA, 19 bp, Homo sapiens
  siRNA target sequence for MACF1 (NM_033044.2,498-516).
gcatggcttcattcagtat

SEQ ID NO: 114482 - DNA, 19 bp, Homo sapiens
  siRNA target sequence for MACF1 (NM_033044.2,499-517).
catggcttcattcagtatt

SEQ ID NO: 114483 - DNA, 19 bp, Homo sapiens
  siRNA target sequence for MACF1 (NM_033044.2,511-529).
cagtattagagtcttatct

SEQ ID NO: 114484 - DNA, 19 bp, Homo sapiens
  siRNA target sequence for MACF1 (NM_033044.2,519-537).
gagtcttatcttagaacat

SEQ ID NO: 114485 - DNA, 19 bp, Homo sapiens
  siRNA target sequence for MACF1 (NM_033044.2,528-546).
cttagaacatccaagaatt

SEQ ID NO: 114486 - DNA, 19 bp, Homo sapiens
  siRNA target sequence for MACF1 (NM_033044.2,532-550).
gaacatccaagaatttgat

SEQ ID NO: 114487 - DNA, 19 bp, Homo sapiens
  siRNA target sequence for MACF1 (NM_033044.2,535-553).
catccaagaatttgataga

SEQ ID NO: 114488 - DNA, 19 bp, Homo sapiens
  siRNA target sequence for MACF1 (NM_033044.2,556-574).
ctaacacagctgagaaaat

SEQ ID NO: 114489 - DNA, 19 bp, Homo sapiens
  siRNA target sequence for MACF1 (NM_033044.2,678-696).
ggccggaaggttagcattt

SEQ ID NO: 114490 - DNA, 19 bp, Homo sapiens
  siRNA target sequence for MACF1 (NM_033044.2,679-697).
gccggaaggttagcatttt

SEQ ID NO: 114491 - DNA, 19 bp, Homo sapiens
  siRNA target sequence for MACF1 (NM_033044.2,708-726).
caggaagggctaatagata

SEQ ID NO: 114492 - DNA, 19 bp, Homo sapiens
  siRNA target sequence for MACF1 (NM_033044.2,816-834).
gctgtaagacataatctga

SEQ ID NO: 114493 - DNA, 19 bp, Homo sapiens
  siRNA target sequence for MACF1 (NM_033044.2,817-835).
ctgtaagacataatctgat

SEQ ID NO: 114494 - DNA, 19 bp, Homo sapiens
  siRNA target sequence for MACF1 (NM_033044.2,904-922).
cggggcaaaggctaacaat

SEQ ID NO: 114495 - DNA, 19 bp, Homo sapiens
  siRNA target sequence for MACF1 (NM_033044.2,905-923).
ggggcaaaggctaacaata

SEQ ID NO: 114496 - DNA, 19 bp, Homo sapiens
  siRNA target sequence for MACF1 (NM_033044.2,907-925).
ggcaaaggctaacaataga

SEQ ID NO: 114497 - DNA, 19 bp, Homo sapiens
  siRNA target sequence for MACF1 (NM_033044.2,908-926).
gcaaaggctaacaatagat

SEQ ID NO: 114498 - DNA, 19 bp, Homo sapiens
  siRNA target sequence for MACF1 (NM_033044.2,955-973).
ctaagatcgcccttgtgat

SEQ ID NO: 114499 - DNA, 19 bp, Homo sapiens
  siRNA target sequence for MACF1 (NM_033044.2,1020-1038).
ggagagatcctcccaatta

SEQ ID NO: 114500 - DNA, 19 bp, Homo sapiens
  siRNA target sequence for MACF1 (NM_033044.2,1025-1043).
gatcctcccaattacagat

SEQ ID NO: 114501 - DNA, 19 bp, Homo sapiens
  siRNA target sequence for MACF1 (NM_033044.2,1066-1084).
ctactgaactagcacataa

SEQ ID NO: 114502 - DNA, 19 bp, Homo sapiens
  siRNA target sequence for MACF1 (NM_033044.2,1074-1092).
ctagcacataaaatcctta

SEQ ID NO: 114503 - DNA, 19 bp, Homo sapiens
  siRNA target sequence for MACF1 (NM_033044.2,1077-1095).
gcacataaaatccttagta

SEQ ID NO: 114504 - DNA, 19 bp, Homo sapiens
  siRNA target sequence for MACF1 (NM_033044.2,1103-1121).
gcatattaaggctctgttt

SEQ ID NO: 114505 - DNA, 19 bp, Homo sapiens
  siRNA target sequence for MACF1 (NM_033044.2,1128-1146).
gcaaccacagagattttgt

SEQ ID NO: 114506 - DNA, 19 bp, Homo sapiens
  siRNA target sequence for MACF1 (NM_033044.2,1188-1206).
cttgccaataacttaaaat

SEQ ID NO: 114507 - DNA, 19 bp, Homo sapiens
  siRNA target sequence for MACF1 (NM_033044.2,1191-1209).
gccaataacttaaaatcga

SEQ ID NO: 114508 - DNA, 19 bp, Homo sapiens
  siRNA target sequence for MACF1 (NM_033044.2,1192-1210).
ccaataacttaaaatcgat

SEQ ID NO: 114509 - DNA, 19 bp, Homo sapiens
  siRNA target sequence for MACF1 (NM_033044.2,1248-1266).
gactctgcagaacaaaata

SEQ ID NO: 114510 - DNA, 19 bp, Homo sapiens
  siRNA target sequence for MACF1 (NM_033044.2,1321-1339).
caagccagagtgagaatct

SEQ ID NO: 114511 - DNA, 19 bp, Homo sapiens
  siRNA target sequence for MACF1 (NM_033044.2,1363-1381).
gctatattaatgtgcaaaa

SEQ ID NO: 114512 - DNA, 19 bp, Homo sapiens
  siRNA target sequence for MACF1 (NM_033044.2,1679-1697).
ccctgaacaggatctgttt

SEQ ID NO: 114513 - DNA, 19 bp, Homo sapiens
  siRNA target sequence for MACF1 (NM_033044.2,1681-1699).
ctgaacaggatctgtttgt

SEQ ID NO: 114514 - DNA, 19 bp, Homo sapiens
  siRNA target sequence for MACF1 (NM_033044.2,1752-1770).
gtcaaattagaggtacaaa

SEQ ID NO: 114515 - DNA, 19 bp, Homo sapiens
  siRNA target sequence for MACF1 (NM_033044.2,1763-1781).
ggtacaaaggcagttgata

SEQ ID NO: 114516 - DNA, 19 bp, Homo sapiens
  siRNA target sequence for MACF1 (NM_033044.2,1767-1785).
caaaggcagttgataggta

SEQ ID NO: 114517 - DNA, 19 bp, Homo sapiens
  siRNA target sequence for MACF1 (NM_033044.2,1877-1895).
gccgttggtggttgacaaa

SEQ ID NO: 114518 - DNA, 19 bp, Homo sapiens
  siRNA target sequence for MACF1 (NM_033044.2,1926-1944).
gaacatcaacctctaagaa

SEQ ID NO: 114519 - DNA, 19 bp, Homo sapiens
  siRNA target sequence for MACF1 (NM_033044.2,1932-1950).
caacctctaagaaacactt

SEQ ID NO: 114520 - DNA, 19 bp, Homo sapiens
  siRNA target sequence for MACF1 (NM_033044.2,2068-2086).
ctctaggtataaagttaga

SEQ ID NO: 114521 - DNA, 19 bp, Homo sapiens
  siRNA target sequence for MACF1 (NM_033044.2,2073-2091).
ggtataaagttagaactaa

SEQ ID NO: 114522 - DNA, 19 bp, Homo sapiens
  siRNA target sequence for MACF1 (NM_033044.2,2156-2174).
ggctaaggatgaccataaa

SEQ ID NO: 114523 - DNA, 19 bp, Homo sapiens
  siRNA target sequence for MACF1 (NM_033044.2,2264-2282).
gtcatgcagtcatccatta

SEQ ID NO: 114524 - DNA, 19 bp, Homo sapiens
  siRNA target sequence for MACF1 (NM_033044.2,2266-2284).
catgcagtcatccattaga

SEQ ID NO: 114525 - DNA, 19 bp, Homo sapiens
  siRNA target sequence for MACF1 (NM_033044.2,2272-2290).
gtcatccattagaattgct

SEQ ID NO: 114526 - DNA, 19 bp, Homo sapiens
  siRNA target sequence for MACF1 (NM_033044.2,2289-2307).
cttgaagaagctaccttaa

SEQ ID NO: 114527 - DNA, 19 bp, Homo sapiens
  siRNA target sequence for MACF1 (NM_033044.2,2295-2313).
gaagctaccttaaatgtat

SEQ ID NO: 114528 - DNA, 19 bp, Homo sapiens
  siRNA target sequence for MACF1 (NM_033044.2,2335-2353).
gtggtatctttcatgaaca

SEQ ID NO: 114529 - DNA, 19 bp, Homo sapiens
  siRNA target sequence for MACF1 (NM_033044.2,2358-2376).
ggtcaaaagctcttactaa

SEQ ID NO: 114530 - DNA, 19 bp, Homo sapiens
  siRNA target sequence for MACF1 (NM_033044.2,2541-2559).
ctcatggcagacaaagcta

SEQ ID NO: 114531 - DNA, 19 bp, Homo sapiens
  siRNA target sequence for MACF1 (NM_033044.2,2557-2575).
ctataagtggtgtcttaga

SEQ ID NO: 114532 - DNA, 19 bp, Homo sapiens
  siRNA target sequence for MACF1 (NM_033044.2,2669-2687).
ggtgactggtggaattatt

SEQ ID NO: 114533 - DNA, 19 bp, Homo sapiens
  siRNA target sequence for MACF1 (NM_033044.2,2698-2716).
gaggcaaaaaagtttcagt

SEQ ID NO: 114534 - DNA, 19 bp, Homo sapiens
  siRNA target sequence for MACF1 (NM_033044.2,2812-2830).
cagttagggagagattaat

SEQ ID NO: 114535 - DNA, 19 bp, Homo sapiens
  siRNA target sequence for MACF1 (NM_033044.2,2814-2832).
gttagggagagattaatta

SEQ ID NO: 114536 - DNA, 19 bp, Homo sapiens
  siRNA target sequence for MACF1 (NM_033044.2,2856-2874).
cttatagaccctgatagta

SEQ ID NO: 114537 - DNA, 19 bp, Homo sapiens
  siRNA target sequence for MACF1 (NM_033044.2,2923-2941).
gagaggaggccgttcgttt

SEQ ID NO: 114538 - DNA, 19 bp, Homo sapiens
  siRNA target sequence for MACF1 (NM_033044.2,2928-2946).
gaggccgttcgtttgttga

SEQ ID NO: 114539 - DNA, 19 bp, Homo sapiens
  siRNA target sequence for MACF1 (NM_033044.2,2931-2949).
gccgttcgtttgttgacta

SEQ ID NO: 114540 - DNA, 19 bp, Homo sapiens
  siRNA target sequence for MACF1 (NM_033044.2,2932-2950).
ccgttcgtttgttgactaa

SEQ ID NO: 114541 - DNA, 19 bp, Homo sapiens
  siRNA target sequence for MACF1 (NM_033044.2,2965-2983).
gaggtatcattcaccatat

SEQ ID NO: 114542 - DNA, 19 bp, Homo sapiens
  siRNA target sequence for MACF1 (NM_033044.2,2993-3011).
gagactttctgttgataat

SEQ ID NO: 114543 - DNA, 19 bp, Homo sapiens
  siRNA target sequence for MACF1 (NM_033044.2,3024-3042).
ggcttaattggtgaagatt

SEQ ID NO: 114544 - DNA, 19 bp, Homo sapiens
  siRNA target sequence for MACF1 (NM_033044.2,3039-3057).
gatttagccgagaaactca

SEQ ID NO: 114545 - DNA, 19 bp, Homo sapiens
  siRNA target sequence for MACF1 (NM_033044.2,3080-3098).
ccatcagatttttaatcct

SEQ ID NO: 114546 - DNA, 19 bp, Homo sapiens
  siRNA target sequence for MACF1 (NM_033044.2,3293-3311).
gatgcatggcattgtagat

SEQ ID NO: 114547 - DNA, 19 bp, Homo sapiens
  siRNA target sequence for MACF1 (NM_033044.2,3333-3351).
ccctactcagaattagtca

SEQ ID NO: 114548 - DNA, 19 bp, Homo sapiens
  siRNA target sequence for MACF1 (NM_033044.2,3376-3394).
ctggacagagatatctaga

SEQ ID NO: 114549 - DNA, 19 bp, Homo sapiens
  siRNA target sequence for MACF1 (NM_033044.2,3381-3399).
cagagatatctagaagtaa

SEQ ID NO: 114550 - DNA, 19 bp, Homo sapiens
  siRNA target sequence for MACF1 (NM_033044.2,3383-3401).
gagatatctagaagtaatt

SEQ ID NO: 114551 - DNA, 19 bp, Homo sapiens
  siRNA target sequence for MACF1 (NM_033044.2,3468-3486).
ggaaaagtagactttgcat

SEQ ID NO: 114552 - DNA, 19 bp, Homo sapiens
  siRNA target sequence for MACF1 (NM_033044.2,3501-3519).
ctagaagcccaggcaaata

SEQ ID NO: 114553 - DNA, 19 bp, Homo sapiens
  siRNA target sequence for MACF1 (NM_033044.2,3514-3532).
caaatactggtggaatcat

SEQ ID NO: 114554 - DNA, 19 bp, Homo sapiens
  siRNA target sequence for MACF1 (NM_033044.2,3534-3552).
gatactgctactggaaaaa

SEQ ID NO: 114555 - DNA, 19 bp, Homo sapiens
  siRNA target sequence for MACF1 (NM_033044.2,3538-3556).
ctgctactggaaaaagact

SEQ ID NO: 114556 - DNA, 19 bp, Homo sapiens
  siRNA target sequence for MACF1 (NM_033044.2,3605-3623).
cagaattattgcatctcat

SEQ ID NO: 114557 - DNA, 19 bp, Homo sapiens
  siRNA target sequence for MACF1 (NM_033044.2,3615-3633).
gcatctcatcaggtgttaa

SEQ ID NO: 114558 - DNA, 19 bp, Homo sapiens
  siRNA target sequence for MACF1 (NM_033044.2,3629-3647).
gttaaatggaggaattgtt

SEQ ID NO: 114559 - DNA, 19 bp, Homo sapiens
  siRNA target sequence for MACF1 (NM_033044.2,3637-3655).
gaggaattgttgacatatt

SEQ ID NO: 114560 - DNA, 19 bp, Homo sapiens
  siRNA target sequence for MACF1 (NM_033044.2,3673-3691).
ctttagtagaagctattga

SEQ ID NO: 114561 - DNA, 19 bp, Homo sapiens
  siRNA target sequence for MACF1 (NM_033044.2,3706-3724).
gccctgaactggcaaatat

SEQ ID NO: 114562 - DNA, 19 bp, Homo sapiens
  siRNA target sequence for MACF1 (NM_033044.2,3708-3726).
cctgaactggcaaatatga

SEQ ID NO: 114563 - DNA, 19 bp, Homo sapiens
  siRNA target sequence for MACF1 (NM_033044.2,3752-3770).
cgatcacagggctcagatt

SEQ ID NO: 114564 - DNA, 19 bp, Homo sapiens
  siRNA target sequence for MACF1 (NM_033044.2,3841-3859).
gtaatcagactgctgaaat

SEQ ID NO: 114565 - DNA, 19 bp, Homo sapiens
  siRNA target sequence for MACF1 (NM_033044.2,3860-3878).
gagttgtaataaagtagaa

SEQ ID NO: 114566 - DNA, 19 bp, Homo sapiens
  siRNA target sequence for MACF1 (NM_033044.2,3994-4012).
ggtgcaaggatcaacgtaa

SEQ ID NO: 114567 - DNA, 19 bp, Homo sapiens
  siRNA target sequence for MACF1 (NM_033044.2,4008-4026).
cgtaagccaagaatgtctt

SEQ ID NO: 114568 - DNA, 19 bp, Homo sapiens
  siRNA target sequence for MACF1 (NM_033044.2,4029-4047).
gatgctaaagaatttatca

SEQ ID NO: 114569 - DNA, 19 bp, Homo sapiens
  siRNA target sequence for MACF1 (NM_033044.2,4059-4077).
cctcataatcttaaaggta

SEQ ID NO: 114570 - DNA, 19 bp, Homo sapiens
  siRNA target sequence for MACF1 (NM_033044.2,4081-4099).
ccttgggccaagtgtcatt

SEQ ID NO: 114571 - DNA, 19 bp, Homo sapiens
  siRNA target sequence for MACF1 (NM_033044.2,4107-4125).
ccttactctgaatgtgatt

SEQ ID NO: 114572 - DNA, 19 bp, Homo sapiens
  siRNA target sequence for MACF1 (NM_033044.2,4223-4241).
gcagtctacctcatgtcta

SEQ ID NO: 114573 - DNA, 19 bp, Homo sapiens
  siRNA target sequence for MACF1 (NM_033044.2,4303-4321).
gtgaaacgtcaggcaaatt

SEQ ID NO: 114574 - DNA, 19 bp, Homo sapiens
  siRNA target sequence for MACF1 (NM_033044.2,4324-4342).
cgagtgagcaggttttgca

SEQ ID NO: 114575 - DNA, 19 bp, Homo sapiens
  siRNA target sequence for MACF1 (NM_033044.2,4352-4370).
gaatgctcgggtgaaaagt

SEQ ID NO: 114576 - DNA, 19 bp, Homo sapiens
  siRNA target sequence for MACF1 (NM_033044.2,4379-4397).
gaagagggaggtgattgta

SEQ ID NO: 114577 - DNA, 19 bp, Homo sapiens
  siRNA target sequence for MACF1 (NM_033044.2,4385-4403).
ggaggtgattgtagaagaa

SEQ ID NO: 114578 - DNA, 19 bp, Homo sapiens
  siRNA target sequence for MACF1 (NM_033044.2,4388-4406).
ggtgattgtagaagaaagt

SEQ ID NO: 114579 - DNA, 19 bp, Homo sapiens
  siRNA target sequence for MACF1 (NM_033044.2,4473-4491).
gagcatgactcccatataa

SEQ ID NO: 114580 - DNA, 19 bp, Homo sapiens
  siRNA target sequence for MACF1 (NM_033044.2,4539-4557).
gatacagaaatgggatttt

SEQ ID NO: 114581 - DNA, 19 bp, Homo sapiens
  siRNA target sequence for MACF1 (NM_033044.2,4684-4702).
gtctctgcttgactttaaa

SEQ ID NO: 114582 - DNA, 19 bp, Homo sapiens
  siRNA target sequence for MACF1 (NM_033044.2,4749-4767).
gaaccattcccttgtatga

SEQ ID NO: 114583 - DNA, 19 bp, Homo sapiens
  siRNA target sequence for MACF1 (NM_033044.2,4871-4889).
cagacaggagaccaactat

SEQ ID NO: 114584 - DNA, 19 bp, Homo sapiens
  siRNA target sequence for MACF1 (NM_033044.2,4873-4891).
gacaggagaccaactatca

SEQ ID NO: 114585 - DNA, 19 bp, Homo sapiens
  siRNA target sequence for MACF1 (NM_033044.2,4900-4918).
gggttacttcgaaaactaa

SEQ ID NO: 114586 - DNA, 19 bp, Homo sapiens
  siRNA target sequence for MACF1 (NM_033044.2,4909-4927).
cgaaaactaaggaaaccaa

SEQ ID NO: 114587 - DNA, 19 bp, Homo sapiens
  siRNA target sequence for MACF1 (NM_033044.2,4939-4957).
cctcatctaatgaatgtaa

SEQ ID NO: 114588 - DNA, 19 bp, Homo sapiens
  siRNA target sequence for MACF1 (NM_033044.2,5026-5044).
ctagaccagattcaaaaga

SEQ ID NO: 114589 - DNA, 19 bp, Homo sapiens
  siRNA target sequence for MACF1 (NM_033044.2,5046-5064).
gtcaggtatctagaattct

SEQ ID NO: 114590 - DNA, 19 bp, Homo sapiens
  siRNA target sequence for MACF1 (NM_033044.2,5048-5066).
caggtatctagaattctca

SEQ ID NO: 114591 - DNA, 19 bp, Homo sapiens
  siRNA target sequence for MACF1 (NM_033044.2,5090-5108).
gggcagcaaaagtgatgat

SEQ ID NO: 114592 - DNA, 19 bp, Homo sapiens
  siRNA target sequence for MACF1 (NM_033044.2,5124-5142).
ctcaaatctgaaatagcaa

SEQ ID NO: 114593 - DNA, 19 bp, Homo sapiens
  siRNA target sequence for MACF1 (NM_033044.2,5209-5227).
gatccattgaggacatagt

SEQ ID NO: 114594 - DNA, 19 bp, Homo sapiens
  siRNA target sequence for MACF1 (NM_033044.2,5243-5261).
cagagtcttgggatccttt

SEQ ID NO: 114595 - DNA, 19 bp, Homo sapiens
  siRNA target sequence for MACF1 (NM_033044.2,5283-5301).
ggagtgtctcaaaaagaga

SEQ ID NO: 114596 - DNA, 19 bp, Homo sapiens
  siRNA target sequence for MACF1 (NM_033044.2,5360-5378).
gacagtgtccctaacagta

SEQ ID NO: 114597 - DNA, 19 bp, Homo sapiens
  siRNA target sequence for MACF1 (NM_033044.2,5429-5447).
ccctggcagtgaacaaact

SEQ ID NO: 114598 - DNA, 19 bp, Homo sapiens
  siRNA target sequence for MACF1 (NM_033044.2,5439-5457).
gaacaaactcccttcatga

SEQ ID NO: 114599 - DNA, 19 bp, Homo sapiens
  siRNA target sequence for MACF1 (NM_033044.2,5573-5591).
gtctctgttacggaacatt

SEQ ID NO: 114600 - DNA, 19 bp, Homo sapiens
  siRNA target sequence for MACF1 (NM_033044.2,5575-5593).
ctctgttacggaacattga

SEQ ID NO: 114601 - DNA, 19 bp, Homo sapiens
  siRNA target sequence for MACF1 (NM_033044.2,5577-5595).
ctgttacggaacattgaaa

SEQ ID NO: 114602 - DNA, 19 bp, Homo sapiens
  siRNA target sequence for MACF1 (NM_033044.2,5624-5642).
gctaaacctggcagaacta

SEQ ID NO: 114603 - DNA, 19 bp, Homo sapiens
  siRNA target sequence for MACF1 (NM_033044.2,5652-5670).
ctgtgtcaggccaaggtat

SEQ ID NO: 114604 - DNA, 19 bp, Homo sapiens
  siRNA target sequence for MACF1 (NM_033044.2,5654-5672).
gtgtcaggccaaggtatta

SEQ ID NO: 114605 - DNA, 19 bp, Homo sapiens
  siRNA target sequence for MACF1 (NM_033044.2,5658-5676).
caggccaaggtattagaaa

SEQ ID NO: 114606 - DNA, 19 bp, Homo sapiens
  siRNA target sequence for MACF1 (NM_033044.2,5909-5927).
gctagaaggccgacttcaa

SEQ ID NO: 114607 - DNA, 19 bp, Homo sapiens
  siRNA target sequence for MACF1 (NM_033044.2,5935-5953).
gagcctgggttggcaataa

SEQ ID NO: 114608 - DNA, 19 bp, Homo sapiens
  siRNA target sequence for MACF1 (NM_033044.2,5938-5956).
cctgggttggcaataaaaa

SEQ ID NO: 114609 - DNA, 19 bp, Homo sapiens
  siRNA target sequence for MACF1 (NM_033044.2,5939-5957).
ctgggttggcaataaaaat

SEQ ID NO: 114610 - DNA, 19 bp, Homo sapiens
  siRNA target sequence for MACF1 (NM_033044.2,5969-5987).
cagcaagggatctaacagt

SEQ ID NO: 114611 - DNA, 19 bp, Homo sapiens
  siRNA target sequence for MACF1 (NM_033044.2,5975-5993).
gggatctaacagtgaaata

SEQ ID NO: 114612 - DNA, 19 bp, Homo sapiens
  siRNA target sequence for MACF1 (NM_033044.2,6021-6039).
caacagtatgaggatttga

SEQ ID NO: 114613 - DNA, 19 bp, Homo sapiens
  siRNA target sequence for MACF1 (NM_033044.2,6068-6086).
gctggatgctcttgctttt

SEQ ID NO: 114614 - DNA, 19 bp, Homo sapiens
  siRNA target sequence for MACF1 (NM_033044.2,6076-6094).
ctcttgcttttgatattca

SEQ ID NO: 114615 - DNA, 19 bp, Homo sapiens
  siRNA target sequence for MACF1 (NM_033044.2,6095-6113).
gttctttatctcagaacat

SEQ ID NO: 114616 - DNA, 19 bp, Homo sapiens
  siRNA target sequence for MACF1 (NM_033044.2,6149-6167).
gctgaggcttctgaatgaa

SEQ ID NO: 114617 - DNA, 19 bp, Homo sapiens
  siRNA target sequence for MACF1 (NM_033044.2,6175-6193).
ggtccttccaggacatttt

SEQ ID NO: 114618 - DNA, 19 bp, Homo sapiens
  siRNA target sequence for MARCKS (NM_002356.4,809-827).
gcaacgagaccccgaaaaa

SEQ ID NO: 114619 - DNA, 19 bp, Homo sapiens
  siRNA target sequence for PLS1 (NM_002670.1,140-158).
gaactacaagaggcattta

SEQ ID NO: 114620 - DNA, 19 bp, Homo sapiens
  siRNA target sequence for PLS1 (NM_002670.1,173-191).
gacaatagtgggtatgtca

SEQ ID NO: 114621 - DNA, 19 bp, Homo sapiens
  siRNA target sequence for PLS1 (NM_002670.1,184-202).
gtatgtcagtgactatgaa

SEQ ID NO: 114622 - DNA, 19 bp, Homo sapiens
  siRNA target sequence for PLS1 (NM_002670.1,255-273).
gcgagattgtggagaaaat

SEQ ID NO: 114623 - DNA, 19 bp, Homo sapiens
  siRNA target sequence for PLS1 (NM_002670.1,326-344).
gtgtcactaatgcaagaat

SEQ ID NO: 114624 - DNA, 19 bp, Homo sapiens
  siRNA target sequence for PLS1 (NM_002670.1,439-457).
gggcacacagcattcttat

SEQ ID NO: 114625 - DNA, 19 bp, Homo sapiens
  siRNA target sequence for PLS1 (NM_002670.1,515-533).
cctgactgtaagcatctta

SEQ ID NO: 114626 - DNA, 19 bp, Homo sapiens
  siRNA target sequence for PLS1 (NM_002670.1,516-534).
ctgactgtaagcatcttat

SEQ ID NO: 114627 - DNA, 19 bp, Homo sapiens
  siRNA target sequence for PLS1 (NM_002670.1,541-559).
gaatcccaatgatgatagt

SEQ ID NO: 114628 - DNA, 19 bp, Homo sapiens
  siRNA target sequence for PLS1 (NM_002670.1,551-569).
gatgatagtcttttcaagt

SEQ ID NO: 114629 - DNA, 19 bp, Homo sapiens
  siRNA target sequence for PLS1 (NM_002670.1,595-613).
caaaatgatcaacttatct

SEQ ID NO: 114630 - DNA, 19 bp, Homo sapiens
  siRNA target sequence for PLS1 (NM_002670.1,612-630).
ctgaaccagatacaattga

SEQ ID NO: 114631 - DNA, 19 bp, Homo sapiens
  siRNA target sequence for PLS1 (NM_002670.1,658-676).
cacgccattcactatttct

SEQ ID NO: 114632 - DNA, 19 bp, Homo sapiens
  siRNA target sequence for PLS1 (NM_002670.1,660-678).
cgccattcactatttctga

SEQ ID NO: 114633 - DNA, 19 bp, Homo sapiens
  siRNA target sequence for PLS1 (NM_002670.1,661-679).
gccattcactatttctgaa

SEQ ID NO: 114634 - DNA, 19 bp, Homo sapiens
  siRNA target sequence for PLS1 (NM_002670.1,662-680).
ccattcactatttctgaaa

SEQ ID NO: 114635 - DNA, 19 bp, Homo sapiens
  siRNA target sequence for PLS1 (NM_002670.1,663-681).
cattcactatttctgaaaa

SEQ ID NO: 114636 - DNA, 19 bp, Homo sapiens
  siRNA target sequence for PLS1 (NM_002670.1,782-800).
cttctctggcagatcatca

SEQ ID NO: 114637 - DNA, 19 bp, Homo sapiens
  siRNA target sequence for PLS1 (NM_002670.1,799-817).
caaagttggcctttttgct

SEQ ID NO: 114638 - DNA, 19 bp, Homo sapiens
  siRNA target sequence for PLS1 (NM_002670.1,842-860).
gctctgattgcattgttaa

SEQ ID NO: 114639 - DNA, 19 bp, Homo sapiens
  siRNA target sequence for PLS1 (NM_002670.1,892-910).
gctttctcccgaggaatta

SEQ ID NO: 114640 - DNA, 19 bp, Homo sapiens
  siRNA target sequence for PLS1 (NM_002670.1,953-971).
cataccatcagcaacttca

SEQ ID NO: 114641 - DNA, 19 bp, Homo sapiens
  siRNA target sequence for PLS1 (NM_002670.1,985-1003).
ggactcgagagcctatttt

SEQ ID NO: 114642 - DNA, 19 bp, Homo sapiens
  siRNA target sequence for PLS1 (NM_002670.1,988-1006).
ctcgagagcctattttcat

SEQ ID NO: 114643 - DNA, 19 bp, Homo sapiens
  siRNA target sequence for PLS1 (NM_002670.1,990-1008).
cgagagcctattttcatct

SEQ ID NO: 114644 - DNA, 19 bp, Homo sapiens
  siRNA target sequence for PLS1 (NM_002670.1,1165-1183).
ggtttcaggcaatcctaaa

SEQ ID NO: 114645 - DNA, 19 bp, Homo sapiens
  siRNA target sequence for PLS1 (NM_002670.1,1170-1188).
caggcaatcctaaacttaa

SEQ ID NO: 114646 - DNA, 19 bp, Homo sapiens
  siRNA target sequence for PLS1 (NM_002670.1,1172-1190).
ggcaatcctaaacttaatt

SEQ ID NO: 114647 - DNA, 19 bp, Homo sapiens
  siRNA target sequence for PLS1 (NM_002670.1,1173-1191).
gcaatcctaaacttaattt

SEQ ID NO: 114648 - DNA, 19 bp, Homo sapiens
  siRNA target sequence for PLS1 (NM_002670.1,1202-1220).
gctaatttgtttaacacat

SEQ ID NO: 114649 - DNA, 19 bp, Homo sapiens
  siRNA target sequence for PLS1 (NM_002670.1,1227-1245).
gcctgcacaagccgaataa

SEQ ID NO: 114650 - DNA, 19 bp, Homo sapiens
  siRNA target sequence for PLS1 (NM_002670.1,1229-1247).
ctgcacaagccgaataata

SEQ ID NO: 114651 - DNA, 19 bp, Homo sapiens
  siRNA target sequence for PLS1 (NM_002670.1,1231-1249).
gcacaagccgaataataat

SEQ ID NO: 114652 - DNA, 19 bp, Homo sapiens
  siRNA target sequence for PLS1 (NM_002670.1,1321-1339).
gggagtcaacccatacatt

SEQ ID NO: 114653 - DNA, 19 bp, Homo sapiens
  siRNA target sequence for PLS1 (NM_002670.1,1322-1340).
ggagtcaacccatacatta

SEQ ID NO: 114654 - DNA, 19 bp, Homo sapiens
  siRNA target sequence for PLS1 (NM_002670.1,1327-1345).
caacccatacattaatcat

SEQ ID NO: 114655 - DNA, 19 bp, Homo sapiens
  siRNA target sequence for PLS1 (NM_002670.1,1353-1371).
gtgaccttgcagatgcttt

SEQ ID NO: 114656 - DNA, 19 bp, Homo sapiens
  siRNA target sequence for PLS1 (NM_002670.1,1362-1380).
cagatgctttagtgatctt

SEQ ID NO: 114657 - DNA, 19 bp, Homo sapiens
  siRNA target sequence for PLS1 (NM_002670.1,1568-1586).
cttaccctggcattggtat

SEQ ID NO: 114658 - DNA, 19 bp, Homo sapiens
  siRNA target sequence for PLS1 (NM_002670.1,1671-1689).
gggtcaatcagactcttaa

SEQ ID NO: 114659 - DNA, 19 bp, Homo sapiens
  siRNA target sequence for PLS1 (NM_002670.1,1672-1690).
ggtcaatcagactcttaaa

SEQ ID NO: 114660 - DNA, 19 bp, Homo sapiens
  siRNA target sequence for PLS1 (NM_002670.1,1675-1693).
caatcagactcttaaaagt

SEQ ID NO: 114661 - DNA, 19 bp, Homo sapiens
  siRNA target sequence for PLS1 (NM_002670.1,1695-1713).
caaacaaaaagacttctat

SEQ ID NO: 114662 - DNA, 19 bp, Homo sapiens
  siRNA target sequence for PLS1 (NM_002670.1,1719-1737).
gcttcaaggataaatctat

SEQ ID NO: 114663 - DNA, 19 bp, Homo sapiens
  siRNA target sequence for PLS1 (NM_002670.1,1788-1806).
cagttcgtcaagaaatgat

SEQ ID NO: 114664 - DNA, 19 bp, Homo sapiens
  siRNA target sequence for PLS1 (NM_002670.1,1790-1808).
gttcgtcaagaaatgatca

SEQ ID NO: 114665 - DNA, 19 bp, Homo sapiens
  siRNA target sequence for PLS1 (NM_002670.1,1834-1852).
caagctgaacaatgctaaa

SEQ ID NO: 114666 - DNA, 19 bp, Homo sapiens
  siRNA target sequence for PLS1 (NM_002670.1,1876-1894).
gatcggtgcccggatatat

SEQ ID NO: 114667 - DNA, 19 bp, Homo sapiens
  siRNA target sequence for PLS1 (NM_002670.1,1879-1897).
cggtgcccggatatatgca

SEQ ID NO: 114668 - DNA, 19 bp, Homo sapiens
  siRNA target sequence for PLS1 (NM_002670.1,1880-1898).
ggtgcccggatatatgcat

SEQ ID NO: 114669 - DNA, 19 bp, Homo sapiens
  siRNA target sequence for PLS1 (NM_002670.1,1881-1899).
gtgcccggatatatgcatt

SEQ ID NO: 114670 - DNA, 19 bp, Homo sapiens
  siRNA target sequence for PLS1 (NM_002670.1,1902-1920).
ctgatgacctcgtagaagt

SEQ ID NO: 114671 - DNA, 19 bp, Homo sapiens
  siRNA target sequence for PLS1 (NM_002670.1,1910-1928).
ctcgtagaagtgaaaccaa

SEQ ID NO: 114672 - DNA, 19 bp, Homo sapiens
  siRNA target sequence for PLS1 (NM_002670.1,1941-1959).
cggtgtttgcatgcttaat

SEQ ID NO: 114673 - DNA, 19 bp, Homo sapiens
  siRNA target sequence for SPTA1 (NM_003126.1,219-237).
gagcagtgggccaaaggtt

SEQ ID NO: 114674 - DNA, 19 bp, Homo sapiens
  siRNA target sequence for SPTA1 (NM_003126.1,224-242).
gtgggccaaaggttttgga

SEQ ID NO: 114675 - DNA, 19 bp, Homo sapiens
  siRNA target sequence for SPTA1 (NM_003126.1,226-244).
gggccaaaggttttggaaa

SEQ ID NO: 114676 - DNA, 19 bp, Homo sapiens
  siRNA target sequence for SPTA1 (NM_003126.1,277-295).
gtgttgactcggtatcaaa

SEQ ID NO: 114677 - DNA, 19 bp, Homo sapiens
  siRNA target sequence for SPTA1 (NM_003126.1,279-297).
gttgactcggtatcaaagt

SEQ ID NO: 114678 - DNA, 19 bp, Homo sapiens
  siRNA target sequence for SPTA1 (NM_003126.1,284-302).
ctcggtatcaaagtttcaa

SEQ ID NO: 114679 - DNA, 19 bp, Homo sapiens
  siRNA target sequence for SPTA1 (NM_003126.1,331-349).
cttgaggattcctatcact

SEQ ID NO: 114680 - DNA, 19 bp, Homo sapiens
  siRNA target sequence for SPTA1 (NM_003126.1,336-354).
ggattcctatcacttacaa

SEQ ID NO: 114681 - DNA, 19 bp, Homo sapiens
  siRNA target sequence for SPTA1 (NM_003126.1,360-378).
caagcgagatgcagatgat

SEQ ID NO: 114682 - DNA, 19 bp, Homo sapiens
  siRNA target sequence for SPTA1 (NM_003126.1,426-444).
ctatgaagacccaactaat

SEQ ID NO: 114683 - DNA, 19 bp, Homo sapiens
  siRNA target sequence for SPTA1 (NM_003126.1,440-458).
ctaatatacaggggaaata

SEQ ID NO: 114684 - DNA, 19 bp, Homo sapiens
  siRNA target sequence for SPTA1 (NM_003126.1,553-571).
cattctgcccacgaagaaa

SEQ ID NO: 114685 - DNA, 19 bp, Homo sapiens
  siRNA target sequence for SPTA1 (NM_003126.1,755-773).
gggagcgcaccgaagttct

SEQ ID NO: 114686 - DNA, 19 bp, Homo sapiens
  siRNA target sequence for SPTA1 (NM_003126.1,761-779).
gcaccgaagttctgcataa

SEQ ID NO: 114687 - DNA, 19 bp, Homo sapiens
  siRNA target sequence for SPTA1 (NM_003126.1,765-783).
cgaagttctgcataagaaa

SEQ ID NO: 114688 - DNA, 19 bp, Homo sapiens
  siRNA target sequence for SPTA1 (NM_003126.1,766-784).
gaagttctgcataagaaat

SEQ ID NO: 114689 - DNA, 19 bp, Homo sapiens
  siRNA target sequence for SPTA1 (NM_003126.1,855-873).
gtgtgccgaggaaaaccat

SEQ ID NO: 114690 - DNA, 19 bp, Homo sapiens
  siRNA target sequence for SPTA1 (NM_003126.1,877-895).
gacctacccttaattcagt

SEQ ID NO: 114691 - DNA, 19 bp, Homo sapiens
  siRNA target sequence for SPTA1 (NM_003126.1,966-984).
gtccaatgctgcaaactta

SEQ ID NO: 114692 - DNA, 19 bp, Homo sapiens
  siRNA target sequence for SPTA1 (NM_003126.1,974-992).
ctgcaaacttacaacgatt

SEQ ID NO: 114693 - DNA, 19 bp, Homo sapiens
  siRNA target sequence for SPTA1 (NM_003126.1,1104-1122).
caagggacttgagagaaat

SEQ ID NO: 114694 - DNA, 19 bp, Homo sapiens
  siRNA target sequence for SPTA1 (NM_003126.1,1138-1156).
gacaaggtgaaggagttat

SEQ ID NO: 114695 - DNA, 19 bp, Homo sapiens
  siRNA target sequence for SPTA1 (NM_003126.1,1149-1167).
ggagttatgtgctaaagca

SEQ ID NO: 114696 - DNA, 19 bp, Homo sapiens
  siRNA target sequence for SPTA1 (NM_003126.1,1236-1254).
cagctgggagcatattcgt

SEQ ID NO: 114697 - DNA, 19 bp, Homo sapiens
  siRNA target sequence for SPTA1 (NM_003126.1,1261-1279).
gccaccagcagatatgaaa

SEQ ID NO: 114698 - DNA, 19 bp, Homo sapiens
  siRNA target sequence for SPTA1 (NM_003126.1,1282-1300).
ctgcaggctacttattggt

SEQ ID NO: 114699 - DNA, 19 bp, Homo sapiens
  siRNA target sequence for SPTA1 (NM_003126.1,1299-1317).
gtaccatcgattttcatct

SEQ ID NO: 114700 - DNA, 19 bp, Homo sapiens
  siRNA target sequence for SPTA1 (NM_003126.1,1429-1447).
cataagcatgagattgact

SEQ ID NO: 114701 - DNA, 19 bp, Homo sapiens
  siRNA target sequence for SPTA1 (NM_003126.1,1448-1466).
cttacgatgaccgatttca

SEQ ID NO: 114702 - DNA, 19 bp, Homo sapiens
  siRNA target sequence for SPTA1 (NM_003126.1,1452-1470).
cgatgaccgatttcaatct

SEQ ID NO: 114703 - DNA, 19 bp, Homo sapiens
  siRNA target sequence for SPTA1 (NM_003126.1,1584-1602).
cgagcgtcatcgtcagtat

SEQ ID NO: 114704 - DNA, 19 bp, Homo sapiens
  siRNA target sequence for SPTA1 (NM_003126.1,1792-1810).
gacaagactgcaaccaaat

SEQ ID NO: 114705 - DNA, 19 bp, Homo sapiens
  siRNA target sequence for SPTA1 (NM_003126.1,1812-1830).
gattggtgatgaccattat

SEQ ID NO: 114706 - DNA, 19 bp, Homo sapiens
  siRNA target sequence for SPTA1 (NM_003126.1,1816-1834).
ggtgatgaccattatgatt

SEQ ID NO: 114707 - DNA, 19 bp, Homo sapiens
  siRNA target sequence for SPTA1 (NM_003126.1,1898-1916).
ctgccactagacgtagatt

SEQ ID NO: 114708 - DNA, 19 bp, Homo sapiens
  siRNA target sequence for SPTA1 (NM_003126.1,1913-1931).
gattgctgaaggagtcatt

SEQ ID NO: 114709 - DNA, 19 bp, Homo sapiens
  siRNA target sequence for SPTA1 (NM_003126.1,1954-1972).
gactcagatgacctaaaga

SEQ ID NO: 114710 - DNA, 19 bp, Homo sapiens
  siRNA target sequence for SPTA1 (NM_003126.1,1966-1984).
ctaaagaactggatcaaca

SEQ ID NO: 114711 - DNA, 19 bp, Homo sapiens
  siRNA target sequence for SPTA1 (NM_003126.1,1974-1992).
ctggatcaacaagaagaaa

SEQ ID NO: 114712 - DNA, 19 bp, Homo sapiens
  siRNA target sequence for SPTA1 (NM_003126.1,2071-2089).
gagttggcagttaataaga

SEQ ID NO: 114713 - DNA, 19 bp, Homo sapiens
  siRNA target sequence for SPTA1 (NM_003126.1,2163-2181).
cactcgtctgagtgaagtt

SEQ ID NO: 114714 - DNA, 19 bp, Homo sapiens
  siRNA target sequence for SPTA1 (NM_003126.1,2340-2358).
cctggccgaggtacagaat

SEQ ID NO: 114715 - DNA, 19 bp, Homo sapiens
  siRNA target sequence for SPTA1 (NM_003126.1,2402-2420).
gtcaggatcaggtggatat

SEQ ID NO: 114716 - DNA, 19 bp, Homo sapiens
  siRNA target sequence for SPTA1 (NM_003126.1,2407-2425).
gatcaggtggatatcctta

SEQ ID NO: 114717 - DNA, 19 bp, Homo sapiens
  siRNA target sequence for SPTA1 (NM_003126.1,2457-2475).
ccatcctgattctaaggat

SEQ ID NO: 114718 - DNA, 19 bp, Homo sapiens
  siRNA target sequence for SPTA1 (NM_003126.1,2458-2476).
catcctgattctaaggata

SEQ ID NO: 114719 - DNA, 19 bp, Homo sapiens
  siRNA target sequence for SPTA1 (NM_003126.1,2461-2479).
cctgattctaaggatataa

SEQ ID NO: 114720 - DNA, 19 bp, Homo sapiens
  siRNA target sequence for SPTA1 (NM_003126.1,2495-2513).
ccttggtatgccgatttga

SEQ ID NO: 114721 - DNA, 19 bp, Homo sapiens
  siRNA target sequence for SPTA1 (NM_003126.1,2496-2514).
cttggtatgccgatttgaa

SEQ ID NO: 114722 - DNA, 19 bp, Homo sapiens
  siRNA target sequence for SPTA1 (NM_003126.1,2505-2523).
ccgatttgaagctctgaaa

SEQ ID NO: 114723 - DNA, 19 bp, Homo sapiens
  siRNA target sequence for SPTA1 (NM_003126.1,2636-2654).
cttccacctaccttggaaa

SEQ ID NO: 114724 - DNA, 19 bp, Homo sapiens
  siRNA target sequence for SPTA1 (NM_003126.1,2656-2674).
gacctgattgcttccaaaa

SEQ ID NO: 114725 - DNA, 19 bp, Homo sapiens
  siRNA target sequence for SPTA1 (NM_003126.1,2718-2736).
ccatgaaccacgcattcaa

SEQ ID NO: 114726 - DNA, 19 bp, Homo sapiens
  siRNA target sequence for SPTA1 (NM_003126.1,2797-2815).
gcctctagggtcaagagtt

SEQ ID NO: 114727 - DNA, 19 bp, Homo sapiens
  siRNA target sequence for SPTA1 (NM_003126.1,2798-2816).
cctctagggtcaagagttt

SEQ ID NO: 114728 - DNA, 19 bp, Homo sapiens
  siRNA target sequence for SPTA1 (NM_003126.1,2801-2819).
ctagggtcaagagtttgaa

SEQ ID NO: 114729 - DNA, 19 bp, Homo sapiens
  siRNA target sequence for SPTA1 (NM_003126.1,2846-2864).
gagctgctaggcgacaaaa

SEQ ID NO: 114730 - DNA, 19 bp, Homo sapiens
  siRNA target sequence for SPTA1 (NM_003126.1,2849-2867).
ctgctaggcgacaaaatga

SEQ ID NO: 114731 - DNA, 19 bp, Homo sapiens
  siRNA target sequence for SPTA1 (NM_003126.1,2852-2870).
ctaggcgacaaaatgatct

SEQ ID NO: 114732 - DNA, 19 bp, Homo sapiens
  siRNA target sequence for SPTA1 (NM_003126.1,2855-2873).
ggcgacaaaatgatcttga

SEQ ID NO: 114733 - DNA, 19 bp, Homo sapiens
  siRNA target sequence for SPTA1 (NM_003126.1,2856-2874).
gcgacaaaatgatcttgaa

SEQ ID NO: 114734 - DNA, 19 bp, Homo sapiens
  siRNA target sequence for SPTA1 (NM_003126.1,2937-2955).
gaaggaacctattgtagat

SEQ ID NO: 114735 - DNA, 19 bp, Homo sapiens
  siRNA target sequence for SPTA1 (NM_003126.1,3201-3219).
gctgctcagttccatcaat

SEQ ID NO: 114736 - DNA, 19 bp, Homo sapiens
  siRNA target sequence for SPTA1 (NM_003126.1,3202-3220).
ctgctcagttccatcaata

SEQ ID NO: 114737 - DNA, 19 bp, Homo sapiens
  siRNA target sequence for SPTA1 (NM_003126.1,3284-3302).
gactggcccacgatgagtt

SEQ ID NO: 114738 - DNA, 19 bp, Homo sapiens
  siRNA target sequence for SPTA1 (NM_003126.1,3408-3426).
cagacgtcgtctattgcaa

SEQ ID NO: 114739 - DNA, 19 bp, Homo sapiens
  siRNA target sequence for SPTA1 (NM_003126.1,3413-3431).
gtcgtctattgcaacgtta

SEQ ID NO: 114740 - DNA, 19 bp, Homo sapiens
  siRNA target sequence for SPTA1 (NM_003126.1,3415-3433).
cgtctattgcaacgttata

SEQ ID NO: 114741 - DNA, 19 bp, Homo sapiens
  siRNA target sequence for SPTA1 (NM_003126.1,3416-3434).
gtctattgcaacgttataa

SEQ ID NO: 114742 - DNA, 19 bp, Homo sapiens
  siRNA target sequence for SPTA1 (NM_003126.1,3423-3441).
gcaacgttataatgaattt

SEQ ID NO: 114743 - DNA, 19 bp, Homo sapiens
  siRNA target sequence for SPTA1 (NM_003126.1,3580-3598).
cctcggctaagggatatca

SEQ ID NO: 114744 - DNA, 19 bp, Homo sapiens
  siRNA target sequence for SPTA1 (NM_003126.1,3581-3599).
ctcggctaagggatatcaa

SEQ ID NO: 114745 - DNA, 19 bp, Homo sapiens
  siRNA target sequence for SPTA1 (NM_003126.1,3583-3601).
cggctaagggatatcaaca

SEQ ID NO: 114746 - DNA, 19 bp, Homo sapiens
  siRNA target sequence for SPTA1 (NM_003126.1,3597-3615).
caacaaggtagctgatgat

SEQ ID NO: 114747 - DNA, 19 bp, Homo sapiens
  siRNA target sequence for SPTA1 (NM_003126.1,3600-3618).
caaggtagctgatgatcta

SEQ ID NO: 114748 - DNA, 19 bp, Homo sapiens
  siRNA target sequence for SPTA1 (NM_003126.1,3603-3621).
ggtagctgatgatctacta

SEQ ID NO: 114749 - DNA, 19 bp, Homo sapiens
  siRNA target sequence for SPTA1 (NM_003126.1,3604-3622).
gtagctgatgatctactat

SEQ ID NO: 114750 - DNA, 19 bp, Homo sapiens
  siRNA target sequence for SPTA1 (NM_003126.1,3608-3626).
ctgatgatctactatttga

SEQ ID NO: 114751 - DNA, 19 bp, Homo sapiens
  siRNA target sequence for SPTA1 (NM_003126.1,3652-3670).
caaatccggcaggaattga

SEQ ID NO: 114752 - DNA, 19 bp, Homo sapiens
  siRNA target sequence for SPTA1 (NM_003126.1,3731-3749).
cccatgctgttgaagtgtt

SEQ ID NO: 114753 - DNA, 19 bp, Homo sapiens
  siRNA target sequence for SPTA1 (NM_003126.1,3732-3750).
ccatgctgttgaagtgttt

SEQ ID NO: 114754 - DNA, 19 bp, Homo sapiens
  siRNA target sequence for SPTA1 (NM_003126.1,3736-3754).
gctgttgaagtgtttcaca

SEQ ID NO: 114755 - DNA, 19 bp, Homo sapiens
  siRNA target sequence for SPTA1 (NM_003126.1,4008-4026).
gcaggggcgtacaaaggat

SEQ ID NO: 114756 - DNA, 19 bp, Homo sapiens
  siRNA target sequence for SPTA1 (NM_003126.1,4013-4031).
ggcgtacaaaggatcgtaa

SEQ ID NO: 114757 - DNA, 19 bp, Homo sapiens
  siRNA target sequence for SPTA1 (NM_003126.1,4131-4149).
ggagctggccgaagactta

SEQ ID NO: 114758 - DNA, 19 bp, Homo sapiens
  siRNA target sequence for SPTA1 (NM_003126.1,4134-4152).
gctggccgaagacttaact

SEQ ID NO: 114759 - DNA, 19 bp, Homo sapiens
  siRNA target sequence for SPTA1 (NM_003126.1,4234-4252).
gacttcagtgcagaactta

SEQ ID NO: 114760 - DNA, 19 bp, Homo sapiens
  siRNA target sequence for SPTA1 (NM_003126.1,4266-4284).
ccatgctagccctgaaatt

SEQ ID NO: 114761 - DNA, 19 bp, Homo sapiens
  siRNA target sequence for SPTA1 (NM_003126.1,4367-4385).
gcctggagttgcagatgtt

SEQ ID NO: 114762 - DNA, 19 bp, Homo sapiens
  siRNA target sequence for SPTA1 (NM_003126.1,4386-4404).
ccaggggaactgtgatcaa

SEQ ID NO: 114763 - DNA, 19 bp, Homo sapiens
  siRNA target sequence for SPTA1 (NM_003126.1,4495-4513).
gacgatttggacaaagcaa

SEQ ID NO: 114764 - DNA, 19 bp, Homo sapiens
  siRNA target sequence for SPTA1 (NM_003126.1,4607-4625).
ggctccaacgtgtactaga

SEQ ID NO: 114765 - DNA, 19 bp, Homo sapiens
  siRNA target sequence for SPTA1 (NM_003126.1,4665-4683).
gacaaagcttggagactat

SEQ ID NO: 114766 - DNA, 19 bp, Homo sapiens
  siRNA target sequence for SPTA1 (NM_003126.1,4675-4693).
ggagactatgccaacctaa

SEQ ID NO: 114767 - DNA, 19 bp, Homo sapiens
  siRNA target sequence for SPTA1 (NM_003126.1,4676-4694).
gagactatgccaacctaaa

SEQ ID NO: 114768 - DNA, 19 bp, Homo sapiens
  siRNA target sequence for SPTA1 (NM_003126.1,4680-4698).
ctatgccaacctaaaacaa

SEQ ID NO: 114769 - DNA, 19 bp, Homo sapiens
  siRNA target sequence for SPTA1 (NM_003126.1,4746-4764).
gcccacagcctgtgatgaa

SEQ ID NO: 114770 - DNA, 19 bp, Homo sapiens
  siRNA target sequence for SPTA1 (NM_003126.1,4755-4773).
ctgtgatgaatcctacaaa

SEQ ID NO: 114771 - DNA, 19 bp, Homo sapiens
  siRNA target sequence for SPTA1 (NM_003126.1,4774-4792).
gacgccactaacattcaga

SEQ ID NO: 114772 - DNA, 19 bp, Homo sapiens
  siRNA target sequence for SPTA1 (NM_003126.1,5008-5026).
caacagaggttcaacacaa

SEQ ID NO: 114773 - DNA, 19 bp, Homo sapiens
  siRNA target sequence for SPTA1 (NM_003126.1,5181-5199).
gaatacattggctgaagat

SEQ ID NO: 114774 - DNA, 19 bp, Homo sapiens
  siRNA target sequence for SPTA1 (NM_003126.1,5213-5231).
ggactttcaacgttgatca

SEQ ID NO: 114775 - DNA, 19 bp, Homo sapiens
  siRNA target sequence for SPTA1 (NM_003126.1,5216-5234).
ctttcaacgttgatcagat

SEQ ID NO: 114776 - DNA, 19 bp, Homo sapiens
  siRNA target sequence for SPTA1 (NM_003126.1,5288-5306).
cagctgcacaccacgaaaa

SEQ ID NO: 114777 - DNA, 19 bp, Homo sapiens
  siRNA target sequence for SPTA1 (NM_003126.1,5290-5308).
gctgcacaccacgaaaaat

SEQ ID NO: 114778 - DNA, 19 bp, Homo sapiens
  siRNA target sequence for SPTA1 (NM_003126.1,5291-5309).
ctgcacaccacgaaaaatt

SEQ ID NO: 114779 - DNA, 19 bp, Homo sapiens
  siRNA target sequence for SPTA1 (NM_003126.1,5293-5311).
gcacaccacgaaaaattga

SEQ ID NO: 114780 - DNA, 19 bp, Homo sapiens
  siRNA target sequence for SPTA1 (NM_003126.1,5294-5312).
cacaccacgaaaaattgaa

SEQ ID NO: 114781 - DNA, 19 bp, Homo sapiens
  siRNA target sequence for SPTA1 (NM_003126.1,5334-5352).
gttcttccaggatctagat

SEQ ID NO: 114782 - DNA, 19 bp, Homo sapiens
  siRNA target sequence for SPTA1 (NM_003126.1,5337-5355).
cttccaggatctagatgat

SEQ ID NO: 114783 - DNA, 19 bp, Homo sapiens
  siRNA target sequence for SPTA1 (NM_003126.1,5363-5381).
cctggatagaggagaagtt

SEQ ID NO: 114784 - DNA, 19 bp, Homo sapiens
  siRNA target sequence for SPTA1 (NM_003126.1,5367-5385).
gatagaggagaagttgata

SEQ ID NO: 114785 - DNA, 19 bp, Homo sapiens
  siRNA target sequence for SPTA1 (NM_003126.1,5606-5624).
ccaaggcccgaggacttaa

SEQ ID NO: 114786 - DNA, 19 bp, Homo sapiens
  siRNA target sequence for SPTA1 (NM_003126.1,5636-5654).
ccctagaatacttgcaatt

SEQ ID NO: 114787 - DNA, 19 bp, Homo sapiens
  siRNA target sequence for SPTA1 (NM_003126.1,5741-5759).
ctactcagagcttgctaat

SEQ ID NO: 114788 - DNA, 19 bp, Homo sapiens
  siRNA target sequence for SPTA1 (NM_003126.1,5793-5811).
ccatgagacccgagtacaa

SEQ ID NO: 114789 - DNA, 19 bp, Homo sapiens
  siRNA target sequence for SPTA1 (NM_003126.1,5794-5812).
catgagacccgagtacaaa

SEQ ID NO: 114790 - DNA, 19 bp, Homo sapiens
  siRNA target sequence for SPTA1 (NM_003126.1,5828-5846).
gagaagacatcctaaataa

SEQ ID NO: 114791 - DNA, 19 bp, Homo sapiens
  siRNA target sequence for SPTA1 (NM_003126.1,5886-5904).
caagatagaggctctgaat

SEQ ID NO: 114792 - DNA, 19 bp, Homo sapiens
  siRNA target sequence for SPTA1 (NM_003126.1,6176-6194).
ctcaacacaaccagtctaa

SEQ ID NO: 114793 - DNA, 19 bp, Homo sapiens
  siRNA target sequence for SPTA1 (NM_003126.1,6309-6327).
ggacctgttcgtggaattt

SEQ ID NO: 114794 - DNA, 19 bp, Homo sapiens
  siRNA target sequence for SPTA1 (NM_003126.1,6526-6544).
ccttccagcccttatacct

SEQ ID NO: 114795 - DNA, 19 bp, Homo sapiens
  siRNA target sequence for SPTA1 (NM_003126.1,6572-6590).
cctggaagcacctatctga

SEQ ID NO: 114796 - DNA, 19 bp, Homo sapiens
  siRNA target sequence for SPTA1 (NM_003126.1,6579-6597).
gcacctatctgacatcatt

SEQ ID NO: 114797 - DNA, 19 bp, Homo sapiens
  siRNA target sequence for SPTA1 (NM_003126.1,6632-6650).
caagacaggtcaagaactt

SEQ ID NO: 114798 - DNA, 19 bp, Homo sapiens
  siRNA target sequence for SPTA1 (NM_003126.1,6679-6697).
gccagtaccttccttcaat

SEQ ID NO: 114799 - DNA, 19 bp, Homo sapiens
  siRNA target sequence for SPTA1 (NM_003126.1,6705-6723).
ggaaaccagggcttacttt

SEQ ID NO: 114800 - DNA, 19 bp, Homo sapiens
  siRNA target sequence for SPTA1 (NM_003126.1,6749-6767).
caggaactctggaatctca

SEQ ID NO: 114801 - DNA, 19 bp, Homo sapiens
  siRNA target sequence for SPTA1 (NM_003126.1,6804-6822).
ggcgatgaagcgtcaacta

SEQ ID NO: 114802 - DNA, 19 bp, Homo sapiens
  siRNA target sequence for SPTA1 (NM_003126.1,6805-6823).
gcgatgaagcgtcaactaa

SEQ ID NO: 114803 - DNA, 19 bp, Homo sapiens
  siRNA target sequence for SPTA1 (NM_003126.1,6813-6831).
gcgtcaactaaccaagatt

SEQ ID NO: 114804 - DNA, 19 bp, Homo sapiens
  siRNA target sequence for SPTA1 (NM_003126.1,6815-6833).
gtcaactaaccaagattgt

SEQ ID NO: 114805 - DNA, 19 bp, Homo sapiens
  siRNA target sequence for SPTA1 (NM_003126.1,6856-6874).
gacgctctgatccttgata

SEQ ID NO: 114806 - DNA, 19 bp, Homo sapiens
  siRNA target sequence for SPTA1 (NM_003126.1,6859-6877).
gctctgatccttgatatca

SEQ ID NO: 114807 - DNA, 19 bp, Homo sapiens
  siRNA target sequence for SPTA1 (NM_003126.1,6860-6878).
ctctgatccttgatatcaa

SEQ ID NO: 114808 - DNA, 19 bp, Homo sapiens
  siRNA target sequence for SPTA1 (NM_003126.1,6862-6880).
ctgatccttgatatcaaat

SEQ ID NO: 114809 - DNA, 19 bp, Homo sapiens
  siRNA target sequence for SPTA1 (NM_003126.1,6985-7003).
gtgagtgaagagactctaa

SEQ ID NO: 114810 - DNA, 19 bp, Homo sapiens
  siRNA target sequence for SPTA1 (NM_003126.1,7006-7024).
gaatttagcacaatctata

SEQ ID NO: 114811 - DNA, 19 bp, Homo sapiens
  siRNA target sequence for SPTA1 (NM_003126.1,7029-7047).
ctttgatgagaatttgaca

SEQ ID NO: 114812 - DNA, 19 bp, Homo sapiens
  siRNA target sequence for SPTA1 (NM_003126.1,7051-7069).
cgcctgactcacaaagagt

SEQ ID NO: 114813 - DNA, 19 bp, Homo sapiens
  siRNA target sequence for SPTA1 (NM_003126.1,7052-7070).
gcctgactcacaaagagtt

SEQ ID NO: 114814 - DNA, 19 bp, Homo sapiens
  siRNA target sequence for SPTA1 (NM_003126.1,7085-7103).
gaggactcaattactactt

SEQ ID NO: 114815 - DNA, 19 bp, Homo sapiens
  siRNA target sequence for SPTA1 (NM_003126.1,7183-7201).
gtctcactggaggactata

SEQ ID NO: 114816 - DNA, 19 bp, Homo sapiens
  siRNA target sequence for SPTA1 (NM_003126.1,7236-7254).
caagtccagtgatgaaata

SEQ ID NO: 114817 - DNA, 19 bp, Homo sapiens
  siRNA target sequence for SPTA1 (NM_003126.1,7276-7294).
gcagagggcaagtcatata

SEQ ID NO: 114818 - DNA, 19 bp, Homo sapiens
  siRNA target sequence for SPTA1 (NM_003126.1,7277-7295).
cagagggcaagtcatatat

SEQ ID NO: 114819 - DNA, 19 bp, Homo sapiens
  siRNA target sequence for SPTA1 (NM_003126.1,7283-7301).
gcaagtcatatattaccaa

SEQ ID NO: 114820 - DNA, 19 bp, Homo sapiens
  siRNA target sequence for SPTA1 (NM_003126.1,7349-7367).
ccacacatatgcagcaata

SEQ ID NO: 114821 - DNA, 19 bp, Homo sapiens
  siRNA target sequence for SPTA1 (NM_003126.1,7350-7368).
cacacatatgcagcaatat

SEQ ID NO: 114822 - DNA, 19 bp, Homo sapiens
  siRNA target sequence for SPTA1 (NM_003126.1,7427-7445).
ctactttggcaactaataa

SEQ ID NO: 114823 - DNA, 19 bp, Homo sapiens
  siRNA target sequence for SPTA1 (NM_003126.1,7430-7448).
ctttggcaactaataagca

SEQ ID NO: 114824 - DNA, 19 bp, Homo sapiens
  siRNA target sequence for SPTA1 (NM_003126.1,7452-7470).
cctcgtggatcgtagaaaa

SEQ ID NO: 114825 - DNA, 19 bp, Homo sapiens
  siRNA target sequence for SPTA1 (NM_003126.1,7453-7471).
ctcgtggatcgtagaaaat

SEQ ID NO: 114826 - DNA, 19 bp, Homo sapiens
  siRNA target sequence for SPTA1 (NM_003126.1,7455-7473).
cgtggatcgtagaaaatct

SEQ ID NO: 114827 - DNA, 19 bp, Homo sapiens
  siRNA target sequence for SPTA1 (NM_003126.1,7456-7474).
gtggatcgtagaaaatctt

SEQ ID NO: 114828 - DNA, 19 bp, Homo sapiens
  siRNA target sequence for AVIL (NM_006576.2,62-80).
caacgaccctgggatcatt

SEQ ID NO: 114829 - DNA, 19 bp, Homo sapiens
  siRNA target sequence for AVIL (NM_006576.2,125-143).
cgcccacggcaacttctat

SEQ ID NO: 114830 - DNA, 19 bp, Homo sapiens
  siRNA target sequence for AVIL (NM_006576.2,431-449).
gcggctgctacatgtgaaa

SEQ ID NO: 114831 - DNA, 19 bp, Homo sapiens
  siRNA target sequence for AVIL (NM_006576.2,466-484).
gggctaccgaggtggaaat

SEQ ID NO: 114832 - DNA, 19 bp, Homo sapiens
  siRNA target sequence for AVIL (NM_006576.2,593-611).
gcttctggcaaaggatatt

SEQ ID NO: 114833 - DNA, 19 bp, Homo sapiens
  siRNA target sequence for AVIL (NM_006576.2,708-726).
cttggccgacgctccatta

SEQ ID NO: 114834 - DNA, 19 bp, Homo sapiens
  siRNA target sequence for AVIL (NM_006576.2,711-729).
ggccgacgctccattatca

SEQ ID NO: 114835 - DNA, 19 bp, Homo sapiens
  siRNA target sequence for AVIL (NM_006576.2,712-730).
gccgacgctccattatcaa

SEQ ID NO: 114836 - DNA, 19 bp, Homo sapiens
  siRNA target sequence for AVIL (NM_006576.2,765-783).
cagaaatcaactatcatgt

SEQ ID NO: 114837 - DNA, 19 bp, Homo sapiens
  siRNA target sequence for AVIL (NM_006576.2,779-797).
catgttgtatcatatctca

SEQ ID NO: 114838 - DNA, 19 bp, Homo sapiens
  siRNA target sequence for AVIL (NM_006576.2,908-926).
cgtgtggaaaggaaaagga

SEQ ID NO: 114839 - DNA, 19 bp, Homo sapiens
  siRNA target sequence for AVIL (NM_006576.2,1029-1047).
gctgagtcggccatgttca

SEQ ID NO: 114840 - DNA, 19 bp, Homo sapiens
  siRNA target sequence for AVIL (NM_006576.2,1030-1048).
ctgagtcggccatgttcaa

SEQ ID NO: 114841 - DNA, 19 bp, Homo sapiens
  siRNA target sequence for AVIL (NM_006576.2,1102-1120).
cgttcagcattggtaaaat

SEQ ID NO: 114842 - DNA, 19 bp, Homo sapiens
  siRNA target sequence for AVIL (NM_006576.2,1109-1127).
cattggtaaaattgctaaa

SEQ ID NO: 114843 - DNA, 19 bp, Homo sapiens
  siRNA target sequence for AVIL (NM_006576.2,1250-1268).
ggtccctgtggagtatcaa

SEQ ID NO: 114844 - DNA, 19 bp, Homo sapiens
  siRNA target sequence for AVIL (NM_006576.2,1251-1269).
gtccctgtggagtatcaat

SEQ ID NO: 114845 - DNA, 19 bp, Homo sapiens
  siRNA target sequence for AVIL (NM_006576.2,1255-1273).
ctgtggagtatcaatggta

SEQ ID NO: 114846 - DNA, 19 bp, Homo sapiens
  siRNA target sequence for AVIL (NM_006576.2,1335-1353).
ccacatcacatcttgtaca

SEQ ID NO: 114847 - DNA, 19 bp, Homo sapiens
  siRNA target sequence for AVIL (NM_006576.2,1338-1356).
catcacatcttgtacatct

SEQ ID NO: 114848 - DNA, 19 bp, Homo sapiens
  siRNA target sequence for AVIL (NM_006576.2,1415-1433).
ggtggatcggcagtttgat

SEQ ID NO: 114849 - DNA, 19 bp, Homo sapiens
  siRNA target sequence for AVIL (NM_006576.2,1468-1486).
cggagccacgccacttcat

SEQ ID NO: 114850 - DNA, 19 bp, Homo sapiens
  siRNA target sequence for AVIL (NM_006576.2,1552-1570).
ctgaccctccagtaagact

SEQ ID NO: 114851 - DNA, 19 bp, Homo sapiens
  siRNA target sequence for AVIL (NM_006576.2,1575-1593).
caaattcatggaaatgaca

SEQ ID NO: 114852 - DNA, 19 bp, Homo sapiens
  siRNA target sequence for AVIL (NM_006576.2,1827-1845).
ccctatgccaatgataaaa

SEQ ID NO: 114853 - DNA, 19 bp, Homo sapiens
  siRNA target sequence for AVIL (NM_006576.2,1872-1890).
cagtctcgtctctttgaat

SEQ ID NO: 114854 - DNA, 19 bp, Homo sapiens
  siRNA target sequence for AVIL (NM_006576.2,1874-1892).
gtctcgtctctttgaatgt

SEQ ID NO: 114855 - DNA, 19 bp, Homo sapiens
  siRNA target sequence for AVIL (NM_006576.2,1962-1980).
gacgtgatgctcctagata

SEQ ID NO: 114856 - DNA, 19 bp, Homo sapiens
  siRNA target sequence for AVIL (NM_006576.2,2096-2114).
cacaccaatcctgatcatt

SEQ ID NO: 114857 - DNA, 19 bp, Homo sapiens
  siRNA target sequence for AVIL (NM_006576.2,2098-2116).
caccaatcctgatcattaa

SEQ ID NO: 114858 - DNA, 19 bp, Homo sapiens
  siRNA target sequence for AVIL (NM_006576.2,2247-2265).
gctgacatgaagaatgcaa

SEQ ID NO: 114859 - DNA, 19 bp, Homo sapiens
  siRNA target sequence for AVIL (NM_006576.2,2361-2379).
cctgccaaaaaggagaatt

SEQ ID NO: 114860 - DNA, 19 bp, Homo sapiens
  siRNA target sequence for AVIL (NM_006576.2,2446-2464).
gctggaaacagctccaaat

SEQ ID NO: 114861 - DNA, 19 bp, Homo sapiens
  siRNA target sequence for CFL1 (NM_005507.1,102-120).
catgaaggtgcgtaagtct

SEQ ID NO: 114862 - DNA, 19 bp, Homo sapiens
  siRNA target sequence for CFL1 (NM_005507.1,290-308).
gccgctatgccctctatga

SEQ ID NO: 114863 - DNA, 19 bp, Homo sapiens
  siRNA target sequence for CFL1 (NM_005507.1,300-318).
cctctatgatgcaacctat

SEQ ID NO: 114864 - DNA, 19 bp, Homo sapiens
  siRNA target sequence for CFL1 (NM_005507.1,440-458).
ggatcaagcatgaattgca

SEQ ID NO: 114865 - DNA, 19 bp, Homo sapiens
  siRNA target sequence for SDCBP (NM_005625.1,261-279).
ctatccctcacgatggaaa

SEQ ID NO: 114866 - DNA, 19 bp, Homo sapiens
  siRNA target sequence for ACTN4 (NM_004924.3,334-352).
caggggagcggttacctaa

SEQ ID NO: 114867 - DNA, 19 bp, Homo sapiens
  siRNA target sequence for ACTN4 (NM_004924.3,442-460).
ccatcggggcagaagagat

SEQ ID NO: 114868 - DNA, 19 bp, Homo sapiens
  siRNA target sequence for ACTN4 (NM_004924.3,443-461).
catcggggcagaagagatt

SEQ ID NO: 114869 - DNA, 19 bp, Homo sapiens
  siRNA target sequence for ACTN4 (NM_004924.3,465-483).
gacggcaacgcaaagatga

SEQ ID NO: 114870 - DNA, 19 bp, Homo sapiens
  siRNA target sequence for ACTN4 (NM_004924.3,595-613).
cgtataagaacgtcaatgt

SEQ ID NO: 114871 - DNA, 19 bp, Homo sapiens
  siRNA target sequence for ACTN4 (NM_004924.3,638-656).
ggatggtcttgccttcaat

SEQ ID NO: 114872 - DNA, 19 bp, Homo sapiens
  siRNA target sequence for ACTN4 (NM_004924.3,676-694).
gaccagagctgattgagta

SEQ ID NO: 114873 - DNA, 19 bp, Homo sapiens
  siRNA target sequence for ACTN4 (NM_004924.3,681-699).
gagctgattgagtatgaca

SEQ ID NO: 114874 - DNA, 19 bp, Homo sapiens
  siRNA target sequence for ACTN4 (NM_004924.3,888-906).
gccgccaaccggatctgta

SEQ ID NO: 114875 - DNA, 19 bp, Homo sapiens
  siRNA target sequence for ACTN4 (NM_004924.3,889-907).
ccgccaaccggatctgtaa

SEQ ID NO: 114876 - DNA, 19 bp, Homo sapiens
  siRNA target sequence for ACTN4 (NM_004924.3,1011-1029).
gaccgtgtgccccaaaaga

SEQ ID NO: 114877 - DNA, 19 bp, Homo sapiens
  siRNA target sequence for ACTN4 (NM_004924.3,1390-1408).
ccacactatcggacatcaa

SEQ ID NO: 114878 - DNA, 19 bp, Homo sapiens
  siRNA target sequence for ACTN4 (NM_004924.3,1391-1409).
cacactatcggacatcaaa

SEQ ID NO: 114879 - DNA, 19 bp, Homo sapiens
  siRNA target sequence for ACTN4 (NM_004924.3,1574-1592).
cggctctctgacacatagt

SEQ ID NO: 114880 - DNA, 19 bp, Homo sapiens
  siRNA target sequence for ACTN4 (NM_004924.3,2737-2755).
ccggtgccctcgactacaa

SEQ ID NO: 114881 - DNA, 19 bp, Homo sapiens
  siRNA target sequence for ACTN4 (NM_004924.3,2739-2757).
ggtgccctcgactacaagt

SEQ ID NO: 114882 - DNA, 19 bp, Homo sapiens
  siRNA target sequence for ACTN4 (NM_004924.3,2759-2777).
cttctccacggccttgtat

SEQ ID NO: 114883 - DNA, 19 bp, Homo sapiens
  siRNA target sequence for EPB49 (NM_001978.1,642-660).
cgagcctcacttcacttat

SEQ ID NO: 114884 - DNA, 19 bp, Homo sapiens
  siRNA target sequence for EPB49 (NM_001978.1,758-776).
gccggtcgcctggaatcat

SEQ ID NO: 114885 - DNA, 19 bp, Homo sapiens
  siRNA target sequence for EPB49 (NM_001978.1,854-872).
gcccagattccaacatcta

SEQ ID NO: 114886 - DNA, 19 bp, Homo sapiens
  siRNA target sequence for EPB49 (NM_001978.1,873-891).
caagaagcctcccatctat

SEQ ID NO: 114887 - DNA, 19 bp, Homo sapiens
  siRNA target sequence for EPB49 (NM_001978.1,951-969).
catcgagtcatccaagttt

SEQ ID NO: 114888 - DNA, 19 bp, Homo sapiens
  siRNA target sequence for EPB49 (NM_001978.1,997-1015).
cagccagccaaaatcgaaa

SEQ ID NO: 114889 - DNA, 19 bp, Homo sapiens
  siRNA target sequence for EPB49 (NM_001978.1,1165-1183).
gaggaactcagtaaggtta

SEQ ID NO: 114890 - DNA, 19 bp, Homo sapiens
  siRNA target sequence for EPB49 (NM_001978.1,1168-1186).
gaactcagtaaggttactt

SEQ ID NO: 114891 - DNA, 19 bp, Homo sapiens
  siRNA target sequence for EPB49 (NM_001978.1,1264-1282).
gaccggacacccttccata

SEQ ID NO: 114892 - DNA, 19 bp, Homo sapiens
  siRNA target sequence for EPB49 (NM_001978.1,1290-1308).
gcaccagggaacgtctaaa

SEQ ID NO: 114893 - DNA, 19 bp, Homo sapiens
  siRNA target sequence for EPB49 (NM_001978.1,1291-1309).
caccagggaacgtctaaat

SEQ ID NO: 114894 - DNA, 19 bp, Homo sapiens
  siRNA target sequence for EPB49 (NM_001978.1,1293-1311).
ccagggaacgtctaaatct

SEQ ID NO: 114895 - DNA, 19 bp, Homo sapiens
  siRNA target sequence for EPB49 (NM_001978.1,1470-1488).
gaagatctatccctatgaa

SEQ ID NO: 114896 - DNA, 19 bp, Homo sapiens
  siRNA target sequence for FSCN1 (NM_003088.1,1006-1024).
gaccgcgacaccaaaaagt

SEQ ID NO: 114897 - DNA, 19 bp, Homo sapiens
  siRNA target sequence for FSCN1 (NM_003088.1,1008-1026).
ccgcgacaccaaaaagtgt

SEQ ID NO: 114898 - DNA, 19 bp, Homo sapiens
  siRNA target sequence for FSCN1 (NM_003088.1,1155-1173).
ggcgtccaatggcaagttt

SEQ ID NO: 114899 - DNA, 19 bp, Homo sapiens
  siRNA target sequence for FSCN1 (NM_003088.1,1157-1175).
cgtccaatggcaagtttgt

SEQ ID NO: 114900 - DNA, 19 bp, Homo sapiens
  siRNA target sequence for FSCN1 (NM_003088.1,1229-1247).
cagagctcttcctcatgaa

SEQ ID NO: 114901 - DNA, 19 bp, Homo sapiens
  siRNA target sequence for FSCN1 (NM_003088.1,1390-1408).
gactccacaggcaaatact

SEQ ID NO: 114902 - DNA, 19 bp, Homo sapiens
  siRNA target sequence for FSCN1 (NM_003088.1,1451-1469).
ctcctgtggacttcttctt

SEQ ID NO: 114903 - DNA, 19 bp, Homo sapiens
  siRNA target sequence for FSCN1 (NM_003088.1,1471-1489).
gagttctgcgactataaca

SEQ ID NO: 114904 - DNA, 19 bp, Homo sapiens
  siRNA target sequence for FSCN2 (NM_012418.1,978-996).
ccaatcaggatgatgaact

SEQ ID NO: 114905 - DNA, 19 bp, Homo sapiens
  siRNA target sequence for FSCN2 (NM_012418.1,979-997).
caatcaggatgatgaacta

SEQ ID NO: 114906 - DNA, 19 bp, Homo sapiens
  siRNA target sequence for FSCN2 (NM_012418.1,1122-1140).
ctgccaacaccatgtttga

SEQ ID NO: 114907 - DNA, 19 bp, Homo sapiens
  siRNA target sequence for FSCN2 (NM_012418.1,1124-1142).
gccaacaccatgtttgaga

SEQ ID NO: 114908 - DNA, 19 bp, Homo sapiens
  siRNA target sequence for FSCN2 (NM_012418.1,1187-1205).
cgctacgtgtgcatgaaga

SEQ ID NO: 114909 - DNA, 19 bp, Homo sapiens
  siRNA target sequence for FSCN2 (NM_012418.1,1192-1210).
cgtgtgcatgaagaagaat

SEQ ID NO: 114910 - DNA, 19 bp, Homo sapiens
  siRNA target sequence for FSCN2 (NM_012418.1,1219-1237).
ggcggctatcagcgatttt

SEQ ID NO: 114911 - DNA, 19 bp, Homo sapiens
  siRNA target sequence for FSCN2 (NM_012418.1,1221-1239).
cggctatcagcgattttgt

SEQ ID NO: 114912 - DNA, 19 bp, Homo sapiens
  siRNA target sequence for VIL1 (NM_007127.1,250-268).
ggggcagctgccatctaca

SEQ ID NO: 114913 - DNA, 19 bp, Homo sapiens
  siRNA target sequence for VIL1 (NM_007127.1,269-287).
ccacacagatggatgactt

SEQ ID NO: 114914 - DNA, 19 bp, Homo sapiens
  siRNA target sequence for VIL1 (NM_007127.1,630-648).
gggagggcgcacctatgta

SEQ ID NO: 114915 - DNA, 19 bp, Homo sapiens
  siRNA target sequence for VIL1 (NM_007127.1,651-669).
cgtggtggacggagagaat

SEQ ID NO: 114916 - DNA, 19 bp, Homo sapiens
  siRNA target sequence for VIL1 (NM_007127.1,866-884).
gtcacgaggactgttacat

SEQ ID NO: 114917 - DNA, 19 bp, Homo sapiens
  siRNA target sequence for VIL1 (NM_007127.1,962-980).
gccatgcgctgaacttcat

SEQ ID NO: 114918 - DNA, 19 bp, Homo sapiens
  siRNA target sequence for VIL1 (NM_007127.1,1225-1243).
caggtgtggcgcattgaga

SEQ ID NO: 114919 - DNA, 19 bp, Homo sapiens
  siRNA target sequence for VIL1 (NM_007127.1,1272-1290).
gtggctaggccacttctat

SEQ ID NO: 114920 - DNA, 19 bp, Homo sapiens
  siRNA target sequence for VIL1 (NM_007127.1,1374-1392).
ggccagccaagatgaaatt

SEQ ID NO: 114921 - DNA, 19 bp, Homo sapiens
  siRNA target sequence for VIL1 (NM_007127.1,1470-1488).
caaggagccacctcatctt

SEQ ID NO: 114922 - DNA, 19 bp, Homo sapiens
  siRNA target sequence for VIL1 (NM_007127.1,1483-1501).
catcttatgtccatcttca

SEQ ID NO: 114923 - DNA, 19 bp, Homo sapiens
  siRNA target sequence for VIL1 (NM_007127.1,1526-1544).
gaggcacctcccgaactaa

SEQ ID NO: 114924 - DNA, 19 bp, Homo sapiens
  siRNA target sequence for VIL1 (NM_007127.1,1588-1606).
ggaactggcgccaacaaca

SEQ ID NO: 114925 - DNA, 19 bp, Homo sapiens
  siRNA target sequence for VIL1 (NM_007127.1,1850-1868).
gactacaggaagaaaacct

SEQ ID NO: 114926 - DNA, 19 bp, Homo sapiens
  siRNA target sequence for VIL1 (NM_007127.1,2170-2188).
cccttcaagtggagtaaca

SEQ ID NO: 114927 - DNA, 19 bp, Homo sapiens
  siRNA target sequence for VIL1 (NM_007127.1,2180-2198).
ggagtaacaccaaatccta

SEQ ID NO: 114928 - DNA, 19 bp, Homo sapiens
  siRNA target sequence for VIL1 (NM_007127.1,2181-2199).
gagtaacaccaaatcctat

SEQ ID NO: 114929 - DNA, 19 bp, Homo sapiens
  siRNA target sequence for VIL1 (NM_007127.1,2267-2285).
ccaaagtggacgtgttcaa

SEQ ID NO: 114930 - DNA, 19 bp, Homo sapiens
  siRNA target sequence for VIL1 (NM_007127.1,2268-2286).
caaagtggacgtgttcaat

SEQ ID NO: 114931 - DNA, 19 bp, Homo sapiens
  siRNA target sequence for VIL1 (NM_007127.1,2272-2290).
gtggacgtgttcaatgcta

SEQ ID NO: 114932 - DNA, 19 bp, Homo sapiens
  siRNA target sequence for DSTN (NM_006870.2,88-106).
caagtagctgatgaagtat

SEQ ID NO: 114933 - DNA, 19 bp, Homo sapiens
  siRNA target sequence for DSTN (NM_006870.2,121-139).
gacatgaaagttcgtaaat

SEQ ID NO: 114934 - DNA, 19 bp, Homo sapiens
  siRNA target sequence for DSTN (NM_006870.2,140-158).
gctccacaccagaagaaat

SEQ ID NO: 114935 - DNA, 19 bp, Homo sapiens
  siRNA target sequence for DSTN (NM_006870.2,247-265).
gatgttggtgtaaccataa

SEQ ID NO: 114936 - DNA, 19 bp, Homo sapiens
  siRNA target sequence for DSTN (NM_006870.2,428-446).
gctccaaggatgcaattaa

SEQ ID NO: 114937 - DNA, 19 bp, Homo sapiens
  siRNA target sequence for DSTN (NM_006870.2,501-519).
caatcgggcttgtattgct

SEQ ID NO: 114938 - DNA, 19 bp, Homo sapiens
  siRNA target sequence for DSTN (NM_006870.2,506-524).
gggcttgtattgctgaaaa

SEQ ID NO: 114939 - DNA, 19 bp, Homo sapiens
  siRNA target sequence for DSTN (NM_006870.2,525-543).
gttaggtggatccttaatt

SEQ ID NO: 114940 - DNA, 19 bp, Homo sapiens
  siRNA target sequence for WASF1 (NM_003931.1,246-264).
ccgctagtgaaaagaaaca

SEQ ID NO: 114941 - DNA, 19 bp, Homo sapiens
  siRNA target sequence for WASF1 (NM_003931.1,247-265).
cgctagtgaaaagaaacat

SEQ ID NO: 114942 - DNA, 19 bp, Homo sapiens
  siRNA target sequence for WASF1 (NM_003931.1,296-314).
gcctagaggcattaagaat

SEQ ID NO: 114943 - DNA, 19 bp, Homo sapiens
  siRNA target sequence for WASF1 (NM_003931.1,298-316).
ctagaggcattaagaatga

SEQ ID NO: 114944 - DNA, 19 bp, Homo sapiens
  siRNA target sequence for WASF1 (NM_003931.1,363-381).
ctaagtagcctaagtaaat

SEQ ID NO: 114945 - DNA, 19 bp, Homo sapiens
  siRNA target sequence for WASF1 (NM_003931.1,410-428).
caatgaagcacatagtttt

SEQ ID NO: 114946 - DNA, 19 bp, Homo sapiens
  siRNA target sequence for WASF1 (NM_003931.1,453-471).
gaacgtgtggaccgtttat

SEQ ID NO: 114947 - DNA, 19 bp, Homo sapiens
  siRNA target sequence for WASF1 (NM_003931.1,457-475).
gtgtggaccgtttatctgt

SEQ ID NO: 114948 - DNA, 19 bp, Homo sapiens
  siRNA target sequence for WASF1 (NM_003931.1,459-477).
gtggaccgtttatctgtta

SEQ ID NO: 114949 - DNA, 19 bp, Homo sapiens
  siRNA target sequence for WASF1 (NM_003931.1,461-479).
ggaccgtttatctgttagt

SEQ ID NO: 114950 - DNA, 19 bp, Homo sapiens
  siRNA target sequence for WASF1 (NM_003931.1,514-532).
ctttgcaagatataacaat

SEQ ID NO: 114951 - DNA, 19 bp, Homo sapiens
  siRNA target sequence for WASF1 (NM_003931.1,540-558).
gctttccgaagttctacaa

SEQ ID NO: 114952 - DNA, 19 bp, Homo sapiens
  siRNA target sequence for WASF1 (NM_003931.1,541-559).
ctttccgaagttctacaat

SEQ ID NO: 114953 - DNA, 19 bp, Homo sapiens
  siRNA target sequence for WASF1 (NM_003931.1,545-563).
ccgaagttctacaattcaa

SEQ ID NO: 114954 - DNA, 19 bp, Homo sapiens
  siRNA target sequence for WASF1 (NM_003931.1,573-591).
cttttcgatcgcaagactt

SEQ ID NO: 114955 - DNA, 19 bp, Homo sapiens
  siRNA target sequence for WASF1 (NM_003931.1,606-624).
caggagacgtacgatgttt

SEQ ID NO: 114956 - DNA, 19 bp, Homo sapiens
  siRNA target sequence for WASF1 (NM_003931.1,608-626).
ggagacgtacgatgtttgt

SEQ ID NO: 114957 - DNA, 19 bp, Homo sapiens
  siRNA target sequence for WASF1 (NM_003931.1,698-716).
caatccttcgtatttcttt

SEQ ID NO: 114958 - DNA, 19 bp, Homo sapiens
  siRNA target sequence for WASF1 (NM_003931.1,895-913).
ctaatctcttacataagca

SEQ ID NO: 114959 - DNA, 19 bp, Homo sapiens
  siRNA target sequence for WASF1 (NM_003931.1,938-956).
ctctcattttgaaacaaga

SEQ ID NO: 114960 - DNA, 19 bp, Homo sapiens
  siRNA target sequence for WASF1 (NM_003931.1,960-978).
cagacatacgtggatcata

SEQ ID NO: 114961 - DNA, 19 bp, Homo sapiens
  siRNA target sequence for WASF1 (NM_003931.1,964-982).
catacgtggatcatatgga

SEQ ID NO: 114962 - DNA, 19 bp, Homo sapiens
  siRNA target sequence for WASF1 (NM_003931.1,975-993).
catatggatggatcttact

SEQ ID NO: 114963 - DNA, 19 bp, Homo sapiens
  siRNA target sequence for WASF1 (NM_003931.1,1135-1153).
gttctgctacaggtttgat

SEQ ID NO: 114964 - DNA, 19 bp, Homo sapiens
  siRNA target sequence for WASF1 (NM_003931.1,1138-1156).
ctgctacaggtttgataga

SEQ ID NO: 114965 - DNA, 19 bp, Homo sapiens
  siRNA target sequence for WASF1 (NM_003931.1,1141-1159).
ctacaggtttgatagaaaa

SEQ ID NO: 114966 - DNA, 19 bp, Homo sapiens
  siRNA target sequence for WASF1 (NM_003931.1,1247-1265).
gtcaacttcctcattaaga

SEQ ID NO: 114967 - DNA, 19 bp, Homo sapiens
  siRNA target sequence for WASF1 (NM_003931.1,1630-1648).
caggtccccatgttccatt

SEQ ID NO: 114968 - DNA, 19 bp, Homo sapiens
  siRNA target sequence for WASF1 (NM_003931.1,1633-1651).
gtccccatgttccattaat

SEQ ID NO: 114969 - DNA, 19 bp, Homo sapiens
  siRNA target sequence for WASF1 (NM_003931.1,1660-1678).
ctcctccatcacaagttat

SEQ ID NO: 114970 - DNA, 19 bp, Homo sapiens
  siRNA target sequence for WASF1 (NM_003931.1,1705-1723).
catcaaccctacctgtaat

SEQ ID NO: 114971 - DNA, 19 bp, Homo sapiens
  siRNA target sequence for WASF1 (NM_003931.1,1742-1760).
gctactggaagcaatacga

SEQ ID NO: 114972 - DNA, 19 bp, Homo sapiens
  siRNA target sequence for WASF1 (NM_003931.1,1844-1862).
cctgtctcgccgtattgct

SEQ ID NO: 114973 - DNA, 19 bp, Homo sapiens
  siRNA target sequence for WASF1 (NM_003931.1,1851-1869).
cgccgtattgctgttgaat

SEQ ID NO: 114974 - DNA, 19 bp, Homo sapiens
  siRNA target sequence for WASF1 (NM_003931.1,1852-1870).
gccgtattgctgttgaata

SEQ ID NO: 114975 - DNA, 19 bp, Homo sapiens
  siRNA target sequence for WASF1 (NM_003931.1,1853-1871).
ccgtattgctgttgaatat

SEQ ID NO: 114976 - DNA, 19 bp, Homo sapiens
  siRNA target sequence for WASF3 (NM_006646.3,240-258).
ggattaccagcgaacttga

SEQ ID NO: 114977 - DNA, 19 bp, Homo sapiens
  siRNA target sequence for WASF3 (NM_006646.3,241-259).
gattaccagcgaacttgaa

SEQ ID NO: 114978 - DNA, 19 bp, Homo sapiens
  siRNA target sequence for WASF3 (NM_006646.3,247-265).
cagcgaacttgaatgtgta

SEQ ID NO: 114979 - DNA, 19 bp, Homo sapiens
  siRNA target sequence for WASF3 (NM_006646.3,273-291).
gtactcttgccgctatcat

SEQ ID NO: 114980 - DNA, 19 bp, Homo sapiens
  siRNA target sequence for WASF3 (NM_006646.3,372-390).
gagcaaattctcttcaaga

SEQ ID NO: 114981 - DNA, 19 bp, Homo sapiens
  siRNA target sequence for WASF3 (NM_006646.3,401-419).
cgccttgctgtcaaagtca

SEQ ID NO: 114982 - DNA, 19 bp, Homo sapiens
  siRNA target sequence for WASF3 (NM_006646.3,416-434).
gtcacccagctggattcaa

SEQ ID NO: 114983 - DNA, 19 bp, Homo sapiens
  siRNA target sequence for WASF3 (NM_006646.3,446-464).
gtctcactacaggatatca

SEQ ID NO: 114984 - DNA, 19 bp, Homo sapiens
  siRNA target sequence for WASF3 (NM_006646.3,500-518).
gaccagcaagtggtttcaa

SEQ ID NO: 114985 - DNA, 19 bp, Homo sapiens
  siRNA target sequence for WASF3 (NM_006646.3,503-521).
cagcaagtggtttcaaaga

SEQ ID NO: 114986 - DNA, 19 bp, Homo sapiens
  siRNA target sequence for WASF3 (NM_006646.3,618-636).
ggctgaagttctatactga

SEQ ID NO: 114987 - DNA, 19 bp, Homo sapiens
  siRNA target sequence for WASF3 (NM_006646.3,619-637).
gctgaagttctatactgat

SEQ ID NO: 114988 - DNA, 19 bp, Homo sapiens
  siRNA target sequence for WASF3 (NM_006646.3,718-736).
ggagcaaaagcgtatagat

SEQ ID NO: 114989 - DNA, 19 bp, Homo sapiens
  siRNA target sequence for WASF3 (NM_006646.3,780-798).
ggcgccaggagtggaatat

SEQ ID NO: 114990 - DNA, 19 bp, Homo sapiens
  siRNA target sequence for WASF3 (NM_006646.3,782-800).
cgccaggagtggaatatga

SEQ ID NO: 114991 - DNA, 19 bp, Homo sapiens
  siRNA target sequence for WASF3 (NM_006646.3,907-925).
ggacgttacggattactct

SEQ ID NO: 114992 - DNA, 19 bp, Homo sapiens
  siRNA target sequence for WASF3 (NM_006646.3,908-926).
gacgttacggattactctt

SEQ ID NO: 114993 - DNA, 19 bp, Homo sapiens
  siRNA target sequence for WASF3 (NM_006646.3,929-947).
ccggctactcccaaccatt

SEQ ID NO: 114994 - DNA, 19 bp, Homo sapiens
  siRNA target sequence for WASF3 (NM_006646.3,933-951).
ctactcccaaccattctct

SEQ ID NO: 114995 - DNA, 19 bp, Homo sapiens
  siRNA target sequence for WASF3 (NM_006646.3,1169-1187).
ccagcgcagataattgagt

SEQ ID NO: 114996 - DNA, 19 bp, Homo sapiens
  siRNA target sequence for WASF3 (NM_006646.3,1170-1188).
cagcgcagataattgagta

SEQ ID NO: 114997 - DNA, 19 bp, Homo sapiens
  siRNA target sequence for WASF3 (NM_006646.3,1172-1190).
gcgcagataattgagtatt

SEQ ID NO: 114998 - DNA, 19 bp, Homo sapiens
  siRNA target sequence for WASF3 (NM_006646.3,1173-1191).
cgcagataattgagtatta

SEQ ID NO: 114999 - DNA, 19 bp, Homo sapiens
  siRNA target sequence for WASF3 (NM_006646.3,1175-1193).
cagataattgagtattaca

SEQ ID NO: 115000 - DNA, 19 bp, Homo sapiens
  siRNA target sequence for WASF3 (NM_006646.3,1508-1526).
ctcctcgctgctattcgaa

SEQ ID NO: 115001 - DNA, 19 bp, Homo sapiens
  siRNA target sequence for ABLIM1 (NM_002313.4,104-122).
ctgccttccttggtctaaa

SEQ ID NO: 115002 - DNA, 19 bp, Homo sapiens
  siRNA target sequence for ABLIM1 (NM_002313.4,106-124).
gccttccttggtctaaagt

SEQ ID NO: 115003 - DNA, 19 bp, Homo sapiens
  siRNA target sequence for ABLIM1 (NM_002313.4,189-207).
gggctcgaacagaaagaga

SEQ ID NO: 115004 - DNA, 19 bp, Homo sapiens
  siRNA target sequence for ABLIM1 (NM_002313.4,253-271).
cataggcgtgccactatca

SEQ ID NO: 115005 - DNA, 19 bp, Homo sapiens
  siRNA target sequence for ABLIM1 (NM_002313.4,259-277).
cgtgccactatcactcatt

SEQ ID NO: 115006 - DNA, 19 bp, Homo sapiens
  siRNA target sequence for ABLIM1 (NM_002313.4,260-278).
gtgccactatcactcattt

SEQ ID NO: 115007 - DNA, 19 bp, Homo sapiens
  siRNA target sequence for ABLIM1 (NM_002313.4,306-324).
cccacgtgggcgtgtatgt

SEQ ID NO: 115008 - DNA, 19 bp, Homo sapiens
  siRNA target sequence for ABLIM1 (NM_002313.4,307-325).
ccacgtgggcgtgtatgta

SEQ ID NO: 115009 - DNA, 19 bp, Homo sapiens
  siRNA target sequence for ABLIM1 (NM_002313.4,308-326).
cacgtgggcgtgtatgtaa

SEQ ID NO: 115010 - DNA, 19 bp, Homo sapiens
  siRNA target sequence for ABLIM1 (NM_002313.4,310-328).
cgtgggcgtgtatgtaaca

SEQ ID NO: 115011 - DNA, 19 bp, Homo sapiens
  siRNA target sequence for ABLIM1 (NM_002313.4,323-341).
gtaacagcgttgatccttt

SEQ ID NO: 115012 - DNA, 19 bp, Homo sapiens
  siRNA target sequence for ABLIM1 (NM_002313.4,376-394).
gagaagcctgtcattcact

SEQ ID NO: 115013 - DNA, 19 bp, Homo sapiens
  siRNA target sequence for ABLIM1 (NM_002313.4,385-403).
gtcattcactgccataaat

SEQ ID NO: 115014 - DNA, 19 bp, Homo sapiens
  siRNA target sequence for ABLIM1 (NM_002313.4,433-451).
cgggtccagaccaaacatt

SEQ ID NO: 115015 - DNA, 19 bp, Homo sapiens
  siRNA target sequence for ABLIM1 (NM_002313.4,496-514).
gcacaagggggcttcttca

SEQ ID NO: 115016 - DNA, 19 bp, Homo sapiens
  siRNA target sequence for ABLIM1 (NM_002313.4,497-515).
cacaagggggcttcttcat

SEQ ID NO: 115017 - DNA, 19 bp, Homo sapiens
  siRNA target sequence for ABLIM1 (NM_002313.4,499-517).
caagggggcttcttcataa

SEQ ID NO: 115018 - DNA, 19 bp, Homo sapiens
  siRNA target sequence for ABLIM1 (NM_002313.4,513-531).
cataaagaacggagagtat

SEQ ID NO: 115019 - DNA, 19 bp, Homo sapiens
  siRNA target sequence for ABLIM1 (NM_002313.4,626-644).
cctaccatcccaattgctt

SEQ ID NO: 115020 - DNA, 19 bp, Homo sapiens
  siRNA target sequence for ABLIM1 (NM_002313.4,627-645).
ctaccatcccaattgcttt

SEQ ID NO: 115021 - DNA, 19 bp, Homo sapiens
  siRNA target sequence for ABLIM1 (NM_002313.4,631-649).
catcccaattgctttgctt

SEQ ID NO: 115022 - DNA, 19 bp, Homo sapiens
  siRNA target sequence for ABLIM1 (NM_002313.4,677-695).
ccggagaccgagtcacatt

SEQ ID NO: 115023 - DNA, 19 bp, Homo sapiens
  siRNA target sequence for ABLIM1 (NM_002313.4,680-698).
gagaccgagtcacattcaa

SEQ ID NO: 115024 - DNA, 19 bp, Homo sapiens
  siRNA target sequence for ABLIM1 (NM_002313.4,738-756).
gtcgtccagtccgaaagaa

SEQ ID NO: 115025 - DNA, 19 bp, Homo sapiens
  siRNA target sequence for ABLIM1 (NM_002313.4,778-796).
gccggctgcggaagagata

SEQ ID NO: 115026 - DNA, 19 bp, Homo sapiens
  siRNA target sequence for ABLIM1 (NM_002313.4,779-797).
ccggctgcggaagagatat

SEQ ID NO: 115027 - DNA, 19 bp, Homo sapiens
  siRNA target sequence for ABLIM1 (NM_002313.4,782-800).
gctgcggaagagatatcaa

SEQ ID NO: 115028 - DNA, 19 bp, Homo sapiens
  siRNA target sequence for ABLIM1 (NM_002313.4,904-922).
ggtgctccgtactgtgaaa

SEQ ID NO: 115029 - DNA, 19 bp, Homo sapiens
  siRNA target sequence for ABLIM1 (NM_002313.4,905-923).
gtgctccgtactgtgaaaa

SEQ ID NO: 115030 - DNA, 19 bp, Homo sapiens
  siRNA target sequence for ABLIM1 (NM_002313.4,934-952).
ggactctttggggtgaaat

SEQ ID NO: 115031 - DNA, 19 bp, Homo sapiens
  siRNA target sequence for ABLIM1 (NM_002313.4,955-973).
gaggcgtgtcaccagttta

SEQ ID NO: 115032 - DNA, 19 bp, Homo sapiens
  siRNA target sequence for ABLIM1 (NM_002313.4,958-976).
gcgtgtcaccagtttatca

SEQ ID NO: 115033 - DNA, 19 bp, Homo sapiens
  siRNA target sequence for ABLIM1 (NM_002313.4,1061-1079).
gagaggaaatgtatcttca

SEQ ID NO: 115034 - DNA, 19 bp, Homo sapiens
  siRNA target sequence for ABLIM1 (NM_002313.4,1095-1113).
gcatcccgactgtaagcaa

SEQ ID NO: 115035 - DNA, 19 bp, Homo sapiens
  siRNA target sequence for ABLIM1 (NM_002313.4,1096-1114).
catcccgactgtaagcaat

SEQ ID NO: 115036 - DNA, 19 bp, Homo sapiens
  siRNA target sequence for ABLIM1 (NM_002313.4,1099-1117).
cccgactgtaagcaatcta

SEQ ID NO: 115037 - DNA, 19 bp, Homo sapiens
  siRNA target sequence for ABLIM1 (NM_002313.4,1115-1133).
ctacgaagaccgaggaaaa

SEQ ID NO: 115038 - DNA, 19 bp, Homo sapiens
  siRNA target sequence for ABLIM1 (NM_002313.4,1118-1136).
cgaagaccgaggaaaagct

SEQ ID NO: 115039 - DNA, 19 bp, Homo sapiens
  siRNA target sequence for ABLIM1 (NM_002313.4,1151-1169).
catcctcggaaagtattta

SEQ ID NO: 115040 - DNA, 19 bp, Homo sapiens
  siRNA target sequence for ABLIM1 (NM_002313.4,1195-1213).
ggctcaccaggtcatacta

SEQ ID NO: 115041 - DNA, 19 bp, Homo sapiens
  siRNA target sequence for ABLIM1 (NM_002313.4,1196-1214).
gctcaccaggtcatactat

SEQ ID NO: 115042 - DNA, 19 bp, Homo sapiens
  siRNA target sequence for ABLIM1 (NM_002313.4,1204-1222).
ggtcatactatctatgcaa

SEQ ID NO: 115043 - DNA, 19 bp, Homo sapiens
  siRNA target sequence for ABLIM1 (NM_002313.4,1205-1223).
gtcatactatctatgcaaa

SEQ ID NO: 115044 - DNA, 19 bp, Homo sapiens
  siRNA target sequence for ABLIM1 (NM_002313.4,1215-1233).
ctatgcaaaagtagacaat

SEQ ID NO: 115045 - DNA, 19 bp, Homo sapiens
  siRNA target sequence for ABLIM1 (NM_002313.4,1239-1257).
cctggattacaaggattta

SEQ ID NO: 115046 - DNA, 19 bp, Homo sapiens
  siRNA target sequence for ABLIM1 (NM_002313.4,1242-1260).
ggattacaaggatttagca

SEQ ID NO: 115047 - DNA, 19 bp, Homo sapiens
  siRNA target sequence for ABLIM1 (NM_002313.4,1267-1285).
ccgaaggtcaaggcaattt

SEQ ID NO: 115048 - DNA, 19 bp, Homo sapiens
  siRNA target sequence for ABLIM1 (NM_002313.4,1268-1286).
cgaaggtcaaggcaattta

SEQ ID NO: 115049 - DNA, 19 bp, Homo sapiens
  siRNA target sequence for ABLIM1 (NM_002313.4,1269-1287).
gaaggtcaaggcaatttat

SEQ ID NO: 115050 - DNA, 19 bp, Homo sapiens
  siRNA target sequence for ABLIM1 (NM_002313.4,1278-1296).
ggcaatttatgacattgaa

SEQ ID NO: 115051 - DNA, 19 bp, Homo sapiens
  siRNA target sequence for ABLIM1 (NM_002313.4,1290-1308).
cattgaacgtccagatctt

SEQ ID NO: 115052 - DNA, 19 bp, Homo sapiens
  siRNA target sequence for ABLIM1 (NM_002313.4,1294-1312).
gaacgtccagatcttatta

SEQ ID NO: 115053 - DNA, 19 bp, Homo sapiens
  siRNA target sequence for ABLIM1 (NM_002313.4,1297-1315).
cgtccagatcttattacct

SEQ ID NO: 115054 - DNA, 19 bp, Homo sapiens
  siRNA target sequence for ABLIM1 (NM_002313.4,1326-1344).
ctacacttcgggctatgat

SEQ ID NO: 115055 - DNA, 19 bp, Homo sapiens
  siRNA target sequence for ABLIM1 (NM_002313.4,1331-1349).
cttcgggctatgatgacaa

SEQ ID NO: 115056 - DNA, 19 bp, Homo sapiens
  siRNA target sequence for ABLIM1 (NM_002313.4,1614-1632).
cgctcaggcccctaaacat

SEQ ID NO: 115057 - DNA, 19 bp, Homo sapiens
  siRNA target sequence for ABLIM1 (NM_002313.4,1615-1633).
gctcaggcccctaaacatt

SEQ ID NO: 115058 - DNA, 19 bp, Homo sapiens
  siRNA target sequence for ABLIM1 (NM_002313.4,1616-1634).
ctcaggcccctaaacattt

SEQ ID NO: 115059 - DNA, 19 bp, Homo sapiens
  siRNA target sequence for ABLIM1 (NM_002313.4,1620-1638).
ggcccctaaacatttccat

SEQ ID NO: 115060 - DNA, 19 bp, Homo sapiens
  siRNA target sequence for ABLIM1 (NM_002313.4,1645-1663).
gatcaaggaatcaacattt

SEQ ID NO: 115061 - DNA, 19 bp, Homo sapiens
  siRNA target sequence for ABLIM1 (NM_002313.4,1666-1684).
cgaaagccacccatctaca

SEQ ID NO: 115062 - DNA, 19 bp, Homo sapiens
  siRNA target sequence for ABLIM1 (NM_002313.4,1667-1685).
gaaagccacccatctacaa

SEQ ID NO: 115063 - DNA, 19 bp, Homo sapiens
  siRNA target sequence for ABLIM1 (NM_002313.4,1842-1860).
catgaaacgcagatctagt

SEQ ID NO: 115064 - DNA, 19 bp, Homo sapiens
  siRNA target sequence for ABLIM1 (NM_002313.4,1892-1910).
gacgtcggcagcttcaaga

SEQ ID NO: 115065 - DNA, 19 bp, Homo sapiens
  siRNA target sequence for ABLIM1 (NM_002313.4,1912-1930).
gagcaattaatgaagctta

SEQ ID NO: 115066 - DNA, 19 bp, Homo sapiens
  siRNA target sequence for ABLIM1 (NM_002313.4,2022-2040).
catcaactcagcttcacat

SEQ ID NO: 115067 - DNA, 19 bp, Homo sapiens
  siRNA target sequence for ABLIM1 (NM_002313.4,2028-2046).
ctcagcttcacatattcca

SEQ ID NO: 115068 - DNA, 19 bp, Homo sapiens
  siRNA target sequence for ABLIM1 (NM_002313.4,2038-2056).
catattccatcatctaaaa

SEQ ID NO: 115069 - DNA, 19 bp, Homo sapiens
  siRNA target sequence for ABLIM1 (NM_002313.4,2108-2126).
ccgacttcgctcagtataa

SEQ ID NO: 115070 - DNA, 19 bp, Homo sapiens
  siRNA target sequence for ABLIM1 (NM_002313.4,2110-2128).
gacttcgctcagtataaca

SEQ ID NO: 115071 - DNA, 19 bp, Homo sapiens
  siRNA target sequence for ABLIM1 (NM_002313.4,2212-2230).
gtgtctatgcccaacatgt

SEQ ID NO: 115072 - DNA, 19 bp, Homo sapiens
  siRNA target sequence for ABLIM1 (NM_002313.4,2338-2356).
gaagtgtttcgggaaatct

SEQ ID NO: 115073 - DNA, 19 bp, Homo sapiens
  siRNA target sequence for ABLIM1 (NM_002313.4,2399-2417).
gacgcaacgacatgaagaa

SEQ ID NO: 115074 - DNA, 19 bp, Homo sapiens
  siRNA target sequence for ABLIM1 (NM_002313.4,2401-2419).
cgcaacgacatgaagaaaa

SEQ ID NO: 115075 - DNA, 19 bp, Homo sapiens
  siRNA target sequence for ABLIM2 (NM_032432.2,315-333).
cggcagggcgagtacatct

SEQ ID NO: 115076 - DNA, 19 bp, Homo sapiens
  siRNA target sequence for ABLIM2 (NM_032432.2,374-392).
cagctgcgaccagttcatt

SEQ ID NO: 115077 - DNA, 19 bp, Homo sapiens
  siRNA target sequence for ABLIM2 (NM_032432.2,376-394).
gctgcgaccagttcattga

SEQ ID NO: 115078 - DNA, 19 bp, Homo sapiens
  siRNA target sequence for ABLIM2 (NM_032432.2,563-581).
ccagggcctccgaagttgt

SEQ ID NO: 115079 - DNA, 19 bp, Homo sapiens
  siRNA target sequence for ABLIM2 (NM_032432.2,589-607).
gcggcacagaaatcaagaa

SEQ ID NO: 115080 - DNA, 19 bp, Homo sapiens
  siRNA target sequence for ABLIM2 (NM_032432.2,590-608).
cggcacagaaatcaagaat

SEQ ID NO: 115081 - DNA, 19 bp, Homo sapiens
  siRNA target sequence for ABLIM2 (NM_032432.2,757-775).
gtgacagctgtgagaaata

SEQ ID NO: 115082 - DNA, 19 bp, Homo sapiens
  siRNA target sequence for ABLIM2 (NM_032432.2,820-838).
cttcctgcgcgctatgtgt

SEQ ID NO: 115083 - DNA, 19 bp, Homo sapiens
  siRNA target sequence for ABLIM2 (NM_032432.2,839-857).
caggtgcggccagatgttt

SEQ ID NO: 115084 - DNA, 19 bp, Homo sapiens
  siRNA target sequence for ABLIM2 (NM_032432.2,859-877).
cagaaggcgaagagatgta

SEQ ID NO: 115085 - DNA, 19 bp, Homo sapiens
  siRNA target sequence for ABLIM2 (NM_032432.2,1001-1019).
gtctccgagccgtgtgatt

SEQ ID NO: 115086 - DNA, 19 bp, Homo sapiens
  siRNA target sequence for ABLIM2 (NM_032432.2,1003-1021).
ctccgagccgtgtgattta

SEQ ID NO: 115087 - DNA, 19 bp, Homo sapiens
  siRNA target sequence for ABLIM2 (NM_032432.2,1062-1080).
gcagcccttcctaaaagta

SEQ ID NO: 115088 - DNA, 19 bp, Homo sapiens
  siRNA target sequence for ABLIM2 (NM_032432.2,1507-1525).
gctttcactcacagatcta

SEQ ID NO: 115089 - DNA, 19 bp, Homo sapiens
  siRNA target sequence for ABLIM2 (NM_032432.2,1508-1526).
ctttcactcacagatctat

SEQ ID NO: 115090 - DNA, 19 bp, Homo sapiens
  siRNA target sequence for ACTN1 (NM_001102.2,200-218).
ctcagcaaaccaacgatta

SEQ ID NO: 115091 - DNA, 19 bp, Homo sapiens
  siRNA target sequence for ACTN1 (NM_001102.2,202-220).
cagcaaaccaacgattaca

SEQ ID NO: 115092 - DNA, 19 bp, Homo sapiens
  siRNA target sequence for ACTN1 (NM_001102.2,421-439).
ccagagcgaggcaagatga

SEQ ID NO: 115093 - DNA, 19 bp, Homo sapiens
  siRNA target sequence for ACTN1 (NM_001102.2,656-674).
cagccccttacaaaaatgt

SEQ ID NO: 115094 - DNA, 19 bp, Homo sapiens
  siRNA target sequence for ACTN1 (NM_001102.2,658-676).
gccccttacaaaaatgtca

SEQ ID NO: 115095 - DNA, 19 bp, Homo sapiens
  siRNA target sequence for ACTN1 (NM_001102.2,659-677).
ccccttacaaaaatgtcaa

SEQ ID NO: 115096 - DNA, 19 bp, Homo sapiens
  siRNA target sequence for ACTN1 (NM_001102.2,777-795).
ggatgatccactcacaaat

SEQ ID NO: 115097 - DNA, 19 bp, Homo sapiens
  siRNA target sequence for ACTN1 (NM_001102.2,784-802).
ccactcacaaatctgaata

SEQ ID NO: 115098 - DNA, 19 bp, Homo sapiens
  siRNA target sequence for ACTN1 (NM_001102.2,872-890).
ctgcccgaccggatgagaa

SEQ ID NO: 115099 - DNA, 19 bp, Homo sapiens
  siRNA target sequence for ACTN1 (NM_001102.2,1457-1475).
ccaccctctcggagatcaa

SEQ ID NO: 115100 - DNA, 19 bp, Homo sapiens
  siRNA target sequence for ACTN1 (NM_001102.2,1566-1584).
caatgagctggactattat

SEQ ID NO: 115101 - DNA, 19 bp, Homo sapiens
  siRNA target sequence for ACTN1 (NM_001102.2,1603-1621).
gcccgttgccaaaagatct

SEQ ID NO: 115102 - DNA, 19 bp, Homo sapiens
  siRNA target sequence for ACTN1 (NM_001102.2,1622-1640).
gtgaccagtgggacaatct

SEQ ID NO: 115103 - DNA, 19 bp, Homo sapiens
  siRNA target sequence for ACTN1 (NM_001102.2,1921-1939).
cagacctaccacgtcaata

SEQ ID NO: 115104 - DNA, 19 bp, Homo sapiens
  siRNA target sequence for ACTN1 (NM_001102.2,2090-2108).
gagcccaggccaatgtcat

SEQ ID NO: 115105 - DNA, 19 bp, Homo sapiens
  siRNA target sequence for ACTN1 (NM_001102.2,2508-2526).
catcagcttgggttatgat

SEQ ID NO: 115106 - DNA, 19 bp, Homo sapiens
  siRNA target sequence for ACTN1 (NM_001102.2,2511-2529).
cagcttgggttatgatatt

SEQ ID NO: 115107 - DNA, 19 bp, Homo sapiens
  siRNA target sequence for ACTN1 (NM_001102.2,2640-2658).
gacagccgacacagataca

SEQ ID NO: 115108 - DNA, 19 bp, Homo sapiens
  siRNA target sequence for ACTN2 (NM_001103.1,449-467).
gcggttccacaaaattgct

SEQ ID NO: 115109 - DNA, 19 bp, Homo sapiens
  siRNA target sequence for ACTN2 (NM_001103.1,450-468).
cggttccacaaaattgcta

SEQ ID NO: 115110 - DNA, 19 bp, Homo sapiens
  siRNA target sequence for ACTN2 (NM_001103.1,451-469).
ggttccacaaaattgctaa

SEQ ID NO: 115111 - DNA, 19 bp, Homo sapiens
  siRNA target sequence for ACTN2 (NM_001103.1,465-483).
gctaatgtcaacaaagctt

SEQ ID NO: 115112 - DNA, 19 bp, Homo sapiens
  siRNA target sequence for ACTN2 (NM_001103.1,476-494).
caaagctttggattacata

SEQ ID NO: 115113 - DNA, 19 bp, Homo sapiens
  siRNA target sequence for ACTN2 (NM_001103.1,593-611).
ctttgctattcaggatatt

SEQ ID NO: 115114 - DNA, 19 bp, Homo sapiens
  siRNA target sequence for ACTN2 (NM_001103.1,659-677).
gaggaaaactgctccttat

SEQ ID NO: 115115 - DNA, 19 bp, Homo sapiens
  siRNA target sequence for ACTN2 (NM_001103.1,669-687).
gctccttatagaaatgtga

SEQ ID NO: 115116 - DNA, 19 bp, Homo sapiens
  siRNA target sequence for ACTN2 (NM_001103.1,701-719).
ccatactagctggaaagat

SEQ ID NO: 115117 - DNA, 19 bp, Homo sapiens
  siRNA target sequence for ACTN2 (NM_001103.1,768-786).
gactactcaaagcttaaca

SEQ ID NO: 115118 - DNA, 19 bp, Homo sapiens
  siRNA target sequence for ACTN2 (NM_001103.1,792-810).
gaccccataggaaatatta

SEQ ID NO: 115119 - DNA, 19 bp, Homo sapiens
  siRNA target sequence for ACTN2 (NM_001103.1,829-847).
ctgagaagcacctggatat

SEQ ID NO: 115120 - DNA, 19 bp, Homo sapiens
  siRNA target sequence for ACTN2 (NM_001103.1,836-854).
gcacctggatattcctaaa

SEQ ID NO: 115121 - DNA, 19 bp, Homo sapiens
  siRNA target sequence for ACTN2 (NM_001103.1,837-855).
cacctggatattcctaaaa

SEQ ID NO: 115122 - DNA, 19 bp, Homo sapiens
  siRNA target sequence for ACTN2 (NM_001103.1,884-902).
ccctaaacccgatgaaaga

SEQ ID NO: 115123 - DNA, 19 bp, Homo sapiens
  siRNA target sequence for ACTN2 (NM_001103.1,966-984).
gcggctaacaggatatgta

SEQ ID NO: 115124 - DNA, 19 bp, Homo sapiens
  siRNA target sequence for ACTN2 (NM_001103.1,967-985).
cggctaacaggatatgtaa

SEQ ID NO: 115125 - DNA, 19 bp, Homo sapiens
  siRNA target sequence for ACTN2 (NM_001103.1,1036-1054).
ggctagcgagtgagctttt

SEQ ID NO: 115126 - DNA, 19 bp, Homo sapiens
  siRNA target sequence for ACTN2 (NM_001103.1,1268-1286).
caagatggtgtcggatatt

SEQ ID NO: 115127 - DNA, 19 bp, Homo sapiens
  siRNA target sequence for ACTN2 (NM_001103.1,1271-1289).
gatggtgtcggatattgct

SEQ ID NO: 115128 - DNA, 19 bp, Homo sapiens
  siRNA target sequence for ACTN2 (NM_001103.1,1593-1611).
cacgacgctgtgaatgtca

SEQ ID NO: 115129 - DNA, 19 bp, Homo sapiens
  siRNA target sequence for ACTN2 (NM_001103.1,1595-1613).
cgacgctgtgaatgtcaat

SEQ ID NO: 115130 - DNA, 19 bp, Homo sapiens
  siRNA target sequence for ACTN2 (NM_001103.1,1598-1616).
cgctgtgaatgtcaatgat

SEQ ID NO: 115131 - DNA, 19 bp, Homo sapiens
  siRNA target sequence for ACTN2 (NM_001103.1,1648-1666).
gactgggaacgcttactca

SEQ ID NO: 115132 - DNA, 19 bp, Homo sapiens
  siRNA target sequence for ACTN2 (NM_001103.1,1749-1767).
gctcctttcaacaattgga

SEQ ID NO: 115133 - DNA, 19 bp, Homo sapiens
  siRNA target sequence for ACTN2 (NM_001103.1,1750-1768).
ctcctttcaacaattggat

SEQ ID NO: 115134 - DNA, 19 bp, Homo sapiens
  siRNA target sequence for ACTN2 (NM_001103.1,1782-1800).
gaggatctgcaagatatgt

SEQ ID NO: 115135 - DNA, 19 bp, Homo sapiens
  siRNA target sequence for ACTN2 (NM_001103.1,2025-2043).
gtgcccatccgcgatcaat

SEQ ID NO: 115136 - DNA, 19 bp, Homo sapiens
  siRNA target sequence for ACTN2 (NM_001103.1,2219-2237).
gcacaacatcatcaactat

SEQ ID NO: 115137 - DNA, 19 bp, Homo sapiens
  siRNA target sequence for ACTN2 (NM_001103.1,2220-2238).
cacaacatcatcaactata

SEQ ID NO: 115138 - DNA, 19 bp, Homo sapiens
  siRNA target sequence for ACTN2 (NM_001103.1,2283-2301).
gaggcccttgtctttgaca

SEQ ID NO: 115139 - DNA, 19 bp, Homo sapiens
  siRNA target sequence for ACTN2 (NM_001103.1,2537-2555).
cctgggtgaagccgaattt

SEQ ID NO: 115140 - DNA, 19 bp, Homo sapiens
  siRNA target sequence for ACTN2 (NM_001103.1,2592-2610).
ggcaccgtcaccttccaat

SEQ ID NO: 115141 - DNA, 19 bp, Homo sapiens
  siRNA target sequence for ACTN2 (NM_001103.1,2678-2696).
ccggatcctggcttctgat

SEQ ID NO: 115142 - DNA, 19 bp, Homo sapiens
  siRNA target sequence for ACTN2 (NM_001103.1,2679-2697).
cggatcctggcttctgata

SEQ ID NO: 115143 - DNA, 19 bp, Homo sapiens
  siRNA target sequence for ACTN2 (NM_001103.1,2811-2829).
gattacgctgcgttctctt

SEQ ID NO: 115144 - DNA, 19 bp, Homo sapiens
  siRNA target sequence for ACTN3 (NM_001104.1,238-256).
cgcaatggcctcaaactca

SEQ ID NO: 115145 - DNA, 19 bp, Homo sapiens
  siRNA target sequence for ACTN3 (NM_001104.1,288-306).
gctgcctaggccagataaa

SEQ ID NO: 115146 - DNA, 19 bp, Homo sapiens
  siRNA target sequence for ACTN3 (NM_001104.1,322-340).
cacaaaatcgccaacgtta

SEQ ID NO: 115147 - DNA, 19 bp, Homo sapiens
  siRNA target sequence for ACTN3 (NM_001104.1,639-657).
cgccaaactgcgaaaggat

SEQ ID NO: 115148 - DNA, 19 bp, Homo sapiens
  siRNA target sequence for ACTN3 (NM_001104.1,1323-1341).
ctacgattcggctttgcta

SEQ ID NO: 115149 - DNA, 19 bp, Homo sapiens
  siRNA target sequence for ACTN3 (NM_001104.1,1777-1795).
ggtgagatccagaagatct

SEQ ID NO: 115150 - DNA, 19 bp, Homo sapiens
  siRNA target sequence for ACTN3 (NM_001104.1,2097-2115).
caactacaagactaacatt

SEQ ID NO: 115151 - DNA, 19 bp, Homo sapiens
  siRNA target sequence for ACTN3 (NM_001104.1,2153-2171).
gcctggtgttcgacaataa

SEQ ID NO: 115152 - DNA, 19 bp, Homo sapiens
  siRNA target sequence for ACTN3 (NM_001104.1,2517-2535).
cacgactgagcaagttgta

SEQ ID NO: 115153 - DNA, 19 bp, Homo sapiens
  siRNA target sequence for ACTN3 (NM_001104.1,2533-2551).
gtagcttccttcaagatct

SEQ ID NO: 115154 - DNA, 19 bp, Homo sapiens
  siRNA target sequence for ADD1 (NM_001119.3,257-275).
gtacttcgaccgagtagat

SEQ ID NO: 115155 - DNA, 19 bp, Homo sapiens
  siRNA target sequence for ADD1 (NM_001119.3,321-339).
cttcgccaggacttcaaca

SEQ ID NO: 115156 - DNA, 19 bp, Homo sapiens
  siRNA target sequence for ADD1 (NM_001119.3,353-371).
gaagagggtgtccatgatt

SEQ ID NO: 115157 - DNA, 19 bp, Homo sapiens
  siRNA target sequence for ADD1 (NM_001119.3,406-424).
caatgatacaggagcaatt

SEQ ID NO: 115158 - DNA, 19 bp, Homo sapiens
  siRNA target sequence for ADD1 (NM_001119.3,445-463).
caggcctattggcattaca

SEQ ID NO: 115159 - DNA, 19 bp, Homo sapiens
  siRNA target sequence for ADD1 (NM_001119.3,572-590).
cgatcttagaggatctgat

SEQ ID NO: 115160 - DNA, 19 bp, Homo sapiens
  siRNA target sequence for ADD1 (NM_001119.3,573-591).
gatcttagaggatctgatt

SEQ ID NO: 115161 - DNA, 19 bp, Homo sapiens
  siRNA target sequence for ADD1 (NM_001119.3,588-606).
gattctattgcgtatgaca

SEQ ID NO: 115162 - DNA, 19 bp, Homo sapiens
  siRNA target sequence for ADD1 (NM_001119.3,628-646).
gtaaattggcagcgtttta

SEQ ID NO: 115163 - DNA, 19 bp, Homo sapiens
  siRNA target sequence for ADD1 (NM_001119.3,666-684).
gggtggtctcagcttatct

SEQ ID NO: 115164 - DNA, 19 bp, Homo sapiens
  siRNA target sequence for ADD1 (NM_001119.3,673-691).
ctcagcttatctacaatca

SEQ ID NO: 115165 - DNA, 19 bp, Homo sapiens
  siRNA target sequence for ADD1 (NM_001119.3,675-693).
cagcttatctacaatcata

SEQ ID NO: 115166 - DNA, 19 bp, Homo sapiens
  siRNA target sequence for ADD1 (NM_001119.3,768-786).
gcatccagtttggttaaga

SEQ ID NO: 115167 - DNA, 19 bp, Homo sapiens
  siRNA target sequence for ADD1 (NM_001119.3,769-787).
catccagtttggttaagat

SEQ ID NO: 115168 - DNA, 19 bp, Homo sapiens
  siRNA target sequence for ADD1 (NM_001119.3,772-790).
ccagtttggttaagatcaa

SEQ ID NO: 115169 - DNA, 19 bp, Homo sapiens
  siRNA target sequence for ADD1 (NM_001119.3,775-793).
gtttggttaagatcaatct

SEQ ID NO: 115170 - DNA, 19 bp, Homo sapiens
  siRNA target sequence for ADD1 (NM_001119.3,779-797).
ggttaagatcaatctacaa

SEQ ID NO: 115171 - DNA, 19 bp, Homo sapiens
  siRNA target sequence for ADD1 (NM_001119.3,788-806).
caatctacaaggagatata

SEQ ID NO: 115172 - DNA, 19 bp, Homo sapiens
  siRNA target sequence for ADD1 (NM_001119.3,821-839).
cactaatctgggagtgaat

SEQ ID NO: 115173 - DNA, 19 bp, Homo sapiens
  siRNA target sequence for ADD1 (NM_001119.3,823-841).
ctaatctgggagtgaatca

SEQ ID NO: 115174 - DNA, 19 bp, Homo sapiens
  siRNA target sequence for ADD1 (NM_001119.3,851-869).
caccttacactctgcaatt

SEQ ID NO: 115175 - DNA, 19 bp, Homo sapiens
  siRNA target sequence for ADD1 (NM_001119.3,854-872).
cttacactctgcaatttat

SEQ ID NO: 115176 - DNA, 19 bp, Homo sapiens
  siRNA target sequence for ADD1 (NM_001119.3,925-943).
ctgcggtctctgcaatgaa

SEQ ID NO: 115177 - DNA, 19 bp, Homo sapiens
  siRNA target sequence for ADD1 (NM_001119.3,985-1003).
gagaagtggcttatcatga

SEQ ID NO: 115178 - DNA, 19 bp, Homo sapiens
  siRNA target sequence for ADD1 (NM_001119.3,1012-1030).
gcattctggttgatgaaga

SEQ ID NO: 115179 - DNA, 19 bp, Homo sapiens
  siRNA target sequence for ADD1 (NM_001119.3,1119-1137).
gttgaggaggccttctatt

SEQ ID NO: 115180 - DNA, 19 bp, Homo sapiens
  siRNA target sequence for ADD1 (NM_001119.3,1128-1146).
gccttctattacatccata

SEQ ID NO: 115181 - DNA, 19 bp, Homo sapiens
  siRNA target sequence for ADD1 (NM_001119.3,1133-1151).
ctattacatccataacctt

SEQ ID NO: 115182 - DNA, 19 bp, Homo sapiens
  siRNA target sequence for ADD1 (NM_001119.3,1328-1346).
catgcggatgctcgataat

SEQ ID NO: 115183 - DNA, 19 bp, Homo sapiens
  siRNA target sequence for ADD1 (NM_001119.3,1360-1378).
ctggctacccttatcgata

SEQ ID NO: 115184 - DNA, 19 bp, Homo sapiens
  siRNA target sequence for ADD1 (NM_001119.3,1386-1404).
ctgagagagaagtctaaaa

SEQ ID NO: 115185 - DNA, 19 bp, Homo sapiens
  siRNA target sequence for ADD1 (NM_001119.3,1582-1600).
gtcccaagtcgaagactaa

SEQ ID NO: 115186 - DNA, 19 bp, Homo sapiens
  siRNA target sequence for ADD1 (NM_001119.3,1592-1610).
gaagactaagtggactaaa

SEQ ID NO: 115187 - DNA, 19 bp, Homo sapiens
  siRNA target sequence for ADD1 (NM_001119.3,1645-1663).
ctaacctgtttgttccatt

SEQ ID NO: 115188 - DNA, 19 bp, Homo sapiens
  siRNA target sequence for ADD1 (NM_001119.3,2143-2161).
cactcggcttcccaatgtt

SEQ ID NO: 115189 - DNA, 19 bp, Homo sapiens
  siRNA target sequence for ADD1 (NM_001119.3,2148-2166).
ggcttcccaatgttagaga

SEQ ID NO: 115190 - DNA, 19 bp, Homo sapiens
  siRNA target sequence for ADD1 (NM_001119.3,2149-2167).
gcttcccaatgttagagaa

SEQ ID NO: 115191 - DNA, 19 bp, Homo sapiens
  siRNA target sequence for ADD1 (NM_001119.3,2322-2340).
ggcaagtccccgtccaaaa

SEQ ID NO: 115192 - DNA, 19 bp, Homo sapiens
  siRNA target sequence for ADD1 (NM_001119.3,2355-2373).
cgtaccccgtcctttctga

SEQ ID NO: 115193 - DNA, 19 bp, Homo sapiens
  siRNA target sequence for ADD1 (NM_001119.3,2356-2374).
gtaccccgtcctttctgaa

SEQ ID NO: 115194 - DNA, 19 bp, Homo sapiens
  siRNA target sequence for ADD1 (NM_014189.2,1668-1686).
gtgccaagctgtattacca

SEQ ID NO: 115195 - DNA, 19 bp, Homo sapiens
  siRNA target sequence for ADD2 (NM_001617.1,509-527).
cgcaggggcagccttactt

SEQ ID NO: 115196 - DNA, 19 bp, Homo sapiens
  siRNA target sequence for ADD2 (NM_001617.1,510-528).
gcaggggcagccttacttt

SEQ ID NO: 115197 - DNA, 19 bp, Homo sapiens
  siRNA target sequence for ADD2 (NM_001617.1,771-789).
cccgacatcttccatgaat

SEQ ID NO: 115198 - DNA, 19 bp, Homo sapiens
  siRNA target sequence for ADD2 (NM_001617.1,794-812).
ccatgatgacgcctatcaa

SEQ ID NO: 115199 - DNA, 19 bp, Homo sapiens
  siRNA target sequence for ADD2 (NM_001617.1,795-813).
catgatgacgcctatcaat

SEQ ID NO: 115200 - DNA, 19 bp, Homo sapiens
  siRNA target sequence for ADD2 (NM_001617.1,919-937).
ctgagtgacacctatgtca

SEQ ID NO: 115201 - DNA, 19 bp, Homo sapiens
  siRNA target sequence for ADD2 (NM_001617.1,1168-1186).
gcggtgtcggccatgaagt

SEQ ID NO: 115202 - DNA, 19 bp, Homo sapiens
  siRNA target sequence for ADD2 (NM_001617.1,1224-1242).
gggggacatggcctattat

SEQ ID NO: 115203 - DNA, 19 bp, Homo sapiens
  siRNA target sequence for ADD2 (NM_001617.1,1226-1244).
gggacatggcctattatga

SEQ ID NO: 115204 - DNA, 19 bp, Homo sapiens
  siRNA target sequence for ADD2 (NM_001617.1,1228-1246).
gacatggcctattatgact

SEQ ID NO: 115205 - DNA, 19 bp, Homo sapiens
  siRNA target sequence for ADD2 (NM_001617.1,1358-1376).
cggtagaggaggcatttta

SEQ ID NO: 115206 - DNA, 19 bp, Homo sapiens
  siRNA target sequence for ADD2 (NM_001617.1,1363-1381).
gaggaggcattttacaaga

SEQ ID NO: 115207 - DNA, 19 bp, Homo sapiens
  siRNA target sequence for ADD2 (NM_001617.1,1611-1629).
gtatcgccacccctttgtt

SEQ ID NO: 115208 - DNA, 19 bp, Homo sapiens
  siRNA target sequence for ADD2 (NM_001617.1,1915-1933).
caatttgtgcctctctata

SEQ ID NO: 115209 - DNA, 19 bp, Homo sapiens
  siRNA target sequence for ADD2 (NM_001617.1,2315-2333).
ctccttccaagtctttaga

SEQ ID NO: 115210 - DNA, 19 bp, Homo sapiens
  siRNA target sequence for ADD2 (NM_001617.1,2480-2498).
gtgctgacacggatgttga

SEQ ID NO: 115211 - DNA, 19 bp, Homo sapiens
  siRNA target sequence for ADD2 (NM_001617.1,2482-2500).
gctgacacggatgttgata

SEQ ID NO: 115212 - DNA, 19 bp, Homo sapiens
  siRNA target sequence for ADD2 (NM_017485.1,646-664).
cccatcctggtgctaagaa

SEQ ID NO: 115213 - DNA, 19 bp, Homo sapiens
  siRNA target sequence for ADD2 (NM_017488.1,2271-2289).
ccacatctggagtaacata

SEQ ID NO: 115214 - DNA, 19 bp, Homo sapiens
  siRNA target sequence for ANLN (NM_018685.2,240-258).
ccgtgccaggcgagagaat

SEQ ID NO: 115215 - DNA, 19 bp, Homo sapiens
  siRNA target sequence for ANLN (NM_018685.2,242-260).
gtgccaggcgagagaatct

SEQ ID NO: 115216 - DNA, 19 bp, Homo sapiens
  siRNA target sequence for ANLN (NM_018685.2,245-263).
ccaggcgagagaatcttca

SEQ ID NO: 115217 - DNA, 19 bp, Homo sapiens
  siRNA target sequence for ANLN (NM_018685.2,289-307).
gcagctccaaggtctatga

SEQ ID NO: 115218 - DNA, 19 bp, Homo sapiens
  siRNA target sequence for ANLN (NM_018685.2,378-396).
gaaatcttgtacaaaacca

SEQ ID NO: 115219 - DNA, 19 bp, Homo sapiens
  siRNA target sequence for ANLN (NM_018685.2,428-446).
ctgaagtagaagtttctaa

SEQ ID NO: 115220 - DNA, 19 bp, Homo sapiens
  siRNA target sequence for ANLN (NM_018685.2,469-487).
gagtcgacatctgcaaaat

SEQ ID NO: 115221 - DNA, 19 bp, Homo sapiens
  siRNA target sequence for ANLN (NM_018685.2,616-634).
gcagcctcctcagttaaaa

SEQ ID NO: 115222 - DNA, 19 bp, Homo sapiens
  siRNA target sequence for ANLN (NM_018685.2,628-646).
gttaaaacacgtatgcaaa

SEQ ID NO: 115223 - DNA, 19 bp, Homo sapiens
  siRNA target sequence for ANLN (NM_018685.2,665-683).
gccgttgggataatgatga

SEQ ID NO: 115224 - DNA, 19 bp, Homo sapiens
  siRNA target sequence for ANLN (NM_018685.2,667-685).
cgttgggataatgatgata

SEQ ID NO: 115225 - DNA, 19 bp, Homo sapiens
  siRNA target sequence for ANLN (NM_018685.2,722-740).
caatgccatcagaggaaaa

SEQ ID NO: 115226 - DNA, 19 bp, Homo sapiens
  siRNA target sequence for ANLN (NM_018685.2,754-772).
cccagacctctgctttcaa

SEQ ID NO: 115227 - DNA, 19 bp, Homo sapiens
  siRNA target sequence for ANLN (NM_018685.2,891-909).
gcctggtaccgcttgttta

SEQ ID NO: 115228 - DNA, 19 bp, Homo sapiens
  siRNA target sequence for ANLN (NM_018685.2,892-910).
cctggtaccgcttgtttat

SEQ ID NO: 115229 - DNA, 19 bp, Homo sapiens
  siRNA target sequence for ANLN (NM_018685.2,895-913).
ggtaccgcttgtttatcca

SEQ ID NO: 115230 - DNA, 19 bp, Homo sapiens
  siRNA target sequence for ANLN (NM_018685.2,896-914).
gtaccgcttgtttatccaa

SEQ ID NO: 115231 - DNA, 19 bp, Homo sapiens
  siRNA target sequence for ANLN (NM_018685.2,899-917).
ccgcttgtttatccaaatt

SEQ ID NO: 115232 - DNA, 19 bp, Homo sapiens
  siRNA target sequence for ANLN (NM_018685.2,900-918).
cgcttgtttatccaaattt

SEQ ID NO: 115233 - DNA, 19 bp, Homo sapiens
  siRNA target sequence for ANLN (NM_018685.2,934-952).
gcatctgctaggatcaata

SEQ ID NO: 115234 - DNA, 19 bp, Homo sapiens
  siRNA target sequence for ANLN (NM_018685.2,966-984).
gcaggaagctacattctgt

SEQ ID NO: 115235 - DNA, 19 bp, Homo sapiens
  siRNA target sequence for ANLN (NM_018685.2,998-1016).
gcgatgcctctttgaataa

SEQ ID NO: 115236 - DNA, 19 bp, Homo sapiens
  siRNA target sequence for ANLN (NM_018685.2,999-1017).
cgatgcctctttgaataaa

SEQ ID NO: 115237 - DNA, 19 bp, Homo sapiens
  siRNA target sequence for ANLN (NM_018685.2,1051-1069).
gttaatgcctcaatttcca

SEQ ID NO: 115238 - DNA, 19 bp, Homo sapiens
  siRNA target sequence for ANLN (NM_018685.2,1090-1108).
ccagtgaaatctactacat

SEQ ID NO: 115239 - DNA, 19 bp, Homo sapiens
  siRNA target sequence for ANLN (NM_018685.2,1179-1197).
gaaaacgggggtatcgaaa

SEQ ID NO: 115240 - DNA, 19 bp, Homo sapiens
  siRNA target sequence for ANLN (NM_018685.2,1184-1202).
cgggggtatcgaaaccaat

SEQ ID NO: 115241 - DNA, 19 bp, Homo sapiens
  siRNA target sequence for ANLN (NM_018685.2,1185-1203).
gggggtatcgaaaccaatt

SEQ ID NO: 115242 - DNA, 19 bp, Homo sapiens
  siRNA target sequence for ANLN (NM_018685.2,1198-1216).
ccaattgtgaagtcaactt

SEQ ID NO: 115243 - DNA, 19 bp, Homo sapiens
  siRNA target sequence for ANLN (NM_018685.2,1236-1254).
caagggagaattaagtaga

SEQ ID NO: 115244 - DNA, 19 bp, Homo sapiens
  siRNA target sequence for ANLN (NM_018685.2,1267-1285).
caatctcaatctaaagaca

SEQ ID NO: 115245 - DNA, 19 bp, Homo sapiens
  siRNA target sequence for ANLN (NM_018685.2,1332-1350).
ctttggagagcgttgtcaa

SEQ ID NO: 115246 - DNA, 19 bp, Homo sapiens
  siRNA target sequence for ANLN (NM_018685.2,1343-1361).
gttgtcaagaacatagcaa

SEQ ID NO: 115247 - DNA, 19 bp, Homo sapiens
  siRNA target sequence for ANLN (NM_018685.2,1386-1404).
ccacagaacccccattatt

SEQ ID NO: 115248 - DNA, 19 bp, Homo sapiens
  siRNA target sequence for ANLN (NM_018685.2,1389-1407).
cagaacccccattattact

SEQ ID NO: 115249 - DNA, 19 bp, Homo sapiens
  siRNA target sequence for ANLN (NM_018685.2,1514-1532).
gtcttcgtggccgatttga

SEQ ID NO: 115250 - DNA, 19 bp, Homo sapiens
  siRNA target sequence for ANLN (NM_018685.2,1516-1534).
cttcgtggccgatttgaca

SEQ ID NO: 115251 - DNA, 19 bp, Homo sapiens
  siRNA target sequence for ANLN (NM_018685.2,1656-1674).
gtcacttccagtaacagaa

SEQ ID NO: 115252 - DNA, 19 bp, Homo sapiens
  siRNA target sequence for ANLN (NM_018685.2,1696-1714).
ccagccaaaaattctagta

SEQ ID NO: 115253 - DNA, 19 bp, Homo sapiens
  siRNA target sequence for ANLN (NM_018685.2,1712-1730).
gtacagaacctaaaggttt

SEQ ID NO: 115254 - DNA, 19 bp, Homo sapiens
  siRNA target sequence for ANLN (NM_018685.2,1720-1738).
cctaaaggtttcactgaat

SEQ ID NO: 115255 - DNA, 19 bp, Homo sapiens
  siRNA target sequence for ANLN (NM_018685.2,1735-1753).
gaatgcgaaatgacgaaat

SEQ ID NO: 115256 - DNA, 19 bp, Homo sapiens
  siRNA target sequence for ANLN (NM_018685.2,1817-1835).
caaaggttgagcagaaaat

SEQ ID NO: 115257 - DNA, 19 bp, Homo sapiens
  siRNA target sequence for ANLN (NM_018685.2,1827-1845).
gcagaaaattgaagtgata

SEQ ID NO: 115258 - DNA, 19 bp, Homo sapiens
  siRNA target sequence for ANLN (NM_018685.2,1881-1899).
caatagttcgaaagtaatt

SEQ ID NO: 115259 - DNA, 19 bp, Homo sapiens
  siRNA target sequence for ANLN (NM_018685.2,1920-1938).
cctagaggaaggtgaacta

SEQ ID NO: 115260 - DNA, 19 bp, Homo sapiens
  siRNA target sequence for ANLN (NM_018685.2,1924-1942).
gaggaaggtgaactagata

SEQ ID NO: 115261 - DNA, 19 bp, Homo sapiens
  siRNA target sequence for ANLN (NM_018685.2,2061-2079).
ggtaagtccagagagttta

SEQ ID NO: 115262 - DNA, 19 bp, Homo sapiens
  siRNA target sequence for ANLN (NM_018685.2,2087-2105).
cacctagactggaattgaa

SEQ ID NO: 115263 - DNA, 19 bp, Homo sapiens
  siRNA target sequence for ANLN (NM_018685.2,2224-2242).
gatgcatatagatctcaaa

SEQ ID NO: 115264 - DNA, 19 bp, Homo sapiens
  siRNA target sequence for ANLN (NM_018685.2,2227-2245).
gcatatagatctcaaagat

SEQ ID NO: 115265 - DNA, 19 bp, Homo sapiens
  siRNA target sequence for ANLN (NM_018685.2,2228-2246).
catatagatctcaaagatt

SEQ ID NO: 115266 - DNA, 19 bp, Homo sapiens
  siRNA target sequence for ANLN (NM_018685.2,2284-2302).
gttcggaaggaagatgtta

SEQ ID NO: 115267 - DNA, 19 bp, Homo sapiens
  siRNA target sequence for ANLN (NM_018685.2,2329-2347).
gcctttccttgtcaagtta

SEQ ID NO: 115268 - DNA, 19 bp, Homo sapiens
  siRNA target sequence for ANLN (NM_018685.2,2391-2409).
gcaacagacagtgatctat

SEQ ID NO: 115269 - DNA, 19 bp, Homo sapiens
  siRNA target sequence for ANLN (NM_018685.2,2413-2431).
gctagccaggctcttaact

SEQ ID NO: 115270 - DNA, 19 bp, Homo sapiens
  siRNA target sequence for ANLN (NM_018685.2,2453-2471).
gaaaagggtccctagaaga

SEQ ID NO: 115271 - DNA, 19 bp, Homo sapiens
  siRNA target sequence for ANLN (NM_018685.2,2479-2497).
gcagaaagacttcttctaa

SEQ ID NO: 115272 - DNA, 19 bp, Homo sapiens
  siRNA target sequence for ANLN (NM_018685.2,2480-2498).
cagaaagacttcttctaat

SEQ ID NO: 115273 - DNA, 19 bp, Homo sapiens
  siRNA target sequence for ANLN (NM_018685.2,2511-2529).
gagaacacttttgattgat

SEQ ID NO: 115274 - DNA, 19 bp, Homo sapiens
  siRNA target sequence for ANLN (NM_018685.2,2574-2592).
ggctagtccccaaagtgaa

SEQ ID NO: 115275 - DNA, 19 bp, Homo sapiens
  siRNA target sequence for ANLN (NM_018685.2,2631-2649).
ccgcttgcctctaaaagca

SEQ ID NO: 115276 - DNA, 19 bp, Homo sapiens
  siRNA target sequence for ANLN (NM_018685.2,2658-2676).
ctgcagtacggttcagaaa

SEQ ID NO: 115277 - DNA, 19 bp, Homo sapiens
  siRNA target sequence for ANLN (NM_018685.2,2678-2696).
cagatgcagcaaattacta

SEQ ID NO: 115278 - DNA, 19 bp, Homo sapiens
  siRNA target sequence for ANLN (NM_018685.2,2700-2718).
cttaattatactaaaagca

SEQ ID NO: 115279 - DNA, 19 bp, Homo sapiens
  siRNA target sequence for ANLN (NM_018685.2,2717-2735).
caggagctgaaaatatggt

SEQ ID NO: 115280 - DNA, 19 bp, Homo sapiens
  siRNA target sequence for ANLN (NM_018685.2,2733-2751).
ggtagccacaccattagca

SEQ ID NO: 115281 - DNA, 19 bp, Homo sapiens
  siRNA target sequence for ANLN (NM_018685.2,2734-2752).
gtagccacaccattagcaa

SEQ ID NO: 115282 - DNA, 19 bp, Homo sapiens
  siRNA target sequence for ANLN (NM_018685.2,2739-2757).
cacaccattagcaagtact

SEQ ID NO: 115283 - DNA, 19 bp, Homo sapiens
  siRNA target sequence for ANLN (NM_018685.2,2743-2761).
ccattagcaagtacttcaa

SEQ ID NO: 115284 - DNA, 19 bp, Homo sapiens
  siRNA target sequence for ANLN (NM_018685.2,2776-2794).
gatgctctgacattcacta

SEQ ID NO: 115285 - DNA, 19 bp, Homo sapiens
  siRNA target sequence for ANLN (NM_018685.2,2782-2800).
ctgacattcactactacat

SEQ ID NO: 115286 - DNA, 19 bp, Homo sapiens
  siRNA target sequence for ANLN (NM_018685.2,2872-2890).
ccctcaggccttgataaga

SEQ ID NO: 115287 - DNA, 19 bp, Homo sapiens
  siRNA target sequence for ANLN (NM_018685.2,2928-2946).
gcgactcctcacatctata

SEQ ID NO: 115288 - DNA, 19 bp, Homo sapiens
  siRNA target sequence for ANLN (NM_018685.2,2929-2947).
cgactcctcacatctataa

SEQ ID NO: 115289 - DNA, 19 bp, Homo sapiens
  siRNA target sequence for ANLN (NM_018685.2,3022-3040).
gcccttgttggatcttaca

SEQ ID NO: 115290 - DNA, 19 bp, Homo sapiens
  siRNA target sequence for ANLN (NM_018685.2,3024-3042).
ccttgttggatcttacaca

SEQ ID NO: 115291 - DNA, 19 bp, Homo sapiens
  siRNA target sequence for ANLN (NM_018685.2,3025-3043).
cttgttggatcttacacat

SEQ ID NO: 115292 - DNA, 19 bp, Homo sapiens
  siRNA target sequence for ANLN (NM_018685.2,3028-3046).
gttggatcttacacattat

SEQ ID NO: 115293 - DNA, 19 bp, Homo sapiens
  siRNA target sequence for ANLN (NM_018685.2,3031-3049).
ggatcttacacattatcat

SEQ ID NO: 115294 - DNA, 19 bp, Homo sapiens
  siRNA target sequence for ANLN (NM_018685.2,3032-3050).
gatcttacacattatcatt

SEQ ID NO: 115295 - DNA, 19 bp, Homo sapiens
  siRNA target sequence for ANLN (NM_018685.2,3062-3080).
gaaatactaagtttgttct

SEQ ID NO: 115296 - DNA, 19 bp, Homo sapiens
  siRNA target sequence for ANLN (NM_018685.2,3282-3300).
gaatcccataggaaggata

SEQ ID NO: 115297 - DNA, 19 bp, Homo sapiens
  siRNA target sequence for ANLN (NM_018685.2,3314-3332).
gtaccagtcgtcagataga

SEQ ID NO: 115298 - DNA, 19 bp, Homo sapiens
  siRNA target sequence for ANLN (NM_018685.2,3331-3349).
gaaccagccaacagagaat

SEQ ID NO: 115299 - DNA, 19 bp, Homo sapiens
  siRNA target sequence for ANLN (NM_018685.2,3383-3401).
ctgtccgaccacaaagaga

SEQ ID NO: 115300 - DNA, 19 bp, Homo sapiens
  siRNA target sequence for ANLN (NM_018685.2,3461-3479).
ggctgtctgcagatactaa

SEQ ID NO: 115301 - DNA, 19 bp, Homo sapiens
  siRNA target sequence for ANLN (NM_018685.2,3488-3506).
gggatctctggatgcaaaa

SEQ ID NO: 115302 - DNA, 19 bp, Homo sapiens
  siRNA target sequence for ANLN (NM_018685.2,3497-3515).
ggatgcaaaaactcaatca

SEQ ID NO: 115303 - DNA, 19 bp, Homo sapiens
  siRNA target sequence for ANLN (NM_018685.2,3501-3519).
gcaaaaactcaatcaagtt

SEQ ID NO: 115304 - DNA, 19 bp, Homo sapiens
  siRNA target sequence for ANLN (NM_018685.2,3547-3565).
gatgcttgctacaaaccta

SEQ ID NO: 115305 - DNA, 19 bp, Homo sapiens
  siRNA target sequence for ARPC1A (NM_006409.2,152-170).
cactgcatcagtttttact

SEQ ID NO: 115306 - DNA, 19 bp, Homo sapiens
  siRNA target sequence for ARPC1A (NM_006409.2,198-216).
cagggatcgtactcagatt

SEQ ID NO: 115307 - DNA, 19 bp, Homo sapiens
  siRNA target sequence for ARPC1A (NM_006409.2,218-236).
ccctcagtcccaataatca

SEQ ID NO: 115308 - DNA, 19 bp, Homo sapiens
  siRNA target sequence for ARPC1A (NM_006409.2,235-253).
cacgaagtgcacatctata

SEQ ID NO: 115309 - DNA, 19 bp, Homo sapiens
  siRNA target sequence for ARPC1A (NM_006409.2,238-256).
gaagtgcacatctataaga

SEQ ID NO: 115310 - DNA, 19 bp, Homo sapiens
  siRNA target sequence for ARPC1A (NM_006409.2,764-782).
gggtccacggggtaagctt

SEQ ID NO: 115311 - DNA, 19 bp, Homo sapiens
  siRNA target sequence for ARPC1A (NM_006409.2,890-908).
cgctcctaagtgtgtcatt

SEQ ID NO: 115312 - DNA, 19 bp, Homo sapiens
  siRNA target sequence for ARPC1A (NM_006409.2,987-1005).
gaccttcgtctccaagtta

SEQ ID NO: 115313 - DNA, 19 bp, Homo sapiens
  siRNA target sequence for ARPC1A (NM_006409.2,989-1007).
ccttcgtctccaagttaga

SEQ ID NO: 115314 - DNA, 19 bp, Homo sapiens
  siRNA target sequence for ARPC1A (NM_006409.2,990-1008).
cttcgtctccaagttagat

SEQ ID NO: 115315 - DNA, 19 bp, Homo sapiens
  siRNA target sequence for ARPC1A (NM_006409.2,993-1011).
cgtctccaagttagatatt

SEQ ID NO: 115316 - DNA, 19 bp, Homo sapiens
  siRNA target sequence for ARPC1A (NM_006409.2,996-1014).
ctccaagttagatattcca

SEQ ID NO: 115317 - DNA, 19 bp, Homo sapiens
  siRNA target sequence for ARPC1A (NM_006409.2,998-1016).
ccaagttagatattccaaa

SEQ ID NO: 115318 - DNA, 19 bp, Homo sapiens
  siRNA target sequence for ARPC1A (NM_006409.2,1109-1127).
cgctgcaccagaatagcat

SEQ ID NO: 115319 - DNA, 19 bp, Homo sapiens
  siRNA target sequence for ARPC1A (NM_006409.2,1128-1146).
cactcaagtctctatttat

SEQ ID NO: 115320 - DNA, 19 bp, Homo sapiens
  siRNA target sequence for ARPC1A (NM_006409.2,1162-1180).
gattgtcgcaaattttgca

SEQ ID NO: 115321 - DNA, 19 bp, Homo sapiens
  siRNA target sequence for ARPC1A (NM_006409.2,1191-1209).
cgatggagccatgacaatt

SEQ ID NO: 115322 - DNA, 19 bp, Homo sapiens
  siRNA target sequence for ARPC1A (NM_006409.2,1240-1258).
cagggcctccggataatgt

SEQ ID NO: 115323 - DNA, 19 bp, Homo sapiens
  siRNA target sequence for BCL7B (NM_001707.2,234-252).
gacacgtccctgaggatat

SEQ ID NO: 115324 - DNA, 19 bp, Homo sapiens
  siRNA target sequence for BCL7B (NM_001707.2,236-254).
cacgtccctgaggatattt

SEQ ID NO: 115325 - DNA, 19 bp, Homo sapiens
  siRNA target sequence for BCL7B (NM_001707.2,238-256).
cgtccctgaggatatttaa

SEQ ID NO: 115326 - DNA, 19 bp, Homo sapiens
  siRNA target sequence for BCL7B (NM_001707.2,342-360).
gatgcctcagccaattcct

SEQ ID NO: 115327 - DNA, 19 bp, Homo sapiens
  siRNA target sequence for BCL7B (NM_001707.2,403-421).
ccgtgtctgacgtctatca

SEQ ID NO: 115328 - DNA, 19 bp, Homo sapiens
  siRNA target sequence for BCL7B (NM_001707.2,409-427).
ctgacgtctatcagcttaa

SEQ ID NO: 115329 - DNA, 19 bp, Homo sapiens
  siRNA target sequence for BCL7B (NM_001707.2,569-587).
ctcggaagttgctgatgaa

SEQ ID NO: 115330 - DNA, 19 bp, Homo sapiens
  siRNA target sequence for BPAG1 (NM_001723.3,105-123).
gcacagtagtagttatagt

SEQ ID NO: 115331 - DNA, 19 bp, Homo sapiens
  siRNA target sequence for BPAG1 (NM_001723.3,162-180).
cactcgaaccagtcttgat

SEQ ID NO: 115332 - DNA, 19 bp, Homo sapiens
  siRNA target sequence for BPAG1 (NM_001723.3,166-184).
cgaaccagtcttgattcaa

SEQ ID NO: 115333 - DNA, 19 bp, Homo sapiens
  siRNA target sequence for BPAG1 (NM_001723.3,209-227).
gtggtccaacactgatcaa

SEQ ID NO: 115334 - DNA, 19 bp, Homo sapiens
  siRNA target sequence for BPAG1 (NM_001723.3,211-229).
ggtccaacactgatcaact

SEQ ID NO: 115335 - DNA, 19 bp, Homo sapiens
  siRNA target sequence for BPAG1 (NM_001723.3,239-257).
gcttcggcagtgaatcctt

SEQ ID NO: 115336 - DNA, 19 bp, Homo sapiens
  siRNA target sequence for BPAG1 (NM_001723.3,259-277).
gatggacacaggttagaaa

SEQ ID NO: 115337 - DNA, 19 bp, Homo sapiens
  siRNA target sequence for BPAG1 (NM_001723.3,262-280).
ggacacaggttagaaatgt

SEQ ID NO: 115338 - DNA, 19 bp, Homo sapiens
  siRNA target sequence for BPAG1 (NM_001723.3,362-380).
ctgattctaaaagattaga

SEQ ID NO: 115339 - DNA, 19 bp, Homo sapiens
  siRNA target sequence for BPAG1 (NM_001723.3,364-382).
gattctaaaagattagaat

SEQ ID NO: 115340 - DNA, 19 bp, Homo sapiens
  siRNA target sequence for BPAG1 (NM_001723.3,415-433).
gctgggtatatacttgaat

SEQ ID NO: 115341 - DNA, 19 bp, Homo sapiens
  siRNA target sequence for BPAG1 (NM_001723.3,419-437).
ggtatatacttgaatgtga

SEQ ID NO: 115342 - DNA, 19 bp, Homo sapiens
  siRNA target sequence for BPAG1 (NM_001723.3,427-445).
cttgaatgtgagaaccttt

SEQ ID NO: 115343 - DNA, 19 bp, Homo sapiens
  siRNA target sequence for BPAG1 (NM_001723.3,442-460).
cttttacgccagcatgtaa

SEQ ID NO: 115344 - DNA, 19 bp, Homo sapiens
  siRNA target sequence for BPAG1 (NM_001723.3,449-467).
gccagcatgtaattgatgt

SEQ ID NO: 115345 - DNA, 19 bp, Homo sapiens
  siRNA target sequence for BPAG1 (NM_001723.3,450-468).
ccagcatgtaattgatgta

SEQ ID NO: 115346 - DNA, 19 bp, Homo sapiens
  siRNA target sequence for BPAG1 (NM_001723.3,495-513).
ccaggcagatcaattggta

SEQ ID NO: 115347 - DNA, 19 bp, Homo sapiens
  siRNA target sequence for BPAG1 (NM_001723.3,510-528).
ggtacagagggttgcaaaa

SEQ ID NO: 115348 - DNA, 19 bp, Homo sapiens
  siRNA target sequence for BPAG1 (NM_001723.3,538-556).
gaaattatggccttaagga

SEQ ID NO: 115349 - DNA, 19 bp, Homo sapiens
  siRNA target sequence for BPAG1 (NM_001723.3,547-565).
gccttaaggaacgaatgtt

SEQ ID NO: 115350 - DNA, 19 bp, Homo sapiens
  siRNA target sequence for BPAG1 (NM_001723.3,549-567).
cttaaggaacgaatgttct

SEQ ID NO: 115351 - DNA, 19 bp, Homo sapiens
  siRNA target sequence for BPAG1 (NM_001723.3,623-641).
caggaatcactcaaagttt

SEQ ID NO: 115352 - DNA, 19 bp, Homo sapiens
  siRNA target sequence for BPAG1 (NM_001723.3,630-648).
cactcaaagtttaaactca

SEQ ID NO: 115353 - DNA, 19 bp, Homo sapiens
  siRNA target sequence for BPAG1 (NM_001723.3,687-705).
gctgacccagagtttaaca

SEQ ID NO: 115354 - DNA, 19 bp, Homo sapiens
  siRNA target sequence for BPAG1 (NM_001723.3,710-728).
ccctaacctcttctagtat

SEQ ID NO: 115355 - DNA, 19 bp, Homo sapiens
  siRNA target sequence for BPAG1 (NM_001723.3,712-730).
ctaacctcttctagtatga

SEQ ID NO: 115356 - DNA, 19 bp, Homo sapiens
  siRNA target sequence for BPAG1 (NM_001723.3,806-824).
caggattagttccaaattt

SEQ ID NO: 115357 - DNA, 19 bp, Homo sapiens
  siRNA target sequence for BPAG1 (NM_001723.3,832-850).
ggagtagagccaaattcat

SEQ ID NO: 115358 - DNA, 19 bp, Homo sapiens
  siRNA target sequence for BPAG1 (NM_001723.3,877-895).
cgaaaaccccttctaaagt

SEQ ID NO: 115359 - DNA, 19 bp, Homo sapiens
  siRNA target sequence for BPAG1 (NM_001723.3,998-1016).
ctgagtggggctcagattt

SEQ ID NO: 115360 - DNA, 19 bp, Homo sapiens
  siRNA target sequence for BPAG1 (NM_001723.3,1008-1026).
ctcagatttgccaagtgtt

SEQ ID NO: 115361 - DNA, 19 bp, Homo sapiens
  siRNA target sequence for BPAG1 (NM_001723.3,1124-1142).
cacctcttaaactgactta

SEQ ID NO: 115362 - DNA, 19 bp, Homo sapiens
  siRNA target sequence for BPAG1 (NM_001723.3,1158-1176).
cagattagagagtcagtat

SEQ ID NO: 115363 - DNA, 19 bp, Homo sapiens
  siRNA target sequence for BPAG1 (NM_001723.3,1173-1191).
gtatgcaaaactcttgaat

SEQ ID NO: 115364 - DNA, 19 bp, Homo sapiens
  siRNA target sequence for BPAG1 (NM_001723.3,1215-1233).
ccttgatacactccataat

SEQ ID NO: 115365 - DNA, 19 bp, Homo sapiens
  siRNA target sequence for BPAG1 (NM_001723.3,1216-1234).
cttgatacactccataatt

SEQ ID NO: 115366 - DNA, 19 bp, Homo sapiens
  siRNA target sequence for BPAG1 (NM_001723.3,1241-1259).
gtcgtgcgactaatgaact

SEQ ID NO: 115367 - DNA, 19 bp, Homo sapiens
  siRNA target sequence for BPAG1 (NM_001723.3,1246-1264).
gcgactaatgaacttattt

SEQ ID NO: 115368 - DNA, 19 bp, Homo sapiens
  siRNA target sequence for BPAG1 (NM_001723.3,1250-1268).
ctaatgaacttatttggtt

SEQ ID NO: 115369 - DNA, 19 bp, Homo sapiens
  siRNA target sequence for BPAG1 (NM_001723.3,1339-1357).
gattatcatgctgaattaa

SEQ ID NO: 115370 - DNA, 19 bp, Homo sapiens
  siRNA target sequence for BPAG1 (NM_001723.3,1416-1434).
gctacttctagaaaatcat

SEQ ID NO: 115371 - DNA, 19 bp, Homo sapiens
  siRNA target sequence for BPAG1 (NM_001723.3,1432-1450).
catccagcccggttaacta

SEQ ID NO: 115372 - DNA, 19 bp, Homo sapiens
  siRNA target sequence for BPAG1 (NM_001723.3,1538-1556).
cagcgtatttcgagttttt

SEQ ID NO: 115373 - DNA, 19 bp, Homo sapiens
  siRNA target sequence for BPAG1 (NM_001723.3,1541-1559).
cgtatttcgagtttttcaa

SEQ ID NO: 115374 - DNA, 19 bp, Homo sapiens
  siRNA target sequence for BPAG1 (NM_001723.3,1542-1560).
gtatttcgagtttttcaat

SEQ ID NO: 115375 - DNA, 19 bp, Homo sapiens
  siRNA target sequence for BPAG1 (NM_001723.3,1564-1582).
gccaaagaagctactgatt

SEQ ID NO: 115376 - DNA, 19 bp, Homo sapiens
  siRNA target sequence for BPAG1 (NM_001723.3,1565-1583).
ccaaagaagctactgatta

SEQ ID NO: 115377 - DNA, 19 bp, Homo sapiens
  siRNA target sequence for BPAG1 (NM_001723.3,1570-1588).
gaagctactgattacttaa

SEQ ID NO: 115378 - DNA, 19 bp, Homo sapiens
  siRNA target sequence for BPAG1 (NM_001723.3,1603-1621).
gccattcagcggaagtaca

SEQ ID NO: 115379 - DNA, 19 bp, Homo sapiens
  siRNA target sequence for BPAG1 (NM_001723.3,1612-1630).
cggaagtacagctgtgata

SEQ ID NO: 115380 - DNA, 19 bp, Homo sapiens
  siRNA target sequence for BPAG1 (NM_001723.3,1709-1727).
gcactatagcaaacctaat

SEQ ID NO: 115381 - DNA, 19 bp, Homo sapiens
  siRNA target sequence for BPAG1 (NM_001723.3,1775-1793).
gtccactcaaaacttctat

SEQ ID NO: 115382 - DNA, 19 bp, Homo sapiens
  siRNA target sequence for BPAG1 (NM_001723.3,1813-1831).
gactacagacaaattgaga

SEQ ID NO: 115383 - DNA, 19 bp, Homo sapiens
  siRNA target sequence for BPAG1 (NM_001723.3,1943-1961).
ccgttcctccaccaaacaa

SEQ ID NO: 115384 - DNA, 19 bp, Homo sapiens
  siRNA target sequence for BPAG1 (NM_001723.3,1985-2003).
gaattgagcaacagtatca

SEQ ID NO: 115385 - DNA, 19 bp, Homo sapiens
  siRNA target sequence for BPAG1 (NM_001723.3,2060-2078).
ggcattatctcatcaatga

SEQ ID NO: 115386 - DNA, 19 bp, Homo sapiens
  siRNA target sequence for BPAG1 (NM_001723.3,2134-2152).
gaacatcagcaagttctaa

SEQ ID NO: 115387 - DNA, 19 bp, Homo sapiens
  siRNA target sequence for BPAG1 (NM_001723.3,2142-2160).
gcaagttctaagtaatcta

SEQ ID NO: 115388 - DNA, 19 bp, Homo sapiens
  siRNA target sequence for BPAG1 (NM_001723.3,2146-2164).
gttctaagtaatctacaat

SEQ ID NO: 115389 - DNA, 19 bp, Homo sapiens
  siRNA target sequence for BPAG1 (NM_001723.3,2161-2179).
caatctcgttttgaagatt

SEQ ID NO: 115390 - DNA, 19 bp, Homo sapiens
  siRNA target sequence for BPAG1 (NM_001723.3,2192-2210).
gccaggaatcccaagtctt

SEQ ID NO: 115391 - DNA, 19 bp, Homo sapiens
  siRNA target sequence for BPAG1 (NM_001723.3,2194-2212).
caggaatcccaagtctttt

SEQ ID NO: 115392 - DNA, 19 bp, Homo sapiens
  siRNA target sequence for BPAG1 (NM_001723.3,2235-2253).
ggaaaaggaggttaatgta

SEQ ID NO: 115393 - DNA, 19 bp, Homo sapiens
  siRNA target sequence for BPAG1 (NM_001723.3,2262-2280).
gtattatcaagaacttctt

SEQ ID NO: 115394 - DNA, 19 bp, Homo sapiens
  siRNA target sequence for BPAG1 (NM_001723.3,2331-2349).
ctctgaagttcgaaacatt

SEQ ID NO: 115395 - DNA, 19 bp, Homo sapiens
  siRNA target sequence for BPAG1 (NM_001723.3,2380-2398).
ctgattagacagattcgaa

SEQ ID NO: 115396 - DNA, 19 bp, Homo sapiens
  siRNA target sequence for BPAG1 (NM_001723.3,2401-2419).
cccctggaaagagatgatt

SEQ ID NO: 115397 - DNA, 19 bp, Homo sapiens
  siRNA target sequence for BPAG1 (NM_001723.3,2558-2576).
ccctacgatcagagcttaa

SEQ ID NO: 115398 - DNA, 19 bp, Homo sapiens
  siRNA target sequence for BPAG1 (NM_001723.3,2559-2577).
cctacgatcagagcttaat

SEQ ID NO: 115399 - DNA, 19 bp, Homo sapiens
  siRNA target sequence for BPAG1 (NM_001723.3,2589-2607).
gaacatgaaccaagtctat

SEQ ID NO: 115400 - DNA, 19 bp, Homo sapiens
  siRNA target sequence for BPAG1 (NM_001723.3,2592-2610).
catgaaccaagtctattct

SEQ ID NO: 115401 - DNA, 19 bp, Homo sapiens
  siRNA target sequence for BPAG1 (NM_001723.3,2598-2616).
ccaagtctattctatgtct

SEQ ID NO: 115402 - DNA, 19 bp, Homo sapiens
  siRNA target sequence for BPAG1 (NM_001723.3,2615-2633).
cttccacttacatagataa

SEQ ID NO: 115403 - DNA, 19 bp, Homo sapiens
  siRNA target sequence for BPAG1 (NM_001723.3,2618-2636).
ccacttacatagataagtt

SEQ ID NO: 115404 - DNA, 19 bp, Homo sapiens
  siRNA target sequence for BPAG1 (NM_001723.3,2621-2639).
cttacatagataagttgaa

SEQ ID NO: 115405 - DNA, 19 bp, Homo sapiens
  siRNA target sequence for BPAG1 (NM_001723.3,2625-2643).
catagataagttgaaaact

SEQ ID NO: 115406 - DNA, 19 bp, Homo sapiens
  siRNA target sequence for BPAG1 (NM_001723.3,2642-2660).
ctgttaacttggtgttaaa

SEQ ID NO: 115407 - DNA, 19 bp, Homo sapiens
  siRNA target sequence for BPAG1 (NM_001723.3,2649-2667).
cttggtgttaaaaaacact

SEQ ID NO: 115408 - DNA, 19 bp, Homo sapiens
  siRNA target sequence for BPAG1 (NM_001723.3,2672-2690).
ctgcagaagccctcgtaaa

SEQ ID NO: 115409 - DNA, 19 bp, Homo sapiens
  siRNA target sequence for BPAG1 (NM_001723.3,2677-2695).
gaagccctcgtaaaactct

SEQ ID NO: 115410 - DNA, 19 bp, Homo sapiens
  siRNA target sequence for BPAG1 (NM_001723.3,2681-2699).
ccctcgtaaaactctatga

SEQ ID NO: 115411 - DNA, 19 bp, Homo sapiens
  siRNA target sequence for BPAG1 (NM_001723.3,2682-2700).
cctcgtaaaactctatgaa

SEQ ID NO: 115412 - DNA, 19 bp, Homo sapiens
  siRNA target sequence for BPAG1 (NM_001723.3,2683-2701).
ctcgtaaaactctatgaaa

SEQ ID NO: 115413 - DNA, 19 bp, Homo sapiens
  siRNA target sequence for BPAG1 (NM_001723.3,2685-2703).
cgtaaaactctatgaaact

SEQ ID NO: 115414 - DNA, 19 bp, Homo sapiens
  siRNA target sequence for BPAG1 (NM_001723.3,2686-2704).
gtaaaactctatgaaacta

SEQ ID NO: 115415 - DNA, 19 bp, Homo sapiens
  siRNA target sequence for BPAG1 (NM_001723.3,2692-2710).
ctctatgaaactaaactgt

SEQ ID NO: 115416 - DNA, 19 bp, Homo sapiens
  siRNA target sequence for BPAG1 (NM_001723.3,2723-2741).
cagttatagctgacaagaa

SEQ ID NO: 115417 - DNA, 19 bp, Homo sapiens
  siRNA target sequence for BPAG1 (NM_001723.3,2772-2790).
gcaatggagatctgaagta

SEQ ID NO: 115418 - DNA, 19 bp, Homo sapiens
  siRNA target sequence for BPAG1 (NM_001723.3,2914-2932).
gcagatcaattagttgaaa

SEQ ID NO: 115419 - DNA, 19 bp, Homo sapiens
  siRNA target sequence for BPAG1 (NM_001723.3,2933-2951).
ggtggcaaaatgttcatgt

SEQ ID NO: 115420 - DNA, 19 bp, Homo sapiens
  siRNA target sequence for BPAG1 (NM_001723.3,3006-3024).
ctacagagacacttaccat

SEQ ID NO: 115421 - DNA, 19 bp, Homo sapiens
  siRNA target sequence for BPAG1 (NM_001723.3,3011-3029).
gagacacttaccatccttt

SEQ ID NO: 115422 - DNA, 19 bp, Homo sapiens
  siRNA target sequence for BPAG1 (NM_001723.3,3015-3033).
cacttaccatcctttagat

SEQ ID NO: 115423 - DNA, 19 bp, Homo sapiens
  siRNA target sequence for BPAG1 (NM_001723.3,3039-3057).
gatccagcaggttgaaact

SEQ ID NO: 115424 - DNA, 19 bp, Homo sapiens
  siRNA target sequence for BPAG1 (NM_001723.3,3042-3060).
ccagcaggttgaaactact

SEQ ID NO: 115425 - DNA, 19 bp, Homo sapiens
  siRNA target sequence for BPAG1 (NM_001723.3,3101-3119).
ccctagccacacagttgaa

SEQ ID NO: 115426 - DNA, 19 bp, Homo sapiens
  siRNA target sequence for BPAG1 (NM_001723.3,3107-3125).
ccacacagttgaatcaaca

SEQ ID NO: 115427 - DNA, 19 bp, Homo sapiens
  siRNA target sequence for BPAG1 (NM_001723.3,3129-3147).
gatgctggtgtccgaaata

SEQ ID NO: 115428 - DNA, 19 bp, Homo sapiens
  siRNA target sequence for BPAG1 (NM_001723.3,3132-3150).
gctggtgtccgaaatagaa

SEQ ID NO: 115429 - DNA, 19 bp, Homo sapiens
  siRNA target sequence for BPAG1 (NM_001723.3,3133-3151).
ctggtgtccgaaatagaaa

SEQ ID NO: 115430 - DNA, 19 bp, Homo sapiens
  siRNA target sequence for BPAG1 (NM_001723.3,3203-3221).
ctacagtgaaggactatga

SEQ ID NO: 115431 - DNA, 19 bp, Homo sapiens
  siRNA target sequence for BPAG1 (NM_001723.3,3206-3224).
cagtgaaggactatgaatt

SEQ ID NO: 115432 - DNA, 19 bp, Homo sapiens
  siRNA target sequence for BPAG1 (NM_001723.3,3249-3267).
ggtagattcacaacaaaaa

SEQ ID NO: 115433 - DNA, 19 bp, Homo sapiens
  siRNA target sequence for BPAG1 (NM_001723.3,3250-3268).
gtagattcacaacaaaaat

SEQ ID NO: 115434 - DNA, 19 bp, Homo sapiens
  siRNA target sequence for BPAG1 (NM_001723.3,3296-3314).
gttcagcagatctcattat

SEQ ID NO: 115435 - DNA, 19 bp, Homo sapiens
  siRNA target sequence for BPAG1 (NM_001723.3,3299-3317).
cagcagatctcattattca

SEQ ID NO: 115436 - DNA, 19 bp, Homo sapiens
  siRNA target sequence for BPAG1 (NM_001723.3,3327-3345).
ggacctaaggactcgatat

SEQ ID NO: 115437 - DNA, 19 bp, Homo sapiens
  siRNA target sequence for BPAG1 (NM_001723.3,3328-3346).
gacctaaggactcgatata

SEQ ID NO: 115438 - DNA, 19 bp, Homo sapiens
  siRNA target sequence for BPAG1 (NM_001723.3,3330-3348).
cctaaggactcgatatact

SEQ ID NO: 115439 - DNA, 19 bp, Homo sapiens
  siRNA target sequence for BPAG1 (NM_001723.3,3357-3375).
cactctcatgacacaatat

SEQ ID NO: 115440 - DNA, 19 bp, Homo sapiens
  siRNA target sequence for BPAG1 (NM_001723.3,3359-3377).
ctctcatgacacaatatat

SEQ ID NO: 115441 - DNA, 19 bp, Homo sapiens
  siRNA target sequence for BPAG1 (NM_001723.3,3429-3447).
gtgtaaggagacttctgaa

SEQ ID NO: 115442 - DNA, 19 bp, Homo sapiens
  siRNA target sequence for BPAG1 (NM_001723.3,3483-3501).
ggcaacagtgcttgagaat

SEQ ID NO: 115443 - DNA, 19 bp, Homo sapiens
  siRNA target sequence for BPAG1 (NM_001723.3,3484-3502).
gcaacagtgcttgagaata

SEQ ID NO: 115444 - DNA, 19 bp, Homo sapiens
  siRNA target sequence for BPAG1 (NM_001723.3,3488-3506).
cagtgcttgagaatagcaa

SEQ ID NO: 115445 - DNA, 19 bp, Homo sapiens
  siRNA target sequence for BPAG1 (NM_001723.3,3536-3554).
gaatggtagctgaactaaa

SEQ ID NO: 115446 - DNA, 19 bp, Homo sapiens
  siRNA target sequence for BPAG1 (NM_001723.3,3540-3558).
ggtagctgaactaaagaaa

SEQ ID NO: 115447 - DNA, 19 bp, Homo sapiens
  siRNA target sequence for BPAG1 (NM_001723.3,3566-3584).
cccgagtagaggaagaact

SEQ ID NO: 115448 - DNA, 19 bp, Homo sapiens
  siRNA target sequence for BPAG1 (NM_001723.3,3808-3826).
ctgaattttcgcaatcagt

SEQ ID NO: 115449 - DNA, 19 bp, Homo sapiens
  siRNA target sequence for BPAG1 (NM_001723.3,3848-3866).
gacgaacactggaagatca

SEQ ID NO: 115450 - DNA, 19 bp, Homo sapiens
  siRNA target sequence for BPAG1 (NM_001723.3,3880-3898).
gatttaagtctcaatgatt

SEQ ID NO: 115451 - DNA, 19 bp, Homo sapiens
  siRNA target sequence for BPAG1 (NM_001723.3,4198-4216).
cagcaggtagatgaactaa

SEQ ID NO: 115452 - DNA, 19 bp, Homo sapiens
  siRNA target sequence for BPAG1 (NM_001723.3,4213-4231).
ctaacagctgccaatagaa

SEQ ID NO: 115453 - DNA, 19 bp, Homo sapiens
  siRNA target sequence for BPAG1 (NM_001723.3,4245-4263).
catgagagagctgacatat

SEQ ID NO: 115454 - DNA, 19 bp, Homo sapiens
  siRNA target sequence for BPAG1 (NM_001723.3,4250-4268).
gagagctgacatatgaact

SEQ ID NO: 115455 - DNA, 19 bp, Homo sapiens
  siRNA target sequence for BPAG1 (NM_001723.3,4252-4270).
gagctgacatatgaactta

SEQ ID NO: 115456 - DNA, 19 bp, Homo sapiens
  siRNA target sequence for BPAG1 (NM_001723.3,4254-4272).
gctgacatatgaacttaat

SEQ ID NO: 115457 - DNA, 19 bp, Homo sapiens
  siRNA target sequence for BPAG1 (NM_001723.3,4308-4326).
ggctcgtttgctaaaagat

SEQ ID NO: 115458 - DNA, 19 bp, Homo sapiens
  siRNA target sequence for BPAG1 (NM_001723.3,4309-4327).
gctcgtttgctaaaagata

SEQ ID NO: 115459 - DNA, 19 bp, Homo sapiens
  siRNA target sequence for BPAG1 (NM_001723.3,4310-4328).
ctcgtttgctaaaagataa

SEQ ID NO: 115460 - DNA, 19 bp, Homo sapiens
  siRNA target sequence for BPAG1 (NM_001723.3,4313-4331).
gtttgctaaaagataaact

SEQ ID NO: 115461 - DNA, 19 bp, Homo sapiens
  siRNA target sequence for BPAG1 (NM_001723.3,4391-4409).
cggagaaagggtattctca

SEQ ID NO: 115462 - DNA, 19 bp, Homo sapiens
  siRNA target sequence for BPAG1 (NM_001723.3,4392-4410).
ggagaaagggtattctcaa

SEQ ID NO: 115463 - DNA, 19 bp, Homo sapiens
  siRNA target sequence for BPAG1 (NM_001723.3,4395-4413).
gaaagggtattctcaacaa

SEQ ID NO: 115464 - DNA, 19 bp, Homo sapiens
  siRNA target sequence for BPAG1 (NM_001723.3,4420-4438).
gagcttggtaggcaattga

SEQ ID NO: 115465 - DNA, 19 bp, Homo sapiens
  siRNA target sequence for BPAG1 (NM_001723.3,4426-4444).
ggtaggcaattgaatcaaa

SEQ ID NO: 115466 - DNA, 19 bp, Homo sapiens
  siRNA target sequence for BPAG1 (NM_001723.3,4467-4485).
catgcaagaagctagtgat

SEQ ID NO: 115467 - DNA, 19 bp, Homo sapiens
  siRNA target sequence for BPAG1 (NM_001723.3,4500-4518).
gcgcaattatcagttagaa

SEQ ID NO: 115468 - DNA, 19 bp, Homo sapiens
  siRNA target sequence for BPAG1 (NM_001723.3,4501-4519).
cgcaattatcagttagaat

SEQ ID NO: 115469 - DNA, 19 bp, Homo sapiens
  siRNA target sequence for BPAG1 (NM_001723.3,4502-4520).
gcaattatcagttagaatt

SEQ ID NO: 115470 - DNA, 19 bp, Homo sapiens
  siRNA target sequence for BPAG1 (NM_001723.3,4503-4521).
caattatcagttagaatta

SEQ ID NO: 115471 - DNA, 19 bp, Homo sapiens
  siRNA target sequence for BPAG1 (NM_001723.3,4801-4819).
gagtgtgcagagatgctaa

SEQ ID NO: 115472 - DNA, 19 bp, Homo sapiens
  siRNA target sequence for BPAG1 (NM_001723.3,4803-4821).
gtgtgcagagatgctaaaa

SEQ ID NO: 115473 - DNA, 19 bp, Homo sapiens
  siRNA target sequence for BPAG1 (NM_001723.3,4915-4933).
caaactatccagcaaagat

SEQ ID NO: 115474 - DNA, 19 bp, Homo sapiens
  siRNA target sequence for BPAG1 (NM_001723.3,5056-5074).
gacctggcgaaaagtcaaa

SEQ ID NO: 115475 - DNA, 19 bp, Homo sapiens
  siRNA target sequence for BPAG1 (NM_001723.3,5235-5253).
gttaaataacaggttgaaa

SEQ ID NO: 115476 - DNA, 19 bp, Homo sapiens
  siRNA target sequence for BPAG1 (NM_001723.3,5257-5275).
gtacaagacgaattacact

SEQ ID NO: 115477 - DNA, 19 bp, Homo sapiens
  siRNA target sequence for BPAG1 (NM_001723.3,5263-5281).
gacgaattacacttaaaga

SEQ ID NO: 115478 - DNA, 19 bp, Homo sapiens
  siRNA target sequence for BPAG1 (NM_001723.3,5420-5438).
caggcattaggcttgactt

SEQ ID NO: 115479 - DNA, 19 bp, Homo sapiens
  siRNA target sequence for BPAG1 (NM_001723.3,5423-5441).
gcattaggcttgactttgt

SEQ ID NO: 115480 - DNA, 19 bp, Homo sapiens
  siRNA target sequence for BPAG1 (NM_001723.3,5460-5478).
ctctagagcccaagaaaat

SEQ ID NO: 115481 - DNA, 19 bp, Homo sapiens
  siRNA target sequence for BPAG1 (NM_001723.3,5470-5488).
caagaaaatgctaagcttt

SEQ ID NO: 115482 - DNA, 19 bp, Homo sapiens
  siRNA target sequence for BPAG1 (NM_001723.3,5524-5542).
caacagtatcgtgaacaaa

SEQ ID NO: 115483 - DNA, 19 bp, Homo sapiens
  siRNA target sequence for BPAG1 (NM_001723.3,5614-5632).
cagaagcgtgaggttgaaa

SEQ ID NO: 115484 - DNA, 19 bp, Homo sapiens
  siRNA target sequence for BPAG1 (NM_001723.3,5667-5685).
gcatgaacatcaattagtt

SEQ ID NO: 115485 - DNA, 19 bp, Homo sapiens
  siRNA target sequence for BPAG1 (NM_001723.3,5668-5686).
catgaacatcaattagttt

SEQ ID NO: 115486 - DNA, 19 bp, Homo sapiens
  siRNA target sequence for BPAG1 (NM_001723.3,5688-5706).
gctccagtgtgaaattcaa

SEQ ID NO: 115487 - DNA, 19 bp, Homo sapiens
  siRNA target sequence for BPAG1 (NM_001723.3,5689-5707).
ctccagtgtgaaattcaaa

SEQ ID NO: 115488 - DNA, 19 bp, Homo sapiens
  siRNA target sequence for BPAG1 (NM_001723.3,5732-5750).
ccttcaaaccagattttga

SEQ ID NO: 115489 - DNA, 19 bp, Homo sapiens
  siRNA target sequence for BPAG1 (NM_001723.3,5780-5798).
gagagctgtcctctagaaa

SEQ ID NO: 115490 - DNA, 19 bp, Homo sapiens
  siRNA target sequence for BPAG1 (NM_001723.3,5930-5948).
gggctccactcgagaaaga

SEQ ID NO: 115491 - DNA, 19 bp, Homo sapiens
  siRNA target sequence for BPAG1 (NM_001723.3,5932-5950).
gctccactcgagaaagaga

SEQ ID NO: 115492 - DNA, 19 bp, Homo sapiens
  siRNA target sequence for BPAG1 (NM_001723.3,5933-5951).
ctccactcgagaaagagaa

SEQ ID NO: 115493 - DNA, 19 bp, Homo sapiens
  siRNA target sequence for BPAG1 (NM_001723.3,5987-6005).
caagcaccgagttacagat

SEQ ID NO: 115494 - DNA, 19 bp, Homo sapiens
  siRNA target sequence for BPAG1 (NM_001723.3,5993-6011).
ccgagttacagataacttt

SEQ ID NO: 115495 - DNA, 19 bp, Homo sapiens
  siRNA target sequence for BPAG1 (NM_001723.3,5994-6012).
cgagttacagataactttt

SEQ ID NO: 115496 - DNA, 19 bp, Homo sapiens
  siRNA target sequence for BPAG1 (NM_001723.3,6080-6098).
ctagaccacctgttaggta

SEQ ID NO: 115497 - DNA, 19 bp, Homo sapiens
  siRNA target sequence for BPAG1 (NM_001723.3,6086-6104).
cacctgttaggtatcaaga

SEQ ID NO: 115498 - DNA, 19 bp, Homo sapiens
  siRNA target sequence for BPAG1 (NM_001723.3,6088-6106).
cctgttaggtatcaagata

SEQ ID NO: 115499 - DNA, 19 bp, Homo sapiens
  siRNA target sequence for BPAG1 (NM_001723.3,6089-6107).
ctgttaggtatcaagataa

SEQ ID NO: 115500 - DNA, 19 bp, Homo sapiens
  siRNA target sequence for BPAG1 (NM_001723.3,6133-6151).
gttttgacacccttagaga

SEQ ID NO: 115501 - DNA, 19 bp, Homo sapiens
  siRNA target sequence for BPAG1 (NM_001723.3,6257-6275).
catctggtggactcaagaa

SEQ ID NO: 115502 - DNA, 19 bp, Homo sapiens
  siRNA target sequence for BPAG1 (NM_001723.3,6285-6303).
ccttaagaagggcttagaa

SEQ ID NO: 115503 - DNA, 19 bp, Homo sapiens
  siRNA target sequence for BPAG1 (NM_001723.3,6348-6366).
cagggatgatgaatttaaa

SEQ ID NO: 115504 - DNA, 19 bp, Homo sapiens
  siRNA target sequence for BPAG1 (NM_001723.3,6445-6463).
ctgcgactcggtcttaaga

SEQ ID NO: 115505 - DNA, 19 bp, Homo sapiens
  siRNA target sequence for BPAG1 (NM_001723.3,6447-6465).
gcgactcggtcttaagact

SEQ ID NO: 115506 - DNA, 19 bp, Homo sapiens
  siRNA target sequence for BPAG1 (NM_001723.3,6453-6471).
cggtcttaagactgttgaa

SEQ ID NO: 115507 - DNA, 19 bp, Homo sapiens
  siRNA target sequence for BPAG1 (NM_001723.3,6455-6473).
gtcttaagactgttgaaga

SEQ ID NO: 115508 - DNA, 19 bp, Homo sapiens
  siRNA target sequence for BPAG1 (NM_001723.3,6472-6490).
gaagttcagaaaactctta

SEQ ID NO: 115509 - DNA, 19 bp, Homo sapiens
  siRNA target sequence for BPAG1 (NM_001723.3,6501-6519).
gacgaaagccacctcaatt

SEQ ID NO: 115510 - DNA, 19 bp, Homo sapiens
  siRNA target sequence for BPAG1 (NM_001723.3,6515-6533).
caattgcagggctttacct

SEQ ID NO: 115511 - DNA, 19 bp, Homo sapiens
  siRNA target sequence for BPAG1 (NM_001723.3,6520-6538).
gcagggctttacctagaat

SEQ ID NO: 115512 - DNA, 19 bp, Homo sapiens
  siRNA target sequence for BPAG1 (NM_001723.3,6572-6590).
ccgagagaatcataataga

SEQ ID NO: 115513 - DNA, 19 bp, Homo sapiens
  siRNA target sequence for BPAG1 (NM_001723.3,6624-6642).
ggctgcaacaggttttata

SEQ ID NO: 115514 - DNA, 19 bp, Homo sapiens
  siRNA target sequence for BPAG1 (NM_001723.3,6625-6643).
gctgcaacaggttttataa

SEQ ID NO: 115515 - DNA, 19 bp, Homo sapiens
  siRNA target sequence for BPAG1 (NM_001723.3,6656-6674).
caggtcagacatattctgt

SEQ ID NO: 115516 - DNA, 19 bp, Homo sapiens
  siRNA target sequence for BPAG1 (NM_001723.3,6697-6715).
gttgttgaccccgaattca

SEQ ID NO: 115517 - DNA, 19 bp, Homo sapiens
  siRNA target sequence for BPAG1 (NM_001723.3,6743-6761).
cagctgtgggatattctta

SEQ ID NO: 115518 - DNA, 19 bp, Homo sapiens
  siRNA target sequence for BPAG1 (NM_001723.3,6748-6766).
gtgggatattcttattctt

SEQ ID NO: 115519 - DNA, 19 bp, Homo sapiens
  siRNA target sequence for BPAG1 (NM_001723.3,6807-6825).
gcttgacagacaaaaaggt

SEQ ID NO: 115520 - DNA, 19 bp, Homo sapiens
  siRNA target sequence for BPAG1 (NM_001723.3,6952-6970).
gagccatccagcaacacaa

SEQ ID NO: 115521 - DNA, 19 bp, Homo sapiens
  siRNA target sequence for BPAG1 (NM_001723.3,6959-6977).
ccagcaacacaagagtttt

SEQ ID NO: 115522 - DNA, 19 bp, Homo sapiens
  siRNA target sequence for BPAG1 (NM_001723.3,6996-7014).
gcaagctctgtattactca

SEQ ID NO: 115523 - DNA, 19 bp, Homo sapiens
  siRNA target sequence for BPAG1 (NM_001723.3,7000-7018).
gctctgtattactcagaat

SEQ ID NO: 115524 - DNA, 19 bp, Homo sapiens
  siRNA target sequence for BPAG1 (NM_001723.3,7045-7063).
gagtcccaatgctttctgt

SEQ ID NO: 115525 - DNA, 19 bp, Homo sapiens
  siRNA target sequence for BPAG1 (NM_001723.3,7089-7107).
caatctcaatgtcaagaaa

SEQ ID NO: 115526 - DNA, 19 bp, Homo sapiens
  siRNA target sequence for BPAG1 (NM_001723.3,7145-7163).
cagaattgaccgtgtatga

SEQ ID NO: 115527 - DNA, 19 bp, Homo sapiens
  siRNA target sequence for BPAG1 (NM_001723.3,7233-7251).
ggaagctatgttttttgaa

SEQ ID NO: 115528 - DNA, 19 bp, Homo sapiens
  siRNA target sequence for BPAG1 (NM_001723.3,7234-7252).
gaagctatgttttttgaat

SEQ ID NO: 115529 - DNA, 19 bp, Homo sapiens
  siRNA target sequence for BPAG1 (NM_001723.3,7249-7267).
gaatcctatgggcattctt

SEQ ID NO: 115530 - DNA, 19 bp, Homo sapiens
  siRNA target sequence for BPAG1 (NM_001723.3,7270-7288).
catatgctgactgatacta

SEQ ID NO: 115531 - DNA, 19 bp, Homo sapiens
  siRNA target sequence for BPAG1 (NM_001723.3,7324-7342).
gagcagggaacaattgaca

SEQ ID NO: 115532 - DNA, 19 bp, Homo sapiens
  siRNA target sequence for BPAG1 (NM_001723.3,7339-7357).
gacaaagccttggtcaaaa

SEQ ID NO: 115533 - DNA, 19 bp, Homo sapiens
  siRNA target sequence for BPAG1 (NM_001723.3,7366-7384).
gaaggcctcatcacactta

SEQ ID NO: 115534 - DNA, 19 bp, Homo sapiens
  siRNA target sequence for BPAG1 (NM_001723.3,7370-7388).
gcctcatcacacttacaga

SEQ ID NO: 115535 - DNA, 19 bp, Homo sapiens
  siRNA target sequence for BPAG1 (NM_001723.3,7371-7389).
cctcatcacacttacagaa

SEQ ID NO: 115536 - DNA, 19 bp, Homo sapiens
  siRNA target sequence for BPAG1 (NM_001723.3,7410-7428).
ccggttagtccccaagaaa

SEQ ID NO: 115537 - DNA, 19 bp, Homo sapiens
  siRNA target sequence for BPAG1 (NM_001723.3,7412-7430).
ggttagtccccaagaaaga

SEQ ID NO: 115538 - DNA, 19 bp, Homo sapiens
  siRNA target sequence for BPAG1 (NM_001723.3,7473-7491).
ggaaaggatctctgtacta

SEQ ID NO: 115539 - DNA, 19 bp, Homo sapiens
  siRNA target sequence for BPAG1 (NM_001723.3,7474-7492).
gaaaggatctctgtactaa

SEQ ID NO: 115540 - DNA, 19 bp, Homo sapiens
  siRNA target sequence for BPAG1 (NM_001723.3,7496-7514).
cctcccgtagaaatttggt

SEQ ID NO: 115541 - DNA, 19 bp, Homo sapiens
  siRNA target sequence for BPAG1 (NM_001723.3,7497-7515).
ctcccgtagaaatttggtt

SEQ ID NO: 115542 - DNA, 19 bp, Homo sapiens
  siRNA target sequence for BPAG1 (NM_001723.3,7554-7572).
cagtacagggggcataatt

SEQ ID NO: 115543 - DNA, 19 bp, Homo sapiens
  siRNA target sequence for BPAG1 (NM_001723.3,7566-7584).
cataattgatcctcttact

SEQ ID NO: 115544 - DNA, 19 bp, Homo sapiens
  siRNA target sequence for BPAG1 (NM_001723.3,7648-7666).
cagctgcgacagtgtgaat

SEQ ID NO: 115545 - DNA, 19 bp, Homo sapiens
  siRNA target sequence for BPAG1 (NM_001723.3,7653-7671).
gcgacagtgtgaattagta

SEQ ID NO: 115546 - DNA, 19 bp, Homo sapiens
  siRNA target sequence for BPAG1 (NM_001723.3,7654-7672).
cgacagtgtgaattagtaa

SEQ ID NO: 115547 - DNA, 19 bp, Homo sapiens
  siRNA target sequence for BPAG1 (NM_001723.3,7684-7702).
ggccatcccatcactaaca

SEQ ID NO: 115548 - DNA, 19 bp, Homo sapiens
  siRNA target sequence for BPAG1 (NM_001723.3,7685-7703).
gccatcccatcactaacaa

SEQ ID NO: 115549 - DNA, 19 bp, Homo sapiens
  siRNA target sequence for BPAG1 (NM_001723.3,7687-7705).
catcccatcactaacaaaa

SEQ ID NO: 115550 - DNA, 19 bp, Homo sapiens
  siRNA target sequence for BPAG1 (NM_001723.3,7755-7773).
gggaatccgatgtttggaa

SEQ ID NO: 115551 - DNA, 19 bp, Homo sapiens
  siRNA target sequence for BPAG1 (NM_001723.3,7756-7774).
ggaatccgatgtttggaat

SEQ ID NO: 115552 - DNA, 19 bp, Homo sapiens
  siRNA target sequence for BPAG1 (NM_001723.3,7757-7775).
gaatccgatgtttggaatt

SEQ ID NO: 115553 - DNA, 19 bp, Homo sapiens
  siRNA target sequence for BPAG1 (NM_001723.3,7782-7800).
cttgacaggagggttgata

SEQ ID NO: 115554 - DNA, 19 bp, Homo sapiens
  siRNA target sequence for BPAG1 (NM_001723.3,7809-7827).
ggttcactctcggttatca

SEQ ID NO: 115555 - DNA, 19 bp, Homo sapiens
  siRNA target sequence for BPAG1 (NM_001723.3,7815-7833).
ctctcggttatcaatagaa

SEQ ID NO: 115556 - DNA, 19 bp, Homo sapiens
  siRNA target sequence for BPAG1 (NM_001723.3,7817-7835).
ctcggttatcaatagaaga

SEQ ID NO: 115557 - DNA, 19 bp, Homo sapiens
  siRNA target sequence for BPAG1 (NM_001723.3,7836-7854).
ggctctccaagtaggtatt

SEQ ID NO: 115558 - DNA, 19 bp, Homo sapiens
  siRNA target sequence for BPAG1 (NM_015548.2,3524-3542).
gaaaacctcccttctctaa

SEQ ID NO: 115559 - DNA, 19 bp, Homo sapiens
  siRNA target sequence for BPAG1 (NM_015548.2,3590-3608).
cggaagcacttcaaactat

SEQ ID NO: 115560 - DNA, 19 bp, Homo sapiens
  siRNA target sequence for BPAG1 (NM_015548.2,3685-3703).
cttcaggaaagttataatt

SEQ ID NO: 115561 - DNA, 19 bp, Homo sapiens
  siRNA target sequence for BPAG1 (NM_015548.2,3727-3745).
cagctacaagaatcacaaa

SEQ ID NO: 115562 - DNA, 19 bp, Homo sapiens
  siRNA target sequence for BPAG1 (NM_015548.2,3742-3760).
caaacctcaggagatgtaa

SEQ ID NO: 115563 - DNA, 19 bp, Homo sapiens
  siRNA target sequence for BPAG1 (NM_015548.2,3784-3802).
gagcgtcagcaggagtata

SEQ ID NO: 115564 - DNA, 19 bp, Homo sapiens
  siRNA target sequence for BPAG1 (NM_015548.2,3788-3806).
gtcagcaggagtataaaga

SEQ ID NO: 115565 - DNA, 19 bp, Homo sapiens
  siRNA target sequence for BPAG1 (NM_015548.2,3817-3835).
gggatatgtgatcttctta

SEQ ID NO: 115566 - DNA, 19 bp, Homo sapiens
  siRNA target sequence for BPAG1 (NM_015548.2,3890-3908).
gcacagttgagttaaagaa

SEQ ID NO: 115567 - DNA, 19 bp, Homo sapiens
  siRNA target sequence for BPAG1 (NM_015548.2,4037-4055).
ctttgattgaacagaaact

SEQ ID NO: 115568 - DNA, 19 bp, Homo sapiens
  siRNA target sequence for BPAG1 (NM_015548.2,4074-4092).
gtgtgaacagcttaattta

SEQ ID NO: 115569 - DNA, 19 bp, Homo sapiens
  siRNA target sequence for BPAG1 (NM_015548.2,4106-4124).
ctaaaaaggagctggataa

SEQ ID NO: 115570 - DNA, 19 bp, Homo sapiens
  siRNA target sequence for BPAG1 (NM_015548.2,4220-4238).
ggttgtcaaatgttgacaa

SEQ ID NO: 115571 - DNA, 19 bp, Homo sapiens
  siRNA target sequence for BPAG1 (NM_015548.2,4231-4249).
gttgacaaagactcagaaa

SEQ ID NO: 115572 - DNA, 19 bp, Homo sapiens
  siRNA target sequence for BPAG1 (NM_015548.2,4333-4351).
gaggatgaagttaatggta

SEQ ID NO: 115573 - DNA, 19 bp, Homo sapiens
  siRNA target sequence for BPAG1 (NM_015548.2,4356-4374).
gttggagactgatgttgat

SEQ ID NO: 115574 - DNA, 19 bp, Homo sapiens
  siRNA target sequence for BPAG1 (NM_015548.2,4385-4403).
gaaccactcaggagaatct

SEQ ID NO: 115575 - DNA, 19 bp, Homo sapiens
  siRNA target sequence for BPAG1 (NM_015548.2,4391-4409).
ctcaggagaatctgaatca

SEQ ID NO: 115576 - DNA, 19 bp, Homo sapiens
  siRNA target sequence for BPAG1 (NM_015548.2,4455-4473).
gcaccaagcagtgatcata

SEQ ID NO: 115577 - DNA, 19 bp, Homo sapiens
  siRNA target sequence for BPAG1 (NM_015548.2,4560-4578).
ggaactgaaagtgcattat

SEQ ID NO: 115578 - DNA, 19 bp, Homo sapiens
  siRNA target sequence for BPAG1 (NM_015548.2,4769-4787).
gtttctcagaagacgttat

SEQ ID NO: 115579 - DNA, 19 bp, Homo sapiens
  siRNA target sequence for BPAG1 (NM_015548.2,4775-4793).
cagaagacgttatttctca

SEQ ID NO: 115580 - DNA, 19 bp, Homo sapiens
  siRNA target sequence for BPAG1 (NM_015548.2,4801-4819).
gacttgagatacatcacaa

SEQ ID NO: 115581 - DNA, 19 bp, Homo sapiens
  siRNA target sequence for BPAG1 (NM_015548.2,4867-4885).
gacggtggcaaggttgata

SEQ ID NO: 115582 - DNA, 19 bp, Homo sapiens
  siRNA target sequence for BPAG1 (NM_015548.2,4869-4887).
cggtggcaaggttgatact

SEQ ID NO: 115583 - DNA, 19 bp, Homo sapiens
  siRNA target sequence for BPAG1 (NM_015548.2,4870-4888).
ggtggcaaggttgatactt

SEQ ID NO: 115584 - DNA, 19 bp, Homo sapiens
  siRNA target sequence for BPAG1 (NM_015548.2,4953-4971).
ctctaagtgcaatgttctt

SEQ ID NO: 115585 - DNA, 19 bp, Homo sapiens
  siRNA target sequence for BPAG1 (NM_015548.2,4959-4977).
gtgcaatgttcttggaaat

SEQ ID NO: 115586 - DNA, 19 bp, Homo sapiens
  siRNA target sequence for BPAG1 (NM_015548.2,5066-5084).
cgagcaaacacttatctga

SEQ ID NO: 115587 - DNA, 19 bp, Homo sapiens
  siRNA target sequence for BPAG1 (NM_015548.2,5067-5085).
gagcaaacacttatctgaa

SEQ ID NO: 115588 - DNA, 19 bp, Homo sapiens
  siRNA target sequence for BPAG1 (NM_015548.2,5093-5111).
cggtggaccccaaaaatct

SEQ ID NO: 115589 - DNA, 19 bp, Homo sapiens
  siRNA target sequence for BPAG1 (NM_015548.2,5094-5112).
ggtggaccccaaaaatctt

SEQ ID NO: 115590 - DNA, 19 bp, Homo sapiens
  siRNA target sequence for BPAG1 (NM_015548.2,5136-5154).
ggctttgcaaggacagata

SEQ ID NO: 115591 - DNA, 19 bp, Homo sapiens
  siRNA target sequence for BPAG1 (NM_015548.2,5295-5313).
gtctgttaatgaacgaaat

SEQ ID NO: 115592 - DNA, 19 bp, Homo sapiens
  siRNA target sequence for BPAG1 (NM_015548.2,5314-5332).
gaaaaactccagataacct

SEQ ID NO: 115593 - DNA, 19 bp, Homo sapiens
  siRNA target sequence for BPAG1 (NM_015548.2,5413-5431).
caaggtcaagtgcctttaa

SEQ ID NO: 115594 - DNA, 19 bp, Homo sapiens
  siRNA target sequence for BPAG1 (NM_015548.2,5416-5434).
ggtcaagtgcctttaaact

SEQ ID NO: 115595 - DNA, 19 bp, Homo sapiens
  siRNA target sequence for BPAG1 (NM_015548.2,5435-5453).
ctactgctcttcaggatat

SEQ ID NO: 115596 - DNA, 19 bp, Homo sapiens
  siRNA target sequence for BPAG1 (NM_015548.2,5443-5461).
cttcaggatattatcagta

SEQ ID NO: 115597 - DNA, 19 bp, Homo sapiens
  siRNA target sequence for BPAG1 (NM_015548.2,5446-5464).
caggatattatcagtaaaa

SEQ ID NO: 115598 - DNA, 19 bp, Homo sapiens
  siRNA target sequence for BPAG1 (NM_015548.2,5472-5490).
gttggaacaggatattgca

SEQ ID NO: 115599 - DNA, 19 bp, Homo sapiens
  siRNA target sequence for BPAG1 (NM_015548.2,5492-5510).
gtcgtcagagcagtataaa

SEQ ID NO: 115600 - DNA, 19 bp, Homo sapiens
  siRNA target sequence for BPAG1 (NM_015548.2,5592-5610).
cttgtctgctcggttttca

SEQ ID NO: 115601 - DNA, 19 bp, Homo sapiens
  siRNA target sequence for BPAG1 (NM_015548.2,5595-5613).
gtctgctcggttttcagaa

SEQ ID NO: 115602 - DNA, 19 bp, Homo sapiens
  siRNA target sequence for BPAG1 (NM_015548.2,5609-5627).
cagaagcaagtcataaaca

SEQ ID NO: 115603 - DNA, 19 bp, Homo sapiens
  siRNA target sequence for BPAG1 (NM_015548.2,5611-5629).
gaagcaagtcataaacaca

SEQ ID NO: 115604 - DNA, 19 bp, Homo sapiens
  siRNA target sequence for BPAG1 (NM_015548.2,5649-5667).
ggaggagctaaaaaccaaa

SEQ ID NO: 115605 - DNA, 19 bp, Homo sapiens
  siRNA target sequence for BPAG1 (NM_015548.2,5652-5670).
ggagctaaaaaccaaagta

SEQ ID NO: 115606 - DNA, 19 bp, Homo sapiens
  siRNA target sequence for BPAG1 (NM_015548.2,5729-5747).
ctcttactgaagtagatgt

SEQ ID NO: 115607 - DNA, 19 bp, Homo sapiens
  siRNA target sequence for BPAG1 (NM_015548.2,5776-5794).
cagtatatgcaggaatcaa

SEQ ID NO: 115608 - DNA, 19 bp, Homo sapiens
  siRNA target sequence for BPAG1 (NM_015548.2,5778-5796).
gtatatgcaggaatcaact

SEQ ID NO: 115609 - DNA, 19 bp, Homo sapiens
  siRNA target sequence for BPAG1 (NM_015548.2,5863-5881).
catggcttaccaagtgata

SEQ ID NO: 115610 - DNA, 19 bp, Homo sapiens
  siRNA target sequence for BPAG1 (NM_015548.2,5884-5902).
gctttggtccttgaaaaaa

SEQ ID NO: 115611 - DNA, 19 bp, Homo sapiens
  siRNA target sequence for BPAG1 (NM_015548.2,6014-6032).
cattgaagtcatggataaa

SEQ ID NO: 115612 - DNA, 19 bp, Homo sapiens
  siRNA target sequence for BPAG1 (NM_015548.2,6145-6163).
gagattcagaaagtaaaca

SEQ ID NO: 115613 - DNA, 19 bp, Homo sapiens
  siRNA target sequence for BPAG1 (NM_015548.2,6207-6225).
ccctgcaaaggcaatagca

SEQ ID NO: 115614 - DNA, 19 bp, Homo sapiens
  siRNA target sequence for BPAG1 (NM_015548.2,6217-6235).
gcaatagcagcagttaaat

SEQ ID NO: 115615 - DNA, 19 bp, Homo sapiens
  siRNA target sequence for BPAG1 (NM_015548.2,6270-6288).
cacaaatactgaggaattt

SEQ ID NO: 115616 - DNA, 19 bp, Homo sapiens
  siRNA target sequence for BPAG1 (NM_015548.2,6292-6310).
gcaaataaaggtttaacat

SEQ ID NO: 115617 - DNA, 19 bp, Homo sapiens
  siRNA target sequence for BPAG1 (NM_015548.2,6302-6320).
gtttaacatccattaaaaa

SEQ ID NO: 115618 - DNA, 19 bp, Homo sapiens
  siRNA target sequence for BPAG1 (NM_015548.2,6338-6356).
gtcatggttatgaagatct

SEQ ID NO: 115619 - DNA, 19 bp, Homo sapiens
  siRNA target sequence for BPAG1 (NM_015548.2,6524-6542).
ctcaagttgagcagaataa

SEQ ID NO: 115620 - DNA, 19 bp, Homo sapiens
  siRNA target sequence for BPAG1 (NM_015548.2,6526-6544).
caagttgagcagaataagt

SEQ ID NO: 115621 - DNA, 19 bp, Homo sapiens
  siRNA target sequence for BPAG1 (NM_015548.2,6559-6577).
ctgaagcagaatgtaaaca

SEQ ID NO: 115622 - DNA, 19 bp, Homo sapiens
  siRNA target sequence for BPAG1 (NM_015548.2,6576-6594).
caaagtacaggagttgaaa

SEQ ID NO: 115623 - DNA, 19 bp, Homo sapiens
  siRNA target sequence for BPAG1 (NM_015548.2,6677-6695).
ctaagtggcaagaactcaa

SEQ ID NO: 115624 - DNA, 19 bp, Homo sapiens
  siRNA target sequence for BPAG1 (NM_015548.2,6685-6703).
caagaactcaatcaattaa

SEQ ID NO: 115625 - DNA, 19 bp, Homo sapiens
  siRNA target sequence for BPAG1 (NM_015548.2,6761-6779).
ctgtagaggcccaattgaa

SEQ ID NO: 115626 - DNA, 19 bp, Homo sapiens
  siRNA target sequence for BPAG1 (NM_015548.2,6830-6848).
caattgacccaaatatgct

SEQ ID NO: 115627 - DNA, 19 bp, Homo sapiens
  siRNA target sequence for BPAG1 (NM_015548.2,6893-6911).
ccactcggaaacctcaata

SEQ ID NO: 115628 - DNA, 19 bp, Homo sapiens
  siRNA target sequence for BPAG1 (NM_015548.2,6896-6914).
ctcggaaacctcaatatga

SEQ ID NO: 115629 - DNA, 19 bp, Homo sapiens
  siRNA target sequence for BPAG1 (NM_015548.2,6968-6986).
ctttacgtgggattgtgaa

SEQ ID NO: 115630 - DNA, 19 bp, Homo sapiens
  siRNA target sequence for BPAG1 (NM_015548.2,6997-7015).
gcagctgtgacccaaaaat

SEQ ID NO: 115631 - DNA, 19 bp, Homo sapiens
  siRNA target sequence for BPAG1 (NM_015548.2,7023-7041).
cctaacagggcaattgagt

SEQ ID NO: 115632 - DNA, 19 bp, Homo sapiens
  siRNA target sequence for BPAG1 (NM_015548.2,7099-7117).
ctgagaagcctttctgata

SEQ ID NO: 115633 - DNA, 19 bp, Homo sapiens
  siRNA target sequence for BPAG1 (NM_015548.2,7163-7181).
gcacgcaccctgatgctat

SEQ ID NO: 115634 - DNA, 19 bp, Homo sapiens
  siRNA target sequence for BPAG1 (NM_015548.2,7166-7184).
cgcaccctgatgctatgaa

SEQ ID NO: 115635 - DNA, 19 bp, Homo sapiens
  siRNA target sequence for BPAG1 (NM_015548.2,7191-7209).
gttggaaacagcccaaaaa

SEQ ID NO: 115636 - DNA, 19 bp, Homo sapiens
  siRNA target sequence for BPAG1 (NM_015548.2,7280-7298).
cactggttaaagaagagta

SEQ ID NO: 115637 - DNA, 19 bp, Homo sapiens
  siRNA target sequence for BPAG1 (NM_015548.2,7285-7303).
gttaaagaagagtacttga

SEQ ID NO: 115638 - DNA, 19 bp, Homo sapiens
  siRNA target sequence for BPAG1 (NM_015548.2,7320-7338).
gcaactagaaggcatctta

SEQ ID NO: 115639 - DNA, 19 bp, Homo sapiens
  siRNA target sequence for BPAG1 (NM_015548.2,7330-7348).
ggcatcttaaaatcattta

SEQ ID NO: 115640 - DNA, 19 bp, Homo sapiens
  siRNA target sequence for BPAG1 (NM_015548.2,7476-7494).
caaatctcatccaatatct

SEQ ID NO: 115641 - DNA, 19 bp, Homo sapiens
  siRNA target sequence for BPAG1 (NM_015548.2,7493-7511).
ctgccaaactcgatgtctt

SEQ ID NO: 115642 - DNA, 19 bp, Homo sapiens
  siRNA target sequence for BPAG1 (NM_015548.2,7528-7546).
gatcataaagactttagta

SEQ ID NO: 115643 - DNA, 19 bp, Homo sapiens
  siRNA target sequence for BPAG1 (NM_015548.2,7531-7549).
cataaagactttagtaaaa

SEQ ID NO: 115644 - DNA, 19 bp, Homo sapiens
  siRNA target sequence for BPAG1 (NM_015548.2,7556-7574).
ccgctcagtctcatatgta

SEQ ID NO: 115645 - DNA, 19 bp, Homo sapiens
  siRNA target sequence for BPAG1 (NM_015548.2,7557-7575).
cgctcagtctcatatgtat

SEQ ID NO: 115646 - DNA, 19 bp, Homo sapiens
  siRNA target sequence for BPAG1 (NM_015548.2,7627-7645).
gagaaggcagccttacagt

SEQ ID NO: 115647 - DNA, 19 bp, Homo sapiens
  siRNA target sequence for BPAG1 (NM_015548.2,7629-7647).
gaaggcagccttacagtta

SEQ ID NO: 115648 - DNA, 19 bp, Homo sapiens
  siRNA target sequence for BPAG1 (NM_015548.2,7637-7655).
ccttacagttacagcttaa

SEQ ID NO: 115649 - DNA, 19 bp, Homo sapiens
  siRNA target sequence for BPAG1 (NM_015548.2,7642-7660).
cagttacagcttaatacaa

SEQ ID NO: 115650 - DNA, 19 bp, Homo sapiens
  siRNA target sequence for BPAG1 (NM_015548.2,7648-7666).
cagcttaatacaattaaaa

SEQ ID NO: 115651 - DNA, 19 bp, Homo sapiens
  siRNA target sequence for BPAG1 (NM_015548.2,7673-7691).
gggatacatttaataagca

SEQ ID NO: 115652 - DNA, 19 bp, Homo sapiens
  siRNA target sequence for BPAG1 (NM_015548.2,7839-7857).
gaattctattgccaagtta

SEQ ID NO: 115653 - DNA, 19 bp, Homo sapiens
  siRNA target sequence for BPAG1 (NM_015548.2,7881-7899).
ccaacactttggtatggta

SEQ ID NO: 115654 - DNA, 19 bp, Homo sapiens
  siRNA target sequence for BPAG1 (NM_015548.2,7887-7905).
ctttggtatggtagaatta

SEQ ID NO: 115655 - DNA, 19 bp, Homo sapiens
  siRNA target sequence for BPAG1 (NM_015548.2,7891-7909).
ggtatggtagaattactga

SEQ ID NO: 115656 - DNA, 19 bp, Homo sapiens
  siRNA target sequence for BPAG1 (NM_015548.2,7897-7915).
gtagaattactgaacaaca

SEQ ID NO: 115657 - DNA, 19 bp, Homo sapiens
  siRNA target sequence for BPAG1 (NM_015548.2,7960-7978).
gttacagatgagaataagt

SEQ ID NO: 115658 - DNA, 19 bp, Homo sapiens
  siRNA target sequence for BPAG1 (NM_015548.2,7995-8013).
ggacatggtcactgaacaa

SEQ ID NO: 115659 - DNA, 19 bp, Homo sapiens
  siRNA target sequence for BPAG1 (NM_015548.2,8014-8032).
cttcacagtaagaaattct

SEQ ID NO: 115660 - DNA, 19 bp, Homo sapiens
  siRNA target sequence for BPAG1 (NM_015548.2,8112-8130).
ggagcagctagatatccat

SEQ ID NO: 115661 - DNA, 19 bp, Homo sapiens
  siRNA target sequence for BPAG1 (NM_015548.2,8116-8134).
cagctagatatccatgatt

SEQ ID NO: 115662 - DNA, 19 bp, Homo sapiens
  siRNA target sequence for BPAG1 (NM_015548.2,8139-8157).
gggatcccaggcttacagt

SEQ ID NO: 115663 - DNA, 19 bp, Homo sapiens
  siRNA target sequence for BPAG1 (NM_015548.2,8217-8235).
ggtagatttggctaaaaga

SEQ ID NO: 115664 - DNA, 19 bp, Homo sapiens
  siRNA target sequence for BPAG1 (NM_015548.2,8275-8293).
ggaacctctgatgttttat

SEQ ID NO: 115665 - DNA, 19 bp, Homo sapiens
  siRNA target sequence for BPAG1 (NM_015548.2,8388-8406).
gcatttccagaataccatt

SEQ ID NO: 115666 - DNA, 19 bp, Homo sapiens
  siRNA target sequence for BPAG1 (NM_015548.2,8424-8442).
gttcgcagagtttgatgat

SEQ ID NO: 115667 - DNA, 19 bp, Homo sapiens
  siRNA target sequence for BPAG1 (NM_015548.2,8631-8649).
ggaggccttaagcaaacaa

SEQ ID NO: 115668 - DNA, 19 bp, Homo sapiens
  siRNA target sequence for BPAG1 (NM_015548.2,8636-8654).
ccttaagcaaacaatgcaa

SEQ ID NO: 115669 - DNA, 19 bp, Homo sapiens
  siRNA target sequence for BPAG1 (NM_015548.2,8642-8660).
gcaaacaatgcaacaagtt

SEQ ID NO: 115670 - DNA, 19 bp, Homo sapiens
  siRNA target sequence for BPAG1 (NM_015548.2,8688-8706).
gcaggttgaagggacaatt

SEQ ID NO: 115671 - DNA, 19 bp, Homo sapiens
  siRNA target sequence for BPAG1 (NM_015548.2,8702-8720).
caattaagcgccttgaaga

SEQ ID NO: 115672 - DNA, 19 bp, Homo sapiens
  siRNA target sequence for BPAG1 (NM_015548.2,8802-8820).
ggaaacggagacaattaat

SEQ ID NO: 115673 - DNA, 19 bp, Homo sapiens
  siRNA target sequence for BPAG1 (NM_015548.2,8821-8839).
cagcagcttaacatgttca

SEQ ID NO: 115674 - DNA, 19 bp, Homo sapiens
  siRNA target sequence for BPAG1 (NM_015548.2,8875-8893).
ggtaaacagcaagatgtaa

SEQ ID NO: 115675 - DNA, 19 bp, Homo sapiens
  siRNA target sequence for BPAG1 (NM_015548.2,8898-8916).
gttaggtcaaggccttatt

SEQ ID NO: 115676 - DNA, 19 bp, Homo sapiens
  siRNA target sequence for BPAG1 (NM_015548.2,8980-8998).
cggtggaagactctcaata

SEQ ID NO: 115677 - DNA, 19 bp, Homo sapiens
  siRNA target sequence for BPAG1 (NM_015548.2,8981-8999).
ggtggaagactctcaataa

SEQ ID NO: 115678 - DNA, 19 bp, Homo sapiens
  siRNA target sequence for BPAG1 (NM_015548.2,9103-9121).
gagcttgtggccaatcaga

SEQ ID NO: 115679 - DNA, 19 bp, Homo sapiens
  siRNA target sequence for BPAG1 (NM_015548.2,9126-9144).
cccgtcggctgagttcaaa

SEQ ID NO: 115680 - DNA, 19 bp, Homo sapiens
  siRNA target sequence for BPAG1 (NM_015548.2,9128-9146).
cgtcggctgagttcaaagt

SEQ ID NO: 115681 - DNA, 19 bp, Homo sapiens
  siRNA target sequence for BPAG1 (NM_015548.2,9254-9272).
cagagcccgcagataaagt

SEQ ID NO: 115682 - DNA, 19 bp, Homo sapiens
  siRNA target sequence for BPAG1 (NM_015548.2,9256-9274).
gagcccgcagataaagtga

SEQ ID NO: 115683 - DNA, 19 bp, Homo sapiens
  siRNA target sequence for BPAG1 (NM_015548.2,9261-9279).
cgcagataaagtgaagatt

SEQ ID NO: 115684 - DNA, 19 bp, Homo sapiens
  siRNA target sequence for BPAG1 (NM_015548.2,9365-9383).
cggtggtagcacagcaatt

SEQ ID NO: 115685 - DNA, 19 bp, Homo sapiens
  siRNA target sequence for BPAG1 (NM_015548.2,9366-9384).
ggtggtagcacagcaattt

SEQ ID NO: 115686 - DNA, 19 bp, Homo sapiens
  siRNA target sequence for BPAG1 (NM_015548.2,9369-9387).
ggtagcacagcaatttcat

SEQ ID NO: 115687 - DNA, 19 bp, Homo sapiens
  siRNA target sequence for BPAG1 (NM_015548.2,9408-9426).
cgagtggcttacaaccata

SEQ ID NO: 115688 - DNA, 19 bp, Homo sapiens
  siRNA target sequence for BPAG1 (NM_015548.2,9413-9431).
ggcttacaaccatagaaaa

SEQ ID NO: 115689 - DNA, 19 bp, Homo sapiens
  siRNA target sequence for BPAG1 (NM_015548.2,9427-9445).
gaaaagaggctggtgaatt

SEQ ID NO: 115690 - DNA, 19 bp, Homo sapiens
  siRNA target sequence for BPAG1 (NM_015548.2,9458-9476).
gaacccaagcatctaaact

SEQ ID NO: 115691 - DNA, 19 bp, Homo sapiens
  siRNA target sequence for BPAG1 (NM_015548.2,9514-9532).
gacatcatcaatcacaata

SEQ ID NO: 115692 - DNA, 19 bp, Homo sapiens
  siRNA target sequence for BPAG1 (NM_015548.2,9554-9572).
gcattggccagtccttaaa

SEQ ID NO: 115693 - DNA, 19 bp, Homo sapiens
  siRNA target sequence for BPAG1 (NM_015548.2,9559-9577).
ggccagtccttaaaggttt

SEQ ID NO: 115694 - DNA, 19 bp, Homo sapiens
  siRNA target sequence for BPAG1 (NM_015548.2,9560-9578).
gccagtccttaaaggtttt

SEQ ID NO: 115695 - DNA, 19 bp, Homo sapiens
  siRNA target sequence for BPAG1 (NM_015548.2,9584-9602).
ccagggaggataaagatat

SEQ ID NO: 115696 - DNA, 19 bp, Homo sapiens
  siRNA target sequence for BPAG1 (NM_015548.2,9587-9605).
gggaggataaagatatggt

SEQ ID NO: 115697 - DNA, 19 bp, Homo sapiens
  siRNA target sequence for BPAG1 (NM_015548.2,9604-9622).
gtgcagagtaaattagact

SEQ ID NO: 115698 - DNA, 19 bp, Homo sapiens
  siRNA target sequence for BPAG1 (NM_015548.2,9624-9642).
ctctcaagtatggtacatt

SEQ ID NO: 115699 - DNA, 19 bp, Homo sapiens
  siRNA target sequence for BPAG1 (NM_015548.2,9626-9644).
ctcaagtatggtacattga

SEQ ID NO: 115700 - DNA, 19 bp, Homo sapiens
  siRNA target sequence for BPAG1 (NM_015548.2,9628-9646).
caagtatggtacattgaga

SEQ ID NO: 115701 - DNA, 19 bp, Homo sapiens
  siRNA target sequence for BPAG1 (NM_015548.2,9679-9697).
ctccagcaggccttatgta

SEQ ID NO: 115702 - DNA, 19 bp, Homo sapiens
  siRNA target sequence for BPAG1 (NM_015548.2,9681-9699).
ccagcaggccttatgtaat

SEQ ID NO: 115703 - DNA, 19 bp, Homo sapiens
  siRNA target sequence for BPAG1 (NM_015548.2,9684-9702).
gcaggccttatgtaatgct

SEQ ID NO: 115704 - DNA, 19 bp, Homo sapiens
  siRNA target sequence for BPAG1 (NM_015548.2,9685-9703).
caggccttatgtaatgcta

SEQ ID NO: 115705 - DNA, 19 bp, Homo sapiens
  siRNA target sequence for BPAG1 (NM_015548.2,9689-9707).
ccttatgtaatgctaagat

SEQ ID NO: 115706 - DNA, 19 bp, Homo sapiens
  siRNA target sequence for BPAG1 (NM_015548.2,9690-9708).
cttatgtaatgctaagatt

SEQ ID NO: 115707 - DNA, 19 bp, Homo sapiens
  siRNA target sequence for BPAG1 (NM_015548.2,9748-9766).
gaagtgcatgacaaactga

SEQ ID NO: 115708 - DNA, 19 bp, Homo sapiens
  siRNA target sequence for BPAG1 (NM_015548.2,9791-9809).
gcactgaggggctatggaa

SEQ ID NO: 115709 - DNA, 19 bp, Homo sapiens
  siRNA target sequence for BPAG1 (NM_015548.2,9865-9883).
gtagatcaggctttactaa

SEQ ID NO: 115710 - DNA, 19 bp, Homo sapiens
  siRNA target sequence for BPAG1 (NM_015548.2,9873-9891).
ggctttactaaatggttta

SEQ ID NO: 115711 - DNA, 19 bp, Homo sapiens
  siRNA target sequence for BPAG1 (NM_015548.2,9875-9893).
ctttactaaatggtttaga

SEQ ID NO: 115712 - DNA, 19 bp, Homo sapiens
  siRNA target sequence for BPAG1 (NM_015548.2,9887-9905).
gtttagaactacttaaaca

SEQ ID NO: 115713 - DNA, 19 bp, Homo sapiens
  siRNA target sequence for BPAG1 (NM_015548.2,9908-9926).
ccacaggtgatgaagtttt

SEQ ID NO: 115714 - DNA, 19 bp, Homo sapiens
  siRNA target sequence for BPAG1 (NM_015548.2,9913-9931).
ggtgatgaagttttaataa

SEQ ID NO: 115715 - DNA, 19 bp, Homo sapiens
  siRNA target sequence for BPAG1 (NM_015548.2,9958-9976).
gcaaggtacaaagacatta

SEQ ID NO: 115716 - DNA, 19 bp, Homo sapiens
  siRNA target sequence for BPAG1 (NM_015548.2,10285-10303).
gagcgctaccgattagtga

SEQ ID NO: 115717 - DNA, 19 bp, Homo sapiens
  siRNA target sequence for BPAG1 (NM_015548.2,10503-10521).
gagacacaaggatattatt

SEQ ID NO: 115718 - DNA, 19 bp, Homo sapiens
  siRNA target sequence for BPAG1 (NM_015548.2,10570-10588).
gaggaaaagcaatcaatga

SEQ ID NO: 115719 - DNA, 19 bp, Homo sapiens
  siRNA target sequence for BPAG1 (NM_015548.2,10600-10618).
gacaaggtactgaagaact

SEQ ID NO: 115720 - DNA, 19 bp, Homo sapiens
  siRNA target sequence for BPAG1 (NM_015548.2,10606-10624).
gtactgaagaactatgata

SEQ ID NO: 115721 - DNA, 19 bp, Homo sapiens
  siRNA target sequence for BPAG1 (NM_015548.2,10635-10653).
gattaattcagaaaggtat

SEQ ID NO: 115722 - DNA, 19 bp, Homo sapiens
  siRNA target sequence for BPAG1 (NM_015548.2,10667-10685).
gggcacagtccctggttaa

SEQ ID NO: 115723 - DNA, 19 bp, Homo sapiens
  siRNA target sequence for BPAG1 (NM_015548.2,10670-10688).
cacagtccctggttaacca

SEQ ID NO: 115724 - DNA, 19 bp, Homo sapiens
  siRNA target sequence for BPAG1 (NM_015548.2,10766-10784).
cccttgaatatgaaactct

SEQ ID NO: 115725 - DNA, 19 bp, Homo sapiens
  siRNA target sequence for BPAG1 (NM_015548.2,10808-10826).
ggcaactgcgtgagttgat

SEQ ID NO: 115726 - DNA, 19 bp, Homo sapiens
  siRNA target sequence for BPAG1 (NM_015548.2,10809-10827).
gcaactgcgtgagttgata

SEQ ID NO: 115727 - DNA, 19 bp, Homo sapiens
  siRNA target sequence for BPAG1 (NM_015548.2,10841-10859).
ctcatatagataagatgaa

SEQ ID NO: 115728 - DNA, 19 bp, Homo sapiens
  siRNA target sequence for BPAG1 (NM_015548.2,10868-10886).
ggccacagttactggaatt

SEQ ID NO: 115729 - DNA, 19 bp, Homo sapiens
  siRNA target sequence for BPAG1 (NM_015548.2,10870-10888).
ccacagttactggaattga

SEQ ID NO: 115730 - DNA, 19 bp, Homo sapiens
  siRNA target sequence for BPAG1 (NM_015548.2,10927-10945).
gcagccgacaccctttaca

SEQ ID NO: 115731 - DNA, 19 bp, Homo sapiens
  siRNA target sequence for BPAG1 (NM_015548.2,10933-10951).
gacaccctttacagtcaaa

SEQ ID NO: 115732 - DNA, 19 bp, Homo sapiens
  siRNA target sequence for BPAG1 (NM_015548.2,10935-10953).
caccctttacagtcaaatt

SEQ ID NO: 115733 - DNA, 19 bp, Homo sapiens
  siRNA target sequence for BPAG1 (NM_015548.2,11013-11031).
gttccatgacaagatagat

SEQ ID NO: 115734 - DNA, 19 bp, Homo sapiens
  siRNA target sequence for BPAG1 (NM_015548.2,11073-11091).
gcagccaccctctatctct

SEQ ID NO: 115735 - DNA, 19 bp, Homo sapiens
  siRNA target sequence for BPAG1 (NM_015548.2,11163-11181).
gccgttgtatgaaactctt

SEQ ID NO: 115736 - DNA, 19 bp, Homo sapiens
  siRNA target sequence for BPAG1 (NM_015548.2,11164-11182).
ccgttgtatgaaactctta

SEQ ID NO: 115737 - DNA, 19 bp, Homo sapiens
  siRNA target sequence for BPAG1 (NM_015548.2,11165-11183).
cgttgtatgaaactcttaa

SEQ ID NO: 115738 - DNA, 19 bp, Homo sapiens
  siRNA target sequence for BPAG1 (NM_015548.2,11213-11231).
ctggggggactgataaaga

SEQ ID NO: 115739 - DNA, 19 bp, Homo sapiens
  siRNA target sequence for BPAG1 (NM_015548.2,11215-11233).
ggggggactgataaagaca

SEQ ID NO: 115740 - DNA, 19 bp, Homo sapiens
  siRNA target sequence for BPAG1 (NM_015548.2,11216-11234).
gggggactgataaagacat

SEQ ID NO: 115741 - DNA, 19 bp, Homo sapiens
  siRNA target sequence for BPAG1 (NM_015548.2,11217-11235).
ggggactgataaagacata

SEQ ID NO: 115742 - DNA, 19 bp, Homo sapiens
  siRNA target sequence for BPAG1 (NM_015548.2,11218-11236).
gggactgataaagacatat

SEQ ID NO: 115743 - DNA, 19 bp, Homo sapiens
  siRNA target sequence for BPAG1 (NM_015548.2,11240-11258).
ccaaagctgttcaggataa

SEQ ID NO: 115744 - DNA, 19 bp, Homo sapiens
  siRNA target sequence for BPAG1 (NM_015548.2,11370-11388).
gtcattgatagttaccatt

SEQ ID NO: 115745 - DNA, 19 bp, Homo sapiens
  siRNA target sequence for BPAG1 (NM_015548.2,11506-11524).
gagctggatatagttatta

SEQ ID NO: 115746 - DNA, 19 bp, Homo sapiens
  siRNA target sequence for BPAG1 (NM_015548.2,11549-11567).
catgtggggagcctgataa

SEQ ID NO: 115747 - DNA, 19 bp, Homo sapiens
  siRNA target sequence for BPAG1 (NM_015548.2,11571-11589).
cattgtcaagaagagtata

SEQ ID NO: 115748 - DNA, 19 bp, Homo sapiens
  siRNA target sequence for BPAG1 (NM_015548.2,11580-11598).
gaagagtatagatgagtta

SEQ ID NO: 115749 - DNA, 19 bp, Homo sapiens
  siRNA target sequence for BPAG1 (NM_015548.2,11603-11621).
cagcatgggattctctaaa

SEQ ID NO: 115750 - DNA, 19 bp, Homo sapiens
  siRNA target sequence for BPAG1 (NM_015548.2,11630-11648).
ggaaagaccggattgacaa

SEQ ID NO: 115751 - DNA, 19 bp, Homo sapiens
  siRNA target sequence for BPAG1 (NM_015548.2,11690-11708).
gactgcaggcggtatttga

SEQ ID NO: 115752 - DNA, 19 bp, Homo sapiens
  siRNA target sequence for BPAG1 (NM_015548.2,11692-11710).
ctgcaggcggtatttgact

SEQ ID NO: 115753 - DNA, 19 bp, Homo sapiens
  siRNA target sequence for BPAG1 (NM_015548.2,11716-11734).
gatattgcaggtggtaaat

SEQ ID NO: 115754 - DNA, 19 bp, Homo sapiens
  siRNA target sequence for BPAG1 (NM_015548.2,11726-11744).
gtggtaaattagcttcaat

SEQ ID NO: 115755 - DNA, 19 bp, Homo sapiens
  siRNA target sequence for BPAG1 (NM_015548.2,11728-11746).
ggtaaattagcttcaatgt

SEQ ID NO: 115756 - DNA, 19 bp, Homo sapiens
  siRNA target sequence for BPAG1 (NM_015548.2,11756-11774).
gaacagatctcgaaactgt

SEQ ID NO: 115757 - DNA, 19 bp, Homo sapiens
  siRNA target sequence for BPAG1 (NM_015548.2,11791-11809).
gagctaaagcaatttaagt

SEQ ID NO: 115758 - DNA, 19 bp, Homo sapiens
  siRNA target sequence for BPAG1 (NM_015548.2,11857-11875).
gcagagcttttgctaaaga

SEQ ID NO: 115759 - DNA, 19 bp, Homo sapiens
  siRNA target sequence for BPAG1 (NM_015548.2,11903-11921).
ctgttcaagacccattaat

SEQ ID NO: 115760 - DNA, 19 bp, Homo sapiens
  siRNA target sequence for BPAG1 (NM_015548.2,12049-12067).
cacaccgagggcttgctaa

SEQ ID NO: 115761 - DNA, 19 bp, Homo sapiens
  siRNA target sequence for BPAG1 (NM_015548.2,12162-12180).
cacagtggaagccgttaat

SEQ ID NO: 115762 - DNA, 19 bp, Homo sapiens
  siRNA target sequence for BPAG1 (NM_015548.2,12164-12182).
cagtggaagccgttaataa

SEQ ID NO: 115763 - DNA, 19 bp, Homo sapiens
  siRNA target sequence for BPAG1 (NM_015548.2,12168-12186).
ggaagccgttaataaagca

SEQ ID NO: 115764 - DNA, 19 bp, Homo sapiens
  siRNA target sequence for BPAG1 (NM_015548.2,12174-12192).
cgttaataaagcaggaaat

SEQ ID NO: 115765 - DNA, 19 bp, Homo sapiens
  siRNA target sequence for BPAG1 (NM_015548.2,12240-12258).
caagctagaggttttaaat

SEQ ID NO: 115766 - DNA, 19 bp, Homo sapiens
  siRNA target sequence for BPAG1 (NM_015548.2,12259-12277).
caacgctggcaaaatgttt

SEQ ID NO: 115767 - DNA, 19 bp, Homo sapiens
  siRNA target sequence for BPAG1 (NM_015548.2,12335-12353).
ggttccatggcgaaattga

SEQ ID NO: 115768 - DNA, 19 bp, Homo sapiens
  siRNA target sequence for BPAG1 (NM_015548.2,12431-12449).
ccaaggagcagcttaatgt

SEQ ID NO: 115769 - DNA, 19 bp, Homo sapiens
  siRNA target sequence for BPAG1 (NM_015548.2,12464-12482).
gtgctgcctttgaagctaa

SEQ ID NO: 115770 - DNA, 19 bp, Homo sapiens
  siRNA target sequence for BPAG1 (NM_015548.2,12467-12485).
ctgcctttgaagctaaaga

SEQ ID NO: 115771 - DNA, 19 bp, Homo sapiens
  siRNA target sequence for BPAG1 (NM_015548.2,12562-12580).
gaccaagacataaataact

SEQ ID NO: 115772 - DNA, 19 bp, Homo sapiens
  siRNA target sequence for BPAG1 (NM_015548.2,12565-12583).
caagacataaataacttga

SEQ ID NO: 115773 - DNA, 19 bp, Homo sapiens
  siRNA target sequence for BPAG1 (NM_015548.2,12594-12612).
ggaatcggtggaaaccaaa

SEQ ID NO: 115774 - DNA, 19 bp, Homo sapiens
  siRNA target sequence for BPAG1 (NM_015548.2,12599-12617).
cggtggaaaccaaactcaa

SEQ ID NO: 115775 - DNA, 19 bp, Homo sapiens
  siRNA target sequence for BPAG1 (NM_015548.2,12806-12824).
ctcatcgtgagcagataat

SEQ ID NO: 115776 - DNA, 19 bp, Homo sapiens
  siRNA target sequence for BPAG1 (NM_015548.2,12883-12901).
ctaatcaagaatctactta

SEQ ID NO: 115777 - DNA, 19 bp, Homo sapiens
  siRNA target sequence for BPAG1 (NM_015548.2,12888-12906).
caagaatctacttatcagt

SEQ ID NO: 115778 - DNA, 19 bp, Homo sapiens
  siRNA target sequence for BPAG1 (NM_015548.2,12895-12913).
ctacttatcagtgtacaaa

SEQ ID NO: 115779 - DNA, 19 bp, Homo sapiens
  siRNA target sequence for BPAG1 (NM_015548.2,13065-13083).
cgcaaatgatccagacaaa

SEQ ID NO: 115780 - DNA, 19 bp, Homo sapiens
  siRNA target sequence for BPAG1 (NM_015548.2,13339-13357).
gctctcattgattggttat

SEQ ID NO: 115781 - DNA, 19 bp, Homo sapiens
  siRNA target sequence for BPAG1 (NM_015548.2,13340-13358).
ctctcattgattggttata

SEQ ID NO: 115782 - DNA, 19 bp, Homo sapiens
  siRNA target sequence for BPAG1 (NM_015548.2,13344-13362).
cattgattggttatataga

SEQ ID NO: 115783 - DNA, 19 bp, Homo sapiens
  siRNA target sequence for BPAG1 (NM_015548.2,13414-13432).
gtgatgaatctgatcgata

SEQ ID NO: 115784 - DNA, 19 bp, Homo sapiens
  siRNA target sequence for BPAG1 (NM_015548.2,13416-13434).
gatgaatctgatcgataat

SEQ ID NO: 115785 - DNA, 19 bp, Homo sapiens
  siRNA target sequence for BPAG1 (NM_015548.2,13493-13511).
gctcagcccgagaactcat

SEQ ID NO: 115786 - DNA, 19 bp, Homo sapiens
  siRNA target sequence for BPAG1 (NM_015548.2,13578-13596).
gaccgtgtgtgcactttct

SEQ ID NO: 115787 - DNA, 19 bp, Homo sapiens
  siRNA target sequence for BPAG1 (NM_015548.2,13580-13598).
ccgtgtgtgcactttctat

SEQ ID NO: 115788 - DNA, 19 bp, Homo sapiens
  siRNA target sequence for BPAG1 (NM_015548.2,13591-13609).
ctttctatatcaaagcaaa

SEQ ID NO: 115789 - DNA, 19 bp, Homo sapiens
  siRNA target sequence for BPAG1 (NM_015548.2,13631-13649).
gtcaggcagaggaattcca

SEQ ID NO: 115790 - DNA, 19 bp, Homo sapiens
  siRNA target sequence for BPAG1 (NM_015548.2,13745-13763).
ctctcattgatcagcataa

SEQ ID NO: 115791 - DNA, 19 bp, Homo sapiens
  siRNA target sequence for BPAG1 (NM_015548.2,13851-13869).
cgactccatcactaccatt

SEQ ID NO: 115792 - DNA, 19 bp, Homo sapiens
  siRNA target sequence for BPAG1 (NM_015548.2,13856-13874).
ccatcactaccattaagca

SEQ ID NO: 115793 - DNA, 19 bp, Homo sapiens
  siRNA target sequence for BPAG1 (NM_015548.2,13911-13929).
gctggcctgggcaaagcaa

SEQ ID NO: 115794 - DNA, 19 bp, Homo sapiens
  siRNA target sequence for BPAG1 (NM_015548.2,14007-14025).
gcaatgggctgaaactaca

SEQ ID NO: 115795 - DNA, 19 bp, Homo sapiens
  siRNA target sequence for BPAG1 (NM_015548.2,14013-14031).
ggctgaaactacacttact

SEQ ID NO: 115796 - DNA, 19 bp, Homo sapiens
  siRNA target sequence for BPAG1 (NM_015548.2,14017-14035).
gaaactacacttactgata

SEQ ID NO: 115797 - DNA, 19 bp, Homo sapiens
  siRNA target sequence for BPAG1 (NM_015548.2,14143-14161).
gtaacgaagacctataaga

SEQ ID NO: 115798 - DNA, 19 bp, Homo sapiens
  siRNA target sequence for BPAG1 (NM_015548.2,14388-14406).
ggagctgagggaatttgct

SEQ ID NO: 115799 - DNA, 19 bp, Homo sapiens
  siRNA target sequence for BPAG1 (NM_015548.2,14394-14412).
gagggaatttgctaacttt

SEQ ID NO: 115800 - DNA, 19 bp, Homo sapiens
  siRNA target sequence for BPAG1 (NM_015548.2,14419-14437).
gatatctggcgcaaaaaat

SEQ ID NO: 115801 - DNA, 19 bp, Homo sapiens
  siRNA target sequence for BPAG1 (NM_015548.2,14519-14537).
cgcggcaggaatttattga

SEQ ID NO: 115802 - DNA, 19 bp, Homo sapiens
  siRNA target sequence for BPAG1 (NM_015548.2,14585-14603).
cagttgcagacatctttga

SEQ ID NO: 115803 - DNA, 19 bp, Homo sapiens
  siRNA target sequence for BPAG1 (NM_015548.2,14611-14629).
ggcgatggatatattgact

SEQ ID NO: 115804 - DNA, 19 bp, Homo sapiens
  siRNA target sequence for BPAG1 (NM_015548.2,14612-14630).
gcgatggatatattgacta

SEQ ID NO: 115805 - DNA, 19 bp, Homo sapiens
  siRNA target sequence for BPAG1 (NM_015548.2,14618-14636).
gatatattgactactatga

SEQ ID NO: 115806 - DNA, 19 bp, Homo sapiens
  siRNA target sequence for BPAG1 (NM_015548.2,14645-14663).
cagcccttcacccaaataa

SEQ ID NO: 115807 - DNA, 19 bp, Homo sapiens
  siRNA target sequence for BPAG1 (NM_015548.2,14684-14702).
cagatgccgacaaaatcga

SEQ ID NO: 115808 - DNA, 19 bp, Homo sapiens
  siRNA target sequence for BPAG1 (NM_015548.2,14717-14735).
ggcaggtagctaagtgtaa

SEQ ID NO: 115809 - DNA, 19 bp, Homo sapiens
  siRNA target sequence for BPAG1 (NM_015548.2,14741-14759).
caaagcgatttcaagttga

SEQ ID NO: 115810 - DNA, 19 bp, Homo sapiens
  siRNA target sequence for BPAG1 (NM_015548.2,14880-14898).
ggcacttgatgagttctta

SEQ ID NO: 115811 - DNA, 19 bp, Homo sapiens
  siRNA target sequence for BPAG1 (NM_015548.2,14884-14902).
cttgatgagttcttagtga

SEQ ID NO: 115812 - DNA, 19 bp, Homo sapiens
  siRNA target sequence for BPAG1 (NM_015548.2,14944-14962).
ctgcgtgagaagttcattt

SEQ ID NO: 115813 - DNA, 19 bp, Homo sapiens
  siRNA target sequence for BPAG1 (NM_015548.2,14946-14964).
gcgtgagaagttcatttta

SEQ ID NO: 115814 - DNA, 19 bp, Homo sapiens
  siRNA target sequence for BPAG1 (NM_015548.2,15120-15138).
gattctccatcctttaaca

SEQ ID NO: 115815 - DNA, 19 bp, Homo sapiens
  siRNA target sequence for BPAG1 (NM_015548.2,15139-15157).
cgcaattatggtaaaccat

SEQ ID NO: 115816 - DNA, 19 bp, Homo sapiens
  siRNA target sequence for BPAG1 (NM_015548.2,15148-15166).
ggtaaaccatggttgacaa

SEQ ID NO: 115817 - DNA, 19 bp, Homo sapiens
  siRNA target sequence for BPAG1 (NM_015548.2,15333-15351).
cagagtccgaacacagttt

SEQ ID NO: 115818 - DNA, 19 bp, Homo sapiens
  siRNA target sequence for BPAG1 (NM_015548.2,15539-15557).
ccacagcgaagccttcaaa

SEQ ID NO: 115819 - DNA, 19 bp, Homo sapiens
  siRNA target sequence for BPAG1 (NM_020388.2,3786-3804).
gattgcaggcaccattgat

SEQ ID NO: 115820 - DNA, 19 bp, Homo sapiens
  siRNA target sequence for BPAG1 (NM_020388.2,3812-3830).
ctggagaagtcctttcagt

SEQ ID NO: 115821 - DNA, 19 bp, Homo sapiens
  siRNA target sequence for BPAG1 (NM_020388.2,3859-3877).
gactatgacacaggaatta

SEQ ID NO: 115822 - DNA, 19 bp, Homo sapiens
  siRNA target sequence for BPAG1 (NM_020388.2,3888-3906).
gacacagctaatgatttct

SEQ ID NO: 115823 - DNA, 19 bp, Homo sapiens
  siRNA target sequence for BPAG1 (NM_020388.2,3908-3926).
gtctaatttcaccagaatt

SEQ ID NO: 115824 - DNA, 19 bp, Homo sapiens
  siRNA target sequence for BPAG1 (NM_020388.2,3954-3972).
caaaagtcatggccttatt

SEQ ID NO: 115825 - DNA, 19 bp, Homo sapiens
  siRNA target sequence for BPAG1 (NM_020388.2,3959-3977).
gtcatggccttattgatga

SEQ ID NO: 115826 - DNA, 19 bp, Homo sapiens
  siRNA target sequence for BPAG1 (NM_020388.2,3990-4008).
ccaactcaaagaactaagt

SEQ ID NO: 115827 - DNA, 19 bp, Homo sapiens
  siRNA target sequence for BPAG1 (NM_020388.2,3991-4009).
caactcaaagaactaagta

SEQ ID NO: 115828 - DNA, 19 bp, Homo sapiens
  siRNA target sequence for BPAG1 (NM_020388.2,4035-4053).
gtcacctaccacaattcca

SEQ ID NO: 115829 - DNA, 19 bp, Homo sapiens
  siRNA target sequence for BPAG1 (NM_020388.2,4066-4084).
ctagctcaaagcatgataa

SEQ ID NO: 115830 - DNA, 19 bp, Homo sapiens
  siRNA target sequence for BPAG1 (NM_020388.2,4076-4094).
gcatgataacagaatccat

SEQ ID NO: 115831 - DNA, 19 bp, Homo sapiens
  siRNA target sequence for BPAG1 (NM_020388.2,4092-4110).
catggccatcaaagttctt

SEQ ID NO: 115832 - DNA, 19 bp, Homo sapiens
  siRNA target sequence for BPAG1 (NM_020388.2,4124-4142).
ctacaggctctctggttat

SEQ ID NO: 115833 - DNA, 19 bp, Homo sapiens
  siRNA target sequence for BPAG1 (NM_020388.2,4167-4185).
cctacagaaggctttccaa

SEQ ID NO: 115834 - DNA, 19 bp, Homo sapiens
  siRNA target sequence for BPAG1 (NM_020388.2,4194-4212).
ggtttcctcagcattattt

SEQ ID NO: 115835 - DNA, 19 bp, Homo sapiens
  siRNA target sequence for BPAG1 (NM_020388.2,4268-4286).
ctgagaaggtttctttaat

SEQ ID NO: 115836 - DNA, 19 bp, Homo sapiens
  siRNA target sequence for BPAG1 (NM_020388.2,4288-4306).
gatatggtacaaagaagta

SEQ ID NO: 115837 - DNA, 19 bp, Homo sapiens
  siRNA target sequence for BPAG1 (NM_020388.2,4349-4367).
cacaagaaggaggtagaat

SEQ ID NO: 115838 - DNA, 19 bp, Homo sapiens
  siRNA target sequence for BPAG1 (NM_020388.2,4351-4369).
caagaaggaggtagaataa

SEQ ID NO: 115839 - DNA, 19 bp, Homo sapiens
  siRNA target sequence for BPAG1 (NM_020388.2,4429-4447).
cgtgaaaccatgtttaggt

SEQ ID NO: 115840 - DNA, 19 bp, Homo sapiens
  siRNA target sequence for BPAG1 (NM_020388.2,4430-4448).
gtgaaaccatgtttaggtt

SEQ ID NO: 115841 - DNA, 19 bp, Homo sapiens
  siRNA target sequence for BPAG1 (NM_020388.2,4437-4455).
catgtttaggttgttaagt

SEQ ID NO: 115842 - DNA, 19 bp, Homo sapiens
  siRNA target sequence for BPAG1 (NM_020388.2,4471-4489).
ggaggtctgatcaattcca

SEQ ID NO: 115843 - DNA, 19 bp, Homo sapiens
  siRNA target sequence for BPAG1 (NM_020388.2,4553-4571).
ctagcagtatcctcacata

SEQ ID NO: 115844 - DNA, 19 bp, Homo sapiens
  siRNA target sequence for BPAG1 (NM_020388.2,4564-4582).
ctcacatatcaggttcaaa

SEQ ID NO: 115845 - DNA, 19 bp, Homo sapiens
  siRNA target sequence for BPAG1 (NM_020388.2,4566-4584).
cacatatcaggttcaaact

SEQ ID NO: 115846 - DNA, 19 bp, Homo sapiens
  siRNA target sequence for BPAG1 (NM_020388.2,4605-4623).
ccctgccaagcgtttaact

SEQ ID NO: 115847 - DNA, 19 bp, Homo sapiens
  siRNA target sequence for BPAG1 (NM_020388.2,4607-4625).
ctgccaagcgtttaactgt

SEQ ID NO: 115848 - DNA, 19 bp, Homo sapiens
  siRNA target sequence for BPAG1 (NM_020388.2,4634-4652).
cagtacagtgtgatttaat

SEQ ID NO: 115849 - DNA, 19 bp, Homo sapiens
  siRNA target sequence for BPAG1 (NM_020388.2,4693-4711).
ggctatgttggactcattt

SEQ ID NO: 115850 - DNA, 19 bp, Homo sapiens
  siRNA target sequence for BPAG1 (NM_020388.2,4712-4730).
ggccccattctggtgaaat

SEQ ID NO: 115851 - DNA, 19 bp, Homo sapiens
  siRNA target sequence for BPAG1 (NM_020388.2,4713-4731).
gccccattctggtgaaata

SEQ ID NO: 115852 - DNA, 19 bp, Homo sapiens
  siRNA target sequence for BPAG1 (NM_020388.2,4714-4732).
ccccattctggtgaaatat

SEQ ID NO: 115853 - DNA, 19 bp, Homo sapiens
  siRNA target sequence for BPAG1 (NM_020388.2,4726-4744).
gaaatatttcccacatcat

SEQ ID NO: 115854 - DNA, 19 bp, Homo sapiens
  siRNA target sequence for BPAG1 (NM_020388.2,4752-4770).
gcagcaagaattgattaca

SEQ ID NO: 115855 - DNA, 19 bp, Homo sapiens
  siRNA target sequence for BPAG1 (NM_020388.2,4792-4810).
ctgaatggcagacaaaaaa

SEQ ID NO: 115856 - DNA, 19 bp, Homo sapiens
  siRNA target sequence for BPAG1 (NM_020388.2,4835-4853).
gttctcaagtcattggttt

SEQ ID NO: 115857 - DNA, 19 bp, Homo sapiens
  siRNA target sequence for BPAG1 (NM_020388.2,4859-4877).
ctgctaaacagctaggaat

SEQ ID NO: 115858 - DNA, 19 bp, Homo sapiens
  siRNA target sequence for BPAG1 (NM_020388.2,4867-4885).
cagctaggaattatagaca

SEQ ID NO: 115859 - DNA, 19 bp, Homo sapiens
  siRNA target sequence for BPAG1 (NM_020388.2,4873-4891).
ggaattatagacaacaaca

SEQ ID NO: 115860 - DNA, 19 bp, Homo sapiens
  siRNA target sequence for BPAG1 (NM_020388.2,4887-4905).
caacacagcatcaatttta

SEQ ID NO: 115861 - DNA, 19 bp, Homo sapiens
  siRNA target sequence for BPAG1 (NM_020388.2,4977-4995).
gctctctttttgtaaattt

SEQ ID NO: 115862 - DNA, 19 bp, Homo sapiens
  siRNA target sequence for BPAG1 (NM_020388.2,5000-5018).
cctccacagttcatgatta

SEQ ID NO: 115863 - DNA, 19 bp, Homo sapiens
  siRNA target sequence for BPAG1 (NM_020388.2,5118-5136).
ctatatggatgcaaacaca

SEQ ID NO: 115864 - DNA, 19 bp, Homo sapiens
  siRNA target sequence for BPAG1 (NM_020388.2,5198-5216).
gctgtcatgcagaatttga

SEQ ID NO: 115865 - DNA, 19 bp, Homo sapiens
  siRNA target sequence for BPAG1 (NM_020388.2,5236-5254).
gaatgtctcgatgtcttaa

SEQ ID NO: 115866 - DNA, 19 bp, Homo sapiens
  siRNA target sequence for BPAG1 (NM_020388.2,5311-5329).
gctacaccaagtagtttca

SEQ ID NO: 115867 - DNA, 19 bp, Homo sapiens
  siRNA target sequence for BPAG1 (NM_020388.2,5378-5396).
gaaagtgtgctatagatga

SEQ ID NO: 115868 - DNA, 19 bp, Homo sapiens
  siRNA target sequence for BPAG1 (NM_020388.2,5450-5468).
gaaaactggcaagtacaat

SEQ ID NO: 115869 - DNA, 19 bp, Homo sapiens
  siRNA target sequence for BPAG1 (NM_020388.2,5457-5475).
ggcaagtacaatatcaatt

SEQ ID NO: 115870 - DNA, 19 bp, Homo sapiens
  siRNA target sequence for BPAG1 (NM_020388.2,5459-5477).
caagtacaatatcaattga

SEQ ID NO: 115871 - DNA, 19 bp, Homo sapiens
  siRNA target sequence for BPAG1 (NM_020388.2,5471-5489).
caattgatcctaaagttaa

SEQ ID NO: 115872 - DNA, 19 bp, Homo sapiens
  siRNA target sequence for BPAG1 (NM_020388.2,5476-5494).
gatcctaaagttaacagtt

SEQ ID NO: 115873 - DNA, 19 bp, Homo sapiens
  siRNA target sequence for BPAG1 (NM_020388.2,5509-5527).
gttcccagtctcatatcat

SEQ ID NO: 115874 - DNA, 19 bp, Homo sapiens
  siRNA target sequence for BPAG1 (NM_020388.2,5512-5530).
cccagtctcatatcatatt

SEQ ID NO: 115875 - DNA, 19 bp, Homo sapiens
  siRNA target sequence for BPAG1 (NM_020388.2,5513-5531).
ccagtctcatatcatattt

SEQ ID NO: 115876 - DNA, 19 bp, Homo sapiens
  siRNA target sequence for BPAG1 (NM_020388.2,5514-5532).
cagtctcatatcatattta

SEQ ID NO: 115877 - DNA, 19 bp, Homo sapiens
  siRNA target sequence for BPAG1 (NM_020388.2,5548-5566).
gcagacattagcatgctta

SEQ ID NO: 115878 - DNA, 19 bp, Homo sapiens
  siRNA target sequence for BPAG1 (NM_020388.2,5551-5569).
gacattagcatgcttagaa

SEQ ID NO: 115879 - DNA, 19 bp, Homo sapiens
  siRNA target sequence for BPAG1 (NM_020388.2,5553-5571).
cattagcatgcttagaagt

SEQ ID NO: 115880 - DNA, 19 bp, Homo sapiens
  siRNA target sequence for BPAG1 (NM_020388.2,5609-5627).
gccgagtggaaacaaatga

SEQ ID NO: 115881 - DNA, 19 bp, Homo sapiens
  siRNA target sequence for BPAG1 (NM_020388.2,5632-5650).
gcaaatgaatgtagtcatt

SEQ ID NO: 115882 - DNA, 19 bp, Homo sapiens
  siRNA target sequence for BPAG1 (NM_020388.2,5762-5780).
gggattcacctatctttga

SEQ ID NO: 115883 - DNA, 19 bp, Homo sapiens
  siRNA target sequence for BPAG1 (NM_020388.2,5764-5782).
gattcacctatctttgact

SEQ ID NO: 115884 - DNA, 19 bp, Homo sapiens
  siRNA target sequence for BPAG1 (NM_020388.2,5793-5811).
gctaagtgccttgttaagt

SEQ ID NO: 115885 - DNA, 19 bp, Homo sapiens
  siRNA target sequence for BPAG1 (NM_020388.2,5800-5818).
gccttgttaagtcatgata

SEQ ID NO: 115886 - DNA, 19 bp, Homo sapiens
  siRNA target sequence for BPAG1 (NM_020388.2,5801-5819).
ccttgttaagtcatgataa

SEQ ID NO: 115887 - DNA, 19 bp, Homo sapiens
  siRNA target sequence for BPAG1 (NM_020388.2,5802-5820).
cttgttaagtcatgataaa

SEQ ID NO: 115888 - DNA, 19 bp, Homo sapiens
  siRNA target sequence for BPAG1 (NM_020388.2,5829-5847).
cagtcagggaagttttaat

SEQ ID NO: 115889 - DNA, 19 bp, Homo sapiens
  siRNA target sequence for BPAG1 (NM_020388.2,5831-5849).
gtcagggaagttttaatga

SEQ ID NO: 115890 - DNA, 19 bp, Homo sapiens
  siRNA target sequence for BPAG1 (NM_020388.2,5833-5851).
cagggaagttttaatgata

SEQ ID NO: 115891 - DNA, 19 bp, Homo sapiens
  siRNA target sequence for BPAG1 (NM_020388.2,5884-5902).
gaagccccagccttatcat

SEQ ID NO: 115892 - DNA, 19 bp, Homo sapiens
  siRNA target sequence for BPAG1 (NM_020388.2,5889-5907).
cccagccttatcattcagt

SEQ ID NO: 115893 - DNA, 19 bp, Homo sapiens
  siRNA target sequence for BPAG1 (NM_020388.2,5895-5913).
cttatcattcagtgacaaa

SEQ ID NO: 115894 - DNA, 19 bp, Homo sapiens
  siRNA target sequence for BPAG1 (NM_020388.2,5916-5934).
catgttgtcaggtcaaaga

SEQ ID NO: 115895 - DNA, 19 bp, Homo sapiens
  siRNA target sequence for BPAG1 (NM_020388.2,5965-5983).
ggaattgcagctattaaca

SEQ ID NO: 115896 - DNA, 19 bp, Homo sapiens
  siRNA target sequence for BPAG1 (NM_020388.2,5972-5990).
cagctattaacatcagttt

SEQ ID NO: 115897 - DNA, 19 bp, Homo sapiens
  siRNA target sequence for BPAG1 (NM_020388.2,6032-6050).
ctagtaatcctcaagtaca

SEQ ID NO: 115898 - DNA, 19 bp, Homo sapiens
  siRNA target sequence for BPAG1 (NM_020388.2,6035-6053).
gtaatcctcaagtacaata

SEQ ID NO: 115899 - DNA, 19 bp, Homo sapiens
  siRNA target sequence for BPAG1 (NM_020388.2,6144-6162).
gtctgaaatagaagagtat

SEQ ID NO: 115900 - DNA, 19 bp, Homo sapiens
  siRNA target sequence for BPAG1 (NM_020388.2,6174-6192).
gactccagggggtgatact

SEQ ID NO: 115901 - DNA, 19 bp, Homo sapiens
  siRNA target sequence for BPAG1 (NM_020388.2,6201-6219).
cattgtgtctcttacttgt

SEQ ID NO: 115902 - DNA, 19 bp, Homo sapiens
  siRNA target sequence for BPAG1 (NM_020388.2,6243-6261).
catcagtgctagtgactat

SEQ ID NO: 115903 - DNA, 19 bp, Homo sapiens
  siRNA target sequence for BPAG1 (NM_020388.2,6266-6284).
cgtcactgctgaatgatca

SEQ ID NO: 115904 - DNA, 19 bp, Homo sapiens
  siRNA target sequence for BPAG1 (NM_020388.2,6510-6528).
ggcaccagttggtagctta

SEQ ID NO: 115905 - DNA, 19 bp, Homo sapiens
  siRNA target sequence for BPAG1 (NM_020388.2,6511-6529).
gcaccagttggtagcttaa

SEQ ID NO: 115906 - DNA, 19 bp, Homo sapiens
  siRNA target sequence for BPAG1 (NM_020388.2,6515-6533).
cagttggtagcttaagtgt

SEQ ID NO: 115907 - DNA, 19 bp, Homo sapiens
  siRNA target sequence for BPAG1 (NM_020388.2,6564-6582).
ccttatggatgttgagaaa

SEQ ID NO: 115908 - DNA, 19 bp, Homo sapiens
  siRNA target sequence for BPAG1 (NM_020388.2,6652-6670).
ctggaaactggatcagaaa

SEQ ID NO: 115909 - DNA, 19 bp, Homo sapiens
  siRNA target sequence for BPAG1 (NM_020388.2,6695-6713).
gtgatgaatctgactcatt

SEQ ID NO: 115910 - DNA, 19 bp, Homo sapiens
  siRNA target sequence for BPAG1 (NM_020388.2,6708-6726).
ctcattgactgattatgat

SEQ ID NO: 115911 - DNA, 19 bp, Homo sapiens
  siRNA target sequence for BPAG1 (NM_020388.2,6826-6844).
cactccgatactgatcatt

SEQ ID NO: 115912 - DNA, 19 bp, Homo sapiens
  siRNA target sequence for BPAG1 (NM_020388.2,6828-6846).
ctccgatactgatcattta

SEQ ID NO: 115913 - DNA, 19 bp, Homo sapiens
  siRNA target sequence for BPAG1 (NM_020388.2,6830-6848).
ccgatactgatcatttaga

SEQ ID NO: 115914 - DNA, 19 bp, Homo sapiens
  siRNA target sequence for BPAG1 (NM_020388.2,6831-6849).
cgatactgatcatttagat

SEQ ID NO: 115915 - DNA, 19 bp, Homo sapiens
  siRNA target sequence for BPAG1 (NM_020388.2,6836-6854).
ctgatcatttagattctat

SEQ ID NO: 115916 - DNA, 19 bp, Homo sapiens
  siRNA target sequence for BPAG1 (NM_020388.2,6941-6959).
gaggtataagagatgagaa

SEQ ID NO: 115917 - DNA, 19 bp, Homo sapiens
  siRNA target sequence for BPAG1 (NM_020388.2,6986-7004).
ctgaagatatggatatcca

SEQ ID NO: 115918 - DNA, 19 bp, Homo sapiens
  siRNA target sequence for BPAG1 (NM_020388.2,7058-7076).
caatgattcttctggataa

SEQ ID NO: 115919 - DNA, 19 bp, Homo sapiens
  siRNA target sequence for BPAG1 (NM_020388.2,7080-7098).
gcacagttgtagctcttta

SEQ ID NO: 115920 - DNA, 19 bp, Homo sapiens
  siRNA target sequence for BPAG1 (NM_020388.2,7088-7106).
gtagctctttagaaaaaca

SEQ ID NO: 115921 - DNA, 19 bp, Homo sapiens
  siRNA target sequence for BPAG1 (NM_020388.2,7173-7191).
ccttccagaatatacaact

SEQ ID NO: 115922 - DNA, 19 bp, Homo sapiens
  siRNA target sequence for BPAG1 (NM_020388.2,7249-7267).
gtattgccgcctatcatta

SEQ ID NO: 115923 - DNA, 19 bp, Homo sapiens
  siRNA target sequence for BPAG1 (NM_020388.2,7255-7273).
ccgcctatcattaaagaca

SEQ ID NO: 115924 - DNA, 19 bp, Homo sapiens
  siRNA target sequence for BPAG1 (NM_020388.2,7272-7290).
cactgaatctgaaaaaact

SEQ ID NO: 115925 - DNA, 19 bp, Homo sapiens
  siRNA target sequence for BPAG1 (NM_020388.2,7295-7313).
gccctgcaagtatttcaca

SEQ ID NO: 115926 - DNA, 19 bp, Homo sapiens
  siRNA target sequence for BPAG1 (NM_020388.2,7300-7318).
gcaagtatttcacatgata

SEQ ID NO: 115927 - DNA, 19 bp, Homo sapiens
  siRNA target sequence for BPAG1 (NM_020388.2,7357-7375).
ctagcaaacacaaaggtta

SEQ ID NO: 115928 - DNA, 19 bp, Homo sapiens
  siRNA target sequence for BPAG1 (NM_020388.2,7388-7406).
ggtcagaattgccagaatt

SEQ ID NO: 115929 - DNA, 19 bp, Homo sapiens
  siRNA target sequence for BPAG1 (NM_020388.2,7466-7484).
catctcttgatcacatcat

SEQ ID NO: 115930 - DNA, 19 bp, Homo sapiens
  siRNA target sequence for BPAG1 (NM_020388.2,7487-7505).
gtactgagcctgatttaat

SEQ ID NO: 115931 - DNA, 19 bp, Homo sapiens
  siRNA target sequence for BPAG1 (NM_020388.2,7492-7510).
gagcctgatttaataggaa

SEQ ID NO: 115932 - DNA, 19 bp, Homo sapiens
  siRNA target sequence for BPAG1 (NM_020388.2,7571-7589).
gaaatggaagcgatctcat

SEQ ID NO: 115933 - DNA, 19 bp, Homo sapiens
  siRNA target sequence for BPAG1 (NM_020388.2,7710-7728).
caaacttttgcctggtaaa

SEQ ID NO: 115934 - DNA, 19 bp, Homo sapiens
  siRNA target sequence for BPAG1 (NM_020388.2,7733-7751).
caagggatagtttcaagtt

SEQ ID NO: 115935 - DNA, 19 bp, Homo sapiens
  siRNA target sequence for BPAG1 (NM_020388.2,7737-7755).
ggatagtttcaagttaatt

SEQ ID NO: 115936 - DNA, 19 bp, Homo sapiens
  siRNA target sequence for BPAG1 (NM_020388.2,7738-7756).
gatagtttcaagttaatta

SEQ ID NO: 115937 - DNA, 19 bp, Homo sapiens
  siRNA target sequence for BPAG1 (NM_020388.2,7810-7828).
ggaagccttaaaaaagcaa

SEQ ID NO: 115938 - DNA, 19 bp, Homo sapiens
  siRNA target sequence for BPAG1 (NM_020388.2,7883-7901).
ctgttcagtttgagaatct

SEQ ID NO: 115939 - DNA, 19 bp, Homo sapiens
  siRNA target sequence for BPAG1 (NM_020388.2,7967-7985).
cgtgggaagggaatacaca

SEQ ID NO: 115940 - DNA, 19 bp, Homo sapiens
  siRNA target sequence for BPAG1 (NM_020388.2,7968-7986).
gtgggaagggaatacacat

SEQ ID NO: 115941 - DNA, 19 bp, Homo sapiens
  siRNA target sequence for BPAG1 (NM_020388.2,7970-7988).
gggaagggaatacacattt

SEQ ID NO: 115942 - DNA, 19 bp, Homo sapiens
  siRNA target sequence for BPAG1 (NM_020388.2,8020-8038).
gagcttgatctgtttactt

SEQ ID NO: 115943 - DNA, 19 bp, Homo sapiens
  siRNA target sequence for BPAG1 (NM_020388.2,8095-8113).
gatgtcccaagccatgttt

SEQ ID NO: 115944 - DNA, 19 bp, Homo sapiens
  siRNA target sequence for BPAG1 (NM_020388.2,8101-8119).
ccaagccatgttttaataa

SEQ ID NO: 115945 - DNA, 19 bp, Homo sapiens
  siRNA target sequence for BPAG1 (NM_020388.2,8177-8195).
ccactagtacccaaaaaga

SEQ ID NO: 115946 - DNA, 19 bp, Homo sapiens
  siRNA target sequence for BPAG1 (NM_020388.2,8194-8212).
gactcacctcttaatgaca

SEQ ID NO: 115947 - DNA, 19 bp, Homo sapiens
  siRNA target sequence for BPAG1 (NM_020388.2,8198-8216).
cacctcttaatgacatgat

SEQ ID NO: 115948 - DNA, 19 bp, Homo sapiens
  siRNA target sequence for BPAG1 (NM_020388.2,8223-8241).
caatgatctttgtagtaaa

SEQ ID NO: 115949 - DNA, 19 bp, Homo sapiens
  siRNA target sequence for BPAG1 (NM_020388.2,8227-8245).
gatctttgtagtaaagaaa

SEQ ID NO: 115950 - DNA, 19 bp, Homo sapiens
  siRNA target sequence for BPAG1 (NM_020388.2,8277-8295).
gttcacaccagaaagtatt

SEQ ID NO: 115951 - DNA, 19 bp, Homo sapiens
  siRNA target sequence for BPAG1 (NM_020388.2,8296-8314).
gaagccacactttcaatat

SEQ ID NO: 115952 - DNA, 19 bp, Homo sapiens
  siRNA target sequence for BPAG1 (NM_020388.2,8299-8317).
gccacactttcaatattat

SEQ ID NO: 115953 - DNA, 19 bp, Homo sapiens
  siRNA target sequence for BPAG1 (NM_020388.2,8309-8327).
caatattatctcgtaaaca

SEQ ID NO: 115954 - DNA, 19 bp, Homo sapiens
  siRNA target sequence for BPAG1 (NM_020388.2,8335-8353).
gatgttgggaaaaatgatt

SEQ ID NO: 115955 - DNA, 19 bp, Homo sapiens
  siRNA target sequence for BPAG1 (NM_020388.2,8361-8379).
gtcggagcggtgtgcaaat

SEQ ID NO: 115956 - DNA, 19 bp, Homo sapiens
  siRNA target sequence for BPAG1 (NM_020388.2,8364-8382).
ggagcggtgtgcaaatgga

SEQ ID NO: 115957 - DNA, 19 bp, Homo sapiens
  siRNA target sequence for BPAG1 (NM_020388.2,8365-8383).
gagcggtgtgcaaatggat

SEQ ID NO: 115958 - DNA, 19 bp, Homo sapiens
  siRNA target sequence for BPAG1 (NM_020388.2,8367-8385).
gcggtgtgcaaatggatta

SEQ ID NO: 115959 - DNA, 19 bp, Homo sapiens
  siRNA target sequence for BPAG1 (NM_020388.2,8515-8533).
gttcagattcctgaattgt

SEQ ID NO: 115960 - DNA, 19 bp, Homo sapiens
  siRNA target sequence for BPAG1 (NM_020388.2,8548-8566).
gaggatgtaaaggatatct

SEQ ID NO: 115961 - DNA, 19 bp, Homo sapiens
  siRNA target sequence for BPAG1 (NM_020388.2,8550-8568).
ggatgtaaaggatatctta

SEQ ID NO: 115962 - DNA, 19 bp, Homo sapiens
  siRNA target sequence for BPAG1 (NM_020388.2,8576-8594).
ggttgaaagaaggtcatat

SEQ ID NO: 115963 - DNA, 19 bp, Homo sapiens
  siRNA target sequence for BPAG1 (NM_020388.2,8630-8648).
cagacactaaaattttaat

SEQ ID NO: 115964 - DNA, 19 bp, Homo sapiens
  siRNA target sequence for BPAG1 (NM_020388.2,8672-8690).
ccacatcacagttggtaaa

SEQ ID NO: 115965 - DNA, 19 bp, Homo sapiens
  siRNA target sequence for BPAG1 (NM_020388.2,8673-8691).
cacatcacagttggtaaat

SEQ ID NO: 115966 - DNA, 19 bp, Homo sapiens
  siRNA target sequence for BPAG1 (NM_020388.2,8704-8722).
gtgcccagcgactctcaaa

SEQ ID NO: 115967 - DNA, 19 bp, Homo sapiens
  siRNA target sequence for BPAG1 (NM_020388.2,8707-8725).
cccagcgactctcaaatga

SEQ ID NO: 115968 - DNA, 19 bp, Homo sapiens
  siRNA target sequence for BPAG1 (NM_020388.2,8709-8727).
cagcgactctcaaatgagt

SEQ ID NO: 115969 - DNA, 19 bp, Homo sapiens
  siRNA target sequence for BPAG1 (NM_020388.2,8737-8755).
ggagtttcccccatgacta

SEQ ID NO: 115970 - DNA, 19 bp, Homo sapiens
  siRNA target sequence for BPAG1 (NM_020388.2,8738-8756).
gagtttcccccatgactaa

SEQ ID NO: 115971 - DNA, 19 bp, Homo sapiens
  siRNA target sequence for BPAG1 (NM_020388.2,8748-8766).
catgactaactcatcagaa

SEQ ID NO: 115972 - DNA, 19 bp, Homo sapiens
  siRNA target sequence for BPAG1 (NM_020388.2,8753-8771).
ctaactcatcagaactaaa

SEQ ID NO: 115973 - DNA, 19 bp, Homo sapiens
  siRNA target sequence for BPAG1 (NM_020388.2,8814-8832).
gtctgagcttctccttaat

SEQ ID NO: 115974 - DNA, 19 bp, Homo sapiens
  siRNA target sequence for BPAG1 (NM_020388.2,8818-8836).
gagcttctccttaatatat

SEQ ID NO: 115975 - DNA, 19 bp, Homo sapiens
  siRNA target sequence for BPAG1 (NM_020388.2,8924-8942).
gaggcattacgtctaaagt

SEQ ID NO: 115976 - DNA, 19 bp, Homo sapiens
  siRNA target sequence for BPAG1 (NM_020388.2,8927-8945).
gcattacgtctaaagtact

SEQ ID NO: 115977 - DNA, 19 bp, Homo sapiens
  siRNA target sequence for BPAG1 (NM_020388.2,8928-8946).
cattacgtctaaagtactt

SEQ ID NO: 115978 - DNA, 19 bp, Homo sapiens
  siRNA target sequence for BPAG1 (NM_020388.2,8977-8995).
ctgcttgctgatggatatt

SEQ ID NO: 115979 - DNA, 19 bp, Homo sapiens
  siRNA target sequence for BPAG1 (NM_020388.2,8979-8997).
gcttgctgatggatattca

SEQ ID NO: 115980 - DNA, 19 bp, Homo sapiens
  siRNA target sequence for BPAG1 (NM_020388.2,9038-9056).
gttctacatctgagatgat

SEQ ID NO: 115981 - DNA, 19 bp, Homo sapiens
  siRNA target sequence for BPAG1 (NM_020388.2,9070-9088).
catattcttggtgatatta

SEQ ID NO: 115982 - DNA, 19 bp, Homo sapiens
  siRNA target sequence for BPAG1 (NM_020388.2,9108-9126).
ctattctcctaatttagaa

SEQ ID NO: 115983 - DNA, 19 bp, Homo sapiens
  siRNA target sequence for BPAG1 (NM_020388.2,9192-9210).
gctcaaggatctgtgtaat

SEQ ID NO: 115984 - DNA, 19 bp, Homo sapiens
  siRNA target sequence for BPAG1 (NM_183380.1,667-685).
catgaaggttcgaaaacat

SEQ ID NO: 115985 - DNA, 19 bp, Homo sapiens
  siRNA target sequence for BPAG1 (NM_183380.1,706-724).
cttaagggatggacacaat

SEQ ID NO: 115986 - DNA, 19 bp, Homo sapiens
  siRNA target sequence for BPAG1 (NM_183380.1,776-794).
ggtcggatgcgttttcaca

SEQ ID NO: 115987 - DNA, 19 bp, Homo sapiens
  siRNA target sequence for BPAG1 (NM_183380.1,834-852).
gacgccaggtgaaattagt

SEQ ID NO: 115988 - DNA, 19 bp, Homo sapiens
  siRNA target sequence for BPAG1 (NM_183380.1,968-986).
gatatgtctgcaaaagaga

SEQ ID NO: 115989 - DNA, 19 bp, Homo sapiens
  siRNA target sequence for BPAG1 (NM_183380.1,1025-1043).
gctggaattcggtgtgaaa

SEQ ID NO: 115990 - DNA, 19 bp, Homo sapiens
  siRNA target sequence for BPAG1 (NM_183380.1,1026-1044).
ctggaattcggtgtgaaaa

SEQ ID NO: 115991 - DNA, 19 bp, Homo sapiens
  siRNA target sequence for BPAG1 (NM_183380.1,1034-1052).
cggtgtgaaaatttcacta

SEQ ID NO: 115992 - DNA, 19 bp, Homo sapiens
  siRNA target sequence for BPAG1 (NM_183380.1,1105-1123).
ggacctgatagatatgaat

SEQ ID NO: 115993 - DNA, 19 bp, Homo sapiens
  siRNA target sequence for BPAG1 (NM_183380.1,1120-1138).
gaatactgttgctgttcaa

SEQ ID NO: 115994 - DNA, 19 bp, Homo sapiens
  siRNA target sequence for BPAG1 (NM_183380.1,1136-1154).
caaagcaaccttgcaaatt

SEQ ID NO: 115995 - DNA, 19 bp, Homo sapiens
  siRNA target sequence for BPAG1 (NM_183380.1,1223-1241).
gtctcctcacctgatgaaa

SEQ ID NO: 115996 - DNA, 19 bp, Homo sapiens
  siRNA target sequence for BPAG1 (NM_183380.1,1228-1246).
ctcacctgatgaaaaatca

SEQ ID NO: 115997 - DNA, 19 bp, Homo sapiens
  siRNA target sequence for BPAG1 (NM_183380.1,1258-1276).
cgtgtcatctctctatgat

SEQ ID NO: 115998 - DNA, 19 bp, Homo sapiens
  siRNA target sequence for BPAG1 (NM_183380.1,1268-1286).
ctctatgatgcatttccta

SEQ ID NO: 115999 - DNA, 19 bp, Homo sapiens
  siRNA target sequence for BPAG1 (NM_183380.1,1363-1381).
ctacctcatccaatggatt

SEQ ID NO: 116000 - DNA, 19 bp, Homo sapiens
  siRNA target sequence for BPAG1 (NM_183380.1,1385-1403).
caccatgtgaccacaatgt

SEQ ID NO: 116001 - DNA, 19 bp, Homo sapiens
  siRNA target sequence for BPAG1 (NM_183380.1,1404-1422).
ctgagagaacatttcctaa

SEQ ID NO: 116002 - DNA, 19 bp, Homo sapiens
  siRNA target sequence for BPAG1 (NM_183380.1,1518-1536).
gtctatataaattattaga

SEQ ID NO: 116003 - DNA, 19 bp, Homo sapiens
  siRNA target sequence for BPAG1 (NM_183380.1,1561-1579).
caagctccttcaaggttat

SEQ ID NO: 116004 - DNA, 19 bp, Homo sapiens
  siRNA target sequence for BPAG1 (NM_183380.1,1642-1660).
ggcccttcgtccagaagta

SEQ ID NO: 116005 - DNA, 19 bp, Homo sapiens
  siRNA target sequence for BPAG1 (NM_183380.1,1644-1662).
cccttcgtccagaagtaga

SEQ ID NO: 116006 - DNA, 19 bp, Homo sapiens
  siRNA target sequence for BPAG1 (NM_183380.1,1645-1663).
ccttcgtccagaagtagaa

SEQ ID NO: 116007 - DNA, 19 bp, Homo sapiens
  siRNA target sequence for C6orf209 (NM_018368.2,149-167).
gtgatcggctggtgcatat

SEQ ID NO: 116008 - DNA, 19 bp, Homo sapiens
  siRNA target sequence for C6orf209 (NM_018368.2,162-180).
gcatattcggcctcttact

SEQ ID NO: 116009 - DNA, 19 bp, Homo sapiens
  siRNA target sequence for C6orf209 (NM_018368.2,163-181).
catattcggcctcttacta

SEQ ID NO: 116010 - DNA, 19 bp, Homo sapiens
  siRNA target sequence for C6orf209 (NM_018368.2,173-191).
ctcttactactggctattt

SEQ ID NO: 116011 - DNA, 19 bp, Homo sapiens
  siRNA target sequence for C6orf209 (NM_018368.2,195-213).
cattctgctggatatatgt

SEQ ID NO: 116012 - DNA, 19 bp, Homo sapiens
  siRNA target sequence for C6orf209 (NM_018368.2,242-260).
gaagttgtctccaccataa

SEQ ID NO: 116013 - DNA, 19 bp, Homo sapiens
  siRNA target sequence for C6orf209 (NM_018368.2,250-268).
ctccaccataacagcaatt

SEQ ID NO: 116014 - DNA, 19 bp, Homo sapiens
  siRNA target sequence for C6orf209 (NM_018368.2,252-270).
ccaccataacagcaatttt

SEQ ID NO: 116015 - DNA, 19 bp, Homo sapiens
  siRNA target sequence for C6orf209 (NM_018368.2,273-291).
ctctagcaattgcacttat

SEQ ID NO: 116016 - DNA, 19 bp, Homo sapiens
  siRNA target sequence for C6orf209 (NM_018368.2,275-293).
ctagcaattgcacttatca

SEQ ID NO: 116017 - DNA, 19 bp, Homo sapiens
  siRNA target sequence for C6orf209 (NM_018368.2,300-318).
cacttctaccagtggatat

SEQ ID NO: 116018 - DNA, 19 bp, Homo sapiens
  siRNA target sequence for C6orf209 (NM_018368.2,302-320).
cttctaccagtggatatat

SEQ ID NO: 116019 - DNA, 19 bp, Homo sapiens
  siRNA target sequence for C6orf209 (NM_018368.2,361-379).
ggactgggctaatgctaat

SEQ ID NO: 116020 - DNA, 19 bp, Homo sapiens
  siRNA target sequence for C6orf209 (NM_018368.2,389-407).
cagattgaggacactgtat

SEQ ID NO: 116021 - DNA, 19 bp, Homo sapiens
  siRNA target sequence for C6orf209 (NM_018368.2,402-420).
ctgtattatacggttacta

SEQ ID NO: 116022 - DNA, 19 bp, Homo sapiens
  siRNA target sequence for C6orf209 (NM_018368.2,404-422).
gtattatacggttactata

SEQ ID NO: 116023 - DNA, 19 bp, Homo sapiens
  siRNA target sequence for C6orf209 (NM_018368.2,459-477).
ggatcccttttgtctactt

SEQ ID NO: 116024 - DNA, 19 bp, Homo sapiens
  siRNA target sequence for C6orf209 (NM_018368.2,531-549).
cggcactcaagtatacttt

SEQ ID NO: 116025 - DNA, 19 bp, Homo sapiens
  siRNA target sequence for C6orf209 (NM_018368.2,591-609).
cctttgttccattgaatgt

SEQ ID NO: 116026 - DNA, 19 bp, Homo sapiens
  siRNA target sequence for C6orf209 (NM_018368.2,649-667).
gtccctatttgaagaactt

SEQ ID NO: 116027 - DNA, 19 bp, Homo sapiens
  siRNA target sequence for C6orf209 (NM_018368.2,680-698).
ggtttagctgcattgtcat

SEQ ID NO: 116028 - DNA, 19 bp, Homo sapiens
  siRNA target sequence for C6orf209 (NM_018368.2,681-699).
gtttagctgcattgtcatt

SEQ ID NO: 116029 - DNA, 19 bp, Homo sapiens
  siRNA target sequence for C6orf209 (NM_018368.2,706-724).
cagttctctgaccttgatt

SEQ ID NO: 116030 - DNA, 19 bp, Homo sapiens
  siRNA target sequence for C6orf209 (NM_018368.2,758-776).
ggcatgtctgcgttacctt

SEQ ID NO: 116031 - DNA, 19 bp, Homo sapiens
  siRNA target sequence for C6orf209 (NM_018368.2,760-778).
catgtctgcgttaccttta

SEQ ID NO: 116032 - DNA, 19 bp, Homo sapiens
  siRNA target sequence for C6orf209 (NM_018368.2,763-781).
gtctgcgttacctttaaat

SEQ ID NO: 116033 - DNA, 19 bp, Homo sapiens
  siRNA target sequence for C6orf209 (NM_018368.2,765-783).
ctgcgttacctttaaatct

SEQ ID NO: 116034 - DNA, 19 bp, Homo sapiens
  siRNA target sequence for C6orf209 (NM_018368.2,767-785).
gcgttacctttaaatctga

SEQ ID NO: 116035 - DNA, 19 bp, Homo sapiens
  siRNA target sequence for C6orf209 (NM_018368.2,768-786).
cgttacctttaaatctgat

SEQ ID NO: 116036 - DNA, 19 bp, Homo sapiens
  siRNA target sequence for C6orf209 (NM_018368.2,793-811).
cactagaagcgctgcttat

SEQ ID NO: 116037 - DNA, 19 bp, Homo sapiens
  siRNA target sequence for C6orf209 (NM_018368.2,801-819).
gcgctgcttatgaacgttt

SEQ ID NO: 116038 - DNA, 19 bp, Homo sapiens
  siRNA target sequence for C6orf209 (NM_018368.2,856-874).
cattcaaacgattaaatca

SEQ ID NO: 116039 - DNA, 19 bp, Homo sapiens
  siRNA target sequence for C6orf209 (NM_018368.2,860-878).
caaacgattaaatcaaaaa

SEQ ID NO: 116040 - DNA, 19 bp, Homo sapiens
  siRNA target sequence for C6orf209 (NM_018368.2,907-925).
ggataaacgcgccttaaaa

SEQ ID NO: 116041 - DNA, 19 bp, Homo sapiens
  siRNA target sequence for C6orf209 (NM_018368.2,935-953).
gaaaggttacgaacactta

SEQ ID NO: 116042 - DNA, 19 bp, Homo sapiens
  siRNA target sequence for C6orf209 (NM_018368.2,939-957).
ggttacgaacacttaagaa

SEQ ID NO: 116043 - DNA, 19 bp, Homo sapiens
  siRNA target sequence for C6orf209 (NM_018368.2,962-980).
gagaggcatttagaattca

SEQ ID NO: 116044 - DNA, 19 bp, Homo sapiens
  siRNA target sequence for C6orf209 (NM_018368.2,1034-1052).
gtctggggaatatttttca

SEQ ID NO: 116045 - DNA, 19 bp, Homo sapiens
  siRNA target sequence for C6orf209 (NM_018368.2,1039-1057).
gggaatatttttcatctta

SEQ ID NO: 116046 - DNA, 19 bp, Homo sapiens
  siRNA target sequence for C6orf209 (NM_018368.2,1084-1102).
cttcttgtcaaatttagat

SEQ ID NO: 116047 - DNA, 19 bp, Homo sapiens
  siRNA target sequence for C6orf209 (NM_018368.2,1178-1196).
cttttgcctttactacaaa

SEQ ID NO: 116048 - DNA, 19 bp, Homo sapiens
  siRNA target sequence for C6orf209 (NM_018368.2,1240-1258).
gtactttatttttacttca

SEQ ID NO: 116049 - DNA, 19 bp, Homo sapiens
  siRNA target sequence for C6orf209 (NM_018368.2,1257-1275).
caatggcaggaattcgaaa

SEQ ID NO: 116050 - DNA, 19 bp, Homo sapiens
  siRNA target sequence for C6orf209 (NM_018368.2,1271-1289).
cgaaatattggcatatggt

SEQ ID NO: 116051 - DNA, 19 bp, Homo sapiens
  siRNA target sequence for C6orf209 (NM_018368.2,1332-1350).
ggccccaagcactcctttt

SEQ ID NO: 116052 - DNA, 19 bp, Homo sapiens
  siRNA target sequence for C6orf209 (NM_018368.2,1345-1363).
cctttttctctgcatgata

SEQ ID NO: 116053 - DNA, 19 bp, Homo sapiens
  siRNA target sequence for C6orf209 (NM_018368.2,1357-1375).
catgatacttctgcttatt

SEQ ID NO: 116054 - DNA, 19 bp, Homo sapiens
  siRNA target sequence for C6orf209 (NM_018368.2,1404-1422).
gtcttgctccccaatatgt

SEQ ID NO: 116055 - DNA, 19 bp, Homo sapiens
  siRNA target sequence for C6orf209 (NM_018368.2,1406-1424).
cttgctccccaatatgtta

SEQ ID NO: 116056 - DNA, 19 bp, Homo sapiens
  siRNA target sequence for C6orf209 (NM_018368.2,1409-1427).
gctccccaatatgttatgt

SEQ ID NO: 116057 - DNA, 19 bp, Homo sapiens
  siRNA target sequence for C6orf209 (NM_018368.2,1410-1428).
ctccccaatatgttatgta

SEQ ID NO: 116058 - DNA, 19 bp, Homo sapiens
  siRNA target sequence for C6orf209 (NM_018368.2,1415-1433).
caatatgttatgtatggaa

SEQ ID NO: 116059 - DNA, 19 bp, Homo sapiens
  siRNA target sequence for C6orf209 (NM_018368.2,1430-1448).
ggaagccaaaattacttaa

SEQ ID NO: 116060 - DNA, 19 bp, Homo sapiens
  siRNA target sequence for C6orf209 (NM_018368.2,1436-1454).
caaaattacttaatagaga

SEQ ID NO: 116061 - DNA, 19 bp, Homo sapiens
  siRNA target sequence for C6orf209 (NM_018368.2,1453-1471).
gactaatataacttctgat

SEQ ID NO: 116062 - DNA, 19 bp, Homo sapiens
  siRNA target sequence for C6orf209 (NM_018368.2,1482-1500).
gcaattcaaccctttctgt

SEQ ID NO: 116063 - DNA, 19 bp, Homo sapiens
  siRNA target sequence for C6orf209 (NM_018368.2,1544-1562).
gttacccggacatacctat

SEQ ID NO: 116064 - DNA, 19 bp, Homo sapiens
  siRNA target sequence for C6orf209 (NM_018368.2,1548-1566).
cccggacatacctattcct

SEQ ID NO: 116065 - DNA, 19 bp, Homo sapiens
  siRNA target sequence for C6orf209 (NM_018368.2,1559-1577).
ctattccttcacaagttct

SEQ ID NO: 116066 - DNA, 19 bp, Homo sapiens
  siRNA target sequence for C6orf209 (NM_018368.2,1622-1640).
ggggtatttttgattggat

SEQ ID NO: 116067 - DNA, 19 bp, Homo sapiens
  siRNA target sequence for C6orf209 (NM_018368.2,1662-1680).
ggaagaaatcggttattga

SEQ ID NO: 116068 - DNA, 19 bp, Homo sapiens
  siRNA target sequence for C9orf40 (NM_017998.1,770-788).
ggcagacattgaagattta

SEQ ID NO: 116069 - DNA, 19 bp, Homo sapiens
  siRNA target sequence for CALD1 (NM_004342.4,242-260).
gagcgtcgcagagaactta

SEQ ID NO: 116070 - DNA, 19 bp, Homo sapiens
  siRNA target sequence for CALD1 (NM_004342.4,244-262).
gcgtcgcagagaacttaga

SEQ ID NO: 116071 - DNA, 19 bp, Homo sapiens
  siRNA target sequence for CALD1 (NM_004342.4,245-263).
cgtcgcagagaacttagaa

SEQ ID NO: 116072 - DNA, 19 bp, Homo sapiens
  siRNA target sequence for CALD1 (NM_004342.4,285-303).
gactcgaagcagaaagaat

SEQ ID NO: 116073 - DNA, 19 bp, Homo sapiens
  siRNA target sequence for CALD1 (NM_004342.4,586-604).
ggagttcgacccaacaata

SEQ ID NO: 116074 - DNA, 19 bp, Homo sapiens
  siRNA target sequence for CALD1 (NM_004342.4,589-607).
gttcgacccaacaataaca

SEQ ID NO: 116075 - DNA, 19 bp, Homo sapiens
  siRNA target sequence for CALD1 (NM_004342.4,592-610).
cgacccaacaataacagat

SEQ ID NO: 116076 - DNA, 19 bp, Homo sapiens
  siRNA target sequence for CALD1 (NM_004342.4,739-757).
gtcctaccagaagaatgat

SEQ ID NO: 116077 - DNA, 19 bp, Homo sapiens
  siRNA target sequence for CALD1 (NM_004342.4,828-846).
gagggagcattggagaaaa

SEQ ID NO: 116078 - DNA, 19 bp, Homo sapiens
  siRNA target sequence for CALD1 (NM_004342.4,903-921).
gcttcatggatcgaaagaa

SEQ ID NO: 116079 - DNA, 19 bp, Homo sapiens
  siRNA target sequence for CALD1 (NM_004342.4,911-929).
gatcgaaagaagggattta

SEQ ID NO: 116080 - DNA, 19 bp, Homo sapiens
  siRNA target sequence for CALD1 (NM_004342.4,942-960).
cgcagaatggagaattcat

SEQ ID NO: 116081 - DNA, 19 bp, Homo sapiens
  siRNA target sequence for CALD1 (NM_004342.4,961-979).
gacccacaaacttaaacat

SEQ ID NO: 116082 - DNA, 19 bp, Homo sapiens
  siRNA target sequence for CALD1 (NM_004342.4,1228-1246).
ggaggaagccgatcgaaaa

SEQ ID NO: 116083 - DNA, 19 bp, Homo sapiens
  siRNA target sequence for CALD1 (NM_004342.4,1232-1250).
gaagccgatcgaaaactca

SEQ ID NO: 116084 - DNA, 19 bp, Homo sapiens
  siRNA target sequence for CALD1 (NM_004342.4,1311-1329).
ctgagaaacgccagaagat

SEQ ID NO: 116085 - DNA, 19 bp, Homo sapiens
  siRNA target sequence for CALD1 (NM_004342.4,1375-1393).
cactcctaaaggttcatct

SEQ ID NO: 116086 - DNA, 19 bp, Homo sapiens
  siRNA target sequence for CALD1 (NM_004342.4,1386-1404).
gttcatctctcaagataga

SEQ ID NO: 116087 - DNA, 19 bp, Homo sapiens
  siRNA target sequence for CALD1 (NM_004342.4,1389-1407).
catctctcaagatagaaga

SEQ ID NO: 116088 - DNA, 19 bp, Homo sapiens
  siRNA target sequence for CALD1 (NM_004342.4,1403-1421).
gaagagcgagcagaatttt

SEQ ID NO: 116089 - DNA, 19 bp, Homo sapiens
  siRNA target sequence for CALD1 (NM_004342.4,1408-1426).
gcgagcagaatttttgaat

SEQ ID NO: 116090 - DNA, 19 bp, Homo sapiens
  siRNA target sequence for CALD1 (NM_004342.4,1463-1481).
catcaagcagcaatagtct

SEQ ID NO: 116091 - DNA, 19 bp, Homo sapiens
  siRNA target sequence for CALD1 (NM_004342.4,1473-1491).
caatagtctccaagattga

SEQ ID NO: 116092 - DNA, 19 bp, Homo sapiens
  siRNA target sequence for CALD1 (NM_004342.4,1504-1522).
gcagtataccagtgcaatt

SEQ ID NO: 116093 - DNA, 19 bp, Homo sapiens
  siRNA target sequence for CALD1 (NM_004342.4,1515-1533).
gtgcaattgagggaacaaa

SEQ ID NO: 116094 - DNA, 19 bp, Homo sapiens
  siRNA target sequence for CALD1 (NM_004342.4,1586-1604).
ggtgtacgcaacatcaaga

SEQ ID NO: 116095 - DNA, 19 bp, Homo sapiens
  siRNA target sequence for CALD1 (NM_004342.4,1589-1607).
gtacgcaacatcaagagta

SEQ ID NO: 116096 - DNA, 19 bp, Homo sapiens
  siRNA target sequence for CALD1 (NM_004342.4,1592-1610).
cgcaacatcaagagtatgt

SEQ ID NO: 116097 - DNA, 19 bp, Homo sapiens
  siRNA target sequence for CALD1 (NM_004342.4,1647-1665).
caggcacaccaaataagga

SEQ ID NO: 116098 - DNA, 19 bp, Homo sapiens
  siRNA target sequence for CALD1 (NM_004342.4,1649-1667).
ggcacaccaaataaggaaa

SEQ ID NO: 116099 - DNA, 19 bp, Homo sapiens
  siRNA target sequence for CALD1 (NM_004342.4,1687-1705).
ggtttctagccgcatcaat

SEQ ID NO: 116100 - DNA, 19 bp, Homo sapiens
  siRNA target sequence for CALD1 (NM_033138.1,1095-1113).
cagatgaacgagcaagaat

SEQ ID NO: 116101 - DNA, 19 bp, Homo sapiens
  siRNA target sequence for CALD1 (NM_033138.1,1392-1410).
gtaacaagcagctagaaga

SEQ ID NO: 116102 - DNA, 19 bp, Homo sapiens
  siRNA target sequence for CALD1 (NM_033138.1,1589-1607).
gacaagcctaccttcaaaa

SEQ ID NO: 116103 - DNA, 19 bp, Homo sapiens
  siRNA target sequence for CALD1 (NM_033138.1,1591-1609).
caagcctaccttcaaaaaa

SEQ ID NO: 116104 - DNA, 19 bp, Homo sapiens
  siRNA target sequence for CEACAM1 (NM_001712.2,1009-1027).
gtcaagacgatcatagtca

SEQ ID NO: 116105 - DNA, 19 bp, Homo sapiens
  siRNA target sequence for CEACAM1 (NM_001712.2,1140-1158).
catccgttggttcttcaaa

SEQ ID NO: 116106 - DNA, 19 bp, Homo sapiens
  siRNA target sequence for CEACAM1 (NM_001712.2,1145-1163).
gttggttcttcaaaaacca

SEQ ID NO: 116107 - DNA, 19 bp, Homo sapiens
  siRNA target sequence for CEACAM1 (NM_001712.2,1240-1258).
gatgctgggacgtattggt

SEQ ID NO: 116108 - DNA, 19 bp, Homo sapiens
  siRNA target sequence for CEACAM1 (NM_001712.2,1263-1281).
ggtcttcaacccaatcagt

SEQ ID NO: 116109 - DNA, 19 bp, Homo sapiens
  siRNA target sequence for CEACAM1 (NM_001712.2,1305-1323).
gctgaacgtaaactataat

SEQ ID NO: 116110 - DNA, 19 bp, Homo sapiens
  siRNA target sequence for CEACAM1 (NM_001712.2,1308-1326).
gaacgtaaactataatgct

SEQ ID NO: 116111 - DNA, 19 bp, Homo sapiens
  siRNA target sequence for CEACAM1 (NM_001712.2,1386-1404).
ggccctggttgctctgata

SEQ ID NO: 116112 - DNA, 19 bp, Homo sapiens
  siRNA target sequence for CEACAM1 (NM_001712.2,1521-1539).
cccacctaacaagatgaat

SEQ ID NO: 116113 - DNA, 19 bp, Homo sapiens
  siRNA target sequence for CEACAM1 (NM_001712.2,1523-1541).
cacctaacaagatgaatga

SEQ ID NO: 116114 - DNA, 19 bp, Homo sapiens
  siRNA target sequence for CEACAM1 (NM_001712.2,1533-1551).
gatgaatgaagttacttat

SEQ ID NO: 116115 - DNA, 19 bp, Homo sapiens
  siRNA target sequence for CEACAM5 (NM_004363.1,745-763).
gcaagctacaaatgtgaaa

SEQ ID NO: 116116 - DNA, 19 bp, Homo sapiens
  siRNA target sequence for CEACAM5 (NM_004363.1,837-855).
catttcccctctaaacaca

SEQ ID NO: 116117 - DNA, 19 bp, Homo sapiens
  siRNA target sequence for CEACAM5 (NM_004363.1,1452-1470).
gtattcttggctgattgat

SEQ ID NO: 116118 - DNA, 19 bp, Homo sapiens
  siRNA target sequence for CEACAM5 (NM_004363.1,1521-1539).
gaagaacagcggactctat

SEQ ID NO: 116119 - DNA, 19 bp, Homo sapiens
  siRNA target sequence for CEACAM5 (NM_004363.1,1807-1825).
gacgcaagagcctatgtat

SEQ ID NO: 116120 - DNA, 19 bp, Homo sapiens
  siRNA target sequence for CEACAM5 (NM_004363.1,1809-1827).
cgcaagagcctatgtatgt

SEQ ID NO: 116121 - DNA, 19 bp, Homo sapiens
  siRNA target sequence for CEACAM5 (NM_004363.1,1914-1932).
cccagactcgtcttacctt

SEQ ID NO: 116122 - DNA, 19 bp, Homo sapiens
  siRNA target sequence for CEACAM5 (NM_004363.1,1915-1933).
ccagactcgtcttaccttt

SEQ ID NO: 116123 - DNA, 19 bp, Homo sapiens
  siRNA target sequence for CEACAM5 (NM_004363.1,1974-1992).
cccatccccgcagtattct

SEQ ID NO: 116124 - DNA, 19 bp, Homo sapiens
  siRNA target sequence for CEACAM5 (NM_004363.1,1975-1993).
ccatccccgcagtattctt

SEQ ID NO: 116125 - DNA, 19 bp, Homo sapiens
  siRNA target sequence for CEACAM5 (NM_004363.1,1986-2004).
gtattcttggcgtatcaat

SEQ ID NO: 116126 - DNA, 19 bp, Homo sapiens
  siRNA target sequence for CEACAM5 (NM_004363.1,2013-2031).
gcagcaacacacacaagtt

SEQ ID NO: 116127 - DNA, 19 bp, Homo sapiens
  siRNA target sequence for CEACAM5 (NM_004363.1,2043-2061).
caaaatcacgccaaataat

SEQ ID NO: 116128 - DNA, 19 bp, Homo sapiens
  siRNA target sequence for CEACAM5 (NM_004363.1,2064-2082).
cgggacctatgcctgtttt

SEQ ID NO: 116129 - DNA, 19 bp, Homo sapiens
  siRNA target sequence for CEACAM5 (NM_004363.1,2066-2084).
ggacctatgcctgttttgt

SEQ ID NO: 116130 - DNA, 19 bp, Homo sapiens
  siRNA target sequence for CEACAM5 (NM_004363.1,2094-2112).
ggctactggccgcaataat

SEQ ID NO: 116131 - DNA, 19 bp, Homo sapiens
  siRNA target sequence for CEACAM5 (NM_004363.1,2095-2113).
gctactggccgcaataatt

SEQ ID NO: 116132 - DNA, 19 bp, Homo sapiens
  siRNA target sequence for CEACAM5 (NM_004363.1,2099-2117).
ctggccgcaataattccat

SEQ ID NO: 116133 - DNA, 19 bp, Homo sapiens
  siRNA target sequence for CEACAM5 (NM_004363.1,2104-2122).
cgcaataattccatagtca

SEQ ID NO: 116134 - DNA, 19 bp, Homo sapiens
  siRNA target sequence for CEACAM5 (NM_004363.1,2105-2123).
gcaataattccatagtcaa

SEQ ID NO: 116135 - DNA, 19 bp, Homo sapiens
  siRNA target sequence for CEACAM5 (NM_004363.1,2202-2220).
ggttggggttgctctgata

SEQ ID NO: 116136 - DNA, 19 bp, Homo sapiens
  siRNA target sequence for CFL2 (NM_021914.5,160-178).
ctggagttacagtgaatga

SEQ ID NO: 116137 - DNA, 19 bp, Homo sapiens
  siRNA target sequence for CFL2 (NM_021914.5,163-181).
gagttacagtgaatgatga

SEQ ID NO: 116138 - DNA, 19 bp, Homo sapiens
  siRNA target sequence for CFL2 (NM_021914.5,266-284).
ctgtttaagcgatgacaaa

SEQ ID NO: 116139 - DNA, 19 bp, Homo sapiens
  siRNA target sequence for CFL2 (NM_021914.5,274-292).
gcgatgacaaaagacaaat

SEQ ID NO: 116140 - DNA, 19 bp, Homo sapiens
  siRNA target sequence for CFL2 (NM_021914.5,323-341).
gggtgacattggtgatact

SEQ ID NO: 116141 - DNA, 19 bp, Homo sapiens
  siRNA target sequence for CFL2 (NM_021914.5,371-389).
gttgctacctctgaatgat

SEQ ID NO: 116142 - DNA, 19 bp, Homo sapiens
  siRNA target sequence for CFL2 (NM_021914.5,408-426).
gatgccacatacgaaacaa

SEQ ID NO: 116143 - DNA, 19 bp, Homo sapiens
  siRNA target sequence for CFL2 (NM_021914.5,412-430).
ccacatacgaaacaaaaga

SEQ ID NO: 116144 - DNA, 19 bp, Homo sapiens
  siRNA target sequence for CFL2 (NM_021914.5,508-526).
gctctaaagatgccattaa

SEQ ID NO: 116145 - DNA, 19 bp, Homo sapiens
  siRNA target sequence for CFL2 (NM_021914.5,511-529).
ctaaagatgccattaaaaa

SEQ ID NO: 116146 - DNA, 19 bp, Homo sapiens
  siRNA target sequence for CFL2 (NM_021914.5,605-623).
gaaattgggaggcaatgta

SEQ ID NO: 116147 - DNA, 19 bp, Homo sapiens
  siRNA target sequence for CFL2 (NM_021914.5,611-629).
gggaggcaatgtagtagtt

SEQ ID NO: 116148 - DNA, 19 bp, Homo sapiens
  siRNA target sequence for CFL2 (NM_021914.5,616-634).
gcaatgtagtagtttcact

SEQ ID NO: 116149 - DNA, 19 bp, Homo sapiens
  siRNA target sequence for CFL2 (NM_021914.5,617-635).
caatgtagtagtttcactt

SEQ ID NO: 116150 - DNA, 19 bp, Homo sapiens
  siRNA target sequence for CFL2 (NM_021914.5,633-651).
cttgaaggaaaaccattat

SEQ ID NO: 116151 - DNA, 19 bp, Homo sapiens
  siRNA target sequence for CGN (NM_020770.1,203-221).
gtccagattcgcttcatca

SEQ ID NO: 116152 - DNA, 19 bp, Homo sapiens
  siRNA target sequence for CGN (NM_020770.1,585-603).
gcccagtggatcctagtaa

SEQ ID NO: 116153 - DNA, 19 bp, Homo sapiens
  siRNA target sequence for CGN (NM_020770.1,587-605).
ccagtggatcctagtaaca

SEQ ID NO: 116154 - DNA, 19 bp, Homo sapiens
  siRNA target sequence for CGN (NM_020770.1,590-608).
gtggatcctagtaacagaa

SEQ ID NO: 116155 - DNA, 19 bp, Homo sapiens
  siRNA target sequence for CGN (NM_020770.1,686-704).
gactcactcatcaacaagt

SEQ ID NO: 116156 - DNA, 19 bp, Homo sapiens
  siRNA target sequence for CGN (NM_020770.1,700-718).
caagtttgacagtcaactt

SEQ ID NO: 116157 - DNA, 19 bp, Homo sapiens
  siRNA target sequence for CGN (NM_020770.1,855-873).
ggacctctagcacaaaata

SEQ ID NO: 116158 - DNA, 19 bp, Homo sapiens
  siRNA target sequence for CGN (NM_020770.1,964-982).
ctgggtccttcagagtttt

SEQ ID NO: 116159 - DNA, 19 bp, Homo sapiens
  siRNA target sequence for CGN (NM_020770.1,1148-1166).
gtgaggaggaaggttagtt

SEQ ID NO: 116160 - DNA, 19 bp, Homo sapiens
  siRNA target sequence for CGN (NM_020770.1,1164-1182).
gtttggtgctggagaagat

SEQ ID NO: 116161 - DNA, 19 bp, Homo sapiens
  siRNA target sequence for CGN (NM_020770.1,1198-1216).
ggtttcttctggttctact

SEQ ID NO: 116162 - DNA, 19 bp, Homo sapiens
  siRNA target sequence for CGN (NM_020770.1,1236-1254).
gtgagcttacccgaaaagt

SEQ ID NO: 116163 - DNA, 19 bp, Homo sapiens
  siRNA target sequence for CGN (NM_020770.1,1441-1459).
cttggaccagggtgaagat

SEQ ID NO: 116164 - DNA, 19 bp, Homo sapiens
  siRNA target sequence for CGN (NM_020770.1,1447-1465).
ccagggtgaagatttacga

SEQ ID NO: 116165 - DNA, 19 bp, Homo sapiens
  siRNA target sequence for CGN (NM_020770.1,1975-1993).
ggtcttgcagagggaatta

SEQ ID NO: 116166 - DNA, 19 bp, Homo sapiens
  siRNA target sequence for CGN (NM_020770.1,2058-2076).
ggacacaggaggagcttaa

SEQ ID NO: 116167 - DNA, 19 bp, Homo sapiens
  siRNA target sequence for CGN (NM_020770.1,2734-2752).
cggggaggactctaagcaa

SEQ ID NO: 116168 - DNA, 19 bp, Homo sapiens
  siRNA target sequence for CGN (NM_020770.1,3043-3061).
gaagggtctcgaggaaaaa

SEQ ID NO: 116169 - DNA, 19 bp, Homo sapiens
  siRNA target sequence for CGN (NM_020770.1,3047-3065).
ggtctcgaggaaaaagtct

SEQ ID NO: 116170 - DNA, 19 bp, Homo sapiens
  siRNA target sequence for CGN (NM_020770.1,3070-3088).
gctggaaacagagttagat

SEQ ID NO: 116171 - DNA, 19 bp, Homo sapiens
  siRNA target sequence for CGN (NM_020770.1,3103-3121).
cgtggagctgctaacagat

SEQ ID NO: 116172 - DNA, 19 bp, Homo sapiens
  siRNA target sequence for CGN (NM_020770.1,3299-3317).
cttgagtcccagaatcagt

SEQ ID NO: 116173 - DNA, 19 bp, Homo sapiens
  siRNA target sequence for CGN (NM_020770.1,3362-3380).
ctgcagtctaccaatcgaa

SEQ ID NO: 116174 - DNA, 19 bp, Homo sapiens
  siRNA target sequence for CGN (NM_020770.1,3364-3382).
gcagtctaccaatcgaaaa

SEQ ID NO: 116175 - DNA, 19 bp, Homo sapiens
  siRNA target sequence for CGN (NM_020770.1,3614-3632).
gactcctggcgcaaagctt

SEQ ID NO: 116176 - DNA, 19 bp, Homo sapiens
  siRNA target sequence for CGN (NM_020770.1,3644-3662).
gctgagtcagctctcaaaa

SEQ ID NO: 116177 - DNA, 19 bp, Homo sapiens
  siRNA target sequence for CGN (NM_020770.1,3649-3667).
gtcagctctcaaaaacgaa

SEQ ID NO: 116178 - DNA, 19 bp, Homo sapiens
  siRNA target sequence for CGN (NM_020770.1,3704-3722).
gatccctcgtccattgcat

SEQ ID NO: 116179 - DNA, 19 bp, Homo sapiens
  siRNA target sequence for CLMN (NM_024734.2,184-202).
ctttacacgatggataaat

SEQ ID NO: 116180 - DNA, 19 bp, Homo sapiens
  siRNA target sequence for CLMN (NM_024734.2,189-207).
cacgatggataaatctaca

SEQ ID NO: 116181 - DNA, 19 bp, Homo sapiens
  siRNA target sequence for CLMN (NM_024734.2,217-235).
gtgcaacccacctctagaa

SEQ ID NO: 116182 - DNA, 19 bp, Homo sapiens
  siRNA target sequence for CLMN (NM_024734.2,219-237).
gcaacccacctctagaagt

SEQ ID NO: 116183 - DNA, 19 bp, Homo sapiens
  siRNA target sequence for CLMN (NM_024734.2,311-329).
ctgctgcacgaatacaaat

SEQ ID NO: 116184 - DNA, 19 bp, Homo sapiens
  siRNA target sequence for CLMN (NM_024734.2,330-348).
cctcgtcgcatcgtatttt

SEQ ID NO: 116185 - DNA, 19 bp, Homo sapiens
  siRNA target sequence for CLMN (NM_024734.2,331-349).
ctcgtcgcatcgtattttt

SEQ ID NO: 116186 - DNA, 19 bp, Homo sapiens
  siRNA target sequence for CLMN (NM_024734.2,411-429).
gcattgatgcagcagaaat

SEQ ID NO: 116187 - DNA, 19 bp, Homo sapiens
  siRNA target sequence for CLMN (NM_024734.2,412-430).
cattgatgcagcagaaata

SEQ ID NO: 116188 - DNA, 19 bp, Homo sapiens
  siRNA target sequence for CLMN (NM_024734.2,458-476).
gggctgatatggaacataa

SEQ ID NO: 116189 - DNA, 19 bp, Homo sapiens
  siRNA target sequence for CLMN (NM_024734.2,459-477).
ggctgatatggaacataat

SEQ ID NO: 116190 - DNA, 19 bp, Homo sapiens
  siRNA target sequence for CLMN (NM_024734.2,599-617).
gagaggagcgtggcaatat

SEQ ID NO: 116191 - DNA, 19 bp, Homo sapiens
  siRNA target sequence for CLMN (NM_024734.2,732-750).
ctttcctggcggtgatcaa

SEQ ID NO: 116192 - DNA, 19 bp, Homo sapiens
  siRNA target sequence for CLMN (NM_024734.2,801-819).
cacgagaaaatctagagaa

SEQ ID NO: 116193 - DNA, 19 bp, Homo sapiens
  siRNA target sequence for CLMN (NM_024734.2,891-909).
caccagacgagcagtctat

SEQ ID NO: 116194 - DNA, 19 bp, Homo sapiens
  siRNA target sequence for CLMN (NM_024734.2,893-911).
ccagacgagcagtctatca

SEQ ID NO: 116195 - DNA, 19 bp, Homo sapiens
  siRNA target sequence for CLMN (NM_024734.2,947-965).
gagttggaagccgaagata

SEQ ID NO: 116196 - DNA, 19 bp, Homo sapiens
  siRNA target sequence for CLMN (NM_024734.2,956-974).
gccgaagatattttcgatt

SEQ ID NO: 116197 - DNA, 19 bp, Homo sapiens
  siRNA target sequence for CLMN (NM_024734.2,962-980).
gatattttcgattcagata

SEQ ID NO: 116198 - DNA, 19 bp, Homo sapiens
  siRNA target sequence for CLMN (NM_024734.2,990-1008).
ctatcgaatccacttttgt

SEQ ID NO: 116199 - DNA, 19 bp, Homo sapiens
  siRNA target sequence for CLMN (NM_024734.2,1000-1018).
cacttttgttcgcatcaaa

SEQ ID NO: 116200 - DNA, 19 bp, Homo sapiens
  siRNA target sequence for CLMN (NM_024734.2,1031-1049).
gaacaggagagcaaagtct

SEQ ID NO: 116201 - DNA, 19 bp, Homo sapiens
  siRNA target sequence for CLMN (NM_024734.2,1046-1064).
gtcttcgttctgactgaaa

SEQ ID NO: 116202 - DNA, 19 bp, Homo sapiens
  siRNA target sequence for CLMN (NM_024734.2,1070-1088).
gagcgtacctacactgtta

SEQ ID NO: 116203 - DNA, 19 bp, Homo sapiens
  siRNA target sequence for CLMN (NM_024734.2,1074-1092).
gtacctacactgttaacca

SEQ ID NO: 116204 - DNA, 19 bp, Homo sapiens
  siRNA target sequence for CLMN (NM_024734.2,1112-1130).
ccctccaaagtctttgtct

SEQ ID NO: 116205 - DNA, 19 bp, Homo sapiens
  siRNA target sequence for CLMN (NM_024734.2,1139-1157).
cccgagagcatgaaggaat

SEQ ID NO: 116206 - DNA, 19 bp, Homo sapiens
  siRNA target sequence for CLMN (NM_024734.2,1140-1158).
ccgagagcatgaaggaatt

SEQ ID NO: 116207 - DNA, 19 bp, Homo sapiens
  siRNA target sequence for CLMN (NM_024734.2,1207-1225).
gttcatgcaccagattatt

SEQ ID NO: 116208 - DNA, 19 bp, Homo sapiens
  siRNA target sequence for CLMN (NM_024734.2,1396-1414).
cctgtccctttgctttgaa

SEQ ID NO: 116209 - DNA, 19 bp, Homo sapiens
  siRNA target sequence for CLMN (NM_024734.2,1561-1579).
ggagggcacaaacaataat

SEQ ID NO: 116210 - DNA, 19 bp, Homo sapiens
  siRNA target sequence for CLMN (NM_024734.2,1564-1582).
gggcacaaacaataattct

SEQ ID NO: 116211 - DNA, 19 bp, Homo sapiens
  siRNA target sequence for CLMN (NM_024734.2,1668-1686).
ctgtgatggccgattcctt

SEQ ID NO: 116212 - DNA, 19 bp, Homo sapiens
  siRNA target sequence for CLMN (NM_024734.2,1677-1695).
ccgattccttccagatcaa

SEQ ID NO: 116213 - DNA, 19 bp, Homo sapiens
  siRNA target sequence for CLMN (NM_024734.2,1705-1723).
gatgactgtagaagcttta

SEQ ID NO: 116214 - DNA, 19 bp, Homo sapiens
  siRNA target sequence for CLMN (NM_024734.2,1726-1744).
ggagggagactattttgaa

SEQ ID NO: 116215 - DNA, 19 bp, Homo sapiens
  siRNA target sequence for CLMN (NM_024734.2,1774-1792).
cagcgacctaatagatttt

SEQ ID NO: 116216 - DNA, 19 bp, Homo sapiens
  siRNA target sequence for CLMN (NM_024734.2,1777-1795).
cgacctaatagattttgct

SEQ ID NO: 116217 - DNA, 19 bp, Homo sapiens
  siRNA target sequence for CLMN (NM_024734.2,1886-1904).
ctaggtaaaaggagtatta

SEQ ID NO: 116218 - DNA, 19 bp, Homo sapiens
  siRNA target sequence for CLMN (NM_024734.2,1910-1928).
gctcacaaaaagaaggatt

SEQ ID NO: 116219 - DNA, 19 bp, Homo sapiens
  siRNA target sequence for CLMN (NM_024734.2,1929-1947).
cgccagagcctcaagttaa

SEQ ID NO: 116220 - DNA, 19 bp, Homo sapiens
  siRNA target sequence for CLMN (NM_024734.2,2065-2083).
gtccacccgtcctcattat

SEQ ID NO: 116221 - DNA, 19 bp, Homo sapiens
  siRNA target sequence for CLMN (NM_024734.2,2117-2135).
gtgggcgaggaattatctt

SEQ ID NO: 116222 - DNA, 19 bp, Homo sapiens
  siRNA target sequence for CLMN (NM_024734.2,2184-2202).
gcgaagaaggcctggattt

SEQ ID NO: 116223 - DNA, 19 bp, Homo sapiens
  siRNA target sequence for CLMN (NM_024734.2,2306-2324).
gaagacccggaggatctaa

SEQ ID NO: 116224 - DNA, 19 bp, Homo sapiens
  siRNA target sequence for CLMN (NM_024734.2,2311-2329).
cccggaggatctaaaaaat

SEQ ID NO: 116225 - DNA, 19 bp, Homo sapiens
  siRNA target sequence for CLMN (NM_024734.2,2313-2331).
cggaggatctaaaaaatga

SEQ ID NO: 116226 - DNA, 19 bp, Homo sapiens
  siRNA target sequence for CLMN (NM_024734.2,2317-2335).
ggatctaaaaaatgaagaa

SEQ ID NO: 116227 - DNA, 19 bp, Homo sapiens
  siRNA target sequence for CLMN (NM_024734.2,2454-2472).
gcgaccaggtgctgtatct

SEQ ID NO: 116228 - DNA, 19 bp, Homo sapiens
  siRNA target sequence for CLMN (NM_024734.2,2620-2638).
ccccctagaagaaaatgta

SEQ ID NO: 116229 - DNA, 19 bp, Homo sapiens
  siRNA target sequence for CLMN (NM_024734.2,2645-2663).
gaatcaatcagtagtaaaa

SEQ ID NO: 116230 - DNA, 19 bp, Homo sapiens
  siRNA target sequence for CLMN (NM_024734.2,2681-2699).
catgtggaccacgtagaaa

SEQ ID NO: 116231 - DNA, 19 bp, Homo sapiens
  siRNA target sequence for CLMN (NM_024734.2,2684-2702).
gtggaccacgtagaaagtt

SEQ ID NO: 116232 - DNA, 19 bp, Homo sapiens
  siRNA target sequence for CLMN (NM_024734.2,2689-2707).
ccacgtagaaagttcacta

SEQ ID NO: 116233 - DNA, 19 bp, Homo sapiens
  siRNA target sequence for CLMN (NM_024734.2,2690-2708).
cacgtagaaagttcactat

SEQ ID NO: 116234 - DNA, 19 bp, Homo sapiens
  siRNA target sequence for CLMN (NM_024734.2,2809-2827).
ccttcgacgacatactcat

SEQ ID NO: 116235 - DNA, 19 bp, Homo sapiens
  siRNA target sequence for CLMN (NM_024734.2,2810-2828).
cttcgacgacatactcata

SEQ ID NO: 116236 - DNA, 19 bp, Homo sapiens
  siRNA target sequence for CLMN (NM_024734.2,2832-2850).
cttcggaatcggatcattt

SEQ ID NO: 116237 - DNA, 19 bp, Homo sapiens
  siRNA target sequence for CLMN (NM_024734.2,2837-2855).
gaatcggatcattttagct

SEQ ID NO: 116238 - DNA, 19 bp, Homo sapiens
  siRNA target sequence for CLMN (NM_024734.2,2842-2860).
ggatcattttagctatgtt

SEQ ID NO: 116239 - DNA, 19 bp, Homo sapiens
  siRNA target sequence for CLMN (NM_024734.2,2992-3010).
gcagccggatatgatgtat

SEQ ID NO: 116240 - DNA, 19 bp, Homo sapiens
  siRNA target sequence for CLMN (NM_024734.2,2993-3011).
cagccggatatgatgtatt

SEQ ID NO: 116241 - DNA, 19 bp, Homo sapiens
  siRNA target sequence for CLMN (NM_024734.2,2996-3014).
ccggatatgatgtatttta

SEQ ID NO: 116242 - DNA, 19 bp, Homo sapiens
  siRNA target sequence for CNN1 (NM_001299.3,294-312).
cgtcgcatcggcaacaact

SEQ ID NO: 116243 - DNA, 19 bp, Homo sapiens
  siRNA target sequence for CNN1 (NM_001299.3,295-313).
gtcgcatcggcaacaactt

SEQ ID NO: 116244 - DNA, 19 bp, Homo sapiens
  siRNA target sequence for CNN1 (NM_001299.3,297-315).
cgcatcggcaacaacttca

SEQ ID NO: 116245 - DNA, 19 bp, Homo sapiens
  siRNA target sequence for CNN1 (NM_001299.3,342-360).
ctttgcgaattcatcaata

SEQ ID NO: 116246 - DNA, 19 bp, Homo sapiens
  siRNA target sequence for CNN1 (NM_001299.3,346-364).
gcgaattcatcaataagct

SEQ ID NO: 116247 - DNA, 19 bp, Homo sapiens
  siRNA target sequence for CNN1 (NM_001299.3,462-480).
gtgaagccccacgacattt

SEQ ID NO: 116248 - DNA, 19 bp, Homo sapiens
  siRNA target sequence for CNN1 (NM_001299.3,464-482).
gaagccccacgacattttt

SEQ ID NO: 116249 - DNA, 19 bp, Homo sapiens
  siRNA target sequence for CNN1 (NM_001299.3,1029-1047).
cacgcacacaactactaca

SEQ ID NO: 116250 - DNA, 19 bp, Homo sapiens
  siRNA target sequence for CNN1 (NM_001299.3,1032-1050).
gcacacaactactacaatt

SEQ ID NO: 116251 - DNA, 19 bp, Homo sapiens
  siRNA target sequence for CNN2 (NM_004368.1,32-50).
gctccacgcagttcaacaa

SEQ ID NO: 116252 - DNA, 19 bp, Homo sapiens
  siRNA target sequence for CNN2 (NM_004368.1,185-203).
gcctgaaggatggaactat

SEQ ID NO: 116253 - DNA, 19 bp, Homo sapiens
  siRNA target sequence for CNN2 (NM_004368.1,187-205).
ctgaaggatggaactatct

SEQ ID NO: 116254 - DNA, 19 bp, Homo sapiens
  siRNA target sequence for CNN2 (NM_004368.1,189-207).
gaaggatggaactatctta

SEQ ID NO: 116255 - DNA, 19 bp, Homo sapiens
  siRNA target sequence for CNN2 (NM_004368.1,448-466).
gacattggcgtcaagtact

SEQ ID NO: 116256 - DNA, 19 bp, Homo sapiens
  siRNA target sequence for CNN3 (NM_001839.1,171-189).
gaagatcttcgcaattgga

SEQ ID NO: 116257 - DNA, 19 bp, Homo sapiens
  siRNA target sequence for CNN3 (NM_001839.1,251-269).
catcctctgcgaacttata

SEQ ID NO: 116258 - DNA, 19 bp, Homo sapiens
  siRNA target sequence for CNN3 (NM_001839.1,323-341).
gcctcagttggagaatatt

SEQ ID NO: 116259 - DNA, 19 bp, Homo sapiens
  siRNA target sequence for CNN3 (NM_001839.1,342-360).
ggcaactttattaaagcta

SEQ ID NO: 116260 - DNA, 19 bp, Homo sapiens
  siRNA target sequence for CNN3 (NM_001839.1,357-375).
gctattcaggcttatggta

SEQ ID NO: 116261 - DNA, 19 bp, Homo sapiens
  siRNA target sequence for CNN3 (NM_001839.1,373-391).
gtatgaagccacatgacat

SEQ ID NO: 116262 - DNA, 19 bp, Homo sapiens
  siRNA target sequence for CNN3 (NM_001839.1,380-398).
gccacatgacatattcgaa

SEQ ID NO: 116263 - DNA, 19 bp, Homo sapiens
  siRNA target sequence for CNN3 (NM_001839.1,389-407).
catattcgaagcaaatgat

SEQ ID NO: 116264 - DNA, 19 bp, Homo sapiens
  siRNA target sequence for CNN3 (NM_001839.1,456-474).
ctagcaggtctggctaaaa

SEQ ID NO: 116265 - DNA, 19 bp, Homo sapiens
  siRNA target sequence for CNN3 (NM_001839.1,485-503).
ccatacaaccattgacatt

SEQ ID NO: 116266 - DNA, 19 bp, Homo sapiens
  siRNA target sequence for CNN3 (NM_001839.1,512-530).
gtatgcagaaaaacaaaca

SEQ ID NO: 116267 - DNA, 19 bp, Homo sapiens
  siRNA target sequence for CNN3 (NM_001839.1,794-812).
ggtggacaactcgacaatt

SEQ ID NO: 116268 - DNA, 19 bp, Homo sapiens
  siRNA target sequence for CNN3 (NM_001839.1,795-813).
gtggacaactcgacaattt

SEQ ID NO: 116269 - DNA, 19 bp, Homo sapiens
  siRNA target sequence for CNN3 (NM_001839.1,805-823).
cgacaatttccctacagat

SEQ ID NO: 116270 - DNA, 19 bp, Homo sapiens
  siRNA target sequence for CNN3 (NM_001839.1,821-839).
gatgggtaccaacaaagtt

SEQ ID NO: 116271 - DNA, 19 bp, Homo sapiens
  siRNA target sequence for CNN3 (NM_001839.1,957-975).
ggttcggaaatcagtgata

SEQ ID NO: 116272 - DNA, 19 bp, Homo sapiens
  siRNA target sequence for CNN3 (NM_001839.1,961-979).
cggaaatcagtgatagtga

SEQ ID NO: 116273 - DNA, 19 bp, Homo sapiens
  siRNA target sequence for CNN3 (NM_001839.1,962-980).
ggaaatcagtgatagtgat

SEQ ID NO: 116274 - DNA, 19 bp, Homo sapiens
  siRNA target sequence for CNN3 (NM_001839.1,963-981).
gaaatcagtgatagtgatt

SEQ ID NO: 116275 - DNA, 19 bp, Homo sapiens
  siRNA target sequence for CNN3 (NM_001839.1,976-994).
gtgattatcaggcagaata

SEQ ID NO: 116276 - DNA, 19 bp, Homo sapiens
  siRNA target sequence for CNN3 (NM_001839.1,1012-1030).
gcgagtaccaggatgacta

SEQ ID NO: 116277 - DNA, 19 bp, Homo sapiens
  siRNA target sequence for CNN3 (NM_001839.1,1023-1041).
gatgactaccccagagatt

SEQ ID NO: 116278 - DNA, 19 bp, Homo sapiens
  siRNA target sequence for CNN3 (NM_001839.1,1028-1046).
ctaccccagagattaccaa

SEQ ID NO: 116279 - DNA, 19 bp, Homo sapiens
  siRNA target sequence for CNN3 (NM_001839.1,1051-1069).
gcgaccaaggcattgatta

SEQ ID NO: 116280 - DNA, 19 bp, Homo sapiens
  siRNA target sequence for CORO1A (NM_007074.1,160-178).
ggccgaccagtgctatgaa

SEQ ID NO: 116281 - DNA, 19 bp, Homo sapiens
  siRNA target sequence for CORO1A (NM_007074.1,222-240).
ctgtcaaccctaagtttgt

SEQ ID NO: 116282 - DNA, 19 bp, Homo sapiens
  siRNA target sequence for CORO1A (NM_007074.1,363-381).
cctggtgcccgcacaatga

SEQ ID NO: 116283 - DNA, 19 bp, Homo sapiens
  siRNA target sequence for CORO1A (NM_007074.1,366-384).
ggtgcccgcacaatgacaa

SEQ ID NO: 116284 - DNA, 19 bp, Homo sapiens
  siRNA target sequence for CORO1A (NM_007074.1,967-985).
cagctcaatccggtacttt

SEQ ID NO: 116285 - DNA, 19 bp, Homo sapiens
  siRNA target sequence for CORO1A (NM_007074.1,969-987).
gctcaatccggtactttga

SEQ ID NO: 116286 - DNA, 19 bp, Homo sapiens
  siRNA target sequence for CORO1B (NM_020441.1,336-354).
ctcacaacgacgaagtcat

SEQ ID NO: 116287 - DNA, 19 bp, Homo sapiens
  siRNA target sequence for CORO1B (NM_020441.1,519-537).
gcgacaacgtggtactcat

SEQ ID NO: 116288 - DNA, 19 bp, Homo sapiens
  siRNA target sequence for CORO1C (NM_014325.2,108-126).
ggtacgacagagcaagttt

SEQ ID NO: 116289 - DNA, 19 bp, Homo sapiens
  siRNA target sequence for CORO1C (NM_014325.2,119-137).
gcaagtttcggcatgtatt

SEQ ID NO: 116290 - DNA, 19 bp, Homo sapiens
  siRNA target sequence for CORO1C (NM_014325.2,140-158).
ggcaagcggtgaaaaatga

SEQ ID NO: 116291 - DNA, 19 bp, Homo sapiens
  siRNA target sequence for CORO1C (NM_014325.2,195-213).
ctgggatagttccttttgt

SEQ ID NO: 116292 - DNA, 19 bp, Homo sapiens
  siRNA target sequence for CORO1C (NM_014325.2,215-233).
ctgtcaatcccagatttgt

SEQ ID NO: 116293 - DNA, 19 bp, Homo sapiens
  siRNA target sequence for CORO1C (NM_014325.2,224-242).
ccagatttgttgccataat

SEQ ID NO: 116294 - DNA, 19 bp, Homo sapiens
  siRNA target sequence for CORO1C (NM_014325.2,285-303).
gcacaagactggtcgaatt

SEQ ID NO: 116295 - DNA, 19 bp, Homo sapiens
  siRNA target sequence for CORO1C (NM_014325.2,291-309).
gactggtcgaattgacaaa

SEQ ID NO: 116296 - DNA, 19 bp, Homo sapiens
  siRNA target sequence for CORO1C (NM_014325.2,295-313).
ggtcgaattgacaaatctt

SEQ ID NO: 116297 - DNA, 19 bp, Homo sapiens
  siRNA target sequence for CORO1C (NM_014325.2,296-314).
gtcgaattgacaaatctta

SEQ ID NO: 116298 - DNA, 19 bp, Homo sapiens
  siRNA target sequence for CORO1C (NM_014325.2,357-375).
ctggtgcccacataacgat

SEQ ID NO: 116299 - DNA, 19 bp, Homo sapiens
  siRNA target sequence for CORO1C (NM_014325.2,522-540).
ccgcaatgtgcttcttagt

SEQ ID NO: 116300 - DNA, 19 bp, Homo sapiens
  siRNA target sequence for CORO1C (NM_014325.2,535-553).
cttagtgcaggctgtgata

SEQ ID NO: 116301 - DNA, 19 bp, Homo sapiens
  siRNA target sequence for CORO1C (NM_014325.2,581-599).
caggggaagcccttataaa

SEQ ID NO: 116302 - DNA, 19 bp, Homo sapiens
  siRNA target sequence for CORO1C (NM_014325.2,584-602).
gggaagcccttataaactt

SEQ ID NO: 116303 - DNA, 19 bp, Homo sapiens
  siRNA target sequence for CORO1C (NM_014325.2,660-678).
gatctgcacagcttccaaa

SEQ ID NO: 116304 - DNA, 19 bp, Homo sapiens
  siRNA target sequence for CORO1C (NM_014325.2,665-683).
gcacagcttccaaagacaa

SEQ ID NO: 116305 - DNA, 19 bp, Homo sapiens
  siRNA target sequence for CORO1C (NM_014325.2,681-699).
caagaaagtgagagtcatt

SEQ ID NO: 116306 - DNA, 19 bp, Homo sapiens
  siRNA target sequence for CORO1C (NM_014325.2,839-857).
ggaatccgaaaaatatgca

SEQ ID NO: 116307 - DNA, 19 bp, Homo sapiens
  siRNA target sequence for CORO1C (NM_014325.2,919-937).
cctgacaccagcatcattt

SEQ ID NO: 116308 - DNA, 19 bp, Homo sapiens
  siRNA target sequence for CORO1C (NM_014325.2,957-975).
cagcagtattcgctatttt

SEQ ID NO: 116309 - DNA, 19 bp, Homo sapiens
  siRNA target sequence for CORO1C (NM_014325.2,959-977).
gcagtattcgctattttga

SEQ ID NO: 116310 - DNA, 19 bp, Homo sapiens
  siRNA target sequence for CORO1C (NM_014325.2,962-980).
gtattcgctattttgagat

SEQ ID NO: 116311 - DNA, 19 bp, Homo sapiens
  siRNA target sequence for CORO1C (NM_014325.2,1000-1018).
gtccactacctcaacacat

SEQ ID NO: 116312 - DNA, 19 bp, Homo sapiens
  siRNA target sequence for CORO1C (NM_014325.2,1064-1082).
ggggacttgatgttaacaa

SEQ ID NO: 116313 - DNA, 19 bp, Homo sapiens
  siRNA target sequence for CORO1C (NM_014325.2,1066-1084).
ggacttgatgttaacaaat

SEQ ID NO: 116314 - DNA, 19 bp, Homo sapiens
  siRNA target sequence for CORO1C (NM_014325.2,1152-1170).
gaagtctgaccttttccaa

SEQ ID NO: 116315 - DNA, 19 bp, Homo sapiens
  siRNA target sequence for CORO1C (NM_014325.2,1224-1242).
gtggttcgaaggcaagaat

SEQ ID NO: 116316 - DNA, 19 bp, Homo sapiens
  siRNA target sequence for CORO1C (NM_014325.2,1263-1281).
cttgaagcacgggtacatt

SEQ ID NO: 116317 - DNA, 19 bp, Homo sapiens
  siRNA target sequence for CORO1C (NM_014325.2,1305-1323).
ggtggtcaagaagaacatt

SEQ ID NO: 116318 - DNA, 19 bp, Homo sapiens
  siRNA target sequence for CORO1C (NM_014325.2,1413-1431).
caagttggatgagatttta

SEQ ID NO: 116319 - DNA, 19 bp, Homo sapiens
  siRNA target sequence for CORO1C (NM_014325.2,1455-1473).
cacaatctgcaatcaagat

SEQ ID NO: 116320 - DNA, 19 bp, Homo sapiens
  siRNA target sequence for CORO1C (NM_014325.2,1457-1475).
caatctgcaatcaagatga

SEQ ID NO: 116321 - DNA, 19 bp, Homo sapiens
  siRNA target sequence for CORO2A (NM_003389.2,295-313).
ccaagttccgtcatgtctt

SEQ ID NO: 116322 - DNA, 19 bp, Homo sapiens
  siRNA target sequence for CORO2A (NM_003389.2,296-314).
caagttccgtcatgtcttt

SEQ ID NO: 116323 - DNA, 19 bp, Homo sapiens
  siRNA target sequence for CORO2A (NM_003389.2,391-409).
ccgtgaacccccacttcat

SEQ ID NO: 116324 - DNA, 19 bp, Homo sapiens
  siRNA target sequence for CORO2A (NM_003389.2,392-410).
cgtgaacccccacttcatt

SEQ ID NO: 116325 - DNA, 19 bp, Homo sapiens
  siRNA target sequence for CORO2A (NM_003389.2,483-501).
ccccactacccaaaagtct

SEQ ID NO: 116326 - DNA, 19 bp, Homo sapiens
  siRNA target sequence for CORO2A (NM_003389.2,504-522).
gggcacagaggcaacgttt

SEQ ID NO: 116327 - DNA, 19 bp, Homo sapiens
  siRNA target sequence for CORO2A (NM_003389.2,505-523).
ggcacagaggcaacgtttt

SEQ ID NO: 116328 - DNA, 19 bp, Homo sapiens
  siRNA target sequence for CORO2A (NM_003389.2,557-575).
gatcgcctcctgttctgaa

SEQ ID NO: 116329 - DNA, 19 bp, Homo sapiens
  siRNA target sequence for CORO2A (NM_003389.2,560-578).
cgcctcctgttctgaagat

SEQ ID NO: 116330 - DNA, 19 bp, Homo sapiens
  siRNA target sequence for CORO2A (NM_003389.2,576-594).
gatgccacaattaagatct

SEQ ID NO: 116331 - DNA, 19 bp, Homo sapiens
  siRNA target sequence for CORO2A (NM_003389.2,780-798).
cccatgagtacgattagct

SEQ ID NO: 116332 - DNA, 19 bp, Homo sapiens
  siRNA target sequence for CORO2A (NM_003389.2,869-887).
ccgcaagattcgggttatt

SEQ ID NO: 116333 - DNA, 19 bp, Homo sapiens
  siRNA target sequence for CORO2A (NM_003389.2,1018-1036).
ccttgtgggaccaggataa

SEQ ID NO: 116334 - DNA, 19 bp, Homo sapiens
  siRNA target sequence for CORO2A (NM_003389.2,1198-1216).
ctgagtaccgctcctataa

SEQ ID NO: 116335 - DNA, 19 bp, Homo sapiens
  siRNA target sequence for CORO2A (NM_003389.2,1232-1250).
cggtgtcatgccaaagaga

SEQ ID NO: 116336 - DNA, 19 bp, Homo sapiens
  siRNA target sequence for CORO2A (NM_003389.2,1354-1372).
cctaccaagaggacatata

SEQ ID NO: 116337 - DNA, 19 bp, Homo sapiens
  siRNA target sequence for CORO2A (NM_003389.2,1415-1433).
gtggctcagcgggatgaat

SEQ ID NO: 116338 - DNA, 19 bp, Homo sapiens
  siRNA target sequence for CORO2A (NM_003389.2,1498-1516).
cagagagacctatcttcaa

SEQ ID NO: 116339 - DNA, 19 bp, Homo sapiens
  siRNA target sequence for CORO2A (NM_003389.2,1668-1686).
ggctttgacgttttcgaat

SEQ ID NO: 116340 - DNA, 19 bp, Homo sapiens
  siRNA target sequence for CORO2A (NM_003389.2,1800-1818).
gaactggagatcaaaaact

SEQ ID NO: 116341 - DNA, 19 bp, Homo sapiens
  siRNA target sequence for CORO2B (NM_006091.1,371-389).
gggctgaagcggaacatga

SEQ ID NO: 116342 - DNA, 19 bp, Homo sapiens
  siRNA target sequence for CORO2B (NM_006091.1,518-536).
ggtgagccggtgaagatga

SEQ ID NO: 116343 - DNA, 19 bp, Homo sapiens
  siRNA target sequence for CORO2B (NM_006091.1,519-537).
gtgagccggtgaagatgat

SEQ ID NO: 116344 - DNA, 19 bp, Homo sapiens
  siRNA target sequence for CORO2B (NM_006091.1,524-542).
ccggtgaagatgattgact

SEQ ID NO: 116345 - DNA, 19 bp, Homo sapiens
  siRNA target sequence for CORO2B (NM_006091.1,734-752).
gtctccaggtggaacacaa

SEQ ID NO: 116346 - DNA, 19 bp, Homo sapiens
  siRNA target sequence for CORO2B (NM_006091.1,792-810).
ccctgatcgaagaggaaat

SEQ ID NO: 116347 - DNA, 19 bp, Homo sapiens
  siRNA target sequence for CORO2B (NM_006091.1,793-811).
cctgatcgaagaggaaatt

SEQ ID NO: 116348 - DNA, 19 bp, Homo sapiens
  siRNA target sequence for CORO2B (NM_006091.1,1142-1160).
gcactgaccccggatgaat

SEQ ID NO: 116349 - DNA, 19 bp, Homo sapiens
  siRNA target sequence for CORO2B (NM_006091.1,1181-1199).
gatcccgtgctgatgtctt

SEQ ID NO: 116350 - DNA, 19 bp, Homo sapiens
  siRNA target sequence for CORO2B (NM_006091.1,1186-1204).
cgtgctgatgtctttgaaa

SEQ ID NO: 116351 - DNA, 19 bp, Homo sapiens
  siRNA target sequence for CORO2B (NM_006091.1,1268-1286).
gtggtcaacggaatagatt

SEQ ID NO: 116352 - DNA, 19 bp, Homo sapiens
  siRNA target sequence for CORO2B (NM_006091.1,1271-1289).
gtcaacggaatagatttat

SEQ ID NO: 116353 - DNA, 19 bp, Homo sapiens
  siRNA target sequence for CORO2B (NM_006091.1,1273-1291).
caacggaatagatttatta

SEQ ID NO: 116354 - DNA, 19 bp, Homo sapiens
  siRNA target sequence for CORO2B (NM_006091.1,1430-1448).
cgcaacagccccaagaact

SEQ ID NO: 116355 - DNA, 19 bp, Homo sapiens
  siRNA target sequence for COTL1 (NM_021149.2,218-236).
cgtcatctgggtgactttt

SEQ ID NO: 116356 - DNA, 19 bp, Homo sapiens
  siRNA target sequence for COTL1 (NM_021149.2,219-237).
gtcatctgggtgactttta

SEQ ID NO: 116357 - DNA, 19 bp, Homo sapiens
  siRNA target sequence for COTL1 (NM_021149.2,452-470).
gaaggaggtcgtacagaat

SEQ ID NO: 116358 - DNA, 19 bp, Homo sapiens
  siRNA target sequence for DAAM1 (NM_014992.1,140-158).
gagaggtggacgaggtatt

SEQ ID NO: 116359 - DNA, 19 bp, Homo sapiens
  siRNA target sequence for DAAM1 (NM_014992.1,144-162).
ggtggacgaggtatttcat

SEQ ID NO: 116360 - DNA, 19 bp, Homo sapiens
  siRNA target sequence for DAAM1 (NM_014992.1,145-163).
gtggacgaggtatttcatt

SEQ ID NO: 116361 - DNA, 19 bp, Homo sapiens
  siRNA target sequence for DAAM1 (NM_014992.1,147-165).
ggacgaggtatttcattca

SEQ ID NO: 116362 - DNA, 19 bp, Homo sapiens
  siRNA target sequence for DAAM1 (NM_014992.1,148-166).
gacgaggtatttcattcat

SEQ ID NO: 116363 - DNA, 19 bp, Homo sapiens
  siRNA target sequence for DAAM1 (NM_014992.1,150-168).
cgaggtatttcattcatct

SEQ ID NO: 116364 - DNA, 19 bp, Homo sapiens
  siRNA target sequence for DAAM1 (NM_014992.1,172-190).
gctgtttccgaaataatga

SEQ ID NO: 116365 - DNA, 19 bp, Homo sapiens
  siRNA target sequence for DAAM1 (NM_014992.1,205-223).
cgtatcggctgcgaaatga

SEQ ID NO: 116366 - DNA, 19 bp, Homo sapiens
  siRNA target sequence for DAAM1 (NM_014992.1,206-224).
gtatcggctgcgaaatgat

SEQ ID NO: 116367 - DNA, 19 bp, Homo sapiens
  siRNA target sequence for DAAM1 (NM_014992.1,211-229).
ggctgcgaaatgatagcaa

SEQ ID NO: 116368 - DNA, 19 bp, Homo sapiens
  siRNA target sequence for DAAM1 (NM_014992.1,215-233).
gcgaaatgatagcaacttt

SEQ ID NO: 116369 - DNA, 19 bp, Homo sapiens
  siRNA target sequence for DAAM1 (NM_014992.1,421-439).
ctacaagttggcctgaatt

SEQ ID NO: 116370 - DNA, 19 bp, Homo sapiens
  siRNA target sequence for DAAM1 (NM_014992.1,517-535).
gtaaaactatagagagttt

SEQ ID NO: 116371 - DNA, 19 bp, Homo sapiens
  siRNA target sequence for DAAM1 (NM_014992.1,565-583).
ggtttgtaaccagattcat

SEQ ID NO: 116372 - DNA, 19 bp, Homo sapiens
  siRNA target sequence for DAAM1 (NM_014992.1,585-603).
gacttggatggcctatcat

SEQ ID NO: 116373 - DNA, 19 bp, Homo sapiens
  siRNA target sequence for DAAM1 (NM_014992.1,640-658).
cctcagagtctcgaataca

SEQ ID NO: 116374 - DNA, 19 bp, Homo sapiens
  siRNA target sequence for DAAM1 (NM_014992.1,641-659).
ctcagagtctcgaatacat

SEQ ID NO: 116375 - DNA, 19 bp, Homo sapiens
  siRNA target sequence for DAAM1 (NM_014992.1,647-665).
gtctcgaatacatacttct

SEQ ID NO: 116376 - DNA, 19 bp, Homo sapiens
  siRNA target sequence for DAAM1 (NM_014992.1,664-682).
ctctcattggctgtataaa

SEQ ID NO: 116377 - DNA, 19 bp, Homo sapiens
  siRNA target sequence for DAAM1 (NM_014992.1,676-694).
gtataaaggcgttaatgaa

SEQ ID NO: 116378 - DNA, 19 bp, Homo sapiens
  siRNA target sequence for DAAM1 (NM_014992.1,723-741).
gctcattctgagagtatta

SEQ ID NO: 116379 - DNA, 19 bp, Homo sapiens
  siRNA target sequence for DAAM1 (NM_014992.1,734-752).
gagtattaatgtaattgct

SEQ ID NO: 116380 - DNA, 19 bp, Homo sapiens
  siRNA target sequence for DAAM1 (NM_014992.1,886-904).
ggacccgctttcagacatt

SEQ ID NO: 116381 - DNA, 19 bp, Homo sapiens
  siRNA target sequence for DAAM1 (NM_014992.1,887-905).
gacccgctttcagacatta

SEQ ID NO: 116382 - DNA, 19 bp, Homo sapiens
  siRNA target sequence for DAAM1 (NM_014992.1,889-907).
cccgctttcagacattaat

SEQ ID NO: 116383 - DNA, 19 bp, Homo sapiens
  siRNA target sequence for DAAM1 (NM_014992.1,891-909).
cgctttcagacattaatta

SEQ ID NO: 116384 - DNA, 19 bp, Homo sapiens
  siRNA target sequence for DAAM1 (NM_014992.1,931-949).
ggcggtatcgagatgaagt

SEQ ID NO: 116385 - DNA, 19 bp, Homo sapiens
  siRNA target sequence for DAAM1 (NM_014992.1,1039-1057).
gctatgaatttctgatgtt

SEQ ID NO: 116386 - DNA, 19 bp, Homo sapiens
  siRNA target sequence for DAAM1 (NM_014992.1,1065-1083).
caacctgtaatagataaat

SEQ ID NO: 116387 - DNA, 19 bp, Homo sapiens
  siRNA target sequence for DAAM1 (NM_014992.1,1094-1112).
cgaaaattcaacattagat

SEQ ID NO: 116388 - DNA, 19 bp, Homo sapiens
  siRNA target sequence for DAAM1 (NM_014992.1,1171-1189).
gatttgaactggttcacat

SEQ ID NO: 116389 - DNA, 19 bp, Homo sapiens
  siRNA target sequence for DAAM1 (NM_014992.1,1176-1194).
gaactggttcacatagaca

SEQ ID NO: 116390 - DNA, 19 bp, Homo sapiens
  siRNA target sequence for DAAM1 (NM_014992.1,1232-1250).
gaggctgacacatagtgaa

SEQ ID NO: 116391 - DNA, 19 bp, Homo sapiens
  siRNA target sequence for DAAM1 (NM_014992.1,1325-1343).
gtactggctactactagat

SEQ ID NO: 116392 - DNA, 19 bp, Homo sapiens
  siRNA target sequence for DAAM1 (NM_014992.1,1328-1346).
ctggctactactagataga

SEQ ID NO: 116393 - DNA, 19 bp, Homo sapiens
  siRNA target sequence for DAAM1 (NM_014992.1,1345-1363).
gaattatacagcagatagt

SEQ ID NO: 116394 - DNA, 19 bp, Homo sapiens
  siRNA target sequence for DAAM1 (NM_014992.1,1392-1410).
gactccacacctttggaaa

SEQ ID NO: 116395 - DNA, 19 bp, Homo sapiens
  siRNA target sequence for DAAM1 (NM_014992.1,1428-1446).
gtcgtacgaatgttggtta

SEQ ID NO: 116396 - DNA, 19 bp, Homo sapiens
  siRNA target sequence for DAAM1 (NM_014992.1,1430-1448).
cgtacgaatgttggttaat

SEQ ID NO: 116397 - DNA, 19 bp, Homo sapiens
  siRNA target sequence for DAAM1 (NM_014992.1,1476-1494).
caagcggaaaaaatgagaa

SEQ ID NO: 116398 - DNA, 19 bp, Homo sapiens
  siRNA target sequence for DAAM1 (NM_014992.1,1616-1634).
gactactgagcataagcaa

SEQ ID NO: 116399 - DNA, 19 bp, Homo sapiens
  siRNA target sequence for DAAM1 (NM_014992.1,1621-1639).
ctgagcataagcaagtcaa

SEQ ID NO: 116400 - DNA, 19 bp, Homo sapiens
  siRNA target sequence for DAAM1 (NM_014992.1,1687-1705).
gggccgtctgtgcttcaat

SEQ ID NO: 116401 - DNA, 19 bp, Homo sapiens
  siRNA target sequence for DAAM1 (NM_014992.1,1867-1885).
ctcccttaggggcaatcat

SEQ ID NO: 116402 - DNA, 19 bp, Homo sapiens
  siRNA target sequence for DAAM1 (NM_014992.1,1950-1968).
gccctgaaatccttcaact

SEQ ID NO: 116403 - DNA, 19 bp, Homo sapiens
  siRNA target sequence for DAAM1 (NM_014992.1,1960-1978).
ccttcaactggtctaaact

SEQ ID NO: 116404 - DNA, 19 bp, Homo sapiens
  siRNA target sequence for DAAM1 (NM_014992.1,1972-1990).
ctaaactgcccgagaacaa

SEQ ID NO: 116405 - DNA, 19 bp, Homo sapiens
  siRNA target sequence for DAAM1 (NM_014992.1,2009-2027).
gaccgaaattgatgataca

SEQ ID NO: 116406 - DNA, 19 bp, Homo sapiens
  siRNA target sequence for DAAM1 (NM_014992.1,2086-2104).
gacagcaggatttctttgt

SEQ ID NO: 116407 - DNA, 19 bp, Homo sapiens
  siRNA target sequence for DAAM1 (NM_014992.1,2149-2167).
ctctgagttccaaacttaa

SEQ ID NO: 116408 - DNA, 19 bp, Homo sapiens
  siRNA target sequence for DAAM1 (NM_014992.1,2153-2171).
gagttccaaacttaaagtt

SEQ ID NO: 116409 - DNA, 19 bp, Homo sapiens
  siRNA target sequence for DAAM1 (NM_014992.1,2193-2211).
ggtcggagagctcagaatt

SEQ ID NO: 116410 - DNA, 19 bp, Homo sapiens
  siRNA target sequence for DAAM1 (NM_014992.1,2219-2237).
ccttctatcgaggttgaaa

SEQ ID NO: 116411 - DNA, 19 bp, Homo sapiens
  siRNA target sequence for DAAM1 (NM_014992.1,2220-2238).
cttctatcgaggttgaaat

SEQ ID NO: 116412 - DNA, 19 bp, Homo sapiens
  siRNA target sequence for DAAM1 (NM_014992.1,2223-2241).
ctatcgaggttgaaattat

SEQ ID NO: 116413 - DNA, 19 bp, Homo sapiens
  siRNA target sequence for DAAM1 (NM_014992.1,2228-2246).
gaggttgaaattatccaat

SEQ ID NO: 116414 - DNA, 19 bp, Homo sapiens
  siRNA target sequence for DAAM1 (NM_014992.1,2306-2324).
gttggaacagctcttgaaa

SEQ ID NO: 116415 - DNA, 19 bp, Homo sapiens
  siRNA target sequence for DAAM1 (NM_014992.1,2393-2411).
ggctgataggttccttttt

SEQ ID NO: 116416 - DNA, 19 bp, Homo sapiens
  siRNA target sequence for DAAM1 (NM_014992.1,2417-2435).
gagccgaattaatcactat

SEQ ID NO: 116417 - DNA, 19 bp, Homo sapiens
  siRNA target sequence for DAAM1 (NM_014992.1,2419-2437).
gccgaattaatcactatca

SEQ ID NO: 116418 - DNA, 19 bp, Homo sapiens
  siRNA target sequence for DAAM1 (NM_014992.1,2447-2465).
gcaatcgctgtacttcaaa

SEQ ID NO: 116419 - DNA, 19 bp, Homo sapiens
  siRNA target sequence for DAAM1 (NM_014992.1,2448-2466).
caatcgctgtacttcaaaa

SEQ ID NO: 116420 - DNA, 19 bp, Homo sapiens
  siRNA target sequence for DAAM1 (NM_014992.1,2689-2707).
cccttttgcactatctcat

SEQ ID NO: 116421 - DNA, 19 bp, Homo sapiens
  siRNA target sequence for DAAM1 (NM_014992.1,2696-2714).
gcactatctcatcactatt

SEQ ID NO: 116422 - DNA, 19 bp, Homo sapiens
  siRNA target sequence for DAAM1 (NM_014992.1,2726-2744).
gtaccccagtgttctcaat

SEQ ID NO: 116423 - DNA, 19 bp, Homo sapiens
  siRNA target sequence for DAAM1 (NM_014992.1,2729-2747).
ccccagtgttctcaatcta

SEQ ID NO: 116424 - DNA, 19 bp, Homo sapiens
  siRNA target sequence for DAAM1 (NM_014992.1,2730-2748).
cccagtgttctcaatctaa

SEQ ID NO: 116425 - DNA, 19 bp, Homo sapiens
  siRNA target sequence for DAAM1 (NM_014992.1,2734-2752).
gtgttctcaatctaaatga

SEQ ID NO: 116426 - DNA, 19 bp, Homo sapiens
  siRNA target sequence for DAAM1 (NM_014992.1,2769-2787).
cctcaagctgcgaaagtaa

SEQ ID NO: 116427 - DNA, 19 bp, Homo sapiens
  siRNA target sequence for DAAM1 (NM_014992.1,2772-2790).
caagctgcgaaagtaaaca

SEQ ID NO: 116428 - DNA, 19 bp, Homo sapiens
  siRNA target sequence for DAAM1 (NM_014992.1,2775-2793).
gctgcgaaagtaaacatga

SEQ ID NO: 116429 - DNA, 19 bp, Homo sapiens
  siRNA target sequence for DAAM1 (NM_014992.1,2875-2893).
ccccacagcccggagataa

SEQ ID NO: 116430 - DNA, 19 bp, Homo sapiens
  siRNA target sequence for DAAM1 (NM_014992.1,2878-2896).
cacagcccggagataagtt

SEQ ID NO: 116431 - DNA, 19 bp, Homo sapiens
  siRNA target sequence for DAAM1 (NM_014992.1,2883-2901).
cccggagataagtttgtgt

SEQ ID NO: 116432 - DNA, 19 bp, Homo sapiens
  siRNA target sequence for DAAM1 (NM_014992.1,2902-2920).
ctgttgtcagccagttcat

SEQ ID NO: 116433 - DNA, 19 bp, Homo sapiens
  siRNA target sequence for DAAM1 (NM_014992.1,2904-2922).
gttgtcagccagttcatca

SEQ ID NO: 116434 - DNA, 19 bp, Homo sapiens
  siRNA target sequence for DAAM1 (NM_014992.1,2957-2975).
ccttctagcagaagctaaa

SEQ ID NO: 116435 - DNA, 19 bp, Homo sapiens
  siRNA target sequence for DAAM1 (NM_014992.1,3264-3282).
gacaaagacctttctaaat

SEQ ID NO: 116436 - DNA, 19 bp, Homo sapiens
  siRNA target sequence for DAAM1 (NM_014992.1,3288-3306).
cggaatcgcaaacgtatta

SEQ ID NO: 116437 - DNA, 19 bp, Homo sapiens
  siRNA target sequence for DAAM1 (NM_014992.1,3335-3353).
gagaccaatcacaaaactt

SEQ ID NO: 116438 - DNA, 19 bp, Homo sapiens
  siRNA target sequence for DAAM2 (NM_015345.2,242-260).
gtgacatccccgaaatcaa

SEQ ID NO: 116439 - DNA, 19 bp, Homo sapiens
  siRNA target sequence for DAAM2 (NM_015345.2,397-415).
ctgccccctgagaagaaat

SEQ ID NO: 116440 - DNA, 19 bp, Homo sapiens
  siRNA target sequence for DAAM2 (NM_015345.2,470-488).
ccagctggcctgactatta

SEQ ID NO: 116441 - DNA, 19 bp, Homo sapiens
  siRNA target sequence for DAAM2 (NM_015345.2,473-491).
gctggcctgactattacat

SEQ ID NO: 116442 - DNA, 19 bp, Homo sapiens
  siRNA target sequence for DAAM2 (NM_015345.2,522-540).
gagtctgtacgcgtttgat

SEQ ID NO: 116443 - DNA, 19 bp, Homo sapiens
  siRNA target sequence for DAAM2 (NM_015345.2,524-542).
gtctgtacgcgtttgatga

SEQ ID NO: 116444 - DNA, 19 bp, Homo sapiens
  siRNA target sequence for DAAM2 (NM_015345.2,601-619).
cagcctatgaggtttgtga

SEQ ID NO: 116445 - DNA, 19 bp, Homo sapiens
  siRNA target sequence for DAAM2 (NM_015345.2,641-659).
gcttgacctgtctgctaaa

SEQ ID NO: 116446 - DNA, 19 bp, Homo sapiens
  siRNA target sequence for DAAM2 (NM_015345.2,642-660).
cttgacctgtctgctaaat

SEQ ID NO: 116447 - DNA, 19 bp, Homo sapiens
  siRNA target sequence for DAAM2 (NM_015345.2,647-665).
cctgtctgctaaatttcct

SEQ ID NO: 116448 - DNA, 19 bp, Homo sapiens
  siRNA target sequence for DAAM2 (NM_015345.2,719-737).
gctgcatcaaagcattgat

SEQ ID NO: 116449 - DNA, 19 bp, Homo sapiens
  siRNA target sequence for DAAM2 (NM_015345.2,981-999).
gtaccgggatgaagtgaat

SEQ ID NO: 116450 - DNA, 19 bp, Homo sapiens
  siRNA target sequence for DAAM2 (NM_015345.2,985-1003).
cgggatgaagtgaatctga

SEQ ID NO: 116451 - DNA, 19 bp, Homo sapiens
  siRNA target sequence for DAAM2 (NM_015345.2,1074-1092).
cctacatctacggtatgaa

SEQ ID NO: 116452 - DNA, 19 bp, Homo sapiens
  siRNA target sequence for DAAM2 (NM_015345.2,1075-1093).
ctacatctacggtatgaat

SEQ ID NO: 116453 - DNA, 19 bp, Homo sapiens
  siRNA target sequence for DAAM2 (NM_015345.2,1104-1122).
gggtatacagcctgtgatt

SEQ ID NO: 116454 - DNA, 19 bp, Homo sapiens
  siRNA target sequence for DAAM2 (NM_015345.2,1249-1267).
gcttcccagatgtttgagt

SEQ ID NO: 116455 - DNA, 19 bp, Homo sapiens
  siRNA target sequence for DAAM2 (NM_015345.2,1250-1268).
cttcccagatgtttgagtt

SEQ ID NO: 116456 - DNA, 19 bp, Homo sapiens
  siRNA target sequence for DAAM2 (NM_015345.2,1253-1271).
cccagatgtttgagttgat

SEQ ID NO: 116457 - DNA, 19 bp, Homo sapiens
  siRNA target sequence for DAAM2 (NM_015345.2,1391-1409).
gcatcctccagcagattgt

SEQ ID NO: 116458 - DNA, 19 bp, Homo sapiens
  siRNA target sequence for DAAM2 (NM_015345.2,1444-1462).
gctcccttggagaacttca

SEQ ID NO: 116459 - DNA, 19 bp, Homo sapiens
  siRNA target sequence for DAAM2 (NM_015345.2,1445-1463).
ctcccttggagaacttcaa

SEQ ID NO: 116460 - DNA, 19 bp, Homo sapiens
  siRNA target sequence for DAAM2 (NM_015345.2,1485-1503).
gctcatcaacgagaatgaa

SEQ ID NO: 116461 - DNA, 19 bp, Homo sapiens
  siRNA target sequence for DAAM2 (NM_015345.2,1491-1509).
caacgagaatgaagtgaaa

SEQ ID NO: 116462 - DNA, 19 bp, Homo sapiens
  siRNA target sequence for DAAM2 (NM_015345.2,1585-1603).
gaatgcgagacaaagacat

SEQ ID NO: 116463 - DNA, 19 bp, Homo sapiens
  siRNA target sequence for DAAM2 (NM_015345.2,1620-1638).
gatgcggacgctgaacaaa

SEQ ID NO: 116464 - DNA, 19 bp, Homo sapiens
  siRNA target sequence for DAAM2 (NM_015345.2,1624-1642).
cggacgctgaacaaaatga

SEQ ID NO: 116465 - DNA, 19 bp, Homo sapiens
  siRNA target sequence for DAAM2 (NM_015345.2,1725-1743).
ctcaacaggccctgtatct

SEQ ID NO: 116466 - DNA, 19 bp, Homo sapiens
  siRNA target sequence for DAAM2 (NM_015345.2,1951-1969).
gacgtcccactcaggaaaa

SEQ ID NO: 116467 - DNA, 19 bp, Homo sapiens
  siRNA target sequence for DAAM2 (NM_015345.2,2037-2055).
ccctggcaccgtatggaat

SEQ ID NO: 116468 - DNA, 19 bp, Homo sapiens
  siRNA target sequence for DAAM2 (NM_015345.2,2045-2063).
ccgtatggaatgagattga

SEQ ID NO: 116469 - DNA, 19 bp, Homo sapiens
  siRNA target sequence for DAAM2 (NM_015345.2,2046-2064).
cgtatggaatgagattgat

SEQ ID NO: 116470 - DNA, 19 bp, Homo sapiens
  siRNA target sequence for DAAM2 (NM_015345.2,2240-2258).
ccaagttgaagctttctaa

SEQ ID NO: 116471 - DNA, 19 bp, Homo sapiens
  siRNA target sequence for DAAM2 (NM_015345.2,2373-2391).
ggagcacaagcatgaaatt

SEQ ID NO: 116472 - DNA, 19 bp, Homo sapiens
  siRNA target sequence for DAAM2 (NM_015345.2,2413-2431).
cgcttcctctatgaaatga

SEQ ID NO: 116473 - DNA, 19 bp, Homo sapiens
  siRNA target sequence for DAAM2 (NM_015345.2,2553-2571).
ccgcagcaagcgtcttaga

SEQ ID NO: 116474 - DNA, 19 bp, Homo sapiens
  siRNA target sequence for DAAM2 (NM_015345.2,2555-2573).
gcagcaagcgtcttagaca

SEQ ID NO: 116475 - DNA, 19 bp, Homo sapiens
  siRNA target sequence for DAAM2 (NM_015345.2,2590-2608).
ctagccataggcaacttca

SEQ ID NO: 116476 - DNA, 19 bp, Homo sapiens
  siRNA target sequence for DAAM2 (NM_015345.2,2914-2932).
gtcatgagcgacttcatca

SEQ ID NO: 116477 - DNA, 19 bp, Homo sapiens
  siRNA target sequence for DAAM2 (NM_015345.2,3036-3054).
gcagccagacgaattcttt

SEQ ID NO: 116478 - DNA, 19 bp, Homo sapiens
  siRNA target sequence for DAAM2 (NM_015345.2,3045-3063).
cgaattctttggcatcttt

SEQ ID NO: 116479 - DNA, 19 bp, Homo sapiens
  siRNA target sequence for DAAM2 (NM_015345.2,3283-3301).
gtcttcgacaaggacttat

SEQ ID NO: 116480 - DNA, 19 bp, Homo sapiens
  siRNA target sequence for DAAM2 (NM_015345.2,3353-3371).
cccgggagcgggcaataaa

SEQ ID NO: 116481 - DNA, 19 bp, Homo sapiens
  siRNA target sequence for DAAM2 (NM_015345.2,3363-3381).
ggcaataaaccggctaaat

SEQ ID NO: 116482 - DNA, 19 bp, Homo sapiens
  siRNA target sequence for DAAM2 (NM_015345.2,3364-3382).
gcaataaaccggctaaatt

SEQ ID NO: 116483 - DNA, 19 bp, Homo sapiens
  siRNA target sequence for DAAM2 (NM_015345.2,3365-3383).
caataaaccggctaaatta

SEQ ID NO: 116484 - DNA, 19 bp, Homo sapiens
  siRNA target sequence for DBN1 (NM_004395.2,367-385).
ctgctctgccaaaatacgt

SEQ ID NO: 116485 - DNA, 19 bp, Homo sapiens
  siRNA target sequence for DBN1 (NM_004395.2,376-394).
caaaatacgtgctcatcaa

SEQ ID NO: 116486 - DNA, 19 bp, Homo sapiens
  siRNA target sequence for DBN1 (NM_004395.2,451-469).
ctaaggtggcagagttctt

SEQ ID NO: 116487 - DNA, 19 bp, Homo sapiens
  siRNA target sequence for DBN1 (NM_004395.2,854-872).
gaaacagcagactttagaa

SEQ ID NO: 116488 - DNA, 19 bp, Homo sapiens
  siRNA target sequence for DBN1 (NM_004395.2,974-992).
ggaggcagcagctattatt

SEQ ID NO: 116489 - DNA, 19 bp, Homo sapiens
  siRNA target sequence for DBN1 (NM_004395.2,1183-1201).
ctgtcgctgagcagataga

SEQ ID NO: 116490 - DNA, 19 bp, Homo sapiens
  siRNA target sequence for DBN1 (NM_004395.2,1395-1413).
gcagaggacttgatgttca

SEQ ID NO: 116491 - DNA, 19 bp, Homo sapiens
  siRNA target sequence for DBN1 (NM_004395.2,1928-1946).
ggggtacttcagtcaatca

SEQ ID NO: 116492 - DNA, 19 bp, Homo sapiens
  siRNA target sequence for DBN1 (NM_004395.2,1930-1948).
ggtacttcagtcaatcaca

SEQ ID NO: 116493 - DNA, 19 bp, Homo sapiens
  siRNA target sequence for DBN1 (NM_004395.2,2019-2037).
ccagagatcgacatcacat

SEQ ID NO: 116494 - DNA, 19 bp, Homo sapiens
  siRNA target sequence for DIAPH1 (NM_005219.2,125-143).
cggcaaatctaagaaattt

SEQ ID NO: 116495 - DNA, 19 bp, Homo sapiens
  siRNA target sequence for DIAPH1 (NM_005219.2,179-197).
gaaggaaaagcccaattct

SEQ ID NO: 116496 - DNA, 19 bp, Homo sapiens
  siRNA target sequence for DIAPH1 (NM_005219.2,372-390).
gtgtcccaatacttgtaca

SEQ ID NO: 116497 - DNA, 19 bp, Homo sapiens
  siRNA target sequence for DIAPH1 (NM_005219.2,504-522).
cgtgtgtctctcaacaaca

SEQ ID NO: 116498 - DNA, 19 bp, Homo sapiens
  siRNA target sequence for DIAPH1 (NM_005219.2,528-546).
gtcagttgggtgcaaacat

SEQ ID NO: 116499 - DNA, 19 bp, Homo sapiens
  siRNA target sequence for DIAPH1 (NM_005219.2,611-629).
gactgctgggagttacgat

SEQ ID NO: 116500 - DNA, 19 bp, Homo sapiens
  siRNA target sequence for DIAPH1 (NM_005219.2,654-672).
cgctgcttgaaagctttta

SEQ ID NO: 116501 - DNA, 19 bp, Homo sapiens
  siRNA target sequence for DIAPH1 (NM_005219.2,666-684).
gcttttatgaacaacaagt

SEQ ID NO: 116502 - DNA, 19 bp, Homo sapiens
  siRNA target sequence for DIAPH1 (NM_005219.2,750-768).
gctgttcccaacatgatga

SEQ ID NO: 116503 - DNA, 19 bp, Homo sapiens
  siRNA target sequence for DIAPH1 (NM_005219.2,833-851).
ggttttggaggcaatgaca

SEQ ID NO: 116504 - DNA, 19 bp, Homo sapiens
  siRNA target sequence for DIAPH1 (NM_005219.2,887-905).
gccgctgctggatggatta

SEQ ID NO: 116505 - DNA, 19 bp, Homo sapiens
  siRNA target sequence for DIAPH1 (NM_005219.2,888-906).
ccgctgctggatggattaa

SEQ ID NO: 116506 - DNA, 19 bp, Homo sapiens
  siRNA target sequence for DIAPH1 (NM_005219.2,889-907).
cgctgctggatggattaaa

SEQ ID NO: 116507 - DNA, 19 bp, Homo sapiens
  siRNA target sequence for DIAPH1 (NM_005219.2,890-908).
gctgctggatggattaaaa

SEQ ID NO: 116508 - DNA, 19 bp, Homo sapiens
  siRNA target sequence for DIAPH1 (NM_005219.2,1068-1086).
gatatgagagtgcaactaa

SEQ ID NO: 116509 - DNA, 19 bp, Homo sapiens
  siRNA target sequence for DIAPH1 (NM_005219.2,1251-1269).
ctcttggtccgaaatgact

SEQ ID NO: 116510 - DNA, 19 bp, Homo sapiens
  siRNA target sequence for DIAPH1 (NM_005219.2,1253-1271).
cttggtccgaaatgactat

SEQ ID NO: 116511 - DNA, 19 bp, Homo sapiens
  siRNA target sequence for DIAPH1 (NM_005219.2,1274-1292).
ggccagacctcagtactat

SEQ ID NO: 116512 - DNA, 19 bp, Homo sapiens
  siRNA target sequence for DIAPH1 (NM_005219.2,1275-1293).
gccagacctcagtactata

SEQ ID NO: 116513 - DNA, 19 bp, Homo sapiens
  siRNA target sequence for DIAPH1 (NM_005219.2,1279-1297).
gacctcagtactataagtt

SEQ ID NO: 116514 - DNA, 19 bp, Homo sapiens
  siRNA target sequence for DIAPH1 (NM_005219.2,1281-1299).
cctcagtactataagttga

SEQ ID NO: 116515 - DNA, 19 bp, Homo sapiens
  siRNA target sequence for DIAPH1 (NM_005219.2,1282-1300).
ctcagtactataagttgat

SEQ ID NO: 116516 - DNA, 19 bp, Homo sapiens
  siRNA target sequence for DIAPH1 (NM_005219.2,1286-1304).
gtactataagttgattgaa

SEQ ID NO: 116517 - DNA, 19 bp, Homo sapiens
  siRNA target sequence for DIAPH1 (NM_005219.2,1295-1313).
gttgattgaagaatgtatt

SEQ ID NO: 116518 - DNA, 19 bp, Homo sapiens
  siRNA target sequence for DIAPH1 (NM_005219.2,1309-1327).
gtatttcccagatagttct

SEQ ID NO: 116519 - DNA, 19 bp, Homo sapiens
  siRNA target sequence for DIAPH1 (NM_005219.2,1360-1378).
gccggcacctccagattga

SEQ ID NO: 116520 - DNA, 19 bp, Homo sapiens
  siRNA target sequence for DIAPH1 (NM_005219.2,1395-1413).
gatcaaatgattgataaga

SEQ ID NO: 116521 - DNA, 19 bp, Homo sapiens
  siRNA target sequence for DIAPH1 (NM_005219.2,1398-1416).
caaatgattgataagacaa

SEQ ID NO: 116522 - DNA, 19 bp, Homo sapiens
  siRNA target sequence for DIAPH1 (NM_005219.2,1691-1709).
cctctctgcggcagctatt

SEQ ID NO: 116523 - DNA, 19 bp, Homo sapiens
  siRNA target sequence for DIAPH1 (NM_005219.2,1692-1710).
ctctctgcggcagctatta

SEQ ID NO: 116524 - DNA, 19 bp, Homo sapiens
  siRNA target sequence for DIAPH1 (NM_005219.2,1772-1790).
ctctggcactattattcca

SEQ ID NO: 116525 - DNA, 19 bp, Homo sapiens
  siRNA target sequence for DIAPH1 (NM_005219.2,2391-2409).
gaacttttcgccaaactta

SEQ ID NO: 116526 - DNA, 19 bp, Homo sapiens
  siRNA target sequence for DIAPH1 (NM_005219.2,2496-2514).
gagttaaaggtgttggatt

SEQ ID NO: 116527 - DNA, 19 bp, Homo sapiens
  siRNA target sequence for DIAPH1 (NM_005219.2,2552-2570).
cttccgcatgccctatcaa

SEQ ID NO: 116528 - DNA, 19 bp, Homo sapiens
  siRNA target sequence for DIAPH1 (NM_005219.2,2557-2575).
gcatgccctatcaagagat

SEQ ID NO: 116529 - DNA, 19 bp, Homo sapiens
  siRNA target sequence for DIAPH1 (NM_005219.2,2558-2576).
catgccctatcaagagatt

SEQ ID NO: 116530 - DNA, 19 bp, Homo sapiens
  siRNA target sequence for DIAPH1 (NM_005219.2,2562-2580).
ccctatcaagagattaaga

SEQ ID NO: 116531 - DNA, 19 bp, Homo sapiens
  siRNA target sequence for DIAPH1 (NM_005219.2,2607-2625).
gttctgactgagtctatga

SEQ ID NO: 116532 - DNA, 19 bp, Homo sapiens
  siRNA target sequence for DIAPH1 (NM_005219.2,2627-2645).
ccagaacctcattaagcaa

SEQ ID NO: 116533 - DNA, 19 bp, Homo sapiens
  siRNA target sequence for DIAPH1 (NM_005219.2,2628-2646).
cagaacctcattaagcaaa

SEQ ID NO: 116534 - DNA, 19 bp, Homo sapiens
  siRNA target sequence for DIAPH1 (NM_005219.2,2760-2778).
cgcctcaatgccattctct

SEQ ID NO: 116535 - DNA, 19 bp, Homo sapiens
  siRNA target sequence for DIAPH1 (NM_005219.2,2794-2812).
gcgagcaagtggagaatat

SEQ ID NO: 116536 - DNA, 19 bp, Homo sapiens
  siRNA target sequence for DIAPH1 (NM_005219.2,2841-2859).
gcatgtgaggagttacgta

SEQ ID NO: 116537 - DNA, 19 bp, Homo sapiens
  siRNA target sequence for DIAPH1 (NM_005219.2,2842-2860).
catgtgaggagttacgtaa

SEQ ID NO: 116538 - DNA, 19 bp, Homo sapiens
  siRNA target sequence for DIAPH1 (NM_005219.2,2856-2874).
cgtaagagtgagagctttt

SEQ ID NO: 116539 - DNA, 19 bp, Homo sapiens
  siRNA target sequence for DIAPH1 (NM_005219.2,2861-2879).
gagtgagagcttttccaat

SEQ ID NO: 116540 - DNA, 19 bp, Homo sapiens
  siRNA target sequence for DIAPH1 (NM_005219.2,2937-2955).
ggtgcttttggcttcaata

SEQ ID NO: 116541 - DNA, 19 bp, Homo sapiens
  siRNA target sequence for DIAPH1 (NM_005219.2,2938-2956).
gtgcttttggcttcaatat

SEQ ID NO: 116542 - DNA, 19 bp, Homo sapiens
  siRNA target sequence for DIAPH1 (NM_005219.2,3025-3043).
ctgagttgtgtgagaatga

SEQ ID NO: 116543 - DNA, 19 bp, Homo sapiens
  siRNA target sequence for DIAPH1 (NM_005219.2,3029-3047).
gttgtgtgagaatgactat

SEQ ID NO: 116544 - DNA, 19 bp, Homo sapiens
  siRNA target sequence for DIAPH1 (NM_005219.2,3089-3107).
gaaagccagccgagtttct

SEQ ID NO: 116545 - DNA, 19 bp, Homo sapiens
  siRNA target sequence for DIAPH1 (NM_005219.2,3239-3257).
ggatgcacaggaacagtat

SEQ ID NO: 116546 - DNA, 19 bp, Homo sapiens
  siRNA target sequence for DIAPH1 (NM_005219.2,3240-3258).
gatgcacaggaacagtata

SEQ ID NO: 116547 - DNA, 19 bp, Homo sapiens
  siRNA target sequence for DIAPH1 (NM_005219.2,3264-3282).
ctgcggatgatgcattcta

SEQ ID NO: 116548 - DNA, 19 bp, Homo sapiens
  siRNA target sequence for DIAPH1 (NM_005219.2,3310-3328).
gcgagtacttcctctttga

SEQ ID NO: 116549 - DNA, 19 bp, Homo sapiens
  siRNA target sequence for DIAPH1 (NM_005219.2,3359-3377).
catggatcttcacaatttt

SEQ ID NO: 116550 - DNA, 19 bp, Homo sapiens
  siRNA target sequence for DIAPH1 (NM_005219.2,3371-3389).
caattttcggaatatgttt

SEQ ID NO: 116551 - DNA, 19 bp, Homo sapiens
  siRNA target sequence for DIAPH1 (NM_005219.2,3437-3455).
gatgaggcgagcaaaacta

SEQ ID NO: 116552 - DNA, 19 bp, Homo sapiens
  siRNA target sequence for DIAPH1 (NM_005219.2,3502-3520).
gagagcaactcatagacat

SEQ ID NO: 116553 - DNA, 19 bp, Homo sapiens
  siRNA target sequence for DIAPH2 (NM_006729.2,470-488).
caaacccaaattgaacatt

SEQ ID NO: 116554 - DNA, 19 bp, Homo sapiens
  siRNA target sequence for DIAPH2 (NM_006729.2,474-492).
cccaaattgaacattcaaa

SEQ ID NO: 116555 - DNA, 19 bp, Homo sapiens
  siRNA target sequence for DIAPH2 (NM_006729.2,475-493).
ccaaattgaacattcaaat

SEQ ID NO: 116556 - DNA, 19 bp, Homo sapiens
  siRNA target sequence for DIAPH2 (NM_006729.2,510-528).
gatgtgcgtgaccgaatta

SEQ ID NO: 116557 - DNA, 19 bp, Homo sapiens
  siRNA target sequence for DIAPH2 (NM_006729.2,513-531).
gtgcgtgaccgaattacaa

SEQ ID NO: 116558 - DNA, 19 bp, Homo sapiens
  siRNA target sequence for DIAPH2 (NM_006729.2,515-533).
gcgtgaccgaattacaagt

SEQ ID NO: 116559 - DNA, 19 bp, Homo sapiens
  siRNA target sequence for DIAPH2 (NM_006729.2,516-534).
cgtgaccgaattacaagtt

SEQ ID NO: 116560 - DNA, 19 bp, Homo sapiens
  siRNA target sequence for DIAPH2 (NM_006729.2,517-535).
gtgaccgaattacaagttt

SEQ ID NO: 116561 - DNA, 19 bp, Homo sapiens
  siRNA target sequence for DIAPH2 (NM_006729.2,612-630).
cctgcagctcagccattat

SEQ ID NO: 116562 - DNA, 19 bp, Homo sapiens
  siRNA target sequence for DIAPH2 (NM_006729.2,613-631).
ctgcagctcagccattata

SEQ ID NO: 116563 - DNA, 19 bp, Homo sapiens
  siRNA target sequence for DIAPH2 (NM_006729.2,616-634).
cagctcagccattatatga

SEQ ID NO: 116564 - DNA, 19 bp, Homo sapiens
  siRNA target sequence for DIAPH2 (NM_006729.2,619-637).
ctcagccattatatgatga

SEQ ID NO: 116565 - DNA, 19 bp, Homo sapiens
  siRNA target sequence for DIAPH2 (NM_006729.2,633-651).
gatgaacgatctttgaatt

SEQ ID NO: 116566 - DNA, 19 bp, Homo sapiens
  siRNA target sequence for DIAPH2 (NM_006729.2,695-713).
ggacatgaaccttaacgaa

SEQ ID NO: 116567 - DNA, 19 bp, Homo sapiens
  siRNA target sequence for DIAPH2 (NM_006729.2,716-734).
gaaaaaagctcctttacga

SEQ ID NO: 116568 - DNA, 19 bp, Homo sapiens
  siRNA target sequence for DIAPH2 (NM_006729.2,724-742).
ctcctttacgaaacaaaga

SEQ ID NO: 116569 - DNA, 19 bp, Homo sapiens
  siRNA target sequence for DIAPH2 (NM_006729.2,726-744).
cctttacgaaacaaagact

SEQ ID NO: 116570 - DNA, 19 bp, Homo sapiens
  siRNA target sequence for DIAPH2 (NM_006729.2,759-777).
gagatggttgtccagtata

SEQ ID NO: 116571 - DNA, 19 bp, Homo sapiens
  siRNA target sequence for DIAPH2 (NM_006729.2,761-779).
gatggttgtccagtatatt

SEQ ID NO: 116572 - DNA, 19 bp, Homo sapiens
  siRNA target sequence for DIAPH2 (NM_006729.2,827-845).
caccctgtcttcacaagaa

SEQ ID NO: 116573 - DNA, 19 bp, Homo sapiens
  siRNA target sequence for DIAPH2 (NM_006729.2,829-847).
ccctgtcttcacaagaata

SEQ ID NO: 116574 - DNA, 19 bp, Homo sapiens
  siRNA target sequence for DIAPH2 (NM_006729.2,830-848).
cctgtcttcacaagaatat

SEQ ID NO: 116575 - DNA, 19 bp, Homo sapiens
  siRNA target sequence for DIAPH2 (NM_006729.2,833-851).
gtcttcacaagaatatgtt

SEQ ID NO: 116576 - DNA, 19 bp, Homo sapiens
  siRNA target sequence for DIAPH2 (NM_006729.2,855-873).
gaattacgatcgggtatat

SEQ ID NO: 116577 - DNA, 19 bp, Homo sapiens
  siRNA target sequence for DIAPH2 (NM_006729.2,865-883).
cgggtatatcagatgagaa

SEQ ID NO: 116578 - DNA, 19 bp, Homo sapiens
  siRNA target sequence for DIAPH2 (NM_006729.2,866-884).
gggtatatcagatgagaaa

SEQ ID NO: 116579 - DNA, 19 bp, Homo sapiens
  siRNA target sequence for DIAPH2 (NM_006729.2,868-886).
gtatatcagatgagaaact

SEQ ID NO: 116580 - DNA, 19 bp, Homo sapiens
  siRNA target sequence for DIAPH2 (NM_006729.2,930-948).
ccggtcagctgggttaaca

SEQ ID NO: 116581 - DNA, 19 bp, Homo sapiens
  siRNA target sequence for DIAPH2 (NM_006729.2,931-949).
cggtcagctgggttaacaa

SEQ ID NO: 116582 - DNA, 19 bp, Homo sapiens
  siRNA target sequence for DIAPH2 (NM_006729.2,933-951).
gtcagctgggttaacaact

SEQ ID NO: 116583 - DNA, 19 bp, Homo sapiens
  siRNA target sequence for DIAPH2 (NM_006729.2,935-953).
cagctgggttaacaacttt

SEQ ID NO: 116584 - DNA, 19 bp, Homo sapiens
  siRNA target sequence for DIAPH2 (NM_006729.2,964-982).
gtcttggactcttattgga

SEQ ID NO: 116585 - DNA, 19 bp, Homo sapiens
  siRNA target sequence for DIAPH2 (NM_006729.2,1058-1076).
cctcaaagcatttatgaat

SEQ ID NO: 116586 - DNA, 19 bp, Homo sapiens
  siRNA target sequence for DIAPH2 (NM_006729.2,1110-1128).
gaaagaagtcttttactat

SEQ ID NO: 116587 - DNA, 19 bp, Homo sapiens
  siRNA target sequence for DIAPH2 (NM_006729.2,1146-1164).
cccaaacaacccaacatga

SEQ ID NO: 116588 - DNA, 19 bp, Homo sapiens
  siRNA target sequence for DIAPH2 (NM_006729.2,1147-1165).
ccaaacaacccaacatgat

SEQ ID NO: 116589 - DNA, 19 bp, Homo sapiens
  siRNA target sequence for DIAPH2 (NM_006729.2,1198-1216).
gcattgttggagaagagaa

SEQ ID NO: 116590 - DNA, 19 bp, Homo sapiens
  siRNA target sequence for DIAPH2 (NM_006729.2,1261-1279).
gaaataacagggaacgatt

SEQ ID NO: 116591 - DNA, 19 bp, Homo sapiens
  siRNA target sequence for DIAPH2 (NM_006729.2,1366-1384).
ctccttatgagcttgattt

SEQ ID NO: 116592 - DNA, 19 bp, Homo sapiens
  siRNA target sequence for DIAPH2 (NM_006729.2,1376-1394).
gcttgattttcgaatacat

SEQ ID NO: 116593 - DNA, 19 bp, Homo sapiens
  siRNA target sequence for DIAPH2 (NM_006729.2,1377-1395).
cttgattttcgaatacatt

SEQ ID NO: 116594 - DNA, 19 bp, Homo sapiens
  siRNA target sequence for DIAPH2 (NM_006729.2,1409-1427).
cctccgttcaggactaaaa

SEQ ID NO: 116595 - DNA, 19 bp, Homo sapiens
  siRNA target sequence for DIAPH2 (NM_006729.2,1410-1428).
ctccgttcaggactaaaaa

SEQ ID NO: 116596 - DNA, 19 bp, Homo sapiens
  siRNA target sequence for DIAPH2 (NM_006729.2,1412-1430).
ccgttcaggactaaaaaca

SEQ ID NO: 116597 - DNA, 19 bp, Homo sapiens
  siRNA target sequence for DIAPH2 (NM_006729.2,1413-1431).
cgttcaggactaaaaacaa

SEQ ID NO: 116598 - DNA, 19 bp, Homo sapiens
  siRNA target sequence for DIAPH2 (NM_006729.2,1417-1435).
caggactaaaaacaatgtt

SEQ ID NO: 116599 - DNA, 19 bp, Homo sapiens
  siRNA target sequence for DIAPH2 (NM_006729.2,1455-1473).
gagaatgatgagcttgata

SEQ ID NO: 116600 - DNA, 19 bp, Homo sapiens
  siRNA target sequence for DIAPH2 (NM_006729.2,1457-1475).
gaatgatgagcttgatatt

SEQ ID NO: 116601 - DNA, 19 bp, Homo sapiens
  siRNA target sequence for DIAPH2 (NM_006729.2,1470-1488).
gatattcagttgaaagtat

SEQ ID NO: 116602 - DNA, 19 bp, Homo sapiens
  siRNA target sequence for DIAPH2 (NM_006729.2,1503-1521).
gaagatgacctaactgaat

SEQ ID NO: 116603 - DNA, 19 bp, Homo sapiens
  siRNA target sequence for DIAPH2 (NM_006729.2,1506-1524).
gatgacctaactgaattat

SEQ ID NO: 116604 - DNA, 19 bp, Homo sapiens
  siRNA target sequence for DIAPH2 (NM_006729.2,1525-1543).
cacaccgtctcaatgacat

SEQ ID NO: 116605 - DNA, 19 bp, Homo sapiens
  siRNA target sequence for DIAPH2 (NM_006729.2,1541-1559).
cattcgagcagaaatggat

SEQ ID NO: 116606 - DNA, 19 bp, Homo sapiens
  siRNA target sequence for DIAPH2 (NM_006729.2,1572-1590).
gtctaccatcttctatata

SEQ ID NO: 116607 - DNA, 19 bp, Homo sapiens
  siRNA target sequence for DIAPH2 (NM_006729.2,1574-1592).
ctaccatcttctatataat

SEQ ID NO: 116608 - DNA, 19 bp, Homo sapiens
  siRNA target sequence for DIAPH2 (NM_006729.2,1622-1640).
cttcttatctattctacaa

SEQ ID NO: 116609 - DNA, 19 bp, Homo sapiens
  siRNA target sequence for DIAPH2 (NM_006729.2,1625-1643).
cttatctattctacaacat

SEQ ID NO: 116610 - DNA, 19 bp, Homo sapiens
  siRNA target sequence for DIAPH2 (NM_006729.2,1649-1667).
gcttatcagaaatgattat

SEQ ID NO: 116611 - DNA, 19 bp, Homo sapiens
  siRNA target sequence for DIAPH2 (NM_006729.2,1675-1693).
ggccacaatattataaaat

SEQ ID NO: 116612 - DNA, 19 bp, Homo sapiens
  siRNA target sequence for DIAPH2 (NM_006729.2,1761-1779).
caaagattagacatcgatt

SEQ ID NO: 116613 - DNA, 19 bp, Homo sapiens
  siRNA target sequence for DIAPH2 (NM_006729.2,1775-1793).
cgatttaactcatctgata

SEQ ID NO: 116614 - DNA, 19 bp, Homo sapiens
  siRNA target sequence for DIAPH2 (NM_006729.2,1808-1826).
caaggcgaaagttgaagaa

SEQ ID NO: 116615 - DNA, 19 bp, Homo sapiens
  siRNA target sequence for DIAPH2 (NM_006729.2,1852-1870).
caaagaagttcgatgaaga

SEQ ID NO: 116616 - DNA, 19 bp, Homo sapiens
  siRNA target sequence for DIAPH2 (NM_006729.2,1965-1983).
gcacaagtactctcaagtt

SEQ ID NO: 116617 - DNA, 19 bp, Homo sapiens
  siRNA target sequence for DIAPH2 (NM_006729.2,1968-1986).
caagtactctcaagttcat

SEQ ID NO: 116618 - DNA, 19 bp, Homo sapiens
  siRNA target sequence for DIAPH2 (NM_006729.2,2095-2113).
ctcctttacctggaatgat

SEQ ID NO: 116619 - DNA, 19 bp, Homo sapiens
  siRNA target sequence for DIAPH2 (NM_006729.2,2191-2209).
ctcccccaggaatatcact

SEQ ID NO: 116620 - DNA, 19 bp, Homo sapiens
  siRNA target sequence for DIAPH2 (NM_006729.2,2208-2226).
cttaatctaccttatggaa

SEQ ID NO: 116621 - DNA, 19 bp, Homo sapiens
  siRNA target sequence for DIAPH2 (NM_006729.2,2253-2271).
gaagtgtccatgaagagaa

SEQ ID NO: 116622 - DNA, 19 bp, Homo sapiens
  siRNA target sequence for DIAPH2 (NM_006729.2,2309-2327).
gaactgtttctggttaaga

SEQ ID NO: 116623 - DNA, 19 bp, Homo sapiens
  siRNA target sequence for DIAPH2 (NM_006729.2,2482-2500).
ccaaaacagctcagaatct

SEQ ID NO: 116624 - DNA, 19 bp, Homo sapiens
  siRNA target sequence for DIAPH2 (NM_006729.2,2518-2536).
catatcgcatgccatatga

SEQ ID NO: 116625 - DNA, 19 bp, Homo sapiens
  siRNA target sequence for DIAPH2 (NM_006729.2,2528-2546).
gccatatgaagacataaga

SEQ ID NO: 116626 - DNA, 19 bp, Homo sapiens
  siRNA target sequence for DIAPH2 (NM_006729.2,2549-2567).
cgttattctggaggttaat

SEQ ID NO: 116627 - DNA, 19 bp, Homo sapiens
  siRNA target sequence for DIAPH2 (NM_006729.2,2581-2599).
gtgaggctttaattcagaa

SEQ ID NO: 116628 - DNA, 19 bp, Homo sapiens
  siRNA target sequence for DIAPH2 (NM_006729.2,2624-2642).
gaagatactcaacgaatta

SEQ ID NO: 116629 - DNA, 19 bp, Homo sapiens
  siRNA target sequence for DIAPH2 (NM_006729.2,2627-2645).
gatactcaacgaattagca

SEQ ID NO: 116630 - DNA, 19 bp, Homo sapiens
  siRNA target sequence for DIAPH2 (NM_006729.2,2643-2661).
gcagagcttaagaatgaat

SEQ ID NO: 116631 - DNA, 19 bp, Homo sapiens
  siRNA target sequence for DIAPH2 (NM_006729.2,2672-2690).
ctgtgagcctgaacaattt

SEQ ID NO: 116632 - DNA, 19 bp, Homo sapiens
  siRNA target sequence for DIAPH2 (NM_006729.2,2721-2739).
cagcctcgtctcagtagta

SEQ ID NO: 116633 - DNA, 19 bp, Homo sapiens
  siRNA target sequence for DIAPH2 (NM_006729.2,2753-2771).
cacatttgaagaacacata

SEQ ID NO: 116634 - DNA, 19 bp, Homo sapiens
  siRNA target sequence for DIAPH2 (NM_006729.2,2788-2806).
gcatcatagcagtaactct

SEQ ID NO: 116635 - DNA, 19 bp, Homo sapiens
  siRNA target sequence for DIAPH2 (NM_006729.2,2868-2886).
gttggaaactacatgaact

SEQ ID NO: 116636 - DNA, 19 bp, Homo sapiens
  siRNA target sequence for DIAPH2 (NM_006729.2,2939-2957).
gatcagagatactaaatca

SEQ ID NO: 116637 - DNA, 19 bp, Homo sapiens
  siRNA target sequence for DIAPH2 (NM_006729.2,3039-3057).
gaactggaacacgtagaaa

SEQ ID NO: 116638 - DNA, 19 bp, Homo sapiens
  siRNA target sequence for DIAPH2 (NM_006729.2,3050-3068).
cgtagaaagtgcaagcaaa

SEQ ID NO: 116639 - DNA, 19 bp, Homo sapiens
  siRNA target sequence for DIAPH2 (NM_006729.2,3064-3082).
gcaaagtttcagctcaaat

SEQ ID NO: 116640 - DNA, 19 bp, Homo sapiens
  siRNA target sequence for DIAPH2 (NM_006729.2,3065-3083).
caaagtttcagctcaaatt

SEQ ID NO: 116641 - DNA, 19 bp, Homo sapiens
  siRNA target sequence for DIAPH2 (NM_006729.2,3149-3167).
cccccaagcagaaaatcaa

SEQ ID NO: 116642 - DNA, 19 bp, Homo sapiens
  siRNA target sequence for DIAPH2 (NM_006729.2,3159-3177).
gaaaatcaacacgataagt

SEQ ID NO: 116643 - DNA, 19 bp, Homo sapiens
  siRNA target sequence for DIAPH2 (NM_006729.2,3208-3226).
ctgcccgagaacagtatga

SEQ ID NO: 116644 - DNA, 19 bp, Homo sapiens
  siRNA target sequence for DIAPH2 (NM_006729.2,3238-3256).
ccatgcacaacaacatgat

SEQ ID NO: 116645 - DNA, 19 bp, Homo sapiens
  siRNA target sequence for DIAPH2 (NM_006729.2,3267-3285).
gagaatcttggagaatact

SEQ ID NO: 116646 - DNA, 19 bp, Homo sapiens
  siRNA target sequence for DIAPH2 (NM_006729.2,3304-3322).
cagtgagcatagaagagtt

SEQ ID NO: 116647 - DNA, 19 bp, Homo sapiens
  siRNA target sequence for DIAPH2 (NM_006729.2,3449-3467).
gttagaacgccagaagaaa

SEQ ID NO: 116648 - DNA, 19 bp, Homo sapiens
  siRNA target sequence for DIAPH2 (NM_006729.2,3564-3582).
cgtcgaaagcggattccaa

SEQ ID NO: 116649 - DNA, 19 bp, Homo sapiens
  siRNA target sequence for DIAPH2 (NM_006729.2,3579-3597).
ccaaggaatccagataaca

SEQ ID NO: 116650 - DNA, 19 bp, Homo sapiens
  siRNA target sequence for DIAPH2 (NM_006729.2,3596-3614).
cagacgagtacctttggaa

SEQ ID NO: 116651 - DNA, 19 bp, Homo sapiens
  siRNA target sequence for DMD (NM_000109.2,487-505).
gcctgacagggcaaaaact

SEQ ID NO: 116652 - DNA, 19 bp, Homo sapiens
  siRNA target sequence for DMD (NM_000109.2,529-547).
gagttcatgccctgaacaa

SEQ ID NO: 116653 - DNA, 19 bp, Homo sapiens
  siRNA target sequence for DMD (NM_000109.2,572-590).
gcagaacaataatgttgat

SEQ ID NO: 116654 - DNA, 19 bp, Homo sapiens
  siRNA target sequence for DMD (NM_000109.2,573-591).
cagaacaataatgttgatt

SEQ ID NO: 116655 - DNA, 19 bp, Homo sapiens
  siRNA target sequence for DMD (NM_000109.2,588-606).
gatttagtgaatattggaa

SEQ ID NO: 116656 - DNA, 19 bp, Homo sapiens
  siRNA target sequence for DMD (NM_000109.2,614-632).
catcgtagatggaaatcat

SEQ ID NO: 116657 - DNA, 19 bp, Homo sapiens
  siRNA target sequence for DMD (NM_000109.2,617-635).
cgtagatggaaatcataaa

SEQ ID NO: 116658 - DNA, 19 bp, Homo sapiens
  siRNA target sequence for DMD (NM_000109.2,666-684).
ctccactggcaggtcaaaa

SEQ ID NO: 116659 - DNA, 19 bp, Homo sapiens
  siRNA target sequence for DMD (NM_000109.2,671-689).
ctggcaggtcaaaaatgta

SEQ ID NO: 116660 - DNA, 19 bp, Homo sapiens
  siRNA target sequence for DMD (NM_000109.2,743-761).
gagctgggtccgacaatca

SEQ ID NO: 116661 - DNA, 19 bp, Homo sapiens
  siRNA target sequence for DMD (NM_000109.2,752-770).
ccgacaatcaactcgtaat

SEQ ID NO: 116662 - DNA, 19 bp, Homo sapiens
  siRNA target sequence for DMD (NM_000109.2,753-771).
cgacaatcaactcgtaatt

SEQ ID NO: 116663 - DNA, 19 bp, Homo sapiens
  siRNA target sequence for DMD (NM_000109.2,754-772).
gacaatcaactcgtaatta

SEQ ID NO: 116664 - DNA, 19 bp, Homo sapiens
  siRNA target sequence for DMD (NM_000109.2,766-784).
gtaattatccacaggttaa

SEQ ID NO: 116665 - DNA, 19 bp, Homo sapiens
  siRNA target sequence for DMD (NM_000109.2,774-792).
ccacaggttaatgtaatca

SEQ ID NO: 116666 - DNA, 19 bp, Homo sapiens
  siRNA target sequence for DMD (NM_000109.2,775-793).
cacaggttaatgtaatcaa

SEQ ID NO: 116667 - DNA, 19 bp, Homo sapiens
  siRNA target sequence for DMD (NM_000109.2,777-795).
caggttaatgtaatcaact

SEQ ID NO: 116668 - DNA, 19 bp, Homo sapiens
  siRNA target sequence for DMD (NM_000109.2,780-798).
gttaatgtaatcaacttca

SEQ ID NO: 116669 - DNA, 19 bp, Homo sapiens
  siRNA target sequence for DMD (NM_000109.2,844-862).
gtcataggccagacctatt

SEQ ID NO: 116670 - DNA, 19 bp, Homo sapiens
  siRNA target sequence for DMD (NM_000109.2,855-873).
gacctatttgactggaata

SEQ ID NO: 116671 - DNA, 19 bp, Homo sapiens
  siRNA target sequence for DMD (NM_000109.2,904-922).
gactggaacatgcattcaa

SEQ ID NO: 116672 - DNA, 19 bp, Homo sapiens
  siRNA target sequence for DMD (NM_000109.2,923-941).
catcgccagatatcaatta

SEQ ID NO: 116673 - DNA, 19 bp, Homo sapiens
  siRNA target sequence for DMD (NM_000109.2,979-997).
ccacctatccagataagaa

SEQ ID NO: 116674 - DNA, 19 bp, Homo sapiens
  siRNA target sequence for DMD (NM_000109.2,990-1008).
gataagaagtccatcttaa

SEQ ID NO: 116675 - DNA, 19 bp, Homo sapiens
  siRNA target sequence for DMD (NM_000109.2,1090-1108).
cacctaaagtgactaaaga

SEQ ID NO: 116676 - DNA, 19 bp, Homo sapiens
  siRNA target sequence for DMD (NM_000109.2,1098-1116).
gtgactaaagaagaacatt

SEQ ID NO: 116677 - DNA, 19 bp, Homo sapiens
  siRNA target sequence for DMD (NM_000109.2,1162-1180).
gtctagcacagggatatga

SEQ ID NO: 116678 - DNA, 19 bp, Homo sapiens
  siRNA target sequence for DMD (NM_000109.2,1164-1182).
ctagcacagggatatgaga

SEQ ID NO: 116679 - DNA, 19 bp, Homo sapiens
  siRNA target sequence for DMD (NM_000109.2,1194-1212).
cctaagcctcgattcaaga

SEQ ID NO: 116680 - DNA, 19 bp, Homo sapiens
  siRNA target sequence for DMD (NM_000109.2,1340-1358).
cctggaccgttatcaaaca

SEQ ID NO: 116681 - DNA, 19 bp, Homo sapiens
  siRNA target sequence for DMD (NM_000109.2,1346-1364).
ccgttatcaaacagcttta

SEQ ID NO: 116682 - DNA, 19 bp, Homo sapiens
  siRNA target sequence for DMD (NM_000109.2,1348-1366).
gttatcaaacagctttaga

SEQ ID NO: 116683 - DNA, 19 bp, Homo sapiens
  siRNA target sequence for DMD (NM_000109.2,1443-1461).
gtgaaagaccagtttcata

SEQ ID NO: 116684 - DNA, 19 bp, Homo sapiens
  siRNA target sequence for DMD (NM_000109.2,1504-1522).
gggttggtaatattctaca

SEQ ID NO: 116685 - DNA, 19 bp, Homo sapiens
  siRNA target sequence for DMD (NM_000109.2,1538-1556).
gattggaacaggaaaatta

SEQ ID NO: 116686 - DNA, 19 bp, Homo sapiens
  siRNA target sequence for DMD (NM_000109.2,1549-1567).
gaaaattatcagaagatga

SEQ ID NO: 116687 - DNA, 19 bp, Homo sapiens
  siRNA target sequence for DMD (NM_000109.2,1586-1604).
gcagatgaatctcctaaat

SEQ ID NO: 116688 - DNA, 19 bp, Homo sapiens
  siRNA target sequence for DMD (NM_000109.2,1592-1610).
gaatctcctaaattcaaga

SEQ ID NO: 116689 - DNA, 19 bp, Homo sapiens
  siRNA target sequence for DMD (NM_000109.2,1775-1793).
cctaaaacgccaagtacaa

SEQ ID NO: 116690 - DNA, 19 bp, Homo sapiens
  siRNA target sequence for DMD (NM_000109.2,1827-1845).
gaacaagtcagggtcaatt

SEQ ID NO: 116691 - DNA, 19 bp, Homo sapiens
  siRNA target sequence for DMD (NM_000109.2,1856-1874).
catggtggtggtagttgat

SEQ ID NO: 116692 - DNA, 19 bp, Homo sapiens
  siRNA target sequence for DMD (NM_000109.2,1863-1881).
gtggtagttgatgaatcta

SEQ ID NO: 116693 - DNA, 19 bp, Homo sapiens
  siRNA target sequence for DMD (NM_000109.2,1865-1883).
ggtagttgatgaatctagt

SEQ ID NO: 116694 - DNA, 19 bp, Homo sapiens
  siRNA target sequence for DMD (NM_000109.2,1907-1925).
ggaagaacaacttaaggta

SEQ ID NO: 116695 - DNA, 19 bp, Homo sapiens
  siRNA target sequence for DMD (NM_000109.2,1908-1926).
gaagaacaacttaaggtat

SEQ ID NO: 116696 - DNA, 19 bp, Homo sapiens
  siRNA target sequence for DMD (NM_000109.2,1930-1948).
gagatcgatgggcaaacat

SEQ ID NO: 116697 - DNA, 19 bp, Homo sapiens
  siRNA target sequence for DMD (NM_000109.2,1932-1950).
gatcgatgggcaaacatct

SEQ ID NO: 116698 - DNA, 19 bp, Homo sapiens
  siRNA target sequence for DMD (NM_000109.2,1935-1953).
cgatgggcaaacatctgta

SEQ ID NO: 116699 - DNA, 19 bp, Homo sapiens
  siRNA target sequence for DMD (NM_000109.2,2108-2126).
gttatcaagtcttcaaaaa

SEQ ID NO: 116700 - DNA, 19 bp, Homo sapiens
  siRNA target sequence for DMD (NM_000109.2,2163-2181).
caatccatgggcaaactgt

SEQ ID NO: 116701 - DNA, 19 bp, Homo sapiens
  siRNA target sequence for DMD (NM_000109.2,2180-2198).
gtattcactcaaacaagat

SEQ ID NO: 116702 - DNA, 19 bp, Homo sapiens
  siRNA target sequence for DMD (NM_000109.2,2187-2205).
ctcaaacaagatcttcttt

SEQ ID NO: 116703 - DNA, 19 bp, Homo sapiens
  siRNA target sequence for DMD (NM_000109.2,2189-2207).
caaacaagatcttctttca

SEQ ID NO: 116704 - DNA, 19 bp, Homo sapiens
  siRNA target sequence for DMD (NM_000109.2,2239-2257).
cggaagcatggctggataa

SEQ ID NO: 116705 - DNA, 19 bp, Homo sapiens
  siRNA target sequence for DMD (NM_000109.2,2262-2280).
gcccggtgttgggataatt

SEQ ID NO: 116706 - DNA, 19 bp, Homo sapiens
  siRNA target sequence for DMD (NM_000109.2,2263-2281).
cccggtgttgggataattt

SEQ ID NO: 116707 - DNA, 19 bp, Homo sapiens
  siRNA target sequence for DMD (NM_000109.2,2266-2284).
ggtgttgggataatttagt

SEQ ID NO: 116708 - DNA, 19 bp, Homo sapiens
  siRNA target sequence for DMD (NM_000109.2,2335-2353).
ctcagccatcactaacaca

SEQ ID NO: 116709 - DNA, 19 bp, Homo sapiens
  siRNA target sequence for DMD (NM_000109.2,2346-2364).
ctaacacagacaactgtaa

SEQ ID NO: 116710 - DNA, 19 bp, Homo sapiens
  siRNA target sequence for DMD (NM_000109.2,2356-2374).
caactgtaatggaaacagt

SEQ ID NO: 116711 - DNA, 19 bp, Homo sapiens
  siRNA target sequence for DMD (NM_000109.2,2482-2500).
ggaaaaggttggatgttga

SEQ ID NO: 116712 - DNA, 19 bp, Homo sapiens
  siRNA target sequence for DMD (NM_000109.2,2551-2569).
gtcctgaatttgcaatctt

SEQ ID NO: 116713 - DNA, 19 bp, Homo sapiens
  siRNA target sequence for DMD (NM_000109.2,2615-2633).
catagagcgagaaaaagct

SEQ ID NO: 116714 - DNA, 19 bp, Homo sapiens
  siRNA target sequence for DMD (NM_000109.2,2632-2650).
ctgagaagttcagaaaact

SEQ ID NO: 116715 - DNA, 19 bp, Homo sapiens
  siRNA target sequence for DMD (NM_000109.2,2696-2714).
gaatgagggtgttaatgca

SEQ ID NO: 116716 - DNA, 19 bp, Homo sapiens
  siRNA target sequence for DMD (NM_000109.2,2704-2722).
gtgttaatgcagatagcat

SEQ ID NO: 116717 - DNA, 19 bp, Homo sapiens
  siRNA target sequence for DMD (NM_000109.2,2760-2778).
gaattctgccagttgctaa

SEQ ID NO: 116718 - DNA, 19 bp, Homo sapiens
  siRNA target sequence for DMD (NM_000109.2,2799-2817).
gagtatcagaacaacatca

SEQ ID NO: 116719 - DNA, 19 bp, Homo sapiens
  siRNA target sequence for DMD (NM_000109.2,2906-2924).
gccaacagcaattaaaagt

SEQ ID NO: 116720 - DNA, 19 bp, Homo sapiens
  siRNA target sequence for DMD (NM_000109.2,3048-3066).
gactttgtggcctttacaa

SEQ ID NO: 116721 - DNA, 19 bp, Homo sapiens
  siRNA target sequence for DMD (NM_000109.2,3107-3125).
gaaagagctacagacaatt

SEQ ID NO: 116722 - DNA, 19 bp, Homo sapiens
  siRNA target sequence for DMD (NM_000109.2,3206-3224).
ctccatacctcaacttagt

SEQ ID NO: 116723 - DNA, 19 bp, Homo sapiens
  siRNA target sequence for DMD (NM_000109.2,3208-3226).
ccatacctcaacttagtgt

SEQ ID NO: 116724 - DNA, 19 bp, Homo sapiens
  siRNA target sequence for DMD (NM_000109.2,3223-3241).
gtgtcaccgactatgaaat

SEQ ID NO: 116725 - DNA, 19 bp, Homo sapiens
  siRNA target sequence for DMD (NM_000109.2,3225-3243).
gtcaccgactatgaaatca

SEQ ID NO: 116726 - DNA, 19 bp, Homo sapiens
  siRNA target sequence for DMD (NM_000109.2,3261-3279).
gaattgcaggctttacaaa

SEQ ID NO: 116727 - DNA, 19 bp, Homo sapiens
  siRNA target sequence for DMD (NM_000109.2,3344-3362).
gaaagcgccctctgaaatt

SEQ ID NO: 116728 - DNA, 19 bp, Homo sapiens
  siRNA target sequence for DMD (NM_000109.2,3355-3373).
ctgaaattagccggaaata

SEQ ID NO: 116729 - DNA, 19 bp, Homo sapiens
  siRNA target sequence for DMD (NM_000109.2,3364-3382).
gccggaaatatcaatcaga

SEQ ID NO: 116730 - DNA, 19 bp, Homo sapiens
  siRNA target sequence for DMD (NM_000109.2,3365-3383).
ccggaaatatcaatcagaa

SEQ ID NO: 116731 - DNA, 19 bp, Homo sapiens
  siRNA target sequence for DMD (NM_000109.2,3366-3384).
cggaaatatcaatcagaat

SEQ ID NO: 116732 - DNA, 19 bp, Homo sapiens
  siRNA target sequence for DMD (NM_000109.2,3425-3443).
gctggttgagcattgtcaa

SEQ ID NO: 116733 - DNA, 19 bp, Homo sapiens
  siRNA target sequence for DMD (NM_000109.2,3426-3444).
ctggttgagcattgtcaaa

SEQ ID NO: 116734 - DNA, 19 bp, Homo sapiens
  siRNA target sequence for DMD (NM_000109.2,3471-3489).
cgaaaaattcagaatcaca

SEQ ID NO: 116735 - DNA, 19 bp, Homo sapiens
  siRNA target sequence for DMD (NM_000109.2,3472-3490).
gaaaaattcagaatcacat

SEQ ID NO: 116736 - DNA, 19 bp, Homo sapiens
  siRNA target sequence for DMD (NM_000109.2,3488-3506).
catacaaaccctgaagaaa

SEQ ID NO: 116737 - DNA, 19 bp, Homo sapiens
  siRNA target sequence for DMD (NM_000109.2,3503-3521).
gaaatggatggctgaagtt

SEQ ID NO: 116738 - DNA, 19 bp, Homo sapiens
  siRNA target sequence for DMD (NM_000109.2,3547-3565).
ctgcccttggggattcaga

SEQ ID NO: 116739 - DNA, 19 bp, Homo sapiens
  siRNA target sequence for DMD (NM_000109.2,3584-3602).
gaaacagtgcagactttta

SEQ ID NO: 116740 - DNA, 19 bp, Homo sapiens
  siRNA target sequence for DMD (NM_000109.2,3619-3637).
caattcagcccagtctaaa

SEQ ID NO: 116741 - DNA, 19 bp, Homo sapiens
  siRNA target sequence for DMD (NM_000109.2,3629-3647).
cagtctaaacagtgtcaat

SEQ ID NO: 116742 - DNA, 19 bp, Homo sapiens
  siRNA target sequence for DMD (NM_000109.2,3675-3693).
gcagagccagagtttgctt

SEQ ID NO: 116743 - DNA, 19 bp, Homo sapiens
  siRNA target sequence for DMD (NM_000109.2,3697-3715).
gacttgagacagaactcaa

SEQ ID NO: 116744 - DNA, 19 bp, Homo sapiens
  siRNA target sequence for DMD (NM_000109.2,3783-3801).
ggtttggagaaaactgtaa

SEQ ID NO: 116745 - DNA, 19 bp, Homo sapiens
  siRNA target sequence for DMD (NM_000109.2,3855-3873).
gagtatcttgagagagatt

SEQ ID NO: 116746 - DNA, 19 bp, Homo sapiens
  siRNA target sequence for DMD (NM_000109.2,3945-3963).
caaaaagaagcgaaagtga

SEQ ID NO: 116747 - DNA, 19 bp, Homo sapiens
  siRNA target sequence for DMD (NM_000109.2,3966-3984).
ctccttactgagtctgtaa

SEQ ID NO: 116748 - DNA, 19 bp, Homo sapiens
  siRNA target sequence for DMD (NM_000109.2,4114-4132).
gggcatgttggcatgagtt

SEQ ID NO: 116749 - DNA, 19 bp, Homo sapiens
  siRNA target sequence for DMD (NM_000109.2,4116-4134).
gcatgttggcatgagttat

SEQ ID NO: 116750 - DNA, 19 bp, Homo sapiens
  siRNA target sequence for DMD (NM_000109.2,4117-4135).
catgttggcatgagttatt

SEQ ID NO: 116751 - DNA, 19 bp, Homo sapiens
  siRNA target sequence for DMD (NM_000109.2,4226-4244).
ctctgaggtgctagattca

SEQ ID NO: 116752 - DNA, 19 bp, Homo sapiens
  siRNA target sequence for DMD (NM_000109.2,4232-4250).
ggtgctagattcacttgaa

SEQ ID NO: 116753 - DNA, 19 bp, Homo sapiens
  siRNA target sequence for DMD (NM_000109.2,4233-4251).
gtgctagattcacttgaaa

SEQ ID NO: 116754 - DNA, 19 bp, Homo sapiens
  siRNA target sequence for DMD (NM_000109.2,4267-4285).
cagaggataacccaaatca

SEQ ID NO: 116755 - DNA, 19 bp, Homo sapiens
  siRNA target sequence for DMD (NM_000109.2,4346-4364).
ggaacttgagacatttaat

SEQ ID NO: 116756 - DNA, 19 bp, Homo sapiens
  siRNA target sequence for DMD (NM_000109.2,4347-4365).
gaacttgagacatttaatt

SEQ ID NO: 116757 - DNA, 19 bp, Homo sapiens
  siRNA target sequence for DMD (NM_000109.2,4366-4384).
ctcgttggagggaactaca

SEQ ID NO: 116758 - DNA, 19 bp, Homo sapiens
  siRNA target sequence for DMD (NM_000109.2,4446-4464).
gaaaaatccttacacttaa

SEQ ID NO: 116759 - DNA, 19 bp, Homo sapiens
  siRNA target sequence for DMD (NM_000109.2,4467-4485).
caggagtccctcacattca

SEQ ID NO: 116760 - DNA, 19 bp, Homo sapiens
  siRNA target sequence for DMD (NM_000109.2,4469-4487).
ggagtccctcacattcatt

SEQ ID NO: 116761 - DNA, 19 bp, Homo sapiens
  siRNA target sequence for DMD (NM_000109.2,4474-4492).
ccctcacattcattgacaa

SEQ ID NO: 116762 - DNA, 19 bp, Homo sapiens
  siRNA target sequence for DMD (NM_000109.2,4496-4514).
gttggcagcttatattgca

SEQ ID NO: 116763 - DNA, 19 bp, Homo sapiens
  siRNA target sequence for DMD (NM_000109.2,4573-4591).
caagtcatgagatcagttt

SEQ ID NO: 116764 - DNA, 19 bp, Homo sapiens
  siRNA target sequence for DMD (NM_000109.2,4636-4654).
gagtcctgtctcagattga

SEQ ID NO: 116765 - DNA, 19 bp, Homo sapiens
  siRNA target sequence for DMD (NM_000109.2,4680-4698).
gtctccatgaagtttcgat

SEQ ID NO: 116766 - DNA, 19 bp, Homo sapiens
  siRNA target sequence for DMD (NM_000109.2,4682-4700).
ctccatgaagtttcgatta

SEQ ID NO: 116767 - DNA, 19 bp, Homo sapiens
  siRNA target sequence for DMD (NM_000109.2,4684-4702).
ccatgaagtttcgattatt

SEQ ID NO: 116768 - DNA, 19 bp, Homo sapiens
  siRNA target sequence for DMD (NM_000109.2,4815-4833).
cagtcacagctaaatcatt

SEQ ID NO: 116769 - DNA, 19 bp, Homo sapiens
  siRNA target sequence for DMD (NM_000109.2,4830-4848).
cattgtgtgaacttgtata

SEQ ID NO: 116770 - DNA, 19 bp, Homo sapiens
  siRNA target sequence for DMD (NM_000109.2,4892-4910).
gactggacgtcagattgta

SEQ ID NO: 116771 - DNA, 19 bp, Homo sapiens
  siRNA target sequence for DMD (NM_000109.2,4894-4912).
ctggacgtcagattgtaca

SEQ ID NO: 116772 - DNA, 19 bp, Homo sapiens
  siRNA target sequence for DMD (NM_000109.2,4897-4915).
gacgtcagattgtacagaa

SEQ ID NO: 116773 - DNA, 19 bp, Homo sapiens
  siRNA target sequence for DMD (NM_000109.2,4899-4917).
cgtcagattgtacagaaaa

SEQ ID NO: 116774 - DNA, 19 bp, Homo sapiens
  siRNA target sequence for DMD (NM_000109.2,4980-4998).
gagctgggagcaaaggtaa

SEQ ID NO: 116775 - DNA, 19 bp, Homo sapiens
  siRNA target sequence for DMD (NM_000109.2,5039-5057).
ccgtaagatgcgaaaggaa

SEQ ID NO: 116776 - DNA, 19 bp, Homo sapiens
  siRNA target sequence for DMD (NM_000109.2,5085-5103).
gctacagatatggaattga

SEQ ID NO: 116777 - DNA, 19 bp, Homo sapiens
  siRNA target sequence for DMD (NM_000109.2,5089-5107).
cagatatggaattgacaaa

SEQ ID NO: 116778 - DNA, 19 bp, Homo sapiens
  siRNA target sequence for DMD (NM_000109.2,5121-5139).
gaaggaatgcctagtaatt

SEQ ID NO: 116779 - DNA, 19 bp, Homo sapiens
  siRNA target sequence for DMD (NM_000109.2,5125-5143).
gaatgcctagtaatttgga

SEQ ID NO: 116780 - DNA, 19 bp, Homo sapiens
  siRNA target sequence for DMD (NM_000109.2,5156-5174).
ctggggaaaggctactcaa

SEQ ID NO: 116781 - DNA, 19 bp, Homo sapiens
  siRNA target sequence for DMD (NM_000109.2,5161-5179).
gaaaggctactcaaaaaga

SEQ ID NO: 116782 - DNA, 19 bp, Homo sapiens
  siRNA target sequence for DMD (NM_000109.2,5198-5216).
gcacctgaagagtatcaca

SEQ ID NO: 116783 - DNA, 19 bp, Homo sapiens
  siRNA target sequence for DMD (NM_000109.2,5226-5244).
gaggccttgaaaacagttt

SEQ ID NO: 116784 - DNA, 19 bp, Homo sapiens
  siRNA target sequence for DMD (NM_000109.2,5256-5274).
gagacgttggtggaagata

SEQ ID NO: 116785 - DNA, 19 bp, Homo sapiens
  siRNA target sequence for DMD (NM_000109.2,5316-5334).
cgagcagaagagtggttaa

SEQ ID NO: 116786 - DNA, 19 bp, Homo sapiens
  siRNA target sequence for DMD (NM_000109.2,5320-5338).
cagaagagtggttaaatct

SEQ ID NO: 116787 - DNA, 19 bp, Homo sapiens
  siRNA target sequence for DMD (NM_000109.2,5354-5372).
gaaacacatggaaactttt

SEQ ID NO: 116788 - DNA, 19 bp, Homo sapiens
  siRNA target sequence for DMD (NM_000109.2,5463-5481).
gacgtgcttaagcgtttaa

SEQ ID NO: 116789 - DNA, 19 bp, Homo sapiens
  siRNA target sequence for DMD (NM_000109.2,5557-5575).
gtgaccactgcaggaaatt

SEQ ID NO: 116790 - DNA, 19 bp, Homo sapiens
  siRNA target sequence for DMD (NM_000109.2,5593-5611).
cagagctcaaccatcgatt

SEQ ID NO: 116791 - DNA, 19 bp, Homo sapiens
  siRNA target sequence for DMD (NM_000109.2,5597-5615).
gctcaaccatcgatttgca

SEQ ID NO: 116792 - DNA, 19 bp, Homo sapiens
  siRNA target sequence for DMD (NM_000109.2,5614-5632).
cagccatttcacacagaat

SEQ ID NO: 116793 - DNA, 19 bp, Homo sapiens
  siRNA target sequence for DMD (NM_000109.2,5683-5701).
cagatatacaaaaattgct

SEQ ID NO: 116794 - DNA, 19 bp, Homo sapiens
  siRNA target sequence for DMD (NM_000109.2,5747-5765).
ggaagacttcaataaagat

SEQ ID NO: 116795 - DNA, 19 bp, Homo sapiens
  siRNA target sequence for DMD (NM_000109.2,5748-5766).
gaagacttcaataaagata

SEQ ID NO: 116796 - DNA, 19 bp, Homo sapiens
  siRNA target sequence for DMD (NM_000109.2,5777-5795).
caatgagggtactgtaaaa

SEQ ID NO: 116797 - DNA, 19 bp, Homo sapiens
  siRNA target sequence for DMD (NM_000109.2,5781-5799).
gagggtactgtaaaagaat

SEQ ID NO: 116798 - DNA, 19 bp, Homo sapiens
  siRNA target sequence for DMD (NM_000109.2,5879-5897).
gttacagacaaaacataat

SEQ ID NO: 116799 - DNA, 19 bp, Homo sapiens
  siRNA target sequence for DMD (NM_000109.2,5933-5951).
ggctctagaaatttctcat

SEQ ID NO: 116800 - DNA, 19 bp, Homo sapiens
  siRNA target sequence for DMD (NM_000109.2,5952-5970).
cagtggtatcagtacaaga

SEQ ID NO: 116801 - DNA, 19 bp, Homo sapiens
  siRNA target sequence for DMD (NM_000109.2,6179-6197).
caagcgctggcgggaaatt

SEQ ID NO: 116802 - DNA, 19 bp, Homo sapiens
  siRNA target sequence for DMD (NM_000109.2,6183-6201).
cgctggcgggaaattgaga

SEQ ID NO: 116803 - DNA, 19 bp, Homo sapiens
  siRNA target sequence for DMD (NM_000109.2,6189-6207).
cgggaaattgagagcaaat

SEQ ID NO: 116804 - DNA, 19 bp, Homo sapiens
  siRNA target sequence for DMD (NM_000109.2,6215-6233).
gtttcgaagactcaacttt

SEQ ID NO: 116805 - DNA, 19 bp, Homo sapiens
  siRNA target sequence for DMD (NM_000109.2,6243-6261).
cacactgtccgtgaagaaa

SEQ ID NO: 116806 - DNA, 19 bp, Homo sapiens
  siRNA target sequence for DMD (NM_000109.2,6313-6331).
ctacttatttgactgaaat

SEQ ID NO: 116807 - DNA, 19 bp, Homo sapiens
  siRNA target sequence for DMD (NM_000109.2,6341-6359).
ctcacaagccctattagaa

SEQ ID NO: 116808 - DNA, 19 bp, Homo sapiens
  siRNA target sequence for DMD (NM_000109.2,6463-6481).
gctcaggtcggattgacat

SEQ ID NO: 116809 - DNA, 19 bp, Homo sapiens
  siRNA target sequence for DMD (NM_000109.2,6464-6482).
ctcaggtcggattgacatt

SEQ ID NO: 116810 - DNA, 19 bp, Homo sapiens
  siRNA target sequence for DMD (NM_000109.2,6466-6484).
caggtcggattgacattat

SEQ ID NO: 116811 - DNA, 19 bp, Homo sapiens
  siRNA target sequence for DMD (NM_000109.2,6469-6487).
gtcggattgacattattca

SEQ ID NO: 116812 - DNA, 19 bp, Homo sapiens
  siRNA target sequence for DMD (NM_000109.2,6554-6572).
ctcccagcttgatttccaa

SEQ ID NO: 116813 - DNA, 19 bp, Homo sapiens
  siRNA target sequence for DMD (NM_000109.2,6570-6588).
caatgggaaaaagttaaca

SEQ ID NO: 116814 - DNA, 19 bp, Homo sapiens
  siRNA target sequence for DMD (NM_000109.2,6603-6621).
cgacaagggcgatttgaca

SEQ ID NO: 116815 - DNA, 19 bp, Homo sapiens
  siRNA target sequence for DMD (NM_000109.2,6611-6629).
gcgatttgacagatctgtt

SEQ ID NO: 116816 - DNA, 19 bp, Homo sapiens
  siRNA target sequence for DMD (NM_000109.2,6640-6658).
ggcgttttcattatgatat

SEQ ID NO: 116817 - DNA, 19 bp, Homo sapiens
  siRNA target sequence for DMD (NM_000109.2,6641-6659).
gcgttttcattatgatata

SEQ ID NO: 116818 - DNA, 19 bp, Homo sapiens
  siRNA target sequence for DMD (NM_000109.2,6642-6660).
cgttttcattatgatataa

SEQ ID NO: 116819 - DNA, 19 bp, Homo sapiens
  siRNA target sequence for DMD (NM_000109.2,6722-6740).
gaattgggaacatgctaaa

SEQ ID NO: 116820 - DNA, 19 bp, Homo sapiens
  siRNA target sequence for DMD (NM_000109.2,6727-6745).
gggaacatgctaaatacaa

SEQ ID NO: 116821 - DNA, 19 bp, Homo sapiens
  siRNA target sequence for DMD (NM_000109.2,6728-6746).
ggaacatgctaaatacaaa

SEQ ID NO: 116822 - DNA, 19 bp, Homo sapiens
  siRNA target sequence for DMD (NM_000109.2,6795-6813).
gtcagaacattgaatgcaa

SEQ ID NO: 116823 - DNA, 19 bp, Homo sapiens
  siRNA target sequence for DMD (NM_000109.2,7067-7085).
gcttgagcaagtcaagtta

SEQ ID NO: 116824 - DNA, 19 bp, Homo sapiens
  siRNA target sequence for DMD (NM_000109.2,7109-7127).
ccagggaattctcaaacaa

SEQ ID NO: 116825 - DNA, 19 bp, Homo sapiens
  siRNA target sequence for DMD (NM_000109.2,7110-7128).
cagggaattctcaaacaat

SEQ ID NO: 116826 - DNA, 19 bp, Homo sapiens
  siRNA target sequence for DMD (NM_000109.2,7140-7158).
ggaggacccgtgcttgtaa

SEQ ID NO: 116827 - DNA, 19 bp, Homo sapiens
  siRNA target sequence for DMD (NM_000109.2,7171-7189).
gcccagaagagcaagataa

SEQ ID NO: 116828 - DNA, 19 bp, Homo sapiens
  siRNA target sequence for DMD (NM_000109.2,7232-7250).
ggtttccagagctttacct

SEQ ID NO: 116829 - DNA, 19 bp, Homo sapiens
  siRNA target sequence for DMD (NM_000109.2,7314-7332).
gaccttgaagagcagttaa

SEQ ID NO: 116830 - DNA, 19 bp, Homo sapiens
  siRNA target sequence for DMD (NM_000109.2,7343-7361).
gctgtggttatctcctatt

SEQ ID NO: 116831 - DNA, 19 bp, Homo sapiens
  siRNA target sequence for DMD (NM_000109.2,7344-7362).
ctgtggttatctcctatta

SEQ ID NO: 116832 - DNA, 19 bp, Homo sapiens
  siRNA target sequence for DMD (NM_000109.2,7348-7366).
ggttatctcctattaggaa

SEQ ID NO: 116833 - DNA, 19 bp, Homo sapiens
  siRNA target sequence for DMD (NM_000109.2,7349-7367).
gttatctcctattaggaat

SEQ ID NO: 116834 - DNA, 19 bp, Homo sapiens
  siRNA target sequence for DMD (NM_000109.2,7364-7382).
gaatcagttggaaatttat

SEQ ID NO: 116835 - DNA, 19 bp, Homo sapiens
  siRNA target sequence for DMD (NM_000109.2,7449-7467).
ccggatgtggaagagattt

SEQ ID NO: 116836 - DNA, 19 bp, Homo sapiens
  siRNA target sequence for DMD (NM_000109.2,7553-7571).
ggcggtaaaccgtttactt

SEQ ID NO: 116837 - DNA, 19 bp, Homo sapiens
  siRNA target sequence for DMD (NM_000109.2,7555-7573).
cggtaaaccgtttacttca

SEQ ID NO: 116838 - DNA, 19 bp, Homo sapiens
  siRNA target sequence for DMD (NM_000109.2,7556-7574).
ggtaaaccgtttacttcaa

SEQ ID NO: 116839 - DNA, 19 bp, Homo sapiens
  siRNA target sequence for DMD (NM_000109.2,7774-7792).
ggctttctctgcttgatca

SEQ ID NO: 116840 - DNA, 19 bp, Homo sapiens
  siRNA target sequence for DMD (NM_000109.2,7780-7798).
ctctgcttgatcaagttat

SEQ ID NO: 116841 - DNA, 19 bp, Homo sapiens
  siRNA target sequence for DMD (NM_000109.2,7782-7800).
ctgcttgatcaagttataa

SEQ ID NO: 116842 - DNA, 19 bp, Homo sapiens
  siRNA target sequence for DMD (NM_000109.2,7822-7840).
gtgaccttgaggatatcaa

SEQ ID NO: 116843 - DNA, 19 bp, Homo sapiens
  siRNA target sequence for DMD (NM_000109.2,7891-7909).
gtccccagttggaagaact

SEQ ID NO: 116844 - DNA, 19 bp, Homo sapiens
  siRNA target sequence for DMD (NM_000109.2,7895-7913).
ccagttggaagaactcatt

SEQ ID NO: 116845 - DNA, 19 bp, Homo sapiens
  siRNA target sequence for DMD (NM_000109.2,7910-7928).
cattaccgctgcccaaaat

SEQ ID NO: 116846 - DNA, 19 bp, Homo sapiens
  siRNA target sequence for DMD (NM_000109.2,7915-7933).
ccgctgcccaaaatttgaa

SEQ ID NO: 116847 - DNA, 19 bp, Homo sapiens
  siRNA target sequence for DMD (NM_000109.2,7963-7981).
caatcattacggatcgaat

SEQ ID NO: 116848 - DNA, 19 bp, Homo sapiens
  siRNA target sequence for DMD (NM_000109.2,7967-7985).
cattacggatcgaattgaa

SEQ ID NO: 116849 - DNA, 19 bp, Homo sapiens
  siRNA target sequence for DMD (NM_000109.2,7972-7990).
cggatcgaattgaaagaat

SEQ ID NO: 116850 - DNA, 19 bp, Homo sapiens
  siRNA target sequence for DMD (NM_000109.2,7973-7991).
ggatcgaattgaaagaatt

SEQ ID NO: 116851 - DNA, 19 bp, Homo sapiens
  siRNA target sequence for DMD (NM_000109.2,8054-8072).
gttaaaggattcaacacaa

SEQ ID NO: 116852 - DNA, 19 bp, Homo sapiens
  siRNA target sequence for DMD (NM_000109.2,8068-8086).
cacaatggctggaagctaa

SEQ ID NO: 116853 - DNA, 19 bp, Homo sapiens
  siRNA target sequence for DMD (NM_000109.2,8141-8159).
ggagggtccctatacagta

SEQ ID NO: 116854 - DNA, 19 bp, Homo sapiens
  siRNA target sequence for DMD (NM_000109.2,8144-8162).
gggtccctatacagtagat

SEQ ID NO: 116855 - DNA, 19 bp, Homo sapiens
  siRNA target sequence for DMD (NM_000109.2,8149-8167).
cctatacagtagatgcaat

SEQ ID NO: 116856 - DNA, 19 bp, Homo sapiens
  siRNA target sequence for DMD (NM_000109.2,8157-8175).
gtagatgcaatccaaaaga

SEQ ID NO: 116857 - DNA, 19 bp, Homo sapiens
  siRNA target sequence for DMD (NM_000109.2,8218-8236).
ggcagacaaatgtagatgt

SEQ ID NO: 116858 - DNA, 19 bp, Homo sapiens
  siRNA target sequence for DMD (NM_000109.2,8297-8315).
ccacatgataacagagaat

SEQ ID NO: 116859 - DNA, 19 bp, Homo sapiens
  siRNA target sequence for DMD (NM_000109.2,8326-8344).
cttggagaagcattcataa

SEQ ID NO: 116860 - DNA, 19 bp, Homo sapiens
  siRNA target sequence for DMD (NM_000109.2,8468-8486).
ggatgctacccgtaaggaa

SEQ ID NO: 116861 - DNA, 19 bp, Homo sapiens
  siRNA target sequence for DMD (NM_000109.2,8469-8487).
gatgctacccgtaaggaaa

SEQ ID NO: 116862 - DNA, 19 bp, Homo sapiens
  siRNA target sequence for DMD (NM_000109.2,8560-8578).
ctcacacagatgtttatca

SEQ ID NO: 116863 - DNA, 19 bp, Homo sapiens
  siRNA target sequence for DMD (NM_000109.2,8642-8660).
gttacaaagacgtttggat

SEQ ID NO: 116864 - DNA, 19 bp, Homo sapiens
  siRNA target sequence for DMD (NM_000109.2,8650-8668).
gacgtttggataacatgaa

SEQ ID NO: 116865 - DNA, 19 bp, Homo sapiens
  siRNA target sequence for DMD (NM_000109.2,8652-8670).
cgtttggataacatgaact

SEQ ID NO: 116866 - DNA, 19 bp, Homo sapiens
  siRNA target sequence for DMD (NM_000109.2,8807-8825).
ccggcaggcacctattgga

SEQ ID NO: 116867 - DNA, 19 bp, Homo sapiens
  siRNA target sequence for DMD (NM_000109.2,8846-8864).
gaagcagaacgatgtacat

SEQ ID NO: 116868 - DNA, 19 bp, Homo sapiens
  siRNA target sequence for DMD (NM_000109.2,8859-8877).
gtacatagggccttcaaga

SEQ ID NO: 116869 - DNA, 19 bp, Homo sapiens
  siRNA target sequence for DMD (NM_000109.2,8890-8908).
ctaaagaacctgtaatcat

SEQ ID NO: 116870 - DNA, 19 bp, Homo sapiens
  siRNA target sequence for DMD (NM_000109.2,8895-8913).
gaacctgtaatcatgagta

SEQ ID NO: 116871 - DNA, 19 bp, Homo sapiens
  siRNA target sequence for DMD (NM_000109.2,8914-8932).
ctcttgagactgtacgaat

SEQ ID NO: 116872 - DNA, 19 bp, Homo sapiens
  siRNA target sequence for DMD (NM_000109.2,8916-8934).
cttgagactgtacgaatat

SEQ ID NO: 116873 - DNA, 19 bp, Homo sapiens
  siRNA target sequence for DMD (NM_000109.2,9041-9059).
ggctgaggaggtcaatact

SEQ ID NO: 116874 - DNA, 19 bp, Homo sapiens
  siRNA target sequence for DMD (NM_000109.2,9085-9103).
ccgctgactggcagagaaa

SEQ ID NO: 116875 - DNA, 19 bp, Homo sapiens
  siRNA target sequence for DMD (NM_000109.2,9210-9228).
ggcgatctcctcattgact

SEQ ID NO: 116876 - DNA, 19 bp, Homo sapiens
  siRNA target sequence for DMD (NM_000109.2,9257-9275).
ggcacttcgaggagaaatt

SEQ ID NO: 116877 - DNA, 19 bp, Homo sapiens
  siRNA target sequence for DMD (NM_000109.2,9542-9560).
caaccacgagactcaaaca

SEQ ID NO: 116878 - DNA, 19 bp, Homo sapiens
  siRNA target sequence for DMD (NM_000109.2,9545-9563).
ccacgagactcaaacaact

SEQ ID NO: 116879 - DNA, 19 bp, Homo sapiens
  siRNA target sequence for DMD (NM_000109.2,9546-9564).
cacgagactcaaacaactt

SEQ ID NO: 116880 - DNA, 19 bp, Homo sapiens
  siRNA target sequence for DMD (NM_000109.2,9586-9604).
cagagctctaccagtcttt

SEQ ID NO: 116881 - DNA, 19 bp, Homo sapiens
  siRNA target sequence for DMD (NM_000109.2,9601-9619).
ctttagctgacctgaataa

SEQ ID NO: 116882 - DNA, 19 bp, Homo sapiens
  siRNA target sequence for DMD (NM_000109.2,9614-9632).
gaataatgtcagattctca

SEQ ID NO: 116883 - DNA, 19 bp, Homo sapiens
  siRNA target sequence for DMD (NM_000109.2,9761-9779).
cctgcagattattaattgt

SEQ ID NO: 116884 - DNA, 19 bp, Homo sapiens
  siRNA target sequence for DMD (NM_000109.2,9778-9796).
gtttgaccactatttatga

SEQ ID NO: 116885 - DNA, 19 bp, Homo sapiens
  siRNA target sequence for DMD (NM_000109.2,9860-9878).
ctggctgctgaatgtttat

SEQ ID NO: 116886 - DNA, 19 bp, Homo sapiens
  siRNA target sequence for DMD (NM_000109.2,9862-9880).
ggctgctgaatgtttatga

SEQ ID NO: 116887 - DNA, 19 bp, Homo sapiens
  siRNA target sequence for DMD (NM_000109.2,9898-9916).
ggatccgtgtcctgtcttt

SEQ ID NO: 116888 - DNA, 19 bp, Homo sapiens
  siRNA target sequence for DMD (NM_000109.2,9899-9917).
gatccgtgtcctgtctttt

SEQ ID NO: 116889 - DNA, 19 bp, Homo sapiens
  siRNA target sequence for DMD (NM_000109.2,9925-9943).
gcatcatttccctgtgtaa

SEQ ID NO: 116890 - DNA, 19 bp, Homo sapiens
  siRNA target sequence for DMD (NM_000109.2,9934-9952).
ccctgtgtaaagcacattt

SEQ ID NO: 116891 - DNA, 19 bp, Homo sapiens
  siRNA target sequence for DMD (NM_000109.2,10023-10041).
ggcctccttctgcatgatt

SEQ ID NO: 116892 - DNA, 19 bp, Homo sapiens
  siRNA target sequence for DMD (NM_000109.2,10026-10044).
ctccttctgcatgattcta

SEQ ID NO: 116893 - DNA, 19 bp, Homo sapiens
  siRNA target sequence for DMD (NM_000109.2,10107-10125).
gtccggagctgcttccaat

SEQ ID NO: 116894 - DNA, 19 bp, Homo sapiens
  siRNA target sequence for DMD (NM_000109.2,10268-10286).
caaagagtgtccaatcatt

SEQ ID NO: 116895 - DNA, 19 bp, Homo sapiens
  siRNA target sequence for DMD (NM_000109.2,10272-10290).
gagtgtccaatcattggat

SEQ ID NO: 116896 - DNA, 19 bp, Homo sapiens
  siRNA target sequence for DMD (NM_000109.2,10303-10321).
gtctaaagcactttaatta

SEQ ID NO: 116897 - DNA, 19 bp, Homo sapiens
  siRNA target sequence for DMD (NM_000109.2,10379-10397).
ctatcccatggtggaatat

SEQ ID NO: 116898 - DNA, 19 bp, Homo sapiens
  siRNA target sequence for DMD (NM_000109.2,10431-10449).
gactttgccaaggtactaa

SEQ ID NO: 116899 - DNA, 19 bp, Homo sapiens
  siRNA target sequence for DMD (NM_000109.2,10433-10451).
ctttgccaaggtactaaaa

SEQ ID NO: 116900 - DNA, 19 bp, Homo sapiens
  siRNA target sequence for DMD (NM_000109.2,10543-10561).
ctcccgttactctgatcaa

SEQ ID NO: 116901 - DNA, 19 bp, Homo sapiens
  siRNA target sequence for DMD (NM_000109.2,10545-10563).
cccgttactctgatcaact

SEQ ID NO: 116902 - DNA, 19 bp, Homo sapiens
  siRNA target sequence for DMD (NM_000109.2,10562-10580).
cttctggccagtagattct

SEQ ID NO: 116903 - DNA, 19 bp, Homo sapiens
  siRNA target sequence for DMD (NM_000109.2,10591-10609).
cgtcccctcagctttcaca

SEQ ID NO: 116904 - DNA, 19 bp, Homo sapiens
  siRNA target sequence for DMD (NM_000109.2,10618-10636).
ctcattcacgcattgaaca

SEQ ID NO: 116905 - DNA, 19 bp, Homo sapiens
  siRNA target sequence for DMD (NM_000109.2,10626-10644).
cgcattgaacattatgcta

SEQ ID NO: 116906 - DNA, 19 bp, Homo sapiens
  siRNA target sequence for DMD (NM_000109.2,10667-10685).
cagcaatggatcttatcta

SEQ ID NO: 116907 - DNA, 19 bp, Homo sapiens
  siRNA target sequence for DMD (NM_000109.2,10709-10727).
gagcatagatgatgaacat

SEQ ID NO: 116908 - DNA, 19 bp, Homo sapiens
  siRNA target sequence for DMD (NM_000109.2,10737-10755).
cagcattactgccaaagtt

SEQ ID NO: 116909 - DNA, 19 bp, Homo sapiens
  siRNA target sequence for DMD (NM_000109.2,10796-10814).
ccagatcttgatttcctta

SEQ ID NO: 116910 - DNA, 19 bp, Homo sapiens
  siRNA target sequence for DMD (NM_000109.2,10904-10922).
gcagcagcacgaacataaa

SEQ ID NO: 116911 - DNA, 19 bp, Homo sapiens
  siRNA target sequence for DMD (NM_000109.2,10939-10957).
cgtcccctcctgaaatgat

SEQ ID NO: 116912 - DNA, 19 bp, Homo sapiens
  siRNA target sequence for DMD (NM_000109.2,11009-11027).
gctactgcgtcaacacaaa

SEQ ID NO: 116913 - DNA, 19 bp, Homo sapiens
  siRNA target sequence for DMD (NM_000109.2,11208-11226).
cgagtggttggcagtcaaa

SEQ ID NO: 116914 - DNA, 19 bp, Homo sapiens
  siRNA target sequence for DMD (NM_000109.2,11211-11229).
gtggttggcagtcaaactt

SEQ ID NO: 116915 - DNA, 19 bp, Homo sapiens
  siRNA target sequence for DMD (NM_004012.1,207-225).
ccaggaagctgcgaaatct

SEQ ID NO: 116916 - DNA, 19 bp, Homo sapiens
  siRNA target sequence for DMD (NM_004012.1,217-235).
gcgaaatctgtcttacaaa

SEQ ID NO: 116917 - DNA, 19 bp, Homo sapiens
  siRNA target sequence for DMD (NM_004012.1,218-236).
cgaaatctgtcttacaaaa

SEQ ID NO: 116918 - DNA, 19 bp, Homo sapiens
  siRNA target sequence for DMD (NM_004016.1,1936-1954).
gcgatggagtccttagtat

SEQ ID NO: 116919 - DNA, 19 bp, Homo sapiens
  siRNA target sequence for DNASE1 (NM_005223.2,1187-1205).
ccctcgtcagctacattgt

SEQ ID NO: 116920 - DNA, 19 bp, Homo sapiens
  siRNA target sequence for DNASE1 (NM_005223.2,1303-1321).
gcaccagacacctatcact

SEQ ID NO: 116921 - DNA, 19 bp, Homo sapiens
  siRNA target sequence for DNASE1 (NM_005223.2,1343-1361).
gacggaacagctataagga

SEQ ID NO: 116922 - DNA, 19 bp, Homo sapiens
  siRNA target sequence for DNASE1 (NM_005223.2,1399-1417).
gcggtggacagctactact

SEQ ID NO: 116923 - DNA, 19 bp, Homo sapiens
  siRNA target sequence for DNASE1 (NM_005223.2,1400-1418).
cggtggacagctactacta

SEQ ID NO: 116924 - DNA, 19 bp, Homo sapiens
  siRNA target sequence for DNASE1 (NM_005223.2,1503-1521).
cagggagtttgccattgtt

SEQ ID NO: 116925 - DNA, 19 bp, Homo sapiens
  siRNA target sequence for DNASE1 (NM_005223.2,1554-1572).
cgagatcgacgctctctat

SEQ ID NO: 116926 - DNA, 19 bp, Homo sapiens
  siRNA target sequence for DNASE1 (NM_005223.2,1604-1622).
gcttggaggacgtcatgtt

SEQ ID NO: 116927 - DNA, 19 bp, Homo sapiens
  siRNA target sequence for DNASE1 (NM_005223.2,1639-1657).
gcgggctgcagctatgtga

SEQ ID NO: 116928 - DNA, 19 bp, Homo sapiens
  siRNA target sequence for DNASE1 (NM_005223.2,1814-1832).
cggctcttccctttaactt

SEQ ID NO: 116929 - DNA, 19 bp, Homo sapiens
  siRNA target sequence for ENC1 (NM_003633.1,440-458).
gcagcggctccattaacat

SEQ ID NO: 116930 - DNA, 19 bp, Homo sapiens
  siRNA target sequence for ENC1 (NM_003633.1,443-461).
gcggctccattaacatcta

SEQ ID NO: 116931 - DNA, 19 bp, Homo sapiens
  siRNA target sequence for ENC1 (NM_003633.1,444-462).
cggctccattaacatctat

SEQ ID NO: 116932 - DNA, 19 bp, Homo sapiens
  siRNA target sequence for ENC1 (NM_003633.1,547-565).
ctccatgccggaaatagga

SEQ ID NO: 116933 - DNA, 19 bp, Homo sapiens
  siRNA target sequence for ENC1 (NM_003633.1,596-614).
catgcagtcgctactttga

SEQ ID NO: 116934 - DNA, 19 bp, Homo sapiens
  siRNA target sequence for ENC1 (NM_003633.1,674-692).
ccatccacccagaagtctt

SEQ ID NO: 116935 - DNA, 19 bp, Homo sapiens
  siRNA target sequence for ENC1 (NM_003633.1,719-737).
cctcccgggtcatcatcaa

SEQ ID NO: 116936 - DNA, 19 bp, Homo sapiens
  siRNA target sequence for ENC1 (NM_003633.1,720-738).
ctcccgggtcatcatcaat

SEQ ID NO: 116937 - DNA, 19 bp, Homo sapiens
  siRNA target sequence for ENC1 (NM_003633.1,722-740).
cccgggtcatcatcaatga

SEQ ID NO: 116938 - DNA, 19 bp, Homo sapiens
  siRNA target sequence for ENC1 (NM_003633.1,885-903).
caagctgtacgaactatct

SEQ ID NO: 116939 - DNA, 19 bp, Homo sapiens
  siRNA target sequence for ENC1 (NM_003633.1,1027-1045).
gtgtacgagtctgcaatta

SEQ ID NO: 116940 - DNA, 19 bp, Homo sapiens
  siRNA target sequence for ENC1 (NM_003633.1,1063-1081).
ctgaagaagcgctattgct

SEQ ID NO: 116941 - DNA, 19 bp, Homo sapiens
  siRNA target sequence for ENC1 (NM_003633.1,1079-1097).
gctacctcccagaactgtt

SEQ ID NO: 116942 - DNA, 19 bp, Homo sapiens
  siRNA target sequence for ENC1 (NM_003633.1,1120-1138).
ctgccagccatctatctca

SEQ ID NO: 116943 - DNA, 19 bp, Homo sapiens
  siRNA target sequence for ENC1 (NM_003633.1,1204-1222).
gccatcaggtgcaaactga

SEQ ID NO: 116944 - DNA, 19 bp, Homo sapiens
  siRNA target sequence for ENC1 (NM_003633.1,1206-1224).
catcaggtgcaaactgaaa

SEQ ID NO: 116945 - DNA, 19 bp, Homo sapiens
  siRNA target sequence for ENC1 (NM_003633.1,1314-1332).
catgtgtgacaagttgtat

SEQ ID NO: 116946 - DNA, 19 bp, Homo sapiens
  siRNA target sequence for ENC1 (NM_003633.1,1339-1357).
gaccagaaggccaaagaaa

SEQ ID NO: 116947 - DNA, 19 bp, Homo sapiens
  siRNA target sequence for ENC1 (NM_003633.1,1383-1401).
cccaagaaaagagtttagt

SEQ ID NO: 116948 - DNA, 19 bp, Homo sapiens
  siRNA target sequence for ENC1 (NM_003633.1,1408-1426).
gcgattggctgcaaagtgt

SEQ ID NO: 116949 - DNA, 19 bp, Homo sapiens
  siRNA target sequence for ENC1 (NM_003633.1,1414-1432).
ggctgcaaagtgtacatta

SEQ ID NO: 116950 - DNA, 19 bp, Homo sapiens
  siRNA target sequence for ENC1 (NM_003633.1,1645-1663).
cattatgaccccacaatca

SEQ ID NO: 116951 - DNA, 19 bp, Homo sapiens
  siRNA target sequence for ENC1 (NM_003633.1,1714-1732).
gtagtgagtgccaaactta

SEQ ID NO: 116952 - DNA, 19 bp, Homo sapiens
  siRNA target sequence for ENC1 (NM_003633.1,1719-1737).
gagtgccaaacttaagtta

SEQ ID NO: 116953 - DNA, 19 bp, Homo sapiens
  siRNA target sequence for ENC1 (NM_003633.1,1721-1739).
gtgccaaacttaagttatt

SEQ ID NO: 116954 - DNA, 19 bp, Homo sapiens
  siRNA target sequence for ENC1 (NM_003633.1,1779-1797).
caaagttcagtgttacgat

SEQ ID NO: 116955 - DNA, 19 bp, Homo sapiens
  siRNA target sequence for ENC1 (NM_003633.1,1790-1808).
gttacgatcagtgtgaaaa

SEQ ID NO: 116956 - DNA, 19 bp, Homo sapiens
  siRNA target sequence for ENC1 (NM_003633.1,1867-1885).
ctggggaaccagattttta

SEQ ID NO: 116957 - DNA, 19 bp, Homo sapiens
  siRNA target sequence for ENC1 (NM_003633.1,1869-1887).
ggggaaccagatttttatt

SEQ ID NO: 116958 - DNA, 19 bp, Homo sapiens
  siRNA target sequence for ENC1 (NM_003633.1,1891-1909).
gggggtgatacagaattct

SEQ ID NO: 116959 - DNA, 19 bp, Homo sapiens
  siRNA target sequence for ENC1 (NM_003633.1,1893-1911).
gggtgatacagaattctct

SEQ ID NO: 116960 - DNA, 19 bp, Homo sapiens
  siRNA target sequence for ENC1 (NM_003633.1,2067-2085).
ctgctacgatccaacatta

SEQ ID NO: 116961 - DNA, 19 bp, Homo sapiens
  siRNA target sequence for ENC1 (NM_003633.1,2069-2087).
gctacgatccaacattaga

SEQ ID NO: 116962 - DNA, 19 bp, Homo sapiens
  siRNA target sequence for ENC1 (NM_003633.1,2113-2131).
ccgtactcgctgattccta

SEQ ID NO: 116963 - DNA, 19 bp, Homo sapiens
  siRNA target sequence for ENC1 (NM_003633.1,2121-2139).
gctgattcctactgcattt

SEQ ID NO: 116964 - DNA, 19 bp, Homo sapiens
  siRNA target sequence for EPB41 (NM_004437.1,802-820).
cactgcaaggtttctttgt

SEQ ID NO: 116965 - DNA, 19 bp, Homo sapiens
  siRNA target sequence for EPB41 (NM_004437.1,828-846).
cacagtttatgaatgtgtt

SEQ ID NO: 116966 - DNA, 19 bp, Homo sapiens
  siRNA target sequence for EPB41 (NM_004437.1,856-874).
catgctaagggacaagatt

SEQ ID NO: 116967 - DNA, 19 bp, Homo sapiens
  siRNA target sequence for EPB41 (NM_004437.1,884-902).
gagtatgtgagcatctcaa

SEQ ID NO: 116968 - DNA, 19 bp, Homo sapiens
  siRNA target sequence for EPB41 (NM_004437.1,894-912).
gcatctcaatcttttggaa

SEQ ID NO: 116969 - DNA, 19 bp, Homo sapiens
  siRNA target sequence for EPB41 (NM_004437.1,940-958).
gataacgcaacctctaaga

SEQ ID NO: 116970 - DNA, 19 bp, Homo sapiens
  siRNA target sequence for EPB41 (NM_004437.1,963-981).
gctggattccgccaaagaa

SEQ ID NO: 116971 - DNA, 19 bp, Homo sapiens
  siRNA target sequence for EPB41 (NM_004437.1,967-985).
gattccgccaaagaaataa

SEQ ID NO: 116972 - DNA, 19 bp, Homo sapiens
  siRNA target sequence for EPB41 (NM_004437.1,997-1015).
cgtggtgtcccttggaatt

SEQ ID NO: 116973 - DNA, 19 bp, Homo sapiens
  siRNA target sequence for EPB41 (NM_004437.1,998-1016).
gtggtgtcccttggaattt

SEQ ID NO: 116974 - DNA, 19 bp, Homo sapiens
  siRNA target sequence for EPB41 (NM_004437.1,1066-1084).
gacataacaagatattatt

SEQ ID NO: 116975 - DNA, 19 bp, Homo sapiens
  siRNA target sequence for EPB41 (NM_004437.1,1095-1113).
gcttcggcaggacatagtt

SEQ ID NO: 116976 - DNA, 19 bp, Homo sapiens
  siRNA target sequence for EPB41 (NM_004437.1,1208-1226).
gcgtggattatgttagtga

SEQ ID NO: 116977 - DNA, 19 bp, Homo sapiens
  siRNA target sequence for EPB41 (NM_004437.1,1209-1227).
cgtggattatgttagtgat

SEQ ID NO: 116978 - DNA, 19 bp, Homo sapiens
  siRNA target sequence for EPB41 (NM_004437.1,1210-1228).
gtggattatgttagtgatt

SEQ ID NO: 116979 - DNA, 19 bp, Homo sapiens
  siRNA target sequence for EPB41 (NM_004437.1,1350-1368).
gtctatgtatggagttgat

SEQ ID NO: 116980 - DNA, 19 bp, Homo sapiens
  siRNA target sequence for EPB41 (NM_004437.1,1352-1370).
ctatgtatggagttgatct

SEQ ID NO: 116981 - DNA, 19 bp, Homo sapiens
  siRNA target sequence for EPB41 (NM_004437.1,1384-1402).
gacttggaaggagtagata

SEQ ID NO: 116982 - DNA, 19 bp, Homo sapiens
  siRNA target sequence for EPB41 (NM_004437.1,1440-1458).
caaagataagctgagaatt

SEQ ID NO: 116983 - DNA, 19 bp, Homo sapiens
  siRNA target sequence for EPB41 (NM_004437.1,1476-1494).
caaagtgctgaagatttct

SEQ ID NO: 116984 - DNA, 19 bp, Homo sapiens
  siRNA target sequence for EPB41 (NM_004437.1,1501-1519).
cgtagtagctttttcatca

SEQ ID NO: 116985 - DNA, 19 bp, Homo sapiens
  siRNA target sequence for EPB41 (NM_004437.1,1502-1520).
gtagtagctttttcatcaa

SEQ ID NO: 116986 - DNA, 19 bp, Homo sapiens
  siRNA target sequence for EPB41 (NM_004437.1,1505-1523).
gtagctttttcatcaagat

SEQ ID NO: 116987 - DNA, 19 bp, Homo sapiens
  siRNA target sequence for EPB41 (NM_004437.1,1536-1554).
gcaagagcagtatgaaagt

SEQ ID NO: 116988 - DNA, 19 bp, Homo sapiens
  siRNA target sequence for EPB41 (NM_004437.1,1577-1595).
gttaccgagcagctaagaa

SEQ ID NO: 116989 - DNA, 19 bp, Homo sapiens
  siRNA target sequence for EPB41 (NM_004437.1,1581-1599).
ccgagcagctaagaaatta

SEQ ID NO: 116990 - DNA, 19 bp, Homo sapiens
  siRNA target sequence for EPB41 (NM_004437.1,1582-1600).
cgagcagctaagaaattat

SEQ ID NO: 116991 - DNA, 19 bp, Homo sapiens
  siRNA target sequence for EPB41 (NM_004437.1,1615-1633).
gaacatcacacgtttttca

SEQ ID NO: 116992 - DNA, 19 bp, Homo sapiens
  siRNA target sequence for EPB41 (NM_004437.1,1648-1666).
gacaccattcccaaaagca

SEQ ID NO: 116993 - DNA, 19 bp, Homo sapiens
  siRNA target sequence for EPB41 (NM_004437.1,1672-1690).
cttgcgctaggatccaaat

SEQ ID NO: 116994 - DNA, 19 bp, Homo sapiens
  siRNA target sequence for EPB41 (NM_004437.1,1677-1695).
gctaggatccaaatttcga

SEQ ID NO: 116995 - DNA, 19 bp, Homo sapiens
  siRNA target sequence for EPB41 (NM_004437.1,1729-1747).
gctagtgctctaattgaca

SEQ ID NO: 116996 - DNA, 19 bp, Homo sapiens
  siRNA target sequence for EPB41 (NM_004437.1,1764-1782).
cgagcgtacagcaagtaaa

SEQ ID NO: 116997 - DNA, 19 bp, Homo sapiens
  siRNA target sequence for EPB41 (NM_004437.1,1850-1868).
ctgcacctgccattactca

SEQ ID NO: 116998 - DNA, 19 bp, Homo sapiens
  siRNA target sequence for EPB41 (NM_004437.1,1943-1961).
cagtgaaggctgaagtgaa

SEQ ID NO: 116999 - DNA, 19 bp, Homo sapiens
  siRNA target sequence for EPB41 (NM_004437.1,2030-2048).
gactagatggtgaaaacat

SEQ ID NO: 117000 - DNA, 19 bp, Homo sapiens
  siRNA target sequence for EPB41 (NM_004437.1,2207-2225).
cacccttccgaactcttaa

SEQ ID NO: 117001 - DNA, 19 bp, Homo sapiens
  siRNA target sequence for EPB41 (NM_004437.1,2209-2227).
cccttccgaactcttaaca

SEQ ID NO: 117002 - DNA, 19 bp, Homo sapiens
  siRNA target sequence for EPB41 (NM_004437.1,2210-2228).
ccttccgaactcttaacat

SEQ ID NO: 117003 - DNA, 19 bp, Homo sapiens
  siRNA target sequence for EPB41 (NM_004437.1,2214-2232).
ccgaactcttaacatcaat

SEQ ID NO: 117004 - DNA, 19 bp, Homo sapiens
  siRNA target sequence for EPB41 (NM_004437.1,2327-2345).
ccaaagacgtccctattgt

SEQ ID NO: 117005 - DNA, 19 bp, Homo sapiens
  siRNA target sequence for EPB41 (NM_004437.1,2376-2394).
ggctgcccagactgtaaaa

SEQ ID NO: 117006 - DNA, 19 bp, Homo sapiens
  siRNA target sequence for EPB41 (NM_004437.1,2400-2418).
gatttcagagacacgtatt

SEQ ID NO: 117007 - DNA, 19 bp, Homo sapiens
  siRNA target sequence for EPB41 (NM_004437.1,2407-2425).
gagacacgtattgaaaaga

SEQ ID NO: 117008 - DNA, 19 bp, Homo sapiens
  siRNA target sequence for EPB41 (NM_004437.1,2411-2429).
cacgtattgaaaagagaat

SEQ ID NO: 117009 - DNA, 19 bp, Homo sapiens
  siRNA target sequence for EPB41 (NM_004437.1,2414-2432).
gtattgaaaagagaattgt

SEQ ID NO: 117010 - DNA, 19 bp, Homo sapiens
  siRNA target sequence for EPB41L1 (NM_012156.2,341-359).
ctgaacagagcctagacat

SEQ ID NO: 117011 - DNA, 19 bp, Homo sapiens
  siRNA target sequence for EPB41L1 (NM_012156.2,423-441).
gaaatcgccccagaagatt

SEQ ID NO: 117012 - DNA, 19 bp, Homo sapiens
  siRNA target sequence for EPB41L1 (NM_012156.2,660-678).
gagtagcccctggaatttt

SEQ ID NO: 117013 - DNA, 19 bp, Homo sapiens
  siRNA target sequence for EPB41L1 (NM_012156.2,679-697).
gccttcacagtcaagttct

SEQ ID NO: 117014 - DNA, 19 bp, Homo sapiens
  siRNA target sequence for EPB41L1 (NM_012156.2,865-883).
catgtgggcaactatgtca

SEQ ID NO: 117015 - DNA, 19 bp, Homo sapiens
  siRNA target sequence for EPB41L1 (NM_012156.2,929-947).
ggatcatggagctgcataa

SEQ ID NO: 117016 - DNA, 19 bp, Homo sapiens
  siRNA target sequence for EPB41L1 (NM_012156.2,936-954).
ggagctgcataagacatat

SEQ ID NO: 117017 - DNA, 19 bp, Homo sapiens
  siRNA target sequence for EPB41L1 (NM_012156.2,937-955).
gagctgcataagacatata

SEQ ID NO: 117018 - DNA, 19 bp, Homo sapiens
  siRNA target sequence for EPB41L1 (NM_012156.2,1051-1069).
gagggcatcgacatcatgt

SEQ ID NO: 117019 - DNA, 19 bp, Homo sapiens
  siRNA target sequence for EPB41L1 (NM_012156.2,1102-1120).
cgggaccggctgagaatca

SEQ ID NO: 117020 - DNA, 19 bp, Homo sapiens
  siRNA target sequence for EPB41L1 (NM_012156.2,1103-1121).
gggaccggctgagaatcaa

SEQ ID NO: 117021 - DNA, 19 bp, Homo sapiens
  siRNA target sequence for EPB41L1 (NM_012156.2,1195-1213).
gagtatgagcaatttgaga

SEQ ID NO: 117022 - DNA, 19 bp, Homo sapiens
  siRNA target sequence for EPB41L1 (NM_012156.2,1267-1285).
gtctgcatcgagcatcata

SEQ ID NO: 117023 - DNA, 19 bp, Homo sapiens
  siRNA target sequence for EPB41L1 (NM_012156.2,1271-1289).
gcatcgagcatcatacatt

SEQ ID NO: 117024 - DNA, 19 bp, Homo sapiens
  siRNA target sequence for EPB41L1 (NM_012156.2,2060-2078).
gcagcgccttcgaagactt

SEQ ID NO: 117025 - DNA, 19 bp, Homo sapiens
  siRNA target sequence for EPB41L1 (NM_012156.2,2231-2249).
cggatatgccccagtttga

SEQ ID NO: 117026 - DNA, 19 bp, Homo sapiens
  siRNA target sequence for EPB41L1 (NM_012156.2,2244-2262).
gtttgagcccgtgaaaaca

SEQ ID NO: 117027 - DNA, 19 bp, Homo sapiens
  siRNA target sequence for EPB41L1 (NM_012156.2,2332-2350).
gtctccgctatggataaca

SEQ ID NO: 117028 - DNA, 19 bp, Homo sapiens
  siRNA target sequence for EPB41L1 (NM_012156.2,2375-2393).
cagtggggagggagttcat

SEQ ID NO: 117029 - DNA, 19 bp, Homo sapiens
  siRNA target sequence for EPB41L1 (NM_012156.2,2525-2543).
cgatcatcgggaaagatgt

SEQ ID NO: 117030 - DNA, 19 bp, Homo sapiens
  siRNA target sequence for EPB41L1 (NM_012156.2,2595-2613).
cacccatgtcaccaaaact

SEQ ID NO: 117031 - DNA, 19 bp, Homo sapiens
  siRNA target sequence for EPB41L1 (NM_012156.2,2732-2750).
ctgatatgctggtaaccaa

SEQ ID NO: 117032 - DNA, 19 bp, Homo sapiens
  siRNA target sequence for EPB41L1 (NM_177996.1,1319-1337).
gagctaaagttcttagaca

SEQ ID NO: 117033 - DNA, 19 bp, Homo sapiens
  siRNA target sequence for EPB41L2 (NM_001431.1,84-102).
gactctagccagttaggaa

SEQ ID NO: 117034 - DNA, 19 bp, Homo sapiens
  siRNA target sequence for EPB41L2 (NM_001431.1,109-127).
caaccaaggaaaaacctaa

SEQ ID NO: 117035 - DNA, 19 bp, Homo sapiens
  siRNA target sequence for EPB41L2 (NM_001431.1,260-278).
gggtatttctcggttcata

SEQ ID NO: 117036 - DNA, 19 bp, Homo sapiens
  siRNA target sequence for EPB41L2 (NM_001431.1,282-300).
ccatggcttaagaagcaaa

SEQ ID NO: 117037 - DNA, 19 bp, Homo sapiens
  siRNA target sequence for EPB41L2 (NM_001431.1,322-340).
ccaaagatggaggagataa

SEQ ID NO: 117038 - DNA, 19 bp, Homo sapiens
  siRNA target sequence for EPB41L2 (NM_001431.1,347-365).
gcctacccaagctgttgtt

SEQ ID NO: 117039 - DNA, 19 bp, Homo sapiens
  siRNA target sequence for EPB41L2 (NM_001431.1,533-551).
gcagcctactgaattagta

SEQ ID NO: 117040 - DNA, 19 bp, Homo sapiens
  siRNA target sequence for EPB41L2 (NM_001431.1,534-552).
cagcctactgaattagtaa

SEQ ID NO: 117041 - DNA, 19 bp, Homo sapiens
  siRNA target sequence for EPB41L2 (NM_001431.1,536-554).
gcctactgaattagtaagt

SEQ ID NO: 117042 - DNA, 19 bp, Homo sapiens
  siRNA target sequence for EPB41L2 (NM_001431.1,537-555).
cctactgaattagtaagta

SEQ ID NO: 117043 - DNA, 19 bp, Homo sapiens
  siRNA target sequence for EPB41L2 (NM_001431.1,703-721).
gtaaagtgaccctcttaga

SEQ ID NO: 117044 - DNA, 19 bp, Homo sapiens
  siRNA target sequence for EPB41L2 (NM_001431.1,756-774).
gccaagggacaagtgttat

SEQ ID NO: 117045 - DNA, 19 bp, Homo sapiens
  siRNA target sequence for EPB41L2 (NM_001431.1,763-781).
gacaagtgttatttgacaa

SEQ ID NO: 117046 - DNA, 19 bp, Homo sapiens
  siRNA target sequence for EPB41L2 (NM_001431.1,813-831).
gactactttggacttttgt

SEQ ID NO: 117047 - DNA, 19 bp, Homo sapiens
  siRNA target sequence for EPB41L2 (NM_001431.1,857-875).
ctggttagatcctgctaaa

SEQ ID NO: 117048 - DNA, 19 bp, Homo sapiens
  siRNA target sequence for EPB41L2 (NM_001431.1,859-877).
ggttagatcctgctaaaga

SEQ ID NO: 117049 - DNA, 19 bp, Homo sapiens
  siRNA target sequence for EPB41L2 (NM_001431.1,903-921).
ccatggctattcactttta

SEQ ID NO: 117050 - DNA, 19 bp, Homo sapiens
  siRNA target sequence for EPB41L2 (NM_001431.1,937-955).
ctcctgatccttctcaatt

SEQ ID NO: 117051 - DNA, 19 bp, Homo sapiens
  siRNA target sequence for EPB41L2 (NM_001431.1,939-957).
cctgatccttctcaattga

SEQ ID NO: 117052 - DNA, 19 bp, Homo sapiens
  siRNA target sequence for EPB41L2 (NM_001431.1,949-967).
ctcaattgactgaagatat

SEQ ID NO: 117053 - DNA, 19 bp, Homo sapiens
  siRNA target sequence for EPB41L2 (NM_001431.1,1085-1103).
ctatgacccagaagaacat

SEQ ID NO: 117054 - DNA, 19 bp, Homo sapiens
  siRNA target sequence for EPB41L2 (NM_001431.1,1345-1363).
gactgcgaatcaatcgttt

SEQ ID NO: 117055 - DNA, 19 bp, Homo sapiens
  siRNA target sequence for EPB41L2 (NM_001431.1,1349-1367).
gcgaatcaatcgttttgct

SEQ ID NO: 117056 - DNA, 19 bp, Homo sapiens
  siRNA target sequence for EPB41L2 (NM_001431.1,1350-1368).
cgaatcaatcgttttgctt

SEQ ID NO: 117057 - DNA, 19 bp, Homo sapiens
  siRNA target sequence for EPB41L2 (NM_001431.1,1365-1383).
gcttggccgaaaatcttaa

SEQ ID NO: 117058 - DNA, 19 bp, Homo sapiens
  siRNA target sequence for EPB41L2 (NM_001431.1,1390-1408).
cctataaacgcagtaactt

SEQ ID NO: 117059 - DNA, 19 bp, Homo sapiens
  siRNA target sequence for EPB41L2 (NM_001431.1,1398-1416).
cgcagtaacttctacatta

SEQ ID NO: 117060 - DNA, 19 bp, Homo sapiens
  siRNA target sequence for EPB41L2 (NM_001431.1,1475-1493).
ccaccgggcagcgaaaaga

SEQ ID NO: 117061 - DNA, 19 bp, Homo sapiens
  siRNA target sequence for EPB41L2 (NM_001431.1,1483-1501).
cagcgaaaagactatggaa

SEQ ID NO: 117062 - DNA, 19 bp, Homo sapiens
  siRNA target sequence for EPB41L2 (NM_001431.1,1505-1523).
gtgcgtggagcatcatact

SEQ ID NO: 117063 - DNA, 19 bp, Homo sapiens
  siRNA target sequence for EPB41L2 (NM_001431.1,1507-1525).
gcgtggagcatcatacttt

SEQ ID NO: 117064 - DNA, 19 bp, Homo sapiens
  siRNA target sequence for EPB41L2 (NM_001431.1,1571-1589).
gaccttggggtccaaattt

SEQ ID NO: 117065 - DNA, 19 bp, Homo sapiens
  siRNA target sequence for EPB41L2 (NM_001431.1,1580-1598).
gtccaaatttcgctatagt

SEQ ID NO: 117066 - DNA, 19 bp, Homo sapiens
  siRNA target sequence for EPB41L2 (NM_001431.1,1625-1643).
ggccagcaccctcatagat

SEQ ID NO: 117067 - DNA, 19 bp, Homo sapiens
  siRNA target sequence for EPB41L2 (NM_001431.1,1626-1644).
gccagcaccctcatagata

SEQ ID NO: 117068 - DNA, 19 bp, Homo sapiens
  siRNA target sequence for EPB41L2 (NM_001431.1,1645-1663).
ggccagcaccacactttga

SEQ ID NO: 117069 - DNA, 19 bp, Homo sapiens
  siRNA target sequence for EPB41L2 (NM_001431.1,1656-1674).
cactttgagcgcacttcta

SEQ ID NO: 117070 - DNA, 19 bp, Homo sapiens
  siRNA target sequence for EPB41L2 (NM_001431.1,1658-1676).
ctttgagcgcacttctagt

SEQ ID NO: 117071 - DNA, 19 bp, Homo sapiens
  siRNA target sequence for EPB41L2 (NM_001431.1,1714-1732).
gtgtcatggaccaaagtct

SEQ ID NO: 117072 - DNA, 19 bp, Homo sapiens
  siRNA target sequence for EPB41L2 (NM_001431.1,1716-1734).
gtcatggaccaaagtctta

SEQ ID NO: 117073 - DNA, 19 bp, Homo sapiens
  siRNA target sequence for EPB41L2 (NM_001431.1,1751-1769).
cgctgctggggagatttca

SEQ ID NO: 117074 - DNA, 19 bp, Homo sapiens
  siRNA target sequence for EPB41L2 (NM_001431.1,1793-1811).
cattgccgtggtacaagat

SEQ ID NO: 117075 - DNA, 19 bp, Homo sapiens
  siRNA target sequence for EPB41L2 (NM_001431.1,1840-1858).
caactaaagccccacattt

SEQ ID NO: 117076 - DNA, 19 bp, Homo sapiens
  siRNA target sequence for EPB41L2 (NM_001431.1,1891-1909).
gagtagaaggggataatat

SEQ ID NO: 117077 - DNA, 19 bp, Homo sapiens
  siRNA target sequence for EPB41L2 (NM_001431.1,1958-1976).
ggaggacatactgaaacat

SEQ ID NO: 117078 - DNA, 19 bp, Homo sapiens
  siRNA target sequence for EPB41L2 (NM_001431.1,1981-1999).
ctagcattagtgaactcaa

SEQ ID NO: 117079 - DNA, 19 bp, Homo sapiens
  siRNA target sequence for EPB41L2 (NM_001431.1,1990-2008).
gtgaactcaagcgcaattt

SEQ ID NO: 117080 - DNA, 19 bp, Homo sapiens
  siRNA target sequence for EPB41L2 (NM_001431.1,1992-2010).
gaactcaagcgcaatttta

SEQ ID NO: 117081 - DNA, 19 bp, Homo sapiens
  siRNA target sequence for EPB41L2 (NM_001431.1,2045-2063).
ggaaaaacgacgtatcaca

SEQ ID NO: 117082 - DNA, 19 bp, Homo sapiens
  siRNA target sequence for EPB41L2 (NM_001431.1,2078-2096).
gacacaagggagttcacat

SEQ ID NO: 117083 - DNA, 19 bp, Homo sapiens
  siRNA target sequence for EPB41L2 (NM_001431.1,2226-2244).
cctgtgacacaaaaagact

SEQ ID NO: 117084 - DNA, 19 bp, Homo sapiens
  siRNA target sequence for EPB41L2 (NM_001431.1,2392-2410).
cggcagccaaggtagtaga

SEQ ID NO: 117085 - DNA, 19 bp, Homo sapiens
  siRNA target sequence for EPB41L2 (NM_001431.1,2451-2469).
gcaggtgccagtgtaatca

SEQ ID NO: 117086 - DNA, 19 bp, Homo sapiens
  siRNA target sequence for EPB41L2 (NM_001431.1,2534-2552).
cgaaggcgctcttaagcaa

SEQ ID NO: 117087 - DNA, 19 bp, Homo sapiens
  siRNA target sequence for EPB41L2 (NM_001431.1,2539-2557).
gcgctcttaagcaagacat

SEQ ID NO: 117088 - DNA, 19 bp, Homo sapiens
  siRNA target sequence for EPB41L2 (NM_001431.1,2596-2614).
gagaggtgtcccatgttga

SEQ ID NO: 117089 - DNA, 19 bp, Homo sapiens
  siRNA target sequence for EPB41L2 (NM_001431.1,2600-2618).
ggtgtcccatgttgacatt

SEQ ID NO: 117090 - DNA, 19 bp, Homo sapiens
  siRNA target sequence for EPB41L2 (NM_001431.1,2603-2621).
gtcccatgttgacattgat

SEQ ID NO: 117091 - DNA, 19 bp, Homo sapiens
  siRNA target sequence for EPB41L2 (NM_001431.1,2649-2667).
gagccaccagtggtaaaaa

SEQ ID NO: 117092 - DNA, 19 bp, Homo sapiens
  siRNA target sequence for EPB41L2 (NM_001431.1,2672-2690).
gatggtaacaatttctgat

SEQ ID NO: 117093 - DNA, 19 bp, Homo sapiens
  siRNA target sequence for EPB41L2 (NM_001431.1,2796-2814).
gattcgggcacgttactga

SEQ ID NO: 117094 - DNA, 19 bp, Homo sapiens
  siRNA target sequence for EPB41L3 (NM_012307.2,103-121).
gatcagactcggaatccaa

SEQ ID NO: 117095 - DNA, 19 bp, Homo sapiens
  siRNA target sequence for EPB41L3 (NM_012307.2,304-322).
ctgcaaaacagctcgaata

SEQ ID NO: 117096 - DNA, 19 bp, Homo sapiens
  siRNA target sequence for EPB41L3 (NM_012307.2,307-325).
caaaacagctcgaatatca

SEQ ID NO: 117097 - DNA, 19 bp, Homo sapiens
  siRNA target sequence for EPB41L3 (NM_012307.2,314-332).
gctcgaatatcagcaatta

SEQ ID NO: 117098 - DNA, 19 bp, Homo sapiens
  siRNA target sequence for EPB41L3 (NM_012307.2,317-335).
cgaatatcagcaattagaa

SEQ ID NO: 117099 - DNA, 19 bp, Homo sapiens
  siRNA target sequence for EPB41L3 (NM_012307.2,326-344).
gcaattagaagacgataaa

SEQ ID NO: 117100 - DNA, 19 bp, Homo sapiens
  siRNA target sequence for EPB41L3 (NM_012307.2,353-371).
gaaatcatctagcagtaaa

SEQ ID NO: 117101 - DNA, 19 bp, Homo sapiens
  siRNA target sequence for EPB41L3 (NM_012307.2,372-390).
ctctctcggtctccattaa

SEQ ID NO: 117102 - DNA, 19 bp, Homo sapiens
  siRNA target sequence for EPB41L3 (NM_012307.2,376-394).
ctcggtctccattaaagat

SEQ ID NO: 117103 - DNA, 19 bp, Homo sapiens
  siRNA target sequence for EPB41L3 (NM_012307.2,379-397).
ggtctccattaaagattgt

SEQ ID NO: 117104 - DNA, 19 bp, Homo sapiens
  siRNA target sequence for EPB41L3 (NM_012307.2,416-434).
gcagtgcaaagtgatactt

SEQ ID NO: 117105 - DNA, 19 bp, Homo sapiens
  siRNA target sequence for EPB41L3 (NM_012307.2,501-519).
gtgtgtgaacacttgaact

SEQ ID NO: 117106 - DNA, 19 bp, Homo sapiens
  siRNA target sequence for EPB41L3 (NM_012307.2,533-551).
ctactttgggcttacgtat

SEQ ID NO: 117107 - DNA, 19 bp, Homo sapiens
  siRNA target sequence for EPB41L3 (NM_012307.2,547-565).
cgtatcgagatgctgaaaa

SEQ ID NO: 117108 - DNA, 19 bp, Homo sapiens
  siRNA target sequence for EPB41L3 (NM_012307.2,581-599).
ggaccctgctaaggaaata

SEQ ID NO: 117109 - DNA, 19 bp, Homo sapiens
  siRNA target sequence for EPB41L3 (NM_012307.2,621-639).
gcttggcacttttcattta

SEQ ID NO: 117110 - DNA, 19 bp, Homo sapiens
  siRNA target sequence for EPB41L3 (NM_012307.2,666-684).
gcccaactatctgaagata

SEQ ID NO: 117111 - DNA, 19 bp, Homo sapiens
  siRNA target sequence for EPB41L3 (NM_012307.2,788-806).
gtcagagctcggagactat

SEQ ID NO: 117112 - DNA, 19 bp, Homo sapiens
  siRNA target sequence for EPB41L3 (NM_012307.2,803-821).
ctatgacccagatgaatgt

SEQ ID NO: 117113 - DNA, 19 bp, Homo sapiens
  siRNA target sequence for EPB41L3 (NM_012307.2,816-834).
gaatgtgggagcgattaca

SEQ ID NO: 117114 - DNA, 19 bp, Homo sapiens
  siRNA target sequence for EPB41L3 (NM_012307.2,823-841).
ggagcgattacattagtga

SEQ ID NO: 117115 - DNA, 19 bp, Homo sapiens
  siRNA target sequence for EPB41L3 (NM_012307.2,954-972).
gccaaaaaattatcaatgt

SEQ ID NO: 117116 - DNA, 19 bp, Homo sapiens
  siRNA target sequence for EPB41L3 (NM_012307.2,967-985).
caatgtatggggtagattt

SEQ ID NO: 117117 - DNA, 19 bp, Homo sapiens
  siRNA target sequence for EPB41L3 (NM_012307.2,971-989).
gtatggggtagatttacat

SEQ ID NO: 117118 - DNA, 19 bp, Homo sapiens
  siRNA target sequence for EPB41L3 (NM_012307.2,1001-1019).
ctcagaaggggtagaaatt

SEQ ID NO: 117119 - DNA, 19 bp, Homo sapiens
  siRNA target sequence for EPB41L3 (NM_012307.2,1033-1051).
gtgcaagtggtctgttgat

SEQ ID NO: 117120 - DNA, 19 bp, Homo sapiens
  siRNA target sequence for EPB41L3 (NM_012307.2,1057-1075).
gcgaccggctgcgaataaa

SEQ ID NO: 117121 - DNA, 19 bp, Homo sapiens
  siRNA target sequence for EPB41L3 (NM_012307.2,1059-1077).
gaccggctgcgaataaaca

SEQ ID NO: 117122 - DNA, 19 bp, Homo sapiens
  siRNA target sequence for EPB41L3 (NM_012307.2,1061-1079).
ccggctgcgaataaacaga

SEQ ID NO: 117123 - DNA, 19 bp, Homo sapiens
  siRNA target sequence for EPB41L3 (NM_012307.2,1062-1080).
cggctgcgaataaacagat

SEQ ID NO: 117124 - DNA, 19 bp, Homo sapiens
  siRNA target sequence for EPB41L3 (NM_012307.2,1063-1081).
ggctgcgaataaacagatt

SEQ ID NO: 117125 - DNA, 19 bp, Homo sapiens
  siRNA target sequence for EPB41L3 (NM_012307.2,1064-1082).
gctgcgaataaacagattt

SEQ ID NO: 117126 - DNA, 19 bp, Homo sapiens
  siRNA target sequence for EPB41L3 (NM_012307.2,1087-1105).
ggcccaaggttctaaagat

SEQ ID NO: 117127 - DNA, 19 bp, Homo sapiens
  siRNA target sequence for EPB41L3 (NM_012307.2,1108-1126).
catacaaacggaacaactt

SEQ ID NO: 117128 - DNA, 19 bp, Homo sapiens
  siRNA target sequence for EPB41L3 (NM_012307.2,1116-1134).
cggaacaacttttacatta

SEQ ID NO: 117129 - DNA, 19 bp, Homo sapiens
  siRNA target sequence for EPB41L3 (NM_012307.2,1144-1162).
cgggagagtttgaacaatt

SEQ ID NO: 117130 - DNA, 19 bp, Homo sapiens
  siRNA target sequence for EPB41L3 (NM_012307.2,1145-1163).
gggagagtttgaacaattt

SEQ ID NO: 117131 - DNA, 19 bp, Homo sapiens
  siRNA target sequence for EPB41L3 (NM_012307.2,1147-1165).
gagagtttgaacaatttga

SEQ ID NO: 117132 - DNA, 19 bp, Homo sapiens
  siRNA target sequence for EPB41L3 (NM_012307.2,1197-1215).
cgagctgccaagcgtttat

SEQ ID NO: 117133 - DNA, 19 bp, Homo sapiens
  siRNA target sequence for EPB41L3 (NM_012307.2,1200-1218).
gctgccaagcgtttatgga

SEQ ID NO: 117134 - DNA, 19 bp, Homo sapiens
  siRNA target sequence for EPB41L3 (NM_012307.2,1201-1219).
ctgccaagcgtttatggaa

SEQ ID NO: 117135 - DNA, 19 bp, Homo sapiens
  siRNA target sequence for EPB41L3 (NM_012307.2,1205-1223).
caagcgtttatggaaagta

SEQ ID NO: 117136 - DNA, 19 bp, Homo sapiens
  siRNA target sequence for EPB41L3 (NM_012307.2,1208-1226).
gcgtttatggaaagtatgt

SEQ ID NO: 117137 - DNA, 19 bp, Homo sapiens
  siRNA target sequence for EPB41L3 (NM_012307.2,1221-1239).
gtatgtgttgagcatcata

SEQ ID NO: 117138 - DNA, 19 bp, Homo sapiens
  siRNA target sequence for EPB41L3 (NM_012307.2,1269-1287).
cctcccaagaaattcctaa

SEQ ID NO: 117139 - DNA, 19 bp, Homo sapiens
  siRNA target sequence for EPB41L3 (NM_012307.2,1273-1291).
ccaagaaattcctaacctt

SEQ ID NO: 117140 - DNA, 19 bp, Homo sapiens
  siRNA target sequence for EPB41L3 (NM_012307.2,1292-1310).
gggttccaagtttcgttat

SEQ ID NO: 117141 - DNA, 19 bp, Homo sapiens
  siRNA target sequence for EPB41L3 (NM_012307.2,1293-1311).
ggttccaagtttcgttata

SEQ ID NO: 117142 - DNA, 19 bp, Homo sapiens
  siRNA target sequence for EPB41L3 (NM_012307.2,1339-1357).
gagccagtgcgttgataga

SEQ ID NO: 117143 - DNA, 19 bp, Homo sapiens
  siRNA target sequence for EPB41L3 (NM_012307.2,1360-1378).
gcccagcaccttactttga

SEQ ID NO: 117144 - DNA, 19 bp, Homo sapiens
  siRNA target sequence for EPB41L3 (NM_012307.2,1381-1399).
gctcatccagcaaacgtta

SEQ ID NO: 117145 - DNA, 19 bp, Homo sapiens
  siRNA target sequence for EPB41L3 (NM_012307.2,1382-1400).
ctcatccagcaaacgttat

SEQ ID NO: 117146 - DNA, 19 bp, Homo sapiens
  siRNA target sequence for EPB41L3 (NM_012307.2,1437-1455).
ggccagtacgccacaacaa

SEQ ID NO: 117147 - DNA, 19 bp, Homo sapiens
  siRNA target sequence for EPB41L3 (NM_012307.2,1438-1456).
gccagtacgccacaacaaa

SEQ ID NO: 117148 - DNA, 19 bp, Homo sapiens
  siRNA target sequence for EPB41L3 (NM_012307.2,1694-1712).
ctgcaaactgccaggttat

SEQ ID NO: 117149 - DNA, 19 bp, Homo sapiens
  siRNA target sequence for EPB41L3 (NM_012307.2,1696-1714).
gcaaactgccaggttatga

SEQ ID NO: 117150 - DNA, 19 bp, Homo sapiens
  siRNA target sequence for EPB41L3 (NM_012307.2,1777-1795).
cttacctaggggatcaaga

SEQ ID NO: 117151 - DNA, 19 bp, Homo sapiens
  siRNA target sequence for EPB41L3 (NM_012307.2,2108-2126).
gagcgcctccctagacaat

SEQ ID NO: 117152 - DNA, 19 bp, Homo sapiens
  siRNA target sequence for EPB41L3 (NM_012307.2,2110-2128).
gcgcctccctagacaatga

SEQ ID NO: 117153 - DNA, 19 bp, Homo sapiens
  siRNA target sequence for EPB41L3 (NM_012307.2,2288-2306).
cattagcgagctgaaaaga

SEQ ID NO: 117154 - DNA, 19 bp, Homo sapiens
  siRNA target sequence for EPB41L3 (NM_012307.2,2326-2344).
cagacactgccgtaacgaa

SEQ ID NO: 117155 - DNA, 19 bp, Homo sapiens
  siRNA target sequence for EPB41L3 (NM_012307.2,2330-2348).
cactgccgtaacgaatgaa

SEQ ID NO: 117156 - DNA, 19 bp, Homo sapiens
  siRNA target sequence for EPB41L3 (NM_012307.2,2493-2511).
gagtctgcgcgaaaaccaa

SEQ ID NO: 117157 - DNA, 19 bp, Homo sapiens
  siRNA target sequence for EPB41L3 (NM_012307.2,2499-2517).
gcgcgaaaaccaacagaat

SEQ ID NO: 117158 - DNA, 19 bp, Homo sapiens
  siRNA target sequence for EPB41L3 (NM_012307.2,2500-2518).
cgcgaaaaccaacagaatt

SEQ ID NO: 117159 - DNA, 19 bp, Homo sapiens
  siRNA target sequence for EPB41L3 (NM_012307.2,2519-2537).
cataggaggggttacttct

SEQ ID NO: 117160 - DNA, 19 bp, Homo sapiens
  siRNA target sequence for EPB41L3 (NM_012307.2,2575-2593).
cggagtccagtggaataga

SEQ ID NO: 117161 - DNA, 19 bp, Homo sapiens
  siRNA target sequence for EPB41L3 (NM_012307.2,2577-2595).
gagtccagtggaatagaga

SEQ ID NO: 117162 - DNA, 19 bp, Homo sapiens
  siRNA target sequence for EPB41L3 (NM_012307.2,2683-2701).
cgagtggggatgcttctta

SEQ ID NO: 117163 - DNA, 19 bp, Homo sapiens
  siRNA target sequence for EPB41L3 (NM_012307.2,2737-2755).
ccgcattcacaggcattaa

SEQ ID NO: 117164 - DNA, 19 bp, Homo sapiens
  siRNA target sequence for EPB41L3 (NM_012307.2,2738-2756).
cgcattcacaggcattaaa

SEQ ID NO: 117165 - DNA, 19 bp, Homo sapiens
  siRNA target sequence for EPB41L3 (NM_012307.2,2804-2822).
ggaggaggtcgctaaagct

SEQ ID NO: 117166 - DNA, 19 bp, Homo sapiens
  siRNA target sequence for EPB41L3 (NM_012307.2,2885-2903).
catccacatttcagaaact

SEQ ID NO: 117167 - DNA, 19 bp, Homo sapiens
  siRNA target sequence for EPB41L3 (NM_012307.2,2942-2960).
gacggaaaccatcagtttt

SEQ ID NO: 117168 - DNA, 19 bp, Homo sapiens
  siRNA target sequence for EPB41L3 (NM_012307.2,3018-3036).
gttcacaccgaaaccaaaa

SEQ ID NO: 117169 - DNA, 19 bp, Homo sapiens
  siRNA target sequence for EPB41L3 (NM_012307.2,3172-3190).
gcatttcagagacaagaat

SEQ ID NO: 117170 - DNA, 19 bp, Homo sapiens
  siRNA target sequence for EPB41L3 (NM_012307.2,3295-3313).
ccaaagtagtggtccataa

SEQ ID NO: 117171 - DNA, 19 bp, Homo sapiens
  siRNA target sequence for FHOD1 (NM_013241.1,376-394).
gtcaacgctatcttggaaa

SEQ ID NO: 117172 - DNA, 19 bp, Homo sapiens
  siRNA target sequence for FHOD1 (NM_013241.1,633-651).
gtggctgtacacattgtgt

SEQ ID NO: 117173 - DNA, 19 bp, Homo sapiens
  siRNA target sequence for FHOD1 (NM_013241.1,706-724).
gtagaatactccgaaaaca

SEQ ID NO: 117174 - DNA, 19 bp, Homo sapiens
  siRNA target sequence for FHOD1 (NM_013241.1,2150-2168).
cacctgtgcatgtcattaa

SEQ ID NO: 117175 - DNA, 19 bp, Homo sapiens
  siRNA target sequence for FHOD1 (NM_013241.1,2372-2390).
ccttcaagctggactatga

SEQ ID NO: 117176 - DNA, 19 bp, Homo sapiens
  siRNA target sequence for FHOD1 (NM_013241.1,2417-2435).
cactgtttgacctgaaagt

SEQ ID NO: 117177 - DNA, 19 bp, Homo sapiens
  siRNA target sequence for FHOD1 (NM_013241.1,2427-2445).
cctgaaagtgggtatggaa

SEQ ID NO: 117178 - DNA, 19 bp, Homo sapiens
  siRNA target sequence for FHOD1 (NM_013241.1,2635-2653).
gagtcctctgacctctatt

SEQ ID NO: 117179 - DNA, 19 bp, Homo sapiens
  siRNA target sequence for FHOD1 (NM_013241.1,2857-2875).
caccgccgtgtctgcaata

SEQ ID NO: 117180 - DNA, 19 bp, Homo sapiens
  siRNA target sequence for FHOD1 (NM_013241.1,2860-2878).
cgccgtgtctgcaataggt

SEQ ID NO: 117181 - DNA, 19 bp, Homo sapiens
  siRNA target sequence for FHOD1 (NM_013241.1,2861-2879).
gccgtgtctgcaataggtt

SEQ ID NO: 117182 - DNA, 19 bp, Homo sapiens
  siRNA target sequence for FHOD1 (NM_013241.1,2949-2967).
ccacacgctgcgggaattt

SEQ ID NO: 117183 - DNA, 19 bp, Homo sapiens
  siRNA target sequence for FHOD1 (NM_013241.1,2960-2978).
gggaatttgcgcttgagta

SEQ ID NO: 117184 - DNA, 19 bp, Homo sapiens
  siRNA target sequence for FHOD1 (NM_013241.1,3158-3176).
ctgacagtcatgctagtat

SEQ ID NO: 117185 - DNA, 19 bp, Homo sapiens
  siRNA target sequence for FHOD1 (NM_013241.1,3415-3433).
ggcaaccgcaagtctttga

SEQ ID NO: 117186 - DNA, 19 bp, Homo sapiens
  siRNA target sequence for FHOD1 (NM_013241.1,3417-3435).
caaccgcaagtctttgaga

SEQ ID NO: 117187 - DNA, 19 bp, Homo sapiens
  siRNA target sequence for FLII (NM_002018.2,117-135).
cggctacttccctgagaat

SEQ ID NO: 117188 - DNA, 19 bp, Homo sapiens
  siRNA target sequence for FLII (NM_002018.2,119-137).
gctacttccctgagaatgt

SEQ ID NO: 117189 - DNA, 19 bp, Homo sapiens
  siRNA target sequence for FLII (NM_002018.2,313-331).
gccaacagtctgaagaatt

SEQ ID NO: 117190 - DNA, 19 bp, Homo sapiens
  siRNA target sequence for FLII (NM_002018.2,332-350).
ccggagtccccgatgacat

SEQ ID NO: 117191 - DNA, 19 bp, Homo sapiens
  siRNA target sequence for FLII (NM_002018.2,335-353).
gagtccccgatgacatctt

SEQ ID NO: 117192 - DNA, 19 bp, Homo sapiens
  siRNA target sequence for FLII (NM_002018.2,348-366).
catcttcaagctagatgat

SEQ ID NO: 117193 - DNA, 19 bp, Homo sapiens
  siRNA target sequence for FLII (NM_002018.2,1208-1226).
ccgctgagtggtacaacat

SEQ ID NO: 117194 - DNA, 19 bp, Homo sapiens
  siRNA target sequence for FLII (NM_002018.2,1339-1357).
ctgcggaggcgcaaggatt

SEQ ID NO: 117195 - DNA, 19 bp, Homo sapiens
  siRNA target sequence for FLII (NM_002018.2,1556-1574).
ccatctggcagatagagaa

SEQ ID NO: 117196 - DNA, 19 bp, Homo sapiens
  siRNA target sequence for FLII (NM_002018.2,1620-1638).
cgaggctgactgctacatt

SEQ ID NO: 117197 - DNA, 19 bp, Homo sapiens
  siRNA target sequence for FLII (NM_002018.2,1707-1725).
ggccacactcgacaagaaa

SEQ ID NO: 117198 - DNA, 19 bp, Homo sapiens
  siRNA target sequence for FLII (NM_002018.2,1736-1754).
ccatccacgctgtcaactt

SEQ ID NO: 117199 - DNA, 19 bp, Homo sapiens
  siRNA target sequence for FLII (NM_002018.2,1908-1926).
caggatgtatcgtgtgtat

SEQ ID NO: 117200 - DNA, 19 bp, Homo sapiens
  siRNA target sequence for FLII (NM_002018.2,2222-2240).
cgcagcccaagctgtacaa

SEQ ID NO: 117201 - DNA, 19 bp, Homo sapiens
  siRNA target sequence for FLII (NM_002018.2,2364-2382).
cacgcgctgcgtgtacatt

SEQ ID NO: 117202 - DNA, 19 bp, Homo sapiens
  siRNA target sequence for FLII (NM_002018.2,2390-2408).
gttggtccgacgtgttcat

SEQ ID NO: 117203 - DNA, 19 bp, Homo sapiens
  siRNA target sequence for FLII (NM_002018.2,2992-3010).
cagtgcatcgtgtacttct

SEQ ID NO: 117204 - DNA, 19 bp, Homo sapiens
  siRNA target sequence for FLII (NM_002018.2,3017-3035).
gccgtgaagcctccaatat

SEQ ID NO: 117205 - DNA, 19 bp, Homo sapiens
  siRNA target sequence for FLII (NM_002018.2,3053-3071).
ccttcagcctgcaaaagaa

SEQ ID NO: 117206 - DNA, 19 bp, Homo sapiens
  siRNA target sequence for FLII (NM_002018.2,3254-3272).
cccggtgcatccagatcaa

SEQ ID NO: 117207 - DNA, 19 bp, Homo sapiens
  siRNA target sequence for FLII (NM_002018.2,3498-3516).
ggcacagaagccctatgat

SEQ ID NO: 117208 - DNA, 19 bp, Homo sapiens
  siRNA target sequence for FLII (NM_002018.2,3523-3541).
gccgagtacatgaaacaca

SEQ ID NO: 117209 - DNA, 19 bp, Homo sapiens
  siRNA target sequence for FLII (NM_002018.2,3589-3607).
gagaaatgctccgactttt

SEQ ID NO: 117210 - DNA, 19 bp, Homo sapiens
  siRNA target sequence for FLII (NM_002018.2,3599-3617).
ccgacttttgccaagatga

SEQ ID NO: 117211 - DNA, 19 bp, Homo sapiens
  siRNA target sequence for FLII (NM_002018.2,3652-3670).
ggccaagaggtctacatgt

SEQ ID NO: 117212 - DNA, 19 bp, Homo sapiens
  siRNA target sequence for FLNB (NM_001457.1,413-431).
cgtgtccatcgatagcaaa

SEQ ID NO: 117213 - DNA, 19 bp, Homo sapiens
  siRNA target sequence for FLNB (NM_001457.1,809-827).
cgagcactcagttatgact

SEQ ID NO: 117214 - DNA, 19 bp, Homo sapiens
  siRNA target sequence for FLNB (NM_001457.1,810-828).
gagcactcagttatgactt

SEQ ID NO: 117215 - DNA, 19 bp, Homo sapiens
  siRNA target sequence for FLNB (NM_001457.1,1059-1077).
gacaagaacaagacatact

SEQ ID NO: 117216 - DNA, 19 bp, Homo sapiens
  siRNA target sequence for FLNB (NM_001457.1,1061-1079).
caagaacaagacatactct

SEQ ID NO: 117217 - DNA, 19 bp, Homo sapiens
  siRNA target sequence for FLNB (NM_001457.1,1314-1332).
gatccccaggggaagaaca

SEQ ID NO: 117218 - DNA, 19 bp, Homo sapiens
  siRNA target sequence for FLNB (NM_001457.1,1340-1358).
gttgctcgtggaagacaaa

SEQ ID NO: 117219 - DNA, 19 bp, Homo sapiens
  siRNA target sequence for FLNB (NM_001457.1,1370-1388).
gtatcgatgtgtgtacaaa

SEQ ID NO: 117220 - DNA, 19 bp, Homo sapiens
  siRNA target sequence for FLNB (NM_001457.1,1404-1422).
cctcacgtggtcaagatct

SEQ ID NO: 117221 - DNA, 19 bp, Homo sapiens
  siRNA target sequence for FLNB (NM_001457.1,1405-1423).
ctcacgtggtcaagatctt

SEQ ID NO: 117222 - DNA, 19 bp, Homo sapiens
  siRNA target sequence for FLNB (NM_001457.1,1428-1446).
gctggggacactattccta

SEQ ID NO: 117223 - DNA, 19 bp, Homo sapiens
  siRNA target sequence for FLNB (NM_001457.1,1429-1447).
ctggggacactattcctaa

SEQ ID NO: 117224 - DNA, 19 bp, Homo sapiens
  siRNA target sequence for FLNB (NM_001457.1,1471-1489).
gggaagcctgcaatccaaa

SEQ ID NO: 117225 - DNA, 19 bp, Homo sapiens
  siRNA target sequence for FLNB (NM_001457.1,1472-1490).
ggaagcctgcaatccaaat

SEQ ID NO: 117226 - DNA, 19 bp, Homo sapiens
  siRNA target sequence for FLNB (NM_001457.1,1540-1558).
gggagaccacagatttcaa

SEQ ID NO: 117227 - DNA, 19 bp, Homo sapiens
  siRNA target sequence for FLNB (NM_001457.1,1659-1677).
gtctacgcattcgagtatt

SEQ ID NO: 117228 - DNA, 19 bp, Homo sapiens
  siRNA target sequence for FLNB (NM_001457.1,1741-1759).
gcccctttgaagttcaagt

SEQ ID NO: 117229 - DNA, 19 bp, Homo sapiens
  siRNA target sequence for FLNB (NM_001457.1,1833-1851).
gcggacttcgtggtagaat

SEQ ID NO: 117230 - DNA, 19 bp, Homo sapiens
  siRNA target sequence for FLNB (NM_001457.1,1916-1934).
gtacaacgaccagaatgat

SEQ ID NO: 117231 - DNA, 19 bp, Homo sapiens
  siRNA target sequence for FLNB (NM_001457.1,1935-1953).
ggatcgtgtgatgtcaaat

SEQ ID NO: 117232 - DNA, 19 bp, Homo sapiens
  siRNA target sequence for FLNB (NM_001457.1,1936-1954).
gatcgtgtgatgtcaaata

SEQ ID NO: 117233 - DNA, 19 bp, Homo sapiens
  siRNA target sequence for FLNB (NM_001457.1,1961-1979).
caaggagcctggcgaatat

SEQ ID NO: 117234 - DNA, 19 bp, Homo sapiens
  siRNA target sequence for FLNB (NM_001457.1,1972-1990).
gcgaatatgctgttcacat

SEQ ID NO: 117235 - DNA, 19 bp, Homo sapiens
  siRNA target sequence for FLNB (NM_001457.1,1996-2014).
gtgacgacgaagacatcaa

SEQ ID NO: 117236 - DNA, 19 bp, Homo sapiens
  siRNA target sequence for FLNB (NM_001457.1,2085-2103).
gggccaggtttggagaaat

SEQ ID NO: 117237 - DNA, 19 bp, Homo sapiens
  siRNA target sequence for FLNB (NM_001457.1,2104-2122).
ctggatgcattgtcaacaa

SEQ ID NO: 117238 - DNA, 19 bp, Homo sapiens
  siRNA target sequence for FLNB (NM_001457.1,2320-2338).
gcccctacagggtcaacat

SEQ ID NO: 117239 - DNA, 19 bp, Homo sapiens
  siRNA target sequence for FLNB (NM_001457.1,2460-2478).
gtcagtgttggcattaagt

SEQ ID NO: 117240 - DNA, 19 bp, Homo sapiens
  siRNA target sequence for FLNB (NM_001457.1,2462-2480).
cagtgttggcattaagtgt

SEQ ID NO: 117241 - DNA, 19 bp, Homo sapiens
  siRNA target sequence for FLNB (NM_001457.1,2513-2531).
cgtggattttgacattatt

SEQ ID NO: 117242 - DNA, 19 bp, Homo sapiens
  siRNA target sequence for FLNB (NM_001457.1,2544-2562).
gatacgttcacagtcaaat

SEQ ID NO: 117243 - DNA, 19 bp, Homo sapiens
  siRNA target sequence for FLNB (NM_001457.1,2548-2566).
cgttcacagtcaaatatgt

SEQ ID NO: 117244 - DNA, 19 bp, Homo sapiens
  siRNA target sequence for FLNB (NM_001457.1,2574-2592).
gctgctgggcgatacacta

SEQ ID NO: 117245 - DNA, 19 bp, Homo sapiens
  siRNA target sequence for FLNB (NM_001457.1,2575-2593).
ctgctgggcgatacactat

SEQ ID NO: 117246 - DNA, 19 bp, Homo sapiens
  siRNA target sequence for FLNB (NM_001457.1,2577-2595).
gctgggcgatacactatca

SEQ ID NO: 117247 - DNA, 19 bp, Homo sapiens
  siRNA target sequence for FLNB (NM_001457.1,2581-2599).
ggcgatacactatcaaagt

SEQ ID NO: 117248 - DNA, 19 bp, Homo sapiens
  siRNA target sequence for FLNB (NM_001457.1,2582-2600).
gcgatacactatcaaagtt

SEQ ID NO: 117249 - DNA, 19 bp, Homo sapiens
  siRNA target sequence for FLNB (NM_001457.1,2627-2645).
cagccctttcagagtcaaa

SEQ ID NO: 117250 - DNA, 19 bp, Homo sapiens
  siRNA target sequence for FLNB (NM_001457.1,2630-2648).
ccctttcagagtcaaagtt

SEQ ID NO: 117251 - DNA, 19 bp, Homo sapiens
  siRNA target sequence for FLNB (NM_001457.1,2769-2787).
ctcaacgtgcagttcaaca

SEQ ID NO: 117252 - DNA, 19 bp, Homo sapiens
  siRNA target sequence for FLNB (NM_001457.1,2800-2818).
gcgatgcagtgaaggattt

SEQ ID NO: 117253 - DNA, 19 bp, Homo sapiens
  siRNA target sequence for FLNB (NM_001457.1,2805-2823).
gcagtgaaggatttggata

SEQ ID NO: 117254 - DNA, 19 bp, Homo sapiens
  siRNA target sequence for FLNB (NM_001457.1,2819-2837).
ggatatcatcgataattat

SEQ ID NO: 117255 - DNA, 19 bp, Homo sapiens
  siRNA target sequence for FLNB (NM_001457.1,2963-2981).
gagcaagataaaactcaat

SEQ ID NO: 117256 - DNA, 19 bp, Homo sapiens
  siRNA target sequence for FLNB (NM_001457.1,3015-3033).
caggagttcaccgttgata

SEQ ID NO: 117257 - DNA, 19 bp, Homo sapiens
  siRNA target sequence for FLNB (NM_001457.1,3306-3324).
gccgagttcaccatcgata

SEQ ID NO: 117258 - DNA, 19 bp, Homo sapiens
  siRNA target sequence for FLNB (NM_001457.1,3311-3329).
gttcaccatcgataccaaa

SEQ ID NO: 117259 - DNA, 19 bp, Homo sapiens
  siRNA target sequence for FLNB (NM_001457.1,3367-3385).
gtccgtgcgaggccaaaat

SEQ ID NO: 117260 - DNA, 19 bp, Homo sapiens
  siRNA target sequence for FLNB (NM_001457.1,3409-3427).
ggacctgctccgtctctta

SEQ ID NO: 117261 - DNA, 19 bp, Homo sapiens
  siRNA target sequence for FLNB (NM_001457.1,3445-3463).
gggagtacttcgtcaacat

SEQ ID NO: 117262 - DNA, 19 bp, Homo sapiens
  siRNA target sequence for FLNB (NM_001457.1,3455-3473).
cgtcaacatcctctttgaa

SEQ ID NO: 117263 - DNA, 19 bp, Homo sapiens
  siRNA target sequence for FLNB (NM_001457.1,3518-3536).
gccctttgacccctctaaa

SEQ ID NO: 117264 - DNA, 19 bp, Homo sapiens
  siRNA target sequence for FLNB (NM_001457.1,3644-3662).
ctcggactcgggaacaaaa

SEQ ID NO: 117265 - DNA, 19 bp, Homo sapiens
  siRNA target sequence for FLNB (NM_001457.1,3658-3676).
caaaagccgaagtcagtat

SEQ ID NO: 117266 - DNA, 19 bp, Homo sapiens
  siRNA target sequence for FLNB (NM_001457.1,3663-3681).
gccgaagtcagtattcaga

SEQ ID NO: 117267 - DNA, 19 bp, Homo sapiens
  siRNA target sequence for FLNB (NM_001457.1,3671-3689).
cagtattcagaacaacaaa

SEQ ID NO: 117268 - DNA, 19 bp, Homo sapiens
  siRNA target sequence for FLNB (NM_001457.1,3673-3691).
gtattcagaacaacaaaga

SEQ ID NO: 117269 - DNA, 19 bp, Homo sapiens
  siRNA target sequence for FLNB (NM_001457.1,3737-3755).
cacgttgaccatgaagtat

SEQ ID NO: 117270 - DNA, 19 bp, Homo sapiens
  siRNA target sequence for FLNB (NM_001457.1,3867-3885).
gaagctaccaccgacttta

SEQ ID NO: 117271 - DNA, 19 bp, Homo sapiens
  siRNA target sequence for FLNB (NM_001457.1,3871-3889).
ctaccaccgactttacagt

SEQ ID NO: 117272 - DNA, 19 bp, Homo sapiens
  siRNA target sequence for FLNB (NM_001457.1,3968-3986).
gtgctttgtcacagacaat

SEQ ID NO: 117273 - DNA, 19 bp, Homo sapiens
  siRNA target sequence for FLNB (NM_001457.1,4061-4079).
cgtgcctatcccaaacagt

SEQ ID NO: 117274 - DNA, 19 bp, Homo sapiens
  siRNA target sequence for FLNB (NM_001457.1,4239-4257).
gagtcgaagataaattgca

SEQ ID NO: 117275 - DNA, 19 bp, Homo sapiens
  siRNA target sequence for FLNB (NM_001457.1,4282-4300).
gtgctgagtacattccttt

SEQ ID NO: 117276 - DNA, 19 bp, Homo sapiens
  siRNA target sequence for FLNB (NM_001457.1,4308-4326).
ggggattacgatgttaata

SEQ ID NO: 117277 - DNA, 19 bp, Homo sapiens
  siRNA target sequence for FLNB (NM_001457.1,4309-4327).
gggattacgatgttaatat

SEQ ID NO: 117278 - DNA, 19 bp, Homo sapiens
  siRNA target sequence for FLNB (NM_001457.1,4316-4334).
cgatgttaatatcacatat

SEQ ID NO: 117279 - DNA, 19 bp, Homo sapiens
  siRNA target sequence for FLNB (NM_001457.1,4557-4575).
gatggcacacacacagtaa

SEQ ID NO: 117280 - DNA, 19 bp, Homo sapiens
  siRNA target sequence for FLNB (NM_001457.1,4607-4625).
ggtctcagttaaatatgct

SEQ ID NO: 117281 - DNA, 19 bp, Homo sapiens
  siRNA target sequence for FLNB (NM_001457.1,4658-4676).
caaggtccttcccacatat

SEQ ID NO: 117282 - DNA, 19 bp, Homo sapiens
  siRNA target sequence for FLNB (NM_001457.1,4661-4679).
ggtccttcccacatatgat

SEQ ID NO: 117283 - DNA, 19 bp, Homo sapiens
  siRNA target sequence for FLNB (NM_001457.1,4737-4755).
ctacctgtggactttgcaa

SEQ ID NO: 117284 - DNA, 19 bp, Homo sapiens
  siRNA target sequence for FLNB (NM_001457.1,4741-4759).
ctgtggactttgcaattga

SEQ ID NO: 117285 - DNA, 19 bp, Homo sapiens
  siRNA target sequence for FLNB (NM_001457.1,4781-4799).
cctgcttgctgttcaaata

SEQ ID NO: 117286 - DNA, 19 bp, Homo sapiens
  siRNA target sequence for FLNB (NM_001457.1,4827-4845).
gccattgtccatgacaata

SEQ ID NO: 117287 - DNA, 19 bp, Homo sapiens
  siRNA target sequence for FLNB (NM_001457.1,4883-4901).
gactgggcgctatatgatt

SEQ ID NO: 117288 - DNA, 19 bp, Homo sapiens
  siRNA target sequence for FLNB (NM_001457.1,5056-5074).
ctgccgggaagggtaaagt

SEQ ID NO: 117289 - DNA, 19 bp, Homo sapiens
  siRNA target sequence for FLNB (NM_001457.1,5058-5076).
gccgggaagggtaaagtga

SEQ ID NO: 117290 - DNA, 19 bp, Homo sapiens
  siRNA target sequence for FLNB (NM_001457.1,5110-5128).
ccgaggccgatgtcattga

SEQ ID NO: 117291 - DNA, 19 bp, Homo sapiens
  siRNA target sequence for FLNB (NM_001457.1,5114-5132).
ggccgatgtcattgagaat

SEQ ID NO: 117292 - DNA, 19 bp, Homo sapiens
  siRNA target sequence for FLNB (NM_001457.1,5116-5134).
ccgatgtcattgagaatga

SEQ ID NO: 117293 - DNA, 19 bp, Homo sapiens
  siRNA target sequence for FLNB (NM_001457.1,5133-5151).
gaagatggaacctatgaca

SEQ ID NO: 117294 - DNA, 19 bp, Homo sapiens
  siRNA target sequence for FLNB (NM_001457.1,5139-5157).
ggaacctatgacatcttct

SEQ ID NO: 117295 - DNA, 19 bp, Homo sapiens
  siRNA target sequence for FLNB (NM_001457.1,5140-5158).
gaacctatgacatcttcta

SEQ ID NO: 117296 - DNA, 19 bp, Homo sapiens
  siRNA target sequence for FLNB (NM_001457.1,5174-5192).
gggcacatatgtgatctat

SEQ ID NO: 117297 - DNA, 19 bp, Homo sapiens
  siRNA target sequence for FLNB (NM_001457.1,5195-5213).
gcgcttcggtggtgttgat

SEQ ID NO: 117298 - DNA, 19 bp, Homo sapiens
  siRNA target sequence for FLNB (NM_001457.1,5196-5214).
cgcttcggtggtgttgata

SEQ ID NO: 117299 - DNA, 19 bp, Homo sapiens
  siRNA target sequence for FLNB (NM_001457.1,5197-5215).
gcttcggtggtgttgatat

SEQ ID NO: 117300 - DNA, 19 bp, Homo sapiens
  siRNA target sequence for FLNB (NM_001457.1,5198-5216).
cttcggtggtgttgatatt

SEQ ID NO: 117301 - DNA, 19 bp, Homo sapiens
  siRNA target sequence for FLNB (NM_001457.1,5201-5219).
cggtggtgttgatattcct

SEQ ID NO: 117302 - DNA, 19 bp, Homo sapiens
  siRNA target sequence for FLNB (NM_001457.1,5202-5220).
ggtggtgttgatattccta

SEQ ID NO: 117303 - DNA, 19 bp, Homo sapiens
  siRNA target sequence for FLNB (NM_001457.1,5203-5221).
gtggtgttgatattcctaa

SEQ ID NO: 117304 - DNA, 19 bp, Homo sapiens
  siRNA target sequence for FLNB (NM_001457.1,5267-5285).
ggaggaggcaccggtaaat

SEQ ID NO: 117305 - DNA, 19 bp, Homo sapiens
  siRNA target sequence for FLNB (NM_001457.1,5270-5288).
ggaggcaccggtaaatgca

SEQ ID NO: 117306 - DNA, 19 bp, Homo sapiens
  siRNA target sequence for FLNB (NM_001457.1,5472-5490).
gacggcacggtcactgtta

SEQ ID NO: 117307 - DNA, 19 bp, Homo sapiens
  siRNA target sequence for FLNB (NM_001457.1,5474-5492).
cggcacggtcactgttaga

SEQ ID NO: 117308 - DNA, 19 bp, Homo sapiens
  siRNA target sequence for FLNB (NM_001457.1,5475-5493).
ggcacggtcactgttagat

SEQ ID NO: 117309 - DNA, 19 bp, Homo sapiens
  siRNA target sequence for FLNB (NM_001457.1,5476-5494).
gcacggtcactgttagata

SEQ ID NO: 117310 - DNA, 19 bp, Homo sapiens
  siRNA target sequence for FLNB (NM_001457.1,5477-5495).
cacggtcactgttagatat

SEQ ID NO: 117311 - DNA, 19 bp, Homo sapiens
  siRNA target sequence for FLNB (NM_001457.1,5516-5534).
ccatgagatgcacatcaaa

SEQ ID NO: 117312 - DNA, 19 bp, Homo sapiens
  siRNA target sequence for FLNB (NM_001457.1,5517-5535).
catgagatgcacatcaaat

SEQ ID NO: 117313 - DNA, 19 bp, Homo sapiens
  siRNA target sequence for FLNB (NM_001457.1,5520-5538).
gagatgcacatcaaataca

SEQ ID NO: 117314 - DNA, 19 bp, Homo sapiens
  siRNA target sequence for FLNB (NM_001457.1,5689-5707).
gtctggacttggctattga

SEQ ID NO: 117315 - DNA, 19 bp, Homo sapiens
  siRNA target sequence for FLNB (NM_001457.1,5941-5959).
gcctgacggccagcattaa

SEQ ID NO: 117316 - DNA, 19 bp, Homo sapiens
  siRNA target sequence for FLNB (NM_001457.1,6037-6055).
gggaagtgggcgaacatct

SEQ ID NO: 117317 - DNA, 19 bp, Homo sapiens
  siRNA target sequence for FLNB (NM_001457.1,6054-6072).
ctggtcagcatcaagaaaa

SEQ ID NO: 117318 - DNA, 19 bp, Homo sapiens
  siRNA target sequence for FLNB (NM_001457.1,6222-6240).
ggttatggtggcatatcct

SEQ ID NO: 117319 - DNA, 19 bp, Homo sapiens
  siRNA target sequence for FLNB (NM_001457.1,6322-6340).
ccgtgcctggggtttatat

SEQ ID NO: 117320 - DNA, 19 bp, Homo sapiens
  siRNA target sequence for FLNB (NM_001457.1,6369-6387).
gtgcctgggagcccattta

SEQ ID NO: 117321 - DNA, 19 bp, Homo sapiens
  siRNA target sequence for FLNB (NM_001457.1,6381-6399).
ccatttaccgtgaagatca

SEQ ID NO: 117322 - DNA, 19 bp, Homo sapiens
  siRNA target sequence for FLNB (NM_001457.1,6456-6474).
gccactgtcgggagcattt

SEQ ID NO: 117323 - DNA, 19 bp, Homo sapiens
  siRNA target sequence for FLNB (NM_001457.1,6458-6476).
cactgtcgggagcatttgt

SEQ ID NO: 117324 - DNA, 19 bp, Homo sapiens
  siRNA target sequence for FLNB (NM_001457.1,6460-6478).
ctgtcgggagcatttgtga

SEQ ID NO: 117325 - DNA, 19 bp, Homo sapiens
  siRNA target sequence for FLNB (NM_001457.1,6828-6846).
cccagtaaggccgagatta

SEQ ID NO: 117326 - DNA, 19 bp, Homo sapiens
  siRNA target sequence for FLNB (NM_001457.1,6836-6854).
ggccgagattacattcgat

SEQ ID NO: 117327 - DNA, 19 bp, Homo sapiens
  siRNA target sequence for FLNB (NM_001457.1,6847-6865).
cattcgatgaccataaaaa

SEQ ID NO: 117328 - DNA, 19 bp, Homo sapiens
  siRNA target sequence for FLNB (NM_001457.1,6867-6885).
gggtcgtgcggtgtatctt

SEQ ID NO: 117329 - DNA, 19 bp, Homo sapiens
  siRNA target sequence for FLNB (NM_001457.1,6868-6886).
ggtcgtgcggtgtatctta

SEQ ID NO: 117330 - DNA, 19 bp, Homo sapiens
  siRNA target sequence for FLNB (NM_001457.1,6869-6887).
gtcgtgcggtgtatcttat

SEQ ID NO: 117331 - DNA, 19 bp, Homo sapiens
  siRNA target sequence for FLNB (NM_001457.1,6892-6910).
cccaagagcctggtaacta

SEQ ID NO: 117332 - DNA, 19 bp, Homo sapiens
  siRNA target sequence for FLNB (NM_001457.1,7014-7032).
cttcaggaatcgggattaa

SEQ ID NO: 117333 - DNA, 19 bp, Homo sapiens
  siRNA target sequence for FLNB (NM_001457.1,7019-7037).
ggaatcgggattaaaagtt

SEQ ID NO: 117334 - DNA, 19 bp, Homo sapiens
  siRNA target sequence for FLNB (NM_001457.1,7020-7038).
gaatcgggattaaaagtta

SEQ ID NO: 117335 - DNA, 19 bp, Homo sapiens
  siRNA target sequence for FLNB (NM_001457.1,7024-7042).
cgggattaaaagttaacca

SEQ ID NO: 117336 - DNA, 19 bp, Homo sapiens
  siRNA target sequence for FLNB (NM_001457.1,7073-7091).
cgcaaaaggcaagattgat

SEQ ID NO: 117337 - DNA, 19 bp, Homo sapiens
  siRNA target sequence for FLNB (NM_001457.1,7329-7347).
ggtatccagtcggaattct

SEQ ID NO: 117338 - DNA, 19 bp, Homo sapiens
  siRNA target sequence for FLNB (NM_001457.1,7334-7352).
ccagtcggaattctttatt

SEQ ID NO: 117339 - DNA, 19 bp, Homo sapiens
  siRNA target sequence for FLNB (NM_001457.1,7335-7353).
cagtcggaattctttatta

SEQ ID NO: 117340 - DNA, 19 bp, Homo sapiens
  siRNA target sequence for FLNB (NM_001457.1,7398-7416).
ggcccatccaaggttaaaa

SEQ ID NO: 117341 - DNA, 19 bp, Homo sapiens
  siRNA target sequence for FLNB (NM_001457.1,7399-7417).
gcccatccaaggttaaaat

SEQ ID NO: 117342 - DNA, 19 bp, Homo sapiens
  siRNA target sequence for FMNL1 (NM_005892.3,416-434).
gcggtttcaagtcaagaat

SEQ ID NO: 117343 - DNA, 19 bp, Homo sapiens
  siRNA target sequence for FMNL1 (NM_005892.3,676-694).
gctctgtcacgtatgacat

SEQ ID NO: 117344 - DNA, 19 bp, Homo sapiens
  siRNA target sequence for FMNL1 (NM_005892.3,879-897).
gtccacgtctgtattatgt

SEQ ID NO: 117345 - DNA, 19 bp, Homo sapiens
  siRNA target sequence for FMNL1 (NM_005892.3,898-916).
gcctacgcgccatcatgaa

SEQ ID NO: 117346 - DNA, 19 bp, Homo sapiens
  siRNA target sequence for FMNL1 (NM_005892.3,900-918).
ctacgcgccatcatgaact

SEQ ID NO: 117347 - DNA, 19 bp, Homo sapiens
  siRNA target sequence for FMNL1 (NM_005892.3,972-990).
gctctgagcctcaacaaca

SEQ ID NO: 117348 - DNA, 19 bp, Homo sapiens
  siRNA target sequence for FMNL1 (NM_005892.3,1446-1464).
cgggacgcggagaacgaat

SEQ ID NO: 117349 - DNA, 19 bp, Homo sapiens
  siRNA target sequence for FMNL1 (NM_005892.3,1460-1478).
cgaatccatggccaagatt

SEQ ID NO: 117350 - DNA, 19 bp, Homo sapiens
  siRNA target sequence for FMNL1 (NM_005892.3,2059-2077).
gaagacgcgactcagaatt

SEQ ID NO: 117351 - DNA, 19 bp, Homo sapiens
  siRNA target sequence for FMNL1 (NM_005892.3,2121-2139).
cgaatgccactcttgaact

SEQ ID NO: 117352 - DNA, 19 bp, Homo sapiens
  siRNA target sequence for FMNL1 (NM_005892.3,2177-2195).
cttcacagagctcaatgat

SEQ ID NO: 117353 - DNA, 19 bp, Homo sapiens
  siRNA target sequence for FMNL1 (NM_005892.3,2213-2231).
gctagacatgagtgatttt

SEQ ID NO: 117354 - DNA, 19 bp, Homo sapiens
  siRNA target sequence for FMNL1 (NM_005892.3,2274-2292).
ctcagcgctctcaagagta

SEQ ID NO: 117355 - DNA, 19 bp, Homo sapiens
  siRNA target sequence for FMNL1 (NM_005892.3,2312-2330).
cagcaaggcgacactcatt

SEQ ID NO: 117356 - DNA, 19 bp, Homo sapiens
  siRNA target sequence for FMNL1 (NM_005892.3,2314-2332).
gcaaggcgacactcattga

SEQ ID NO: 117357 - DNA, 19 bp, Homo sapiens
  siRNA target sequence for FMNL1 (NM_005892.3,2639-2657).
gctcatgccgcaactgaat

SEQ ID NO: 117358 - DNA, 19 bp, Homo sapiens
  siRNA target sequence for FMNL1 (NM_005892.3,2670-2688).
gcctcaatgtccatcaagt

SEQ ID NO: 117359 - DNA, 19 bp, Homo sapiens
  siRNA target sequence for FMNL1 (NM_005892.3,2796-2814).
gcgctgttggagatgaagt

SEQ ID NO: 117360 - DNA, 19 bp, Homo sapiens
  siRNA target sequence for FMNL1 (NM_005892.3,3087-3105).
gctcaggaggcctttgagt

SEQ ID NO: 117361 - DNA, 19 bp, Homo sapiens
  siRNA target sequence for FMNL1 (NM_005892.3,3207-3225).
gaggtggaacagtggaaaa

SEQ ID NO: 117362 - DNA, 19 bp, Homo sapiens
  siRNA target sequence for FMNL1 (NM_005892.3,3350-3368).
gcagaaggagccactcatt

SEQ ID NO: 117363 - DNA, 19 bp, Homo sapiens
  siRNA target sequence for FMNL1 (NM_005892.3,3353-3371).
gaaggagccactcatttat

SEQ ID NO: 117364 - DNA, 19 bp, Homo sapiens
  siRNA target sequence for FMNL1 (NM_005892.3,3357-3375).
gagccactcatttatgaga

SEQ ID NO: 117365 - DNA, 19 bp, Homo sapiens
  siRNA target sequence for FMNL1 (NM_005892.3,3380-3398).
ccgtgatggggccattgaa

SEQ ID NO: 117366 - DNA, 19 bp, Homo sapiens
  siRNA target sequence for FMNL1 (NM_005892.3,3382-3400).
gtgatggggccattgaaga

SEQ ID NO: 117367 - DNA, 19 bp, Homo sapiens
  siRNA target sequence for FXYD5 (NM_014164.3,218-236).
gataccacgtccagttctt

SEQ ID NO: 117368 - DNA, 19 bp, Homo sapiens
  siRNA target sequence for FXYD5 (NM_014164.3,237-255).
cagcagactcaactatcat

SEQ ID NO: 117369 - DNA, 19 bp, Homo sapiens
  siRNA target sequence for FXYD5 (NM_014164.3,246-264).
caactatcatggacattca

SEQ ID NO: 117370 - DNA, 19 bp, Homo sapiens
  siRNA target sequence for FXYD5 (NM_014164.3,514-532).
caagccatctggttttcat

SEQ ID NO: 117371 - DNA, 19 bp, Homo sapiens
  siRNA target sequence for FXYD5 (NM_014164.3,653-671).
cggttatgccggaatcgtt

SEQ ID NO: 117372 - DNA, 19 bp, Homo sapiens
  siRNA target sequence for GC (NM_000583.2,286-304).
ctagtcctgtacagtagaa

SEQ ID NO: 117373 - DNA, 19 bp, Homo sapiens
  siRNA target sequence for GC (NM_000583.2,289-307).
gtcctgtacagtagaaaat

SEQ ID NO: 117374 - DNA, 19 bp, Homo sapiens
  siRNA target sequence for GC (NM_000583.2,291-309).
cctgtacagtagaaaattt

SEQ ID NO: 117375 - DNA, 19 bp, Homo sapiens
  siRNA target sequence for GC (NM_000583.2,518-536).
gcatggctgctctgaaaca

SEQ ID NO: 117376 - DNA, 19 bp, Homo sapiens
  siRNA target sequence for GC (NM_000583.2,664-682).
cctctgtcacttttagtca

SEQ ID NO: 117377 - DNA, 19 bp, Homo sapiens
  siRNA target sequence for GC (NM_000583.2,679-697).
gtcagttacaccaagagtt

SEQ ID NO: 117378 - DNA, 19 bp, Homo sapiens
  siRNA target sequence for GC (NM_000583.2,731-749).
caagcccaactgtatgctt

SEQ ID NO: 117379 - DNA, 19 bp, Homo sapiens
  siRNA target sequence for GC (NM_000583.2,787-805).
ctcaccactctgtcaaata

SEQ ID NO: 117380 - DNA, 19 bp, Homo sapiens
  siRNA target sequence for GC (NM_000583.2,789-807).
caccactctgtcaaataga

SEQ ID NO: 117381 - DNA, 19 bp, Homo sapiens
  siRNA target sequence for GC (NM_000583.2,813-831).
ctcacaatatgctgcttat

SEQ ID NO: 117382 - DNA, 19 bp, Homo sapiens
  siRNA target sequence for GC (NM_000583.2,845-863).
caaggctcagcaatctcat

SEQ ID NO: 117383 - DNA, 19 bp, Homo sapiens
  siRNA target sequence for GC (NM_000583.2,848-866).
ggctcagcaatctcataaa

SEQ ID NO: 117384 - DNA, 19 bp, Homo sapiens
  siRNA target sequence for GC (NM_000583.2,850-868).
ctcagcaatctcataaagt

SEQ ID NO: 117385 - DNA, 19 bp, Homo sapiens
  siRNA target sequence for GC (NM_000583.2,861-879).
cataaagttagcccaaaaa

SEQ ID NO: 117386 - DNA, 19 bp, Homo sapiens
  siRNA target sequence for GC (NM_000583.2,890-908).
ctgatctggaggatgtttt

SEQ ID NO: 117387 - DNA, 19 bp, Homo sapiens
  siRNA target sequence for GC (NM_000583.2,910-928).
ccactagctgaagatatta

SEQ ID NO: 117388 - DNA, 19 bp, Homo sapiens
  siRNA target sequence for GC (NM_000583.2,913-931).
ctagctgaagatattacta

SEQ ID NO: 117389 - DNA, 19 bp, Homo sapiens
  siRNA target sequence for GC (NM_000583.2,989-1007).
ctgaacacacagtaaaact

SEQ ID NO: 117390 - DNA, 19 bp, Homo sapiens
  siRNA target sequence for GC (NM_000583.2,1075-1093).
gtttttgtgtgcacttact

SEQ ID NO: 117391 - DNA, 19 bp, Homo sapiens
  siRNA target sequence for GC (NM_000583.2,1113-1131).
ccccgagcttccagatgta

SEQ ID NO: 117392 - DNA, 19 bp, Homo sapiens
  siRNA target sequence for GC (NM_000583.2,1115-1133).
ccgagcttccagatgtaga

SEQ ID NO: 117393 - DNA, 19 bp, Homo sapiens
  siRNA target sequence for GC (NM_000583.2,1129-1147).
gtagagttgcccacaaaca

SEQ ID NO: 117394 - DNA, 19 bp, Homo sapiens
  siRNA target sequence for GC (NM_000583.2,1172-1190).
ccaaagtcatggataagta

SEQ ID NO: 117395 - DNA, 19 bp, Homo sapiens
  siRNA target sequence for GC (NM_000583.2,1177-1195).
gtcatggataagtatacat

SEQ ID NO: 117396 - DNA, 19 bp, Homo sapiens
  siRNA target sequence for GC (NM_000583.2,1214-1232).
ctcatcttccggaagtatt

SEQ ID NO: 117397 - DNA, 19 bp, Homo sapiens
  siRNA target sequence for GC (NM_000583.2,1223-1241).
cggaagtattcctcagtaa

SEQ ID NO: 117398 - DNA, 19 bp, Homo sapiens
  siRNA target sequence for GC (NM_000583.2,1246-1264).
cttgagccaaccctaaaaa

SEQ ID NO: 117399 - DNA, 19 bp, Homo sapiens
  siRNA target sequence for GC (NM_000583.2,1298-1316).
ctacctgttttaatgctaa

SEQ ID NO: 117400 - DNA, 19 bp, Homo sapiens
  siRNA target sequence for GC (NM_000583.2,1312-1330).
gctaagggccctctactaa

SEQ ID NO: 117401 - DNA, 19 bp, Homo sapiens
  siRNA target sequence for GC (NM_000583.2,1313-1331).
ctaagggccctctactaaa

SEQ ID NO: 117402 - DNA, 19 bp, Homo sapiens
  siRNA target sequence for GC (NM_000583.2,1354-1372).
gacaagggacaagaactat

SEQ ID NO: 117403 - DNA, 19 bp, Homo sapiens
  siRNA target sequence for GC (NM_000583.2,1420-1438).
gcagagcgactaaaagcaa

SEQ ID NO: 117404 - DNA, 19 bp, Homo sapiens
  siRNA target sequence for GC (NM_000583.2,1421-1439).
cagagcgactaaaagcaaa

SEQ ID NO: 117405 - DNA, 19 bp, Homo sapiens
  siRNA target sequence for GC (NM_000583.2,1465-1483).
ctggcaaagctggttaaca

SEQ ID NO: 117406 - DNA, 19 bp, Homo sapiens
  siRNA target sequence for GC (NM_000583.2,1536-1554).
ctgtgattcagagattgat

SEQ ID NO: 117407 - DNA, 19 bp, Homo sapiens
  siRNA target sequence for GMFB (NM_004124.2,122-140).
gtgatgttgccgaagattt

SEQ ID NO: 117408 - DNA, 19 bp, Homo sapiens
  siRNA target sequence for GMFB (NM_004124.2,159-177).
gtttcgttttcgcaaagaa

SEQ ID NO: 117409 - DNA, 19 bp, Homo sapiens
  siRNA target sequence for GMFB (NM_004124.2,164-182).
gttttcgcaaagaaacgaa

SEQ ID NO: 117410 - DNA, 19 bp, Homo sapiens
  siRNA target sequence for GMFB (NM_004124.2,180-198).
gaacaacgctgctattata

SEQ ID NO: 117411 - DNA, 19 bp, Homo sapiens
  siRNA target sequence for GMFB (NM_004124.2,187-205).
gctgctattataatgaaga

SEQ ID NO: 117412 - DNA, 19 bp, Homo sapiens
  siRNA target sequence for GMFB (NM_004124.2,249-267).
gggcatttcaccagatgaa

SEQ ID NO: 117413 - DNA, 19 bp, Homo sapiens
  siRNA target sequence for GMFB (NM_004124.2,251-269).
gcatttcaccagatgaact

SEQ ID NO: 117414 - DNA, 19 bp, Homo sapiens
  siRNA target sequence for GMFB (NM_004124.2,290-308).
gacaacctcgcttcattgt

SEQ ID NO: 117415 - DNA, 19 bp, Homo sapiens
  siRNA target sequence for GMFB (NM_004124.2,292-310).
caacctcgcttcattgtgt

SEQ ID NO: 117416 - DNA, 19 bp, Homo sapiens
  siRNA target sequence for GMFB (NM_004124.2,295-313).
cctcgcttcattgtgtata

SEQ ID NO: 117417 - DNA, 19 bp, Homo sapiens
  siRNA target sequence for GMFB (NM_004124.2,371-389).
ccagtcctgttggatgtaa

SEQ ID NO: 117418 - DNA, 19 bp, Homo sapiens
  siRNA target sequence for GMFB (NM_004124.2,383-401).
gatgtaagcctgaacaaca

SEQ ID NO: 117419 - DNA, 19 bp, Homo sapiens
  siRNA target sequence for GMFB (NM_004124.2,413-431).
ctggaagtaagaataagct

SEQ ID NO: 117420 - DNA, 19 bp, Homo sapiens
  siRNA target sequence for GMFB (NM_004124.2,433-451).
gtccagacagctgaactaa

SEQ ID NO: 117421 - DNA, 19 bp, Homo sapiens
  siRNA target sequence for GMFB (NM_004124.2,442-460).
gctgaactaaccaaggtat

SEQ ID NO: 117422 - DNA, 19 bp, Homo sapiens
  siRNA target sequence for GMFB (NM_004124.2,453-471).
caaggtatttgaaataaga

SEQ ID NO: 117423 - DNA, 19 bp, Homo sapiens
  siRNA target sequence for GMFB (NM_004124.2,483-501).
cctaactgaagaatggtta

SEQ ID NO: 117424 - DNA, 19 bp, Homo sapiens
  siRNA target sequence for GMFG (NM_004877.1,73-91).
ccgaaaagagacagacaat

SEQ ID NO: 117425 - DNA, 19 bp, Homo sapiens
  siRNA target sequence for GMFG (NM_004877.1,86-104).
gacaatgcagccatcataa

SEQ ID NO: 117426 - DNA, 19 bp, Homo sapiens
  siRNA target sequence for GMFG (NM_004877.1,288-306).
gctgcaagccggaacaaca

SEQ ID NO: 117427 - DNA, 19 bp, Homo sapiens
  siRNA target sequence for GMFG (NM_004877.1,310-328).
gatgtatgcagggagtaaa

SEQ ID NO: 117428 - DNA, 19 bp, Homo sapiens
  siRNA target sequence for HDAC6 (NM_006044.2,178-196).
gtcacttcgaagcgaaata

SEQ ID NO: 117429 - DNA, 19 bp, Homo sapiens
  siRNA target sequence for HDAC6 (NM_006044.2,182-200).
cttcgaagcgaaatattaa

SEQ ID NO: 117430 - DNA, 19 bp, Homo sapiens
  siRNA target sequence for HDAC6 (NM_006044.2,185-203).
cgaagcgaaatattaaaaa

SEQ ID NO: 117431 - DNA, 19 bp, Homo sapiens
  siRNA target sequence for HDAC6 (NM_006044.2,267-285).
gctcggccaagcaatggaa

SEQ ID NO: 117432 - DNA, 19 bp, Homo sapiens
  siRNA target sequence for HDAC6 (NM_006044.2,358-376).
gtgttggatgagcagttaa

SEQ ID NO: 117433 - DNA, 19 bp, Homo sapiens
  siRNA target sequence for HDAC6 (NM_006044.2,522-540).
ggttcacagcctagaatat

SEQ ID NO: 117434 - DNA, 19 bp, Homo sapiens
  siRNA target sequence for HDAC6 (NM_006044.2,523-541).
gttcacagcctagaatata

SEQ ID NO: 117435 - DNA, 19 bp, Homo sapiens
  siRNA target sequence for HDAC6 (NM_006044.2,528-546).
cagcctagaatatattgat

SEQ ID NO: 117436 - DNA, 19 bp, Homo sapiens
  siRNA target sequence for HDAC6 (NM_006044.2,553-571).
gaaacaacccagtacatga

SEQ ID NO: 117437 - DNA, 19 bp, Homo sapiens
  siRNA target sequence for HDAC6 (NM_006044.2,598-616).
gacacctacgactcagttt

SEQ ID NO: 117438 - DNA, 19 bp, Homo sapiens
  siRNA target sequence for HDAC6 (NM_006044.2,600-618).
cacctacgactcagtttat

SEQ ID NO: 117439 - DNA, 19 bp, Homo sapiens
  siRNA target sequence for HDAC6 (NM_006044.2,754-772).
cttatggatggctattgca

SEQ ID NO: 117440 - DNA, 19 bp, Homo sapiens
  siRNA target sequence for HDAC6 (NM_006044.2,760-778).
gatggctattgcatgttca

SEQ ID NO: 117441 - DNA, 19 bp, Homo sapiens
  siRNA target sequence for HDAC6 (NM_006044.2,797-815).
cccgctatgctcaacagaa

SEQ ID NO: 117442 - DNA, 19 bp, Homo sapiens
  siRNA target sequence for HDAC6 (NM_006044.2,798-816).
ccgctatgctcaacagaaa

SEQ ID NO: 117443 - DNA, 19 bp, Homo sapiens
  siRNA target sequence for HDAC6 (NM_006044.2,821-839).
gcatccggagggtccttat

SEQ ID NO: 117444 - DNA, 19 bp, Homo sapiens
  siRNA target sequence for HDAC6 (NM_006044.2,825-843).
ccggagggtccttatcgta

SEQ ID NO: 117445 - DNA, 19 bp, Homo sapiens
  siRNA target sequence for HDAC6 (NM_006044.2,892-910).
gaccccagtgtcctctatt

SEQ ID NO: 117446 - DNA, 19 bp, Homo sapiens
  siRNA target sequence for HDAC6 (NM_006044.2,949-967).
cacctgaaggcctctaact

SEQ ID NO: 117447 - DNA, 19 bp, Homo sapiens
  siRNA target sequence for HDAC6 (NM_006044.2,1391-1409).
ccttctgggaggttcttgt

SEQ ID NO: 117448 - DNA, 19 bp, Homo sapiens
  siRNA target sequence for HDAC6 (NM_006044.2,1401-1419).
ggttcttgtgagatcaact

SEQ ID NO: 117449 - DNA, 19 bp, Homo sapiens
  siRNA target sequence for HDAC6 (NM_006044.2,1424-1442).
ccgtggagagggacaacat

SEQ ID NO: 117450 - DNA, 19 bp, Homo sapiens
  siRNA target sequence for HDAC6 (NM_006044.2,1538-1556).
ggctggtctatgaccaaaa

SEQ ID NO: 117451 - DNA, 19 bp, Homo sapiens
  siRNA target sequence for HDAC6 (NM_006044.2,1540-1558).
ctggtctatgaccaaaata

SEQ ID NO: 117452 - DNA, 19 bp, Homo sapiens
  siRNA target sequence for HDAC6 (NM_006044.2,1543-1561).
gtctatgaccaaaatatga

SEQ ID NO: 117453 - DNA, 19 bp, Homo sapiens
  siRNA target sequence for HDAC6 (NM_006044.2,1609-1627).
cgcatcttgcggatcatgt

SEQ ID NO: 117454 - DNA, 19 bp, Homo sapiens
  siRNA target sequence for HDAC6 (NM_006044.2,1773-1791).
ccgtgagagttccaacttt

SEQ ID NO: 117455 - DNA, 19 bp, Homo sapiens
  siRNA target sequence for HDAC6 (NM_006044.2,1936-1954).
gatgcagcttgcggttttt

SEQ ID NO: 117456 - DNA, 19 bp, Homo sapiens
  siRNA target sequence for HDAC6 (NM_006044.2,1939-1957).
gcagcttgcggtttttgct

SEQ ID NO: 117457 - DNA, 19 bp, Homo sapiens
  siRNA target sequence for HDAC6 (NM_006044.2,1942-1960).
gcttgcggtttttgctttt

SEQ ID NO: 117458 - DNA, 19 bp, Homo sapiens
  siRNA target sequence for HDAC6 (NM_006044.2,2012-2030).
ccctacggatcctgattgt

SEQ ID NO: 117459 - DNA, 19 bp, Homo sapiens
  siRNA target sequence for HDAC6 (NM_006044.2,2041-2059).
gtccaccacggtaatggaa

SEQ ID NO: 117460 - DNA, 19 bp, Homo sapiens
  siRNA target sequence for HDAC6 (NM_006044.2,2083-2101).
cccagtgtgctatatgtgt

SEQ ID NO: 117461 - DNA, 19 bp, Homo sapiens
  siRNA target sequence for HDAC6 (NM_006044.2,2100-2118).
gtccctgcaccgctatgat

SEQ ID NO: 117462 - DNA, 19 bp, Homo sapiens
  siRNA target sequence for HDAC6 (NM_006044.2,2102-2120).
ccctgcaccgctatgatca

SEQ ID NO: 117463 - DNA, 19 bp, Homo sapiens
  siRNA target sequence for HDAC6 (NM_006044.2,2103-2121).
cctgcaccgctatgatcat

SEQ ID NO: 117464 - DNA, 19 bp, Homo sapiens
  siRNA target sequence for HDAC6 (NM_006044.2,2267-2285).
ccattgcctacgagtttaa

SEQ ID NO: 117465 - DNA, 19 bp, Homo sapiens
  siRNA target sequence for HDAC6 (NM_006044.2,2402-2420).
ccagtggccgcattatcct

SEQ ID NO: 117466 - DNA, 19 bp, Homo sapiens
  siRNA target sequence for HDAC6 (NM_006044.2,2403-2421).
cagtggccgcattatcctt

SEQ ID NO: 117467 - DNA, 19 bp, Homo sapiens
  siRNA target sequence for HDAC6 (NM_006044.2,2405-2423).
gtggccgcattatccttat

SEQ ID NO: 117468 - DNA, 19 bp, Homo sapiens
  siRNA target sequence for HDAC6 (NM_006044.2,2408-2426).
gccgcattatccttatcct

SEQ ID NO: 117469 - DNA, 19 bp, Homo sapiens
  siRNA target sequence for HDAC6 (NM_006044.2,2409-2427).
ccgcattatccttatccta

SEQ ID NO: 117470 - DNA, 19 bp, Homo sapiens
  siRNA target sequence for HDAC6 (NM_006044.2,2566-2584).
caagtccatcgcagatact

SEQ ID NO: 117471 - DNA, 19 bp, Homo sapiens
  siRNA target sequence for HDAC6 (NM_006044.2,2597-2615).
gggtcatgaaggtagaaga

SEQ ID NO: 117472 - DNA, 19 bp, Homo sapiens
  siRNA target sequence for HDAC6 (NM_006044.2,2620-2638).
gaaggaccctccagttcta

SEQ ID NO: 117473 - DNA, 19 bp, Homo sapiens
  siRNA target sequence for HDAC6 (NM_006044.2,2690-2708).
ggatgaccacacgagaaaa

SEQ ID NO: 117474 - DNA, 19 bp, Homo sapiens
  siRNA target sequence for HDAC6 (NM_006044.2,3136-3154).
ggcaccgagctgatccaaa

SEQ ID NO: 117475 - DNA, 19 bp, Homo sapiens
  siRNA target sequence for HDAC6 (NM_006044.2,3208-3226).
ggaactacaccccagatat

SEQ ID NO: 117476 - DNA, 19 bp, Homo sapiens
  siRNA target sequence for HDAC6 (NM_006044.2,3387-3405).
cactgatcaggccatattt

SEQ ID NO: 117477 - DNA, 19 bp, Homo sapiens
  siRNA target sequence for HDAC6 (NM_006044.2,3389-3407).
ctgatcaggccatatttta

SEQ ID NO: 117478 - DNA, 19 bp, Homo sapiens
  siRNA target sequence for HDAC6 (NM_006044.2,3500-3518).
gtggaacaatccaagagaa

SEQ ID NO: 117479 - DNA, 19 bp, Homo sapiens
  siRNA target sequence for HDAC6 (NM_006044.2,3502-3520).
ggaacaatccaagagaatt

SEQ ID NO: 117480 - DNA, 19 bp, Homo sapiens
  siRNA target sequence for HDAC6 (NM_006044.2,3696-3714).
cgcccaccagaacaagttt

SEQ ID NO: 117481 - DNA, 19 bp, Homo sapiens
  siRNA target sequence for HIP-55 (NM_014063.4,240-258).
ctctggactgcccaaattt

SEQ ID NO: 117482 - DNA, 19 bp, Homo sapiens
  siRNA target sequence for HIP-55 (NM_014063.4,516-534).
caatgccgtgtctgagatt

SEQ ID NO: 117483 - DNA, 19 bp, Homo sapiens
  siRNA target sequence for HIP-55 (NM_014063.4,520-538).
gccgtgtctgagattaaaa

SEQ ID NO: 117484 - DNA, 19 bp, Homo sapiens
  siRNA target sequence for HIP-55 (NM_014063.4,787-805).
gtgcacccgagggagattt

SEQ ID NO: 117485 - DNA, 19 bp, Homo sapiens
  siRNA target sequence for HIP1 (NM_005338.4,236-254).
gggcacccaccatgagaaa

SEQ ID NO: 117486 - DNA, 19 bp, Homo sapiens
  siRNA target sequence for HIP1 (NM_005338.4,328-346).
gccatgtgttccacaaact

SEQ ID NO: 117487 - DNA, 19 bp, Homo sapiens
  siRNA target sequence for HIP1 (NM_005338.4,568-586).
gtgacgtgaacaacttttt

SEQ ID NO: 117488 - DNA, 19 bp, Homo sapiens
  siRNA target sequence for HIP1 (NM_005338.4,590-608).
gttaacagtggagatgttt

SEQ ID NO: 117489 - DNA, 19 bp, Homo sapiens
  siRNA target sequence for HIP1 (NM_005338.4,629-647).
caacctcttccaaacagta

SEQ ID NO: 117490 - DNA, 19 bp, Homo sapiens
  siRNA target sequence for HIP1 (NM_005338.4,833-851).
gcagtttacaaagttgaaa

SEQ ID NO: 117491 - DNA, 19 bp, Homo sapiens
  siRNA target sequence for HIP1 (NM_005338.4,841-859).
caaagttgaaagatctgtt

SEQ ID NO: 117492 - DNA, 19 bp, Homo sapiens
  siRNA target sequence for HIP1 (NM_005338.4,946-964).
cagccctgtcagaacatat

SEQ ID NO: 117493 - DNA, 19 bp, Homo sapiens
  siRNA target sequence for HIP1 (NM_005338.4,948-966).
gccctgtcagaacatatca

SEQ ID NO: 117494 - DNA, 19 bp, Homo sapiens
  siRNA target sequence for HIP1 (NM_005338.4,1108-1126).
gcagtgatcccttcaattt

SEQ ID NO: 117495 - DNA, 19 bp, Homo sapiens
  siRNA target sequence for HIP1 (NM_005338.4,1394-1412).
gcggagcctgtctgagata

SEQ ID NO: 117496 - DNA, 19 bp, Homo sapiens
  siRNA target sequence for HIP1 (NM_005338.4,1397-1415).
gagcctgtctgagatagaa

SEQ ID NO: 117497 - DNA, 19 bp, Homo sapiens
  siRNA target sequence for HIP1 (NM_005338.4,1428-1446).
gccaatgaacagcgatata

SEQ ID NO: 117498 - DNA, 19 bp, Homo sapiens
  siRNA target sequence for HIP1 (NM_005338.4,1441-1459).
gatatagcaagctaaagga

SEQ ID NO: 117499 - DNA, 19 bp, Homo sapiens
  siRNA target sequence for HIP1 (NM_005338.4,1795-1813).
ctcatagggaggaggaatt

SEQ ID NO: 117500 - DNA, 19 bp, Homo sapiens
  siRNA target sequence for HIP1 (NM_005338.4,1888-1906).
ccaaagaccaacgaaaaat

SEQ ID NO: 117501 - DNA, 19 bp, Homo sapiens
  siRNA target sequence for HIP1 (NM_005338.4,2015-2033).
ctccacggtcacatccatt

SEQ ID NO: 117502 - DNA, 19 bp, Homo sapiens
  siRNA target sequence for HIP1 (NM_005338.4,2428-2446).
ctgccacggccagaataga

SEQ ID NO: 117503 - DNA, 19 bp, Homo sapiens
  siRNA target sequence for HIP1 (NM_005338.4,2527-2545).
gcctcatgcaagctattca

SEQ ID NO: 117504 - DNA, 19 bp, Homo sapiens
  siRNA target sequence for HIP1 (NM_005338.4,2608-2626).
catcccctaaagagtttta

SEQ ID NO: 117505 - DNA, 19 bp, Homo sapiens
  siRNA target sequence for HIP1 (NM_005338.4,2641-2659).
gatggacagaaggacttat

SEQ ID NO: 117506 - DNA, 19 bp, Homo sapiens
  siRNA target sequence for HIP1 (NM_005338.4,2645-2663).
gacagaaggacttatctca

SEQ ID NO: 117507 - DNA, 19 bp, Homo sapiens
  siRNA target sequence for HIP1 (NM_005338.4,2756-2774).
gtgttctcatgaaattgct

SEQ ID NO: 117508 - DNA, 19 bp, Homo sapiens
  siRNA target sequence for HIP1 (NM_005338.4,2998-3016).
gggtgctagagctagaaaa

SEQ ID NO: 117509 - DNA, 19 bp, Homo sapiens
  siRNA target sequence for HIP1 (NM_005338.4,2999-3017).
ggtgctagagctagaaaat

SEQ ID NO: 117510 - DNA, 19 bp, Homo sapiens
  siRNA target sequence for HPCAL1 (NM_002149.2,816-834).
cgcacagacaagatcttca

SEQ ID NO: 117511 - DNA, 19 bp, Homo sapiens
  siRNA target sequence for IPP (NM_005897.1,1709-1727).
ggactcagttgaagtttat

SEQ ID NO: 117512 - DNA, 19 bp, Homo sapiens
  siRNA target sequence for IPP (NM_005897.1,1766-1784).
gatcaccagtcgttgtgaa

SEQ ID NO: 117513 - DNA, 19 bp, Homo sapiens
  siRNA target sequence for IQGAP2 (NM_006633.1,257-275).
cccgctatggctctattgt

SEQ ID NO: 117514 - DNA, 19 bp, Homo sapiens
  siRNA target sequence for IQGAP2 (NM_006633.1,312-330).
gaggaggcggcagaacatt

SEQ ID NO: 117515 - DNA, 19 bp, Homo sapiens
  siRNA target sequence for IQGAP2 (NM_006633.1,317-335).
ggcggcagaacattgctta

SEQ ID NO: 117516 - DNA, 19 bp, Homo sapiens
  siRNA target sequence for IQGAP2 (NM_006633.1,318-336).
gcggcagaacattgcttat

SEQ ID NO: 117517 - DNA, 19 bp, Homo sapiens
  siRNA target sequence for IQGAP2 (NM_006633.1,322-340).
cagaacattgcttatgaat

SEQ ID NO: 117518 - DNA, 19 bp, Homo sapiens
  siRNA target sequence for IQGAP2 (NM_006633.1,369-387).
gtggatggaagtttgctta

SEQ ID NO: 117519 - DNA, 19 bp, Homo sapiens
  siRNA target sequence for IQGAP2 (NM_006633.1,372-390).
gatggaagtttgcttagtt

SEQ ID NO: 117520 - DNA, 19 bp, Homo sapiens
  siRNA target sequence for IQGAP2 (NM_006633.1,401-419).
caccaaccactgaattgga

SEQ ID NO: 117521 - DNA, 19 bp, Homo sapiens
  siRNA target sequence for IQGAP2 (NM_006633.1,425-443).
ggctccggaatggagttta

SEQ ID NO: 117522 - DNA, 19 bp, Homo sapiens
  siRNA target sequence for IQGAP2 (NM_006633.1,429-447).
ccggaatggagtttacctt

SEQ ID NO: 117523 - DNA, 19 bp, Homo sapiens
  siRNA target sequence for IQGAP2 (NM_006633.1,448-466).
gcaaagttagccaagttct

SEQ ID NO: 117524 - DNA, 19 bp, Homo sapiens
  siRNA target sequence for IQGAP2 (NM_006633.1,470-488).
ccccgaaaatggtatcaga

SEQ ID NO: 117525 - DNA, 19 bp, Homo sapiens
  siRNA target sequence for IQGAP2 (NM_006633.1,508-526).
gaacaaacacgttataaga

SEQ ID NO: 117526 - DNA, 19 bp, Homo sapiens
  siRNA target sequence for IQGAP2 (NM_006633.1,511-529).
caaacacgttataagaagt

SEQ ID NO: 117527 - DNA, 19 bp, Homo sapiens
  siRNA target sequence for IQGAP2 (NM_006633.1,592-610).
ggtctacccaagatatttt

SEQ ID NO: 117528 - DNA, 19 bp, Homo sapiens
  siRNA target sequence for IQGAP2 (NM_006633.1,593-611).
gtctacccaagatatttta

SEQ ID NO: 117529 - DNA, 19 bp, Homo sapiens
  siRNA target sequence for IQGAP2 (NM_006633.1,628-646).
gtctatgatcggaaaaaca

SEQ ID NO: 117530 - DNA, 19 bp, Homo sapiens
  siRNA target sequence for IQGAP2 (NM_006633.1,630-648).
ctatgatcggaaaaacata

SEQ ID NO: 117531 - DNA, 19 bp, Homo sapiens
  siRNA target sequence for IQGAP2 (NM_006633.1,634-652).
gatcggaaaaacataccaa

SEQ ID NO: 117532 - DNA, 19 bp, Homo sapiens
  siRNA target sequence for IQGAP2 (NM_006633.1,650-668).
caagaatgatatattgcat

SEQ ID NO: 117533 - DNA, 19 bp, Homo sapiens
  siRNA target sequence for IQGAP2 (NM_006633.1,665-683).
gcattcacgcactgagttt

SEQ ID NO: 117534 - DNA, 19 bp, Homo sapiens
  siRNA target sequence for IQGAP2 (NM_006633.1,678-696).
gagtttgtatctgttcaaa

SEQ ID NO: 117535 - DNA, 19 bp, Homo sapiens
  siRNA target sequence for IQGAP2 (NM_006633.1,690-708).
gttcaaactaggaatagca

SEQ ID NO: 117536 - DNA, 19 bp, Homo sapiens
  siRNA target sequence for IQGAP2 (NM_006633.1,707-725).
caccccagatccaggattt

SEQ ID NO: 117537 - DNA, 19 bp, Homo sapiens
  siRNA target sequence for IQGAP2 (NM_006633.1,720-738).
ggatttgttgggcaaagta

SEQ ID NO: 117538 - DNA, 19 bp, Homo sapiens
  siRNA target sequence for IQGAP2 (NM_006633.1,812-830).
gcaaaataggtggtattct

SEQ ID NO: 117539 - DNA, 19 bp, Homo sapiens
  siRNA target sequence for IQGAP2 (NM_006633.1,869-887).
ctgcagttatagccattaa

SEQ ID NO: 117540 - DNA, 19 bp, Homo sapiens
  siRNA target sequence for IQGAP2 (NM_006633.1,872-890).
cagttatagccattaatga

SEQ ID NO: 117541 - DNA, 19 bp, Homo sapiens
  siRNA target sequence for IQGAP2 (NM_006633.1,915-933).
gcaaaccgttgtaacacta

SEQ ID NO: 117542 - DNA, 19 bp, Homo sapiens
  siRNA target sequence for IQGAP2 (NM_006633.1,916-934).
caaaccgttgtaacactaa

SEQ ID NO: 117543 - DNA, 19 bp, Homo sapiens
  siRNA target sequence for IQGAP2 (NM_006633.1,939-957).
cccaaatgcggttttaact

SEQ ID NO: 117544 - DNA, 19 bp, Homo sapiens
  siRNA target sequence for IQGAP2 (NM_006633.1,940-958).
ccaaatgcggttttaactt

SEQ ID NO: 117545 - DNA, 19 bp, Homo sapiens
  siRNA target sequence for IQGAP2 (NM_006633.1,969-987).
caaccttgcaccagaatat

SEQ ID NO: 117546 - DNA, 19 bp, Homo sapiens
  siRNA target sequence for IQGAP2 (NM_006633.1,973-991).
cttgcaccagaatatcaga

SEQ ID NO: 117547 - DNA, 19 bp, Homo sapiens
  siRNA target sequence for IQGAP2 (NM_006633.1,1030-1048).
gcaagactgaagaatagct

SEQ ID NO: 117548 - DNA, 19 bp, Homo sapiens
  siRNA target sequence for IQGAP2 (NM_006633.1,1282-1300).
cagaacaccatgaactact

SEQ ID NO: 117549 - DNA, 19 bp, Homo sapiens
  siRNA target sequence for IQGAP2 (NM_006633.1,1304-1322).
cccacgaggagcttttgat

SEQ ID NO: 117550 - DNA, 19 bp, Homo sapiens
  siRNA target sequence for IQGAP2 (NM_006633.1,1305-1323).
ccacgaggagcttttgatt

SEQ ID NO: 117551 - DNA, 19 bp, Homo sapiens
  siRNA target sequence for IQGAP2 (NM_006633.1,1412-1430).
ccgcaataggcttaaacaa

SEQ ID NO: 117552 - DNA, 19 bp, Homo sapiens
  siRNA target sequence for IQGAP2 (NM_006633.1,1413-1431).
cgcaataggcttaaacaat

SEQ ID NO: 117553 - DNA, 19 bp, Homo sapiens
  siRNA target sequence for IQGAP2 (NM_006633.1,1415-1433).
caataggcttaaacaatct

SEQ ID NO: 117554 - DNA, 19 bp, Homo sapiens
  siRNA target sequence for IQGAP2 (NM_006633.1,1440-1458).
ggcatatgtggaacgttat

SEQ ID NO: 117555 - DNA, 19 bp, Homo sapiens
  siRNA target sequence for IQGAP2 (NM_006633.1,1475-1493).
ctgttaaactagaagtttt

SEQ ID NO: 117556 - DNA, 19 bp, Homo sapiens
  siRNA target sequence for IQGAP2 (NM_006633.1,1497-1515).
ccaagggcaagataactta

SEQ ID NO: 117557 - DNA, 19 bp, Homo sapiens
  siRNA target sequence for IQGAP2 (NM_006633.1,1498-1516).
caagggcaagataacttaa

SEQ ID NO: 117558 - DNA, 19 bp, Homo sapiens
  siRNA target sequence for IQGAP2 (NM_006633.1,1501-1519).
gggcaagataacttaagct

SEQ ID NO: 117559 - DNA, 19 bp, Homo sapiens
  siRNA target sequence for IQGAP2 (NM_006633.1,1585-1603).
gtagctgtagggtacatca

SEQ ID NO: 117560 - DNA, 19 bp, Homo sapiens
  siRNA target sequence for IQGAP2 (NM_006633.1,1653-1671).
cctacctactgcgaatatt

SEQ ID NO: 117561 - DNA, 19 bp, Homo sapiens
  siRNA target sequence for IQGAP2 (NM_006633.1,1654-1672).
ctacctactgcgaatatta

SEQ ID NO: 117562 - DNA, 19 bp, Homo sapiens
  siRNA target sequence for IQGAP2 (NM_006633.1,1698-1716).
gcactaccaggatgtttta

SEQ ID NO: 117563 - DNA, 19 bp, Homo sapiens
  siRNA target sequence for IQGAP2 (NM_006633.1,1699-1717).
cactaccaggatgttttat

SEQ ID NO: 117564 - DNA, 19 bp, Homo sapiens
  siRNA target sequence for IQGAP2 (NM_006633.1,1704-1722).
ccaggatgttttataccat

SEQ ID NO: 117565 - DNA, 19 bp, Homo sapiens
  siRNA target sequence for IQGAP2 (NM_006633.1,1826-1844).
caaaacaatgggttactct

SEQ ID NO: 117566 - DNA, 19 bp, Homo sapiens
  siRNA target sequence for IQGAP2 (NM_006633.1,1910-1928).
cttccacttctaatgcaaa

SEQ ID NO: 117567 - DNA, 19 bp, Homo sapiens
  siRNA target sequence for IQGAP2 (NM_006633.1,1940-1958).
cggagtgtgctgacaaata

SEQ ID NO: 117568 - DNA, 19 bp, Homo sapiens
  siRNA target sequence for IQGAP2 (NM_006633.1,1944-1962).
gtgtgctgacaaatactat

SEQ ID NO: 117569 - DNA, 19 bp, Homo sapiens
  siRNA target sequence for IQGAP2 (NM_006633.1,1977-1995).
ggcaaaagagctcaaatct

SEQ ID NO: 117570 - DNA, 19 bp, Homo sapiens
  siRNA target sequence for IQGAP2 (NM_006633.1,2014-2032).
ggttcatggctcaaactca

SEQ ID NO: 117571 - DNA, 19 bp, Homo sapiens
  siRNA target sequence for IQGAP2 (NM_006633.1,2015-2033).
gttcatggctcaaactcaa

SEQ ID NO: 117572 - DNA, 19 bp, Homo sapiens
  siRNA target sequence for IQGAP2 (NM_006633.1,2055-2073).
ctattacaacactgattca

SEQ ID NO: 117573 - DNA, 19 bp, Homo sapiens
  siRNA target sequence for IQGAP2 (NM_006633.1,2085-2103).
ctgggtcacacctgaatca

SEQ ID NO: 117574 - DNA, 19 bp, Homo sapiens
  siRNA target sequence for IQGAP2 (NM_006633.1,2170-2188).
ggttacattcgtgagaata

SEQ ID NO: 117575 - DNA, 19 bp, Homo sapiens
  siRNA target sequence for IQGAP2 (NM_006633.1,2171-2189).
gttacattcgtgagaatat

SEQ ID NO: 117576 - DNA, 19 bp, Homo sapiens
  siRNA target sequence for IQGAP2 (NM_006633.1,2243-2261).
ccatccttagggaagagtt

SEQ ID NO: 117577 - DNA, 19 bp, Homo sapiens
  siRNA target sequence for IQGAP2 (NM_006633.1,2244-2262).
catccttagggaagagttt

SEQ ID NO: 117578 - DNA, 19 bp, Homo sapiens
  siRNA target sequence for IQGAP2 (NM_006633.1,2247-2265).
ccttagggaagagtttgaa

SEQ ID NO: 117579 - DNA, 19 bp, Homo sapiens
  siRNA target sequence for IQGAP2 (NM_006633.1,2267-2285).
ctagaaaatcatttttgca

SEQ ID NO: 117580 - DNA, 19 bp, Homo sapiens
  siRNA target sequence for IQGAP2 (NM_006633.1,2317-2335).
gctttttggaaaggatata

SEQ ID NO: 117581 - DNA, 19 bp, Homo sapiens
  siRNA target sequence for IQGAP2 (NM_006633.1,2358-2376).
caggcggcaaacgttcatt

SEQ ID NO: 117582 - DNA, 19 bp, Homo sapiens
  siRNA target sequence for IQGAP2 (NM_006633.1,2360-2378).
ggcggcaaacgttcattga

SEQ ID NO: 117583 - DNA, 19 bp, Homo sapiens
  siRNA target sequence for IQGAP2 (NM_006633.1,2361-2379).
gcggcaaacgttcattgat

SEQ ID NO: 117584 - DNA, 19 bp, Homo sapiens
  siRNA target sequence for IQGAP2 (NM_006633.1,2362-2380).
cggcaaacgttcattgata

SEQ ID NO: 117585 - DNA, 19 bp, Homo sapiens
  siRNA target sequence for IQGAP2 (NM_006633.1,2363-2381).
ggcaaacgttcattgataa

SEQ ID NO: 117586 - DNA, 19 bp, Homo sapiens
  siRNA target sequence for IQGAP2 (NM_006633.1,2364-2382).
gcaaacgttcattgataat

SEQ ID NO: 117587 - DNA, 19 bp, Homo sapiens
  siRNA target sequence for IQGAP2 (NM_006633.1,2365-2383).
caaacgttcattgataata

SEQ ID NO: 117588 - DNA, 19 bp, Homo sapiens
  siRNA target sequence for IQGAP2 (NM_006633.1,2369-2387).
cgttcattgataatactga

SEQ ID NO: 117589 - DNA, 19 bp, Homo sapiens
  siRNA target sequence for IQGAP2 (NM_006633.1,2518-2536).
gctagagatgactacaaaa

SEQ ID NO: 117590 - DNA, 19 bp, Homo sapiens
  siRNA target sequence for IQGAP2 (NM_006633.1,2522-2540).
gagatgactacaaaacatt

SEQ ID NO: 117591 - DNA, 19 bp, Homo sapiens
  siRNA target sequence for IQGAP2 (NM_006633.1,2569-2587).
gtaattcgcaaatttgtat

SEQ ID NO: 117592 - DNA, 19 bp, Homo sapiens
  siRNA target sequence for IQGAP2 (NM_006633.1,2626-2644).
ctagaggttgcacgattaa

SEQ ID NO: 117593 - DNA, 19 bp, Homo sapiens
  siRNA target sequence for IQGAP2 (NM_006633.1,2661-2679).
caagatcagggccaatcaa

SEQ ID NO: 117594 - DNA, 19 bp, Homo sapiens
  siRNA target sequence for IQGAP2 (NM_006633.1,2742-2760).
cacactagaggatgtaatt

SEQ ID NO: 117595 - DNA, 19 bp, Homo sapiens
  siRNA target sequence for IQGAP2 (NM_006633.1,2817-2835).
caccgacaaccaaggaata

SEQ ID NO: 117596 - DNA, 19 bp, Homo sapiens
  siRNA target sequence for IQGAP2 (NM_006633.1,2819-2837).
ccgacaaccaaggaataaa

SEQ ID NO: 117597 - DNA, 19 bp, Homo sapiens
  siRNA target sequence for IQGAP2 (NM_006633.1,2873-2891).
catatcagcagctgtttta

SEQ ID NO: 117598 - DNA, 19 bp, Homo sapiens
  siRNA target sequence for IQGAP2 (NM_006633.1,2899-2917).
cagaccaaccctttatact

SEQ ID NO: 117599 - DNA, 19 bp, Homo sapiens
  siRNA target sequence for IQGAP2 (NM_006633.1,2946-2964).
gaacaagtccactaaattt

SEQ ID NO: 117600 - DNA, 19 bp, Homo sapiens
  siRNA target sequence for IQGAP2 (NM_006633.1,2952-2970).
gtccactaaatttatggat

SEQ ID NO: 117601 - DNA, 19 bp, Homo sapiens
  siRNA target sequence for IQGAP2 (NM_006633.1,3000-3018).
ctctaatcagcgagaagaa

SEQ ID NO: 117602 - DNA, 19 bp, Homo sapiens
  siRNA target sequence for IQGAP2 (NM_006633.1,3009-3027).
gcgagaagaatatctactt

SEQ ID NO: 117603 - DNA, 19 bp, Homo sapiens
  siRNA target sequence for IQGAP2 (NM_006633.1,3081-3099).
ggtacaggacatagttact

SEQ ID NO: 117604 - DNA, 19 bp, Homo sapiens
  siRNA target sequence for IQGAP2 (NM_006633.1,3101-3119).
gtaaccctacagtcatcaa

SEQ ID NO: 117605 - DNA, 19 bp, Homo sapiens
  siRNA target sequence for IQGAP2 (NM_006633.1,3120-3138).
gatggtcgtcagcttcaat

SEQ ID NO: 117606 - DNA, 19 bp, Homo sapiens
  siRNA target sequence for IQGAP2 (NM_006633.1,3123-3141).
ggtcgtcagcttcaataga

SEQ ID NO: 117607 - DNA, 19 bp, Homo sapiens
  siRNA target sequence for IQGAP2 (NM_006633.1,3205-3223).
gacaagtcgctgattatca

SEQ ID NO: 117608 - DNA, 19 bp, Homo sapiens
  siRNA target sequence for IQGAP2 (NM_006633.1,3251-3269).
cttgggtgaaccaactaga

SEQ ID NO: 117609 - DNA, 19 bp, Homo sapiens
  siRNA target sequence for IQGAP2 (NM_006633.1,3287-3305).
ccagcaagttgccttatga

SEQ ID NO: 117610 - DNA, 19 bp, Homo sapiens
  siRNA target sequence for IQGAP2 (NM_006633.1,3290-3308).
gcaagttgccttatgatgt

SEQ ID NO: 117611 - DNA, 19 bp, Homo sapiens
  siRNA target sequence for IQGAP2 (NM_006633.1,3312-3330).
cacagaacaagctctaaca

SEQ ID NO: 117612 - DNA, 19 bp, Homo sapiens
  siRNA target sequence for IQGAP2 (NM_006633.1,3387-3405).
cgacaaagtcctgaattct

SEQ ID NO: 117613 - DNA, 19 bp, Homo sapiens
  siRNA target sequence for IQGAP2 (NM_006633.1,3430-3448).
ccttatggattgaggtata

SEQ ID NO: 117614 - DNA, 19 bp, Homo sapiens
  siRNA target sequence for IQGAP2 (NM_006633.1,3431-3449).
cttatggattgaggtatat

SEQ ID NO: 117615 - DNA, 19 bp, Homo sapiens
  siRNA target sequence for IQGAP2 (NM_006633.1,3486-3504).
ccccgatgcaacagaagat

SEQ ID NO: 117616 - DNA, 19 bp, Homo sapiens
  siRNA target sequence for IQGAP2 (NM_006633.1,3499-3517).
gaagatgagctattaaaga

SEQ ID NO: 117617 - DNA, 19 bp, Homo sapiens
  siRNA target sequence for IQGAP2 (NM_006633.1,3532-3550).
ctgtactatcggtacatga

SEQ ID NO: 117618 - DNA, 19 bp, Homo sapiens
  siRNA target sequence for IQGAP2 (NM_006633.1,3534-3552).
gtactatcggtacatgaat

SEQ ID NO: 117619 - DNA, 19 bp, Homo sapiens
  siRNA target sequence for IQGAP2 (NM_006633.1,3569-3587).
cagatggctttgatatcat

SEQ ID NO: 117620 - DNA, 19 bp, Homo sapiens
  siRNA target sequence for IQGAP2 (NM_006633.1,3617-3635).
ctgaccaaaggagaaactt

SEQ ID NO: 117621 - DNA, 19 bp, Homo sapiens
  siRNA target sequence for IQGAP2 (NM_006633.1,3641-3659).
cagtggccaaggttcttca

SEQ ID NO: 117622 - DNA, 19 bp, Homo sapiens
  siRNA target sequence for IQGAP2 (NM_006633.1,3668-3686).
cctccaacaagctgtttga

SEQ ID NO: 117623 - DNA, 19 bp, Homo sapiens
  siRNA target sequence for IQGAP2 (NM_006633.1,3700-3718).
catctctcatctatgaaca

SEQ ID NO: 117624 - DNA, 19 bp, Homo sapiens
  siRNA target sequence for IQGAP2 (NM_006633.1,3705-3723).
ctcatctatgaacaattat

SEQ ID NO: 117625 - DNA, 19 bp, Homo sapiens
  siRNA target sequence for IQGAP2 (NM_006633.1,3730-3748).
gagacgtatcaggaattca

SEQ ID NO: 117626 - DNA, 19 bp, Homo sapiens
  siRNA target sequence for IQGAP2 (NM_006633.1,3829-3847).
gtcagcaaaccagtcattt

SEQ ID NO: 117627 - DNA, 19 bp, Homo sapiens
  siRNA target sequence for IQGAP2 (NM_006633.1,3961-3979).
gtgccaaccgtggaatctt

SEQ ID NO: 117628 - DNA, 19 bp, Homo sapiens
  siRNA target sequence for IQGAP2 (NM_006633.1,3965-3983).
caaccgtggaatcttttct

SEQ ID NO: 117629 - DNA, 19 bp, Homo sapiens
  siRNA target sequence for IQGAP2 (NM_006633.1,4011-4029).
ccctaacaaggcaaataca

SEQ ID NO: 117630 - DNA, 19 bp, Homo sapiens
  siRNA target sequence for IQGAP2 (NM_006633.1,4013-4031).
ctaacaaggcaaatacact

SEQ ID NO: 117631 - DNA, 19 bp, Homo sapiens
  siRNA target sequence for IQGAP2 (NM_006633.1,4017-4035).
caaggcaaatacactaagt

SEQ ID NO: 117632 - DNA, 19 bp, Homo sapiens
  siRNA target sequence for IQGAP2 (NM_006633.1,4028-4046).
cactaagtcagctttcaaa

SEQ ID NO: 117633 - DNA, 19 bp, Homo sapiens
  siRNA target sequence for IQGAP2 (NM_006633.1,4030-4048).
ctaagtcagctttcaaaga

SEQ ID NO: 117634 - DNA, 19 bp, Homo sapiens
  siRNA target sequence for IQGAP2 (NM_006633.1,4089-4107).
ggacggtgaagctatagat

SEQ ID NO: 117635 - DNA, 19 bp, Homo sapiens
  siRNA target sequence for IQGAP2 (NM_006633.1,4109-4127).
gccgaagcctcatgataaa

SEQ ID NO: 117636 - DNA, 19 bp, Homo sapiens
  siRNA target sequence for IQGAP2 (NM_006633.1,4111-4129).
cgaagcctcatgataaaga

SEQ ID NO: 117637 - DNA, 19 bp, Homo sapiens
  siRNA target sequence for IQGAP2 (NM_006633.1,4130-4148).
ccaagaagctgataattga

SEQ ID NO: 117638 - DNA, 19 bp, Homo sapiens
  siRNA target sequence for IQGAP2 (NM_006633.1,4131-4149).
caagaagctgataattgat

SEQ ID NO: 117639 - DNA, 19 bp, Homo sapiens
  siRNA target sequence for IQGAP2 (NM_006633.1,4173-4191).
cacattgacagaaatctta

SEQ ID NO: 117640 - DNA, 19 bp, Homo sapiens
  siRNA target sequence for IQGAP2 (NM_006633.1,4175-4193).
cattgacagaaatcttaga

SEQ ID NO: 117641 - DNA, 19 bp, Homo sapiens
  siRNA target sequence for IQGAP2 (NM_006633.1,4239-4257).
ggtgagccgtgcaatgata

SEQ ID NO: 117642 - DNA, 19 bp, Homo sapiens
  siRNA target sequence for IQGAP2 (NM_006633.1,4242-4260).
gagccgtgcaatgatagat

SEQ ID NO: 117643 - DNA, 19 bp, Homo sapiens
  siRNA target sequence for IQGAP2 (NM_006633.1,4284-4302).
gcatagccaatctatgatt

SEQ ID NO: 117644 - DNA, 19 bp, Homo sapiens
  siRNA target sequence for IQGAP2 (NM_006633.1,4378-4396).
cacgtgtcatccgaaaata

SEQ ID NO: 117645 - DNA, 19 bp, Homo sapiens
  siRNA target sequence for IQGAP2 (NM_006633.1,4385-4403).
catccgaaaataaatacca

SEQ ID NO: 117646 - DNA, 19 bp, Homo sapiens
  siRNA target sequence for IQGAP2 (NM_006633.1,4402-4420).
caagacattctcaatgaga

SEQ ID NO: 117647 - DNA, 19 bp, Homo sapiens
  siRNA target sequence for IQGAP2 (NM_006633.1,4449-4467).
ctatcgtaagcttcgaaaa

SEQ ID NO: 117648 - DNA, 19 bp, Homo sapiens
  siRNA target sequence for IQGAP2 (NM_006633.1,4595-4613).
ctcggagatcaattaaact

SEQ ID NO: 117649 - DNA, 19 bp, Homo sapiens
  siRNA target sequence for IQGAP2 (NM_006633.1,4598-4616).
ggagatcaattaaactaga

SEQ ID NO: 117650 - DNA, 19 bp, Homo sapiens
  siRNA target sequence for IQGAP2 (NM_006633.1,4646-4664).
gagcgaagccagtgaagta

SEQ ID NO: 117651 - DNA, 19 bp, Homo sapiens
  siRNA target sequence for IQGAP2 (NM_006633.1,4648-4666).
gcgaagccagtgaagtaca

SEQ ID NO: 117652 - DNA, 19 bp, Homo sapiens
  siRNA target sequence for IQGAP2 (NM_006633.1,4691-4709).
gtgtcctgctagatataga

SEQ ID NO: 117653 - DNA, 19 bp, Homo sapiens
  siRNA target sequence for IQGAP2 (NM_006633.1,4695-4713).
cctgctagatatagatgat

SEQ ID NO: 117654 - DNA, 19 bp, Homo sapiens
  siRNA target sequence for IQGAP2 (NM_006633.1,4698-4716).
gctagatatagatgatctt

SEQ ID NO: 117655 - DNA, 19 bp, Homo sapiens
  siRNA target sequence for IQGAP2 (NM_006633.1,4721-4739).
caaaccagtttaagaatgt

SEQ ID NO: 117656 - DNA, 19 bp, Homo sapiens
  siRNA target sequence for IQGAP2 (NM_006633.1,4725-4743).
ccagtttaagaatgttaca

SEQ ID NO: 117657 - DNA, 19 bp, Homo sapiens
  siRNA target sequence for IQGAP2 (NM_006633.1,4752-4770).
catagctactgaagatgta

SEQ ID NO: 117658 - DNA, 19 bp, Homo sapiens
  siRNA target sequence for IQGAP2 (NM_006633.1,4773-4791).
cattttcgatgtaagatca

SEQ ID NO: 117659 - DNA, 19 bp, Homo sapiens
  siRNA target sequence for IQGAP2 (NM_006633.1,4812-4830).
ggaaaaggtgcaactcaat

SEQ ID NO: 117660 - DNA, 19 bp, Homo sapiens
  siRNA target sequence for IQGAP2 (NM_006633.1,4813-4831).
gaaaaggtgcaactcaata

SEQ ID NO: 117661 - DNA, 19 bp, Homo sapiens
  siRNA target sequence for KIAA0843 (NM_014945.1,215-233).
cggggcagctccaatgtca

SEQ ID NO: 117662 - DNA, 19 bp, Homo sapiens
  siRNA target sequence for KIAA0843 (NM_014945.1,348-366).
caggcttcttcttcaagaa

SEQ ID NO: 117663 - DNA, 19 bp, Homo sapiens
  siRNA target sequence for KIAA0843 (NM_014945.1,535-553).
gaccttcagcggtaaagaa

SEQ ID NO: 117664 - DNA, 19 bp, Homo sapiens
  siRNA target sequence for KIAA0843 (NM_014945.1,538-556).
cttcagcggtaaagaatgt

SEQ ID NO: 117665 - DNA, 19 bp, Homo sapiens
  siRNA target sequence for KIAA0843 (NM_014945.1,589-607).
cagtaagcccatcaagatt

SEQ ID NO: 117666 - DNA, 19 bp, Homo sapiens
  siRNA target sequence for KIAA0843 (NM_014945.1,884-902).
cgctgccaccagatgttca

SEQ ID NO: 117667 - DNA, 19 bp, Homo sapiens
  siRNA target sequence for KIAA0843 (NM_014945.1,988-1006).
gcatagacggacatctgaa

SEQ ID NO: 117668 - DNA, 19 bp, Homo sapiens
  siRNA target sequence for KIAA0843 (NM_014945.1,989-1007).
catagacggacatctgaaa

SEQ ID NO: 117669 - DNA, 19 bp, Homo sapiens
  siRNA target sequence for KIAA0843 (NM_014945.1,1059-1077).
gcgctaaagtggataatga

SEQ ID NO: 117670 - DNA, 19 bp, Homo sapiens
  siRNA target sequence for KIAA0843 (NM_014945.1,1100-1118).
gcggctctccccaaggtta

SEQ ID NO: 117671 - DNA, 19 bp, Homo sapiens
  siRNA target sequence for KIAA0843 (NM_014945.1,1101-1119).
cggctctccccaaggttaa

SEQ ID NO: 117672 - DNA, 19 bp, Homo sapiens
  siRNA target sequence for KIAA0843 (NM_014945.1,1106-1124).
ctccccaaggttaagtcta

SEQ ID NO: 117673 - DNA, 19 bp, Homo sapiens
  siRNA target sequence for KIAA0843 (NM_014945.1,1163-1181).
cctcattccagatacatgt

SEQ ID NO: 117674 - DNA, 19 bp, Homo sapiens
  siRNA target sequence for KIAA0843 (NM_014945.1,1236-1254).
cctactcccaggacatcta

SEQ ID NO: 117675 - DNA, 19 bp, Homo sapiens
  siRNA target sequence for KIAA0843 (NM_014945.1,1350-1368).
gctcacctcaccactacta

SEQ ID NO: 117676 - DNA, 19 bp, Homo sapiens
  siRNA target sequence for KIAA0843 (NM_014945.1,1390-1408).
ccggagctctccataccat

SEQ ID NO: 117677 - DNA, 19 bp, Homo sapiens
  siRNA target sequence for KIAA0843 (NM_014945.1,1391-1409).
cggagctctccataccata

SEQ ID NO: 117678 - DNA, 19 bp, Homo sapiens
  siRNA target sequence for KIAA0843 (NM_014945.1,1401-1419).
cataccatagccagttaga

SEQ ID NO: 117679 - DNA, 19 bp, Homo sapiens
  siRNA target sequence for KIAA0843 (NM_014945.1,1497-1515).
ggaaacccccgatctacaa

SEQ ID NO: 117680 - DNA, 19 bp, Homo sapiens
  siRNA target sequence for KIAA0843 (NM_014945.1,1517-1535).
cggcatggtgatttgtcta

SEQ ID NO: 117681 - DNA, 19 bp, Homo sapiens
  siRNA target sequence for KIAA0843 (NM_014945.1,1597-1615).
ctcgccagacccctactat

SEQ ID NO: 117682 - DNA, 19 bp, Homo sapiens
  siRNA target sequence for KIAA0843 (NM_014945.1,1720-1738).
caagctccaaagtggaatt

SEQ ID NO: 117683 - DNA, 19 bp, Homo sapiens
  siRNA target sequence for KIAA0843 (NM_014945.1,2076-2094).
gactgcccaaggatgtaga

SEQ ID NO: 117684 - DNA, 19 bp, Homo sapiens
  siRNA target sequence for KIAA0843 (NM_014945.1,2149-2167).
catgaccatctctgagttt

SEQ ID NO: 117685 - DNA, 19 bp, Homo sapiens
  siRNA target sequence for KLHL1 (NM_020866.1,633-651).
caggctctgggcgaaaaga

SEQ ID NO: 117686 - DNA, 19 bp, Homo sapiens
  siRNA target sequence for KLHL1 (NM_020866.1,645-663).
gaaaagacttcgatgtgaa

SEQ ID NO: 117687 - DNA, 19 bp, Homo sapiens
  siRNA target sequence for KLHL1 (NM_020866.1,674-692).
cgactccgctggaaactct

SEQ ID NO: 117688 - DNA, 19 bp, Homo sapiens
  siRNA target sequence for KLHL1 (NM_020866.1,675-693).
gactccgctggaaactctt

SEQ ID NO: 117689 - DNA, 19 bp, Homo sapiens
  siRNA target sequence for KLHL1 (NM_020866.1,785-803).
cagagtcgcctgctcaaaa

SEQ ID NO: 117690 - DNA, 19 bp, Homo sapiens
  siRNA target sequence for KLHL1 (NM_020866.1,1118-1136).
ggacacaggctgtcatcaa

SEQ ID NO: 117691 - DNA, 19 bp, Homo sapiens
  siRNA target sequence for KLHL1 (NM_020866.1,1131-1149).
catcaaccggccattcaat

SEQ ID NO: 117692 - DNA, 19 bp, Homo sapiens
  siRNA target sequence for KLHL1 (NM_020866.1,1146-1164).
caatgacacctcaaagtga

SEQ ID NO: 117693 - DNA, 19 bp, Homo sapiens
  siRNA target sequence for KLHL1 (NM_020866.1,1179-1197).
gctctgaagaattctatca

SEQ ID NO: 117694 - DNA, 19 bp, Homo sapiens
  siRNA target sequence for KLHL1 (NM_020866.1,1263-1281).
gtgatgttatcctgattgt

SEQ ID NO: 117695 - DNA, 19 bp, Homo sapiens
  siRNA target sequence for KLHL1 (NM_020866.1,1320-1338).
gttcagtctccgactattt

SEQ ID NO: 117696 - DNA, 19 bp, Homo sapiens
  siRNA target sequence for KLHL1 (NM_020866.1,1342-1360).
ggccatgtttacaagtgat

SEQ ID NO: 117697 - DNA, 19 bp, Homo sapiens
  siRNA target sequence for KLHL1 (NM_020866.1,1348-1366).
gtttacaagtgatgtttgt

SEQ ID NO: 117698 - DNA, 19 bp, Homo sapiens
  siRNA target sequence for KLHL1 (NM_020866.1,1421-1439).
gaccttgtccaatttgcat

SEQ ID NO: 117699 - DNA, 19 bp, Homo sapiens
  siRNA target sequence for KLHL1 (NM_020866.1,1423-1441).
ccttgtccaatttgcatat

SEQ ID NO: 117700 - DNA, 19 bp, Homo sapiens
  siRNA target sequence for KLHL1 (NM_020866.1,1598-1616).
caaggatgcattgagttaa

SEQ ID NO: 117701 - DNA, 19 bp, Homo sapiens
  siRNA target sequence for KLHL1 (NM_020866.1,1622-1640).
gtggcccacagctacacaa

SEQ ID NO: 117702 - DNA, 19 bp, Homo sapiens
  siRNA target sequence for KLHL1 (NM_020866.1,1717-1735).
cagtgatgatgtcaatgtt

SEQ ID NO: 117703 - DNA, 19 bp, Homo sapiens
  siRNA target sequence for KLHL1 (NM_020866.1,1765-1783).
gatgatgtgggtcaagtat

SEQ ID NO: 117704 - DNA, 19 bp, Homo sapiens
  siRNA target sequence for KLHL1 (NM_020866.1,1786-1804).
catgcagagtagatgcaat

SEQ ID NO: 117705 - DNA, 19 bp, Homo sapiens
  siRNA target sequence for KLHL1 (NM_020866.1,1812-1830).
gcatgcttcttgcctttat

SEQ ID NO: 117706 - DNA, 19 bp, Homo sapiens
  siRNA target sequence for KLHL1 (NM_020866.1,1813-1831).
catgcttcttgcctttata

SEQ ID NO: 117707 - DNA, 19 bp, Homo sapiens
  siRNA target sequence for KLHL1 (NM_020866.1,1891-1909).
gaatgatctggaatgtcaa

SEQ ID NO: 117708 - DNA, 19 bp, Homo sapiens
  siRNA target sequence for KLHL1 (NM_020866.1,1936-1954).
ccatctattgccagaaaga

SEQ ID NO: 117709 - DNA, 19 bp, Homo sapiens
  siRNA target sequence for KLHL1 (NM_020866.1,1995-2013).
ctacagtcggaactttgta

SEQ ID NO: 117710 - DNA, 19 bp, Homo sapiens
  siRNA target sequence for KLHL1 (NM_020866.1,2016-2034).
ctgtaggaggaatggataa

SEQ ID NO: 117711 - DNA, 19 bp, Homo sapiens
  siRNA target sequence for KLHL1 (NM_020866.1,2018-2036).
gtaggaggaatggataaca

SEQ ID NO: 117712 - DNA, 19 bp, Homo sapiens
  siRNA target sequence for KLHL1 (NM_020866.1,2045-2063).
gctacaactatagagaaat

SEQ ID NO: 117713 - DNA, 19 bp, Homo sapiens
  siRNA target sequence for KLHL1 (NM_020866.1,2046-2064).
ctacaactatagagaaata

SEQ ID NO: 117714 - DNA, 19 bp, Homo sapiens
  siRNA target sequence for KLHL1 (NM_020866.1,2066-2084).
gatctgagaacaaatctgt

SEQ ID NO: 117715 - DNA, 19 bp, Homo sapiens
  siRNA target sequence for KLHL1 (NM_020866.1,2146-2164).
caaactctttgtaattgga

SEQ ID NO: 117716 - DNA, 19 bp, Homo sapiens
  siRNA target sequence for KLHL1 (NM_020866.1,2168-2186).
cgagatggcttaaagacat

SEQ ID NO: 117717 - DNA, 19 bp, Homo sapiens
  siRNA target sequence for KLHL1 (NM_020866.1,2169-2187).
gagatggcttaaagacatt

SEQ ID NO: 117718 - DNA, 19 bp, Homo sapiens
  siRNA target sequence for KLHL1 (NM_020866.1,2171-2189).
gatggcttaaagacattga

SEQ ID NO: 117719 - DNA, 19 bp, Homo sapiens
  siRNA target sequence for KLHL1 (NM_020866.1,2182-2200).
gacattgaacactgttgaa

SEQ ID NO: 117720 - DNA, 19 bp, Homo sapiens
  siRNA target sequence for KLHL1 (NM_020866.1,2218-2236).
caagacatggactgtctta

SEQ ID NO: 117721 - DNA, 19 bp, Homo sapiens
  siRNA target sequence for KLHL1 (NM_020866.1,2347-2365).
ggatccacagagtcaacaa

SEQ ID NO: 117722 - DNA, 19 bp, Homo sapiens
  siRNA target sequence for KLHL1 (NM_020866.1,2417-2435).
gcattgaatggcaagttgt

SEQ ID NO: 117723 - DNA, 19 bp, Homo sapiens
  siRNA target sequence for KLHL1 (NM_020866.1,2422-2440).
gaatggcaagttgtattca

SEQ ID NO: 117724 - DNA, 19 bp, Homo sapiens
  siRNA target sequence for KLHL1 (NM_020866.1,2472-2490).
gttcaatggaatattatga

SEQ ID NO: 117725 - DNA, 19 bp, Homo sapiens
  siRNA target sequence for KLHL1 (NM_020866.1,2556-2574).
ccacatgtgacggttttct

SEQ ID NO: 117726 - DNA, 19 bp, Homo sapiens
  siRNA target sequence for KLHL1 (NM_020866.1,2557-2575).
cacatgtgacggttttctt

SEQ ID NO: 117727 - DNA, 19 bp, Homo sapiens
  siRNA target sequence for KLHL1 (NM_020866.1,2559-2577).
catgtgacggttttcttta

SEQ ID NO: 117728 - DNA, 19 bp, Homo sapiens
  siRNA target sequence for KLHL1 (NM_020866.1,2597-2615).
gctcctgcttcaaatcact

SEQ ID NO: 117729 - DNA, 19 bp, Homo sapiens
  siRNA target sequence for KLHL1 (NM_020866.1,2616-2634).
gttcccggctactggatta

SEQ ID NO: 117730 - DNA, 19 bp, Homo sapiens
  siRNA target sequence for KLHL1 (NM_020866.1,2619-2637).
cccggctactggattatgt

SEQ ID NO: 117731 - DNA, 19 bp, Homo sapiens
  siRNA target sequence for KLHL1 (NM_020866.1,2620-2638).
ccggctactggattatgta

SEQ ID NO: 117732 - DNA, 19 bp, Homo sapiens
  siRNA target sequence for KLHL1 (NM_020866.1,2622-2640).
ggctactggattatgtaga

SEQ ID NO: 117733 - DNA, 19 bp, Homo sapiens
  siRNA target sequence for KLHL1 (NM_020866.1,2717-2735).
ctccttggtgacagattat

SEQ ID NO: 117734 - DNA, 19 bp, Homo sapiens
  siRNA target sequence for KLHL1 (NM_020866.1,2719-2737).
ccttggtgacagattatat

SEQ ID NO: 117735 - DNA, 19 bp, Homo sapiens
  siRNA target sequence for KLHL1 (NM_020866.1,2759-2777).
cagacatacctcaacacta

SEQ ID NO: 117736 - DNA, 19 bp, Homo sapiens
  siRNA target sequence for KLHL1 (NM_020866.1,2785-2803).
ctatgacccacaaactaat

SEQ ID NO: 117737 - DNA, 19 bp, Homo sapiens
  siRNA target sequence for KLHL1 (NM_020866.1,2847-2865).
cctgtgtggtagtcatcaa

SEQ ID NO: 117738 - DNA, 19 bp, Homo sapiens
  siRNA target sequence for KLHL2 (NM_007246.2,287-305).
cagaagcctctcgattcaa

SEQ ID NO: 117739 - DNA, 19 bp, Homo sapiens
  siRNA target sequence for KLHL2 (NM_007246.2,289-307).
gaagcctctcgattcaaaa

SEQ ID NO: 117740 - DNA, 19 bp, Homo sapiens
  siRNA target sequence for KLHL2 (NM_007246.2,294-312).
ctctcgattcaaaagatga

SEQ ID NO: 117741 - DNA, 19 bp, Homo sapiens
  siRNA target sequence for KLHL2 (NM_007246.2,296-314).
ctcgattcaaaagatgata

SEQ ID NO: 117742 - DNA, 19 bp, Homo sapiens
  siRNA target sequence for KLHL2 (NM_007246.2,299-317).
gattcaaaagatgataata

SEQ ID NO: 117743 - DNA, 19 bp, Homo sapiens
  siRNA target sequence for KLHL2 (NM_007246.2,311-329).
gataataccgaaaaacact

SEQ ID NO: 117744 - DNA, 19 bp, Homo sapiens
  siRNA target sequence for KLHL2 (NM_007246.2,370-388).
caaagtcatgaacgaatta

SEQ ID NO: 117745 - DNA, 19 bp, Homo sapiens
  siRNA target sequence for KLHL2 (NM_007246.2,376-394).
catgaacgaattaagaagt

SEQ ID NO: 117746 - DNA, 19 bp, Homo sapiens
  siRNA target sequence for KLHL2 (NM_007246.2,517-535).
ccgagcaaagagagttaga

SEQ ID NO: 117747 - DNA, 19 bp, Homo sapiens
  siRNA target sequence for KLHL2 (NM_007246.2,518-536).
cgagcaaagagagttagaa

SEQ ID NO: 117748 - DNA, 19 bp, Homo sapiens
  siRNA target sequence for KLHL2 (NM_007246.2,555-573).
ggaccctgaggatgctaat

SEQ ID NO: 117749 - DNA, 19 bp, Homo sapiens
  siRNA target sequence for KLHL2 (NM_007246.2,556-574).
gaccctgaggatgctaatt

SEQ ID NO: 117750 - DNA, 19 bp, Homo sapiens
  siRNA target sequence for KLHL2 (NM_007246.2,562-580).
gaggatgctaattgattat

SEQ ID NO: 117751 - DNA, 19 bp, Homo sapiens
  siRNA target sequence for KLHL2 (NM_007246.2,564-582).
ggatgctaattgattatgt

SEQ ID NO: 117752 - DNA, 19 bp, Homo sapiens
  siRNA target sequence for KLHL2 (NM_007246.2,569-587).
ctaattgattatgtttaca

SEQ ID NO: 117753 - DNA, 19 bp, Homo sapiens
  siRNA target sequence for KLHL2 (NM_007246.2,631-649).
cccagcagctggtctctta

SEQ ID NO: 117754 - DNA, 19 bp, Homo sapiens
  siRNA target sequence for KLHL2 (NM_007246.2,633-651).
cagcagctggtctcttaca

SEQ ID NO: 117755 - DNA, 19 bp, Homo sapiens
  siRNA target sequence for KLHL2 (NM_007246.2,635-653).
gcagctggtctcttacagt

SEQ ID NO: 117756 - DNA, 19 bp, Homo sapiens
  siRNA target sequence for KLHL2 (NM_007246.2,664-682).
gaagaagacttgttgtgaa

SEQ ID NO: 117757 - DNA, 19 bp, Homo sapiens
  siRNA target sequence for KLHL2 (NM_007246.2,667-685).
gaagacttgttgtgaattt

SEQ ID NO: 117758 - DNA, 19 bp, Homo sapiens
  siRNA target sequence for KLHL2 (NM_007246.2,704-722).
cctgtcaactgcttaggaa

SEQ ID NO: 117759 - DNA, 19 bp, Homo sapiens
  siRNA target sequence for KLHL2 (NM_007246.2,726-744).
gggcttttgctgatatgca

SEQ ID NO: 117760 - DNA, 19 bp, Homo sapiens
  siRNA target sequence for KLHL2 (NM_007246.2,727-745).
ggcttttgctgatatgcat

SEQ ID NO: 117761 - DNA, 19 bp, Homo sapiens
  siRNA target sequence for KLHL2 (NM_007246.2,777-795).
cctatgcagagcaacattt

SEQ ID NO: 117762 - DNA, 19 bp, Homo sapiens
  siRNA target sequence for KLHL2 (NM_007246.2,803-821).
gttgtacttagtgaagaat

SEQ ID NO: 117763 - DNA, 19 bp, Homo sapiens
  siRNA target sequence for KLHL2 (NM_007246.2,839-857).
gaacaagtgtgcagcttaa

SEQ ID NO: 117764 - DNA, 19 bp, Homo sapiens
  siRNA target sequence for KLHL2 (NM_007246.2,861-879).
caagtgacaaacttaccat

SEQ ID NO: 117765 - DNA, 19 bp, Homo sapiens
  siRNA target sequence for KLHL2 (NM_007246.2,915-933).
catgggtgaaccatgacaa

SEQ ID NO: 117766 - DNA, 19 bp, Homo sapiens
  siRNA target sequence for KLHL2 (NM_007246.2,935-953).
gatgtgaggcaagagttta

SEQ ID NO: 117767 - DNA, 19 bp, Homo sapiens
  siRNA target sequence for KLHL2 (NM_007246.2,957-975).
cccgactgatggaacatgt

SEQ ID NO: 117768 - DNA, 19 bp, Homo sapiens
  siRNA target sequence for KLHL2 (NM_007246.2,993-1011).
ctcgggaatatttagttca

SEQ ID NO: 117769 - DNA, 19 bp, Homo sapiens
  siRNA target sequence for KLHL2 (NM_007246.2,1039-1057).
gaatagcagtgcttgcaaa

SEQ ID NO: 117770 - DNA, 19 bp, Homo sapiens
  siRNA target sequence for KLHL2 (NM_007246.2,1047-1065).
gtgcttgcaaagattacct

SEQ ID NO: 117771 - DNA, 19 bp, Homo sapiens
  siRNA target sequence for KLHL2 (NM_007246.2,1064-1082).
ctcattgaagcaatgaagt

SEQ ID NO: 117772 - DNA, 19 bp, Homo sapiens
  siRNA target sequence for KLHL2 (NM_007246.2,1094-1112).
ccaacagagcagcgtatat

SEQ ID NO: 117773 - DNA, 19 bp, Homo sapiens
  siRNA target sequence for KLHL2 (NM_007246.2,1100-1118).
gagcagcgtatattaatga

SEQ ID NO: 117774 - DNA, 19 bp, Homo sapiens
  siRNA target sequence for KLHL2 (NM_007246.2,1275-1293).
gggcaggcatggtctacat

SEQ ID NO: 117775 - DNA, 19 bp, Homo sapiens
  siRNA target sequence for KLHL2 (NM_007246.2,1319-1337).
ggctttaatggctcattaa

SEQ ID NO: 117776 - DNA, 19 bp, Homo sapiens
  siRNA target sequence for KLHL2 (NM_007246.2,1321-1339).
ctttaatggctcattaaga

SEQ ID NO: 117777 - DNA, 19 bp, Homo sapiens
  siRNA target sequence for KLHL2 (NM_007246.2,1424-1442).
gctgctgtgttaaatggat

SEQ ID NO: 117778 - DNA, 19 bp, Homo sapiens
  siRNA target sequence for KLHL2 (NM_007246.2,1425-1443).
ctgctgtgttaaatggatt

SEQ ID NO: 117779 - DNA, 19 bp, Homo sapiens
  siRNA target sequence for KLHL2 (NM_007246.2,1427-1445).
gctgtgttaaatggattat

SEQ ID NO: 117780 - DNA, 19 bp, Homo sapiens
  siRNA target sequence for KLHL2 (NM_007246.2,1428-1446).
ctgtgttaaatggattatt

SEQ ID NO: 117781 - DNA, 19 bp, Homo sapiens
  siRNA target sequence for KLHL2 (NM_007246.2,1469-1487).
gggagtacaggtttgtcat

SEQ ID NO: 117782 - DNA, 19 bp, Homo sapiens
  siRNA target sequence for KLHL2 (NM_007246.2,1485-1503).
catctgtggaagcatacaa

SEQ ID NO: 117783 - DNA, 19 bp, Homo sapiens
  siRNA target sequence for KLHL2 (NM_007246.2,1490-1508).
gtggaagcatacaacataa

SEQ ID NO: 117784 - DNA, 19 bp, Homo sapiens
  siRNA target sequence for KLHL2 (NM_007246.2,1526-1544).
catgtagctcccatgaata

SEQ ID NO: 117785 - DNA, 19 bp, Homo sapiens
  siRNA target sequence for KLHL2 (NM_007246.2,1529-1547).
gtagctcccatgaatacaa

SEQ ID NO: 117786 - DNA, 19 bp, Homo sapiens
  siRNA target sequence for KLHL2 (NM_007246.2,1613-1631).
gcatcacgtcagtgtctta

SEQ ID NO: 117787 - DNA, 19 bp, Homo sapiens
  siRNA target sequence for KLHL2 (NM_007246.2,1624-1642).
gtgtcttagcacagtagaa

SEQ ID NO: 117788 - DNA, 19 bp, Homo sapiens
  siRNA target sequence for KLHL2 (NM_007246.2,1706-1724).
gcaggtgttggtgtgttaa

SEQ ID NO: 117789 - DNA, 19 bp, Homo sapiens
  siRNA target sequence for KLHL2 (NM_007246.2,1716-1734).
gtgtgttaaacaatttatt

SEQ ID NO: 117790 - DNA, 19 bp, Homo sapiens
  siRNA target sequence for KLHL2 (NM_007246.2,1757-1775).
ggccctttagtacgaaaaa

SEQ ID NO: 117791 - DNA, 19 bp, Homo sapiens
  siRNA target sequence for KLHL2 (NM_007246.2,1860-1878).
cagttaatggtctgttata

SEQ ID NO: 117792 - DNA, 19 bp, Homo sapiens
  siRNA target sequence for KLHL2 (NM_007246.2,1909-1927).
cttggcgtcagtagaatat

SEQ ID NO: 117793 - DNA, 19 bp, Homo sapiens
  siRNA target sequence for KLHL2 (NM_007246.2,1912-1930).
ggcgtcagtagaatattat

SEQ ID NO: 117794 - DNA, 19 bp, Homo sapiens
  siRNA target sequence for KLHL2 (NM_007246.2,1913-1931).
gcgtcagtagaatattata

SEQ ID NO: 117795 - DNA, 19 bp, Homo sapiens
  siRNA target sequence for KLHL2 (NM_007246.2,1914-1932).
cgtcagtagaatattataa

SEQ ID NO: 117796 - DNA, 19 bp, Homo sapiens
  siRNA target sequence for KLHL2 (NM_007246.2,1955-1973).
gttgtgtcatcgtgtatga

SEQ ID NO: 117797 - DNA, 19 bp, Homo sapiens
  siRNA target sequence for KLHL3 (NM_017415.1,219-237).
gcccacatggggaaagcat

SEQ ID NO: 117798 - DNA, 19 bp, Homo sapiens
  siRNA target sequence for KLHL3 (NM_017415.1,229-247).
ggaaagcattcaaggttat

SEQ ID NO: 117799 - DNA, 19 bp, Homo sapiens
  siRNA target sequence for KLHL3 (NM_017415.1,295-313).
cagaagatgtcgagataga

SEQ ID NO: 117800 - DNA, 19 bp, Homo sapiens
  siRNA target sequence for KLHL3 (NM_017415.1,427-445).
cgctgagtaagctgattga

SEQ ID NO: 117801 - DNA, 19 bp, Homo sapiens
  siRNA target sequence for KLHL3 (NM_017415.1,564-582).
cagttgcatcccaccaatt

SEQ ID NO: 117802 - DNA, 19 bp, Homo sapiens
  siRNA target sequence for KLHL3 (NM_017415.1,674-692).
gatgctaggagaagaattt

SEQ ID NO: 117803 - DNA, 19 bp, Homo sapiens
  siRNA target sequence for KLHL3 (NM_017415.1,710-728).
ccaggtgtgcagcttgata

SEQ ID NO: 117804 - DNA, 19 bp, Homo sapiens
  siRNA target sequence for KLHL3 (NM_017415.1,711-729).
caggtgtgcagcttgatat

SEQ ID NO: 117805 - DNA, 19 bp, Homo sapiens
  siRNA target sequence for KLHL3 (NM_017415.1,735-753).
gacaagctgaccgtttctt

SEQ ID NO: 117806 - DNA, 19 bp, Homo sapiens
  siRNA target sequence for KLHL3 (NM_017415.1,737-755).
caagctgaccgtttcttca

SEQ ID NO: 117807 - DNA, 19 bp, Homo sapiens
  siRNA target sequence for KLHL3 (NM_017415.1,740-758).
gctgaccgtttcttcagaa

SEQ ID NO: 117808 - DNA, 19 bp, Homo sapiens
  siRNA target sequence for KLHL3 (NM_017415.1,784-802).
catggatcaattatgagaa

SEQ ID NO: 117809 - DNA, 19 bp, Homo sapiens
  siRNA target sequence for KLHL3 (NM_017415.1,846-864).
cgacttcctctcttaccta

SEQ ID NO: 117810 - DNA, 19 bp, Homo sapiens
  siRNA target sequence for KLHL3 (NM_017415.1,932-950).
cctcattgaggccatgaaa

SEQ ID NO: 117811 - DNA, 19 bp, Homo sapiens
  siRNA target sequence for KLHL3 (NM_017415.1,963-981).
cctctggatcagagactat

SEQ ID NO: 117812 - DNA, 19 bp, Homo sapiens
  siRNA target sequence for KLHL3 (NM_017415.1,1144-1162).
gagcaggtgtggtgttcat

SEQ ID NO: 117813 - DNA, 19 bp, Homo sapiens
  siRNA target sequence for KLHL3 (NM_017415.1,1211-1229).
gcggacagtggatgtgtat

SEQ ID NO: 117814 - DNA, 19 bp, Homo sapiens
  siRNA target sequence for KLHL3 (NM_017415.1,1213-1231).
ggacagtggatgtgtatga

SEQ ID NO: 117815 - DNA, 19 bp, Homo sapiens
  siRNA target sequence for KLHL3 (NM_017415.1,1291-1309).
gcgcagcggtgctcaatga

SEQ ID NO: 117816 - DNA, 19 bp, Homo sapiens
  siRNA target sequence for KLHL3 (NM_017415.1,1293-1311).
gcagcggtgctcaatgact

SEQ ID NO: 117817 - DNA, 19 bp, Homo sapiens
  siRNA target sequence for KLHL3 (NM_017415.1,1294-1312).
cagcggtgctcaatgactt

SEQ ID NO: 117818 - DNA, 19 bp, Homo sapiens
  siRNA target sequence for KLHL3 (NM_017415.1,1379-1397).
gaccaacgagtggttcttt

SEQ ID NO: 117819 - DNA, 19 bp, Homo sapiens
  siRNA target sequence for KLHL3 (NM_017415.1,1381-1399).
ccaacgagtggttctttgt

SEQ ID NO: 117820 - DNA, 19 bp, Homo sapiens
  siRNA target sequence for KLHL3 (NM_017415.1,1524-1542).
gcgaccaatgaatggatat

SEQ ID NO: 117821 - DNA, 19 bp, Homo sapiens
  siRNA target sequence for KLHL3 (NM_017415.1,1643-1661).
gagcgttgaggtttacgat

SEQ ID NO: 117822 - DNA, 19 bp, Homo sapiens
  siRNA target sequence for KLHL3 (NM_017415.1,1717-1735).
caggggtctgtgcagtaaa

SEQ ID NO: 117823 - DNA, 19 bp, Homo sapiens
  siRNA target sequence for KLHL3 (NM_017415.1,1861-1879).
caggtgttgccgtgattca

SEQ ID NO: 117824 - DNA, 19 bp, Homo sapiens
  siRNA target sequence for KLHL4 (NM_019117.3,98-116).
gtctggcaagaaagagttt

SEQ ID NO: 117825 - DNA, 19 bp, Homo sapiens
  siRNA target sequence for KLHL4 (NM_019117.3,138-156).
ctacgctggaggtggttta

SEQ ID NO: 117826 - DNA, 19 bp, Homo sapiens
  siRNA target sequence for KLHL4 (NM_019117.3,148-166).
ggtggtttagtcatccttt

SEQ ID NO: 117827 - DNA, 19 bp, Homo sapiens
  siRNA target sequence for KLHL4 (NM_019117.3,149-167).
gtggtttagtcatcctttt

SEQ ID NO: 117828 - DNA, 19 bp, Homo sapiens
  siRNA target sequence for KLHL4 (NM_019117.3,151-169).
ggtttagtcatccttttca

SEQ ID NO: 117829 - DNA, 19 bp, Homo sapiens
  siRNA target sequence for KLHL4 (NM_019117.3,231-249).
gttcagggcaggttgaaga

SEQ ID NO: 117830 - DNA, 19 bp, Homo sapiens
  siRNA target sequence for KLHL4 (NM_019117.3,250-268).
gccactctcgggacagaaa

SEQ ID NO: 117831 - DNA, 19 bp, Homo sapiens
  siRNA target sequence for KLHL4 (NM_019117.3,342-360).
cagagagccgttcagaatt

SEQ ID NO: 117832 - DNA, 19 bp, Homo sapiens
  siRNA target sequence for KLHL4 (NM_019117.3,346-364).
gagccgttcagaatttgca

SEQ ID NO: 117833 - DNA, 19 bp, Homo sapiens
  siRNA target sequence for KLHL4 (NM_019117.3,365-383).
gcaacataatctgatagta

SEQ ID NO: 117834 - DNA, 19 bp, Homo sapiens
  siRNA target sequence for KLHL4 (NM_019117.3,476-494).
gatggctgatgacaatata

SEQ ID NO: 117835 - DNA, 19 bp, Homo sapiens
  siRNA target sequence for KLHL4 (NM_019117.3,483-501).
gatgacaatatagaagatt

SEQ ID NO: 117836 - DNA, 19 bp, Homo sapiens
  siRNA target sequence for KLHL4 (NM_019117.3,539-557).
gaatgccaccagatctgaa

SEQ ID NO: 117837 - DNA, 19 bp, Homo sapiens
  siRNA target sequence for KLHL4 (NM_019117.3,583-601).
cagagcaaactcttcgtaa

SEQ ID NO: 117838 - DNA, 19 bp, Homo sapiens
  siRNA target sequence for KLHL4 (NM_019117.3,664-682).
gcatcccagcccataggtt

SEQ ID NO: 117839 - DNA, 19 bp, Homo sapiens
  siRNA target sequence for KLHL4 (NM_019117.3,687-705).
ctcagcgcagtgtctgatt

SEQ ID NO: 117840 - DNA, 19 bp, Homo sapiens
  siRNA target sequence for KLHL4 (NM_019117.3,689-707).
cagcgcagtgtctgattat

SEQ ID NO: 117841 - DNA, 19 bp, Homo sapiens
  siRNA target sequence for KLHL4 (NM_019117.3,758-776).
caggatggaaggagtagat

SEQ ID NO: 117842 - DNA, 19 bp, Homo sapiens
  siRNA target sequence for KLHL4 (NM_019117.3,817-835).
gagtcctgcaattgaaaga

SEQ ID NO: 117843 - DNA, 19 bp, Homo sapiens
  siRNA target sequence for KLHL4 (NM_019117.3,881-899).
gactcaggtcattgatgtt

SEQ ID NO: 117844 - DNA, 19 bp, Homo sapiens
  siRNA target sequence for KLHL4 (NM_019117.3,968-986).
ccaaggctgtacagaactt

SEQ ID NO: 117845 - DNA, 19 bp, Homo sapiens
  siRNA target sequence for KLHL4 (NM_019117.3,993-1011).
gtggcacacaaatacacta

SEQ ID NO: 117846 - DNA, 19 bp, Homo sapiens
  siRNA target sequence for KLHL4 (NM_019117.3,1017-1035).
cacttcattgaggtaataa

SEQ ID NO: 117847 - DNA, 19 bp, Homo sapiens
  siRNA target sequence for KLHL4 (NM_019117.3,1053-1071).
ctgcttccagctaatgaaa

SEQ ID NO: 117848 - DNA, 19 bp, Homo sapiens
  siRNA target sequence for KLHL4 (NM_019117.3,1097-1115).
cattaatgtgcctgatgaa

SEQ ID NO: 117849 - DNA, 19 bp, Homo sapiens
  siRNA target sequence for KLHL4 (NM_019117.3,1149-1167).
gggcatgatgtgcagaata

SEQ ID NO: 117850 - DNA, 19 bp, Homo sapiens
  siRNA target sequence for KLHL4 (NM_019117.3,1349-1367).
gacaaagcctagaaaatca

SEQ ID NO: 117851 - DNA, 19 bp, Homo sapiens
  siRNA target sequence for KLHL4 (NM_019117.3,1417-1435).
ctactactattgaaaaata

SEQ ID NO: 117852 - DNA, 19 bp, Homo sapiens
  siRNA target sequence for KLHL4 (NM_019117.3,1447-1465).
ccaacagttggctacatat

SEQ ID NO: 117853 - DNA, 19 bp, Homo sapiens
  siRNA target sequence for KLHL4 (NM_019117.3,1448-1466).
caacagttggctacatatt

SEQ ID NO: 117854 - DNA, 19 bp, Homo sapiens
  siRNA target sequence for KLHL4 (NM_019117.3,1481-1499).
ccgtaggcttcaatttgga

SEQ ID NO: 117855 - DNA, 19 bp, Homo sapiens
  siRNA target sequence for KLHL4 (NM_019117.3,1540-1558).
gagacggtttaaaaacttt

SEQ ID NO: 117856 - DNA, 19 bp, Homo sapiens
  siRNA target sequence for KLHL4 (NM_019117.3,1602-1620).
gtgatgcctcccatgtcaa

SEQ ID NO: 117857 - DNA, 19 bp, Homo sapiens
  siRNA target sequence for KLHL4 (NM_019117.3,1607-1625).
gcctcccatgtcaacacat

SEQ ID NO: 117858 - DNA, 19 bp, Homo sapiens
  siRNA target sequence for KLHL4 (NM_019117.3,1691-1709).
gagctatctaaatactgta

SEQ ID NO: 117859 - DNA, 19 bp, Homo sapiens
  siRNA target sequence for KLHL4 (NM_019117.3,1729-1747).
gacgacagtggaattacgt

SEQ ID NO: 117860 - DNA, 19 bp, Homo sapiens
  siRNA target sequence for KLHL4 (NM_019117.3,1776-1794).
gttggtgttgttgcattaa

SEQ ID NO: 117861 - DNA, 19 bp, Homo sapiens
  siRNA target sequence for KLHL4 (NM_019117.3,1779-1797).
ggtgttgttgcattaaaca

SEQ ID NO: 117862 - DNA, 19 bp, Homo sapiens
  siRNA target sequence for KLHL4 (NM_019117.3,1780-1798).
gtgttgttgcattaaacaa

SEQ ID NO: 117863 - DNA, 19 bp, Homo sapiens
  siRNA target sequence for KLHL4 (NM_019117.3,1782-1800).
gttgttgcattaaacaaca

SEQ ID NO: 117864 - DNA, 19 bp, Homo sapiens
  siRNA target sequence for KLHL4 (NM_019117.3,1831-1849).
gttcctgcctcaaatcaat

SEQ ID NO: 117865 - DNA, 19 bp, Homo sapiens
  siRNA target sequence for KLHL4 (NM_019117.3,1839-1857).
ctcaaatcaatggaatact

SEQ ID NO: 117866 - DNA, 19 bp, Homo sapiens
  siRNA target sequence for KLHL4 (NM_019117.3,1919-1937).
gggagttgccacatacaat

SEQ ID NO: 117867 - DNA, 19 bp, Homo sapiens
  siRNA target sequence for KLHL4 (NM_019117.3,2009-2027).
ggaacggtatgatccaaaa

SEQ ID NO: 117868 - DNA, 19 bp, Homo sapiens
  siRNA target sequence for KLHL4 (NM_019117.3,2089-2107).
ctcttggagacaaactcta

SEQ ID NO: 117869 - DNA, 19 bp, Homo sapiens
  siRNA target sequence for KLHL4 (NM_019117.3,2118-2136).
ggatatgacggacatactt

SEQ ID NO: 117870 - DNA, 19 bp, Homo sapiens
  siRNA target sequence for KLHL4 (NM_019117.3,2119-2137).
gatatgacggacatactta

SEQ ID NO: 117871 - DNA, 19 bp, Homo sapiens
  siRNA target sequence for KLHL4 (NM_019117.3,2124-2142).
gacggacatacttatttga

SEQ ID NO: 117872 - DNA, 19 bp, Homo sapiens
  siRNA target sequence for KLHL4 (NM_019117.3,2127-2145).
ggacatacttatttgaaca

SEQ ID NO: 117873 - DNA, 19 bp, Homo sapiens
  siRNA target sequence for KLHL4 (NM_019117.3,2212-2230).
ctggtgcatgtgttgtagt

SEQ ID NO: 117874 - DNA, 19 bp, Homo sapiens
  siRNA target sequence for KLHL4 (NM_057162.1,2188-2206).
gcatgcaagaacttctaca

SEQ ID NO: 117875 - DNA, 19 bp, Homo sapiens
  siRNA target sequence for KLHL4 (NM_057162.1,2189-2207).
catgcaagaacttctacaa

SEQ ID NO: 117876 - DNA, 19 bp, Homo sapiens
  siRNA target sequence for KLHL4 (NM_057162.1,2196-2214).
gaacttctacaaaacttct

SEQ ID NO: 117877 - DNA, 19 bp, Homo sapiens
  siRNA target sequence for KLHL4 (NM_057162.1,2199-2217).
cttctacaaaacttctata

SEQ ID NO: 117878 - DNA, 19 bp, Homo sapiens
  siRNA target sequence for KLHL5 (NM_015990.2,594-612).
caggacttccaatagtagt

SEQ ID NO: 117879 - DNA, 19 bp, Homo sapiens
  siRNA target sequence for KLHL5 (NM_015990.2,639-657).
ggagccatgtacatcagat

SEQ ID NO: 117880 - DNA, 19 bp, Homo sapiens
  siRNA target sequence for KLHL5 (NM_015990.2,644-662).
catgtacatcagatgaatt

SEQ ID NO: 117881 - DNA, 19 bp, Homo sapiens
  siRNA target sequence for KLHL5 (NM_015990.2,647-665).
gtacatcagatgaattttt

SEQ ID NO: 117882 - DNA, 19 bp, Homo sapiens
  siRNA target sequence for KLHL5 (NM_015990.2,682-700).
gccgagcaaacatttaaaa

SEQ ID NO: 117883 - DNA, 19 bp, Homo sapiens
  siRNA target sequence for KLHL5 (NM_015990.2,683-701).
ccgagcaaacatttaaaaa

SEQ ID NO: 117884 - DNA, 19 bp, Homo sapiens
  siRNA target sequence for KLHL5 (NM_199039.1,2134-2152).
gcttgtgttgtgactgtaa

SEQ ID NO: 117885 - DNA, 19 bp, Homo sapiens
  siRNA target sequence for KLHL5 (NM_199039.1,2135-2153).
cttgtgttgtgactgtaaa

SEQ ID NO: 117886 - DNA, 19 bp, Homo sapiens
  siRNA target sequence for KPTN (NM_007059.1,201-219).
ccaagacctccgacagaaa

SEQ ID NO: 117887 - DNA, 19 bp, Homo sapiens
  siRNA target sequence for KPTN (NM_007059.1,202-220).
caagacctccgacagaaaa

SEQ ID NO: 117888 - DNA, 19 bp, Homo sapiens
  siRNA target sequence for KPTN (NM_007059.1,277-295).
gtctccatcgacactttca

SEQ ID NO: 117889 - DNA, 19 bp, Homo sapiens
  siRNA target sequence for KPTN (NM_007059.1,362-380).
gcagccccttcctgaacat

SEQ ID NO: 117890 - DNA, 19 bp, Homo sapiens
  siRNA target sequence for KPTN (NM_007059.1,365-383).
gccccttcctgaacattta

SEQ ID NO: 117891 - DNA, 19 bp, Homo sapiens
  siRNA target sequence for KPTN (NM_007059.1,489-507).
ccaggtcggggatcaactt

SEQ ID NO: 117892 - DNA, 19 bp, Homo sapiens
  siRNA target sequence for KPTN (NM_007059.1,644-662).
ggctggacgtccacaactt

SEQ ID NO: 117893 - DNA, 19 bp, Homo sapiens
  siRNA target sequence for KPTN (NM_007059.1,831-849).
ggacaggccactacaagat

SEQ ID NO: 117894 - DNA, 19 bp, Homo sapiens
  siRNA target sequence for KPTN (NM_007059.1,906-924).
gctgaaccggggtcttgaa

SEQ ID NO: 117895 - DNA, 19 bp, Homo sapiens
  siRNA target sequence for LCP1 (NM_002298.2,187-205).
cagtgtccgatgaggaaat

SEQ ID NO: 117896 - DNA, 19 bp, Homo sapiens
  siRNA target sequence for LCP1 (NM_002298.2,189-207).
gtgtccgatgaggaaatga

SEQ ID NO: 117897 - DNA, 19 bp, Homo sapiens
  siRNA target sequence for LCP1 (NM_002298.2,222-240).
gcttttgccaaagttgata

SEQ ID NO: 117898 - DNA, 19 bp, Homo sapiens
  siRNA target sequence for LCP1 (NM_002298.2,262-280).
gcttcaatgagttgaatga

SEQ ID NO: 117899 - DNA, 19 bp, Homo sapiens
  siRNA target sequence for LCP1 (NM_002298.2,302-320).
gcctttgcctgggtataga

SEQ ID NO: 117900 - DNA, 19 bp, Homo sapiens
  siRNA target sequence for LCP1 (NM_002298.2,304-322).
ctttgcctgggtatagagt

SEQ ID NO: 117901 - DNA, 19 bp, Homo sapiens
  siRNA target sequence for LCP1 (NM_002298.2,313-331).
ggtatagagtacgagaaat

SEQ ID NO: 117902 - DNA, 19 bp, Homo sapiens
  siRNA target sequence for LCP1 (NM_002298.2,314-332).
gtatagagtacgagaaatt

SEQ ID NO: 117903 - DNA, 19 bp, Homo sapiens
  siRNA target sequence for LCP1 (NM_002298.2,319-337).
gagtacgagaaattacaga

SEQ ID NO: 117904 - DNA, 19 bp, Homo sapiens
  siRNA target sequence for LCP1 (NM_002298.2,387-405).
gatgagtttatcaagattt

SEQ ID NO: 117905 - DNA, 19 bp, Homo sapiens
  siRNA target sequence for LCP1 (NM_002298.2,401-419).
gattttccatggcctaaaa

SEQ ID NO: 117906 - DNA, 19 bp, Homo sapiens
  siRNA target sequence for LCP1 (NM_002298.2,426-444).
gatgttgccaagaccttta

SEQ ID NO: 117907 - DNA, 19 bp, Homo sapiens
  siRNA target sequence for LCP1 (NM_002298.2,510-528).
ggcacccaacactcctatt

SEQ ID NO: 117908 - DNA, 19 bp, Homo sapiens
  siRNA target sequence for LCP1 (NM_002298.2,514-532).
cccaacactcctattcaga

SEQ ID NO: 117909 - DNA, 19 bp, Homo sapiens
  siRNA target sequence for LCP1 (NM_002298.2,595-613).
ggcatgtcatcccaatgaa

SEQ ID NO: 117910 - DNA, 19 bp, Homo sapiens
  siRNA target sequence for LCP1 (NM_002298.2,611-629).
gaacccaaacacgaatgat

SEQ ID NO: 117911 - DNA, 19 bp, Homo sapiens
  siRNA target sequence for LCP1 (NM_002298.2,788-806).
gtgccatgtggtcaacata

SEQ ID NO: 117912 - DNA, 19 bp, Homo sapiens
  siRNA target sequence for LCP1 (NM_002298.2,857-875).
gtggcaagtcatcaagatt

SEQ ID NO: 117913 - DNA, 19 bp, Homo sapiens
  siRNA target sequence for LCP1 (NM_002298.2,939-957).
gagagcctggaggatttga

SEQ ID NO: 117914 - DNA, 19 bp, Homo sapiens
  siRNA target sequence for LCP1 (NM_002298.2,1242-1260).
cgagggaaccccaagttga

SEQ ID NO: 117915 - DNA, 19 bp, Homo sapiens
  siRNA target sequence for LCP1 (NM_002298.2,1256-1274).
gttgaacttggcttttatt

SEQ ID NO: 117916 - DNA, 19 bp, Homo sapiens
  siRNA target sequence for LCP1 (NM_002298.2,1275-1293).
gccaacctctttaacagat

SEQ ID NO: 117917 - DNA, 19 bp, Homo sapiens
  siRNA target sequence for LCP1 (NM_002298.2,1276-1294).
ccaacctctttaacagata

SEQ ID NO: 117918 - DNA, 19 bp, Homo sapiens
  siRNA target sequence for LCP1 (NM_002298.2,1359-1377).
gaagagcggacatttagga

SEQ ID NO: 117919 - DNA, 19 bp, Homo sapiens
  siRNA target sequence for LCP1 (NM_002298.2,1405-1423).
ctcgagtcaatcatttgta

SEQ ID NO: 117920 - DNA, 19 bp, Homo sapiens
  siRNA target sequence for LCP1 (NM_002298.2,1407-1425).
cgagtcaatcatttgtaca

SEQ ID NO: 117921 - DNA, 19 bp, Homo sapiens
  siRNA target sequence for LCP1 (NM_002298.2,1455-1473).
cagctctatgaaaagatca

SEQ ID NO: 117922 - DNA, 19 bp, Homo sapiens
  siRNA target sequence for LCP1 (NM_002298.2,1482-1500).
gttgactggaacagagtaa

SEQ ID NO: 117923 - DNA, 19 bp, Homo sapiens
  siRNA target sequence for LCP1 (NM_002298.2,1552-1570).
gtaactacgcggtagaatt

SEQ ID NO: 117924 - DNA, 19 bp, Homo sapiens
  siRNA target sequence for LCP1 (NM_002298.2,1641-1659).
ctcacactggccttgattt

SEQ ID NO: 117925 - DNA, 19 bp, Homo sapiens
  siRNA target sequence for LCP1 (NM_002298.2,1655-1673).
gatttggcagctaatgaga

SEQ ID NO: 117926 - DNA, 19 bp, Homo sapiens
  siRNA target sequence for LCP1 (NM_002298.2,1685-1703).
gaatatcctcgaagaaatt

SEQ ID NO: 117927 - DNA, 19 bp, Homo sapiens
  siRNA target sequence for LCP1 (NM_002298.2,1711-1729).
gccagaaggtcaatgatga

SEQ ID NO: 117928 - DNA, 19 bp, Homo sapiens
  siRNA target sequence for LCP1 (NM_002298.2,1718-1736).
ggtcaatgatgacattatt

SEQ ID NO: 117929 - DNA, 19 bp, Homo sapiens
  siRNA target sequence for LCP1 (NM_002298.2,1777-1795).
gttcatccatctctagttt

SEQ ID NO: 117930 - DNA, 19 bp, Homo sapiens
  siRNA target sequence for LCP1 (NM_002298.2,1796-1814).
caaggacccgaagattagt

SEQ ID NO: 117931 - DNA, 19 bp, Homo sapiens
  siRNA target sequence for LCP1 (NM_002298.2,1799-1817).
ggacccgaagattagtaca

SEQ ID NO: 117932 - DNA, 19 bp, Homo sapiens
  siRNA target sequence for LCP1 (NM_002298.2,1800-1818).
gacccgaagattagtacaa

SEQ ID NO: 117933 - DNA, 19 bp, Homo sapiens
  siRNA target sequence for LCP1 (NM_002298.2,1802-1820).
cccgaagattagtacaagt

SEQ ID NO: 117934 - DNA, 19 bp, Homo sapiens
  siRNA target sequence for LCP1 (NM_002298.2,1855-1873).
caggttccattaactatga

SEQ ID NO: 117935 - DNA, 19 bp, Homo sapiens
  siRNA target sequence for LCP1 (NM_002298.2,1934-1952).
ctctatggcccgaaaaatt

SEQ ID NO: 117936 - DNA, 19 bp, Homo sapiens
  siRNA target sequence for LSP1 (NM_002339.1,721-739).
ctaaaccgctccatagaga

SEQ ID NO: 117937 - DNA, 19 bp, Homo sapiens
  siRNA target sequence for LSP1 (NM_002339.1,727-745).
cgctccatagagaagagta

SEQ ID NO: 117938 - DNA, 19 bp, Homo sapiens
  siRNA target sequence for LSP1 (NM_002339.1,1049-1067).
ctgggaagaggtataagtt

SEQ ID NO: 117939 - DNA, 19 bp, Homo sapiens
  siRNA target sequence for LSP1 (NM_002339.1,1074-1092).
caccgggcatgggaagtat

SEQ ID NO: 117940 - DNA, 19 bp, Homo sapiens
  siRNA target sequence for LSP1 (NM_002339.1,1076-1094).
ccgggcatgggaagtatga

SEQ ID NO: 117941 - DNA, 19 bp, Homo sapiens
  siRNA target sequence for LSP1 (NM_002339.1,1078-1096).
gggcatgggaagtatgaga

SEQ ID NO: 117942 - DNA, 19 bp, Homo sapiens
  siRNA target sequence for MEFV (NM_000243.1,304-322).
gggcagccattcaggaata

SEQ ID NO: 117943 - DNA, 19 bp, Homo sapiens
  siRNA target sequence for MEFV (NM_000243.1,305-323).
ggcagccattcaggaatat

SEQ ID NO: 117944 - DNA, 19 bp, Homo sapiens
  siRNA target sequence for MEFV (NM_000243.1,309-327).
gccattcaggaatattcca

SEQ ID NO: 117945 - DNA, 19 bp, Homo sapiens
  siRNA target sequence for MEFV (NM_000243.1,364-382).
gctccctgggggagaacaa

SEQ ID NO: 117946 - DNA, 19 bp, Homo sapiens
  siRNA target sequence for MEFV (NM_000243.1,802-820).
ccgcaaatccagaaattct

SEQ ID NO: 117947 - DNA, 19 bp, Homo sapiens
  siRNA target sequence for MEFV (NM_000243.1,1352-1370).
ggaggagcagcgatcctat

SEQ ID NO: 117948 - DNA, 19 bp, Homo sapiens
  siRNA target sequence for MEFV (NM_000243.1,1662-1680).
gtgcctgtccctgaaaagt

SEQ ID NO: 117949 - DNA, 19 bp, Homo sapiens
  siRNA target sequence for MEFV (NM_000243.1,1681-1699).
ggaccactcctcaagagat

SEQ ID NO: 117950 - DNA, 19 bp, Homo sapiens
  siRNA target sequence for MEFV (NM_000243.1,1682-1700).
gaccactcctcaagagata

SEQ ID NO: 117951 - DNA, 19 bp, Homo sapiens
  siRNA target sequence for MEFV (NM_000243.1,1684-1702).
ccactcctcaagagataaa

SEQ ID NO: 117952 - DNA, 19 bp, Homo sapiens
  siRNA target sequence for MEFV (NM_000243.1,1743-1761).
gagaagagcacaaagtact

SEQ ID NO: 117953 - DNA, 19 bp, Homo sapiens
  siRNA target sequence for MEFV (NM_000243.1,1819-1837).
ctcaggcacatgctgttaa

SEQ ID NO: 117954 - DNA, 19 bp, Homo sapiens
  siRNA target sequence for MEFV (NM_000243.1,1945-1963).
gatttgacagctgtatcat

SEQ ID NO: 117955 - DNA, 19 bp, Homo sapiens
  siRNA target sequence for MEFV (NM_000243.1,2081-2099).
gactctgtcgccagagaat

SEQ ID NO: 117956 - DNA, 19 bp, Homo sapiens
  siRNA target sequence for MEFV (NM_000243.1,2155-2173).
ccccgacccgcctgctaat

SEQ ID NO: 117957 - DNA, 19 bp, Homo sapiens
  siRNA target sequence for MEFV (NM_000243.1,2156-2174).
cccgacccgcctgctaata

SEQ ID NO: 117958 - DNA, 19 bp, Homo sapiens
  siRNA target sequence for MEFV (NM_000243.1,2157-2175).
ccgacccgcctgctaataa

SEQ ID NO: 117959 - DNA, 19 bp, Homo sapiens
  siRNA target sequence for MEFV (NM_000243.1,2158-2176).
cgacccgcctgctaataaa

SEQ ID NO: 117960 - DNA, 19 bp, Homo sapiens
  siRNA target sequence for MEFV (NM_000243.1,2161-2179).
cccgcctgctaataaagga

SEQ ID NO: 117961 - DNA, 19 bp, Homo sapiens
  siRNA target sequence for MEFV (NM_000243.1,2217-2235).
gttggaagcatctcctttt

SEQ ID NO: 117962 - DNA, 19 bp, Homo sapiens
  siRNA target sequence for MEFV (NM_000243.1,2220-2238).
ggaagcatctccttttaca

SEQ ID NO: 117963 - DNA, 19 bp, Homo sapiens
  siRNA target sequence for MEFV (NM_000243.1,2292-2310).
ccccttcaacctatcttca

SEQ ID NO: 117964 - DNA, 19 bp, Homo sapiens
  siRNA target sequence for MEFV (NM_000243.1,2322-2340).
cgtgatggagggaagaaca

SEQ ID NO: 117965 - DNA, 19 bp, Homo sapiens
  siRNA target sequence for MGC35136 (NM_152427.1,416-434).
ggtgttcagtgacatgaaa

SEQ ID NO: 117966 - DNA, 19 bp, Homo sapiens
  siRNA target sequence for MGC35136 (NM_152427.1,557-575).
ggaccaaaccattgatgat

SEQ ID NO: 117967 - DNA, 19 bp, Homo sapiens
  siRNA target sequence for MGC35136 (NM_152427.1,615-633).
gccgctacgccccttatga

SEQ ID NO: 117968 - DNA, 19 bp, Homo sapiens
  siRNA target sequence for MGC35136 (NM_152427.1,682-700).
ctctgagtctgcatccatt

SEQ ID NO: 117969 - DNA, 19 bp, Homo sapiens
  siRNA target sequence for MGC35136 (NM_152427.1,686-704).
gagtctgcatccattaaga

SEQ ID NO: 117970 - DNA, 19 bp, Homo sapiens
  siRNA target sequence for MTSS1 (NM_014751.2,589-607).
ccagcttcggacaacagta

SEQ ID NO: 117971 - DNA, 19 bp, Homo sapiens
  siRNA target sequence for MTSS1 (NM_014751.2,592-610).
gcttcggacaacagtagta

SEQ ID NO: 117972 - DNA, 19 bp, Homo sapiens
  siRNA target sequence for MTSS1 (NM_014751.2,748-766).
gttttcgagcgctttaatt

SEQ ID NO: 117973 - DNA, 19 bp, Homo sapiens
  siRNA target sequence for MTSS1 (NM_014751.2,754-772).
gagcgctttaattgattgt

SEQ ID NO: 117974 - DNA, 19 bp, Homo sapiens
  siRNA target sequence for MTSS1 (NM_014751.2,756-774).
gcgctttaattgattgtct

SEQ ID NO: 117975 - DNA, 19 bp, Homo sapiens
  siRNA target sequence for MTSS1 (NM_014751.2,836-854).
gaccacgcaaaagaatata

SEQ ID NO: 117976 - DNA, 19 bp, Homo sapiens
  siRNA target sequence for MTSS1 (NM_014751.2,885-903).
cctcggatacgctgaaact

SEQ ID NO: 117977 - DNA, 19 bp, Homo sapiens
  siRNA target sequence for MTSS1 (NM_014751.2,954-972).
gtgctctccaagatgtcaa

SEQ ID NO: 117978 - DNA, 19 bp, Homo sapiens
  siRNA target sequence for MTSS1 (NM_014751.2,962-980).
caagatgtcaatgataagt

SEQ ID NO: 117979 - DNA, 19 bp, Homo sapiens
  siRNA target sequence for MTSS1 (NM_014751.2,968-986).
gtcaatgataagtatctct

SEQ ID NO: 117980 - DNA, 19 bp, Homo sapiens
  siRNA target sequence for MTSS1 (NM_014751.2,970-988).
caatgataagtatctctta

SEQ ID NO: 117981 - DNA, 19 bp, Homo sapiens
  siRNA target sequence for MTSS1 (NM_014751.2,1034-1052).
gaacgtggccgattctgta

SEQ ID NO: 117982 - DNA, 19 bp, Homo sapiens
  siRNA target sequence for MTSS1 (NM_014751.2,1066-1084).
gctgcggccagtgattgaa

SEQ ID NO: 117983 - DNA, 19 bp, Homo sapiens
  siRNA target sequence for MTSS1 (NM_014751.2,1069-1087).
gcggccagtgattgaagaa

SEQ ID NO: 117984 - DNA, 19 bp, Homo sapiens
  siRNA target sequence for MTSS1 (NM_014751.2,1125-1143).
ccatctcggaagatctaaa

SEQ ID NO: 117985 - DNA, 19 bp, Homo sapiens
  siRNA target sequence for MTSS1 (NM_014751.2,1126-1144).
catctcggaagatctaaaa

SEQ ID NO: 117986 - DNA, 19 bp, Homo sapiens
  siRNA target sequence for MTSS1 (NM_014751.2,1179-1197).
caagtgaacaggtgattct

SEQ ID NO: 117987 - DNA, 19 bp, Homo sapiens
  siRNA target sequence for MTSS1 (NM_014751.2,1198-1216).
ggacttgaaaggttctgat

SEQ ID NO: 117988 - DNA, 19 bp, Homo sapiens
  siRNA target sequence for MTSS1 (NM_014751.2,1199-1217).
gacttgaaaggttctgatt

SEQ ID NO: 117989 - DNA, 19 bp, Homo sapiens
  siRNA target sequence for MTSS1 (NM_014751.2,1420-1438).
ccatgactcaggattcata

SEQ ID NO: 117990 - DNA, 19 bp, Homo sapiens
  siRNA target sequence for MTSS1 (NM_014751.2,1625-1643).
ccagactacgctcattatt

SEQ ID NO: 117991 - DNA, 19 bp, Homo sapiens
  siRNA target sequence for MTSS1 (NM_014751.2,1626-1644).
cagactacgctcattatta

SEQ ID NO: 117992 - DNA, 19 bp, Homo sapiens
  siRNA target sequence for MTSS1 (NM_014751.2,1628-1646).
gactacgctcattattaca

SEQ ID NO: 117993 - DNA, 19 bp, Homo sapiens
  siRNA target sequence for MTSS1 (NM_014751.2,2017-2035).
catcccttcccaagtttca

SEQ ID NO: 117994 - DNA, 19 bp, Homo sapiens
  siRNA target sequence for MTSS1 (NM_014751.2,2022-2040).
cttcccaagtttcagatta

SEQ ID NO: 117995 - DNA, 19 bp, Homo sapiens
  siRNA target sequence for MTSS1 (NM_014751.2,2097-2115).
cctccaccattccaagaaa

SEQ ID NO: 117996 - DNA, 19 bp, Homo sapiens
  siRNA target sequence for MTSS1 (NM_014751.2,2211-2229).
ctccaggggttgcaactat

SEQ ID NO: 117997 - DNA, 19 bp, Homo sapiens
  siRNA target sequence for MTSS1 (NM_014751.2,2518-2536).
gcacagacaggcaattcca

SEQ ID NO: 117998 - DNA, 19 bp, Homo sapiens
  siRNA target sequence for MTSS1 (NM_014751.2,2669-2687).
cgaaggggcgtgaaactga

SEQ ID NO: 117999 - DNA, 19 bp, Homo sapiens
  siRNA target sequence for MTSS1 (NM_014751.2,2673-2691).
ggggcgtgaaactgaagaa

SEQ ID NO: 118000 - DNA, 19 bp, Homo sapiens
  siRNA target sequence for MTSS1 (NM_014751.2,2689-2707).
gaagaccacgacaaacgat

SEQ ID NO: 118001 - DNA, 19 bp, Homo sapiens
  siRNA target sequence for MYBPC1 (NM_002465.1,84-102).
gccagaacccactaagaaa

SEQ ID NO: 118002 - DNA, 19 bp, Homo sapiens
  siRNA target sequence for MYBPC1 (NM_002465.1,137-155).
cggaagaaccaagtaaaga

SEQ ID NO: 118003 - DNA, 19 bp, Homo sapiens
  siRNA target sequence for MYBPC1 (NM_002465.1,156-174).
gaaggaggccggaactaca

SEQ ID NO: 118004 - DNA, 19 bp, Homo sapiens
  siRNA target sequence for MYBPC1 (NM_002465.1,340-358).
ctgagaaaacccactatca

SEQ ID NO: 118005 - DNA, 19 bp, Homo sapiens
  siRNA target sequence for MYBPC1 (NM_002465.1,436-454).
cacagtcgggtgtacacat

SEQ ID NO: 118006 - DNA, 19 bp, Homo sapiens
  siRNA target sequence for MYBPC1 (NM_002465.1,438-456).
cagtcgggtgtacacattt

SEQ ID NO: 118007 - DNA, 19 bp, Homo sapiens
  siRNA target sequence for MYBPC1 (NM_002465.1,440-458).
gtcgggtgtacacatttga

SEQ ID NO: 118008 - DNA, 19 bp, Homo sapiens
  siRNA target sequence for MYBPC1 (NM_002465.1,442-460).
cgggtgtacacatttgaga

SEQ ID NO: 118009 - DNA, 19 bp, Homo sapiens
  siRNA target sequence for MYBPC1 (NM_002465.1,443-461).
gggtgtacacatttgagat

SEQ ID NO: 118010 - DNA, 19 bp, Homo sapiens
  siRNA target sequence for MYBPC1 (NM_002465.1,452-470).
catttgagatgcagatcat

SEQ ID NO: 118011 - DNA, 19 bp, Homo sapiens
  siRNA target sequence for MYBPC1 (NM_002465.1,503-521).
gatgcgaggtcacctataa

SEQ ID NO: 118012 - DNA, 19 bp, Homo sapiens
  siRNA target sequence for MYBPC1 (NM_002465.1,511-529).
gtcacctataaggataagt

SEQ ID NO: 118013 - DNA, 19 bp, Homo sapiens
  siRNA target sequence for MYBPC1 (NM_002465.1,513-531).
cacctataaggataagttt

SEQ ID NO: 118014 - DNA, 19 bp, Homo sapiens
  siRNA target sequence for MYBPC1 (NM_002465.1,515-533).
cctataaggataagtttga

SEQ ID NO: 118015 - DNA, 19 bp, Homo sapiens
  siRNA target sequence for MYBPC1 (NM_002465.1,539-557).
gttcatttgatcttgaagt

SEQ ID NO: 118016 - DNA, 19 bp, Homo sapiens
  siRNA target sequence for MYBPC1 (NM_002465.1,550-568).
cttgaagtgcacgaatcta

SEQ ID NO: 118017 - DNA, 19 bp, Homo sapiens
  siRNA target sequence for MYBPC1 (NM_002465.1,737-755).
ccagtgagtacgagaagat

SEQ ID NO: 118018 - DNA, 19 bp, Homo sapiens
  siRNA target sequence for MYBPC1 (NM_002465.1,828-846).
gaagagcgcagcttttgca

SEQ ID NO: 118019 - DNA, 19 bp, Homo sapiens
  siRNA target sequence for MYBPC1 (NM_002465.1,831-849).
gagcgcagcttttgcaaaa

SEQ ID NO: 118020 - DNA, 19 bp, Homo sapiens
  siRNA target sequence for MYBPC1 (NM_002465.1,833-851).
gcgcagcttttgcaaaaat

SEQ ID NO: 118021 - DNA, 19 bp, Homo sapiens
  siRNA target sequence for MYBPC1 (NM_002465.1,921-939).
gttggaggtgaaatggtat

SEQ ID NO: 118022 - DNA, 19 bp, Homo sapiens
  siRNA target sequence for MYBPC1 (NM_002465.1,958-976).
cgacccagtaccaaataca

SEQ ID NO: 118023 - DNA, 19 bp, Homo sapiens
  siRNA target sequence for MYBPC1 (NM_002465.1,961-979).
cccagtaccaaatacatct

SEQ ID NO: 118024 - DNA, 19 bp, Homo sapiens
  siRNA target sequence for MYBPC1 (NM_002465.1,962-980).
ccagtaccaaatacatctt

SEQ ID NO: 118025 - DNA, 19 bp, Homo sapiens
  siRNA target sequence for MYBPC1 (NM_002465.1,999-1017).
gagaatcctgtttatcaat

SEQ ID NO: 118026 - DNA, 19 bp, Homo sapiens
  siRNA target sequence for MYBPC1 (NM_002465.1,1001-1019).
gaatcctgtttatcaataa

SEQ ID NO: 118027 - DNA, 19 bp, Homo sapiens
  siRNA target sequence for MYBPC1 (NM_002465.1,1053-1071).
gacagccggtgatgagaaa

SEQ ID NO: 118028 - DNA, 19 bp, Homo sapiens
  siRNA target sequence for MYBPC1 (NM_002465.1,1057-1075).
gccggtgatgagaaatgtt

SEQ ID NO: 118029 - DNA, 19 bp, Homo sapiens
  siRNA target sequence for MYBPC1 (NM_002465.1,1079-1097).
ctgagctcttcgtaagaga

SEQ ID NO: 118030 - DNA, 19 bp, Homo sapiens
  siRNA target sequence for MYBPC1 (NM_002465.1,1089-1107).
cgtaagagagcctccaatt

SEQ ID NO: 118031 - DNA, 19 bp, Homo sapiens
  siRNA target sequence for MYBPC1 (NM_002465.1,1090-1108).
gtaagagagcctccaatta

SEQ ID NO: 118032 - DNA, 19 bp, Homo sapiens
  siRNA target sequence for MYBPC1 (NM_002465.1,1145-1163).
gtggggagagagtggaatt

SEQ ID NO: 118033 - DNA, 19 bp, Homo sapiens
  siRNA target sequence for MYBPC1 (NM_002465.1,1149-1167).
ggagagagtggaattagaa

SEQ ID NO: 118034 - DNA, 19 bp, Homo sapiens
  siRNA target sequence for MYBPC1 (NM_002465.1,1150-1168).
gagagagtggaattagaat

SEQ ID NO: 118035 - DNA, 19 bp, Homo sapiens
  siRNA target sequence for MYBPC1 (NM_002465.1,1227-1245).
ccctggtccaaaatcaaga

SEQ ID NO: 118036 - DNA, 19 bp, Homo sapiens
  siRNA target sequence for MYBPC1 (NM_002465.1,1241-1259).
caagataccgaattagagt

SEQ ID NO: 118037 - DNA, 19 bp, Homo sapiens
  siRNA target sequence for MYBPC1 (NM_002465.1,1258-1276).
gttgagggtaaaaaacaca

SEQ ID NO: 118038 - DNA, 19 bp, Homo sapiens
  siRNA target sequence for MYBPC1 (NM_002465.1,1315-1333).
gaatattcagtaatgacaa

SEQ ID NO: 118039 - DNA, 19 bp, Homo sapiens
  siRNA target sequence for MYBPC1 (NM_002465.1,1346-1364).
catctgctaaacttagtgt

SEQ ID NO: 118040 - DNA, 19 bp, Homo sapiens
  siRNA target sequence for MYBPC1 (NM_002465.1,1352-1370).
ctaaacttagtgttgactt

SEQ ID NO: 118041 - DNA, 19 bp, Homo sapiens
  siRNA target sequence for MYBPC1 (NM_002465.1,1400-1418).
ctgatcagactgtaaatct

SEQ ID NO: 118042 - DNA, 19 bp, Homo sapiens
  siRNA target sequence for MYBPC1 (NM_002465.1,1532-1550).
ggatccacaagttagtgat

SEQ ID NO: 118043 - DNA, 19 bp, Homo sapiens
  siRNA target sequence for MYBPC1 (NM_002465.1,1533-1551).
gatccacaagttagtgata

SEQ ID NO: 118044 - DNA, 19 bp, Homo sapiens
  siRNA target sequence for MYBPC1 (NM_002465.1,1554-1572).
caatgccctcactgaagat

SEQ ID NO: 118045 - DNA, 19 bp, Homo sapiens
  siRNA target sequence for MYBPC1 (NM_002465.1,1592-1610).
cacctgatgcctacaatgt

SEQ ID NO: 118046 - DNA, 19 bp, Homo sapiens
  siRNA target sequence for MYBPC1 (NM_002465.1,1594-1612).
cctgatgcctacaatgtta

SEQ ID NO: 118047 - DNA, 19 bp, Homo sapiens
  siRNA target sequence for MYBPC1 (NM_002465.1,1618-1636).
cctgccaaagttcatgtta

SEQ ID NO: 118048 - DNA, 19 bp, Homo sapiens
  siRNA target sequence for MYBPC1 (NM_002465.1,1619-1637).
ctgccaaagttcatgttat

SEQ ID NO: 118049 - DNA, 19 bp, Homo sapiens
  siRNA target sequence for MYBPC1 (NM_002465.1,1688-1706).
cagtgattgcaggaaacaa

SEQ ID NO: 118050 - DNA, 19 bp, Homo sapiens
  siRNA target sequence for MYBPC1 (NM_002465.1,1731-1749).
cggagaaccacctcctaaa

SEQ ID NO: 118051 - DNA, 19 bp, Homo sapiens
  siRNA target sequence for MYBPC1 (NM_002465.1,1766-1784).
gagataaggctattatgga

SEQ ID NO: 118052 - DNA, 19 bp, Homo sapiens
  siRNA target sequence for MYBPC1 (NM_002465.1,1792-1810).
ggccggataagaacagaat

SEQ ID NO: 118053 - DNA, 19 bp, Homo sapiens
  siRNA target sequence for MYBPC1 (NM_002465.1,1796-1814).
ggataagaacagaatctta

SEQ ID NO: 118054 - DNA, 19 bp, Homo sapiens
  siRNA target sequence for MYBPC1 (NM_002465.1,1823-1841).
gcagcactctggtcattga

SEQ ID NO: 118055 - DNA, 19 bp, Homo sapiens
  siRNA target sequence for MYBPC1 (NM_002465.1,1826-1844).
gcactctggtcattgatat

SEQ ID NO: 118056 - DNA, 19 bp, Homo sapiens
  siRNA target sequence for MYBPC1 (NM_002465.1,1827-1845).
cactctggtcattgatata

SEQ ID NO: 118057 - DNA, 19 bp, Homo sapiens
  siRNA target sequence for MYBPC1 (NM_002465.1,1853-1871).
gagatgactctggtgttta

SEQ ID NO: 118058 - DNA, 19 bp, Homo sapiens
  siRNA target sequence for MYBPC1 (NM_002465.1,1862-1880).
ctggtgtttaccacatcaa

SEQ ID NO: 118059 - DNA, 19 bp, Homo sapiens
  siRNA target sequence for MYBPC1 (NM_002465.1,1867-1885).
gtttaccacatcaatctga

SEQ ID NO: 118060 - DNA, 19 bp, Homo sapiens
  siRNA target sequence for MYBPC1 (NM_002465.1,1906-1924).
catgcaagcatcaaggtta

SEQ ID NO: 118061 - DNA, 19 bp, Homo sapiens
  siRNA target sequence for MYBPC1 (NM_002465.1,1913-1931).
gcatcaaggttaaagttgt

SEQ ID NO: 118062 - DNA, 19 bp, Homo sapiens
  siRNA target sequence for MYBPC1 (NM_002465.1,1975-1993).
ggagatgactggtgtatca

SEQ ID NO: 118063 - DNA, 19 bp, Homo sapiens
  siRNA target sequence for MYBPC1 (NM_002465.1,1981-1999).
gactggtgtatcatgaact

SEQ ID NO: 118064 - DNA, 19 bp, Homo sapiens
  siRNA target sequence for MYBPC1 (NM_002465.1,2019-2037).
cggaggctctccaatccta

SEQ ID NO: 118065 - DNA, 19 bp, Homo sapiens
  siRNA target sequence for MYBPC1 (NM_002465.1,2024-2042).
gctctccaatcctaggata

SEQ ID NO: 118066 - DNA, 19 bp, Homo sapiens
  siRNA target sequence for MYBPC1 (NM_002465.1,2029-2047).
ccaatcctaggatatttta

SEQ ID NO: 118067 - DNA, 19 bp, Homo sapiens
  siRNA target sequence for MYBPC1 (NM_002465.1,2114-2132).
cttttgagcccaagaagat

SEQ ID NO: 118068 - DNA, 19 bp, Homo sapiens
  siRNA target sequence for MYBPC1 (NM_002465.1,2148-2166).
ctatgaggtccgcatcttt

SEQ ID NO: 118069 - DNA, 19 bp, Homo sapiens
  siRNA target sequence for MYBPC1 (NM_002465.1,2157-2175).
ccgcatctttgcagtcaat

SEQ ID NO: 118070 - DNA, 19 bp, Homo sapiens
  siRNA target sequence for MYBPC1 (NM_002465.1,2332-2350).
ggctatgtgctagagtatt

SEQ ID NO: 118071 - DNA, 19 bp, Homo sapiens
  siRNA target sequence for MYBPC1 (NM_002465.1,2340-2358).
gctagagtattgctttgaa

SEQ ID NO: 118072 - DNA, 19 bp, Homo sapiens
  siRNA target sequence for MYBPC1 (NM_002465.1,2370-2388).
ctggatagttgcaaacaaa

SEQ ID NO: 118073 - DNA, 19 bp, Homo sapiens
  siRNA target sequence for MYBPC1 (NM_002465.1,2418-2436).
cacaggtctgccaacagat

SEQ ID NO: 118074 - DNA, 19 bp, Homo sapiens
  siRNA target sequence for MYBPC1 (NM_002465.1,2451-2469).
gcgtgtgaaggctgttaat

SEQ ID NO: 118075 - DNA, 19 bp, Homo sapiens
  siRNA target sequence for MYBPC1 (NM_002465.1,2484-2502).
cgagcccaagtactattct

SEQ ID NO: 118076 - DNA, 19 bp, Homo sapiens
  siRNA target sequence for MYBPC1 (NM_002465.1,2555-2573).
gacacctgaagcaaaccta

SEQ ID NO: 118077 - DNA, 19 bp, Homo sapiens
  siRNA target sequence for MYBPC1 (NM_002465.1,2557-2575).
cacctgaagcaaacctata

SEQ ID NO: 118078 - DNA, 19 bp, Homo sapiens
  siRNA target sequence for MYBPC1 (NM_002465.1,2689-2707).
cgcaactctgagactgata

SEQ ID NO: 118079 - DNA, 19 bp, Homo sapiens
  siRNA target sequence for MYBPC1 (NM_002465.1,2696-2714).
ctgagactgatacaatcat

SEQ ID NO: 118080 - DNA, 19 bp, Homo sapiens
  siRNA target sequence for MYBPC1 (NM_002465.1,2761-2779).
caagtcaaagtggacaaat

SEQ ID NO: 118081 - DNA, 19 bp, Homo sapiens
  siRNA target sequence for MYBPC1 (NM_002465.1,2781-2799).
cgtggagaccgcatcaatt

SEQ ID NO: 118082 - DNA, 19 bp, Homo sapiens
  siRNA target sequence for MYBPC1 (NM_002465.1,2785-2803).
gagaccgcatcaattgaca

SEQ ID NO: 118083 - DNA, 19 bp, Homo sapiens
  siRNA target sequence for MYBPC1 (NM_002465.1,2795-2813).
caattgacatccagatcat

SEQ ID NO: 118084 - DNA, 19 bp, Homo sapiens
  siRNA target sequence for MYBPC1 (NM_002465.1,2822-2840).
caggtccaccccaaattgt

SEQ ID NO: 118085 - DNA, 19 bp, Homo sapiens
  siRNA target sequence for MYBPC1 (NM_002465.1,2828-2846).
caccccaaattgtgaagat

SEQ ID NO: 118086 - DNA, 19 bp, Homo sapiens
  siRNA target sequence for MYBPC1 (NM_002465.1,2911-2929).
gctatcacaggctatacca

SEQ ID NO: 118087 - DNA, 19 bp, Homo sapiens
  siRNA target sequence for MYBPC1 (NM_002465.1,2912-2930).
ctatcacaggctataccat

SEQ ID NO: 118088 - DNA, 19 bp, Homo sapiens
  siRNA target sequence for MYBPC1 (NM_002465.1,2949-2967).
gagcatggaatggtttact

SEQ ID NO: 118089 - DNA, 19 bp, Homo sapiens
  siRNA target sequence for MYBPC1 (NM_002465.1,2986-3004).
cgaaccagtgccaccatta

SEQ ID NO: 118090 - DNA, 19 bp, Homo sapiens
  siRNA target sequence for MYBPC1 (NM_002465.1,3076-3094).
gccaccatgactaaagaga

SEQ ID NO: 118091 - DNA, 19 bp, Homo sapiens
  siRNA target sequence for MYBPC1 (NM_002465.1,3107-3125).
ccagggatggtaaaatcta

SEQ ID NO: 118092 - DNA, 19 bp, Homo sapiens
  siRNA target sequence for MYBPC1 (NM_002465.1,3241-3259).
ggaaatcctaagcctaaaa

SEQ ID NO: 118093 - DNA, 19 bp, Homo sapiens
  siRNA target sequence for MYBPC1 (NM_002465.1,3289-3307).
gtggatgatccaagataca

SEQ ID NO: 118094 - DNA, 19 bp, Homo sapiens
  siRNA target sequence for MYBPC1 (NM_002465.1,3326-3344).
gagtctgtaccctggaaat

SEQ ID NO: 118095 - DNA, 19 bp, Homo sapiens
  siRNA target sequence for MYBPC1 (NM_002465.1,3378-3396).
ctgctgcaaagcagtcaat

SEQ ID NO: 118096 - DNA, 19 bp, Homo sapiens
  siRNA target sequence for MYBPC2 (NM_004533.1,250-268).
gaaggagctcccagacaaa

SEQ ID NO: 118097 - DNA, 19 bp, Homo sapiens
  siRNA target sequence for MYBPC2 (NM_004533.1,263-281).
gacaaaccgaccatcaagt

SEQ ID NO: 118098 - DNA, 19 bp, Homo sapiens
  siRNA target sequence for MYBPC2 (NM_004533.1,452-470).
gacagctgtggcttcaaca

SEQ ID NO: 118099 - DNA, 19 bp, Homo sapiens
  siRNA target sequence for MYBPC2 (NM_004533.1,527-545).
cgtacgagtgaaaagaagt

SEQ ID NO: 118100 - DNA, 19 bp, Homo sapiens
  siRNA target sequence for MYBPC2 (NM_004533.1,821-839).
gtggacagaggcaacaaga

SEQ ID NO: 118101 - DNA, 19 bp, Homo sapiens
  siRNA target sequence for MYBPC2 (NM_004533.1,828-846).
gaggcaacaagatcaagtt

SEQ ID NO: 118102 - DNA, 19 bp, Homo sapiens
  siRNA target sequence for MYBPC2 (NM_004533.1,831-849).
gcaacaagatcaagttgat

SEQ ID NO: 118103 - DNA, 19 bp, Homo sapiens
  siRNA target sequence for MYBPC2 (NM_004533.1,892-910).
gaacggccaggagatcaaa

SEQ ID NO: 118104 - DNA, 19 bp, Homo sapiens
  siRNA target sequence for MYBPC2 (NM_004533.1,915-933).
gcagcaagtacgtgtttga

SEQ ID NO: 118105 - DNA, 19 bp, Homo sapiens
  siRNA target sequence for MYBPC2 (NM_004533.1,941-959).
ggtaagaagcgaattctta

SEQ ID NO: 118106 - DNA, 19 bp, Homo sapiens
  siRNA target sequence for MYBPC2 (NM_004533.1,951-969).
gaattcttaccatcaacaa

SEQ ID NO: 118107 - DNA, 19 bp, Homo sapiens
  siRNA target sequence for MYBPC2 (NM_004533.1,982-1000).
ggatgacgctgcctatgaa

SEQ ID NO: 118108 - DNA, 19 bp, Homo sapiens
  siRNA target sequence for MYBPC2 (NM_004533.1,1268-1286).
ggtcgctatcaggtcataa

SEQ ID NO: 118109 - DNA, 19 bp, Homo sapiens
  siRNA target sequence for MYBPC2 (NM_004533.1,1271-1289).
cgctatcaggtcataacca

SEQ ID NO: 118110 - DNA, 19 bp, Homo sapiens
  siRNA target sequence for MYBPC2 (NM_004533.1,1422-1440).
cgggcaagtggtataagaa

SEQ ID NO: 118111 - DNA, 19 bp, Homo sapiens
  siRNA target sequence for MYBPC2 (NM_004533.1,2159-2177).
gtcttcgccgtcaatgcta

SEQ ID NO: 118112 - DNA, 19 bp, Homo sapiens
  siRNA target sequence for MYBPC2 (NM_004533.1,2161-2179).
cttcgccgtcaatgctata

SEQ ID NO: 118113 - DNA, 19 bp, Homo sapiens
  siRNA target sequence for MYBPC2 (NM_004533.1,2403-2421).
gtggcttcaccgtcaagaa

SEQ ID NO: 118114 - DNA, 19 bp, Homo sapiens
  siRNA target sequence for MYBPC2 (NM_004533.1,2406-2424).
gcttcaccgtcaagaatct

SEQ ID NO: 118115 - DNA, 19 bp, Homo sapiens
  siRNA target sequence for MYBPC2 (NM_004533.1,2451-2469).
gagtagttggggtcaacat

SEQ ID NO: 118116 - DNA, 19 bp, Homo sapiens
  siRNA target sequence for MYBPC2 (NM_004533.1,2762-2780).
gtgcagatcgagaacatga

SEQ ID NO: 118117 - DNA, 19 bp, Homo sapiens
  siRNA target sequence for MYBPC2 (NM_004533.1,2956-2974).
gtggttcaacgtctatgaa

SEQ ID NO: 118118 - DNA, 19 bp, Homo sapiens
  siRNA target sequence for MYBPC2 (NM_004533.1,2994-3012).
gtactgtgtccgaccttat

SEQ ID NO: 118119 - DNA, 19 bp, Homo sapiens
  siRNA target sequence for MYBPC2 (NM_004533.1,2997-3015).
ctgtgtccgaccttatcgt

SEQ ID NO: 118120 - DNA, 19 bp, Homo sapiens
  siRNA target sequence for MYBPC2 (NM_004533.1,3008-3026).
cttatcgtgggcaatgaat

SEQ ID NO: 118121 - DNA, 19 bp, Homo sapiens
  siRNA target sequence for MYBPC2 (NM_004533.1,3013-3031).
cgtgggcaatgaatactat

SEQ ID NO: 118122 - DNA, 19 bp, Homo sapiens
  siRNA target sequence for MYBPC2 (NM_004533.1,3014-3032).
gtgggcaatgaatactatt

SEQ ID NO: 118123 - DNA, 19 bp, Homo sapiens
  siRNA target sequence for MYBPC2 (NM_004533.1,3036-3054).
gagtttacaccgagaacat

SEQ ID NO: 118124 - DNA, 19 bp, Homo sapiens
  siRNA target sequence for MYBPC2 (NM_004533.1,3257-3275).
gtggtctggatgaagaaca

SEQ ID NO: 118125 - DNA, 19 bp, Homo sapiens
  siRNA target sequence for MYBPC2 (NM_004533.1,3296-3314).
cccaagttcctgataacca

SEQ ID NO: 118126 - DNA, 19 bp, Homo sapiens
  siRNA target sequence for MYBPC2 (NM_004533.1,3324-3342).
gagtcctgacgctgaacat

SEQ ID NO: 118127 - DNA, 19 bp, Homo sapiens
  siRNA target sequence for MYBPC3 (NM_000256.2,679-697).
ccagcaaggtctatctgtt

SEQ ID NO: 118128 - DNA, 19 bp, Homo sapiens
  siRNA target sequence for MYBPC3 (NM_000256.2,870-888).
ggtcggcggatcagtgata

SEQ ID NO: 118129 - DNA, 19 bp, Homo sapiens
  siRNA target sequence for MYBPC3 (NM_000256.2,1093-1111).
gcatgaggcgcgatgagaa

SEQ ID NO: 118130 - DNA, 19 bp, Homo sapiens
  siRNA target sequence for MYBPC3 (NM_000256.2,1200-1218).
catgacgctgaggtcaaat

SEQ ID NO: 118131 - DNA, 19 bp, Homo sapiens
  siRNA target sequence for MYBPC3 (NM_000256.2,1363-1381).
gcacggagctctttgtgaa

SEQ ID NO: 118132 - DNA, 19 bp, Homo sapiens
  siRNA target sequence for MYBPC3 (NM_000256.2,1709-1727).
ggaccaggcggtgttcaaa

SEQ ID NO: 118133 - DNA, 19 bp, Homo sapiens
  siRNA target sequence for MYBPC3 (NM_000256.2,1712-1730).
ccaggcggtgttcaaatgt

SEQ ID NO: 118134 - DNA, 19 bp, Homo sapiens
  siRNA target sequence for MYBPC3 (NM_000256.2,1733-1751).
ggtctcagatgagaatgtt

SEQ ID NO: 118135 - DNA, 19 bp, Homo sapiens
  siRNA target sequence for MYBPC3 (NM_000256.2,1789-1807).
ccgacagccgcataaaggt

SEQ ID NO: 118136 - DNA, 19 bp, Homo sapiens
  siRNA target sequence for MYBPC3 (NM_000256.2,1909-1927).
cagccaagctccacttcat

SEQ ID NO: 118137 - DNA, 19 bp, Homo sapiens
  siRNA target sequence for MYBPC3 (NM_000256.2,2089-2107).
ctatcacgcaggggaataa

SEQ ID NO: 118138 - DNA, 19 bp, Homo sapiens
  siRNA target sequence for MYBPC3 (NM_000256.2,2801-2819).
gacagagcacacatcgata

SEQ ID NO: 118139 - DNA, 19 bp, Homo sapiens
  siRNA target sequence for MYBPC3 (NM_000256.2,2860-2878).
gagtgcgggcacacaatat

SEQ ID NO: 118140 - DNA, 19 bp, Homo sapiens
  siRNA target sequence for MYBPC3 (NM_000256.2,3165-3183).
gtgacggtgcgcattgaga

SEQ ID NO: 118141 - DNA, 19 bp, Homo sapiens
  siRNA target sequence for MYBPC3 (NM_000256.2,3256-3274).
ctgacgcctggggtcttaa

SEQ ID NO: 118142 - DNA, 19 bp, Homo sapiens
  siRNA target sequence for MYBPC3 (NM_000256.2,3445-3463).
gcgtcttcagccagaatat

SEQ ID NO: 118143 - DNA, 19 bp, Homo sapiens
  siRNA target sequence for MYBPC3 (NM_000256.2,3493-3511).
ccaaggagcccgtctttat

SEQ ID NO: 118144 - DNA, 19 bp, Homo sapiens
  siRNA target sequence for MYBPC3 (NM_000256.2,3735-3753).
gtgttgactctggagatta

SEQ ID NO: 118145 - DNA, 19 bp, Homo sapiens
  siRNA target sequence for MYBPC3 (NM_000256.2,3788-3806).
ctgcagggccaccaactta

SEQ ID NO: 118146 - DNA, 19 bp, Homo sapiens
  siRNA target sequence for MYBPC3 (NM_000256.2,3790-3808).
gcagggccaccaacttaca

SEQ ID NO: 118147 - DNA, 19 bp, Homo sapiens
  siRNA target sequence for MYRIP (NM_015460.1,157-175).
gtctggtttgactgatgat

SEQ ID NO: 118148 - DNA, 19 bp, Homo sapiens
  siRNA target sequence for MYRIP (NM_015460.1,214-232).
caatcttcgcaaaaaagaa

SEQ ID NO: 118149 - DNA, 19 bp, Homo sapiens
  siRNA target sequence for MYRIP (NM_015460.1,372-390).
gccagtgtggagattgcaa

SEQ ID NO: 118150 - DNA, 19 bp, Homo sapiens
  siRNA target sequence for MYRIP (NM_015460.1,383-401).
gattgcaaattcaatgtct

SEQ ID NO: 118151 - DNA, 19 bp, Homo sapiens
  siRNA target sequence for MYRIP (NM_015460.1,480-498).
cccaatctctggaatggtt

SEQ ID NO: 118152 - DNA, 19 bp, Homo sapiens
  siRNA target sequence for MYRIP (NM_015460.1,585-603).
gcgcgtgcttcgacattct

SEQ ID NO: 118153 - DNA, 19 bp, Homo sapiens
  siRNA target sequence for MYRIP (NM_015460.1,586-604).
cgcgtgcttcgacattcta

SEQ ID NO: 118154 - DNA, 19 bp, Homo sapiens
  siRNA target sequence for MYRIP (NM_015460.1,609-627).
gaagcctttttgagtcaaa

SEQ ID NO: 118155 - DNA, 19 bp, Homo sapiens
  siRNA target sequence for MYRIP (NM_015460.1,737-755).
gccattgaggaagcaattt

SEQ ID NO: 118156 - DNA, 19 bp, Homo sapiens
  siRNA target sequence for MYRIP (NM_015460.1,849-867).
cgacaatcctgcagaagat

SEQ ID NO: 118157 - DNA, 19 bp, Homo sapiens
  siRNA target sequence for MYRIP (NM_015460.1,852-870).
caatcctgcagaagattat

SEQ ID NO: 118158 - DNA, 19 bp, Homo sapiens
  siRNA target sequence for MYRIP (NM_015460.1,856-874).
cctgcagaagattatacga

SEQ ID NO: 118159 - DNA, 19 bp, Homo sapiens
  siRNA target sequence for MYRIP (NM_015460.1,1018-1036).
gtctgccttctcaatcact

SEQ ID NO: 118160 - DNA, 19 bp, Homo sapiens
  siRNA target sequence for MYRIP (NM_015460.1,1161-1179).
caaacctggccccagtttt

SEQ ID NO: 118161 - DNA, 19 bp, Homo sapiens
  siRNA target sequence for MYRIP (NM_015460.1,1235-1253).
cgactactggccaaaccta

SEQ ID NO: 118162 - DNA, 19 bp, Homo sapiens
  siRNA target sequence for MYRIP (NM_015460.1,1236-1254).
gactactggccaaacctaa

SEQ ID NO: 118163 - DNA, 19 bp, Homo sapiens
  siRNA target sequence for MYRIP (NM_015460.1,1296-1314).
catctgcctacgatgagat

SEQ ID NO: 118164 - DNA, 19 bp, Homo sapiens
  siRNA target sequence for MYRIP (NM_015460.1,1796-1814).
catcaggtgtcggatgatt

SEQ ID NO: 118165 - DNA, 19 bp, Homo sapiens
  siRNA target sequence for MYRIP (NM_015460.1,1801-1819).
ggtgtcggatgatttatca

SEQ ID NO: 118166 - DNA, 19 bp, Homo sapiens
  siRNA target sequence for MYRIP (NM_015460.1,1893-1911).
ggctgtacgagttagcaat

SEQ ID NO: 118167 - DNA, 19 bp, Homo sapiens
  siRNA target sequence for MYRIP (NM_015460.1,1897-1915).
gtacgagttagcaatgaaa

SEQ ID NO: 118168 - DNA, 19 bp, Homo sapiens
  siRNA target sequence for MYRIP (NM_015460.1,1992-2010).
gtctgtcctctgaagacaa

SEQ ID NO: 118169 - DNA, 19 bp, Homo sapiens
  siRNA target sequence for MYRIP (NM_015460.1,2278-2296).
gctgactgagctagaagat

SEQ ID NO: 118170 - DNA, 19 bp, Homo sapiens
  siRNA target sequence for MYRIP (NM_015460.1,2429-2447).
ctgaccattgcaggattaa

SEQ ID NO: 118171 - DNA, 19 bp, Homo sapiens
  siRNA target sequence for MYRIP (NM_015460.1,2492-2510).
caaaggacccaggtacaaa

SEQ ID NO: 118172 - DNA, 19 bp, Homo sapiens
  siRNA target sequence for MYRIP (NM_015460.1,2497-2515).
gacccaggtacaaaccata

SEQ ID NO: 118173 - DNA, 19 bp, Homo sapiens
  siRNA target sequence for MYRIP (NM_015460.1,2500-2518).
ccaggtacaaaccatagat

SEQ ID NO: 118174 - DNA, 19 bp, Homo sapiens
  siRNA target sequence for MYRIP (NM_015460.1,2503-2521).
ggtacaaaccatagataca

SEQ ID NO: 118175 - DNA, 19 bp, Homo sapiens
  siRNA target sequence for MYRIP (NM_015460.1,2507-2525).
caaaccatagatacatcaa

SEQ ID NO: 118176 - DNA, 19 bp, Homo sapiens
  siRNA target sequence for MYRIP (NM_015460.1,2588-2606).
gtgactaccattaaaacat

SEQ ID NO: 118177 - DNA, 19 bp, Homo sapiens
  siRNA target sequence for MYRIP (NM_015460.1,2590-2608).
gactaccattaaaacattt

SEQ ID NO: 118178 - DNA, 19 bp, Homo sapiens
  siRNA target sequence for MYRIP (NM_015460.1,2595-2613).
ccattaaaacatttaacca

SEQ ID NO: 118179 - DNA, 19 bp, Homo sapiens
  siRNA target sequence for MYRIP (NM_015460.1,2664-2682).
gcaccaccaaggatttgat

SEQ ID NO: 118180 - DNA, 19 bp, Homo sapiens
  siRNA target sequence for NCALD (NM_032041.1,198-216).
gatccaggaatggtataaa

SEQ ID NO: 118181 - DNA, 19 bp, Homo sapiens
  siRNA target sequence for NCALD (NM_032041.1,267-285).
gaaaatatatgggaacttt

SEQ ID NO: 118182 - DNA, 19 bp, Homo sapiens
  siRNA target sequence for NCALD (NM_032041.1,297-315).
ggatgcttccaaatttgca

SEQ ID NO: 118183 - DNA, 19 bp, Homo sapiens
  siRNA target sequence for NCALD (NM_032041.1,327-345).
ccgcaccttcgatgcaaat

SEQ ID NO: 118184 - DNA, 19 bp, Homo sapiens
  siRNA target sequence for NCALD (NM_032041.1,353-371).
ggacaatagactttagaga

SEQ ID NO: 118185 - DNA, 19 bp, Homo sapiens
  siRNA target sequence for NCALD (NM_032041.1,354-372).
gacaatagactttagagaa

SEQ ID NO: 118186 - DNA, 19 bp, Homo sapiens
  siRNA target sequence for NCALD (NM_032041.1,361-379).
gactttagagaattcatca

SEQ ID NO: 118187 - DNA, 19 bp, Homo sapiens
  siRNA target sequence for NCALD (NM_032041.1,378-396).
catcgccttgagtgtaact

SEQ ID NO: 118188 - DNA, 19 bp, Homo sapiens
  siRNA target sequence for NCALD (NM_032041.1,451-469).
gacggaaatggctatatca

SEQ ID NO: 118189 - DNA, 19 bp, Homo sapiens
  siRNA target sequence for NCALD (NM_032041.1,499-517).
gcaatctataagatggttt

SEQ ID NO: 118190 - DNA, 19 bp, Homo sapiens
  siRNA target sequence for NCALD (NM_032041.1,513-531).
ggtttcctctgtaatgaaa

SEQ ID NO: 118191 - DNA, 19 bp, Homo sapiens
  siRNA target sequence for NCALD (NM_032041.1,514-532).
gtttcctctgtaatgaaaa

SEQ ID NO: 118192 - DNA, 19 bp, Homo sapiens
  siRNA target sequence for NCALD (NM_032041.1,544-562).
gagtcaaccccagagaaaa

SEQ ID NO: 118193 - DNA, 19 bp, Homo sapiens
  siRNA target sequence for NEB (NM_004543.2,442-460).
cagaagaagtggtttacga

SEQ ID NO: 118194 - DNA, 19 bp, Homo sapiens
  siRNA target sequence for NEB (NM_004543.2,467-485).
gccgggagagacaataaca

SEQ ID NO: 118195 - DNA, 19 bp, Homo sapiens
  siRNA target sequence for NEB (NM_004543.2,468-486).
ccgggagagacaataacaa

SEQ ID NO: 118196 - DNA, 19 bp, Homo sapiens
  siRNA target sequence for NEB (NM_004543.2,517-535).
ctgactatgagcaatcaga

SEQ ID NO: 118197 - DNA, 19 bp, Homo sapiens
  siRNA target sequence for NEB (NM_004543.2,638-656).
gttcatgaccccctacatt

SEQ ID NO: 118198 - DNA, 19 bp, Homo sapiens
  siRNA target sequence for NEB (NM_004543.2,737-755).
cgccagcacaacagatact

SEQ ID NO: 118199 - DNA, 19 bp, Homo sapiens
  siRNA target sequence for NEB (NM_004543.2,759-777).
gaacttcgcagaatcaaaa

SEQ ID NO: 118200 - DNA, 19 bp, Homo sapiens
  siRNA target sequence for NEB (NM_004543.2,800-818).
ggttaagtatcgaatggat

SEQ ID NO: 118201 - DNA, 19 bp, Homo sapiens
  siRNA target sequence for NEB (NM_004543.2,819-837).
ggtgatgttgctaagacta

SEQ ID NO: 118202 - DNA, 19 bp, Homo sapiens
  siRNA target sequence for NEB (NM_004543.2,820-838).
gtgatgttgctaagactat

SEQ ID NO: 118203 - DNA, 19 bp, Homo sapiens
  siRNA target sequence for NEB (NM_004543.2,835-853).
ctatatgtcacgtagatga

SEQ ID NO: 118204 - DNA, 19 bp, Homo sapiens
  siRNA target sequence for NEB (NM_004543.2,890-908).
gcagcaagtcagtaaggtt

SEQ ID NO: 118205 - DNA, 19 bp, Homo sapiens
  siRNA target sequence for NEB (NM_004543.2,927-945).
gaagacaccaaggataagt

SEQ ID NO: 118206 - DNA, 19 bp, Homo sapiens
  siRNA target sequence for NEB (NM_004543.2,958-976).
ctgatgcccctgaacttgt

SEQ ID NO: 118207 - DNA, 19 bp, Homo sapiens
  siRNA target sequence for NEB (NM_004543.2,972-990).
cttgtccaggccgttaaga

SEQ ID NO: 118208 - DNA, 19 bp, Homo sapiens
  siRNA target sequence for NEB (NM_004543.2,1026-1044).
gactgggaagcagacaaaa

SEQ ID NO: 118209 - DNA, 19 bp, Homo sapiens
  siRNA target sequence for NEB (NM_004543.2,1049-1067).
gttttacccctataatgat

SEQ ID NO: 118210 - DNA, 19 bp, Homo sapiens
  siRNA target sequence for NEB (NM_004543.2,1111-1129).
gtgatgttgcctacaaaaa

SEQ ID NO: 118211 - DNA, 19 bp, Homo sapiens
  siRNA target sequence for NEB (NM_004543.2,1212-1230).
gtgagcaagcaaaaataca

SEQ ID NO: 118212 - DNA, 19 bp, Homo sapiens
  siRNA target sequence for NEB (NM_004543.2,1265-1283).
gagtgagacaccttgcttt

SEQ ID NO: 118213 - DNA, 19 bp, Homo sapiens
  siRNA target sequence for NEB (NM_004543.2,1379-1397).
gaccgaaacaccagagtat

SEQ ID NO: 118214 - DNA, 19 bp, Homo sapiens
  siRNA target sequence for NEB (NM_004543.2,1381-1399).
ccgaaacaccagagtataa

SEQ ID NO: 118215 - DNA, 19 bp, Homo sapiens
  siRNA target sequence for NEB (NM_004543.2,1382-1400).
cgaaacaccagagtataaa

SEQ ID NO: 118216 - DNA, 19 bp, Homo sapiens
  siRNA target sequence for NEB (NM_004543.2,1421-1439).
ggcagctagcaaggtaaaa

SEQ ID NO: 118217 - DNA, 19 bp, Homo sapiens
  siRNA target sequence for NEB (NM_004543.2,1422-1440).
gcagctagcaaggtaaaat

SEQ ID NO: 118218 - DNA, 19 bp, Homo sapiens
  siRNA target sequence for NEB (NM_004543.2,1423-1441).
cagctagcaaggtaaaata

SEQ ID NO: 118219 - DNA, 19 bp, Homo sapiens
  siRNA target sequence for NEB (NM_004543.2,1425-1443).
gctagcaaggtaaaataca

SEQ ID NO: 118220 - DNA, 19 bp, Homo sapiens
  siRNA target sequence for NEB (NM_004543.2,1426-1444).
ctagcaaggtaaaatacaa

SEQ ID NO: 118221 - DNA, 19 bp, Homo sapiens
  siRNA target sequence for NEB (NM_004543.2,1539-1557).
gccctaagtgacaaactat

SEQ ID NO: 118222 - DNA, 19 bp, Homo sapiens
  siRNA target sequence for NEB (NM_004543.2,1540-1558).
ccctaagtgacaaactata

SEQ ID NO: 118223 - DNA, 19 bp, Homo sapiens
  siRNA target sequence for NEB (NM_004543.2,1637-1655).
gcagaacttcagtagtgat

SEQ ID NO: 118224 - DNA, 19 bp, Homo sapiens
  siRNA target sequence for NEB (NM_004543.2,1648-1666).
gtagtgataaaaaatataa

SEQ ID NO: 118225 - DNA, 19 bp, Homo sapiens
  siRNA target sequence for NEB (NM_004543.2,1705-1723).
gcagcttcgaggatccata

SEQ ID NO: 118226 - DNA, 19 bp, Homo sapiens
  siRNA target sequence for NEB (NM_004543.2,1709-1727).
cttcgaggatccataccat

SEQ ID NO: 118227 - DNA, 19 bp, Homo sapiens
  siRNA target sequence for NEB (NM_004543.2,1931-1949).
gctacaagcccaagtcaat

SEQ ID NO: 118228 - DNA, 19 bp, Homo sapiens
  siRNA target sequence for NEB (NM_004543.2,1932-1950).
ctacaagcccaagtcaatt

SEQ ID NO: 118229 - DNA, 19 bp, Homo sapiens
  siRNA target sequence for NEB (NM_004543.2,1935-1953).
caagcccaagtcaattcca

SEQ ID NO: 118230 - DNA, 19 bp, Homo sapiens
  siRNA target sequence for NEB (NM_004543.2,1952-1970).
caaacaactgagtgactta

SEQ ID NO: 118231 - DNA, 19 bp, Homo sapiens
  siRNA target sequence for NEB (NM_004543.2,1956-1974).
caactgagtgacttaaatt

SEQ ID NO: 118232 - DNA, 19 bp, Homo sapiens
  siRNA target sequence for NEB (NM_004543.2,1959-1977).
ctgagtgacttaaattaca

SEQ ID NO: 118233 - DNA, 19 bp, Homo sapiens
  siRNA target sequence for NEB (NM_004543.2,2009-2027).
ccatatcccccctgatact

SEQ ID NO: 118234 - DNA, 19 bp, Homo sapiens
  siRNA target sequence for NEB (NM_004543.2,2266-2284).
ccttgaaggtggccaaaaa

SEQ ID NO: 118235 - DNA, 19 bp, Homo sapiens
  siRNA target sequence for NEB (NM_004543.2,2345-2363).
ctgtgagaccccaaaatat

SEQ ID NO: 118236 - DNA, 19 bp, Homo sapiens
  siRNA target sequence for NEB (NM_004543.2,2387-2405).
cttcagtgaggctagatat

SEQ ID NO: 118237 - DNA, 19 bp, Homo sapiens
  siRNA target sequence for NEB (NM_004543.2,2390-2408).
cagtgaggctagatataaa

SEQ ID NO: 118238 - DNA, 19 bp, Homo sapiens
  siRNA target sequence for NEB (NM_004543.2,2392-2410).
gtgaggctagatataaaga

SEQ ID NO: 118239 - DNA, 19 bp, Homo sapiens
  siRNA target sequence for NEB (NM_004543.2,2594-2612).
ggaccagtgtaaagatcat

SEQ ID NO: 118240 - DNA, 19 bp, Homo sapiens
  siRNA target sequence for NEB (NM_004543.2,2595-2613).
gaccagtgtaaagatcata

SEQ ID NO: 118241 - DNA, 19 bp, Homo sapiens
  siRNA target sequence for NEB (NM_004543.2,2690-2708).
cacgaaacagcttagtgat

SEQ ID NO: 118242 - DNA, 19 bp, Homo sapiens
  siRNA target sequence for NEB (NM_004543.2,2700-2718).
cttagtgatctgaattaca

SEQ ID NO: 118243 - DNA, 19 bp, Homo sapiens
  siRNA target sequence for NEB (NM_004543.2,2788-2806).
gagtcaatgcctataatct

SEQ ID NO: 118244 - DNA, 19 bp, Homo sapiens
  siRNA target sequence for NEB (NM_004543.2,3026-3044).
ccagagtgatcgcgaatat

SEQ ID NO: 118245 - DNA, 19 bp, Homo sapiens
  siRNA target sequence for NEB (NM_004543.2,3029-3047).
gagtgatcgcgaatatcga

SEQ ID NO: 118246 - DNA, 19 bp, Homo sapiens
  siRNA target sequence for NEB (NM_004543.2,3036-3054).
cgcgaatatcgaaaagatt

SEQ ID NO: 118247 - DNA, 19 bp, Homo sapiens
  siRNA target sequence for NEB (NM_004543.2,3037-3055).
gcgaatatcgaaaagatta

SEQ ID NO: 118248 - DNA, 19 bp, Homo sapiens
  siRNA target sequence for NEB (NM_004543.2,3038-3056).
cgaatatcgaaaagattat

SEQ ID NO: 118249 - DNA, 19 bp, Homo sapiens
  siRNA target sequence for NEB (NM_004543.2,3074-3092).
ctacacggcacctcttgat

SEQ ID NO: 118250 - DNA, 19 bp, Homo sapiens
  siRNA target sequence for NEB (NM_004543.2,3079-3097).
cggcacctcttgatatgct

SEQ ID NO: 118251 - DNA, 19 bp, Homo sapiens
  siRNA target sequence for NEB (NM_004543.2,3106-3124).
ctcaagctaagaaatctca

SEQ ID NO: 118252 - DNA, 19 bp, Homo sapiens
  siRNA target sequence for NEB (NM_004543.2,3132-3150).
gccagcgacgttgattata

SEQ ID NO: 118253 - DNA, 19 bp, Homo sapiens
  siRNA target sequence for NEB (NM_004543.2,3133-3151).
ccagcgacgttgattataa

SEQ ID NO: 118254 - DNA, 19 bp, Homo sapiens
  siRNA target sequence for NEB (NM_004543.2,3136-3154).
gcgacgttgattataagca

SEQ ID NO: 118255 - DNA, 19 bp, Homo sapiens
  siRNA target sequence for NEB (NM_004543.2,3153-3171).
cacatcttacacagttaca

SEQ ID NO: 118256 - DNA, 19 bp, Homo sapiens
  siRNA target sequence for NEB (NM_004543.2,3172-3190).
gctacccccctgatagcat

SEQ ID NO: 118257 - DNA, 19 bp, Homo sapiens
  siRNA target sequence for NEB (NM_004543.2,3176-3194).
cccccctgatagcatcaat

SEQ ID NO: 118258 - DNA, 19 bp, Homo sapiens
  siRNA target sequence for NEB (NM_004543.2,3225-3243).
cagagcgatgttgaataca

SEQ ID NO: 118259 - DNA, 19 bp, Homo sapiens
  siRNA target sequence for NEB (NM_004543.2,3227-3245).
gagcgatgttgaatacaaa

SEQ ID NO: 118260 - DNA, 19 bp, Homo sapiens
  siRNA target sequence for NEB (NM_004543.2,3291-3309).
gggtccttagaaatggaaa

SEQ ID NO: 118261 - DNA, 19 bp, Homo sapiens
  siRNA target sequence for NEB (NM_004543.2,3371-3389).
caagtttacctcgattgaa

SEQ ID NO: 118262 - DNA, 19 bp, Homo sapiens
  siRNA target sequence for NEB (NM_004543.2,3374-3392).
gtttacctcgattgaagat

SEQ ID NO: 118263 - DNA, 19 bp, Homo sapiens
  siRNA target sequence for NEB (NM_004543.2,3383-3401).
gattgaagatgctccaatt

SEQ ID NO: 118264 - DNA, 19 bp, Homo sapiens
  siRNA target sequence for NEB (NM_004543.2,3433-3451).
ggagtgatatcgcttacaa

SEQ ID NO: 118265 - DNA, 19 bp, Homo sapiens
  siRNA target sequence for NEB (NM_004543.2,3434-3452).
gagtgatatcgcttacaaa

SEQ ID NO: 118266 - DNA, 19 bp, Homo sapiens
  siRNA target sequence for NEB (NM_004543.2,3460-3478).
gagaggaaattattcacaa

SEQ ID NO: 118267 - DNA, 19 bp, Homo sapiens
  siRNA target sequence for NEB (NM_004543.2,3506-3524).
gttcatccaggctaaagtt

SEQ ID NO: 118268 - DNA, 19 bp, Homo sapiens
  siRNA target sequence for NEB (NM_004543.2,3509-3527).
catccaggctaaagttaat

SEQ ID NO: 118269 - DNA, 19 bp, Homo sapiens
  siRNA target sequence for NEB (NM_004543.2,3646-3664).
cgagtgacgttcagtacaa

SEQ ID NO: 118270 - DNA, 19 bp, Homo sapiens
  siRNA target sequence for NEB (NM_004543.2,3647-3665).
gagtgacgttcagtacaaa

SEQ ID NO: 118271 - DNA, 19 bp, Homo sapiens
  siRNA target sequence for NEB (NM_004543.2,3649-3667).
gtgacgttcagtacaaaaa

SEQ ID NO: 118272 - DNA, 19 bp, Homo sapiens
  siRNA target sequence for NEB (NM_004543.2,3695-3713).
ggttggcttccaaagtctt

SEQ ID NO: 118273 - DNA, 19 bp, Homo sapiens
  siRNA target sequence for NEB (NM_004543.2,3722-3740).
ccctaaactggttcattat

SEQ ID NO: 118274 - DNA, 19 bp, Homo sapiens
  siRNA target sequence for NEB (NM_004543.2,3763-3781).
cagatcgggagtataaaaa

SEQ ID NO: 118275 - DNA, 19 bp, Homo sapiens
  siRNA target sequence for NEB (NM_004543.2,3768-3786).
cgggagtataaaaaagact

SEQ ID NO: 118276 - DNA, 19 bp, Homo sapiens
  siRNA target sequence for NEB (NM_004543.2,3769-3787).
gggagtataaaaaagacta

SEQ ID NO: 118277 - DNA, 19 bp, Homo sapiens
  siRNA target sequence for NEB (NM_004543.2,3814-3832).
cgccccatgatatgttcaa

SEQ ID NO: 118278 - DNA, 19 bp, Homo sapiens
  siRNA target sequence for NEB (NM_004543.2,3815-3833).
gccccatgatatgttcaat

SEQ ID NO: 118279 - DNA, 19 bp, Homo sapiens
  siRNA target sequence for NEB (NM_004543.2,3817-3835).
cccatgatatgttcaatgt

SEQ ID NO: 118280 - DNA, 19 bp, Homo sapiens
  siRNA target sequence for NEB (NM_004543.2,4027-4045).
gtctcgacgtcgaaaaagt

SEQ ID NO: 118281 - DNA, 19 bp, Homo sapiens
  siRNA target sequence for NEB (NM_004543.2,4029-4047).
ctcgacgtcgaaaaagtta

SEQ ID NO: 118282 - DNA, 19 bp, Homo sapiens
  siRNA target sequence for NEB (NM_004543.2,4031-4049).
cgacgtcgaaaaagttaaa

SEQ ID NO: 118283 - DNA, 19 bp, Homo sapiens
  siRNA target sequence for NEB (NM_004543.2,4032-4050).
gacgtcgaaaaagttaaaa

SEQ ID NO: 118284 - DNA, 19 bp, Homo sapiens
  siRNA target sequence for NEB (NM_004543.2,4052-4070).
ggccggtgatgctctgaat

SEQ ID NO: 118285 - DNA, 19 bp, Homo sapiens
  siRNA target sequence for NEB (NM_004543.2,4156-4174).
cgaagcaagtcagtgatat

SEQ ID NO: 118286 - DNA, 19 bp, Homo sapiens
  siRNA target sequence for NEB (NM_004543.2,4160-4178).
gcaagtcagtgatatctta

SEQ ID NO: 118287 - DNA, 19 bp, Homo sapiens
  siRNA target sequence for NEB (NM_004543.2,4164-4182).
gtcagtgatatcttataca

SEQ ID NO: 118288 - DNA, 19 bp, Homo sapiens
  siRNA target sequence for NEB (NM_004543.2,4175-4193).
cttatacaaggctaaagga

SEQ ID NO: 118289 - DNA, 19 bp, Homo sapiens
  siRNA target sequence for NEB (NM_004543.2,4357-4375).
ccaaggcatcgagaaacat

SEQ ID NO: 118290 - DNA, 19 bp, Homo sapiens
  siRNA target sequence for NEB (NM_004543.2,4398-4416).
gaagcttatgagaagtcaa

SEQ ID NO: 118291 - DNA, 19 bp, Homo sapiens
  siRNA target sequence for NEB (NM_004543.2,4497-4515).
gatcgtgaatacaagaaga

SEQ ID NO: 118292 - DNA, 19 bp, Homo sapiens
  siRNA target sequence for NEB (NM_004543.2,4500-4518).
cgtgaatacaagaagaact

SEQ ID NO: 118293 - DNA, 19 bp, Homo sapiens
  siRNA target sequence for NEB (NM_004543.2,4590-4608).
gatgtcgctaccaatgtca

SEQ ID NO: 118294 - DNA, 19 bp, Homo sapiens
  siRNA target sequence for NEB (NM_004543.2,4597-4615).
ctaccaatgtcaactacaa

SEQ ID NO: 118295 - DNA, 19 bp, Homo sapiens
  siRNA target sequence for NEB (NM_004543.2,4610-4628).
ctacaaacagccattgcat

SEQ ID NO: 118296 - DNA, 19 bp, Homo sapiens
  siRNA target sequence for NEB (NM_004543.2,4617-4635).
cagccattgcatcattaca

SEQ ID NO: 118297 - DNA, 19 bp, Homo sapiens
  siRNA target sequence for NEB (NM_004543.2,4620-4638).
ccattgcatcattacacat

SEQ ID NO: 118298 - DNA, 19 bp, Homo sapiens
  siRNA target sequence for NEB (NM_004543.2,4625-4643).
gcatcattacacataccta

SEQ ID NO: 118299 - DNA, 19 bp, Homo sapiens
  siRNA target sequence for NEB (NM_004543.2,4664-4682).
gcatacgaggaatgtcaat

SEQ ID NO: 118300 - DNA, 19 bp, Homo sapiens
  siRNA target sequence for NEB (NM_004543.2,4701-4719).
gtgtataaagacgagtata

SEQ ID NO: 118301 - DNA, 19 bp, Homo sapiens
  siRNA target sequence for NEB (NM_004543.2,4713-4731).
gagtataacagcttcttga

SEQ ID NO: 118302 - DNA, 19 bp, Homo sapiens
  siRNA target sequence for NEB (NM_004543.2,4739-4757).
cggatggatccctattggt

SEQ ID NO: 118303 - DNA, 19 bp, Homo sapiens
  siRNA target sequence for NEB (NM_004543.2,4781-4799).
gaaagcaggcgatgcatta

SEQ ID NO: 118304 - DNA, 19 bp, Homo sapiens
  siRNA target sequence for NEB (NM_004543.2,4786-4804).
caggcgatgcattaaatga

SEQ ID NO: 118305 - DNA, 19 bp, Homo sapiens
  siRNA target sequence for NEB (NM_004543.2,4788-4806).
ggcgatgcattaaatgaga

SEQ ID NO: 118306 - DNA, 19 bp, Homo sapiens
  siRNA target sequence for NEB (NM_004543.2,4824-4842).
ccagataccgtcaagttca

SEQ ID NO: 118307 - DNA, 19 bp, Homo sapiens
  siRNA target sequence for NEB (NM_004543.2,4843-4861).
caagtgtgcctgattccat

SEQ ID NO: 118308 - DNA, 19 bp, Homo sapiens
  siRNA target sequence for NEB (NM_004543.2,4955-4973).
ccctgaattgcctcagttt

SEQ ID NO: 118309 - DNA, 19 bp, Homo sapiens
  siRNA target sequence for NEB (NM_004543.2,4956-4974).
cctgaattgcctcagttta

SEQ ID NO: 118310 - DNA, 19 bp, Homo sapiens
  siRNA target sequence for NEB (NM_004543.2,4986-5004).
gtcaacgccctcaacatga

SEQ ID NO: 118311 - DNA, 19 bp, Homo sapiens
  siRNA target sequence for NEB (NM_004543.2,5003-5021).
gagtgatgctcattataaa

SEQ ID NO: 118312 - DNA, 19 bp, Homo sapiens
  siRNA target sequence for NEB (NM_004543.2,5023-5041).
cagattggaagaaaaccat

SEQ ID NO: 118313 - DNA, 19 bp, Homo sapiens
  siRNA target sequence for NEB (NM_004543.2,5045-5063).
caagggctatgatttgaga

SEQ ID NO: 118314 - DNA, 19 bp, Homo sapiens
  siRNA target sequence for NEB (NM_004543.2,5075-5093).
cccaattgttgctgcaaaa

SEQ ID NO: 118315 - DNA, 19 bp, Homo sapiens
  siRNA target sequence for NEB (NM_004543.2,5338-5356).
ccaactacagacagtcata

SEQ ID NO: 118316 - DNA, 19 bp, Homo sapiens
  siRNA target sequence for NEB (NM_004543.2,5472-5490).
ggctgggtgcccatagagt

SEQ ID NO: 118317 - DNA, 19 bp, Homo sapiens
  siRNA target sequence for NEB (NM_004543.2,5556-5574).
cccgagaagctgaagttca

SEQ ID NO: 118318 - DNA, 19 bp, Homo sapiens
  siRNA target sequence for NEB (NM_004543.2,5575-5593).
cttacgccatggacacaat

SEQ ID NO: 118319 - DNA, 19 bp, Homo sapiens
  siRNA target sequence for NEB (NM_004543.2,5601-5619).
gcacttaacaagagtaaca

SEQ ID NO: 118320 - DNA, 19 bp, Homo sapiens
  siRNA target sequence for NEB (NM_004543.2,5602-5620).
cacttaacaagagtaacaa

SEQ ID NO: 118321 - DNA, 19 bp, Homo sapiens
  siRNA target sequence for NEB (NM_004543.2,5794-5812).
ggcctgatgccattgcaat

SEQ ID NO: 118322 - DNA, 19 bp, Homo sapiens
  siRNA target sequence for NEB (NM_004543.2,5959-5977).
cagaccgggaatacaagaa

SEQ ID NO: 118323 - DNA, 19 bp, Homo sapiens
  siRNA target sequence for NEB (NM_004543.2,5972-5990).
caagaagggatatgagaaa

SEQ ID NO: 118324 - DNA, 19 bp, Homo sapiens
  siRNA target sequence for NEB (NM_004543.2,6079-6097).
ggaacgtgatccataccta

SEQ ID NO: 118325 - DNA, 19 bp, Homo sapiens
  siRNA target sequence for NEB (NM_004543.2,6084-6102).
gtgatccatacctacaaca

SEQ ID NO: 118326 - DNA, 19 bp, Homo sapiens
  siRNA target sequence for NEB (NM_004543.2,6126-6144).
gaattggccaaaaatatga

SEQ ID NO: 118327 - DNA, 19 bp, Homo sapiens
  siRNA target sequence for NEB (NM_004543.2,6287-6305).
cccagacactttgaagtat

SEQ ID NO: 118328 - DNA, 19 bp, Homo sapiens
  siRNA target sequence for NEB (NM_004543.2,6388-6406).
gggaggctgacaaaaccaa

SEQ ID NO: 118329 - DNA, 19 bp, Homo sapiens
  siRNA target sequence for NEB (NM_004543.2,6420-6438).
cctgatatcccccagatta

SEQ ID NO: 118330 - DNA, 19 bp, Homo sapiens
  siRNA target sequence for NEB (NM_004543.2,6421-6439).
ctgatatcccccagattat

SEQ ID NO: 118331 - DNA, 19 bp, Homo sapiens
  siRNA target sequence for NEB (NM_004543.2,6841-6859).
cagatgcaatgaacattga

SEQ ID NO: 118332 - DNA, 19 bp, Homo sapiens
  siRNA target sequence for NEB (NM_004543.2,6858-6876).
gagctgaccaggaatatga

SEQ ID NO: 118333 - DNA, 19 bp, Homo sapiens
  siRNA target sequence for NEB (NM_004543.2,6860-6878).
gctgaccaggaatatgaat

SEQ ID NO: 118334 - DNA, 19 bp, Homo sapiens
  siRNA target sequence for NEB (NM_004543.2,7101-7119).
catttatacaccattgatt

SEQ ID NO: 118335 - DNA, 19 bp, Homo sapiens
  siRNA target sequence for NEB (NM_004543.2,7192-7210).
cactgtatagtcagaaact

SEQ ID NO: 118336 - DNA, 19 bp, Homo sapiens
  siRNA target sequence for NEB (NM_004543.2,7196-7214).
gtatagtcagaaactctat

SEQ ID NO: 118337 - DNA, 19 bp, Homo sapiens
  siRNA target sequence for NEB (NM_004543.2,7254-7272).
ctcccagttgatgcaattt

SEQ ID NO: 118338 - DNA, 19 bp, Homo sapiens
  siRNA target sequence for NEB (NM_004543.2,7275-7293).
gtacagctagctaaagctt

SEQ ID NO: 118339 - DNA, 19 bp, Homo sapiens
  siRNA target sequence for NEB (NM_004543.2,7280-7298).
gctagctaaagcttcaaga

SEQ ID NO: 118340 - DNA, 19 bp, Homo sapiens
  siRNA target sequence for NEB (NM_004543.2,7707-7725).
cgggcttcggaaatcatca

SEQ ID NO: 118341 - DNA, 19 bp, Homo sapiens
  siRNA target sequence for NEB (NM_004543.2,7812-7830).
gccaaaaataggagtgata

SEQ ID NO: 118342 - DNA, 19 bp, Homo sapiens
  siRNA target sequence for NEB (NM_004543.2,7823-7841).
gagtgatagactttataga

SEQ ID NO: 118343 - DNA, 19 bp, Homo sapiens
  siRNA target sequence for NEB (NM_004543.2,7825-7843).
gtgatagactttatagaga

SEQ ID NO: 118344 - DNA, 19 bp, Homo sapiens
  siRNA target sequence for NEB (NM_004543.2,7895-7913).
cattgttctggctaaagca

SEQ ID NO: 118345 - DNA, 19 bp, Homo sapiens
  siRNA target sequence for NEB (NM_004543.2,7964-7982).
gaagagaaaaggttacgat

SEQ ID NO: 118346 - DNA, 19 bp, Homo sapiens
  siRNA target sequence for NEB (NM_004543.2,7986-8004).
cctgttgatgccataccaa

SEQ ID NO: 118347 - DNA, 19 bp, Homo sapiens
  siRNA target sequence for NEB (NM_004543.2,7987-8005).
ctgttgatgccataccaat

SEQ ID NO: 118348 - DNA, 19 bp, Homo sapiens
  siRNA target sequence for NEB (NM_004543.2,8436-8454).
cgagccacccagattttga

SEQ ID NO: 118349 - DNA, 19 bp, Homo sapiens
  siRNA target sequence for NEB (NM_004543.2,8481-8499).
gatcaatttaagttttcca

SEQ ID NO: 118350 - DNA, 19 bp, Homo sapiens
  siRNA target sequence for NEB (NM_004543.2,8492-8510).
gttttccagccttatggat

SEQ ID NO: 118351 - DNA, 19 bp, Homo sapiens
  siRNA target sequence for NEB (NM_004543.2,8502-8520).
cttatggattccataccaa

SEQ ID NO: 118352 - DNA, 19 bp, Homo sapiens
  siRNA target sequence for NEB (NM_004543.2,8507-8525).
ggattccataccaatggtt

SEQ ID NO: 118353 - DNA, 19 bp, Homo sapiens
  siRNA target sequence for NEB (NM_004543.2,8508-8526).
gattccataccaatggttt

SEQ ID NO: 118354 - DNA, 19 bp, Homo sapiens
  siRNA target sequence for NEB (NM_004543.2,8552-8570).
gaatcatcgcctctataca

SEQ ID NO: 118355 - DNA, 19 bp, Homo sapiens
  siRNA target sequence for NEB (NM_004543.2,8618-8636).
ccctgaagttttattagct

SEQ ID NO: 118356 - DNA, 19 bp, Homo sapiens
  siRNA target sequence for NEB (NM_004543.2,8619-8637).
cctgaagttttattagcta

SEQ ID NO: 118357 - DNA, 19 bp, Homo sapiens
  siRNA target sequence for NEB (NM_004543.2,8620-8638).
ctgaagttttattagctaa

SEQ ID NO: 118358 - DNA, 19 bp, Homo sapiens
  siRNA target sequence for NEB (NM_004543.2,8649-8667).
gtaaattacagtgagaaat

SEQ ID NO: 118359 - DNA, 19 bp, Homo sapiens
  siRNA target sequence for NEB (NM_004543.2,8716-8734).
gggtagatgccattcctat

SEQ ID NO: 118360 - DNA, 19 bp, Homo sapiens
  siRNA target sequence for NEB (NM_004543.2,8813-8831).
cattggtgcccgagctata

SEQ ID NO: 118361 - DNA, 19 bp, Homo sapiens
  siRNA target sequence for NEB (NM_004543.2,8832-8850).
cgtgatgaccccaagatga

SEQ ID NO: 118362 - DNA, 19 bp, Homo sapiens
  siRNA target sequence for NEB (NM_004543.2,9131-9149).
gtccattggctctttggat

SEQ ID NO: 118363 - DNA, 19 bp, Homo sapiens
  siRNA target sequence for NEB (NM_004543.2,9139-9157).
gctctttggatgtggaaaa

SEQ ID NO: 118364 - DNA, 19 bp, Homo sapiens
  siRNA target sequence for NEB (NM_004543.2,9140-9158).
ctctttggatgtggaaaaa

SEQ ID NO: 118365 - DNA, 19 bp, Homo sapiens
  siRNA target sequence for NEB (NM_004543.2,9317-9335).
caagactcaaattcacata

SEQ ID NO: 118366 - DNA, 19 bp, Homo sapiens
  siRNA target sequence for NEB (NM_004543.2,9477-9495).
gcctccagggacgttatca

SEQ ID NO: 118367 - DNA, 19 bp, Homo sapiens
  siRNA target sequence for NEB (NM_004543.2,9484-9502).
gggacgttatcagtgatta

SEQ ID NO: 118368 - DNA, 19 bp, Homo sapiens
  siRNA target sequence for NEB (NM_004543.2,9486-9504).
gacgttatcagtgattaca

SEQ ID NO: 118369 - DNA, 19 bp, Homo sapiens
  siRNA target sequence for NEB (NM_004543.2,9488-9506).
cgttatcagtgattacaaa

SEQ ID NO: 118370 - DNA, 19 bp, Homo sapiens
  siRNA target sequence for NEB (NM_004543.2,9860-9878).
ccccattgggtctatggat

SEQ ID NO: 118371 - DNA, 19 bp, Homo sapiens
  siRNA target sequence for NEB (NM_004543.2,9903-9921).
gaaatactgagtgataaca

SEQ ID NO: 118372 - DNA, 19 bp, Homo sapiens
  siRNA target sequence for NEB (NM_004543.2,9936-9954).
ccggacaagctgaaattta

SEQ ID NO: 118373 - DNA, 19 bp, Homo sapiens
  siRNA target sequence for NEB (NM_004543.2,10046-10064).
caagacccaagtccatatt

SEQ ID NO: 118374 - DNA, 19 bp, Homo sapiens
  siRNA target sequence for NEB (NM_004543.2,10085-10103).
catgttggcaagacaaaat

SEQ ID NO: 118375 - DNA, 19 bp, Homo sapiens
  siRNA target sequence for NEB (NM_004543.2,10202-10220).
caaggcctctcgggatatt

SEQ ID NO: 118376 - DNA, 19 bp, Homo sapiens
  siRNA target sequence for NEB (NM_004543.2,10397-10415).
ggacatgcttggtatcgtt

SEQ ID NO: 118377 - DNA, 19 bp, Homo sapiens
  siRNA target sequence for NEB (NM_004543.2,10398-10416).
gacatgcttggtatcgttt

SEQ ID NO: 118378 - DNA, 19 bp, Homo sapiens
  siRNA target sequence for NEB (NM_004543.2,10445-10463).
cgatgtggactataaacat

SEQ ID NO: 118379 - DNA, 19 bp, Homo sapiens
  siRNA target sequence for NEB (NM_004543.2,10532-10550).
ccagagtgacaatttgtat

SEQ ID NO: 118380 - DNA, 19 bp, Homo sapiens
  siRNA target sequence for NEB (NM_004543.2,10581-10599).
ggctgggttccgattgatt

SEQ ID NO: 118381 - DNA, 19 bp, Homo sapiens
  siRNA target sequence for NEB (NM_004543.2,10629-10647).
ggagaattacttagtgata

SEQ ID NO: 118382 - DNA, 19 bp, Homo sapiens
  siRNA target sequence for NEB (NM_004543.2,10663-10681).
gtccagaaacgctgaaatt

SEQ ID NO: 118383 - DNA, 19 bp, Homo sapiens
  siRNA target sequence for NEB (NM_004543.2,10665-10683).
ccagaaacgctgaaattta

SEQ ID NO: 118384 - DNA, 19 bp, Homo sapiens
  siRNA target sequence for NEB (NM_004543.2,10739-10757).
gaataagcgcttatatact

SEQ ID NO: 118385 - DNA, 19 bp, Homo sapiens
  siRNA target sequence for NEB (NM_004543.2,10821-10839).
gccaaactcaaccgaataa

SEQ ID NO: 118386 - DNA, 19 bp, Homo sapiens
  siRNA target sequence for NEB (NM_004543.2,10822-10840).
ccaaactcaaccgaataaa

SEQ ID NO: 118387 - DNA, 19 bp, Homo sapiens
  siRNA target sequence for NEB (NM_004543.2,10827-10845).
ctcaaccgaataaactaca

SEQ ID NO: 118388 - DNA, 19 bp, Homo sapiens
  siRNA target sequence for NEB (NM_004543.2,10856-10874).
ctataaacttgctttggaa

SEQ ID NO: 118389 - DNA, 19 bp, Homo sapiens
  siRNA target sequence for NEB (NM_004543.2,11166-11184).
cttgtaagcgacatagact

SEQ ID NO: 118390 - DNA, 19 bp, Homo sapiens
  siRNA target sequence for NEB (NM_004543.2,11264-11282).
gagtgatgctatttacaaa

SEQ ID NO: 118391 - DNA, 19 bp, Homo sapiens
  siRNA target sequence for NEB (NM_004543.2,11329-11347).
ctgtagaggtcgagaaagt

SEQ ID NO: 118392 - DNA, 19 bp, Homo sapiens
  siRNA target sequence for NEB (NM_004543.2,11397-11415).
gaccagctcaaattcacat

SEQ ID NO: 118393 - DNA, 19 bp, Homo sapiens
  siRNA target sequence for NEB (NM_004543.2,11402-11420).
gctcaaattcacatgcatt

SEQ ID NO: 118394 - DNA, 19 bp, Homo sapiens
  siRNA target sequence for NEB (NM_004543.2,11422-11440).
ccgacactccggaaattgt

SEQ ID NO: 118395 - DNA, 19 bp, Homo sapiens
  siRNA target sequence for NEB (NM_004543.2,11431-11449).
cggaaattgtcctagcaaa

SEQ ID NO: 118396 - DNA, 19 bp, Homo sapiens
  siRNA target sequence for NEB (NM_004543.2,11460-11478).
ctgacaatgagcaagcatt

SEQ ID NO: 118397 - DNA, 19 bp, Homo sapiens
  siRNA target sequence for NEB (NM_004543.2,11566-11584).
ccaatatcagccaaaaact

SEQ ID NO: 118398 - DNA, 19 bp, Homo sapiens
  siRNA target sequence for NEB (NM_004543.2,11762-11780).
gattatgtgtgccatacat

SEQ ID NO: 118399 - DNA, 19 bp, Homo sapiens
  siRNA target sequence for NEB (NM_004543.2,11938-11956).
catgcatgccggatcaaaa

SEQ ID NO: 118400 - DNA, 19 bp, Homo sapiens
  siRNA target sequence for NEB (NM_004543.2,11941-11959).
gcatgccggatcaaaacga

SEQ ID NO: 118401 - DNA, 19 bp, Homo sapiens
  siRNA target sequence for NEB (NM_004543.2,11946-11964).
ccggatcaaaacgacatta

SEQ ID NO: 118402 - DNA, 19 bp, Homo sapiens
  siRNA target sequence for NEB (NM_004543.2,11947-11965).
cggatcaaaacgacattat

SEQ ID NO: 118403 - DNA, 19 bp, Homo sapiens
  siRNA target sequence for NEB (NM_004543.2,11958-11976).
gacattatccaagcaaaaa

SEQ ID NO: 118404 - DNA, 19 bp, Homo sapiens
  siRNA target sequence for NEB (NM_004543.2,12063-12081).
gaagtgttgagagtcaaaa

SEQ ID NO: 118405 - DNA, 19 bp, Homo sapiens
  siRNA target sequence for NEB (NM_004543.2,12075-12093).
gtcaaaaacgcccagaata

SEQ ID NO: 118406 - DNA, 19 bp, Homo sapiens
  siRNA target sequence for NEB (NM_004543.2,12083-12101).
cgcccagaatatcttttgt

SEQ ID NO: 118407 - DNA, 19 bp, Homo sapiens
  siRNA target sequence for NEB (NM_004543.2,12126-12144).
gtgaaccttaagtacacaa

SEQ ID NO: 118408 - DNA, 19 bp, Homo sapiens
  siRNA target sequence for NEB (NM_004543.2,12131-12149).
ccttaagtacacaagcatt

SEQ ID NO: 118409 - DNA, 19 bp, Homo sapiens
  siRNA target sequence for NEB (NM_004543.2,12160-12178).
ctgaagtggtccttgctaa

SEQ ID NO: 118410 - DNA, 19 bp, Homo sapiens
  siRNA target sequence for NEB (NM_004543.2,12219-12237).
gtttgggacaaggataaaa

SEQ ID NO: 118411 - DNA, 19 bp, Homo sapiens
  siRNA target sequence for NEB (NM_004543.2,12283-12301).
gagcaaatgctcttaatgt

SEQ ID NO: 118412 - DNA, 19 bp, Homo sapiens
  siRNA target sequence for NEB (NM_004543.2,12291-12309).
gctcttaatgtgagcaata

SEQ ID NO: 118413 - DNA, 19 bp, Homo sapiens
  siRNA target sequence for NEB (NM_004543.2,12292-12310).
ctcttaatgtgagcaataa

SEQ ID NO: 118414 - DNA, 19 bp, Homo sapiens
  siRNA target sequence for NEB (NM_004543.2,12318-12336).
cgtgagggctgggatgaaa

SEQ ID NO: 118415 - DNA, 19 bp, Homo sapiens
  siRNA target sequence for NEB (NM_004543.2,12710-12728).
cgaactgcagagcgataat

SEQ ID NO: 118416 - DNA, 19 bp, Homo sapiens
  siRNA target sequence for NEB (NM_004543.2,12714-12732).
ctgcagagcgataatgttt

SEQ ID NO: 118417 - DNA, 19 bp, Homo sapiens
  siRNA target sequence for NEB (NM_004543.2,12782-12800).
ctccgtgtccgtcaatcat

SEQ ID NO: 118418 - DNA, 19 bp, Homo sapiens
  siRNA target sequence for NEB (NM_004543.2,12912-12930).
ggcgagatcctcgatgata

SEQ ID NO: 118419 - DNA, 19 bp, Homo sapiens
  siRNA target sequence for NEB (NM_004543.2,12913-12931).
gcgagatcctcgatgatat

SEQ ID NO: 118420 - DNA, 19 bp, Homo sapiens
  siRNA target sequence for NEB (NM_004543.2,12914-12932).
cgagatcctcgatgatatt

SEQ ID NO: 118421 - DNA, 19 bp, Homo sapiens
  siRNA target sequence for NEB (NM_004543.2,12915-12933).
gagatcctcgatgatatta

SEQ ID NO: 118422 - DNA, 19 bp, Homo sapiens
  siRNA target sequence for NEB (NM_004543.2,12917-12935).
gatcctcgatgatattaaa

SEQ ID NO: 118423 - DNA, 19 bp, Homo sapiens
  siRNA target sequence for NEB (NM_004543.2,13087-13105).
cagatgctgtgccatttgt

SEQ ID NO: 118424 - DNA, 19 bp, Homo sapiens
  siRNA target sequence for NEB (NM_004543.2,13166-13184).
gcaaaaaggtcattatgtt

SEQ ID NO: 118425 - DNA, 19 bp, Homo sapiens
  siRNA target sequence for NEB (NM_004543.2,13190-13208).
cccgacgatgagagatgat

SEQ ID NO: 118426 - DNA, 19 bp, Homo sapiens
  siRNA target sequence for NEB (NM_004543.2,13195-13213).
cgatgagagatgatcctaa

SEQ ID NO: 118427 - DNA, 19 bp, Homo sapiens
  siRNA target sequence for NEB (NM_004543.2,13236-13254).
ggccagattcagaatgaga

SEQ ID NO: 118428 - DNA, 19 bp, Homo sapiens
  siRNA target sequence for NEB (NM_004543.2,13247-13265).
gaatgagagactatacaaa

SEQ ID NO: 118429 - DNA, 19 bp, Homo sapiens
  siRNA target sequence for NEB (NM_004543.2,13266-13284).
gaggactatcacaaaacaa

SEQ ID NO: 118430 - DNA, 19 bp, Homo sapiens
  siRNA target sequence for NEB (NM_004543.2,13282-13300).
caaaggccaaaatcaatat

SEQ ID NO: 118431 - DNA, 19 bp, Homo sapiens
  siRNA target sequence for NEB (NM_004543.2,13343-13361).
gacccttgtcagtgatatt

SEQ ID NO: 118432 - DNA, 19 bp, Homo sapiens
  siRNA target sequence for NEB (NM_004543.2,13345-13363).
cccttgtcagtgatattga

SEQ ID NO: 118433 - DNA, 19 bp, Homo sapiens
  siRNA target sequence for NEB (NM_004543.2,13495-13513).
ggatcccactggattctgt

SEQ ID NO: 118434 - DNA, 19 bp, Homo sapiens
  siRNA target sequence for NEB (NM_004543.2,13506-13524).
gattctgtggaccatgtaa

SEQ ID NO: 118435 - DNA, 19 bp, Homo sapiens
  siRNA target sequence for NEB (NM_004543.2,13515-13533).
gaccatgtaagggttacta

SEQ ID NO: 118436 - DNA, 19 bp, Homo sapiens
  siRNA target sequence for NEB (NM_004543.2,13518-13536).
catgtaagggttactaaga

SEQ ID NO: 118437 - DNA, 19 bp, Homo sapiens
  siRNA target sequence for NEB (NM_004543.2,13575-13593).
gcccttgaaaactatccta

SEQ ID NO: 118438 - DNA, 19 bp, Homo sapiens
  siRNA target sequence for NEB (NM_004543.2,13607-13625).
ggtggatcctccagagatt

SEQ ID NO: 118439 - DNA, 19 bp, Homo sapiens
  siRNA target sequence for NEB (NM_004543.2,13647-13665).
gtcaatcaaagtgatgtaa

SEQ ID NO: 118440 - DNA, 19 bp, Homo sapiens
  siRNA target sequence for NEB (NM_004543.2,13711-13729).
caccagatacaccacatat

SEQ ID NO: 118441 - DNA, 19 bp, Homo sapiens
  siRNA target sequence for NEB (NM_004543.2,13749-13767).
ggaaaactctacagtacta

SEQ ID NO: 118442 - DNA, 19 bp, Homo sapiens
  siRNA target sequence for NEB (NM_004543.2,13757-13775).
ctacagtactatactgtat

SEQ ID NO: 118443 - DNA, 19 bp, Homo sapiens
  siRNA target sequence for NEB (NM_004543.2,13760-13778).
cagtactatactgtataaa

SEQ ID NO: 118444 - DNA, 19 bp, Homo sapiens
  siRNA target sequence for NEB (NM_004543.2,13862-13880).
ggtgaacagtgagcttaaa

SEQ ID NO: 118445 - DNA, 19 bp, Homo sapiens
  siRNA target sequence for NEB (NM_004543.2,13863-13881).
gtgaacagtgagcttaaat

SEQ ID NO: 118446 - DNA, 19 bp, Homo sapiens
  siRNA target sequence for NEB (NM_004543.2,13924-13942).
gaaaagtgatcggtgaatt

SEQ ID NO: 118447 - DNA, 19 bp, Homo sapiens
  siRNA target sequence for NEB (NM_004543.2,13984-14002).
gtgcgttgaactacagaaa

SEQ ID NO: 118448 - DNA, 19 bp, Homo sapiens
  siRNA target sequence for NEB (NM_004543.2,13987-14005).
cgttgaactacagaaaaca

SEQ ID NO: 118449 - DNA, 19 bp, Homo sapiens
  siRNA target sequence for NEB (NM_004543.2,13988-14006).
gttgaactacagaaaacat

SEQ ID NO: 118450 - DNA, 19 bp, Homo sapiens
  siRNA target sequence for NEB (NM_004543.2,14028-14046).
gttcatatccccaatgaca

SEQ ID NO: 118451 - DNA, 19 bp, Homo sapiens
  siRNA target sequence for NEB (NM_004543.2,14065-14083).
ctaaaaggtgccagtacat

SEQ ID NO: 118452 - DNA, 19 bp, Homo sapiens
  siRNA target sequence for NEB (NM_004543.2,14093-14111).
cctggagtatcgacactat

SEQ ID NO: 118453 - DNA, 19 bp, Homo sapiens
  siRNA target sequence for NEB (NM_004543.2,14161-14179).
gaaacgcccaggagatctt

SEQ ID NO: 118454 - DNA, 19 bp, Homo sapiens
  siRNA target sequence for NEB (NM_004543.2,14283-14301).
cagagtcagctacaatata

SEQ ID NO: 118455 - DNA, 19 bp, Homo sapiens
  siRNA target sequence for NEB (NM_004543.2,14285-14303).
gagtcagctacaatataca

SEQ ID NO: 118456 - DNA, 19 bp, Homo sapiens
  siRNA target sequence for NEB (NM_004543.2,14311-14329).
gtaaagaaaatctacaaaa

SEQ ID NO: 118457 - DNA, 19 bp, Homo sapiens
  siRNA target sequence for NEB (NM_004543.2,14344-14362).
cagacacgcccctctatgt

SEQ ID NO: 118458 - DNA, 19 bp, Homo sapiens
  siRNA target sequence for NEB (NM_004543.2,14418-14436).
catcagattaaggacaaat

SEQ ID NO: 118459 - DNA, 19 bp, Homo sapiens
  siRNA target sequence for NEB (NM_004543.2,14438-14456).
cacaacagttctagaaaca

SEQ ID NO: 118460 - DNA, 19 bp, Homo sapiens
  siRNA target sequence for NEB (NM_004543.2,14595-14613).
catctggccagccatatca

SEQ ID NO: 118461 - DNA, 19 bp, Homo sapiens
  siRNA target sequence for NEB (NM_004543.2,14598-14616).
ctggccagccatatcaaat

SEQ ID NO: 118462 - DNA, 19 bp, Homo sapiens
  siRNA target sequence for NEB (NM_004543.2,14600-14618).
ggccagccatatcaaatat

SEQ ID NO: 118463 - DNA, 19 bp, Homo sapiens
  siRNA target sequence for NEB (NM_004543.2,14639-14657).
caaagctctttatacgtta

SEQ ID NO: 118464 - DNA, 19 bp, Homo sapiens
  siRNA target sequence for NEB (NM_004543.2,14643-14661).
gctctttatacgttaccaa

SEQ ID NO: 118465 - DNA, 19 bp, Homo sapiens
  siRNA target sequence for NEB (NM_004543.2,14697-14715).
ctccgagttggcaagctta

SEQ ID NO: 118466 - DNA, 19 bp, Homo sapiens
  siRNA target sequence for NEB (NM_004543.2,14724-14742).
cgcctgtacagatcagttt

SEQ ID NO: 118467 - DNA, 19 bp, Homo sapiens
  siRNA target sequence for NEB (NM_004543.2,14725-14743).
gcctgtacagatcagttta

SEQ ID NO: 118468 - DNA, 19 bp, Homo sapiens
  siRNA target sequence for NEB (NM_004543.2,14843-14861).
gcgcctccacgaatggatt

SEQ ID NO: 118469 - DNA, 19 bp, Homo sapiens
  siRNA target sequence for NEB (NM_004543.2,14844-14862).
cgcctccacgaatggattt

SEQ ID NO: 118470 - DNA, 19 bp, Homo sapiens
  siRNA target sequence for NEB (NM_004543.2,14867-14885).
ccccgacttgcaagtcaat

SEQ ID NO: 118471 - DNA, 19 bp, Homo sapiens
  siRNA target sequence for NEB (NM_004543.2,14869-14887).
ccgacttgcaagtcaatga

SEQ ID NO: 118472 - DNA, 19 bp, Homo sapiens
  siRNA target sequence for NEB (NM_004543.2,14870-14888).
cgacttgcaagtcaatgat

SEQ ID NO: 118473 - DNA, 19 bp, Homo sapiens
  siRNA target sequence for NEB (NM_004543.2,14886-14904).
gatcacgtcaggaaagtca

SEQ ID NO: 118474 - DNA, 19 bp, Homo sapiens
  siRNA target sequence for NEB (NM_004543.2,14910-14928).
cagatcagcgatattgtat

SEQ ID NO: 118475 - DNA, 19 bp, Homo sapiens
  siRNA target sequence for NEB (NM_004543.2,14999-15017).
caagcatgcttatgatcta

SEQ ID NO: 118476 - DNA, 19 bp, Homo sapiens
  siRNA target sequence for NEB (NM_004543.2,15012-15030).
gatctacgtgatgatatca

SEQ ID NO: 118477 - DNA, 19 bp, Homo sapiens
  siRNA target sequence for NEB (NM_004543.2,15092-15110).
ctacgtgcaggctgtcaaa

SEQ ID NO: 118478 - DNA, 19 bp, Homo sapiens
  siRNA target sequence for NEB (NM_004543.2,15095-15113).
cgtgcaggctgtcaaaagt

SEQ ID NO: 118479 - DNA, 19 bp, Homo sapiens
  siRNA target sequence for NEB (NM_004543.2,15174-15192).
gtggctccaactaccaaaa

SEQ ID NO: 118480 - DNA, 19 bp, Homo sapiens
  siRNA target sequence for NEB (NM_004543.2,15224-15242).
caagctccagagttcgaat

SEQ ID NO: 118481 - DNA, 19 bp, Homo sapiens
  siRNA target sequence for NEB (NM_004543.2,15227-15245).
gctccagagttcgaatcta

SEQ ID NO: 118482 - DNA, 19 bp, Homo sapiens
  siRNA target sequence for NEB (NM_004543.2,15233-15251).
gagttcgaatctatacaaa

SEQ ID NO: 118483 - DNA, 19 bp, Homo sapiens
  siRNA target sequence for NEB (NM_004543.2,15266-15284).
cctgcccactggatataga

SEQ ID NO: 118484 - DNA, 19 bp, Homo sapiens
  siRNA target sequence for NEB (NM_004543.2,15326-15344).
ccgttacatgagcagttat

SEQ ID NO: 118485 - DNA, 19 bp, Homo sapiens
  siRNA target sequence for NEB (NM_004543.2,15327-15345).
cgttacatgagcagttatt

SEQ ID NO: 118486 - DNA, 19 bp, Homo sapiens
  siRNA target sequence for NEB (NM_004543.2,15374-15392).
caaggcatatgggtataca

SEQ ID NO: 118487 - DNA, 19 bp, Homo sapiens
  siRNA target sequence for NEB (NM_004543.2,15377-15395).
ggcatatgggtatacactt

SEQ ID NO: 118488 - DNA, 19 bp, Homo sapiens
  siRNA target sequence for NEB (NM_004543.2,15400-15418).
ccaaagatgttccatttgt

SEQ ID NO: 118489 - DNA, 19 bp, Homo sapiens
  siRNA target sequence for NEB (NM_004543.2,15422-15440).
cgtccggagagtcaacaat

SEQ ID NO: 118490 - DNA, 19 bp, Homo sapiens
  siRNA target sequence for NEB (NM_004543.2,15425-15443).
ccggagagtcaacaatgtt

SEQ ID NO: 118491 - DNA, 19 bp, Homo sapiens
  siRNA target sequence for NEB (NM_004543.2,15426-15444).
cggagagtcaacaatgtta

SEQ ID NO: 118492 - DNA, 19 bp, Homo sapiens
  siRNA target sequence for NEB (NM_004543.2,15480-15498).
ctgaaagacaagatccata

SEQ ID NO: 118493 - DNA, 19 bp, Homo sapiens
  siRNA target sequence for NEB (NM_004543.2,15546-15564).
gctgtcagtgagttgatct

SEQ ID NO: 118494 - DNA, 19 bp, Homo sapiens
  siRNA target sequence for NEB (NM_004543.2,15547-15565).
ctgtcagtgagttgatcta

SEQ ID NO: 118495 - DNA, 19 bp, Homo sapiens
  siRNA target sequence for NEB (NM_004543.2,15599-15617).
gatctctctgccatacaca

SEQ ID NO: 118496 - DNA, 19 bp, Homo sapiens
  siRNA target sequence for NEB (NM_004543.2,15610-15628).
catacacaccccaagtgat

SEQ ID NO: 118497 - DNA, 19 bp, Homo sapiens
  siRNA target sequence for NEB (NM_004543.2,15645-15663).
ggagacatcaccagtgata

SEQ ID NO: 118498 - DNA, 19 bp, Homo sapiens
  siRNA target sequence for NEB (NM_004543.2,15761-15779).
gtctaattacctatacact

SEQ ID NO: 118499 - DNA, 19 bp, Homo sapiens
  siRNA target sequence for NEB (NM_004543.2,15822-15840).
gacactccagaatacagaa

SEQ ID NO: 118500 - DNA, 19 bp, Homo sapiens
  siRNA target sequence for NEB (NM_004543.2,15905-15923).
gtcaatctttacttcagtt

SEQ ID NO: 118501 - DNA, 19 bp, Homo sapiens
  siRNA target sequence for NEB (NM_004543.2,15962-15980).
gaagcttcagagtcagtat

SEQ ID NO: 118502 - DNA, 19 bp, Homo sapiens
  siRNA target sequence for NEB (NM_004543.2,15971-15989).
gagtcagtatctgtatgtt

SEQ ID NO: 118503 - DNA, 19 bp, Homo sapiens
  siRNA target sequence for NEB (NM_004543.2,16172-16190).
ctggaatgccagtgatcta

SEQ ID NO: 118504 - DNA, 19 bp, Homo sapiens
  siRNA target sequence for NEB (NM_004543.2,16181-16199).
cagtgatctacgctacaaa

SEQ ID NO: 118505 - DNA, 19 bp, Homo sapiens
  siRNA target sequence for NEB (NM_004543.2,16183-16201).
gtgatctacgctacaaaga

SEQ ID NO: 118506 - DNA, 19 bp, Homo sapiens
  siRNA target sequence for NEB (NM_004543.2,16185-16203).
gatctacgctacaaagaaa

SEQ ID NO: 118507 - DNA, 19 bp, Homo sapiens
  siRNA target sequence for NEB (NM_004543.2,16188-16206).
ctacgctacaaagaaacat

SEQ ID NO: 118508 - DNA, 19 bp, Homo sapiens
  siRNA target sequence for NEB (NM_004543.2,16238-16256).
gaaagatgccctagacatt

SEQ ID NO: 118509 - DNA, 19 bp, Homo sapiens
  siRNA target sequence for NEB (NM_004543.2,16246-16264).
ccctagacattgtctatca

SEQ ID NO: 118510 - DNA, 19 bp, Homo sapiens
  siRNA target sequence for NEB (NM_004543.2,16247-16265).
cctagacattgtctatcat

SEQ ID NO: 118511 - DNA, 19 bp, Homo sapiens
  siRNA target sequence for NEB (NM_004543.2,16272-16290).
gtcacagatgacatcagta

SEQ ID NO: 118512 - DNA, 19 bp, Homo sapiens
  siRNA target sequence for NEB (NM_004543.2,16437-16455).
ggttgctatgcctatgata

SEQ ID NO: 118513 - DNA, 19 bp, Homo sapiens
  siRNA target sequence for NEB (NM_004543.2,16447-16465).
cctatgatacccctgattt

SEQ ID NO: 118514 - DNA, 19 bp, Homo sapiens
  siRNA target sequence for NEB (NM_004543.2,16496-16514).
cagcaagtataagtataaa

SEQ ID NO: 118515 - DNA, 19 bp, Homo sapiens
  siRNA target sequence for NEB (NM_004543.2,16535-16553).
gtcagatttcaagtatgtt

SEQ ID NO: 118516 - DNA, 19 bp, Homo sapiens
  siRNA target sequence for NEB (NM_004543.2,16554-16572).
gccgactctccgatcaata

SEQ ID NO: 118517 - DNA, 19 bp, Homo sapiens
  siRNA target sequence for NEB (NM_004543.2,16568-16586).
caataggcatttcaagtat

SEQ ID NO: 118518 - DNA, 19 bp, Homo sapiens
  siRNA target sequence for NEB (NM_004543.2,16629-16647).
gagcagcggaaagataaat

SEQ ID NO: 118519 - DNA, 19 bp, Homo sapiens
  siRNA target sequence for NEB (NM_004543.2,16745-16763).
ggacaaatttacctcaatt

SEQ ID NO: 118520 - DNA, 19 bp, Homo sapiens
  siRNA target sequence for NEB (NM_004543.2,16776-16794).
gaacacctgcgtactacaa

SEQ ID NO: 118521 - DNA, 19 bp, Homo sapiens
  siRNA target sequence for NEB (NM_004543.2,16782-16800).
ctgcgtactacaaaagtca

SEQ ID NO: 118522 - DNA, 19 bp, Homo sapiens
  siRNA target sequence for NEB (NM_004543.2,16806-16824).
caaatcagcgatatccttt

SEQ ID NO: 118523 - DNA, 19 bp, Homo sapiens
  siRNA target sequence for NEB (NM_004543.2,16813-16831).
gcgatatcctttataaatt

SEQ ID NO: 118524 - DNA, 19 bp, Homo sapiens
  siRNA target sequence for NEB (NM_004543.2,16890-16908).
ctgcatgtccgcaaggtta

SEQ ID NO: 118525 - DNA, 19 bp, Homo sapiens
  siRNA target sequence for NEB (NM_004543.2,16892-16910).
gcatgtccgcaaggttaaa

SEQ ID NO: 118526 - DNA, 19 bp, Homo sapiens
  siRNA target sequence for NEB (NM_004543.2,16898-16916).
ccgcaaggttaaagatgaa

SEQ ID NO: 118527 - DNA, 19 bp, Homo sapiens
  siRNA target sequence for NEB (NM_004543.2,16900-16918).
gcaaggttaaagatgaagt

SEQ ID NO: 118528 - DNA, 19 bp, Homo sapiens
  siRNA target sequence for NEB (NM_004543.2,16938-16956).
gaagtataccaaagaaata

SEQ ID NO: 118529 - DNA, 19 bp, Homo sapiens
  siRNA target sequence for NEB (NM_004543.2,16978-16996).
cagatgctgttcatatcaa

SEQ ID NO: 118530 - DNA, 19 bp, Homo sapiens
  siRNA target sequence for NEB (NM_004543.2,17002-17020).
ccaaggacgcctacaaagt

SEQ ID NO: 118531 - DNA, 19 bp, Homo sapiens
  siRNA target sequence for NEB (NM_004543.2,17026-17044).
ccaatctggactataagaa

SEQ ID NO: 118532 - DNA, 19 bp, Homo sapiens
  siRNA target sequence for NEB (NM_004543.2,17031-17049).
ctggactataagaaacagt

SEQ ID NO: 118533 - DNA, 19 bp, Homo sapiens
  siRNA target sequence for NEB (NM_004543.2,17124-17142).
cagcaaagcgattttgaat

SEQ ID NO: 118534 - DNA, 19 bp, Homo sapiens
  siRNA target sequence for NEB (NM_004543.2,17126-17144).
gcaaagcgattttgaatat

SEQ ID NO: 118535 - DNA, 19 bp, Homo sapiens
  siRNA target sequence for NEB (NM_004543.2,17127-17145).
caaagcgattttgaatata

SEQ ID NO: 118536 - DNA, 19 bp, Homo sapiens
  siRNA target sequence for NEB (NM_004543.2,17131-17149).
gcgattttgaatataagct

SEQ ID NO: 118537 - DNA, 19 bp, Homo sapiens
  siRNA target sequence for NEB (NM_004543.2,17205-17223).
gtgctcgccctcaggaata

SEQ ID NO: 118538 - DNA, 19 bp, Homo sapiens
  siRNA target sequence for NEB (NM_004543.2,17207-17225).
gctcgccctcaggaatact

SEQ ID NO: 118539 - DNA, 19 bp, Homo sapiens
  siRNA target sequence for NEB (NM_004543.2,17208-17226).
ctcgccctcaggaatactt

SEQ ID NO: 118540 - DNA, 19 bp, Homo sapiens
  siRNA target sequence for NEB (NM_004543.2,17210-17228).
cgccctcaggaatacttta

SEQ ID NO: 118541 - DNA, 19 bp, Homo sapiens
  siRNA target sequence for NEB (NM_004543.2,17212-17230).
ccctcaggaatactttaat

SEQ ID NO: 118542 - DNA, 19 bp, Homo sapiens
  siRNA target sequence for NEB (NM_004543.2,17213-17231).
cctcaggaatactttaata

SEQ ID NO: 118543 - DNA, 19 bp, Homo sapiens
  siRNA target sequence for NEB (NM_004543.2,17219-17237).
gaatactttaatagaaagt

SEQ ID NO: 118544 - DNA, 19 bp, Homo sapiens
  siRNA target sequence for NEB (NM_004543.2,17448-17466).
gtcagtgatacaaattaca

SEQ ID NO: 118545 - DNA, 19 bp, Homo sapiens
  siRNA target sequence for NEB (NM_004543.2,17563-17581).
gtgatgtcgcttacagaaa

SEQ ID NO: 118546 - DNA, 19 bp, Homo sapiens
  siRNA target sequence for NEB (NM_004543.2,17720-17738).
gctcggtcgcccagacata

SEQ ID NO: 118547 - DNA, 19 bp, Homo sapiens
  siRNA target sequence for NEB (NM_004543.2,17723-17741).
cggtcgcccagacatagaa

SEQ ID NO: 118548 - DNA, 19 bp, Homo sapiens
  siRNA target sequence for NEB (NM_004543.2,17724-17742).
ggtcgcccagacatagaaa

SEQ ID NO: 118549 - DNA, 19 bp, Homo sapiens
  siRNA target sequence for NEB (NM_004543.2,17783-17801).
ccgagaaaatttcgataaa

SEQ ID NO: 118550 - DNA, 19 bp, Homo sapiens
  siRNA target sequence for NEB (NM_004543.2,17785-17803).
gagaaaatttcgataaaga

SEQ ID NO: 118551 - DNA, 19 bp, Homo sapiens
  siRNA target sequence for NEB (NM_004543.2,17939-17957).
ggagtctctgatcatgaat

SEQ ID NO: 118552 - DNA, 19 bp, Homo sapiens
  siRNA target sequence for NEB (NM_004543.2,17942-17960).
gtctctgatcatgaatcat

SEQ ID NO: 118553 - DNA, 19 bp, Homo sapiens
  siRNA target sequence for NEB (NM_004543.2,17974-17992).
gccaacttgccagttctta

SEQ ID NO: 118554 - DNA, 19 bp, Homo sapiens
  siRNA target sequence for NEB (NM_004543.2,18032-18050).
ccacaccatacccgataat

SEQ ID NO: 118555 - DNA, 19 bp, Homo sapiens
  siRNA target sequence for NEB (NM_004543.2,18053-18071).
ggagcagcttcacctaaaa

SEQ ID NO: 118556 - DNA, 19 bp, Homo sapiens
  siRNA target sequence for NEB (NM_004543.2,18087-18105).
cagagtatagtgaaataca

SEQ ID NO: 118557 - DNA, 19 bp, Homo sapiens
  siRNA target sequence for NEB (NM_004543.2,18265-18283).
cgccagctttgttacatgt

SEQ ID NO: 118558 - DNA, 19 bp, Homo sapiens
  siRNA target sequence for NEB (NM_004543.2,18270-18288).
gctttgttacatgtcaaat

SEQ ID NO: 118559 - DNA, 19 bp, Homo sapiens
  siRNA target sequence for NEB (NM_004543.2,18275-18293).
gttacatgtcaaatatgca

SEQ ID NO: 118560 - DNA, 19 bp, Homo sapiens
  siRNA target sequence for NEB (NM_004543.2,18393-18411).
gcaaagaatgccactcaaa

SEQ ID NO: 118561 - DNA, 19 bp, Homo sapiens
  siRNA target sequence for NEB (NM_004543.2,18394-18412).
caaagaatgccactcaaat

SEQ ID NO: 118562 - DNA, 19 bp, Homo sapiens
  siRNA target sequence for NEB (NM_004543.2,18403-18421).
ccactcaaatcctcaatga

SEQ ID NO: 118563 - DNA, 19 bp, Homo sapiens
  siRNA target sequence for NEB (NM_004543.2,18482-18500).
caatgaaactccggatttt

SEQ ID NO: 118564 - DNA, 19 bp, Homo sapiens
  siRNA target sequence for NEB (NM_004543.2,18509-18527).
caggaatgctactgatatt

SEQ ID NO: 118565 - DNA, 19 bp, Homo sapiens
  siRNA target sequence for NEB (NM_004543.2,18528-18546).
gccagtcagattaagtata

SEQ ID NO: 118566 - DNA, 19 bp, Homo sapiens
  siRNA target sequence for NEB (NM_004543.2,18563-18581).
ggagaaagccaatttcact

SEQ ID NO: 118567 - DNA, 19 bp, Homo sapiens
  siRNA target sequence for NEB (NM_004543.2,18614-18632).
ccaacaagtcaagaatctt

SEQ ID NO: 118568 - DNA, 19 bp, Homo sapiens
  siRNA target sequence for NEB (NM_004543.2,18615-18633).
caacaagtcaagaatcttt

SEQ ID NO: 118569 - DNA, 19 bp, Homo sapiens
  siRNA target sequence for NEB (NM_004543.2,18663-18681).
gagaagtccatgtcgtatt

SEQ ID NO: 118570 - DNA, 19 bp, Homo sapiens
  siRNA target sequence for NEB (NM_004543.2,18665-18683).
gaagtccatgtcgtattat

SEQ ID NO: 118571 - DNA, 19 bp, Homo sapiens
  siRNA target sequence for NEB (NM_004543.2,18676-18694).
cgtattatgagactgtttt

SEQ ID NO: 118572 - DNA, 19 bp, Homo sapiens
  siRNA target sequence for NEB (NM_004543.2,18720-18738).
cgggagaaccaaaagaact

SEQ ID NO: 118573 - DNA, 19 bp, Homo sapiens
  siRNA target sequence for NEB (NM_004543.2,18845-18863).
cagctcggttttatataaa

SEQ ID NO: 118574 - DNA, 19 bp, Homo sapiens
  siRNA target sequence for NEB (NM_004543.2,18892-18910).
gaaagacacctgagatgat

SEQ ID NO: 118575 - DNA, 19 bp, Homo sapiens
  siRNA target sequence for NEB (NM_004543.2,18935-18953).
cattagctcggtgaagtat

SEQ ID NO: 118576 - DNA, 19 bp, Homo sapiens
  siRNA target sequence for NEB (NM_004543.2,18941-18959).
ctcggtgaagtataaggaa

SEQ ID NO: 118577 - DNA, 19 bp, Homo sapiens
  siRNA target sequence for NEB (NM_004543.2,19422-19440).
gagaacctggggaaagcaa

SEQ ID NO: 118578 - DNA, 19 bp, Homo sapiens
  siRNA target sequence for NEB (NM_004543.2,19566-19584).
gctaagcgcaaccaagaaa

SEQ ID NO: 118579 - DNA, 19 bp, Homo sapiens
  siRNA target sequence for NEB (NM_004543.2,19567-19585).
ctaagcgcaaccaagaaaa

SEQ ID NO: 118580 - DNA, 19 bp, Homo sapiens
  siRNA target sequence for NEB (NM_004543.2,19586-19604).
cattagctcggttctttat

SEQ ID NO: 118581 - DNA, 19 bp, Homo sapiens
  siRNA target sequence for NEB (NM_004543.2,19612-19630).
gtttccggaaacaaataca

SEQ ID NO: 118582 - DNA, 19 bp, Homo sapiens
  siRNA target sequence for NEB (NM_004543.2,19632-19650).
ggcaaagctgcctatgtat

SEQ ID NO: 118583 - DNA, 19 bp, Homo sapiens
  siRNA target sequence for NEB (NM_004543.2,19694-19712).
catctcaacggtgaaatat

SEQ ID NO: 118584 - DNA, 19 bp, Homo sapiens
  siRNA target sequence for NEB (NM_004543.2,19697-19715).
ctcaacggtgaaatatcat

SEQ ID NO: 118585 - DNA, 19 bp, Homo sapiens
  siRNA target sequence for NEB (NM_004543.2,19765-19783).
ctatcactgaacgagtaaa

SEQ ID NO: 118586 - DNA, 19 bp, Homo sapiens
  siRNA target sequence for NEB (NM_004543.2,19808-19826).
cattaactaccgaggtatt

SEQ ID NO: 118587 - DNA, 19 bp, Homo sapiens
  siRNA target sequence for NEB (NM_004543.2,19877-19895).
gactattacaggtttacgt

SEQ ID NO: 118588 - DNA, 19 bp, Homo sapiens
  siRNA target sequence for NEB (NM_004543.2,19953-19971).
cagtcccgaagcttacaca

SEQ ID NO: 118589 - DNA, 19 bp, Homo sapiens
  siRNA target sequence for NEB (NM_004543.2,19957-19975).
cccgaagcttacacatgat

SEQ ID NO: 118590 - DNA, 19 bp, Homo sapiens
  siRNA target sequence for NEB (NM_004543.2,20096-20114).
cagcgacgggggtgtcttt

SEQ ID NO: 118591 - DNA, 19 bp, Homo sapiens
  siRNA target sequence for NEB (NM_004543.2,20116-20134).
cagtctcaacagcttacaa

SEQ ID NO: 118592 - DNA, 19 bp, Homo sapiens
  siRNA target sequence for NEB (NM_004543.2,20120-20138).
ctcaacagcttacaaacat

SEQ ID NO: 118593 - DNA, 19 bp, Homo sapiens
  siRNA target sequence for NEB (NM_004543.2,20156-20174).
cccacaacaacgatcatct

SEQ ID NO: 118594 - DNA, 19 bp, Homo sapiens
  siRNA target sequence for NEB (NM_004543.2,20157-20175).
ccacaacaacgatcatctt

SEQ ID NO: 118595 - DNA, 19 bp, Homo sapiens
  siRNA target sequence for NEB (NM_004543.2,20210-20228).
cccatctcatccatctact

SEQ ID NO: 118596 - DNA, 19 bp, Homo sapiens
  siRNA target sequence for NEB (NM_004543.2,20224-20242).
ctactgctggaaaaatctt

SEQ ID NO: 118597 - DNA, 19 bp, Homo sapiens
  siRNA target sequence for NEB (NM_004543.2,20244-20262).
cgtgccatgtatgactata

SEQ ID NO: 118598 - DNA, 19 bp, Homo sapiens
  siRNA target sequence for NEB (NM_004543.2,20294-20312).
ggatggagatgccatcata

SEQ ID NO: 118599 - DNA, 19 bp, Homo sapiens
  siRNA target sequence for NEB (NM_004543.2,20387-20405).
caactacgttgaagctatt

SEQ ID NO: 118600 - DNA, 19 bp, Homo sapiens
  siRNA target sequence for NEBL (NM_006393.1,470-488).
gaagaccaggtcttctata

SEQ ID NO: 118601 - DNA, 19 bp, Homo sapiens
  siRNA target sequence for NEBL (NM_006393.1,481-499).
cttctataagcctgttatt

SEQ ID NO: 118602 - DNA, 19 bp, Homo sapiens
  siRNA target sequence for NEBL (NM_006393.1,484-502).
ctataagcctgttattgaa

SEQ ID NO: 118603 - DNA, 19 bp, Homo sapiens
  siRNA target sequence for NEBL (NM_006393.1,490-508).
gcctgttattgaagactta

SEQ ID NO: 118604 - DNA, 19 bp, Homo sapiens
  siRNA target sequence for NEBL (NM_006393.1,491-509).
cctgttattgaagacttaa

SEQ ID NO: 118605 - DNA, 19 bp, Homo sapiens
  siRNA target sequence for NEBL (NM_006393.1,500-518).
gaagacttaagcatggaat

SEQ ID NO: 118606 - DNA, 19 bp, Homo sapiens
  siRNA target sequence for NEBL (NM_006393.1,546-564).
gcgatatccgttataaaga

SEQ ID NO: 118607 - DNA, 19 bp, Homo sapiens
  siRNA target sequence for NEBL (NM_006393.1,547-565).
cgatatccgttataaagaa

SEQ ID NO: 118608 - DNA, 19 bp, Homo sapiens
  siRNA target sequence for NEBL (NM_006393.1,553-571).
ccgttataaagaagagttt

SEQ ID NO: 118609 - DNA, 19 bp, Homo sapiens
  siRNA target sequence for NEBL (NM_006393.1,584-602).
gataagtgtacatttgtga

SEQ ID NO: 118610 - DNA, 19 bp, Homo sapiens
  siRNA target sequence for NEBL (NM_006393.1,601-619).
gactgacagtcctatgcta

SEQ ID NO: 118611 - DNA, 19 bp, Homo sapiens
  siRNA target sequence for NEBL (NM_006393.1,607-625).
cagtcctatgctaaaccat

SEQ ID NO: 118612 - DNA, 19 bp, Homo sapiens
  siRNA target sequence for NEBL (NM_006393.1,611-629).
cctatgctaaaccatgtaa

SEQ ID NO: 118613 - DNA, 19 bp, Homo sapiens
  siRNA target sequence for NEBL (NM_006393.1,612-630).
ctatgctaaaccatgtaaa

SEQ ID NO: 118614 - DNA, 19 bp, Homo sapiens
  siRNA target sequence for NEBL (NM_006393.1,664-682).
caaaggcaccattaaagct

SEQ ID NO: 118615 - DNA, 19 bp, Homo sapiens
  siRNA target sequence for NEBL (NM_006393.1,683-701).
gacctttctaattctcttt

SEQ ID NO: 118616 - DNA, 19 bp, Homo sapiens
  siRNA target sequence for NEBL (NM_006393.1,706-724).
gcggatgccagccacaatt

SEQ ID NO: 118617 - DNA, 19 bp, Homo sapiens
  siRNA target sequence for NEBL (NM_006393.1,718-736).
cacaattgacagtgttttt

SEQ ID NO: 118618 - DNA, 19 bp, Homo sapiens
  siRNA target sequence for NEBL (NM_006393.1,731-749).
gtttttgcaggagaagtta

SEQ ID NO: 118619 - DNA, 19 bp, Homo sapiens
  siRNA target sequence for NEBL (NM_006393.1,826-844).
ggagccccctgaggttaaa

SEQ ID NO: 118620 - DNA, 19 bp, Homo sapiens
  siRNA target sequence for NEBL (NM_006393.1,859-877).
caataaacaccagagtaat

SEQ ID NO: 118621 - DNA, 19 bp, Homo sapiens
  siRNA target sequence for NEBL (NM_006393.1,910-928).
cacgtacagtgcagaactt

SEQ ID NO: 118622 - DNA, 19 bp, Homo sapiens
  siRNA target sequence for NEBL (NM_006393.1,912-930).
cgtacagtgcagaacttga

SEQ ID NO: 118623 - DNA, 19 bp, Homo sapiens
  siRNA target sequence for NEBL (NM_006393.1,955-973).
ccagatctctaagatcata

SEQ ID NO: 118624 - DNA, 19 bp, Homo sapiens
  siRNA target sequence for NEBL (NM_006393.1,956-974).
cagatctctaagatcataa

SEQ ID NO: 118625 - DNA, 19 bp, Homo sapiens
  siRNA target sequence for NEBL (NM_006393.1,995-1013).
ggacaaggaataatgaata

SEQ ID NO: 118626 - DNA, 19 bp, Homo sapiens
  siRNA target sequence for NEBL (NM_006393.1,1016-1034).
gagcccgctgtaattggaa

SEQ ID NO: 118627 - DNA, 19 bp, Homo sapiens
  siRNA target sequence for NEBL (NM_006393.1,1053-1071).
ccgtggaagcttctaaact

SEQ ID NO: 118628 - DNA, 19 bp, Homo sapiens
  siRNA target sequence for NEBL (NM_006393.1,1054-1072).
cgtggaagcttctaaactt

SEQ ID NO: 118629 - DNA, 19 bp, Homo sapiens
  siRNA target sequence for NEBL (NM_006393.1,1055-1073).
gtggaagcttctaaacttt

SEQ ID NO: 118630 - DNA, 19 bp, Homo sapiens
  siRNA target sequence for NEBL (NM_006393.1,1057-1075).
ggaagcttctaaactttct

SEQ ID NO: 118631 - DNA, 19 bp, Homo sapiens
  siRNA target sequence for NEBL (NM_006393.1,1065-1083).
ctaaactttctagtcaaat

SEQ ID NO: 118632 - DNA, 19 bp, Homo sapiens
  siRNA target sequence for NEBL (NM_006393.1,1182-1200).
cactggcgagcaatgtgaa

SEQ ID NO: 118633 - DNA, 19 bp, Homo sapiens
  siRNA target sequence for NEBL (NM_006393.1,1187-1205).
gcgagcaatgtgaagtaca

SEQ ID NO: 118634 - DNA, 19 bp, Homo sapiens
  siRNA target sequence for NEBL (NM_006393.1,1235-1253).
gtttcagatctcccaaatt

SEQ ID NO: 118635 - DNA, 19 bp, Homo sapiens
  siRNA target sequence for NEBL (NM_006393.1,1239-1257).
cagatctcccaaatttgtt

SEQ ID NO: 118636 - DNA, 19 bp, Homo sapiens
  siRNA target sequence for NEBL (NM_006393.1,1241-1259).
gatctcccaaatttgttgt

SEQ ID NO: 118637 - DNA, 19 bp, Homo sapiens
  siRNA target sequence for NEBL (NM_006393.1,1299-1317).
gccgagaatataaaaagct

SEQ ID NO: 118638 - DNA, 19 bp, Homo sapiens
  siRNA target sequence for NEBL (NM_006393.1,1363-1381).
ggaacatctgcaccataaa

SEQ ID NO: 118639 - DNA, 19 bp, Homo sapiens
  siRNA target sequence for NEBL (NM_006393.1,1397-1415).
caaagtcaggtgaaatata

SEQ ID NO: 118640 - DNA, 19 bp, Homo sapiens
  siRNA target sequence for NEBL (NM_006393.1,1440-1458).
gaaagccaatgcttgaatt

SEQ ID NO: 118641 - DNA, 19 bp, Homo sapiens
  siRNA target sequence for NEBL (NM_006393.1,1444-1462).
gccaatgcttgaatttgtt

SEQ ID NO: 118642 - DNA, 19 bp, Homo sapiens
  siRNA target sequence for NEBL (NM_006393.1,1446-1464).
caatgcttgaatttgttga

SEQ ID NO: 118643 - DNA, 19 bp, Homo sapiens
  siRNA target sequence for NEBL (NM_006393.1,1470-1488).
catcatatcaagcttcaaa

SEQ ID NO: 118644 - DNA, 19 bp, Homo sapiens
  siRNA target sequence for NEBL (NM_006393.1,1505-1523).
caaagtgaaaaagtttaca

SEQ ID NO: 118645 - DNA, 19 bp, Homo sapiens
  siRNA target sequence for NEBL (NM_006393.1,1554-1572).
ggtcatcactggatttaga

SEQ ID NO: 118646 - DNA, 19 bp, Homo sapiens
  siRNA target sequence for NEBL (NM_006393.1,1683-1701).
cagaagttcttgatatcca

SEQ ID NO: 118647 - DNA, 19 bp, Homo sapiens
  siRNA target sequence for NEBL (NM_006393.1,1751-1769).
gacctggagtcaataatta

SEQ ID NO: 118648 - DNA, 19 bp, Homo sapiens
  siRNA target sequence for NEBL (NM_006393.1,1790-1808).
ggcactgacacccttgaaa

SEQ ID NO: 118649 - DNA, 19 bp, Homo sapiens
  siRNA target sequence for NEBL (NM_006393.1,1791-1809).
gcactgacacccttgaaat

SEQ ID NO: 118650 - DNA, 19 bp, Homo sapiens
  siRNA target sequence for NEBL (NM_006393.1,1838-1856).
gcgagtgagaaagactata

SEQ ID NO: 118651 - DNA, 19 bp, Homo sapiens
  siRNA target sequence for NEBL (NM_006393.1,1900-1918).
gagcacagacactcttgat

SEQ ID NO: 118652 - DNA, 19 bp, Homo sapiens
  siRNA target sequence for NEBL (NM_006393.1,1945-1963).
gatggccagccagaaacaa

SEQ ID NO: 118653 - DNA, 19 bp, Homo sapiens
  siRNA target sequence for NEBL (NM_006393.1,1950-1968).
ccagccagaaacaatacaa

SEQ ID NO: 118654 - DNA, 19 bp, Homo sapiens
  siRNA target sequence for NEBL (NM_006393.1,2013-2031).
gcatggatatcccagatat

SEQ ID NO: 118655 - DNA, 19 bp, Homo sapiens
  siRNA target sequence for NEBL (NM_006393.1,2039-2057).
gccaagaggacatctgaaa

SEQ ID NO: 118656 - DNA, 19 bp, Homo sapiens
  siRNA target sequence for NEBL (NM_006393.1,2044-2062).
gaggacatctgaaatctat

SEQ ID NO: 118657 - DNA, 19 bp, Homo sapiens
  siRNA target sequence for NEBL (NM_006393.1,2064-2082).
gccagagaaagtataaaga

SEQ ID NO: 118658 - DNA, 19 bp, Homo sapiens
  siRNA target sequence for NEBL (NM_006393.1,2092-2110).
gaagatgctttctaactat

SEQ ID NO: 118659 - DNA, 19 bp, Homo sapiens
  siRNA target sequence for NEBL (NM_006393.1,2169-2187).
gtgcggtattttataagaa

SEQ ID NO: 118660 - DNA, 19 bp, Homo sapiens
  siRNA target sequence for NEBL (NM_006393.1,2230-2248).
cgaacgagtgaagaaaaat

SEQ ID NO: 118661 - DNA, 19 bp, Homo sapiens
  siRNA target sequence for NEBL (NM_006393.1,2309-2327).
gatcctccagaactaaaga

SEQ ID NO: 118662 - DNA, 19 bp, Homo sapiens
  siRNA target sequence for NEBL (NM_006393.1,2315-2333).
ccagaactaaagagagtta

SEQ ID NO: 118663 - DNA, 19 bp, Homo sapiens
  siRNA target sequence for NEBL (NM_006393.1,2316-2334).
cagaactaaagagagttaa

SEQ ID NO: 118664 - DNA, 19 bp, Homo sapiens
  siRNA target sequence for NEBL (NM_006393.1,2353-2371).
cagcaatctccagtataaa

SEQ ID NO: 118665 - DNA, 19 bp, Homo sapiens
  siRNA target sequence for NEBL (NM_006393.1,2355-2373).
gcaatctccagtataaaga

SEQ ID NO: 118666 - DNA, 19 bp, Homo sapiens
  siRNA target sequence for NEBL (NM_006393.1,2440-2458).
gcagctgagtgcggtaaaa

SEQ ID NO: 118667 - DNA, 19 bp, Homo sapiens
  siRNA target sequence for NEBL (NM_006393.1,2441-2459).
cagctgagtgcggtaaaat

SEQ ID NO: 118668 - DNA, 19 bp, Homo sapiens
  siRNA target sequence for NEBL (NM_006393.1,2443-2461).
gctgagtgcggtaaaatat

SEQ ID NO: 118669 - DNA, 19 bp, Homo sapiens
  siRNA target sequence for NEBL (NM_006393.1,2474-2492).
caacggggaactgcaattt

SEQ ID NO: 118670 - DNA, 19 bp, Homo sapiens
  siRNA target sequence for NEBL (NM_006393.1,2478-2496).
ggggaactgcaatttctga

SEQ ID NO: 118671 - DNA, 19 bp, Homo sapiens
  siRNA target sequence for NEBL (NM_006393.1,2566-2584).
gggaagagctaccacttta

SEQ ID NO: 118672 - DNA, 19 bp, Homo sapiens
  siRNA target sequence for NEBL (NM_006393.1,2571-2589).
gagctaccactttaagtgt

SEQ ID NO: 118673 - DNA, 19 bp, Homo sapiens
  siRNA target sequence for NEBL (NM_006393.1,2573-2591).
gctaccactttaagtgtaa

SEQ ID NO: 118674 - DNA, 19 bp, Homo sapiens
  siRNA target sequence for NEBL (NM_006393.1,2672-2690).
ggtagaccaagtctgattt

SEQ ID NO: 118675 - DNA, 19 bp, Homo sapiens
  siRNA target sequence for NEBL (NM_006393.1,2673-2691).
gtagaccaagtctgatttt

SEQ ID NO: 118676 - DNA, 19 bp, Homo sapiens
  siRNA target sequence for NEBL (NM_006393.1,2676-2694).
gaccaagtctgattttaga

SEQ ID NO: 118677 - DNA, 19 bp, Homo sapiens
  siRNA target sequence for NEBL (NM_006393.1,2743-2761).
ggtaaaataccatgaagat

SEQ ID NO: 118678 - DNA, 19 bp, Homo sapiens
  siRNA target sequence for NEBL (NM_006393.1,2895-2913).
ggagacctggaatcattgt

SEQ ID NO: 118679 - DNA, 19 bp, Homo sapiens
  siRNA target sequence for NEBL (NM_006393.1,2896-2914).
gagacctggaatcattgtt

SEQ ID NO: 118680 - DNA, 19 bp, Homo sapiens
  siRNA target sequence for NEBL (NM_006393.1,2898-2916).
gacctggaatcattgttga

SEQ ID NO: 118681 - DNA, 19 bp, Homo sapiens
  siRNA target sequence for NEBL (NM_006393.1,3008-3026).
gaaaaggcgagtcactata

SEQ ID NO: 118682 - DNA, 19 bp, Homo sapiens
  siRNA target sequence for NEBL (NM_006393.1,3077-3095).
ggagacgacaggtcagaaa

SEQ ID NO: 118683 - DNA, 19 bp, Homo sapiens
  siRNA target sequence for NEBL (NM_006393.1,3090-3108).
cagaaatctccgagattta

SEQ ID NO: 118684 - DNA, 19 bp, Homo sapiens
  siRNA target sequence for NEBL (NM_006393.1,3100-3118).
cgagatttaccctagcttt

SEQ ID NO: 118685 - DNA, 19 bp, Homo sapiens
  siRNA target sequence for NEBL (NM_006393.1,3101-3119).
gagatttaccctagctttt

SEQ ID NO: 118686 - DNA, 19 bp, Homo sapiens
  siRNA target sequence for NEBL (NM_006393.1,3103-3121).
gatttaccctagcttttca

SEQ ID NO: 118687 - DNA, 19 bp, Homo sapiens
  siRNA target sequence for NEBL (NM_006393.1,3275-3293).
cgagccatgtacgattaca

SEQ ID NO: 118688 - DNA, 19 bp, Homo sapiens
  siRNA target sequence for NEBL (NM_006393.1,3305-3323).
gaagacgaggtctccttta

SEQ ID NO: 118689 - DNA, 19 bp, Homo sapiens
  siRNA target sequence for NEBL (NM_006393.1,3413-3431).
ccagcgaattacattgagt

SEQ ID NO: 118690 - DNA, 19 bp, Homo sapiens
  siRNA target sequence for NEBL (NM_006393.1,3414-3432).
cagcgaattacattgagtt

SEQ ID NO: 118691 - DNA, 19 bp, Homo sapiens
  siRNA target sequence for PARVA (NM_018222.2,154-172).
cgtcccgcaagaaagatga

SEQ ID NO: 118692 - DNA, 19 bp, Homo sapiens
  siRNA target sequence for PARVA (NM_018222.2,155-173).
gtcccgcaagaaagatgat

SEQ ID NO: 118693 - DNA, 19 bp, Homo sapiens
  siRNA target sequence for PARVA (NM_018222.2,160-178).
gcaagaaagatgattcctt

SEQ ID NO: 118694 - DNA, 19 bp, Homo sapiens
  siRNA target sequence for PARVA (NM_018222.2,603-621).
cctcccaggagcatcaagt

SEQ ID NO: 118695 - DNA, 19 bp, Homo sapiens
  siRNA target sequence for PARVA (NM_018222.2,689-707).
gtatttccgcgcaccaatt

SEQ ID NO: 118696 - DNA, 19 bp, Homo sapiens
  siRNA target sequence for PARVA (NM_018222.2,767-785).
ccagtctcggcaaatccaa

SEQ ID NO: 118697 - DNA, 19 bp, Homo sapiens
  siRNA target sequence for PARVA (NM_018222.2,1039-1057).
ccccggacagctttgaaca

SEQ ID NO: 118698 - DNA, 19 bp, Homo sapiens
  siRNA target sequence for PARVA (NM_018222.2,1042-1060).
cggacagctttgaacagaa

SEQ ID NO: 118699 - DNA, 19 bp, Homo sapiens
  siRNA target sequence for PARVA (NM_018222.2,1095-1113).
caagatggagggttggaaa

SEQ ID NO: 118700 - DNA, 19 bp, Homo sapiens
  siRNA target sequence for PARVA (NM_018222.2,1159-1177).
ctacactacgagtgttgta

SEQ ID NO: 118701 - DNA, 19 bp, Homo sapiens
  siRNA target sequence for PARVA (NM_018222.2,1162-1180).
cactacgagtgttgtacaa

SEQ ID NO: 118702 - DNA, 19 bp, Homo sapiens
  siRNA target sequence for PARVB (NM_013327.2,395-413).
cagggtgcaagctgaatgt

SEQ ID NO: 118703 - DNA, 19 bp, Homo sapiens
  siRNA target sequence for PARVB (NM_013327.2,420-438).
ggtgacacagtccgaaata

SEQ ID NO: 118704 - DNA, 19 bp, Homo sapiens
  siRNA target sequence for PARVB (NM_013327.2,462-480).
ggtgctggaagcagtacat

SEQ ID NO: 118705 - DNA, 19 bp, Homo sapiens
  siRNA target sequence for PARVB (NM_013327.2,512-530).
ggtggagcgtggactcaat

SEQ ID NO: 118706 - DNA, 19 bp, Homo sapiens
  siRNA target sequence for PARVB (NM_013327.2,513-531).
gtggagcgtggactcaatt

SEQ ID NO: 118707 - DNA, 19 bp, Homo sapiens
  siRNA target sequence for PARVB (NM_013327.2,515-533).
ggagcgtggactcaattca

SEQ ID NO: 118708 - DNA, 19 bp, Homo sapiens
  siRNA target sequence for PARVB (NM_013327.2,679-697).
gaggagctgaccacaacta

SEQ ID NO: 118709 - DNA, 19 bp, Homo sapiens
  siRNA target sequence for PARVB (NM_013327.2,780-798).
gaagtctctcatcactttt

SEQ ID NO: 118710 - DNA, 19 bp, Homo sapiens
  siRNA target sequence for PARVB (NM_013327.2,949-967).
cagaaggtccacaatgtgt

SEQ ID NO: 118711 - DNA, 19 bp, Homo sapiens
  siRNA target sequence for PARVB (NM_013327.2,1019-1037).
gtcctgaagacgtggttaa

SEQ ID NO: 118712 - DNA, 19 bp, Homo sapiens
  siRNA target sequence for PARVB (NM_013327.2,1022-1040).
ctgaagacgtggttaactt

SEQ ID NO: 118713 - DNA, 19 bp, Homo sapiens
  siRNA target sequence for PARVB (NM_013327.2,1033-1051).
gttaacttggacctcaaat

SEQ ID NO: 118714 - DNA, 19 bp, Homo sapiens
  siRNA target sequence for PARVB (NM_013327.2,1052-1070).
ccaccctgagggttcttta

SEQ ID NO: 118715 - DNA, 19 bp, Homo sapiens
  siRNA target sequence for PARVG (NM_022141.3,519-537).
gaaggaccccaaatttgaa

SEQ ID NO: 118716 - DNA, 19 bp, Homo sapiens
  siRNA target sequence for PARVG (NM_022141.3,943-961).
gtggaacagctcactgaat

SEQ ID NO: 118717 - DNA, 19 bp, Homo sapiens
  siRNA target sequence for PARVG (NM_022141.3,946-964).
gaacagctcactgaataca

SEQ ID NO: 118718 - DNA, 19 bp, Homo sapiens
  siRNA target sequence for PARVG (NM_022141.3,983-1001).
ctccaaaggacgtctttga

SEQ ID NO: 118719 - DNA, 19 bp, Homo sapiens
  siRNA target sequence for PARVG (NM_022141.3,990-1008).
ggacgtctttgatgaatta

SEQ ID NO: 118720 - DNA, 19 bp, Homo sapiens
  siRNA target sequence for PARVG (NM_022141.3,991-1009).
gacgtctttgatgaattat

SEQ ID NO: 118721 - DNA, 19 bp, Homo sapiens
  siRNA target sequence for PARVG (NM_022141.3,1048-1066).
gccatcgtgaactttgtca

SEQ ID NO: 118722 - DNA, 19 bp, Homo sapiens
  siRNA target sequence for PARVG (NM_022141.3,1123-1141).
gatggggtcatcttactct

SEQ ID NO: 118723 - DNA, 19 bp, Homo sapiens
  siRNA target sequence for PFN2 (NM_002628.2,24-42).
ggcagagctacgtggataa

SEQ ID NO: 118724 - DNA, 19 bp, Homo sapiens
  siRNA target sequence for PFN2 (NM_002628.2,84-102).
gctactgcgacgccaaata

SEQ ID NO: 118725 - DNA, 19 bp, Homo sapiens
  siRNA target sequence for PFN2 (NM_002628.2,125-143).
ggcgtctttcagagcatta

SEQ ID NO: 118726 - DNA, 19 bp, Homo sapiens
  siRNA target sequence for PFN2 (NM_002628.2,136-154).
gagcattacgccaatagaa

SEQ ID NO: 118727 - DNA, 19 bp, Homo sapiens
  siRNA target sequence for PFN2 (NM_002628.2,144-162).
cgccaatagaaatagatat

SEQ ID NO: 118728 - DNA, 19 bp, Homo sapiens
  siRNA target sequence for PFN2 (NM_002628.2,171-189).
gaaaagaccgggaaggttt

SEQ ID NO: 118729 - DNA, 19 bp, Homo sapiens
  siRNA target sequence for PFN2 (NM_002628.2,176-194).
gaccgggaaggtttcttta

SEQ ID NO: 118730 - DNA, 19 bp, Homo sapiens
  siRNA target sequence for PFN2 (NM_002628.2,179-197).
cgggaaggtttctttacca

SEQ ID NO: 118731 - DNA, 19 bp, Homo sapiens
  siRNA target sequence for PFN2 (NM_002628.2,180-198).
gggaaggtttctttaccaa

SEQ ID NO: 118732 - DNA, 19 bp, Homo sapiens
  siRNA target sequence for PFN2 (NM_002628.2,209-227).
cttggcgcgaagaaatgct

SEQ ID NO: 118733 - DNA, 19 bp, Homo sapiens
  siRNA target sequence for PFN2 (NM_002628.2,226-244).
ctcagtgatcagagatagt

SEQ ID NO: 118734 - DNA, 19 bp, Homo sapiens
  siRNA target sequence for PFN2 (NM_002628.2,271-289).
ggacatccggacaaagagt

SEQ ID NO: 118735 - DNA, 19 bp, Homo sapiens
  siRNA target sequence for PFN2 (NM_002628.2,293-311).
ggtggggagccaacataca

SEQ ID NO: 118736 - DNA, 19 bp, Homo sapiens
  siRNA target sequence for PFN2 (NM_002628.2,297-315).
gggagccaacatacaatgt

SEQ ID NO: 118737 - DNA, 19 bp, Homo sapiens
  siRNA target sequence for PFN2 (NM_002628.2,329-347).
gctggtagagcattggtta

SEQ ID NO: 118738 - DNA, 19 bp, Homo sapiens
  siRNA target sequence for PFN2 (NM_002628.2,368-386).
gtccacggaggcacactta

SEQ ID NO: 118739 - DNA, 19 bp, Homo sapiens
  siRNA target sequence for PFN2 (NM_002628.2,371-389).
cacggaggcacacttaaca

SEQ ID NO: 118740 - DNA, 19 bp, Homo sapiens
  siRNA target sequence for PFN2 (NM_002628.2,374-392).
ggaggcacacttaacaaga

SEQ ID NO: 118741 - DNA, 19 bp, Homo sapiens
  siRNA target sequence for PFN2 (NM_002628.2,395-413).
gcatatgaactcgctttat

SEQ ID NO: 118742 - DNA, 19 bp, Homo sapiens
  siRNA target sequence for PFN2 (NM_002628.2,396-414).
catatgaactcgctttata

SEQ ID NO: 118743 - DNA, 19 bp, Homo sapiens
  siRNA target sequence for PFN2 (NM_053024.1,372-390).
catggaggcggattgaata

SEQ ID NO: 118744 - DNA, 19 bp, Homo sapiens
  siRNA target sequence for PFN2 (NM_053024.1,375-393).
ggaggcggattgaataaga

SEQ ID NO: 118745 - DNA, 19 bp, Homo sapiens
  siRNA target sequence for PFN2 (NM_053024.1,376-394).
gaggcggattgaataagaa

SEQ ID NO: 118746 - DNA, 19 bp, Homo sapiens
  siRNA target sequence for PIP (NM_002652.1,126-144).
caacactcggaagatcata

SEQ ID NO: 118747 - DNA, 19 bp, Homo sapiens
  siRNA target sequence for PIP (NM_002652.1,129-147).
cactcggaagatcataata

SEQ ID NO: 118748 - DNA, 19 bp, Homo sapiens
  siRNA target sequence for PIP (NM_002652.1,165-183).
caagtcagtacgtccaaat

SEQ ID NO: 118749 - DNA, 19 bp, Homo sapiens
  siRNA target sequence for PIP (NM_002652.1,230-248).
gcatggtggttaaaactta

SEQ ID NO: 118750 - DNA, 19 bp, Homo sapiens
  siRNA target sequence for PIP (NM_002652.1,238-256).
gttaaaacttacctcatta

SEQ ID NO: 118751 - DNA, 19 bp, Homo sapiens
  siRNA target sequence for PIP (NM_002652.1,265-283).
cctctacaaggtgcattta

SEQ ID NO: 118752 - DNA, 19 bp, Homo sapiens
  siRNA target sequence for PIP (NM_002652.1,268-286).
ctacaaggtgcatttaact

SEQ ID NO: 118753 - DNA, 19 bp, Homo sapiens
  siRNA target sequence for PIP (NM_002652.1,271-289).
caaggtgcatttaactata

SEQ ID NO: 118754 - DNA, 19 bp, Homo sapiens
  siRNA target sequence for PIP (NM_002652.1,274-292).
ggtgcatttaactataagt

SEQ ID NO: 118755 - DNA, 19 bp, Homo sapiens
  siRNA target sequence for PIP (NM_002652.1,275-293).
gtgcatttaactataagta

SEQ ID NO: 118756 - DNA, 19 bp, Homo sapiens
  siRNA target sequence for PIP (NM_002652.1,304-322).
ctatgtgacgacaatccaa

SEQ ID NO: 118757 - DNA, 19 bp, Homo sapiens
  siRNA target sequence for PIP (NM_002652.1,337-355).
gacttttacaccaacagaa

SEQ ID NO: 118758 - DNA, 19 bp, Homo sapiens
  siRNA target sequence for PIP (NM_002652.1,347-365).
ccaacagaactgtgcaaat

SEQ ID NO: 118759 - DNA, 19 bp, Homo sapiens
  siRNA target sequence for PIP (NM_002652.1,351-369).
cagaactgtgcaaattgca

SEQ ID NO: 118760 - DNA, 19 bp, Homo sapiens
  siRNA target sequence for PIP (NM_002652.1,438-456).
caaccggttttatactatt

SEQ ID NO: 118761 - DNA, 19 bp, Homo sapiens
  siRNA target sequence for PIP (NM_002652.1,441-459).
ccggttttatactattgaa

SEQ ID NO: 118762 - DNA, 19 bp, Homo sapiens
  siRNA target sequence for PIP (NM_002652.1,442-460).
cggttttatactattgaaa

SEQ ID NO: 118763 - DNA, 19 bp, Homo sapiens
  siRNA target sequence for PIP (NM_002652.1,457-475).
gaaatcctaaaggtagaat

SEQ ID NO: 118764 - DNA, 19 bp, Homo sapiens
  siRNA target sequence for PLEC1 (NM_000445.1,77-95).
gggcagtctctgaagatgt

SEQ ID NO: 118765 - DNA, 19 bp, Homo sapiens
  siRNA target sequence for PLEC1 (NM_000445.1,88-106).
gaagatgtctccaatggaa

SEQ ID NO: 118766 - DNA, 19 bp, Homo sapiens
  siRNA target sequence for PLEC1 (NM_000445.1,251-269).
gggatcgtgtgcagaagaa

SEQ ID NO: 118767 - DNA, 19 bp, Homo sapiens
  siRNA target sequence for PLEC1 (NM_000445.1,252-270).
ggatcgtgtgcagaagaaa

SEQ ID NO: 118768 - DNA, 19 bp, Homo sapiens
  siRNA target sequence for PLEC1 (NM_000445.1,662-680).
gcctgcgatgcgacaactt

SEQ ID NO: 118769 - DNA, 19 bp, Homo sapiens
  siRNA target sequence for PLEC1 (NM_000445.1,664-682).
ctgcgatgcgacaacttca

SEQ ID NO: 118770 - DNA, 19 bp, Homo sapiens
  siRNA target sequence for PLEC1 (NM_000445.1,1058-1076).
ccagcttcgaggagattga

SEQ ID NO: 118771 - DNA, 19 bp, Homo sapiens
  siRNA target sequence for PLEC1 (NM_000445.1,1061-1079).
gcttcgaggagattgagat

SEQ ID NO: 118772 - DNA, 19 bp, Homo sapiens
  siRNA target sequence for PLEC1 (NM_000445.1,1282-1300).
ctccgcagcgagtttgaga

SEQ ID NO: 118773 - DNA, 19 bp, Homo sapiens
  siRNA target sequence for PLEC1 (NM_000445.1,1816-1834).
caccagtccatcgaagaat

SEQ ID NO: 118774 - DNA, 19 bp, Homo sapiens
  siRNA target sequence for PLEC1 (NM_000445.1,2003-2021).
ccgccactaaggagctaat

SEQ ID NO: 118775 - DNA, 19 bp, Homo sapiens
  siRNA target sequence for PLEC1 (NM_000445.1,2005-2023).
gccactaaggagctaatgt

SEQ ID NO: 118776 - DNA, 19 bp, Homo sapiens
  siRNA target sequence for PLEC1 (NM_000445.1,2145-2163).
gatcaaggagctccaaaat

SEQ ID NO: 118777 - DNA, 19 bp, Homo sapiens
  siRNA target sequence for PLEC1 (NM_000445.1,2299-2317).
gcctactttcagttcttct

SEQ ID NO: 118778 - DNA, 19 bp, Homo sapiens
  siRNA target sequence for PLEC1 (NM_000445.1,2359-2377).
gaggcactgcgtaggaaat

SEQ ID NO: 118779 - DNA, 19 bp, Homo sapiens
  siRNA target sequence for PLEC1 (NM_000445.1,2362-2380).
gcactgcgtaggaaataca

SEQ ID NO: 118780 - DNA, 19 bp, Homo sapiens
  siRNA target sequence for PLEC1 (NM_000445.1,2365-2383).
ctgcgtaggaaatacagtt

SEQ ID NO: 118781 - DNA, 19 bp, Homo sapiens
  siRNA target sequence for PLEC1 (NM_000445.1,2560-2578).
ctggccgtgtgcgactata

SEQ ID NO: 118782 - DNA, 19 bp, Homo sapiens
  siRNA target sequence for PLEC1 (NM_000445.1,2564-2582).
ccgtgtgcgactataagca

SEQ ID NO: 118783 - DNA, 19 bp, Homo sapiens
  siRNA target sequence for PLEC1 (NM_000445.1,4115-4133).
cactgacgagccagtacat

SEQ ID NO: 118784 - DNA, 19 bp, Homo sapiens
  siRNA target sequence for PLEC1 (NM_000445.1,4117-4135).
ctgacgagccagtacatca

SEQ ID NO: 118785 - DNA, 19 bp, Homo sapiens
  siRNA target sequence for PLEC1 (NM_000445.1,4121-4139).
cgagccagtacatcaagtt

SEQ ID NO: 118786 - DNA, 19 bp, Homo sapiens
  siRNA target sequence for PLEC1 (NM_000445.1,7609-7627).
caaagcttcctctctgaaa

SEQ ID NO: 118787 - DNA, 19 bp, Homo sapiens
  siRNA target sequence for PLEC1 (NM_000445.1,8887-8905).
ggcaagacggtgaccattt

SEQ ID NO: 118788 - DNA, 19 bp, Homo sapiens
  siRNA target sequence for PLEC1 (NM_000445.1,9240-9258).
gaagctgagtatctacaat

SEQ ID NO: 118789 - DNA, 19 bp, Homo sapiens
  siRNA target sequence for PLEC1 (NM_000445.1,9819-9837).
ggcccgtgagacctttgaa

SEQ ID NO: 118790 - DNA, 19 bp, Homo sapiens
  siRNA target sequence for PLEC1 (NM_000445.1,9820-9838).
gcccgtgagacctttgaaa

SEQ ID NO: 118791 - DNA, 19 bp, Homo sapiens
  siRNA target sequence for PLEC1 (NM_000445.1,9823-9841).
cgtgagacctttgaaaaga

SEQ ID NO: 118792 - DNA, 19 bp, Homo sapiens
  siRNA target sequence for PLEC1 (NM_000445.1,10973-10991).
ccaaggaacgcatgatcat

SEQ ID NO: 118793 - DNA, 19 bp, Homo sapiens
  siRNA target sequence for PLEC1 (NM_000445.1,10978-10996).
gaacgcatgatcatcatca

SEQ ID NO: 118794 - DNA, 19 bp, Homo sapiens
  siRNA target sequence for PLEC1 (NM_000445.1,12442-12460).
ctgatggagcgttgtatca

SEQ ID NO: 118795 - DNA, 19 bp, Homo sapiens
  siRNA target sequence for PLEC1 (NM_000445.1,12444-12462).
gatggagcgttgtatcact

SEQ ID NO: 118796 - DNA, 19 bp, Homo sapiens
  siRNA target sequence for PLEC1 (NM_000445.1,13030-13048).
cggaacctggtggataaca

SEQ ID NO: 118797 - DNA, 19 bp, Homo sapiens
  siRNA target sequence for PLEC1 (NM_000445.1,13031-13049).
ggaacctggtggataacat

SEQ ID NO: 118798 - DNA, 19 bp, Homo sapiens
  siRNA target sequence for PLS3 (NM_005032.3,165-183).
caacagcaacggattcatt

SEQ ID NO: 118799 - DNA, 19 bp, Homo sapiens
  siRNA target sequence for PLS3 (NM_005032.3,168-186).
cagcaacggattcatttgt

SEQ ID NO: 118800 - DNA, 19 bp, Homo sapiens
  siRNA target sequence for PLS3 (NM_005032.3,170-188).
gcaacggattcatttgtga

SEQ ID NO: 118801 - DNA, 19 bp, Homo sapiens
  siRNA target sequence for PLS3 (NM_005032.3,204-222).
gctcttcaaggaagctaat

SEQ ID NO: 118802 - DNA, 19 bp, Homo sapiens
  siRNA target sequence for PLS3 (NM_005032.3,227-245).
cattaccaggatataaagt

SEQ ID NO: 118803 - DNA, 19 bp, Homo sapiens
  siRNA target sequence for PLS3 (NM_005032.3,543-561).
caccgatgacctgttcaaa

SEQ ID NO: 118804 - DNA, 19 bp, Homo sapiens
  siRNA target sequence for PLS3 (NM_005032.3,723-741).
gaacattggtgcagaagat

SEQ ID NO: 118805 - DNA, 19 bp, Homo sapiens
  siRNA target sequence for PLS3 (NM_005032.3,752-770).
ggaaacctcatctggtttt

SEQ ID NO: 118806 - DNA, 19 bp, Homo sapiens
  siRNA target sequence for PLS3 (NM_005032.3,798-816).
cggtttgttcgctgacatt

SEQ ID NO: 118807 - DNA, 19 bp, Homo sapiens
  siRNA target sequence for PLS3 (NM_005032.3,804-822).
gttcgctgacattgaatta

SEQ ID NO: 118808 - DNA, 19 bp, Homo sapiens
  siRNA target sequence for PLS3 (NM_005032.3,862-880).
gagactttggaggaactta

SEQ ID NO: 118809 - DNA, 19 bp, Homo sapiens
  siRNA target sequence for PLS3 (NM_005032.3,906-924).
gcttagatgggcaaacttt

SEQ ID NO: 118810 - DNA, 19 bp, Homo sapiens
  siRNA target sequence for PLS3 (NM_005032.3,936-954).
ctcgggctggcaaaaaatt

SEQ ID NO: 118811 - DNA, 19 bp, Homo sapiens
  siRNA target sequence for PLS3 (NM_005032.3,938-956).
cgggctggcaaaaaattaa

SEQ ID NO: 118812 - DNA, 19 bp, Homo sapiens
  siRNA target sequence for PLS3 (NM_005032.3,940-958).
ggctggcaaaaaattaaca

SEQ ID NO: 118813 - DNA, 19 bp, Homo sapiens
  siRNA target sequence for PLS3 (NM_005032.3,990-1008).
ctatttccatcttctcaat

SEQ ID NO: 118814 - DNA, 19 bp, Homo sapiens
  siRNA target sequence for PLS3 (NM_005032.3,1036-1054).
ggtgaaccacggatagata

SEQ ID NO: 118815 - DNA, 19 bp, Homo sapiens
  siRNA target sequence for PLS3 (NM_005032.3,1037-1055).
gtgaaccacggatagatat

SEQ ID NO: 118816 - DNA, 19 bp, Homo sapiens
  siRNA target sequence for PLS3 (NM_005032.3,1039-1057).
gaaccacggatagatatta

SEQ ID NO: 118817 - DNA, 19 bp, Homo sapiens
  siRNA target sequence for PLS3 (NM_005032.3,1042-1060).
ccacggatagatattaaca

SEQ ID NO: 118818 - DNA, 19 bp, Homo sapiens
  siRNA target sequence for PLS3 (NM_005032.3,1043-1061).
cacggatagatattaacat

SEQ ID NO: 118819 - DNA, 19 bp, Homo sapiens
  siRNA target sequence for PLS3 (NM_005032.3,1045-1063).
cggatagatattaacatgt

SEQ ID NO: 118820 - DNA, 19 bp, Homo sapiens
  siRNA target sequence for PLS3 (NM_005032.3,1059-1077).
catgtcaggtttcaatgaa

SEQ ID NO: 118821 - DNA, 19 bp, Homo sapiens
  siRNA target sequence for PLS3 (NM_005032.3,1062-1080).
gtcaggtttcaatgaaaca

SEQ ID NO: 118822 - DNA, 19 bp, Homo sapiens
  siRNA target sequence for PLS3 (NM_005032.3,1064-1082).
caggtttcaatgaaacaga

SEQ ID NO: 118823 - DNA, 19 bp, Homo sapiens
  siRNA target sequence for PLS3 (NM_005032.3,1097-1115).
ctgagagtatgcttcaaca

SEQ ID NO: 118824 - DNA, 19 bp, Homo sapiens
  siRNA target sequence for PLS3 (NM_005032.3,1114-1132).
caagcagataaattaggtt

SEQ ID NO: 118825 - DNA, 19 bp, Homo sapiens
  siRNA target sequence for PLS3 (NM_005032.3,1174-1192).
cccaaactcaacttagctt

SEQ ID NO: 118826 - DNA, 19 bp, Homo sapiens
  siRNA target sequence for PLS3 (NM_005032.3,1175-1193).
ccaaactcaacttagcttt

SEQ ID NO: 118827 - DNA, 19 bp, Homo sapiens
  siRNA target sequence for PLS3 (NM_005032.3,1194-1212).
cgtggctaacctgtttaat

SEQ ID NO: 118828 - DNA, 19 bp, Homo sapiens
  siRNA target sequence for PLS3 (NM_005032.3,1195-1213).
gtggctaacctgtttaata

SEQ ID NO: 118829 - DNA, 19 bp, Homo sapiens
  siRNA target sequence for PLS3 (NM_005032.3,1246-1264).
gatattgactggactctat

SEQ ID NO: 118830 - DNA, 19 bp, Homo sapiens
  siRNA target sequence for PLS3 (NM_005032.3,1308-1326).
gaactctcttggtgtcaat

SEQ ID NO: 118831 - DNA, 19 bp, Homo sapiens
  siRNA target sequence for PLS3 (NM_005032.3,1323-1341).
caatcctcacgtaaaccat

SEQ ID NO: 118832 - DNA, 19 bp, Homo sapiens
  siRNA target sequence for PLS3 (NM_005032.3,1328-1346).
ctcacgtaaaccatctcta

SEQ ID NO: 118833 - DNA, 19 bp, Homo sapiens
  siRNA target sequence for PLS3 (NM_005032.3,1365-1383).
cctggtaatcttacagtta

SEQ ID NO: 118834 - DNA, 19 bp, Homo sapiens
  siRNA target sequence for PLS3 (NM_005032.3,1405-1423).
gttgactggagtaaggtta

SEQ ID NO: 118835 - DNA, 19 bp, Homo sapiens
  siRNA target sequence for PLS3 (NM_005032.3,1408-1426).
gactggagtaaggttaata

SEQ ID NO: 118836 - DNA, 19 bp, Homo sapiens
  siRNA target sequence for PLS3 (NM_005032.3,1410-1428).
ctggagtaaggttaataaa

SEQ ID NO: 118837 - DNA, 19 bp, Homo sapiens
  siRNA target sequence for PLS3 (NM_005032.3,1413-1431).
gagtaaggttaataaacct

SEQ ID NO: 118838 - DNA, 19 bp, Homo sapiens
  siRNA target sequence for PLS3 (NM_005032.3,1464-1482).
gctagaaaactgcaactat

SEQ ID NO: 118839 - DNA, 19 bp, Homo sapiens
  siRNA target sequence for PLS3 (NM_005032.3,1532-1550).
gagggcaagacctgaatga

SEQ ID NO: 118840 - DNA, 19 bp, Homo sapiens
  siRNA target sequence for PLS3 (NM_005032.3,1543-1561).
ctgaatgatgggaaccaaa

SEQ ID NO: 118841 - DNA, 19 bp, Homo sapiens
  siRNA target sequence for PLS3 (NM_005032.3,1558-1576).
caaaccctgactttagctt

SEQ ID NO: 118842 - DNA, 19 bp, Homo sapiens
  siRNA target sequence for PLS3 (NM_005032.3,1564-1582).
ctgactttagctttagtct

SEQ ID NO: 118843 - DNA, 19 bp, Homo sapiens
  siRNA target sequence for PLS3 (NM_005032.3,1608-1626).
caatgtcctggaagatctt

SEQ ID NO: 118844 - DNA, 19 bp, Homo sapiens
  siRNA target sequence for PLS3 (NM_005032.3,1643-1661).
ccaatgacgacatcattgt

SEQ ID NO: 118845 - DNA, 19 bp, Homo sapiens
  siRNA target sequence for PLS3 (NM_005032.3,1660-1678).
gtgaactgggtgaacagaa

SEQ ID NO: 118846 - DNA, 19 bp, Homo sapiens
  siRNA target sequence for PLS3 (NM_005032.3,1776-1794).
gccaggctgtataaactat

SEQ ID NO: 118847 - DNA, 19 bp, Homo sapiens
  siRNA target sequence for PLS3 (NM_005032.3,1778-1796).
caggctgtataaactatga

SEQ ID NO: 118848 - DNA, 19 bp, Homo sapiens
  siRNA target sequence for PLS3 (NM_005032.3,1801-1819).
gtgaagagtggcaatctaa

SEQ ID NO: 118849 - DNA, 19 bp, Homo sapiens
  siRNA target sequence for PLS3 (NM_005032.3,1803-1821).
gaagagtggcaatctaaca

SEQ ID NO: 118850 - DNA, 19 bp, Homo sapiens
  siRNA target sequence for PLS3 (NM_005032.3,1844-1862).
ccaagtatgcagtgtcaat

SEQ ID NO: 118851 - DNA, 19 bp, Homo sapiens
  siRNA target sequence for PSG3 (NM_021016.1,1345-1363).
cttcctggccttaatccat

SEQ ID NO: 118852 - DNA, 19 bp, Homo sapiens
  siRNA target sequence for RDX (NM_002906.2,34-52).
ccgaaaccaatcaacgtaa

SEQ ID NO: 118853 - DNA, 19 bp, Homo sapiens
  siRNA target sequence for RDX (NM_002906.2,40-58).
ccaatcaacgtaagagtaa

SEQ ID NO: 118854 - DNA, 19 bp, Homo sapiens
  siRNA target sequence for RDX (NM_002906.2,45-63).
caacgtaagagtaactaca

SEQ ID NO: 118855 - DNA, 19 bp, Homo sapiens
  siRNA target sequence for RDX (NM_002906.2,497-515).
gtgtattggaacaacacaa

SEQ ID NO: 118856 - DNA, 19 bp, Homo sapiens
  siRNA target sequence for RDX (NM_002906.2,583-601).
gaggattctatgatggaat

SEQ ID NO: 118857 - DNA, 19 bp, Homo sapiens
  siRNA target sequence for RDX (NM_002906.2,680-698).
ggctaggtgttgatgcttt

SEQ ID NO: 118858 - DNA, 19 bp, Homo sapiens
  siRNA target sequence for RDX (NM_002906.2,864-882).
gcggattttggccttatgt

SEQ ID NO: 118859 - DNA, 19 bp, Homo sapiens
  siRNA target sequence for RDX (NM_002906.2,865-883).
cggattttggccttatgta

SEQ ID NO: 118860 - DNA, 19 bp, Homo sapiens
  siRNA target sequence for RDX (NM_002906.2,911-929).
gaaggaagcctgatactat

SEQ ID NO: 118861 - DNA, 19 bp, Homo sapiens
  siRNA target sequence for RDX (NM_002906.2,915-933).
gaagcctgatactattgaa

SEQ ID NO: 118862 - DNA, 19 bp, Homo sapiens
  siRNA target sequence for RDX (NM_002906.2,918-936).
gcctgatactattgaagta

SEQ ID NO: 118863 - DNA, 19 bp, Homo sapiens
  siRNA target sequence for RDX (NM_002906.2,981-999).
gttggaaagggcacaatta

SEQ ID NO: 118864 - DNA, 19 bp, Homo sapiens
  siRNA target sequence for RDX (NM_002906.2,1046-1064).
gaatagaacgtgaaaagga

SEQ ID NO: 118865 - DNA, 19 bp, Homo sapiens
  siRNA target sequence for RDX (NM_002906.2,1068-1086).
gctaatggaacgtctaaaa

SEQ ID NO: 118866 - DNA, 19 bp, Homo sapiens
  siRNA target sequence for RDX (NM_002906.2,1134-1152).
gactcgaaaagctctagaa

SEQ ID NO: 118867 - DNA, 19 bp, Homo sapiens
  siRNA target sequence for RDX (NM_002906.2,1136-1154).
ctcgaaaagctctagaact

SEQ ID NO: 118868 - DNA, 19 bp, Homo sapiens
  siRNA target sequence for RDX (NM_002906.2,1155-1173).
ggatcaagaacgaaaacga

SEQ ID NO: 118869 - DNA, 19 bp, Homo sapiens
  siRNA target sequence for RDX (NM_002906.2,1253-1271).
ccgaccagatgaagaatca

SEQ ID NO: 118870 - DNA, 19 bp, Homo sapiens
  siRNA target sequence for RDX (NM_002906.2,1462-1480).
gtcattcctccaacagaaa

SEQ ID NO: 118871 - DNA, 19 bp, Homo sapiens
  siRNA target sequence for RDX (NM_002906.2,1511-1529).
ctgaagctagtgctgaatt

SEQ ID NO: 118872 - DNA, 19 bp, Homo sapiens
  siRNA target sequence for RDX (NM_002906.2,1699-1717).
gcaggccgtgataagtaca

SEQ ID NO: 118873 - DNA, 19 bp, Homo sapiens
  siRNA target sequence for RDX (NM_002906.2,1700-1718).
caggccgtgataagtacaa

SEQ ID NO: 118874 - DNA, 19 bp, Homo sapiens
  siRNA target sequence for SCIN (NM_033128.1,280-298).
gctaaactatacatggttt

SEQ ID NO: 118875 - DNA, 19 bp, Homo sapiens
  siRNA target sequence for SCIN (NM_033128.1,396-414).
cggggctgccaaacaaatt

SEQ ID NO: 118876 - DNA, 19 bp, Homo sapiens
  siRNA target sequence for SCIN (NM_033128.1,397-415).
ggggctgccaaacaaattt

SEQ ID NO: 118877 - DNA, 19 bp, Homo sapiens
  siRNA target sequence for SCIN (NM_033128.1,417-435).
cgtatggaaaggtaaagat

SEQ ID NO: 118878 - DNA, 19 bp, Homo sapiens
  siRNA target sequence for SCIN (NM_033128.1,423-441).
gaaaggtaaagatgctaat

SEQ ID NO: 118879 - DNA, 19 bp, Homo sapiens
  siRNA target sequence for SCIN (NM_033128.1,536-554).
gaggtgaaacaccaatctt

SEQ ID NO: 118880 - DNA, 19 bp, Homo sapiens
  siRNA target sequence for SCIN (NM_033128.1,538-556).
ggtgaaacaccaatcttca

SEQ ID NO: 118881 - DNA, 19 bp, Homo sapiens
  siRNA target sequence for SCIN (NM_033128.1,599-617).
gcttcgggaaagtttatgt

SEQ ID NO: 118882 - DNA, 19 bp, Homo sapiens
  siRNA target sequence for SCIN (NM_033128.1,655-673).
gatgcctcaaaattacaca

SEQ ID NO: 118883 - DNA, 19 bp, Homo sapiens
  siRNA target sequence for SCIN (NM_033128.1,730-748).
gagatttggcgtgtagaaa

SEQ ID NO: 118884 - DNA, 19 bp, Homo sapiens
  siRNA target sequence for SCIN (NM_033128.1,763-781).
caagttgaccaaaactcat

SEQ ID NO: 118885 - DNA, 19 bp, Homo sapiens
  siRNA target sequence for SCIN (NM_033128.1,829-847).
cccagaggacagattatct

SEQ ID NO: 118886 - DNA, 19 bp, Homo sapiens
  siRNA target sequence for SCIN (NM_033128.1,830-848).
ccagaggacagattatcta

SEQ ID NO: 118887 - DNA, 19 bp, Homo sapiens
  siRNA target sequence for SCIN (NM_033128.1,896-914).
cgttcctgactgttcagtt

SEQ ID NO: 118888 - DNA, 19 bp, Homo sapiens
  siRNA target sequence for SCIN (NM_033128.1,971-989).
ctgttcacctactgagttt

SEQ ID NO: 118889 - DNA, 19 bp, Homo sapiens
  siRNA target sequence for SCIN (NM_033128.1,978-996).
cctactgagtttgttcaaa

SEQ ID NO: 118890 - DNA, 19 bp, Homo sapiens
  siRNA target sequence for SCIN (NM_033128.1,982-1000).
ctgagtttgttcaaagaca

SEQ ID NO: 118891 - DNA, 19 bp, Homo sapiens
  siRNA target sequence for SCIN (NM_033128.1,1249-1267).
gtcctaaagtgcaaaacct

SEQ ID NO: 118892 - DNA, 19 bp, Homo sapiens
  siRNA target sequence for SCIN (NM_033128.1,1252-1270).
ctaaagtgcaaaaccttaa

SEQ ID NO: 118893 - DNA, 19 bp, Homo sapiens
  siRNA target sequence for SCIN (NM_033128.1,1386-1404).
cggctgctctaacaaaact

SEQ ID NO: 118894 - DNA, 19 bp, Homo sapiens
  siRNA target sequence for SCIN (NM_033128.1,1394-1412).
ctaacaaaactggaagatt

SEQ ID NO: 118895 - DNA, 19 bp, Homo sapiens
  siRNA target sequence for SCIN (NM_033128.1,1437-1455).
gttcacccaggatgattta

SEQ ID NO: 118896 - DNA, 19 bp, Homo sapiens
  siRNA target sequence for SCIN (NM_033128.1,1511-1529).
gcaaagatgctaatgaagt

SEQ ID NO: 118897 - DNA, 19 bp, Homo sapiens
  siRNA target sequence for SCIN (NM_033128.1,1544-1562).
ctctgaagtctgccaaaat

SEQ ID NO: 118898 - DNA, 19 bp, Homo sapiens
  siRNA target sequence for SCIN (NM_033128.1,1599-1617).
gacaccaattgtcatcata

SEQ ID NO: 118899 - DNA, 19 bp, Homo sapiens
  siRNA target sequence for SCIN (NM_033128.1,1601-1619).
caccaattgtcatcataaa

SEQ ID NO: 118900 - DNA, 19 bp, Homo sapiens
  siRNA target sequence for SEC24C (NM_004922.2,233-251).
catctacccagggtatcat

SEQ ID NO: 118901 - DNA, 19 bp, Homo sapiens
  siRNA target sequence for SEC24C (NM_004922.2,872-890).
gcctggacagagttttgga

SEQ ID NO: 118902 - DNA, 19 bp, Homo sapiens
  siRNA target sequence for SEC24C (NM_004922.2,1153-1171).
ccatcccaagccctattca

SEQ ID NO: 118903 - DNA, 19 bp, Homo sapiens
  siRNA target sequence for SEC24C (NM_004922.2,1162-1180).
gccctattcaggtcattga

SEQ ID NO: 118904 - DNA, 19 bp, Homo sapiens
  siRNA target sequence for SEC24C (NM_004922.2,1163-1181).
ccctattcaggtcattgaa

SEQ ID NO: 118905 - DNA, 19 bp, Homo sapiens
  siRNA target sequence for SEC24C (NM_004922.2,1233-1251).
caggtgccacccttagtca

SEQ ID NO: 118906 - DNA, 19 bp, Homo sapiens
  siRNA target sequence for SEC24C (NM_004922.2,1292-1310).
ccgatacatccgatgtaca

SEQ ID NO: 118907 - DNA, 19 bp, Homo sapiens
  siRNA target sequence for SEC24C (NM_004922.2,1293-1311).
cgatacatccgatgtacat

SEQ ID NO: 118908 - DNA, 19 bp, Homo sapiens
  siRNA target sequence for SEC24C (NM_004922.2,1298-1316).
catccgatgtacatcctat

SEQ ID NO: 118909 - DNA, 19 bp, Homo sapiens
  siRNA target sequence for SEC24C (NM_004922.2,1301-1319).
ccgatgtacatcctataat

SEQ ID NO: 118910 - DNA, 19 bp, Homo sapiens
  siRNA target sequence for SEC24C (NM_004922.2,1302-1320).
cgatgtacatcctataata

SEQ ID NO: 118911 - DNA, 19 bp, Homo sapiens
  siRNA target sequence for SEC24C (NM_004922.2,1360-1378).
ccctggcagcagtcatcaa

SEQ ID NO: 118912 - DNA, 19 bp, Homo sapiens
  siRNA target sequence for SEC24C (NM_004922.2,1403-1421).
ggaggcttcaccgtatgtt

SEQ ID NO: 118913 - DNA, 19 bp, Homo sapiens
  siRNA target sequence for SEC24C (NM_004922.2,1453-1471).
gcaaccgctgcaaagcata

SEQ ID NO: 118914 - DNA, 19 bp, Homo sapiens
  siRNA target sequence for SEC24C (NM_004922.2,1458-1476).
cgctgcaaagcatacatgt

SEQ ID NO: 118915 - DNA, 19 bp, Homo sapiens
  siRNA target sequence for SEC24C (NM_004922.2,1477-1495).
gtcccttcatgcagttcat

SEQ ID NO: 118916 - DNA, 19 bp, Homo sapiens
  siRNA target sequence for SEC24C (NM_004922.2,1522-1540).
gtttttgcagctgtatcaa

SEQ ID NO: 118917 - DNA, 19 bp, Homo sapiens
  siRNA target sequence for SEC24C (NM_004922.2,1582-1600).
gcaaacgtgtggatgctta

SEQ ID NO: 118918 - DNA, 19 bp, Homo sapiens
  siRNA target sequence for SEC24C (NM_004922.2,1613-1631).
gctatccctgggctcttat

SEQ ID NO: 118919 - DNA, 19 bp, Homo sapiens
  siRNA target sequence for SEC24C (NM_004922.2,1618-1636).
ccctgggctcttatgaatt

SEQ ID NO: 118920 - DNA, 19 bp, Homo sapiens
  siRNA target sequence for SEC24C (NM_004922.2,1647-1665).
gtagattactgcaagaaca

SEQ ID NO: 118921 - DNA, 19 bp, Homo sapiens
  siRNA target sequence for SEC24C (NM_004922.2,1650-1668).
gattactgcaagaacaata

SEQ ID NO: 118922 - DNA, 19 bp, Homo sapiens
  siRNA target sequence for SEC24C (NM_004922.2,1721-1739).
catcaggactggtcttgtt

SEQ ID NO: 118923 - DNA, 19 bp, Homo sapiens
  siRNA target sequence for SEC24C (NM_004922.2,1758-1776).
ctcaagtcactgttagact

SEQ ID NO: 118924 - DNA, 19 bp, Homo sapiens
  siRNA target sequence for SEC24C (NM_004922.2,1763-1781).
gtcactgttagactttcta

SEQ ID NO: 118925 - DNA, 19 bp, Homo sapiens
  siRNA target sequence for SEC24C (NM_004922.2,1822-1840).
gctttgtcacctacaataa

SEQ ID NO: 118926 - DNA, 19 bp, Homo sapiens
  siRNA target sequence for SEC24C (NM_004922.2,1841-1859).
ggtgctccacttctataat

SEQ ID NO: 118927 - DNA, 19 bp, Homo sapiens
  siRNA target sequence for SEC24C (NM_004922.2,1976-1994).
cagcttattggatcagatt

SEQ ID NO: 118928 - DNA, 19 bp, Homo sapiens
  siRNA target sequence for SEC24C (NM_004922.2,2157-2175).
gacaggaagctgatcaata

SEQ ID NO: 118929 - DNA, 19 bp, Homo sapiens
  siRNA target sequence for SEC24C (NM_004922.2,2159-2177).
caggaagctgatcaataca

SEQ ID NO: 118930 - DNA, 19 bp, Homo sapiens
  siRNA target sequence for SEC24C (NM_004922.2,2161-2179).
ggaagctgatcaatacaga

SEQ ID NO: 118931 - DNA, 19 bp, Homo sapiens
  siRNA target sequence for SEC24C (NM_004922.2,2220-2238).
cagaccctggccaaagagt

SEQ ID NO: 118932 - DNA, 19 bp, Homo sapiens
  siRNA target sequence for SEC24C (NM_004922.2,2251-2269).
gctgctgtgtagatctctt

SEQ ID NO: 118933 - DNA, 19 bp, Homo sapiens
  siRNA target sequence for SEC24C (NM_004922.2,2254-2272).
gctgtgtagatctctttct

SEQ ID NO: 118934 - DNA, 19 bp, Homo sapiens
  siRNA target sequence for SEC24C (NM_004922.2,2329-2347).
gtggctctgtctacaaata

SEQ ID NO: 118935 - DNA, 19 bp, Homo sapiens
  siRNA target sequence for SEC24C (NM_004922.2,2339-2357).
ctacaaatatgcttccttt

SEQ ID NO: 118936 - DNA, 19 bp, Homo sapiens
  siRNA target sequence for SEC24C (NM_004922.2,2457-2475).
ggtatccgtgctgtagatt

SEQ ID NO: 118937 - DNA, 19 bp, Homo sapiens
  siRNA target sequence for SEC24C (NM_004922.2,2458-2476).
gtatccgtgctgtagattt

SEQ ID NO: 118938 - DNA, 19 bp, Homo sapiens
  siRNA target sequence for SEC24C (NM_004922.2,2462-2480).
ccgtgctgtagatttcttt

SEQ ID NO: 118939 - DNA, 19 bp, Homo sapiens
  siRNA target sequence for SEC24C (NM_004922.2,2523-2541).
gggctagatggggacaaaa

SEQ ID NO: 118940 - DNA, 19 bp, Homo sapiens
  siRNA target sequence for SEC24C (NM_004922.2,2637-2655).
cgtcggctccgcatccata

SEQ ID NO: 118941 - DNA, 19 bp, Homo sapiens
  siRNA target sequence for SEC24C (NM_004922.2,2638-2656).
gtcggctccgcatccataa

SEQ ID NO: 118942 - DNA, 19 bp, Homo sapiens
  siRNA target sequence for SEC24C (NM_004922.2,2641-2659).
ggctccgcatccataatct

SEQ ID NO: 118943 - DNA, 19 bp, Homo sapiens
  siRNA target sequence for SEC24C (NM_004922.2,2678-2696).
ccagctggctgatctatat

SEQ ID NO: 118944 - DNA, 19 bp, Homo sapiens
  siRNA target sequence for SEC24C (NM_004922.2,2682-2700).
ctggctgatctatatcgaa

SEQ ID NO: 118945 - DNA, 19 bp, Homo sapiens
  siRNA target sequence for SEC24C (NM_004922.2,2848-2866).
cctctgcaggacagttgat

SEQ ID NO: 118946 - DNA, 19 bp, Homo sapiens
  siRNA target sequence for SEC24C (NM_004922.2,3003-3021).
gagaccaatgtcttcttct

SEQ ID NO: 118947 - DNA, 19 bp, Homo sapiens
  siRNA target sequence for SEC24C (NM_004922.2,3027-3045).
cggctcttacctttgacaa

SEQ ID NO: 118948 - DNA, 19 bp, Homo sapiens
  siRNA target sequence for SEC24C (NM_004922.2,3030-3048).
ctcttacctttgacaaagt

SEQ ID NO: 118949 - DNA, 19 bp, Homo sapiens
  siRNA target sequence for SEC24C (NM_004922.2,3102-3120).
ctaagcaatggggatatat

SEQ ID NO: 118950 - DNA, 19 bp, Homo sapiens
  siRNA target sequence for SEC24C (NM_004922.2,3180-3198).
gttgtccagagccttttca

SEQ ID NO: 118951 - DNA, 19 bp, Homo sapiens
  siRNA target sequence for SEC24C (NM_004922.2,3272-3290).
ggttcgaggcctcattgat

SEQ ID NO: 118952 - DNA, 19 bp, Homo sapiens
  siRNA target sequence for SEC24C (NM_004922.2,3273-3291).
gttcgaggcctcattgata

SEQ ID NO: 118953 - DNA, 19 bp, Homo sapiens
  siRNA target sequence for SEC24C (NM_004922.2,3303-3321).
cagagatcccggtacatga

SEQ ID NO: 118954 - DNA, 19 bp, Homo sapiens
  siRNA target sequence for SEC24C (NM_004922.2,3397-3415).
gtgggggagcatcttatgt

SEQ ID NO: 118955 - DNA, 19 bp, Homo sapiens
  siRNA target sequence for SMTN (NM_006932.3,385-403).
ccgagcggcaggacaacaa

SEQ ID NO: 118956 - DNA, 19 bp, Homo sapiens
  siRNA target sequence for SMTN (NM_006932.3,488-506).
cgatgtggaggaattgact

SEQ ID NO: 118957 - DNA, 19 bp, Homo sapiens
  siRNA target sequence for SMTN (NM_006932.3,515-533).
gcgaagcgctggtgagtat

SEQ ID NO: 118958 - DNA, 19 bp, Homo sapiens
  siRNA target sequence for SMTN (NM_006932.3,517-535).
gaagcgctggtgagtatga

SEQ ID NO: 118959 - DNA, 19 bp, Homo sapiens
  siRNA target sequence for SMTN (NM_006932.3,1210-1228).
gggatcgtgtccacaagtt

SEQ ID NO: 118960 - DNA, 19 bp, Homo sapiens
  siRNA target sequence for SMTN (NM_006932.3,1215-1233).
cgtgtccacaagttcacat

SEQ ID NO: 118961 - DNA, 19 bp, Homo sapiens
  siRNA target sequence for SMTN (NM_006932.3,1220-1238).
ccacaagttcacatctgat

SEQ ID NO: 118962 - DNA, 19 bp, Homo sapiens
  siRNA target sequence for SMTN (NM_006932.3,1572-1590).
gagccagggggcagtatga

SEQ ID NO: 118963 - DNA, 19 bp, Homo sapiens
  siRNA target sequence for SMTN (NM_006932.3,1834-1852).
gaggctgcagcatcaagat

SEQ ID NO: 118964 - DNA, 19 bp, Homo sapiens
  siRNA target sequence for SMTN (NM_006932.3,2203-2221).
ctgtcagcactgttaccaa

SEQ ID NO: 118965 - DNA, 19 bp, Homo sapiens
  siRNA target sequence for SMTN (NM_006932.3,2231-2249).
gctcgtccactccaatgat

SEQ ID NO: 118966 - DNA, 19 bp, Homo sapiens
  siRNA target sequence for SMTN (NM_006932.3,2320-2338).
gcaccatgatgcaaaccaa

SEQ ID NO: 118967 - DNA, 19 bp, Homo sapiens
  siRNA target sequence for SMTN (NM_134269.1,2902-2920).
cgtacatccaggaattcta

SEQ ID NO: 118968 - DNA, 19 bp, Homo sapiens
  siRNA target sequence for SMTN (NM_134269.1,2934-2952).
cagaaggggctggtaaaaa

SEQ ID NO: 118969 - DNA, 19 bp, Homo sapiens
  siRNA target sequence for SNTA1 (NM_003098.2,703-721).
cctctgctacccatgatga

SEQ ID NO: 118970 - DNA, 19 bp, Homo sapiens
  siRNA target sequence for SNTA1 (NM_003098.2,724-742).
cggtgcaggtcctcaagaa

SEQ ID NO: 118971 - DNA, 19 bp, Homo sapiens
  siRNA target sequence for SNTA1 (NM_003098.2,759-777).
gtgctggaggtcaagtata

SEQ ID NO: 118972 - DNA, 19 bp, Homo sapiens
  siRNA target sequence for SNTA1 (NM_003098.2,762-780).
ctggaggtcaagtatatga

SEQ ID NO: 118973 - DNA, 19 bp, Homo sapiens
  siRNA target sequence for SNTA1 (NM_003098.2,783-801).
gacgtctcaccgtatttca

SEQ ID NO: 118974 - DNA, 19 bp, Homo sapiens
  siRNA target sequence for SNTA1 (NM_003098.2,786-804).
gtctcaccgtatttcaaga

SEQ ID NO: 118975 - DNA, 19 bp, Homo sapiens
  siRNA target sequence for SNTA1 (NM_003098.2,792-810).
ccgtatttcaagaactcta

SEQ ID NO: 118976 - DNA, 19 bp, Homo sapiens
  siRNA target sequence for SNTA1 (NM_003098.2,1710-1728).
cactcgtgtcccaaaacca

SEQ ID NO: 118977 - DNA, 19 bp, Homo sapiens
  siRNA target sequence for SNTA1 (NM_003098.2,1712-1730).
ctcgtgtcccaaaaccata

SEQ ID NO: 118978 - DNA, 19 bp, Homo sapiens
  siRNA target sequence for SNTB1 (NM_021021.2,1001-1019).
cacagagaccggaaaagca

SEQ ID NO: 118979 - DNA, 19 bp, Homo sapiens
  siRNA target sequence for SNTB1 (NM_021021.2,1164-1182).
ccatccattccaacgttaa

SEQ ID NO: 118980 - DNA, 19 bp, Homo sapiens
  siRNA target sequence for SNTB1 (NM_021021.2,1165-1183).
catccattccaacgttaat

SEQ ID NO: 118981 - DNA, 19 bp, Homo sapiens
  siRNA target sequence for SNTB1 (NM_021021.2,1241-1259).
gctgggagccgagagatta

SEQ ID NO: 118982 - DNA, 19 bp, Homo sapiens
  siRNA target sequence for SNTB1 (NM_021021.2,1292-1310).
ggggagagcaagaaacagt

SEQ ID NO: 118983 - DNA, 19 bp, Homo sapiens
  siRNA target sequence for SNTB1 (NM_021021.2,1343-1361).
gaccttttaatctatgaca

SEQ ID NO: 118984 - DNA, 19 bp, Homo sapiens
  siRNA target sequence for SNTB1 (NM_021021.2,1501-1519).
caggcaagggattgaaaca

SEQ ID NO: 118985 - DNA, 19 bp, Homo sapiens
  siRNA target sequence for SNTB1 (NM_021021.2,1574-1592).
gtacagggttgccacaatt

SEQ ID NO: 118986 - DNA, 19 bp, Homo sapiens
  siRNA target sequence for SNTB1 (NM_021021.2,1588-1606).
caattctgctgaactcatt

SEQ ID NO: 118987 - DNA, 19 bp, Homo sapiens
  siRNA target sequence for SNTB1 (NM_021021.2,1623-1641).
cttgcacctacaaaaacca

SEQ ID NO: 118988 - DNA, 19 bp, Homo sapiens
  siRNA target sequence for SNTB1 (NM_021021.2,1645-1663).
gtgccgtttgaccatacat

SEQ ID NO: 118989 - DNA, 19 bp, Homo sapiens
  siRNA target sequence for SNTB1 (NM_021021.2,1647-1665).
gccgtttgaccatacatta

SEQ ID NO: 118990 - DNA, 19 bp, Homo sapiens
  siRNA target sequence for SNTB1 (NM_021021.2,1648-1666).
ccgtttgaccatacattat

SEQ ID NO: 118991 - DNA, 19 bp, Homo sapiens
  siRNA target sequence for SNTB1 (NM_021021.2,1650-1668).
gtttgaccatacattatga

SEQ ID NO: 118992 - DNA, 19 bp, Homo sapiens
  siRNA target sequence for SNTB1 (NM_021021.2,1708-1726).
ctttcccaagaccatcata

SEQ ID NO: 118993 - DNA, 19 bp, Homo sapiens
  siRNA target sequence for SNTB1 (NM_021021.2,1712-1730).
cccaagaccatcatacagt

SEQ ID NO: 118994 - DNA, 19 bp, Homo sapiens
  siRNA target sequence for SNTB1 (NM_021021.2,1833-1851).
gccccaagccaattgtttt

SEQ ID NO: 118995 - DNA, 19 bp, Homo sapiens
  siRNA target sequence for SNTB1 (NM_021021.2,1863-1881).
ccttcctgtcagctaagat

SEQ ID NO: 118996 - DNA, 19 bp, Homo sapiens
  siRNA target sequence for SNTB1 (NM_021021.2,1864-1882).
cttcctgtcagctaagatt

SEQ ID NO: 118997 - DNA, 19 bp, Homo sapiens
  siRNA target sequence for SNTB1 (NM_021021.2,1867-1885).
cctgtcagctaagattaca

SEQ ID NO: 118998 - DNA, 19 bp, Homo sapiens
  siRNA target sequence for SNTB2 (NM_006750.2,602-620).
caagttcatccgagaagta

SEQ ID NO: 118999 - DNA, 19 bp, Homo sapiens
  siRNA target sequence for SNTB2 (NM_006750.2,605-623).
gttcatccgagaagtaaca

SEQ ID NO: 119000 - DNA, 19 bp, Homo sapiens
  siRNA target sequence for SNTB2 (NM_006750.2,611-629).
ccgagaagtaacaccatat

SEQ ID NO: 119001 - DNA, 19 bp, Homo sapiens
  siRNA target sequence for SNTB2 (NM_006750.2,612-630).
cgagaagtaacaccatata

SEQ ID NO: 119002 - DNA, 19 bp, Homo sapiens
  siRNA target sequence for SNTB2 (NM_006750.2,613-631).
gagaagtaacaccatatat

SEQ ID NO: 119003 - DNA, 19 bp, Homo sapiens
  siRNA target sequence for SNTB2 (NM_006750.2,632-650).
caagaagccatcattagta

SEQ ID NO: 119004 - DNA, 19 bp, Homo sapiens
  siRNA target sequence for SNTB2 (NM_006750.2,678-696).
ccccagtcaccaagcttta

SEQ ID NO: 119005 - DNA, 19 bp, Homo sapiens
  siRNA target sequence for SNTB2 (NM_006750.2,749-767).
gaagatcatccctctcaaa

SEQ ID NO: 119006 - DNA, 19 bp, Homo sapiens
  siRNA target sequence for SNTB2 (NM_006750.2,854-872).
gatcctacgctgcaaagat

SEQ ID NO: 119007 - DNA, 19 bp, Homo sapiens
  siRNA target sequence for SNTB2 (NM_006750.2,857-875).
cctacgctgcaaagataca

SEQ ID NO: 119008 - DNA, 19 bp, Homo sapiens
  siRNA target sequence for SNTB2 (NM_006750.2,901-919).
ctatccacaccaacataat

SEQ ID NO: 119009 - DNA, 19 bp, Homo sapiens
  siRNA target sequence for SNTB2 (NM_006750.2,988-1006).
gtaaagaggtgaagcatat

SEQ ID NO: 119010 - DNA, 19 bp, Homo sapiens
  siRNA target sequence for SNTB2 (NM_006750.2,1142-1160).
ccacagctacccacttgtt

SEQ ID NO: 119011 - DNA, 19 bp, Homo sapiens
  siRNA target sequence for SNTB2 (NM_006750.2,1206-1224).
cttggatctgaccttacat

SEQ ID NO: 119012 - DNA, 19 bp, Homo sapiens
  siRNA target sequence for SNTB2 (NM_006750.2,1243-1261).
ctcgacagggcattgagat

SEQ ID NO: 119013 - DNA, 19 bp, Homo sapiens
  siRNA target sequence for SNTB2 (NM_006750.2,1300-1318).
cctggaccaggatacttgt

SEQ ID NO: 119014 - DNA, 19 bp, Homo sapiens
  siRNA target sequence for SNTB2 (NM_006750.2,1301-1319).
ctggaccaggatacttgtt

SEQ ID NO: 119015 - DNA, 19 bp, Homo sapiens
  siRNA target sequence for SNTB2 (NM_006750.2,1303-1321).
ggaccaggatacttgttca

SEQ ID NO: 119016 - DNA, 19 bp, Homo sapiens
  siRNA target sequence for SNTB2 (NM_006750.2,1383-1401).
caagaggtgaggcttacta

SEQ ID NO: 119017 - DNA, 19 bp, Homo sapiens
  siRNA target sequence for SNTB2 (NM_006750.2,1389-1407).
gtgaggcttactattcact

SEQ ID NO: 119018 - DNA, 19 bp, Homo sapiens
  siRNA target sequence for SNTB2 (NM_006750.2,1391-1409).
gaggcttactattcactat

SEQ ID NO: 119019 - DNA, 19 bp, Homo sapiens
  siRNA target sequence for SNTB2 (NM_006750.2,1393-1411).
ggcttactattcactatga

SEQ ID NO: 119020 - DNA, 19 bp, Homo sapiens
  siRNA target sequence for SNTB2 (NM_006750.2,1394-1412).
gcttactattcactatgaa

SEQ ID NO: 119021 - DNA, 19 bp, Homo sapiens
  siRNA target sequence for SNTB2 (NM_006750.2,1460-1478).
gtaccgctacccctttgaa

SEQ ID NO: 119022 - DNA, 19 bp, Homo sapiens
  siRNA target sequence for SNTB2 (NM_006750.2,1471-1489).
cctttgaaaggctgaagat

SEQ ID NO: 119023 - DNA, 19 bp, Homo sapiens
  siRNA target sequence for SNTB2 (NM_006750.2,1500-1518).
gatggcatccgaaatctat

SEQ ID NO: 119024 - DNA, 19 bp, Homo sapiens
  siRNA target sequence for SNTB2 (NM_006750.2,1503-1521).
ggcatccgaaatctatact

SEQ ID NO: 119025 - DNA, 19 bp, Homo sapiens
  siRNA target sequence for SNTB2 (NM_006750.2,1504-1522).
gcatccgaaatctatactt

SEQ ID NO: 119026 - DNA, 19 bp, Homo sapiens
  siRNA target sequence for SNTB2 (NM_006750.2,1570-1588).
gtccgaagccgattgtatt

SEQ ID NO: 119027 - DNA, 19 bp, Homo sapiens
  siRNA target sequence for SNTB2 (NM_006750.2,1573-1591).
cgaagccgattgtatttgt

SEQ ID NO: 119028 - DNA, 19 bp, Homo sapiens
  siRNA target sequence for SNTB2 (NM_006750.2,1590-1608).
gtgttgcacacgtttttat

SEQ ID NO: 119029 - DNA, 19 bp, Homo sapiens
  siRNA target sequence for SNTB2 (NM_006750.2,1623-1641).
cgtatgggactgcttgtat

SEQ ID NO: 119030 - DNA, 19 bp, Homo sapiens
  siRNA target sequence for SNTG1 (NM_018967.1,570-588).
ccgcctgtgaggagacaaa

SEQ ID NO: 119031 - DNA, 19 bp, Homo sapiens
  siRNA target sequence for SNTG1 (NM_018967.1,671-689).
caggaacaggatgtgatat

SEQ ID NO: 119032 - DNA, 19 bp, Homo sapiens
  siRNA target sequence for SNTG1 (NM_018967.1,673-691).
ggaacaggatgtgatatgt

SEQ ID NO: 119033 - DNA, 19 bp, Homo sapiens
  siRNA target sequence for SNTG1 (NM_018967.1,730-748).
gaccatcagaagacaaaca

SEQ ID NO: 119034 - DNA, 19 bp, Homo sapiens
  siRNA target sequence for SNTG1 (NM_018967.1,747-765).
cagtaggaggatttggatt

SEQ ID NO: 119035 - DNA, 19 bp, Homo sapiens
  siRNA target sequence for SNTG1 (NM_018967.1,749-767).
gtaggaggatttggattaa

SEQ ID NO: 119036 - DNA, 19 bp, Homo sapiens
  siRNA target sequence for SNTG1 (NM_018967.1,776-794).
ggaggagcagaacataaca

SEQ ID NO: 119037 - DNA, 19 bp, Homo sapiens
  siRNA target sequence for SNTG1 (NM_018967.1,797-815).
ccagttgtcgtttcaaaaa

SEQ ID NO: 119038 - DNA, 19 bp, Homo sapiens
  siRNA target sequence for SNTG1 (NM_018967.1,824-842).
gaacaaagagcggaacttt

SEQ ID NO: 119039 - DNA, 19 bp, Homo sapiens
  siRNA target sequence for SNTG1 (NM_018967.1,861-879).
gagatgcaattctacagat

SEQ ID NO: 119040 - DNA, 19 bp, Homo sapiens
  siRNA target sequence for SNTG1 (NM_018967.1,941-959).
ggagaagaagtgactctaa

SEQ ID NO: 119041 - DNA, 19 bp, Homo sapiens
  siRNA target sequence for SNTG1 (NM_018967.1,956-974).
ctaacagtgtcatttttaa

SEQ ID NO: 119042 - DNA, 19 bp, Homo sapiens
  siRNA target sequence for SNTG1 (NM_018967.1,991-1009).
cctcaaactcccattgaat

SEQ ID NO: 119043 - DNA, 19 bp, Homo sapiens
  siRNA target sequence for SNTG1 (NM_018967.1,994-1012).
caaactcccattgaatgaa

SEQ ID NO: 119044 - DNA, 19 bp, Homo sapiens
  siRNA target sequence for SNTG1 (NM_018967.1,1071-1089).
gtggcttacatctcaacta

SEQ ID NO: 119045 - DNA, 19 bp, Homo sapiens
  siRNA target sequence for SNTG1 (NM_018967.1,1096-1114).
caacaatacagacacatta

SEQ ID NO: 119046 - DNA, 19 bp, Homo sapiens
  siRNA target sequence for SNTG1 (NM_018967.1,1099-1117).
caatacagacacattatca

SEQ ID NO: 119047 - DNA, 19 bp, Homo sapiens
  siRNA target sequence for SNTG1 (NM_018967.1,1174-1192).
cagactgatccctctactt

SEQ ID NO: 119048 - DNA, 19 bp, Homo sapiens
  siRNA target sequence for SNTG1 (NM_018967.1,1236-1254).
ggcagaatgcctttcaagt

SEQ ID NO: 119049 - DNA, 19 bp, Homo sapiens
  siRNA target sequence for SNTG1 (NM_018967.1,1325-1343).
caagcaatagcaactaaca

SEQ ID NO: 119050 - DNA, 19 bp, Homo sapiens
  siRNA target sequence for SNTG1 (NM_018967.1,1335-1353).
caactaacatttcaaatct

SEQ ID NO: 119051 - DNA, 19 bp, Homo sapiens
  siRNA target sequence for SNTG1 (NM_018967.1,1394-1412).
gtaaaccagcagattgtct

SEQ ID NO: 119052 - DNA, 19 bp, Homo sapiens
  siRNA target sequence for SNTG1 (NM_018967.1,1488-1506).
ggggctcatgtctctacaa

SEQ ID NO: 119053 - DNA, 19 bp, Homo sapiens
  siRNA target sequence for SNTG1 (NM_018967.1,1607-1625).
ctggaccgacggaaacagt

SEQ ID NO: 119054 - DNA, 19 bp, Homo sapiens
  siRNA target sequence for SNTG1 (NM_018967.1,1647-1665).
ctggggaggacctgtactt

SEQ ID NO: 119055 - DNA, 19 bp, Homo sapiens
  siRNA target sequence for SNTG1 (NM_018967.1,1730-1748).
gaagtagaacggatacagt

SEQ ID NO: 119056 - DNA, 19 bp, Homo sapiens
  siRNA target sequence for SNTG1 (NM_018967.1,1745-1763).
cagtgcaagacctatgcat

SEQ ID NO: 119057 - DNA, 19 bp, Homo sapiens
  siRNA target sequence for SNTG1 (NM_018967.1,1761-1779).
catgtgtgctagaaagtca

SEQ ID NO: 119058 - DNA, 19 bp, Homo sapiens
  siRNA target sequence for SNTG1 (NM_018967.1,1766-1784).
gtgctagaaagtcatctaa

SEQ ID NO: 119059 - DNA, 19 bp, Homo sapiens
  siRNA target sequence for SNTG1 (NM_018967.1,1841-1859).
gctgtcctttggaggtata

SEQ ID NO: 119060 - DNA, 19 bp, Homo sapiens
  siRNA target sequence for SNTG1 (NM_018967.1,1842-1860).
ctgtcctttggaggtataa

SEQ ID NO: 119061 - DNA, 19 bp, Homo sapiens
  siRNA target sequence for SNTG1 (NM_018967.1,1844-1862).
gtcctttggaggtataaat

SEQ ID NO: 119062 - DNA, 19 bp, Homo sapiens
  siRNA target sequence for SNTG1 (NM_018967.1,1915-1933).
gtttcagaatccagatact

SEQ ID NO: 119063 - DNA, 19 bp, Homo sapiens
  siRNA target sequence for SNTG1 (NM_018967.1,2019-2037).
cttgtttggaccctctatt

SEQ ID NO: 119064 - DNA, 19 bp, Homo sapiens
  siRNA target sequence for SNTG1 (NM_018967.1,2083-2101).
cacgagcaaagcaaagtat

SEQ ID NO: 119065 - DNA, 19 bp, Homo sapiens
  siRNA target sequence for SNTG2 (NM_018968.1,200-218).
gcggacgaaaaccactatt

SEQ ID NO: 119066 - DNA, 19 bp, Homo sapiens
  siRNA target sequence for SNTG2 (NM_018968.1,211-229).
ccactattgctctgttgta

SEQ ID NO: 119067 - DNA, 19 bp, Homo sapiens
  siRNA target sequence for SNTG2 (NM_018968.1,212-230).
cactattgctctgttgtat

SEQ ID NO: 119068 - DNA, 19 bp, Homo sapiens
  siRNA target sequence for SNTG2 (NM_018968.1,214-232).
ctattgctctgttgtatga

SEQ ID NO: 119069 - DNA, 19 bp, Homo sapiens
  siRNA target sequence for SNTG2 (NM_018968.1,377-395).
cggcttgggcctgagtata

SEQ ID NO: 119070 - DNA, 19 bp, Homo sapiens
  siRNA target sequence for SNTG2 (NM_018968.1,416-434).
cgtccctgtcgtcatatca

SEQ ID NO: 119071 - DNA, 19 bp, Homo sapiens
  siRNA target sequence for SNTG2 (NM_018968.1,417-435).
gtccctgtcgtcatatcaa

SEQ ID NO: 119072 - DNA, 19 bp, Homo sapiens
  siRNA target sequence for SNTG2 (NM_018968.1,421-439).
ctgtcgtcatatcaaaaat

SEQ ID NO: 119073 - DNA, 19 bp, Homo sapiens
  siRNA target sequence for SNTG2 (NM_018968.1,459-477).
gaccagacagggatgttgt

SEQ ID NO: 119074 - DNA, 19 bp, Homo sapiens
  siRNA target sequence for SNTG2 (NM_018968.1,497-515).
ccaggttaatggcatacat

SEQ ID NO: 119075 - DNA, 19 bp, Homo sapiens
  siRNA target sequence for SNTG2 (NM_018968.1,500-518).
ggttaatggcatacatgta

SEQ ID NO: 119076 - DNA, 19 bp, Homo sapiens
  siRNA target sequence for SNTG2 (NM_018968.1,577-595).
ccatcaccgttgagtatct

SEQ ID NO: 119077 - DNA, 19 bp, Homo sapiens
  siRNA target sequence for SNTG2 (NM_018968.1,680-698).
ctttgacagcggtttgcat

SEQ ID NO: 119078 - DNA, 19 bp, Homo sapiens
  siRNA target sequence for SNTG2 (NM_018968.1,735-753).
ccttcctcgcccatagcta

SEQ ID NO: 119079 - DNA, 19 bp, Homo sapiens
  siRNA target sequence for SNTG2 (NM_018968.1,736-754).
cttcctcgcccatagctaa

SEQ ID NO: 119080 - DNA, 19 bp, Homo sapiens
  siRNA target sequence for SNTG2 (NM_018968.1,827-845).
caaagccggaacggaaaaa

SEQ ID NO: 119081 - DNA, 19 bp, Homo sapiens
  siRNA target sequence for SNTG2 (NM_018968.1,831-849).
gccggaacggaaaaattaa

SEQ ID NO: 119082 - DNA, 19 bp, Homo sapiens
  siRNA target sequence for SORBS1 (NM_006434.1,182-200).
cccggcaacacgaaagcaa

SEQ ID NO: 119083 - DNA, 19 bp, Homo sapiens
  siRNA target sequence for SORBS1 (NM_006434.1,183-201).
ccggcaacacgaaagcaaa

SEQ ID NO: 119084 - DNA, 19 bp, Homo sapiens
  siRNA target sequence for SORBS1 (NM_006434.1,319-337).
gattccagtcctctactaa

SEQ ID NO: 119085 - DNA, 19 bp, Homo sapiens
  siRNA target sequence for SORBS1 (NM_006434.1,328-346).
cctctactaaatgaagttt

SEQ ID NO: 119086 - DNA, 19 bp, Homo sapiens
  siRNA target sequence for SORBS1 (NM_006434.1,331-349).
ctactaaatgaagtttctt

SEQ ID NO: 119087 - DNA, 19 bp, Homo sapiens
  siRNA target sequence for SORBS1 (NM_006434.1,408-426).
ctatccctccacaacgatt

SEQ ID NO: 119088 - DNA, 19 bp, Homo sapiens
  siRNA target sequence for SORBS1 (NM_006434.1,412-430).
ccctccacaacgattgtca

SEQ ID NO: 119089 - DNA, 19 bp, Homo sapiens
  siRNA target sequence for SORBS1 (NM_006434.1,413-431).
cctccacaacgattgtcaa

SEQ ID NO: 119090 - DNA, 19 bp, Homo sapiens
  siRNA target sequence for SORBS1 (NM_006434.1,414-432).
ctccacaacgattgtcaat

SEQ ID NO: 119091 - DNA, 19 bp, Homo sapiens
  siRNA target sequence for SORBS1 (NM_006434.1,476-494).
gactcagtagcctttcaga

SEQ ID NO: 119092 - DNA, 19 bp, Homo sapiens
  siRNA target sequence for SORBS1 (NM_006434.1,664-682).
cggaacactgagagatcaa

SEQ ID NO: 119093 - DNA, 19 bp, Homo sapiens
  siRNA target sequence for SORBS1 (NM_006434.1,745-763).
ctgtactctcccagatact

SEQ ID NO: 119094 - DNA, 19 bp, Homo sapiens
  siRNA target sequence for SORBS1 (NM_006434.1,747-765).
gtactctcccagatactca

SEQ ID NO: 119095 - DNA, 19 bp, Homo sapiens
  siRNA target sequence for SORBS1 (NM_006434.1,896-914).
caagctcagaaagaaatga

SEQ ID NO: 119096 - DNA, 19 bp, Homo sapiens
  siRNA target sequence for SORBS1 (NM_006434.1,958-976).
gcagagcccaagagcattt

SEQ ID NO: 119097 - DNA, 19 bp, Homo sapiens
  siRNA target sequence for SORBS1 (NM_006434.1,1001-1019).
ccgttctgaccaacgaaaa

SEQ ID NO: 119098 - DNA, 19 bp, Homo sapiens
  siRNA target sequence for SORBS1 (NM_006434.1,1003-1021).
gttctgaccaacgaaaaga

SEQ ID NO: 119099 - DNA, 19 bp, Homo sapiens
  siRNA target sequence for SORBS1 (NM_006434.1,1257-1275).
gccaagacattttatacca

SEQ ID NO: 119100 - DNA, 19 bp, Homo sapiens
  siRNA target sequence for SORBS1 (NM_006434.1,1288-1306).
gaatccacggaagaattta

SEQ ID NO: 119101 - DNA, 19 bp, Homo sapiens
  siRNA target sequence for SORBS1 (NM_006434.1,1293-1311).
cacggaagaatttattcga

SEQ ID NO: 119102 - DNA, 19 bp, Homo sapiens
  siRNA target sequence for SORBS1 (NM_006434.1,1309-1327).
cgaagacgtcatgatgata

SEQ ID NO: 119103 - DNA, 19 bp, Homo sapiens
  siRNA target sequence for SORBS1 (NM_006434.1,1310-1328).
gaagacgtcatgatgataa

SEQ ID NO: 119104 - DNA, 19 bp, Homo sapiens
  siRNA target sequence for SORBS1 (NM_006434.1,1315-1333).
cgtcatgatgataaagaga

SEQ ID NO: 119105 - DNA, 19 bp, Homo sapiens
  siRNA target sequence for SORBS1 (NM_006434.1,1342-1360).
gccagagccaaatttgact

SEQ ID NO: 119106 - DNA, 19 bp, Homo sapiens
  siRNA target sequence for SORBS1 (NM_006434.1,1346-1364).
gagccaaatttgactttaa

SEQ ID NO: 119107 - DNA, 19 bp, Homo sapiens
  siRNA target sequence for SORBS1 (NM_006434.1,1516-1534).
gcacagcccaaaaagttga

SEQ ID NO: 119108 - DNA, 19 bp, Homo sapiens
  siRNA target sequence for SORBS1 (NM_006434.1,1561-1579).
gaagctattgctaagttta

SEQ ID NO: 119109 - DNA, 19 bp, Homo sapiens
  siRNA target sequence for SORBS1 (NM_006434.1,1856-1874).
gtcaaacctcacaagattt

SEQ ID NO: 119110 - DNA, 19 bp, Homo sapiens
  siRNA target sequence for SORBS1 (NM_006434.1,1898-1916).
gctatataccacagaatga

SEQ ID NO: 119111 - DNA, 19 bp, Homo sapiens
  siRNA target sequence for SORBS1 (NM_006434.1,1932-1950).
ccgcgatggagatatcgtt

SEQ ID NO: 119112 - DNA, 19 bp, Homo sapiens
  siRNA target sequence for SORBS1 (NM_006434.1,2007-2025).
gcagtttggtacttttcca

SEQ ID NO: 119113 - DNA, 19 bp, Homo sapiens
  siRNA target sequence for SORBS1 (NM_006434.1,2026-2044).
ggcaactatgtaaaacctt

SEQ ID NO: 119114 - DNA, 19 bp, Homo sapiens
  siRNA target sequence for SORBS1 (NM_015385.1,558-576).
cccagccggaggtaatagt

SEQ ID NO: 119115 - DNA, 19 bp, Homo sapiens
  siRNA target sequence for SORBS1 (NM_015385.1,559-577).
ccagccggaggtaatagtt

SEQ ID NO: 119116 - DNA, 19 bp, Homo sapiens
  siRNA target sequence for SORBS1 (NM_015385.1,700-718).
gaccttcccgactctagat

SEQ ID NO: 119117 - DNA, 19 bp, Homo sapiens
  siRNA target sequence for SORBS1 (NM_015385.1,702-720).
ccttcccgactctagatga

SEQ ID NO: 119118 - DNA, 19 bp, Homo sapiens
  siRNA target sequence for SORBS1 (NM_015385.1,703-721).
cttcccgactctagatgat

SEQ ID NO: 119119 - DNA, 19 bp, Homo sapiens
  siRNA target sequence for SORBS1 (NM_015385.1,709-727).
gactctagatgatttcatt

SEQ ID NO: 119120 - DNA, 19 bp, Homo sapiens
  siRNA target sequence for SORBS1 (NM_015385.1,1008-1026).
cgattgtcaatcctactat

SEQ ID NO: 119121 - DNA, 19 bp, Homo sapiens
  siRNA target sequence for SORBS1 (NM_015385.1,1009-1027).
gattgtcaatcctactatt

SEQ ID NO: 119122 - DNA, 19 bp, Homo sapiens
  siRNA target sequence for SORBS1 (NM_015385.1,1342-1360).
cagatactcattttctgaa

SEQ ID NO: 119123 - DNA, 19 bp, Homo sapiens
  siRNA target sequence for SORBS1 (NM_015385.1,1621-1639).
cagccctactccggaaatt

SEQ ID NO: 119124 - DNA, 19 bp, Homo sapiens
  siRNA target sequence for SORBS1 (NM_015385.1,1624-1642).
ccctactccggaaatttct

SEQ ID NO: 119125 - DNA, 19 bp, Homo sapiens
  siRNA target sequence for SORBS1 (NM_015385.1,1625-1643).
cctactccggaaatttctt

SEQ ID NO: 119126 - DNA, 19 bp, Homo sapiens
  siRNA target sequence for SPTAN1 (NM_003127.1,297-315).
gattgcatctgatgagaat

SEQ ID NO: 119127 - DNA, 19 bp, Homo sapiens
  siRNA target sequence for SPTAN1 (NM_003127.1,384-402).
caactcaggagccattgtt

SEQ ID NO: 119128 - DNA, 19 bp, Homo sapiens
  siRNA target sequence for SPTAN1 (NM_003127.1,486-504).
ccgccagtgggaattactt

SEQ ID NO: 119129 - DNA, 19 bp, Homo sapiens
  siRNA target sequence for SPTAN1 (NM_003127.1,487-505).
cgccagtgggaattacttt

SEQ ID NO: 119130 - DNA, 19 bp, Homo sapiens
  siRNA target sequence for SPTAN1 (NM_003127.1,558-576).
gcagtacttacgagaatgt

SEQ ID NO: 119131 - DNA, 19 bp, Homo sapiens
  siRNA target sequence for SPTAN1 (NM_003127.1,603-621).
caaggaagcaattgttact

SEQ ID NO: 119132 - DNA, 19 bp, Homo sapiens
  siRNA target sequence for SPTAN1 (NM_003127.1,606-624).
ggaagcaattgttacttct

SEQ ID NO: 119133 - DNA, 19 bp, Homo sapiens
  siRNA target sequence for SPTAN1 (NM_003127.1,898-916).
gagactatcagttggatta

SEQ ID NO: 119134 - DNA, 19 bp, Homo sapiens
  siRNA target sequence for SPTAN1 (NM_003127.1,1083-1101).
gagtgcaacacagattcaa

SEQ ID NO: 119135 - DNA, 19 bp, Homo sapiens
  siRNA target sequence for SPTAN1 (NM_003127.1,1085-1103).
gtgcaacacagattcaagt

SEQ ID NO: 119136 - DNA, 19 bp, Homo sapiens
  siRNA target sequence for SPTAN1 (NM_003127.1,1160-1178).
gacatgcacggctcaatga

SEQ ID NO: 119137 - DNA, 19 bp, Homo sapiens
  siRNA target sequence for SPTAN1 (NM_003127.1,1165-1183).
gcacggctcaatgattcat

SEQ ID NO: 119138 - DNA, 19 bp, Homo sapiens
  siRNA target sequence for SPTAN1 (NM_003127.1,1166-1184).
cacggctcaatgattcata

SEQ ID NO: 119139 - DNA, 19 bp, Homo sapiens
  siRNA target sequence for SPTAN1 (NM_003127.1,1168-1186).
cggctcaatgattcataca

SEQ ID NO: 119140 - DNA, 19 bp, Homo sapiens
  siRNA target sequence for SPTAN1 (NM_003127.1,1317-1335).
gcacaagggtgaaattgat

SEQ ID NO: 119141 - DNA, 19 bp, Homo sapiens
  siRNA target sequence for SPTAN1 (NM_003127.1,1353-1371).
caaatctgcagatgaatct

SEQ ID NO: 119142 - DNA, 19 bp, Homo sapiens
  siRNA target sequence for SPTAN1 (NM_003127.1,1560-1578).
ggaggcgttcctgttgaat

SEQ ID NO: 119143 - DNA, 19 bp, Homo sapiens
  siRNA target sequence for SPTAN1 (NM_003127.1,1563-1581).
ggcgttcctgttgaatgaa

SEQ ID NO: 119144 - DNA, 19 bp, Homo sapiens
  siRNA target sequence for SPTAN1 (NM_003127.1,1690-1708).
gcaaccaagctaattcaga

SEQ ID NO: 119145 - DNA, 19 bp, Homo sapiens
  siRNA target sequence for SPTAN1 (NM_003127.1,1691-1709).
caaccaagctaattcagaa

SEQ ID NO: 119146 - DNA, 19 bp, Homo sapiens
  siRNA target sequence for SPTAN1 (NM_003127.1,1705-1723).
cagaacaaccactatgcaa

SEQ ID NO: 119147 - DNA, 19 bp, Homo sapiens
  siRNA target sequence for SPTAN1 (NM_003127.1,1710-1728).
caaccactatgcaatggaa

SEQ ID NO: 119148 - DNA, 19 bp, Homo sapiens
  siRNA target sequence for SPTAN1 (NM_003127.1,1801-1819).
gcccagctagccgattctt

SEQ ID NO: 119149 - DNA, 19 bp, Homo sapiens
  siRNA target sequence for SPTAN1 (NM_003127.1,1802-1820).
cccagctagccgattcttt

SEQ ID NO: 119150 - DNA, 19 bp, Homo sapiens
  siRNA target sequence for SPTAN1 (NM_003127.1,1806-1824).
gctagccgattctttccat

SEQ ID NO: 119151 - DNA, 19 bp, Homo sapiens
  siRNA target sequence for SPTAN1 (NM_003127.1,1830-1848).
gcagtttttccgtgattct

SEQ ID NO: 119152 - DNA, 19 bp, Homo sapiens
  siRNA target sequence for SPTAN1 (NM_003127.1,1889-1907).
ccacagatgaagcttataa

SEQ ID NO: 119153 - DNA, 19 bp, Homo sapiens
  siRNA target sequence for SPTAN1 (NM_003127.1,1917-1935).
caacctacaaggaaaagta

SEQ ID NO: 119154 - DNA, 19 bp, Homo sapiens
  siRNA target sequence for SPTAN1 (NM_003127.1,2006-2024).
gccaaaagctgattgatgt

SEQ ID NO: 119155 - DNA, 19 bp, Homo sapiens
  siRNA target sequence for SPTAN1 (NM_003127.1,2200-2218).
cacttggcttcggatgatt

SEQ ID NO: 119156 - DNA, 19 bp, Homo sapiens
  siRNA target sequence for SPTAN1 (NM_003127.1,2215-2233).
gattacggcaaagatctta

SEQ ID NO: 119157 - DNA, 19 bp, Homo sapiens
  siRNA target sequence for SPTAN1 (NM_003127.1,2220-2238).
cggcaaagatcttaccaat

SEQ ID NO: 119158 - DNA, 19 bp, Homo sapiens
  siRNA target sequence for SPTAN1 (NM_003127.1,2493-2511).
gacgtggattcgagagaaa

SEQ ID NO: 119159 - DNA, 19 bp, Homo sapiens
  siRNA target sequence for SPTAN1 (NM_003127.1,2495-2513).
cgtggattcgagagaaaga

SEQ ID NO: 119160 - DNA, 19 bp, Homo sapiens
  siRNA target sequence for SPTAN1 (NM_003127.1,2531-2549).
ccaacagaggtaaggattt

SEQ ID NO: 119161 - DNA, 19 bp, Homo sapiens
  siRNA target sequence for SPTAN1 (NM_003127.1,2532-2550).
caacagaggtaaggattta

SEQ ID NO: 119162 - DNA, 19 bp, Homo sapiens
  siRNA target sequence for SPTAN1 (NM_003127.1,2586-2604).
cttacaagcagaaattgct

SEQ ID NO: 119163 - DNA, 19 bp, Homo sapiens
  siRNA target sequence for SPTAN1 (NM_003127.1,2940-2958).
ccaggctttgcgagaacaa

SEQ ID NO: 119164 - DNA, 19 bp, Homo sapiens
  siRNA target sequence for SPTAN1 (NM_003127.1,3066-3084).
gaagaagggagatatcctt

SEQ ID NO: 119165 - DNA, 19 bp, Homo sapiens
  siRNA target sequence for SPTAN1 (NM_003127.1,3072-3090).
gggagatatccttacctta

SEQ ID NO: 119166 - DNA, 19 bp, Homo sapiens
  siRNA target sequence for SPTAN1 (NM_003127.1,3076-3094).
gatatccttaccttactca

SEQ ID NO: 119167 - DNA, 19 bp, Homo sapiens
  siRNA target sequence for SPTAN1 (NM_003127.1,3152-3170).
cggctgcgtacgtgaagaa

SEQ ID NO: 119168 - DNA, 19 bp, Homo sapiens
  siRNA target sequence for SPTAN1 (NM_003127.1,3153-3171).
ggctgcgtacgtgaagaaa

SEQ ID NO: 119169 - DNA, 19 bp, Homo sapiens
  siRNA target sequence for SPTAN1 (NM_003127.1,3154-3172).
gctgcgtacgtgaagaaat

SEQ ID NO: 119170 - DNA, 19 bp, Homo sapiens
  siRNA target sequence for SPTAN1 (NM_003127.1,3155-3173).
ctgcgtacgtgaagaaatt

SEQ ID NO: 119171 - DNA, 19 bp, Homo sapiens
  siRNA target sequence for SPTAN1 (NM_003127.1,3252-3270).
caatcagacacgcataact

SEQ ID NO: 119172 - DNA, 19 bp, Homo sapiens
  siRNA target sequence for SPTAN1 (NM_003127.1,3284-3302).
gtgtatctctgcgtatgaa

SEQ ID NO: 119173 - DNA, 19 bp, Homo sapiens
  siRNA target sequence for SPTAN1 (NM_003127.1,3303-3321).
gcaggtggaagaactatat

SEQ ID NO: 119174 - DNA, 19 bp, Homo sapiens
  siRNA target sequence for SPTAN1 (NM_003127.1,3393-3411).
ccgtgaagcgaatgaacta

SEQ ID NO: 119175 - DNA, 19 bp, Homo sapiens
  siRNA target sequence for SPTAN1 (NM_003127.1,3395-3413).
gtgaagcgaatgaactaca

SEQ ID NO: 119176 - DNA, 19 bp, Homo sapiens
  siRNA target sequence for SPTAN1 (NM_003127.1,3538-3556).
cggttgaaggacattaaca

SEQ ID NO: 119177 - DNA, 19 bp, Homo sapiens
  siRNA target sequence for SPTAN1 (NM_003127.1,3636-3654).
gatgcccagggatgaaact

SEQ ID NO: 119178 - DNA, 19 bp, Homo sapiens
  siRNA target sequence for SPTAN1 (NM_003127.1,3644-3662).
gggatgaaactgattccaa

SEQ ID NO: 119179 - DNA, 19 bp, Homo sapiens
  siRNA target sequence for SPTAN1 (NM_003127.1,3789-3807).
gggcagcgcccatgaagta

SEQ ID NO: 119180 - DNA, 19 bp, Homo sapiens
  siRNA target sequence for SPTAN1 (NM_003127.1,3791-3809).
gcagcgcccatgaagtaca

SEQ ID NO: 119181 - DNA, 19 bp, Homo sapiens
  siRNA target sequence for SPTAN1 (NM_003127.1,3858-3876).
gaatcaagctctaaacaca

SEQ ID NO: 119182 - DNA, 19 bp, Homo sapiens
  siRNA target sequence for SPTAN1 (NM_003127.1,3865-3883).
gctctaaacacagacaatt

SEQ ID NO: 119183 - DNA, 19 bp, Homo sapiens
  siRNA target sequence for SPTAN1 (NM_003127.1,3953-3971).
ctctcggtgacaaggtaaa

SEQ ID NO: 119184 - DNA, 19 bp, Homo sapiens
  siRNA target sequence for SPTAN1 (NM_003127.1,4280-4298).
gcactttccaggcatttga

SEQ ID NO: 119185 - DNA, 19 bp, Homo sapiens
  siRNA target sequence for SPTAN1 (NM_003127.1,4317-4335).
gttggctcacggacactat

SEQ ID NO: 119186 - DNA, 19 bp, Homo sapiens
  siRNA target sequence for SPTAN1 (NM_003127.1,4347-4365).
gatcaagcagaaacttgat

SEQ ID NO: 119187 - DNA, 19 bp, Homo sapiens
  siRNA target sequence for SPTAN1 (NM_003127.1,4350-4368).
caagcagaaacttgatatt

SEQ ID NO: 119188 - DNA, 19 bp, Homo sapiens
  siRNA target sequence for SPTAN1 (NM_003127.1,4353-4371).
gcagaaacttgatattctt

SEQ ID NO: 119189 - DNA, 19 bp, Homo sapiens
  siRNA target sequence for SPTAN1 (NM_003127.1,4492-4510).
cgggaggccttcttgaata

SEQ ID NO: 119190 - DNA, 19 bp, Homo sapiens
  siRNA target sequence for SPTAN1 (NM_003127.1,4538-4556).
gcgtagaggctctgatcaa

SEQ ID NO: 119191 - DNA, 19 bp, Homo sapiens
  siRNA target sequence for SPTAN1 (NM_003127.1,4539-4557).
cgtagaggctctgatcaaa

SEQ ID NO: 119192 - DNA, 19 bp, Homo sapiens
  siRNA target sequence for SPTAN1 (NM_003127.1,4540-4558).
gtagaggctctgatcaaaa

SEQ ID NO: 119193 - DNA, 19 bp, Homo sapiens
  siRNA target sequence for SPTAN1 (NM_003127.1,4545-4563).
ggctctgatcaaaaaacat

SEQ ID NO: 119194 - DNA, 19 bp, Homo sapiens
  siRNA target sequence for SPTAN1 (NM_003127.1,4654-4672).
gccaagggagacatttcta

SEQ ID NO: 119195 - DNA, 19 bp, Homo sapiens
  siRNA target sequence for SPTAN1 (NM_003127.1,4695-4713).
caggtggcgacgtctgaaa

SEQ ID NO: 119196 - DNA, 19 bp, Homo sapiens
  siRNA target sequence for SPTAN1 (NM_003127.1,4751-4769).
ctcaaaccctccaacagtt

SEQ ID NO: 119197 - DNA, 19 bp, Homo sapiens
  siRNA target sequence for SPTAN1 (NM_003127.1,4794-4812).
ggcttggatcagtgaaaaa

SEQ ID NO: 119198 - DNA, 19 bp, Homo sapiens
  siRNA target sequence for SPTAN1 (NM_003127.1,4796-4814).
cttggatcagtgaaaaatt

SEQ ID NO: 119199 - DNA, 19 bp, Homo sapiens
  siRNA target sequence for SPTAN1 (NM_003127.1,4800-4818).
gatcagtgaaaaattgcaa

SEQ ID NO: 119200 - DNA, 19 bp, Homo sapiens
  siRNA target sequence for SPTAN1 (NM_003127.1,4916-4934).
ggatccgtggggttatcga

SEQ ID NO: 119201 - DNA, 19 bp, Homo sapiens
  siRNA target sequence for SPTAN1 (NM_003127.1,4938-4956).
gggcaactccctcattgaa

SEQ ID NO: 119202 - DNA, 19 bp, Homo sapiens
  siRNA target sequence for SPTAN1 (NM_003127.1,5140-5158).
ctgctggcatccgaagatt

SEQ ID NO: 119203 - DNA, 19 bp, Homo sapiens
  siRNA target sequence for SPTAN1 (NM_003127.1,5206-5224).
ctgctggaagcagatatat

SEQ ID NO: 119204 - DNA, 19 bp, Homo sapiens
  siRNA target sequence for SPTAN1 (NM_003127.1,5546-5564).
cgcatgagccggctattca

SEQ ID NO: 119205 - DNA, 19 bp, Homo sapiens
  siRNA target sequence for SPTAN1 (NM_003127.1,5700-5718).
ggaagagtccttggaatat

SEQ ID NO: 119206 - DNA, 19 bp, Homo sapiens
  siRNA target sequence for SPTAN1 (NM_003127.1,5776-5794).
ctggtggccagcgaagatt

SEQ ID NO: 119207 - DNA, 19 bp, Homo sapiens
  siRNA target sequence for SPTAN1 (NM_003127.1,5778-5796).
ggtggccagcgaagattat

SEQ ID NO: 119208 - DNA, 19 bp, Homo sapiens
  siRNA target sequence for SPTAN1 (NM_003127.1,5812-5830).
gccatccagggcttactga

SEQ ID NO: 119209 - DNA, 19 bp, Homo sapiens
  siRNA target sequence for SPTAN1 (NM_003127.1,5868-5886).
caaggatcgcgtgaatgat

SEQ ID NO: 119210 - DNA, 19 bp, Homo sapiens
  siRNA target sequence for SPTAN1 (NM_003127.1,5902-5920).
caagacctcattaagaaga

SEQ ID NO: 119211 - DNA, 19 bp, Homo sapiens
  siRNA target sequence for SPTAN1 (NM_003127.1,5959-5977).
ggcctgaacgggaaagtgt

SEQ ID NO: 119212 - DNA, 19 bp, Homo sapiens
  siRNA target sequence for SPTAN1 (NM_003127.1,6147-6165).
caccaaacaggaaactttt

SEQ ID NO: 119213 - DNA, 19 bp, Homo sapiens
  siRNA target sequence for SPTAN1 (NM_003127.1,6193-6211).
gaaggcattgccaacatca

SEQ ID NO: 119214 - DNA, 19 bp, Homo sapiens
  siRNA target sequence for SPTAN1 (NM_003127.1,6408-6426).
cttcaacagctggtttgaa

SEQ ID NO: 119215 - DNA, 19 bp, Homo sapiens
  siRNA target sequence for SPTAN1 (NM_003127.1,6411-6429).
caacagctggtttgaaaat

SEQ ID NO: 119216 - DNA, 19 bp, Homo sapiens
  siRNA target sequence for SPTAN1 (NM_003127.1,6598-6616).
ccctacacctggtttacca

SEQ ID NO: 119217 - DNA, 19 bp, Homo sapiens
  siRNA target sequence for SPTAN1 (NM_003127.1,6638-6656).
ggaggaacctacagaaaat

SEQ ID NO: 119218 - DNA, 19 bp, Homo sapiens
  siRNA target sequence for SPTB (NM_000347.3,98-116).
gacatcggccacagagttt

SEQ ID NO: 119219 - DNA, 19 bp, Homo sapiens
  siRNA target sequence for SPTB (NM_000347.3,100-118).
catcggccacagagtttga

SEQ ID NO: 119220 - DNA, 19 bp, Homo sapiens
  siRNA target sequence for SPTB (NM_000347.3,248-266).
gcgggaagttgttcagaaa

SEQ ID NO: 119221 - DNA, 19 bp, Homo sapiens
  siRNA target sequence for SPTB (NM_000347.3,249-267).
cgggaagttgttcagaaaa

SEQ ID NO: 119222 - DNA, 19 bp, Homo sapiens
  siRNA target sequence for SPTB (NM_000347.3,313-331).
gccgcatcaccgatctcta

SEQ ID NO: 119223 - DNA, 19 bp, Homo sapiens
  siRNA target sequence for SPTB (NM_000347.3,657-675).
gcaggctaccctcatgtta

SEQ ID NO: 119224 - DNA, 19 bp, Homo sapiens
  siRNA target sequence for SPTB (NM_000347.3,658-676).
caggctaccctcatgttaa

SEQ ID NO: 119225 - DNA, 19 bp, Homo sapiens
  siRNA target sequence for SPTB (NM_000347.3,745-763).
ccgacctgatcgactttga

SEQ ID NO: 119226 - DNA, 19 bp, Homo sapiens
  siRNA target sequence for SPTB (NM_000347.3,746-764).
cgacctgatcgactttgat

SEQ ID NO: 119227 - DNA, 19 bp, Homo sapiens
  siRNA target sequence for SPTB (NM_000347.3,747-765).
gacctgatcgactttgata

SEQ ID NO: 119228 - DNA, 19 bp, Homo sapiens
  siRNA target sequence for SPTB (NM_000347.3,794-812).
cctggagcacgcattcaat

SEQ ID NO: 119229 - DNA, 19 bp, Homo sapiens
  siRNA target sequence for SPTB (NM_000347.3,868-886).
cggaaaaccctgatgagaa

SEQ ID NO: 119230 - DNA, 19 bp, Homo sapiens
  siRNA target sequence for SPTB (NM_000347.3,959-977).
gcgtgtcggcaaggttatt

SEQ ID NO: 119231 - DNA, 19 bp, Homo sapiens
  siRNA target sequence for SPTB (NM_000347.3,961-979).
gtgtcggcaaggttattga

SEQ ID NO: 119232 - DNA, 19 bp, Homo sapiens
  siRNA target sequence for SPTB (NM_000347.3,1067-1085).
cctgaacagccgcaagttt

SEQ ID NO: 119233 - DNA, 19 bp, Homo sapiens
  siRNA target sequence for SPTB (NM_000347.3,1172-1190).
ggggaatctggaagttcta

SEQ ID NO: 119234 - DNA, 19 bp, Homo sapiens
  siRNA target sequence for SPTB (NM_000347.3,1174-1192).
ggaatctggaagttctact

SEQ ID NO: 119235 - DNA, 19 bp, Homo sapiens
  siRNA target sequence for SPTB (NM_000347.3,1208-1226).
ccggatgagagccaacaat

SEQ ID NO: 119236 - DNA, 19 bp, Homo sapiens
  siRNA target sequence for SPTB (NM_000347.3,1218-1236).
gccaacaatcagaaagtgt

SEQ ID NO: 119237 - DNA, 19 bp, Homo sapiens
  siRNA target sequence for SPTB (NM_000347.3,1219-1237).
ccaacaatcagaaagtgta

SEQ ID NO: 119238 - DNA, 19 bp, Homo sapiens
  siRNA target sequence for SPTB (NM_000347.3,1243-1261).
cccacgatgggaaactagt

SEQ ID NO: 119239 - DNA, 19 bp, Homo sapiens
  siRNA target sequence for SPTB (NM_000347.3,1858-1876).
ccgcagccaccctgaagtt

SEQ ID NO: 119240 - DNA, 19 bp, Homo sapiens
  siRNA target sequence for SPTB (NM_000347.3,2516-2534).
gggattccccgaagagttt

SEQ ID NO: 119241 - DNA, 19 bp, Homo sapiens
  siRNA target sequence for SPTB (NM_000347.3,2789-2807).
gaccttgatgactcagatt

SEQ ID NO: 119242 - DNA, 19 bp, Homo sapiens
  siRNA target sequence for SPTB (NM_000347.3,3001-3019).
ggatcacggacaagacaaa

SEQ ID NO: 119243 - DNA, 19 bp, Homo sapiens
  siRNA target sequence for SPTB (NM_000347.3,3192-3210).
ggtcagcggcaaaaacact

SEQ ID NO: 119244 - DNA, 19 bp, Homo sapiens
  siRNA target sequence for SPTB (NM_000347.3,3193-3211).
gtcagcggcaaaaacactt

SEQ ID NO: 119245 - DNA, 19 bp, Homo sapiens
  siRNA target sequence for SPTB (NM_000347.3,3442-3460).
gctaccagcgtgttaagga

SEQ ID NO: 119246 - DNA, 19 bp, Homo sapiens
  siRNA target sequence for SPTB (NM_000347.3,3485-3503).
ccagacggacccagagtat

SEQ ID NO: 119247 - DNA, 19 bp, Homo sapiens
  siRNA target sequence for SPTB (NM_000347.3,3707-3725).
ggctgggatccggaagttt

SEQ ID NO: 119248 - DNA, 19 bp, Homo sapiens
  siRNA target sequence for SPTB (NM_000347.3,4008-4026).
gcacgaaaccttcacaata

SEQ ID NO: 119249 - DNA, 19 bp, Homo sapiens
  siRNA target sequence for SPTB (NM_000347.3,4009-4027).
cacgaaaccttcacaataa

SEQ ID NO: 119250 - DNA, 19 bp, Homo sapiens
  siRNA target sequence for SPTB (NM_000347.3,4606-4624).
ccgactatggcactaatct

SEQ ID NO: 119251 - DNA, 19 bp, Homo sapiens
  siRNA target sequence for SPTB (NM_000347.3,5272-5290).
ctcttctgcgggacaagtt

SEQ ID NO: 119252 - DNA, 19 bp, Homo sapiens
  siRNA target sequence for SPTB (NM_000347.3,5675-5693).
ccgtctgcagacagcatat

SEQ ID NO: 119253 - DNA, 19 bp, Homo sapiens
  siRNA target sequence for SPTB (NM_000347.3,5793-5811).
gtggacacggcggataaat

SEQ ID NO: 119254 - DNA, 19 bp, Homo sapiens
  siRNA target sequence for SPTB (NM_000347.3,5907-5925).
gtggaactgctcatgaagt

SEQ ID NO: 119255 - DNA, 19 bp, Homo sapiens
  siRNA target sequence for SPTB (NM_000347.3,5924-5942).
gtatcaccagggcatcaat

SEQ ID NO: 119256 - DNA, 19 bp, Homo sapiens
  siRNA target sequence for SPTB (NM_000347.3,6310-6328).
ccacgcttgagctgaaaga

SEQ ID NO: 119257 - DNA, 19 bp, Homo sapiens
  siRNA target sequence for SPTB (NM_000347.3,6311-6329).
cacgcttgagctgaaagaa

SEQ ID NO: 119258 - DNA, 19 bp, Homo sapiens
  siRNA target sequence for SPTB (NM_000347.3,6447-6465).
ctctggtctcgtttgtcta

SEQ ID NO: 119259 - DNA, 19 bp, Homo sapiens
  siRNA target sequence for SPTBN1 (NM_003128.1,873-891).
ctgggtaccccaatgtcaa

SEQ ID NO: 119260 - DNA, 19 bp, Homo sapiens
  siRNA target sequence for SPTBN1 (NM_003128.1,876-894).
ggtaccccaatgtcaacat

SEQ ID NO: 119261 - DNA, 19 bp, Homo sapiens
  siRNA target sequence for SPTBN1 (NM_003128.1,877-895).
gtaccccaatgtcaacatt

SEQ ID NO: 119262 - DNA, 19 bp, Homo sapiens
  siRNA target sequence for SPTBN1 (NM_003128.1,881-899).
cccaatgtcaacattcaca

SEQ ID NO: 119263 - DNA, 19 bp, Homo sapiens
  siRNA target sequence for SPTBN1 (NM_003128.1,882-900).
ccaatgtcaacattcacaa

SEQ ID NO: 119264 - DNA, 19 bp, Homo sapiens
  siRNA target sequence for SPTBN1 (NM_003128.1,883-901).
caatgtcaacattcacaat

SEQ ID NO: 119265 - DNA, 19 bp, Homo sapiens
  siRNA target sequence for SPTBN1 (NM_003128.1,934-952).
caatgcactgatacacaaa

SEQ ID NO: 119266 - DNA, 19 bp, Homo sapiens
  siRNA target sequence for SPTBN1 (NM_003128.1,967-985).
gatagattttgacaaacta

SEQ ID NO: 119267 - DNA, 19 bp, Homo sapiens
  siRNA target sequence for SPTBN1 (NM_003128.1,1039-1057).
gcacctcggcctcactaaa

SEQ ID NO: 119268 - DNA, 19 bp, Homo sapiens
  siRNA target sequence for SPTBN1 (NM_003128.1,1043-1061).
ctcggcctcactaaactgt

SEQ ID NO: 119269 - DNA, 19 bp, Homo sapiens
  siRNA target sequence for SPTBN1 (NM_003128.1,1099-1117).
gaagtccataatcacttat

SEQ ID NO: 119270 - DNA, 19 bp, Homo sapiens
  siRNA target sequence for SPTBN1 (NM_003128.1,1113-1131).
cttatgtggtgacttatta

SEQ ID NO: 119271 - DNA, 19 bp, Homo sapiens
  siRNA target sequence for SPTBN1 (NM_003128.1,1195-1213).
caatgctattgaaacagaa

SEQ ID NO: 119272 - DNA, 19 bp, Homo sapiens
  siRNA target sequence for SPTBN1 (NM_003128.1,1540-1558).
gcggaatgagctcataaga

SEQ ID NO: 119273 - DNA, 19 bp, Homo sapiens
  siRNA target sequence for SPTBN1 (NM_003128.1,1769-1787).
gagctcgaggccgagaatt

SEQ ID NO: 119274 - DNA, 19 bp, Homo sapiens
  siRNA target sequence for SPTBN1 (NM_003128.1,1809-1827).
cagcgaggaaggacaatgt

SEQ ID NO: 119275 - DNA, 19 bp, Homo sapiens
  siRNA target sequence for SPTBN1 (NM_003128.1,1811-1829).
gcgaggaaggacaatgtca

SEQ ID NO: 119276 - DNA, 19 bp, Homo sapiens
  siRNA target sequence for SPTBN1 (NM_003128.1,1812-1830).
cgaggaaggacaatgtcat

SEQ ID NO: 119277 - DNA, 19 bp, Homo sapiens
  siRNA target sequence for SPTBN1 (NM_003128.1,1946-1964).
gaaatgaaggtgctagtat

SEQ ID NO: 119278 - DNA, 19 bp, Homo sapiens
  siRNA target sequence for SPTBN1 (NM_003128.1,1970-1988).
caagactatggcaaacact

SEQ ID NO: 119279 - DNA, 19 bp, Homo sapiens
  siRNA target sequence for SPTBN1 (NM_003128.1,1975-1993).
ctatggcaaacacttactt

SEQ ID NO: 119280 - DNA, 19 bp, Homo sapiens
  siRNA target sequence for SPTBN1 (NM_003128.1,1995-2013).
gtgtggaagacctgttaca

SEQ ID NO: 119281 - DNA, 19 bp, Homo sapiens
  siRNA target sequence for SPTBN1 (NM_003128.1,2023-2041).
cctggttgaagcagacatt

SEQ ID NO: 119282 - DNA, 19 bp, Homo sapiens
  siRNA target sequence for SPTBN1 (NM_003128.1,2150-2168).
gcccacatggagttctgtt

SEQ ID NO: 119283 - DNA, 19 bp, Homo sapiens
  siRNA target sequence for SPTBN1 (NM_003128.1,2151-2169).
cccacatggagttctgtta

SEQ ID NO: 119284 - DNA, 19 bp, Homo sapiens
  siRNA target sequence for SPTBN1 (NM_003128.1,2452-2470).
gatccgtgagaggatcatt

SEQ ID NO: 119285 - DNA, 19 bp, Homo sapiens
  siRNA target sequence for SPTBN1 (NM_003128.1,2456-2474).
cgtgagaggatcatttaca

SEQ ID NO: 119286 - DNA, 19 bp, Homo sapiens
  siRNA target sequence for SPTBN1 (NM_003128.1,2457-2475).
gtgagaggatcatttacat

SEQ ID NO: 119287 - DNA, 19 bp, Homo sapiens
  siRNA target sequence for SPTBN1 (NM_003128.1,2590-2608).
gctggacatcctcaagatt

SEQ ID NO: 119288 - DNA, 19 bp, Homo sapiens
  siRNA target sequence for SPTBN1 (NM_003128.1,2623-2641).
cgtgggccacgatgagtat

SEQ ID NO: 119289 - DNA, 19 bp, Homo sapiens
  siRNA target sequence for SPTBN1 (NM_003128.1,2624-2642).
gtgggccacgatgagtatt

SEQ ID NO: 119290 - DNA, 19 bp, Homo sapiens
  siRNA target sequence for SPTBN1 (NM_003128.1,2627-2645).
ggccacgatgagtattcca

SEQ ID NO: 119291 - DNA, 19 bp, Homo sapiens
  siRNA target sequence for SPTBN1 (NM_003128.1,2652-2670).
ctctggtcaagaaacacaa

SEQ ID NO: 119292 - DNA, 19 bp, Homo sapiens
  siRNA target sequence for SPTBN1 (NM_003128.1,2679-2697).
cggaagagatcgccaatta

SEQ ID NO: 119293 - DNA, 19 bp, Homo sapiens
  siRNA target sequence for SPTBN1 (NM_003128.1,2681-2699).
gaagagatcgccaattaca

SEQ ID NO: 119294 - DNA, 19 bp, Homo sapiens
  siRNA target sequence for SPTBN1 (NM_003128.1,2965-2983).
ggtcatccagcacagattt

SEQ ID NO: 119295 - DNA, 19 bp, Homo sapiens
  siRNA target sequence for SPTBN1 (NM_003128.1,3093-3111).
cccagcaggacaaactcaa

SEQ ID NO: 119296 - DNA, 19 bp, Homo sapiens
  siRNA target sequence for SPTBN1 (NM_003128.1,3190-3208).
ccacctcgagtgcaatgaa

SEQ ID NO: 119297 - DNA, 19 bp, Homo sapiens
  siRNA target sequence for SPTBN1 (NM_003128.1,3191-3209).
cacctcgagtgcaatgaaa

SEQ ID NO: 119298 - DNA, 19 bp, Homo sapiens
  siRNA target sequence for SPTBN1 (NM_003128.1,3196-3214).
cgagtgcaatgaaaccaaa

SEQ ID NO: 119299 - DNA, 19 bp, Homo sapiens
  siRNA target sequence for SPTBN1 (NM_003128.1,3197-3215).
gagtgcaatgaaaccaaat

SEQ ID NO: 119300 - DNA, 19 bp, Homo sapiens
  siRNA target sequence for SPTBN1 (NM_003128.1,3708-3726).
ccgatgcccagtacatgtt

SEQ ID NO: 119301 - DNA, 19 bp, Homo sapiens
  siRNA target sequence for SPTBN1 (NM_003128.1,3709-3727).
cgatgcccagtacatgttt

SEQ ID NO: 119302 - DNA, 19 bp, Homo sapiens
  siRNA target sequence for SPTBN1 (NM_003128.1,3851-3869).
gccgaagcctttcttaaca

SEQ ID NO: 119303 - DNA, 19 bp, Homo sapiens
  siRNA target sequence for SPTBN1 (NM_003128.1,4098-4116).
cagccagtgaacttttgat

SEQ ID NO: 119304 - DNA, 19 bp, Homo sapiens
  siRNA target sequence for SPTBN1 (NM_003128.1,4204-4222).
ccaggacatgtcttacgat

SEQ ID NO: 119305 - DNA, 19 bp, Homo sapiens
  siRNA target sequence for SPTBN1 (NM_003128.1,4248-4266).
ggttgaagcatcaagcatt

SEQ ID NO: 119306 - DNA, 19 bp, Homo sapiens
  siRNA target sequence for SPTBN1 (NM_003128.1,4366-4384).
ggagaaactcactggttta

SEQ ID NO: 119307 - DNA, 19 bp, Homo sapiens
  siRNA target sequence for SPTBN1 (NM_003128.1,4516-4534).
gattcagtctgatgactat

SEQ ID NO: 119308 - DNA, 19 bp, Homo sapiens
  siRNA target sequence for SPTBN1 (NM_003128.1,4695-4713).
ccgtgcagaccaagttcat

SEQ ID NO: 119309 - DNA, 19 bp, Homo sapiens
  siRNA target sequence for SPTBN1 (NM_003128.1,4761-4779).
ccaaagagatccatcagtt

SEQ ID NO: 119310 - DNA, 19 bp, Homo sapiens
  siRNA target sequence for SPTBN1 (NM_003128.1,4926-4944).
ctcgcattgacgacatctt

SEQ ID NO: 119311 - DNA, 19 bp, Homo sapiens
  siRNA target sequence for SPTBN1 (NM_003128.1,5203-5221).
gaagaagcaccagatctta

SEQ ID NO: 119312 - DNA, 19 bp, Homo sapiens
  siRNA target sequence for SPTBN1 (NM_003128.1,5206-5224).
gaagcaccagatcttagaa

SEQ ID NO: 119313 - DNA, 19 bp, Homo sapiens
  siRNA target sequence for SPTBN1 (NM_003128.1,5209-5227).
gcaccagatcttagaacaa

SEQ ID NO: 119314 - DNA, 19 bp, Homo sapiens
  siRNA target sequence for SPTBN1 (NM_003128.1,5503-5521).
gcatgtcacgatgttacaa

SEQ ID NO: 119315 - DNA, 19 bp, Homo sapiens
  siRNA target sequence for SPTBN1 (NM_003128.1,5511-5529).
cgatgttacaagaacgatt

SEQ ID NO: 119316 - DNA, 19 bp, Homo sapiens
  siRNA target sequence for SPTBN1 (NM_003128.1,5542-5560).
ccgagacaccgggaacatt

SEQ ID NO: 119317 - DNA, 19 bp, Homo sapiens
  siRNA target sequence for SPTBN1 (NM_003128.1,5571-5589).
gcgtggacacggtcaatca

SEQ ID NO: 119318 - DNA, 19 bp, Homo sapiens
  siRNA target sequence for SPTBN1 (NM_003128.1,5684-5702).
gagctcattgacacaagaa

SEQ ID NO: 119319 - DNA, 19 bp, Homo sapiens
  siRNA target sequence for SPTBN1 (NM_003128.1,5707-5725).
gattcttgccgcttcctat

SEQ ID NO: 119320 - DNA, 19 bp, Homo sapiens
  siRNA target sequence for SPTBN1 (NM_003128.1,5721-5739).
cctatgaactgcacaagtt

SEQ ID NO: 119321 - DNA, 19 bp, Homo sapiens
  siRNA target sequence for SPTBN1 (NM_003128.1,5768-5786).
cgtatacaggacaaacaca

SEQ ID NO: 119322 - DNA, 19 bp, Homo sapiens
  siRNA target sequence for SPTBN1 (NM_003128.1,5769-5787).
gtatacaggacaaacacaa

SEQ ID NO: 119323 - DNA, 19 bp, Homo sapiens
  siRNA target sequence for SPTBN1 (NM_003128.1,5839-5857).
gagaatgcacactacattt

SEQ ID NO: 119324 - DNA, 19 bp, Homo sapiens
  siRNA target sequence for SPTBN1 (NM_003128.1,5850-5868).
ctacatttgagcatgacat

SEQ ID NO: 119325 - DNA, 19 bp, Homo sapiens
  siRNA target sequence for SPTBN1 (NM_003128.1,5937-5955).
gtgacaaggccgacgatat

SEQ ID NO: 119326 - DNA, 19 bp, Homo sapiens
  siRNA target sequence for SPTBN1 (NM_003128.1,6141-6159).
catctgttgaactcttaat

SEQ ID NO: 119327 - DNA, 19 bp, Homo sapiens
  siRNA target sequence for SPTBN1 (NM_003128.1,6197-6215).
cgtaatgacagtttcacaa

SEQ ID NO: 119328 - DNA, 19 bp, Homo sapiens
  siRNA target sequence for SPTBN1 (NM_003128.1,6211-6229).
cacaacctgcattgaactt

SEQ ID NO: 119329 - DNA, 19 bp, Homo sapiens
  siRNA target sequence for SPTBN1 (NM_003128.1,6239-6257).
ctgttggcgagaaaacact

SEQ ID NO: 119330 - DNA, 19 bp, Homo sapiens
  siRNA target sequence for SPTBN1 (NM_003128.1,6241-6259).
gttggcgagaaaacactat

SEQ ID NO: 119331 - DNA, 19 bp, Homo sapiens
  siRNA target sequence for SPTBN1 (NM_003128.1,6245-6263).
gcgagaaaacactatgcat

SEQ ID NO: 119332 - DNA, 19 bp, Homo sapiens
  siRNA target sequence for SPTBN1 (NM_003128.1,6332-6350).
gaccgatgggaatggttaa

SEQ ID NO: 119333 - DNA, 19 bp, Homo sapiens
  siRNA target sequence for SPTBN1 (NM_003128.1,6334-6352).
ccgatgggaatggttaaga

SEQ ID NO: 119334 - DNA, 19 bp, Homo sapiens
  siRNA target sequence for SPTBN1 (NM_003128.1,6413-6431).
ggacaggagccgtacctat

SEQ ID NO: 119335 - DNA, 19 bp, Homo sapiens
  siRNA target sequence for SPTBN1 (NM_003128.1,6427-6445).
cctatccagccgagagata

SEQ ID NO: 119336 - DNA, 19 bp, Homo sapiens
  siRNA target sequence for SPTBN1 (NM_003128.1,6487-6505).
cgaggcatttgaaaagtct

SEQ ID NO: 119337 - DNA, 19 bp, Homo sapiens
  siRNA target sequence for SPTBN1 (NM_003128.1,6536-6554).
ctggaaaggctgactacat

SEQ ID NO: 119338 - DNA, 19 bp, Homo sapiens
  siRNA target sequence for SPTBN1 (NM_003128.1,6620-6638).
gagccgagcacgaaggttt

SEQ ID NO: 119339 - DNA, 19 bp, Homo sapiens
  siRNA target sequence for SPTBN1 (NM_003128.1,6624-6642).
cgagcacgaaggtttcaga

SEQ ID NO: 119340 - DNA, 19 bp, Homo sapiens
  siRNA target sequence for SPTBN1 (NM_003128.1,6661-6679).
gcagtgggatacttcaaaa

SEQ ID NO: 119341 - DNA, 19 bp, Homo sapiens
  siRNA target sequence for SPTBN1 (NM_003128.1,6664-6682).
gtgggatacttcaaaagga

SEQ ID NO: 119342 - DNA, 19 bp, Homo sapiens
  siRNA target sequence for SPTBN1 (NM_003128.1,6760-6778).
ggtcaacggcgctacagaa

SEQ ID NO: 119343 - DNA, 19 bp, Homo sapiens
  siRNA target sequence for SPTBN1 (NM_003128.1,6763-6781).
caacggcgctacagaacaa

SEQ ID NO: 119344 - DNA, 19 bp, Homo sapiens
  siRNA target sequence for SPTBN1 (NM_003128.1,6817-6835).
cccgacctctgatcgtaaa

SEQ ID NO: 119345 - DNA, 19 bp, Homo sapiens
  siRNA target sequence for SPTBN1 (NM_003128.1,6935-6953).
gagtgggaggcccacaata

SEQ ID NO: 119346 - DNA, 19 bp, Homo sapiens
  siRNA target sequence for SPTBN1 (NM_003128.1,6967-6985).
caggtcctggcacaatgtt

SEQ ID NO: 119347 - DNA, 19 bp, Homo sapiens
  siRNA target sequence for SPTBN1 (NM_003128.1,6970-6988).
gtcctggcacaatgtttat

SEQ ID NO: 119348 - DNA, 19 bp, Homo sapiens
  siRNA target sequence for SPTBN1 (NM_003128.1,6983-7001).
gtttattgtgtcataaata

SEQ ID NO: 119349 - DNA, 19 bp, Homo sapiens
  siRNA target sequence for SPTBN1 (NM_003128.1,6992-7010).
gtcataaataaccaagaaa

SEQ ID NO: 119350 - DNA, 19 bp, Homo sapiens
  siRNA target sequence for SPTBN1 (NM_003128.1,7062-7080).
gcgaggtccctgtgagttt

SEQ ID NO: 119351 - DNA, 19 bp, Homo sapiens
  siRNA target sequence for SPTBN1 (NM_003128.1,7095-7113).
gcgaagtggcccttgatta

SEQ ID NO: 119352 - DNA, 19 bp, Homo sapiens
  siRNA target sequence for SPTBN1 (NM_003128.1,7129-7147).
cgtattcaagctaagacta

SEQ ID NO: 119353 - DNA, 19 bp, Homo sapiens
  siRNA target sequence for SPTBN1 (NM_003128.1,7335-7353).
ccggcaagcgggaaaagga

SEQ ID NO: 119354 - DNA, 19 bp, Homo sapiens
  siRNA target sequence for SPTBN1 (NM_003128.1,7372-7390).
gaagcggttcagccttttt

SEQ ID NO: 119355 - DNA, 19 bp, Homo sapiens
  siRNA target sequence for SPTBN1 (NM_178313.1,440-458).
gggcaggtgccttacaact

SEQ ID NO: 119356 - DNA, 19 bp, Homo sapiens
  siRNA target sequence for SPTBN1 (NM_178313.1,443-461).
caggtgccttacaactaca

SEQ ID NO: 119357 - DNA, 19 bp, Homo sapiens
  siRNA target sequence for SPTBN1 (NM_178313.1,6756-6774).
gatctccacgggttagtta

SEQ ID NO: 119358 - DNA, 19 bp, Homo sapiens
  siRNA target sequence for SPTBN1 (NM_178313.1,6771-6789).
gttaccgctctcaaaccta

SEQ ID NO: 119359 - DNA, 19 bp, Homo sapiens
  siRNA target sequence for SPTBN1 (NM_178313.1,6776-6794).
cgctctcaaacctaccaaa

SEQ ID NO: 119360 - DNA, 19 bp, Homo sapiens
  siRNA target sequence for SPTBN1 (NM_178313.1,6780-6798).
ctcaaacctaccaaaacta

SEQ ID NO: 119361 - DNA, 19 bp, Homo sapiens
  siRNA target sequence for SPTBN2 (NM_006946.1,647-665).
gttatcccaacgtcaatgt

SEQ ID NO: 119362 - DNA, 19 bp, Homo sapiens
  siRNA target sequence for SPTBN2 (NM_006946.1,653-671).
ccaacgtcaatgtacacaa

SEQ ID NO: 119363 - DNA, 19 bp, Homo sapiens
  siRNA target sequence for SPTBN2 (NM_006946.1,686-704).
ggagagatggactagcttt

SEQ ID NO: 119364 - DNA, 19 bp, Homo sapiens
  siRNA target sequence for SPTBN2 (NM_006946.1,705-723).
caacgccatcgtgcataaa

SEQ ID NO: 119365 - DNA, 19 bp, Homo sapiens
  siRNA target sequence for SPTBN2 (NM_006946.1,759-777).
gaagtgtaatgcacactat

SEQ ID NO: 119366 - DNA, 19 bp, Homo sapiens
  siRNA target sequence for SPTBN2 (NM_006946.1,762-780).
gtgtaatgcacactataat

SEQ ID NO: 119367 - DNA, 19 bp, Homo sapiens
  siRNA target sequence for SPTBN2 (NM_006946.1,764-782).
gtaatgcacactataatct

SEQ ID NO: 119368 - DNA, 19 bp, Homo sapiens
  siRNA target sequence for SPTBN2 (NM_006946.1,870-888).
gaagtcaatcattacctat

SEQ ID NO: 119369 - DNA, 19 bp, Homo sapiens
  siRNA target sequence for SPTBN2 (NM_006946.1,884-902).
cctatgtggctacttacta

SEQ ID NO: 119370 - DNA, 19 bp, Homo sapiens
  siRNA target sequence for SPTBN2 (NM_006946.1,893-911).
ctacttactaccattactt

SEQ ID NO: 119371 - DNA, 19 bp, Homo sapiens
  siRNA target sequence for SPTBN2 (NM_006946.1,1043-1061).
cgatcgtgaccctcaatga

SEQ ID NO: 119372 - DNA, 19 bp, Homo sapiens
  siRNA target sequence for SPTBN2 (NM_006946.1,2796-2814).
caccgcggtgaatgacatt

SEQ ID NO: 119373 - DNA, 19 bp, Homo sapiens
  siRNA target sequence for SPTBN2 (NM_006946.1,2845-2863).
ggcaaagaccgcattgtca

SEQ ID NO: 119374 - DNA, 19 bp, Homo sapiens
  siRNA target sequence for SPTBN2 (NM_006946.1,2846-2864).
gcaaagaccgcattgtcaa

SEQ ID NO: 119375 - DNA, 19 bp, Homo sapiens
  siRNA target sequence for SPTBN2 (NM_006946.1,3691-3709).
gctgatgctgccattaaaa

SEQ ID NO: 119376 - DNA, 19 bp, Homo sapiens
  siRNA target sequence for SPTBN2 (NM_006946.1,3801-3819).
catccacgccgacaagatt

SEQ ID NO: 119377 - DNA, 19 bp, Homo sapiens
  siRNA target sequence for SPTBN2 (NM_006946.1,4000-4018).
cgcaacctgcatactaagt

SEQ ID NO: 119378 - DNA, 19 bp, Homo sapiens
  siRNA target sequence for SPTBN2 (NM_006946.1,4048-4066).
ctggctgccaacaaagact

SEQ ID NO: 119379 - DNA, 19 bp, Homo sapiens
  siRNA target sequence for SPTBN2 (NM_006946.1,4881-4899).
gatgggcgagcaggaatta

SEQ ID NO: 119380 - DNA, 19 bp, Homo sapiens
  siRNA target sequence for SPTBN2 (NM_006946.1,4885-4903).
ggcgagcaggaattacaca

SEQ ID NO: 119381 - DNA, 19 bp, Homo sapiens
  siRNA target sequence for SPTBN2 (NM_006946.1,4886-4904).
gcgagcaggaattacacat

SEQ ID NO: 119382 - DNA, 19 bp, Homo sapiens
  siRNA target sequence for SPTBN2 (NM_006946.1,5053-5071).
gagagcactcggatatcca

SEQ ID NO: 119383 - DNA, 19 bp, Homo sapiens
  siRNA target sequence for SPTBN2 (NM_006946.1,5259-5277).
gactatgctccgagacaaa

SEQ ID NO: 119384 - DNA, 19 bp, Homo sapiens
  siRNA target sequence for SPTBN2 (NM_006946.1,5261-5279).
ctatgctccgagacaaatt

SEQ ID NO: 119385 - DNA, 19 bp, Homo sapiens
  siRNA target sequence for SPTBN2 (NM_006946.1,5311-5329).
ggtcaggagcgcgtagata

SEQ ID NO: 119386 - DNA, 19 bp, Homo sapiens
  siRNA target sequence for SPTBN2 (NM_006946.1,5600-5618).
gtgcctacgagcatgacat

SEQ ID NO: 119387 - DNA, 19 bp, Homo sapiens
  siRNA target sequence for SPTBN2 (NM_006946.1,5603-5621).
cctacgagcatgacattca

SEQ ID NO: 119388 - DNA, 19 bp, Homo sapiens
  siRNA target sequence for SPTBN2 (NM_006946.1,5891-5909).
cctccgcggatctagtcat

SEQ ID NO: 119389 - DNA, 19 bp, Homo sapiens
  siRNA target sequence for SPTBN2 (NM_006946.1,5894-5912).
ccgcggatctagtcatcaa

SEQ ID NO: 119390 - DNA, 19 bp, Homo sapiens
  siRNA target sequence for SPTBN2 (NM_006946.1,5896-5914).
gcggatctagtcatcaaga

SEQ ID NO: 119391 - DNA, 19 bp, Homo sapiens
  siRNA target sequence for SPTBN2 (NM_006946.1,6200-6218).
gcacggtcgacgaagttga

SEQ ID NO: 119392 - DNA, 19 bp, Homo sapiens
  siRNA target sequence for SPTBN2 (NM_006946.1,6264-6282).
ctgggaggagcgattctgt

SEQ ID NO: 119393 - DNA, 19 bp, Homo sapiens
  siRNA target sequence for SPTBN2 (NM_006946.1,6473-6491).
cacaagcacccagtgttaa

SEQ ID NO: 119394 - DNA, 19 bp, Homo sapiens
  siRNA target sequence for SPTBN2 (NM_006946.1,6920-6938).
gcagcgtcgcctttgatta

SEQ ID NO: 119395 - DNA, 19 bp, Homo sapiens
  siRNA target sequence for SPTBN2 (NM_006946.1,6941-6959).
gaaagcgcaaacatgtctt

SEQ ID NO: 119396 - DNA, 19 bp, Homo sapiens
  siRNA target sequence for SPTBN5 (NM_016642.1,674-692).
gactcatctgggtcatcat

SEQ ID NO: 119397 - DNA, 19 bp, Homo sapiens
  siRNA target sequence for SPTBN5 (NM_016642.1,813-831).
caacgtgaacattacagat

SEQ ID NO: 119398 - DNA, 19 bp, Homo sapiens
  siRNA target sequence for SPTBN5 (NM_016642.1,1021-1039).
ccagatgagcgctctatca

SEQ ID NO: 119399 - DNA, 19 bp, Homo sapiens
  siRNA target sequence for SPTBN5 (NM_016642.1,1022-1040).
cagatgagcgctctatcat

SEQ ID NO: 119400 - DNA, 19 bp, Homo sapiens
  siRNA target sequence for SPTBN5 (NM_016642.1,1024-1042).
gatgagcgctctatcatga

SEQ ID NO: 119401 - DNA, 19 bp, Homo sapiens
  siRNA target sequence for SPTBN5 (NM_016642.1,1532-1550).
cagccctccgggagagttt

SEQ ID NO: 119402 - DNA, 19 bp, Homo sapiens
  siRNA target sequence for SPTBN5 (NM_016642.1,1536-1554).
cctccgggagagtttcctt

SEQ ID NO: 119403 - DNA, 19 bp, Homo sapiens
  siRNA target sequence for SPTBN5 (NM_016642.1,1537-1555).
ctccgggagagtttcctta

SEQ ID NO: 119404 - DNA, 19 bp, Homo sapiens
  siRNA target sequence for SPTBN5 (NM_016642.1,2799-2817).
gcctgaccctgactttgat

SEQ ID NO: 119405 - DNA, 19 bp, Homo sapiens
  siRNA target sequence for SPTBN5 (NM_016642.1,2811-2829).
ctttgatcccaacactata

SEQ ID NO: 119406 - DNA, 19 bp, Homo sapiens
  siRNA target sequence for SPTBN5 (NM_016642.1,4085-4103).
gagagcagctgcagagtat

SEQ ID NO: 119407 - DNA, 19 bp, Homo sapiens
  siRNA target sequence for SPTBN5 (NM_016642.1,4855-4873).
ggcagccccaccagctata

SEQ ID NO: 119408 - DNA, 19 bp, Homo sapiens
  siRNA target sequence for SPTBN5 (NM_016642.1,5210-5228).
ccctcaggctcattaacaa

SEQ ID NO: 119409 - DNA, 19 bp, Homo sapiens
  siRNA target sequence for SPTBN5 (NM_016642.1,5245-5263).
gaggaactagccatttact

SEQ ID NO: 119410 - DNA, 19 bp, Homo sapiens
  siRNA target sequence for SPTBN5 (NM_016642.1,5533-5551).
ctctgcaccaagtttgcaa

SEQ ID NO: 119411 - DNA, 19 bp, Homo sapiens
  siRNA target sequence for SPTBN5 (NM_016642.1,5799-5817).
cacgagcctccccaacaat

SEQ ID NO: 119412 - DNA, 19 bp, Homo sapiens
  siRNA target sequence for SPTBN5 (NM_016642.1,5801-5819).
cgagcctccccaacaatgt

SEQ ID NO: 119413 - DNA, 19 bp, Homo sapiens
  siRNA target sequence for SPTBN5 (NM_016642.1,6075-6093).
cacggcggtgcgtgactat

SEQ ID NO: 119414 - DNA, 19 bp, Homo sapiens
  siRNA target sequence for SPTBN5 (NM_016642.1,6430-6448).
caggaggtctccctgaaaa

SEQ ID NO: 119415 - DNA, 19 bp, Homo sapiens
  siRNA target sequence for SPTBN5 (NM_016642.1,7241-7259).
ggcgaagccagctcaacaa

SEQ ID NO: 119416 - DNA, 19 bp, Homo sapiens
  siRNA target sequence for SPTBN5 (NM_016642.1,7260-7278).
caggtgggcgagtttccat

SEQ ID NO: 119417 - DNA, 19 bp, Homo sapiens
  siRNA target sequence for SPTBN5 (NM_016642.1,7875-7893).
ggtgctggctggcttagaa

SEQ ID NO: 119418 - DNA, 19 bp, Homo sapiens
  siRNA target sequence for SPTBN5 (NM_016642.1,8107-8125).
gtgcaggcgggaaagatca

SEQ ID NO: 119419 - DNA, 19 bp, Homo sapiens
  siRNA target sequence for SPTBN5 (NM_016642.1,8534-8552).
ggggtgagctgcaagacaa

SEQ ID NO: 119420 - DNA, 19 bp, Homo sapiens
  siRNA target sequence for SPTBN5 (NM_016642.1,8903-8921).
ggagcctcctcttgaagtt

SEQ ID NO: 119421 - DNA, 19 bp, Homo sapiens
  siRNA target sequence for SPTBN5 (NM_016642.1,8927-8945).
gggacgccgacgaggaaat

SEQ ID NO: 119422 - DNA, 19 bp, Homo sapiens
  siRNA target sequence for SPTBN5 (NM_016642.1,10608-10626).
cagacaccaggacttagaa

SEQ ID NO: 119423 - DNA, 19 bp, Homo sapiens
  siRNA target sequence for SPTBN5 (NM_016642.1,10610-10628).
gacaccaggacttagaaaa

SEQ ID NO: 119424 - DNA, 19 bp, Homo sapiens
  siRNA target sequence for SPTBN5 (NM_016642.1,10731-10749).
cagctcgctgacatccttt

SEQ ID NO: 119425 - DNA, 19 bp, Homo sapiens
  siRNA target sequence for SPTBN5 (NM_016642.1,11185-11203).
gtcagctctctgaatgagt

SEQ ID NO: 119426 - DNA, 19 bp, Homo sapiens
  siRNA target sequence for SVIL (NM_003174.2,562-580).
gacacccctcgatacatga

SEQ ID NO: 119427 - DNA, 19 bp, Homo sapiens
  siRNA target sequence for SVIL (NM_003174.2,603-621).
ccacatcggccgatcaaat

SEQ ID NO: 119428 - DNA, 19 bp, Homo sapiens
  siRNA target sequence for SVIL (NM_003174.2,606-624).
catcggccgatcaaatgaa

SEQ ID NO: 119429 - DNA, 19 bp, Homo sapiens
  siRNA target sequence for SVIL (NM_003174.2,700-718).
ggtgactcaccctatggtt

SEQ ID NO: 119430 - DNA, 19 bp, Homo sapiens
  siRNA target sequence for SVIL (NM_003174.2,747-765).
gtccaaagccgaaagaatt

SEQ ID NO: 119431 - DNA, 19 bp, Homo sapiens
  siRNA target sequence for SVIL (NM_003174.2,750-768).
caaagccgaaagaattgca

SEQ ID NO: 119432 - DNA, 19 bp, Homo sapiens
  siRNA target sequence for SVIL (NM_003174.2,829-847).
gaggccgactccgagtatt

SEQ ID NO: 119433 - DNA, 19 bp, Homo sapiens
  siRNA target sequence for SVIL (NM_003174.2,831-849).
ggccgactccgagtattta

SEQ ID NO: 119434 - DNA, 19 bp, Homo sapiens
  siRNA target sequence for SVIL (NM_003174.2,832-850).
gccgactccgagtatttat

SEQ ID NO: 119435 - DNA, 19 bp, Homo sapiens
  siRNA target sequence for SVIL (NM_003174.2,1673-1691).
ctacccggaacagaataga

SEQ ID NO: 119436 - DNA, 19 bp, Homo sapiens
  siRNA target sequence for SVIL (NM_003174.2,1710-1728).
gaacgctcgctatcaaact

SEQ ID NO: 119437 - DNA, 19 bp, Homo sapiens
  siRNA target sequence for SVIL (NM_003174.2,1823-1841).
ccacggttgctccaatgta

SEQ ID NO: 119438 - DNA, 19 bp, Homo sapiens
  siRNA target sequence for SVIL (NM_003174.2,1824-1842).
cacggttgctccaatgtat

SEQ ID NO: 119439 - DNA, 19 bp, Homo sapiens
  siRNA target sequence for SVIL (NM_003174.2,1882-1900).
gcaagtgccactgactata

SEQ ID NO: 119440 - DNA, 19 bp, Homo sapiens
  siRNA target sequence for SVIL (NM_003174.2,1883-1901).
caagtgccactgactataa

SEQ ID NO: 119441 - DNA, 19 bp, Homo sapiens
  siRNA target sequence for SVIL (NM_003174.2,1888-1906).
gccactgactataagtttt

SEQ ID NO: 119442 - DNA, 19 bp, Homo sapiens
  siRNA target sequence for SVIL (NM_003174.2,1987-2005).
gagaacaagggaatgttga

SEQ ID NO: 119443 - DNA, 19 bp, Homo sapiens
  siRNA target sequence for SVIL (NM_003174.2,2128-2146).
gacagccataaggaatcta

SEQ ID NO: 119444 - DNA, 19 bp, Homo sapiens
  siRNA target sequence for SVIL (NM_003174.2,2130-2148).
cagccataaggaatctaaa

SEQ ID NO: 119445 - DNA, 19 bp, Homo sapiens
  siRNA target sequence for SVIL (NM_003174.2,2132-2150).
gccataaggaatctaaata

SEQ ID NO: 119446 - DNA, 19 bp, Homo sapiens
  siRNA target sequence for SVIL (NM_003174.2,2296-2314).
gaggtggagaatgttatga

SEQ ID NO: 119447 - DNA, 19 bp, Homo sapiens
  siRNA target sequence for SVIL (NM_003174.2,2466-2484).
gaatccatgtgcgatgttt

SEQ ID NO: 119448 - DNA, 19 bp, Homo sapiens
  siRNA target sequence for SVIL (NM_003174.2,2510-2528).
caggggagggccttcttga

SEQ ID NO: 119449 - DNA, 19 bp, Homo sapiens
  siRNA target sequence for SVIL (NM_003174.2,2524-2542).
cttgactcacccagcaaaa

SEQ ID NO: 119450 - DNA, 19 bp, Homo sapiens
  siRNA target sequence for SVIL (NM_003174.2,2668-2686).
gggcggtccctcatcaaga

SEQ ID NO: 119451 - DNA, 19 bp, Homo sapiens
  siRNA target sequence for SVIL (NM_003174.2,2669-2687).
ggcggtccctcatcaagaa

SEQ ID NO: 119452 - DNA, 19 bp, Homo sapiens
  siRNA target sequence for SVIL (NM_003174.2,2685-2703).
gaagcgggtcacagaaagt

SEQ ID NO: 119453 - DNA, 19 bp, Homo sapiens
  siRNA target sequence for SVIL (NM_003174.2,3620-3638).
gggtaggagagtttgcaaa

SEQ ID NO: 119454 - DNA, 19 bp, Homo sapiens
  siRNA target sequence for SVIL (NM_003174.2,3630-3648).
gtttgcaaacgtcatagaa

SEQ ID NO: 119455 - DNA, 19 bp, Homo sapiens
  siRNA target sequence for SVIL (NM_003174.2,3660-3678).
ctcagaacttgcaacttta

SEQ ID NO: 119456 - DNA, 19 bp, Homo sapiens
  siRNA target sequence for SVIL (NM_003174.2,3662-3680).
cagaacttgcaactttaat

SEQ ID NO: 119457 - DNA, 19 bp, Homo sapiens
  siRNA target sequence for SVIL (NM_003174.2,3700-3718).
ggttgtagagctacttata

SEQ ID NO: 119458 - DNA, 19 bp, Homo sapiens
  siRNA target sequence for SVIL (NM_003174.2,3701-3719).
gttgtagagctacttatat

SEQ ID NO: 119459 - DNA, 19 bp, Homo sapiens
  siRNA target sequence for SVIL (NM_003174.2,3704-3722).
gtagagctacttatatcca

SEQ ID NO: 119460 - DNA, 19 bp, Homo sapiens
  siRNA target sequence for SVIL (NM_003174.2,3752-3770).
ctcatgcagccaaagactt

SEQ ID NO: 119461 - DNA, 19 bp, Homo sapiens
  siRNA target sequence for SVIL (NM_003174.2,3787-3805).
ggccaaaccagttaccaat

SEQ ID NO: 119462 - DNA, 19 bp, Homo sapiens
  siRNA target sequence for SVIL (NM_003174.2,4221-4239).
ggaactgaagagatcgaat

SEQ ID NO: 119463 - DNA, 19 bp, Homo sapiens
  siRNA target sequence for SVIL (NM_003174.2,4844-4862).
ccgtggaagggaatttgct

SEQ ID NO: 119464 - DNA, 19 bp, Homo sapiens
  siRNA target sequence for SVIL (NM_003174.2,4901-4919).
cttccatggtggtgcttaa

SEQ ID NO: 119465 - DNA, 19 bp, Homo sapiens
  siRNA target sequence for SVIL (NM_003174.2,4941-4959).
cctgtggcacggatgcaaa

SEQ ID NO: 119466 - DNA, 19 bp, Homo sapiens
  siRNA target sequence for SVIL (NM_003174.2,4988-5006).
ggaccgctgcgaacaagat

SEQ ID NO: 119467 - DNA, 19 bp, Homo sapiens
  siRNA target sequence for SVIL (NM_003174.2,4991-5009).
ccgctgcgaacaagatcaa

SEQ ID NO: 119468 - DNA, 19 bp, Homo sapiens
  siRNA target sequence for SVIL (NM_003174.2,5026-5044).
gaagcaggactgcatagta

SEQ ID NO: 119469 - DNA, 19 bp, Homo sapiens
  siRNA target sequence for SVIL (NM_003174.2,5303-5321).
cagcacttttccttgttga

SEQ ID NO: 119470 - DNA, 19 bp, Homo sapiens
  siRNA target sequence for SVIL (NM_003174.2,5306-5324).
cacttttccttgttgacaa

SEQ ID NO: 119471 - DNA, 19 bp, Homo sapiens
  siRNA target sequence for SVIL (NM_021738.1,1653-1671).
gccttccagagttaaagtt

SEQ ID NO: 119472 - DNA, 19 bp, Homo sapiens
  siRNA target sequence for SVIL (NM_021738.1,1654-1672).
ccttccagagttaaagtta

SEQ ID NO: 119473 - DNA, 19 bp, Homo sapiens
  siRNA target sequence for SVIL (NM_021738.1,1721-1739).
cctcagagtccgtaactca

SEQ ID NO: 119474 - DNA, 19 bp, Homo sapiens
  siRNA target sequence for SVIL (NM_021738.1,1754-1772).
cagcgccagtccattacgt

SEQ ID NO: 119475 - DNA, 19 bp, Homo sapiens
  siRNA target sequence for SVIL (NM_021738.1,1760-1778).
cagtccattacgtgtcatt

SEQ ID NO: 119476 - DNA, 19 bp, Homo sapiens
  siRNA target sequence for SVIL (NM_021738.1,1765-1783).
cattacgtgtcatttcagt

SEQ ID NO: 119477 - DNA, 19 bp, Homo sapiens
  siRNA target sequence for SVIL (NM_021738.1,1967-1985).
ccagcttgacggttctaga

SEQ ID NO: 119478 - DNA, 19 bp, Homo sapiens
  siRNA target sequence for SVIL (NM_021738.1,1968-1986).
cagcttgacggttctagaa

SEQ ID NO: 119479 - DNA, 19 bp, Homo sapiens
  siRNA target sequence for SVIL (NM_021738.1,2291-2309).
gcgagatggttctctacat

SEQ ID NO: 119480 - DNA, 19 bp, Homo sapiens
  siRNA target sequence for SVIL (NM_021738.1,2298-2316).
ggttctctacattcaaagt

SEQ ID NO: 119481 - DNA, 19 bp, Homo sapiens
  siRNA target sequence for SVIL (NM_021738.1,2387-2405).
cccgctctctgtcagattt

SEQ ID NO: 119482 - DNA, 19 bp, Homo sapiens
  siRNA target sequence for SVIL (NM_021738.1,2391-2409).
ctctctgtcagatttcaca

SEQ ID NO: 119483 - DNA, 19 bp, Homo sapiens
  siRNA target sequence for SVIL (NM_021738.1,2421-2439).
gctccaggccttgaagtat

SEQ ID NO: 119484 - DNA, 19 bp, Homo sapiens
  siRNA target sequence for SVIL (NM_021738.1,2422-2440).
ctccaggccttgaagtata

SEQ ID NO: 119485 - DNA, 19 bp, Homo sapiens
  siRNA target sequence for SVIL (NM_021738.1,2663-2681).
ggaaaccaagacgctattt

SEQ ID NO: 119486 - DNA, 19 bp, Homo sapiens
  siRNA target sequence for SVIL (NM_021738.1,2689-2707).
ggtgaaagtagaaaaactt

SEQ ID NO: 119487 - DNA, 19 bp, Homo sapiens
  siRNA target sequence for SVIL (NM_021738.1,2757-2775).
ggataggtgcacttcacat

SEQ ID NO: 119488 - DNA, 19 bp, Homo sapiens
  siRNA target sequence for SVIL (NM_021738.1,3026-3044).
ggggcacccaccctgtaat

SEQ ID NO: 119489 - DNA, 19 bp, Homo sapiens
  siRNA target sequence for TAGLN (NM_003186.2,109-127).
cgcgaagtgcagtccaaaa

SEQ ID NO: 119490 - DNA, 19 bp, Homo sapiens
  siRNA target sequence for TAGLN (NM_003186.2,110-128).
gcgaagtgcagtccaaaat

SEQ ID NO: 119491 - DNA, 19 bp, Homo sapiens
  siRNA target sequence for TAGLN (NM_003186.2,123-141).
caaaatcgagaagaagtat

SEQ ID NO: 119492 - DNA, 19 bp, Homo sapiens
  siRNA target sequence for TAGLN (NM_003186.2,414-432).
gactgttgacctctttgaa

SEQ ID NO: 119493 - DNA, 19 bp, Homo sapiens
  siRNA target sequence for TAGLN (NM_003186.2,514-532).
ggagatcccaactggttta

SEQ ID NO: 119494 - DNA, 19 bp, Homo sapiens
  siRNA target sequence for TAGLN (NM_003186.2,521-539).
ccaactggtttatgaagaa

SEQ ID NO: 119495 - DNA, 19 bp, Homo sapiens
  siRNA target sequence for TAGLN (NM_003186.2,656-674).
gacgacctcggcagatcat

SEQ ID NO: 119496 - DNA, 19 bp, Homo sapiens
  siRNA target sequence for TLN1 (NM_006289.2,168-186).
cgacgcctgccgcatcatt

SEQ ID NO: 119497 - DNA, 19 bp, Homo sapiens
  siRNA target sequence for TLN1 (NM_006289.2,453-471).
caccaatcatgatgaatat

SEQ ID NO: 119498 - DNA, 19 bp, Homo sapiens
  siRNA target sequence for TLN1 (NM_006289.2,537-555).
gacattgctgcgagatgaa

SEQ ID NO: 119499 - DNA, 19 bp, Homo sapiens
  siRNA target sequence for TLN1 (NM_006289.2,539-557).
cattgctgcgagatgaaaa

SEQ ID NO: 119500 - DNA, 19 bp, Homo sapiens
  siRNA target sequence for TLN1 (NM_006289.2,544-562).
ctgcgagatgaaaagaaga

SEQ ID NO: 119501 - DNA, 19 bp, Homo sapiens
  siRNA target sequence for TLN1 (NM_006289.2,667-685).
ctgcggaggaagttctttt

SEQ ID NO: 119502 - DNA, 19 bp, Homo sapiens
  siRNA target sequence for TLN1 (NM_006289.2,994-1012).
gcccgttctctcaagactt

SEQ ID NO: 119503 - DNA, 19 bp, Homo sapiens
  siRNA target sequence for TLN1 (NM_006289.2,995-1013).
cccgttctctcaagactta

SEQ ID NO: 119504 - DNA, 19 bp, Homo sapiens
  siRNA target sequence for TLN1 (NM_006289.2,1209-1227).
ccaagatggctattactca

SEQ ID NO: 119505 - DNA, 19 bp, Homo sapiens
  siRNA target sequence for TLN1 (NM_006289.2,1267-1285).
gccggctacatcgatatca

SEQ ID NO: 119506 - DNA, 19 bp, Homo sapiens
  siRNA target sequence for TLN1 (NM_006289.2,1268-1286).
ccggctacatcgatatcat

SEQ ID NO: 119507 - DNA, 19 bp, Homo sapiens
  siRNA target sequence for TLN1 (NM_006289.2,1463-1481).
ctggtcctgagaatttcca

SEQ ID NO: 119508 - DNA, 19 bp, Homo sapiens
  siRNA target sequence for TLN1 (NM_006289.2,1679-1697).
cctggcgtaaaaacaagat

SEQ ID NO: 119509 - DNA, 19 bp, Homo sapiens
  siRNA target sequence for TLN1 (NM_006289.2,1782-1800).
ccctgctgagacagactat

SEQ ID NO: 119510 - DNA, 19 bp, Homo sapiens
  siRNA target sequence for TLN1 (NM_006289.2,1783-1801).
cctgctgagacagactata

SEQ ID NO: 119511 - DNA, 19 bp, Homo sapiens
  siRNA target sequence for TLN1 (NM_006289.2,2035-2053).
ggggagctgttgcaacaaa

SEQ ID NO: 119512 - DNA, 19 bp, Homo sapiens
  siRNA target sequence for TLN1 (NM_006289.2,2037-2055).
ggagctgttgcaacaaatt

SEQ ID NO: 119513 - DNA, 19 bp, Homo sapiens
  siRNA target sequence for TLN1 (NM_006289.2,2254-2272).
gtggtggcacctacaatca

SEQ ID NO: 119514 - DNA, 19 bp, Homo sapiens
  siRNA target sequence for TLN1 (NM_006289.2,2468-2486).
ggcctgctggccgttatga

SEQ ID NO: 119515 - DNA, 19 bp, Homo sapiens
  siRNA target sequence for TLN1 (NM_006289.2,2491-2509).
gctactgacaccatcctaa

SEQ ID NO: 119516 - DNA, 19 bp, Homo sapiens
  siRNA target sequence for TLN1 (NM_006289.2,2510-2528).
ccgtcactgagaacatctt

SEQ ID NO: 119517 - DNA, 19 bp, Homo sapiens
  siRNA target sequence for TLN1 (NM_006289.2,2804-2822).
cgcagaatgccatcaagaa

SEQ ID NO: 119518 - DNA, 19 bp, Homo sapiens
  siRNA target sequence for TLN1 (NM_006289.2,3105-3123).
ggcctcagtgccaacgatt

SEQ ID NO: 119519 - DNA, 19 bp, Homo sapiens
  siRNA target sequence for TLN1 (NM_006289.2,3226-3244).
ggacctttggagatggatt

SEQ ID NO: 119520 - DNA, 19 bp, Homo sapiens
  siRNA target sequence for TLN1 (NM_006289.2,3301-3319).
gctcgagatggcaagctta

SEQ ID NO: 119521 - DNA, 19 bp, Homo sapiens
  siRNA target sequence for TLN1 (NM_006289.2,3302-3320).
ctcgagatggcaagcttaa

SEQ ID NO: 119522 - DNA, 19 bp, Homo sapiens
  siRNA target sequence for TLN1 (NM_006289.2,3323-3341).
ccttacctggggagacaat

SEQ ID NO: 119523 - DNA, 19 bp, Homo sapiens
  siRNA target sequence for TLN1 (NM_006289.2,3527-3545).
cagtgcaggccattgtact

SEQ ID NO: 119524 - DNA, 19 bp, Homo sapiens
  siRNA target sequence for TLN1 (NM_006289.2,3531-3549).
gcaggccattgtacttgat

SEQ ID NO: 119525 - DNA, 19 bp, Homo sapiens
  siRNA target sequence for TLN1 (NM_006289.2,3532-3550).
caggccattgtacttgata

SEQ ID NO: 119526 - DNA, 19 bp, Homo sapiens
  siRNA target sequence for TLN1 (NM_006289.2,3704-3722).
gccagcgcgatgtggataa

SEQ ID NO: 119527 - DNA, 19 bp, Homo sapiens
  siRNA target sequence for TLN1 (NM_006289.2,3705-3723).
ccagcgcgatgtggataat

SEQ ID NO: 119528 - DNA, 19 bp, Homo sapiens
  siRNA target sequence for TLN1 (NM_006289.2,3803-3821).
ctcagagccggttgaatga

SEQ ID NO: 119529 - DNA, 19 bp, Homo sapiens
  siRNA target sequence for TLN1 (NM_006289.2,3988-4006).
caagttgtgtccaacttga

SEQ ID NO: 119530 - DNA, 19 bp, Homo sapiens
  siRNA target sequence for TLN1 (NM_006289.2,4017-4035).
catgtcttcaagcaaactt

SEQ ID NO: 119531 - DNA, 19 bp, Homo sapiens
  siRNA target sequence for TLN1 (NM_006289.2,4229-4247).
cagtccagcccatcaatga

SEQ ID NO: 119532 - DNA, 19 bp, Homo sapiens
  siRNA target sequence for TLN1 (NM_006289.2,4231-4249).
gtccagcccatcaatgaca

SEQ ID NO: 119533 - DNA, 19 bp, Homo sapiens
  siRNA target sequence for TLN1 (NM_006289.2,4246-4264).
gacatgtcctactttggtt

SEQ ID NO: 119534 - DNA, 19 bp, Homo sapiens
  siRNA target sequence for TLN1 (NM_006289.2,4261-4279).
ggttgcctggacagtgtaa

SEQ ID NO: 119535 - DNA, 19 bp, Homo sapiens
  siRNA target sequence for TLN1 (NM_006289.2,4496-4514).
gtgcaaaccaggcaattca

SEQ ID NO: 119536 - DNA, 19 bp, Homo sapiens
  siRNA target sequence for TLN1 (NM_006289.2,4630-4648).
gcccgtaccaccaatccta

SEQ ID NO: 119537 - DNA, 19 bp, Homo sapiens
  siRNA target sequence for TLN1 (NM_006289.2,4649-4667).
ctgccaagcgccagtttgt

SEQ ID NO: 119538 - DNA, 19 bp, Homo sapiens
  siRNA target sequence for TLN1 (NM_006289.2,4652-4670).
ccaagcgccagtttgtaca

SEQ ID NO: 119539 - DNA, 19 bp, Homo sapiens
  siRNA target sequence for TLN1 (NM_006289.2,4694-4712).
gcacagctaatcttgtcaa

SEQ ID NO: 119540 - DNA, 19 bp, Homo sapiens
  siRNA target sequence for TLN1 (NM_006289.2,5014-5032).
gactccatcaagaagctaa

SEQ ID NO: 119541 - DNA, 19 bp, Homo sapiens
  siRNA target sequence for TLN1 (NM_006289.2,5019-5037).
catcaagaagctaattaca

SEQ ID NO: 119542 - DNA, 19 bp, Homo sapiens
  siRNA target sequence for TLN1 (NM_006289.2,5369-5387).
cactcctggaccagactaa

SEQ ID NO: 119543 - DNA, 19 bp, Homo sapiens
  siRNA target sequence for TLN1 (NM_006289.2,5374-5392).
ctggaccagactaaaacat

SEQ ID NO: 119544 - DNA, 19 bp, Homo sapiens
  siRNA target sequence for TLN1 (NM_006289.2,5509-5527).
gtagaggacctgacaacaa

SEQ ID NO: 119545 - DNA, 19 bp, Homo sapiens
  siRNA target sequence for TLN1 (NM_006289.2,5640-5658).
cgtggattaccaaacaact

SEQ ID NO: 119546 - DNA, 19 bp, Homo sapiens
  siRNA target sequence for TLN1 (NM_006289.2,5641-5659).
gtggattaccaaacaacta

SEQ ID NO: 119547 - DNA, 19 bp, Homo sapiens
  siRNA target sequence for TLN1 (NM_006289.2,5751-5769).
ccagctgaccagtgactat

SEQ ID NO: 119548 - DNA, 19 bp, Homo sapiens
  siRNA target sequence for TLN1 (NM_006289.2,6102-6120).
caatcgtgagggtactgaa

SEQ ID NO: 119549 - DNA, 19 bp, Homo sapiens
  siRNA target sequence for TLN1 (NM_006289.2,6106-6124).
cgtgagggtactgaaactt

SEQ ID NO: 119550 - DNA, 19 bp, Homo sapiens
  siRNA target sequence for TLN1 (NM_006289.2,6317-6335).
cccaggtggtactaatcaa

SEQ ID NO: 119551 - DNA, 19 bp, Homo sapiens
  siRNA target sequence for TLN1 (NM_006289.2,6418-6436).
gctgtgtggcagctaaaga

SEQ ID NO: 119552 - DNA, 19 bp, Homo sapiens
  siRNA target sequence for TLN1 (NM_006289.2,6421-6439).
gtgtggcagctaaagaact

SEQ ID NO: 119553 - DNA, 19 bp, Homo sapiens
  siRNA target sequence for TLN1 (NM_006289.2,6555-6573).
ggagctggcggttttctgt

SEQ ID NO: 119554 - DNA, 19 bp, Homo sapiens
  siRNA target sequence for TLN1 (NM_006289.2,6556-6574).
gagctggcggttttctgtt

SEQ ID NO: 119555 - DNA, 19 bp, Homo sapiens
  siRNA target sequence for TLN1 (NM_006289.2,6658-6676).
gttgctgctggcaattcct

SEQ ID NO: 119556 - DNA, 19 bp, Homo sapiens
  siRNA target sequence for TLN1 (NM_006289.2,6719-6737).
gtgctattgcagatatgct

SEQ ID NO: 119557 - DNA, 19 bp, Homo sapiens
  siRNA target sequence for TLN1 (NM_006289.2,7041-7059).
ggctgcagccaaaaagcta

SEQ ID NO: 119558 - DNA, 19 bp, Homo sapiens
  siRNA target sequence for TLN1 (NM_006289.2,7154-7172).
ccaccagtgcactggtaaa

SEQ ID NO: 119559 - DNA, 19 bp, Homo sapiens
  siRNA target sequence for TLN1 (NM_006289.2,7434-7452).
ggactcggaggcaatgaaa

SEQ ID NO: 119560 - DNA, 19 bp, Homo sapiens
  siRNA target sequence for TLN1 (NM_006289.2,7477-7495).
gtgaagcgagcctcagata

SEQ ID NO: 119561 - DNA, 19 bp, Homo sapiens
  siRNA target sequence for TLN1 (NM_006289.2,7479-7497).
gaagcgagcctcagataat

SEQ ID NO: 119562 - DNA, 19 bp, Homo sapiens
  siRNA target sequence for TLN2 (NM_015059.1,4-22).
gtggccctgtccttaaaga

SEQ ID NO: 119563 - DNA, 19 bp, Homo sapiens
  siRNA target sequence for TLN2 (NM_015059.1,6-24).
ggccctgtccttaaagatt

SEQ ID NO: 119564 - DNA, 19 bp, Homo sapiens
  siRNA target sequence for TLN2 (NM_015059.1,7-25).
gccctgtccttaaagattt

SEQ ID NO: 119565 - DNA, 19 bp, Homo sapiens
  siRNA target sequence for TLN2 (NM_015059.1,57-75).
gcagtttgaaccatctaca

SEQ ID NO: 119566 - DNA, 19 bp, Homo sapiens
  siRNA target sequence for TLN2 (NM_015059.1,84-102).
cgatgcgtgtcgagtcatt

SEQ ID NO: 119567 - DNA, 19 bp, Homo sapiens
  siRNA target sequence for TLN2 (NM_015059.1,197-215).
cgggcagaacactggatta

SEQ ID NO: 119568 - DNA, 19 bp, Homo sapiens
  siRNA target sequence for TLN2 (NM_015059.1,206-224).
cactggattactacatgtt

SEQ ID NO: 119569 - DNA, 19 bp, Homo sapiens
  siRNA target sequence for TLN2 (NM_015059.1,332-350).
gggagctcctggtcactat

SEQ ID NO: 119570 - DNA, 19 bp, Homo sapiens
  siRNA target sequence for TLN2 (NM_015059.1,333-351).
ggagctcctggtcactatt

SEQ ID NO: 119571 - DNA, 19 bp, Homo sapiens
  siRNA target sequence for TLN2 (NM_015059.1,336-354).
gctcctggtcactatttgt

SEQ ID NO: 119572 - DNA, 19 bp, Homo sapiens
  siRNA target sequence for TLN2 (NM_015059.1,427-445).
ggaacgggcacactcaaaa

SEQ ID NO: 119573 - DNA, 19 bp, Homo sapiens
  siRNA target sequence for TLN2 (NM_015059.1,428-446).
gaacgggcacactcaaaaa

SEQ ID NO: 119574 - DNA, 19 bp, Homo sapiens
  siRNA target sequence for TLN2 (NM_015059.1,431-449).
cgggcacactcaaaaaaga

SEQ ID NO: 119575 - DNA, 19 bp, Homo sapiens
  siRNA target sequence for TLN2 (NM_015059.1,504-522).
cacagatgatgacctaaat

SEQ ID NO: 119576 - DNA, 19 bp, Homo sapiens
  siRNA target sequence for TLN2 (NM_015059.1,556-574).
ggagtagatgaaaacgaaa

SEQ ID NO: 119577 - DNA, 19 bp, Homo sapiens
  siRNA target sequence for TLN2 (NM_015059.1,580-598).
ctgcttagacggaagttct

SEQ ID NO: 119578 - DNA, 19 bp, Homo sapiens
  siRNA target sequence for TLN2 (NM_015059.1,603-621).
ctctgatcagaatgtagat

SEQ ID NO: 119579 - DNA, 19 bp, Homo sapiens
  siRNA target sequence for TLN2 (NM_015059.1,636-654).
gcagctgaacttgctttat

SEQ ID NO: 119580 - DNA, 19 bp, Homo sapiens
  siRNA target sequence for TLN2 (NM_015059.1,702-720).
cgagaaagcttgtgagttt

SEQ ID NO: 119581 - DNA, 19 bp, Homo sapiens
  siRNA target sequence for TLN2 (NM_015059.1,749-767).
gacctcatgtggaacataa

SEQ ID NO: 119582 - DNA, 19 bp, Homo sapiens
  siRNA target sequence for TLN2 (NM_015059.1,833-851).
ctgaaaagaggatctttca

SEQ ID NO: 119583 - DNA, 19 bp, Homo sapiens
  siRNA target sequence for TLN2 (NM_015059.1,867-885).
cggagagatgagtgagata

SEQ ID NO: 119584 - DNA, 19 bp, Homo sapiens
  siRNA target sequence for TLN2 (NM_015059.1,869-887).
gagagatgagtgagataga

SEQ ID NO: 119585 - DNA, 19 bp, Homo sapiens
  siRNA target sequence for TLN2 (NM_015059.1,1125-1143).
gtatcaggaaagctactat

SEQ ID NO: 119586 - DNA, 19 bp, Homo sapiens
  siRNA target sequence for TLN2 (NM_015059.1,1131-1149).
ggaaagctactattcagta

SEQ ID NO: 119587 - DNA, 19 bp, Homo sapiens
  siRNA target sequence for TLN2 (NM_015059.1,1254-1272).
ggagtcaaccatgttagaa

SEQ ID NO: 119588 - DNA, 19 bp, Homo sapiens
  siRNA target sequence for TLN2 (NM_015059.1,1568-1586).
cacctctcggccaggatat

SEQ ID NO: 119589 - DNA, 19 bp, Homo sapiens
  siRNA target sequence for TLN2 (NM_015059.1,1592-1610).
ctagggtatgggttcagaa

SEQ ID NO: 119590 - DNA, 19 bp, Homo sapiens
  siRNA target sequence for TLN2 (NM_015059.1,1611-1629).
caaagtcgacgaatccaaa

SEQ ID NO: 119591 - DNA, 19 bp, Homo sapiens
  siRNA target sequence for TLN2 (NM_015059.1,1670-1688).
cggcttcagttgttaacct

SEQ ID NO: 119592 - DNA, 19 bp, Homo sapiens
  siRNA target sequence for TLN2 (NM_015059.1,1772-1790).
ccaagggtgtgaagctatt

SEQ ID NO: 119593 - DNA, 19 bp, Homo sapiens
  siRNA target sequence for TLN2 (NM_015059.1,1993-2011).
gagcgattccaggatgttt

SEQ ID NO: 119594 - DNA, 19 bp, Homo sapiens
  siRNA target sequence for TLN2 (NM_015059.1,1995-2013).
gcgattccaggatgtttta

SEQ ID NO: 119595 - DNA, 19 bp, Homo sapiens
  siRNA target sequence for TLN2 (NM_015059.1,1996-2014).
cgattccaggatgttttaa

SEQ ID NO: 119596 - DNA, 19 bp, Homo sapiens
  siRNA target sequence for TLN2 (NM_015059.1,2044-2062).
gctgccatgttggtactaa

SEQ ID NO: 119597 - DNA, 19 bp, Homo sapiens
  siRNA target sequence for TLN2 (NM_015059.1,2045-2063).
ctgccatgttggtactaaa

SEQ ID NO: 119598 - DNA, 19 bp, Homo sapiens
  siRNA target sequence for TLN2 (NM_015059.1,2100-2118).
cctacagaacagggtaatt

SEQ ID NO: 119599 - DNA, 19 bp, Homo sapiens
  siRNA target sequence for TLN2 (NM_015059.1,2176-2194).
gtgagccccactattagct

SEQ ID NO: 119600 - DNA, 19 bp, Homo sapiens
  siRNA target sequence for TLN2 (NM_015059.1,2574-2592).
gctcctggcagcagcaaaa

SEQ ID NO: 119601 - DNA, 19 bp, Homo sapiens
  siRNA target sequence for TLN2 (NM_015059.1,2719-2737).
gctgcccagaatgctatta

SEQ ID NO: 119602 - DNA, 19 bp, Homo sapiens
  siRNA target sequence for TLN2 (NM_015059.1,3137-3155).
cttgtggtccgatggaaat

SEQ ID NO: 119603 - DNA, 19 bp, Homo sapiens
  siRNA target sequence for TLN2 (NM_015059.1,3140-3158).
gtggtccgatggaaatcga

SEQ ID NO: 119604 - DNA, 19 bp, Homo sapiens
  siRNA target sequence for TLN2 (NM_015059.1,3142-3160).
ggtccgatggaaatcgatt

SEQ ID NO: 119605 - DNA, 19 bp, Homo sapiens
  siRNA target sequence for TLN2 (NM_015059.1,3173-3191).
cggtgcagacgcttaagaa

SEQ ID NO: 119606 - DNA, 19 bp, Homo sapiens
  siRNA target sequence for TLN2 (NM_015059.1,3174-3192).
ggtgcagacgcttaagaat

SEQ ID NO: 119607 - DNA, 19 bp, Homo sapiens
  siRNA target sequence for TLN2 (NM_015059.1,3177-3195).
gcagacgcttaagaatgaa

SEQ ID NO: 119608 - DNA, 19 bp, Homo sapiens
  siRNA target sequence for TLN2 (NM_015059.1,3448-3466).
gcccatgccatgttagatt

SEQ ID NO: 119609 - DNA, 19 bp, Homo sapiens
  siRNA target sequence for TLN2 (NM_015059.1,3450-3468).
ccatgccatgttagattct

SEQ ID NO: 119610 - DNA, 19 bp, Homo sapiens
  siRNA target sequence for TLN2 (NM_015059.1,3579-3597).
cgtctcacactccttgaat

SEQ ID NO: 119611 - DNA, 19 bp, Homo sapiens
  siRNA target sequence for TLN2 (NM_015059.1,3580-3598).
gtctcacactccttgaata

SEQ ID NO: 119612 - DNA, 19 bp, Homo sapiens
  siRNA target sequence for TLN2 (NM_015059.1,3631-3649).
gtggacgtggccttgaaga

SEQ ID NO: 119613 - DNA, 19 bp, Homo sapiens
  siRNA target sequence for TLN2 (NM_015059.1,3909-3927).
gatagggaacctcaagaat

SEQ ID NO: 119614 - DNA, 19 bp, Homo sapiens
  siRNA target sequence for TLN2 (NM_015059.1,3986-4004).
gagctcccaatgcgaaaaa

SEQ ID NO: 119615 - DNA, 19 bp, Homo sapiens
  siRNA target sequence for TLN2 (NM_015059.1,4034-4052).
cagagagcatcaatcaact

SEQ ID NO: 119616 - DNA, 19 bp, Homo sapiens
  siRNA target sequence for TLN2 (NM_015059.1,4083-4101).
ccagaaagagtgcgataat

SEQ ID NO: 119617 - DNA, 19 bp, Homo sapiens
  siRNA target sequence for TLN2 (NM_015059.1,4130-4148).
ggatgttggacaatcctaa

SEQ ID NO: 119618 - DNA, 19 bp, Homo sapiens
  siRNA target sequence for TLN2 (NM_015059.1,4131-4149).
gatgttggacaatcctaat

SEQ ID NO: 119619 - DNA, 19 bp, Homo sapiens
  siRNA target sequence for TLN2 (NM_015059.1,4134-4152).
gttggacaatcctaatgaa

SEQ ID NO: 119620 - DNA, 19 bp, Homo sapiens
  siRNA target sequence for TLN2 (NM_015059.1,4145-4163).
ctaatgaacctgttagtga

SEQ ID NO: 119621 - DNA, 19 bp, Homo sapiens
  siRNA target sequence for TLN2 (NM_015059.1,4154-4172).
ctgttagtgacctctctta

SEQ ID NO: 119622 - DNA, 19 bp, Homo sapiens
  siRNA target sequence for TLN2 (NM_015059.1,4162-4180).
gacctctcttactttgact

SEQ ID NO: 119623 - DNA, 19 bp, Homo sapiens
  siRNA target sequence for TLN2 (NM_015059.1,4479-4497).
cctgtcagccgccacaatt

SEQ ID NO: 119624 - DNA, 19 bp, Homo sapiens
  siRNA target sequence for TLN2 (NM_015059.1,4482-4500).
gtcagccgccacaattgtt

SEQ ID NO: 119625 - DNA, 19 bp, Homo sapiens
  siRNA target sequence for TLN2 (NM_015059.1,4686-4704).
cgccaccgcacccttgatt

SEQ ID NO: 119626 - DNA, 19 bp, Homo sapiens
  siRNA target sequence for TLN2 (NM_015059.1,4688-4706).
ccaccgcacccttgattga

SEQ ID NO: 119627 - DNA, 19 bp, Homo sapiens
  siRNA target sequence for TLN2 (NM_015059.1,4689-4707).
caccgcacccttgattgaa

SEQ ID NO: 119628 - DNA, 19 bp, Homo sapiens
  siRNA target sequence for TLN2 (NM_015059.1,4784-4802).
cccaggcacaggaaccaat

SEQ ID NO: 119629 - DNA, 19 bp, Homo sapiens
  siRNA target sequence for TLN2 (NM_015059.1,4907-4925).
ctggacattcccatacagt

SEQ ID NO: 119630 - DNA, 19 bp, Homo sapiens
  siRNA target sequence for TLN2 (NM_015059.1,4978-4996).
cagagggagtgtgattact

SEQ ID NO: 119631 - DNA, 19 bp, Homo sapiens
  siRNA target sequence for TLN2 (NM_015059.1,5199-5217).
gacacaactggcaagctat

SEQ ID NO: 119632 - DNA, 19 bp, Homo sapiens
  siRNA target sequence for TLN2 (NM_015059.1,5201-5219).
cacaactggcaagctattt

SEQ ID NO: 119633 - DNA, 19 bp, Homo sapiens
  siRNA target sequence for TLN2 (NM_015059.1,5250-5268).
ggcctccaagattcttgat

SEQ ID NO: 119634 - DNA, 19 bp, Homo sapiens
  siRNA target sequence for TLN2 (NM_015059.1,5331-5349).
gttgtatgcagccaaagaa

SEQ ID NO: 119635 - DNA, 19 bp, Homo sapiens
  siRNA target sequence for TLN2 (NM_015059.1,5534-5552).
cagaaccaaagggaacatt

SEQ ID NO: 119636 - DNA, 19 bp, Homo sapiens
  siRNA target sequence for TLN2 (NM_015059.1,5546-5564).
gaacatttgtcgactatca

SEQ ID NO: 119637 - DNA, 19 bp, Homo sapiens
  siRNA target sequence for TLN2 (NM_015059.1,5563-5581).
cagacgactgtggttaaat

SEQ ID NO: 119638 - DNA, 19 bp, Homo sapiens
  siRNA target sequence for TLN2 (NM_015059.1,5770-5788).
ctgggccacggctgtatct

SEQ ID NO: 119639 - DNA, 19 bp, Homo sapiens
  siRNA target sequence for TLN2 (NM_015059.1,5867-5885).
gtgccgtcacggaaaaggt

SEQ ID NO: 119640 - DNA, 19 bp, Homo sapiens
  siRNA target sequence for TLN2 (NM_015059.1,6230-6248).
cccaggtggttttgatcaa

SEQ ID NO: 119641 - DNA, 19 bp, Homo sapiens
  siRNA target sequence for TLN2 (NM_015059.1,6383-6401).
cgctcctcaagactgtaaa

SEQ ID NO: 119642 - DNA, 19 bp, Homo sapiens
  siRNA target sequence for TLN2 (NM_015059.1,6437-6455).
cgcttgaggccacaattga

SEQ ID NO: 119643 - DNA, 19 bp, Homo sapiens
  siRNA target sequence for TLN2 (NM_015059.1,6444-6462).
ggccacaattgaatgcata

SEQ ID NO: 119644 - DNA, 19 bp, Homo sapiens
  siRNA target sequence for TLN2 (NM_015059.1,6445-6463).
gccacaattgaatgcataa

SEQ ID NO: 119645 - DNA, 19 bp, Homo sapiens
  siRNA target sequence for TLN2 (NM_015059.1,6476-6494).
cggtgttccagtcaaaaga

SEQ ID NO: 119646 - DNA, 19 bp, Homo sapiens
  siRNA target sequence for TLN2 (NM_015059.1,6493-6511).
gacgtacctgaaaagacat

SEQ ID NO: 119647 - DNA, 19 bp, Homo sapiens
  siRNA target sequence for TLN2 (NM_015059.1,6512-6530).
catcacctgaagaatccat

SEQ ID NO: 119648 - DNA, 19 bp, Homo sapiens
  siRNA target sequence for TLN2 (NM_015059.1,6628-6646).
cggaaagccgtgtcagata

SEQ ID NO: 119649 - DNA, 19 bp, Homo sapiens
  siRNA target sequence for TLN2 (NM_015059.1,6629-6647).
ggaaagccgtgtcagatat

SEQ ID NO: 119650 - DNA, 19 bp, Homo sapiens
  siRNA target sequence for TLN2 (NM_015059.1,6634-6652).
gccgtgtcagatatgttga

SEQ ID NO: 119651 - DNA, 19 bp, Homo sapiens
  siRNA target sequence for TLN2 (NM_015059.1,7448-7466).
ctgatgacgacgatgttgt

SEQ ID NO: 119652 - DNA, 19 bp, Homo sapiens
  siRNA target sequence for TLN2 (NM_015059.1,7455-7473).
cgacgatgttgtagtgaaa

SEQ ID NO: 119653 - DNA, 19 bp, Homo sapiens
  siRNA target sequence for TMOD1 (NM_003275.1,37-55).
gtcgtacagacgagaacta

SEQ ID NO: 119654 - DNA, 19 bp, Homo sapiens
  siRNA target sequence for TMOD1 (NM_003275.1,39-57).
cgtacagacgagaactaga

SEQ ID NO: 119655 - DNA, 19 bp, Homo sapiens
  siRNA target sequence for TMOD1 (NM_003275.1,43-61).
cagacgagaactagagaaa

SEQ ID NO: 119656 - DNA, 19 bp, Homo sapiens
  siRNA target sequence for TMOD1 (NM_003275.1,45-63).
gacgagaactagagaaata

SEQ ID NO: 119657 - DNA, 19 bp, Homo sapiens
  siRNA target sequence for TMOD1 (NM_003275.1,64-82).
ccgtgacctggatgaagat

SEQ ID NO: 119658 - DNA, 19 bp, Homo sapiens
  siRNA target sequence for TMOD1 (NM_003275.1,233-251).
ctcttggatcacttggaaa

SEQ ID NO: 119659 - DNA, 19 bp, Homo sapiens
  siRNA target sequence for TMOD1 (NM_003275.1,265-283).
gtttaaggaccgagaagat

SEQ ID NO: 119660 - DNA, 19 bp, Homo sapiens
  siRNA target sequence for TMOD1 (NM_003275.1,386-404).
gaagccttggcaaatgctt

SEQ ID NO: 119661 - DNA, 19 bp, Homo sapiens
  siRNA target sequence for TMOD1 (NM_003275.1,512-530).
gggctcaacagcgtgatta

SEQ ID NO: 119662 - DNA, 19 bp, Homo sapiens
  siRNA target sequence for TMOD1 (NM_003275.1,513-531).
ggctcaacagcgtgattaa

SEQ ID NO: 119663 - DNA, 19 bp, Homo sapiens
  siRNA target sequence for TMOD1 (NM_003275.1,514-532).
gctcaacagcgtgattaaa

SEQ ID NO: 119664 - DNA, 19 bp, Homo sapiens
  siRNA target sequence for TMOD1 (NM_003275.1,524-542).
gtgattaaacccacacaat

SEQ ID NO: 119665 - DNA, 19 bp, Homo sapiens
  siRNA target sequence for TMOD1 (NM_003275.1,553-571).
gcccgacgaagaaccaaat

SEQ ID NO: 119666 - DNA, 19 bp, Homo sapiens
  siRNA target sequence for TMOD1 (NM_003275.1,554-572).
cccgacgaagaaccaaatt

SEQ ID NO: 119667 - DNA, 19 bp, Homo sapiens
  siRNA target sequence for TMOD1 (NM_003275.1,556-574).
cgacgaagaaccaaattca

SEQ ID NO: 119668 - DNA, 19 bp, Homo sapiens
  siRNA target sequence for TMOD1 (NM_003275.1,559-577).
cgaagaaccaaattcaaca

SEQ ID NO: 119669 - DNA, 19 bp, Homo sapiens
  siRNA target sequence for TMOD1 (NM_003275.1,610-628).
caacgacccaaaacttgaa

SEQ ID NO: 119670 - DNA, 19 bp, Homo sapiens
  siRNA target sequence for TMOD1 (NM_003275.1,686-704).
gaagccctgaaagaaaact

SEQ ID NO: 119671 - DNA, 19 bp, Homo sapiens
  siRNA target sequence for TMOD1 (NM_003275.1,801-819).
cactgaatgtggaatccaa

SEQ ID NO: 119672 - DNA, 19 bp, Homo sapiens
  siRNA target sequence for TMOD1 (NM_003275.1,854-872).
gaagccctcccatacaaca

SEQ ID NO: 119673 - DNA, 19 bp, Homo sapiens
  siRNA target sequence for TMOD1 (NM_003275.1,857-875).
gccctcccatacaacactt

SEQ ID NO: 119674 - DNA, 19 bp, Homo sapiens
  siRNA target sequence for TMOD1 (NM_003275.1,1014-1032).
gggcatccaacgcaatgat

SEQ ID NO: 119675 - DNA, 19 bp, Homo sapiens
  siRNA target sequence for TMOD1 (NM_003275.1,1016-1034).
gcatccaacgcaatgatga

SEQ ID NO: 119676 - DNA, 19 bp, Homo sapiens
  siRNA target sequence for TMOD1 (NM_003275.1,1017-1035).
catccaacgcaatgatgaa

SEQ ID NO: 119677 - DNA, 19 bp, Homo sapiens
  siRNA target sequence for TMOD2 (NM_014548.2,224-242).
gagcttcttggcaaactct

SEQ ID NO: 119678 - DNA, 19 bp, Homo sapiens
  siRNA target sequence for TMOD2 (NM_014548.2,301-319).
catgctgccagctggattt

SEQ ID NO: 119679 - DNA, 19 bp, Homo sapiens
  siRNA target sequence for TMOD2 (NM_014548.2,366-384).
gcgagcacctcctcatgta

SEQ ID NO: 119680 - DNA, 19 bp, Homo sapiens
  siRNA target sequence for TMOD2 (NM_014548.2,478-496).
gcctatagaaactcgtaaa

SEQ ID NO: 119681 - DNA, 19 bp, Homo sapiens
  siRNA target sequence for TMOD2 (NM_014548.2,480-498).
ctatagaaactcgtaaaga

SEQ ID NO: 119682 - DNA, 19 bp, Homo sapiens
  siRNA target sequence for TMOD2 (NM_014548.2,546-564).
cctctgacaccgaactcta

SEQ ID NO: 119683 - DNA, 19 bp, Homo sapiens
  siRNA target sequence for TMOD2 (NM_014548.2,547-565).
ctctgacaccgaactctat

SEQ ID NO: 119684 - DNA, 19 bp, Homo sapiens
  siRNA target sequence for TMOD2 (NM_014548.2,549-567).
ctgacaccgaactctatga

SEQ ID NO: 119685 - DNA, 19 bp, Homo sapiens
  siRNA target sequence for TMOD2 (NM_014548.2,608-626).
ccaaagttcgatgaagaaa

SEQ ID NO: 119686 - DNA, 19 bp, Homo sapiens
  siRNA target sequence for TMOD2 (NM_014548.2,645-663).
gcaaaggacctgtcagaaa

SEQ ID NO: 119687 - DNA, 19 bp, Homo sapiens
  siRNA target sequence for TMOD2 (NM_014548.2,779-797).
ctcaacaacattaagaaca

SEQ ID NO: 119688 - DNA, 19 bp, Homo sapiens
  siRNA target sequence for TMOD2 (NM_014548.2,840-858).
ccaacactcacgtgaagaa

SEQ ID NO: 119689 - DNA, 19 bp, Homo sapiens
  siRNA target sequence for TMOD2 (NM_014548.2,933-951).
ccttgacaagtctaaacat

SEQ ID NO: 119690 - DNA, 19 bp, Homo sapiens
  siRNA target sequence for TMOD2 (NM_014548.2,934-952).
cttgacaagtctaaacata

SEQ ID NO: 119691 - DNA, 19 bp, Homo sapiens
  siRNA target sequence for TMOD3 (NM_014547.3,230-248).
cattccgtaaggacttaga

SEQ ID NO: 119692 - DNA, 19 bp, Homo sapiens
  siRNA target sequence for TMOD3 (NM_014547.3,284-302).
ggaatctgtcagaaacaga

SEQ ID NO: 119693 - DNA, 19 bp, Homo sapiens
  siRNA target sequence for TMOD3 (NM_014547.3,395-413).
ccaccacagggccatttga

SEQ ID NO: 119694 - DNA, 19 bp, Homo sapiens
  siRNA target sequence for TMOD3 (NM_014547.3,396-414).
caccacagggccatttgat

SEQ ID NO: 119695 - DNA, 19 bp, Homo sapiens
  siRNA target sequence for TMOD3 (NM_014547.3,416-434).
gagagcatctcctttcata

SEQ ID NO: 119696 - DNA, 19 bp, Homo sapiens
  siRNA target sequence for TMOD3 (NM_014547.3,448-466).
gcattggagcataaagaca

SEQ ID NO: 119697 - DNA, 19 bp, Homo sapiens
  siRNA target sequence for TMOD3 (NM_014547.3,558-576).
gtctcttgatccagaatta

SEQ ID NO: 119698 - DNA, 19 bp, Homo sapiens
  siRNA target sequence for TMOD3 (NM_014547.3,560-578).
ctcttgatccagaattaga

SEQ ID NO: 119699 - DNA, 19 bp, Homo sapiens
  siRNA target sequence for TMOD3 (NM_014547.3,588-606).
gacaagtgcttctgataca

SEQ ID NO: 119700 - DNA, 19 bp, Homo sapiens
  siRNA target sequence for TMOD3 (NM_014547.3,634-652).
gggatgcacaatttgataa

SEQ ID NO: 119701 - DNA, 19 bp, Homo sapiens
  siRNA target sequence for TMOD3 (NM_014547.3,640-658).
cacaatttgataacgaata

SEQ ID NO: 119702 - DNA, 19 bp, Homo sapiens
  siRNA target sequence for TMOD3 (NM_014547.3,642-660).
caatttgataacgaataca

SEQ ID NO: 119703 - DNA, 19 bp, Homo sapiens
  siRNA target sequence for TMOD3 (NM_014547.3,653-671).
cgaatacaaagttctgtaa

SEQ ID NO: 119704 - DNA, 19 bp, Homo sapiens
  siRNA target sequence for TMOD3 (NM_014547.3,659-677).
caaagttctgtaatataat

SEQ ID NO: 119705 - DNA, 19 bp, Homo sapiens
  siRNA target sequence for TMOD3 (NM_014547.3,735-753).
gattcttccggtatttgat

SEQ ID NO: 119706 - DNA, 19 bp, Homo sapiens
  siRNA target sequence for TMOD3 (NM_014547.3,807-825).
cgatgctcatcttgttgaa

SEQ ID NO: 119707 - DNA, 19 bp, Homo sapiens
  siRNA target sequence for TMOD3 (NM_014547.3,814-832).
catcttgttgaagttaatt

SEQ ID NO: 119708 - DNA, 19 bp, Homo sapiens
  siRNA target sequence for TMOD3 (NM_014547.3,852-870).
cccaattccaaccctaaaa

SEQ ID NO: 119709 - DNA, 19 bp, Homo sapiens
  siRNA target sequence for TMOD3 (NM_014547.3,863-881).
ccctaaaagattttgcaaa

SEQ ID NO: 119710 - DNA, 19 bp, Homo sapiens
  siRNA target sequence for TMOD3 (NM_014547.3,894-912).
caacacacatgtgaaatgt

SEQ ID NO: 119711 - DNA, 19 bp, Homo sapiens
  siRNA target sequence for TMOD3 (NM_014547.3,1031-1049).
ggattctggcactgattga

SEQ ID NO: 119712 - DNA, 19 bp, Homo sapiens
  siRNA target sequence for TMOD3 (NM_014547.3,1044-1062).
gattgatgcgttaagagat

SEQ ID NO: 119713 - DNA, 19 bp, Homo sapiens
  siRNA target sequence for TMOD3 (NM_014547.3,1051-1069).
gcgttaagagataatgaaa

SEQ ID NO: 119714 - DNA, 19 bp, Homo sapiens
  siRNA target sequence for TMOD3 (NM_014547.3,1112-1130).
ggacagctgtagaattgga

SEQ ID NO: 119715 - DNA, 19 bp, Homo sapiens
  siRNA target sequence for TMOD3 (NM_014547.3,1205-1223).
ccagagcagctaatgctat

SEQ ID NO: 119716 - DNA, 19 bp, Homo sapiens
  siRNA target sequence for TMOD3 (NM_014547.3,1206-1224).
cagagcagctaatgctata

SEQ ID NO: 119717 - DNA, 19 bp, Homo sapiens
  siRNA target sequence for TMOD3 (NM_014547.3,1210-1228).
gcagctaatgctataacaa

SEQ ID NO: 119718 - DNA, 19 bp, Homo sapiens
  siRNA target sequence for TMOD3 (NM_014547.3,1211-1229).
cagctaatgctataacaaa

SEQ ID NO: 119719 - DNA, 19 bp, Homo sapiens
  siRNA target sequence for TMOD3 (NM_014547.3,1245-1263).
gcgtaagagacgagttgaa

SEQ ID NO: 119720 - DNA, 19 bp, Homo sapiens
  siRNA target sequence for TMOD4 (NM_013353.1,94-112).
gaaatacagagacatagat

SEQ ID NO: 119721 - DNA, 19 bp, Homo sapiens
  siRNA target sequence for TMOD4 (NM_013353.1,464-482).
gcaattctggacatgtaca

SEQ ID NO: 119722 - DNA, 19 bp, Homo sapiens
  siRNA target sequence for TMOD4 (NM_013353.1,490-508).
gagtaacaagcaatactat

SEQ ID NO: 119723 - DNA, 19 bp, Homo sapiens
  siRNA target sequence for TMOD4 (NM_013353.1,559-577).
ggtacagcctgacaagtat

SEQ ID NO: 119724 - DNA, 19 bp, Homo sapiens
  siRNA target sequence for TMOD4 (NM_013353.1,560-578).
gtacagcctgacaagtata

SEQ ID NO: 119725 - DNA, 19 bp, Homo sapiens
  siRNA target sequence for TMOD4 (NM_013353.1,633-651).
gggtccgaagcaatgacaa

SEQ ID NO: 119726 - DNA, 19 bp, Homo sapiens
  siRNA target sequence for TMOD4 (NM_013353.1,659-677).
gaggaggtgaacttgaata

SEQ ID NO: 119727 - DNA, 19 bp, Homo sapiens
  siRNA target sequence for TMOD4 (NM_013353.1,693-711).
caatacccatgctaagtga

SEQ ID NO: 119728 - DNA, 19 bp, Homo sapiens
  siRNA target sequence for TMOD4 (NM_013353.1,722-740).
gcaatgaaggcaaatacct

SEQ ID NO: 119729 - DNA, 19 bp, Homo sapiens
  siRNA target sequence for TMOD4 (NM_013353.1,830-848).
cagagcctaaacatcgaat

SEQ ID NO: 119730 - DNA, 19 bp, Homo sapiens
  siRNA target sequence for TMOD4 (NM_013353.1,886-904).
gaaggcagttcgggaaaat

SEQ ID NO: 119731 - DNA, 19 bp, Homo sapiens
  siRNA target sequence for TMOD4 (NM_013353.1,1057-1075).
ggccatgacccgaaacaat

SEQ ID NO: 119732 - DNA, 19 bp, Homo sapiens
  siRNA target sequence for TMOD4 (NM_013353.1,1059-1077).
ccatgacccgaaacaatga

SEQ ID NO: 119733 - DNA, 19 bp, Homo sapiens
  siRNA target sequence for TMOD4 (NM_013353.1,1060-1078).
catgacccgaaacaatgaa

SEQ ID NO: 119734 - DNA, 19 bp, Homo sapiens
  siRNA target sequence for TMOD4 (NM_013353.1,1063-1081).
gacccgaaacaatgaacta

SEQ ID NO: 119735 - DNA, 19 bp, Homo sapiens
  siRNA target sequence for TMOD4 (NM_013353.1,1079-1097).
ctacgtcgccagcaaaaga

SEQ ID NO: 119736 - DNA, 19 bp, Homo sapiens
  siRNA target sequence for TMSNB (NM_021992.1,211-229).
gaaagagtgtgttcaaaca

SEQ ID NO: 119737 - DNA, 19 bp, Homo sapiens
  siRNA target sequence for TNNI1 (NM_003281.2,380-398).
gacctccgtgggaagttca

SEQ ID NO: 119738 - DNA, 19 bp, Homo sapiens
  siRNA target sequence for TNNI3 (NM_000363.3,182-200).
ggagccgcacgccaagaaa

SEQ ID NO: 119739 - DNA, 19 bp, Homo sapiens
  siRNA target sequence for TNNI3 (NM_000363.3,185-203).
gccgcacgccaagaaaaaa

SEQ ID NO: 119740 - DNA, 19 bp, Homo sapiens
  siRNA target sequence for TNNI3 (NM_000363.3,188-206).
gcacgccaagaaaaaatct

SEQ ID NO: 119741 - DNA, 19 bp, Homo sapiens
  siRNA target sequence for TNNI3 (NM_000363.3,209-227).
gatctccgcctcgagaaaa

SEQ ID NO: 119742 - DNA, 19 bp, Homo sapiens
  siRNA target sequence for TNNI3 (NM_000363.3,214-232).
ccgcctcgagaaaattgca

SEQ ID NO: 119743 - DNA, 19 bp, Homo sapiens
  siRNA target sequence for TNNI3 (NM_000363.3,426-444).
gacatagaggcaaaagtca

SEQ ID NO: 119744 - DNA, 19 bp, Homo sapiens
  siRNA target sequence for TNNI3 (NM_000363.3,489-507).
gaccttcgaggcaagttta

SEQ ID NO: 119745 - DNA, 19 bp, Homo sapiens
  siRNA target sequence for TPM1 (NM_000366.4,268-286).
ctggtgtcactgcaaaaga

SEQ ID NO: 119746 - DNA, 19 bp, Homo sapiens
  siRNA target sequence for TPM1 (NM_000366.4,515-533).
gaggcatgaaagtcattga

SEQ ID NO: 119747 - DNA, 19 bp, Homo sapiens
  siRNA target sequence for TPM1 (NM_000366.4,534-552).
gagtcgagcccaaaaagat

SEQ ID NO: 119748 - DNA, 19 bp, Homo sapiens
  siRNA target sequence for TPM1 (NM_000366.4,536-554).
gtcgagcccaaaaagatga

SEQ ID NO: 119749 - DNA, 19 bp, Homo sapiens
  siRNA target sequence for TPM1 (NM_000366.4,711-729).
ccgacagctggaagaacaa

SEQ ID NO: 119750 - DNA, 19 bp, Homo sapiens
  siRNA target sequence for TPM1 (NM_000366.4,712-730).
cgacagctggaagaacaat

SEQ ID NO: 119751 - DNA, 19 bp, Homo sapiens
  siRNA target sequence for TPM1 (NM_000366.4,745-763).
cagaccttgaaagcattaa

SEQ ID NO: 119752 - DNA, 19 bp, Homo sapiens
  siRNA target sequence for TPM1 (NM_000366.4,766-784).
gctgcagaggataagtact

SEQ ID NO: 119753 - DNA, 19 bp, Homo sapiens
  siRNA target sequence for TPM1 (NM_000366.4,865-883).
gcggagaggtcagtaacta

SEQ ID NO: 119754 - DNA, 19 bp, Homo sapiens
  siRNA target sequence for TPM1 (NM_000366.4,866-884).
cggagaggtcagtaactaa

SEQ ID NO: 119755 - DNA, 19 bp, Homo sapiens
  siRNA target sequence for TPM1 (NM_000366.4,867-885).
ggagaggtcagtaactaaa

SEQ ID NO: 119756 - DNA, 19 bp, Homo sapiens
  siRNA target sequence for TPM1 (NM_000366.4,872-890).
ggtcagtaactaaattgga

SEQ ID NO: 119757 - DNA, 19 bp, Homo sapiens
  siRNA target sequence for TPM1 (NM_000366.4,915-933).
cgagctgtacgctcagaaa

SEQ ID NO: 119758 - DNA, 19 bp, Homo sapiens
  siRNA target sequence for TPM1 (NM_000366.4,919-937).
ctgtacgctcagaaactga

SEQ ID NO: 119759 - DNA, 19 bp, Homo sapiens
  siRNA target sequence for TPM1 (NM_000366.4,964-982).
gaccacgctctcaacgata

SEQ ID NO: 119760 - DNA, 19 bp, Homo sapiens
  siRNA target sequence for TPM1 (NM_000366.4,967-985).
cacgctctcaacgatatga

SEQ ID NO: 119761 - DNA, 19 bp, Homo sapiens
  siRNA target sequence for TPM1 (NM_000366.4,969-987).
cgctctcaacgatatgact

SEQ ID NO: 119762 - DNA, 19 bp, Homo sapiens
  siRNA target sequence for TPM2 (NM_003289.1,281-299).
gatgaggtggaaaagtatt

SEQ ID NO: 119763 - DNA, 19 bp, Homo sapiens
  siRNA target sequence for TPM3 (NM_152263.1,508-526).
ctgagctggcagagtctaa

SEQ ID NO: 119764 - DNA, 19 bp, Homo sapiens
  siRNA target sequence for TPM3 (NM_152263.1,510-528).
gagctggcagagtctaagt

SEQ ID NO: 119765 - DNA, 19 bp, Homo sapiens
  siRNA target sequence for TPM3 (NM_152263.1,512-530).
gctggcagagtctaagtgt

SEQ ID NO: 119766 - DNA, 19 bp, Homo sapiens
  siRNA target sequence for TPM3 (NM_152263.1,592-610).
cggagaagtactctcaaaa

SEQ ID NO: 119767 - DNA, 19 bp, Homo sapiens
  siRNA target sequence for TPM3 (NM_152263.1,794-812).
caatgacatgacctctata

SEQ ID NO: 119768 - DNA, 19 bp, Homo sapiens
  siRNA target sequence for UTRN (NM_007124.1,34-52).
gacaatgggcagaacgaat

SEQ ID NO: 119769 - DNA, 19 bp, Homo sapiens
  siRNA target sequence for UTRN (NM_007124.1,48-66).
cgaattcagtgatatcatt

SEQ ID NO: 119770 - DNA, 19 bp, Homo sapiens
  siRNA target sequence for UTRN (NM_007124.1,71-89).
ccagatctgatgaacacaa

SEQ ID NO: 119771 - DNA, 19 bp, Homo sapiens
  siRNA target sequence for UTRN (NM_007124.1,147-165).
gaaaccacccatcaatgat

SEQ ID NO: 119772 - DNA, 19 bp, Homo sapiens
  siRNA target sequence for UTRN (NM_007124.1,152-170).
cacccatcaatgatatgtt

SEQ ID NO: 119773 - DNA, 19 bp, Homo sapiens
  siRNA target sequence for UTRN (NM_007124.1,154-172).
cccatcaatgatatgttca

SEQ ID NO: 119774 - DNA, 19 bp, Homo sapiens
  siRNA target sequence for UTRN (NM_007124.1,494-512).
ggccctacagccaagtcaa

SEQ ID NO: 119775 - DNA, 19 bp, Homo sapiens
  siRNA target sequence for UTRN (NM_007124.1,508-526).
gtcaacgtcctcaacttca

SEQ ID NO: 119776 - DNA, 19 bp, Homo sapiens
  siRNA target sequence for UTRN (NM_007124.1,539-557).
cagatggactcgcctttaa

SEQ ID NO: 119777 - DNA, 19 bp, Homo sapiens
  siRNA target sequence for UTRN (NM_007124.1,560-578).
ctgtcctccaccgacataa

SEQ ID NO: 119778 - DNA, 19 bp, Homo sapiens
  siRNA target sequence for UTRN (NM_007124.1,564-582).
cctccaccgacataaacct

SEQ ID NO: 119779 - DNA, 19 bp, Homo sapiens
  siRNA target sequence for UTRN (NM_007124.1,620-638).
caattgagagacttgaaca

SEQ ID NO: 119780 - DNA, 19 bp, Homo sapiens
  siRNA target sequence for UTRN (NM_007124.1,645-663).
cagcaaggctcaaacttat

SEQ ID NO: 119781 - DNA, 19 bp, Homo sapiens
  siRNA target sequence for UTRN (NM_007124.1,712-730).
cctgacaagaaatccataa

SEQ ID NO: 119782 - DNA, 19 bp, Homo sapiens
  siRNA target sequence for UTRN (NM_007124.1,715-733).
gacaagaaatccataatta

SEQ ID NO: 119783 - DNA, 19 bp, Homo sapiens
  siRNA target sequence for UTRN (NM_007124.1,801-819).
gacactcccaaggaaatat

SEQ ID NO: 119784 - DNA, 19 bp, Homo sapiens
  siRNA target sequence for UTRN (NM_007124.1,803-821).
cactcccaaggaaatataa

SEQ ID NO: 119785 - DNA, 19 bp, Homo sapiens
  siRNA target sequence for UTRN (NM_007124.1,838-856).
gaggcaattaatatacaga

SEQ ID NO: 119786 - DNA, 19 bp, Homo sapiens
  siRNA target sequence for UTRN (NM_007124.1,882-900).
gagtccccgagctgaaact

SEQ ID NO: 119787 - DNA, 19 bp, Homo sapiens
  siRNA target sequence for UTRN (NM_007124.1,999-1017).
ggagcaggatgatatttct

SEQ ID NO: 119788 - DNA, 19 bp, Homo sapiens
  siRNA target sequence for UTRN (NM_007124.1,1002-1020).
gcaggatgatatttctgat

SEQ ID NO: 119789 - DNA, 19 bp, Homo sapiens
  siRNA target sequence for UTRN (NM_007124.1,1114-1132).
gcaggcaaccaactgataa

SEQ ID NO: 119790 - DNA, 19 bp, Homo sapiens
  siRNA target sequence for UTRN (NM_007124.1,1118-1136).
gcaaccaactgataacaca

SEQ ID NO: 119791 - DNA, 19 bp, Homo sapiens
  siRNA target sequence for UTRN (NM_007124.1,1285-1303).
cagctctccgcctggttaa

SEQ ID NO: 119792 - DNA, 19 bp, Homo sapiens
  siRNA target sequence for UTRN (NM_007124.1,1287-1305).
gctctccgcctggttaaca

SEQ ID NO: 119793 - DNA, 19 bp, Homo sapiens
  siRNA target sequence for UTRN (NM_007124.1,1310-1328).
cagaggagcgcattcagaa

SEQ ID NO: 119794 - DNA, 19 bp, Homo sapiens
  siRNA target sequence for UTRN (NM_007124.1,1344-1362).
cctggatgatgatgtaaaa

SEQ ID NO: 119795 - DNA, 19 bp, Homo sapiens
  siRNA target sequence for UTRN (NM_007124.1,1422-1440).
ggtgaaagtaaattcacta

SEQ ID NO: 119796 - DNA, 19 bp, Homo sapiens
  siRNA target sequence for UTRN (NM_007124.1,1442-1460).
ctcacatggtggtcattgt

SEQ ID NO: 119797 - DNA, 19 bp, Homo sapiens
  siRNA target sequence for UTRN (NM_007124.1,1449-1467).
ggtggtcattgttgatgaa

SEQ ID NO: 119798 - DNA, 19 bp, Homo sapiens
  siRNA target sequence for UTRN (NM_007124.1,1617-1635).
cttgttgaaagcttggtta

SEQ ID NO: 119799 - DNA, 19 bp, Homo sapiens
  siRNA target sequence for UTRN (NM_007124.1,1628-1646).
cttggttaaccgaaaaaga

SEQ ID NO: 119800 - DNA, 19 bp, Homo sapiens
  siRNA target sequence for UTRN (NM_007124.1,1708-1726).
gttcgacgtctggctattt

SEQ ID NO: 119801 - DNA, 19 bp, Homo sapiens
  siRNA target sequence for UTRN (NM_007124.1,1711-1729).
cgacgtctggctattttga

SEQ ID NO: 119802 - DNA, 19 bp, Homo sapiens
  siRNA target sequence for UTRN (NM_007124.1,1712-1730).
gacgtctggctattttgaa

SEQ ID NO: 119803 - DNA, 19 bp, Homo sapiens
  siRNA target sequence for UTRN (NM_007124.1,1741-1759).
gaaatgaagcgtcaaacat

SEQ ID NO: 119804 - DNA, 19 bp, Homo sapiens
  siRNA target sequence for UTRN (NM_007124.1,1781-1799).
gccaggatgtgggacaatt

SEQ ID NO: 119805 - DNA, 19 bp, Homo sapiens
  siRNA target sequence for UTRN (NM_007124.1,1789-1807).
gtgggacaattacttgata

SEQ ID NO: 119806 - DNA, 19 bp, Homo sapiens
  siRNA target sequence for UTRN (NM_007124.1,1791-1809).
gggacaattacttgataat

SEQ ID NO: 119807 - DNA, 19 bp, Homo sapiens
  siRNA target sequence for UTRN (NM_007124.1,1816-1834).
gcatctaagaagatcaaca

SEQ ID NO: 119808 - DNA, 19 bp, Homo sapiens
  siRNA target sequence for UTRN (NM_007124.1,1872-1890).
ggttcagagactagaagat

SEQ ID NO: 119809 - DNA, 19 bp, Homo sapiens
  siRNA target sequence for UTRN (NM_007124.1,1959-1977).
ggagactgttcgtgtaaga

SEQ ID NO: 119810 - DNA, 19 bp, Homo sapiens
  siRNA target sequence for UTRN (NM_007124.1,1962-1980).
gactgttcgtgtaagagaa

SEQ ID NO: 119811 - DNA, 19 bp, Homo sapiens
  siRNA target sequence for UTRN (NM_007124.1,1970-1988).
gtgtaagagaacaagcaat

SEQ ID NO: 119812 - DNA, 19 bp, Homo sapiens
  siRNA target sequence for UTRN (NM_007124.1,2043-2061).
gatccatgtggatattgaa

SEQ ID NO: 119813 - DNA, 19 bp, Homo sapiens
  siRNA target sequence for UTRN (NM_007124.1,2164-2182).
caagacacttccgaaatga

SEQ ID NO: 119814 - DNA, 19 bp, Homo sapiens
  siRNA target sequence for UTRN (NM_007124.1,2167-2185).
gacacttccgaaatgaaaa

SEQ ID NO: 119815 - DNA, 19 bp, Homo sapiens
  siRNA target sequence for UTRN (NM_007124.1,2226-2244).
ccccagagcagatgaatta

SEQ ID NO: 119816 - DNA, 19 bp, Homo sapiens
  siRNA target sequence for UTRN (NM_007124.1,2320-2338).
gagaaggtttcatcagaat

SEQ ID NO: 119817 - DNA, 19 bp, Homo sapiens
  siRNA target sequence for UTRN (NM_007124.1,2520-2538).
ctgtcagcgggaattgaca

SEQ ID NO: 119818 - DNA, 19 bp, Homo sapiens
  siRNA target sequence for UTRN (NM_007124.1,2522-2540).
gtcagcgggaattgacaaa

SEQ ID NO: 119819 - DNA, 19 bp, Homo sapiens
  siRNA target sequence for UTRN (NM_007124.1,2526-2544).
gcgggaattgacaaatctt

SEQ ID NO: 119820 - DNA, 19 bp, Homo sapiens
  siRNA target sequence for UTRN (NM_007124.1,2652-2670).
ccgctaccaagctgtacaa

SEQ ID NO: 119821 - DNA, 19 bp, Homo sapiens
  siRNA target sequence for UTRN (NM_007124.1,2682-2700).
ggatcgtcaacaacatcta

SEQ ID NO: 119822 - DNA, 19 bp, Homo sapiens
  siRNA target sequence for UTRN (NM_007124.1,2731-2749).
gcatatctggaaacattga

SEQ ID NO: 119823 - DNA, 19 bp, Homo sapiens
  siRNA target sequence for UTRN (NM_007124.1,2798-2816).
ctctgaatgtccttaatga

SEQ ID NO: 119824 - DNA, 19 bp, Homo sapiens
  siRNA target sequence for UTRN (NM_007124.1,2802-2820).
gaatgtccttaatgatctt

SEQ ID NO: 119825 - DNA, 19 bp, Homo sapiens
  siRNA target sequence for UTRN (NM_007124.1,3009-3027).
ggtttccaaagatctacat

SEQ ID NO: 119826 - DNA, 19 bp, Homo sapiens
  siRNA target sequence for UTRN (NM_007124.1,3015-3033).
caaagatctacatttgctt

SEQ ID NO: 119827 - DNA, 19 bp, Homo sapiens
  siRNA target sequence for UTRN (NM_007124.1,3058-3076).
gcttttgaggccgattcaa

SEQ ID NO: 119828 - DNA, 19 bp, Homo sapiens
  siRNA target sequence for UTRN (NM_007124.1,3066-3084).
ggccgattcaacagtcatt

SEQ ID NO: 119829 - DNA, 19 bp, Homo sapiens
  siRNA target sequence for UTRN (NM_007124.1,3092-3110).
ggatggatggcgtgaaaga

SEQ ID NO: 119830 - DNA, 19 bp, Homo sapiens
  siRNA target sequence for UTRN (NM_007124.1,3101-3119).
gcgtgaaagacttcttaat

SEQ ID NO: 119831 - DNA, 19 bp, Homo sapiens
  siRNA target sequence for UTRN (NM_007124.1,3103-3121).
gtgaaagacttcttaatga

SEQ ID NO: 119832 - DNA, 19 bp, Homo sapiens
  siRNA target sequence for UTRN (NM_007124.1,3152-3170).
gtctacagaggcagttaga

SEQ ID NO: 119833 - DNA, 19 bp, Homo sapiens
  siRNA target sequence for UTRN (NM_007124.1,3330-3348).
caaggagatcgctactcaa

SEQ ID NO: 119834 - DNA, 19 bp, Homo sapiens
  siRNA target sequence for UTRN (NM_007124.1,3333-3351).
ggagatcgctactcaaaaa

SEQ ID NO: 119835 - DNA, 19 bp, Homo sapiens
  siRNA target sequence for UTRN (NM_007124.1,3334-3352).
gagatcgctactcaaaaaa

SEQ ID NO: 119836 - DNA, 19 bp, Homo sapiens
  siRNA target sequence for UTRN (NM_007124.1,3336-3354).
gatcgctactcaaaaaagt

SEQ ID NO: 119837 - DNA, 19 bp, Homo sapiens
  siRNA target sequence for UTRN (NM_007124.1,3380-3398).
ctgcgaacctgaagaaaga

SEQ ID NO: 119838 - DNA, 19 bp, Homo sapiens
  siRNA target sequence for UTRN (NM_007124.1,3431-3449).
ccgaggaagaatatttgga

SEQ ID NO: 119839 - DNA, 19 bp, Homo sapiens
  siRNA target sequence for UTRN (NM_007124.1,3538-3556).
gtgagagtgaagattctca

SEQ ID NO: 119840 - DNA, 19 bp, Homo sapiens
  siRNA target sequence for UTRN (NM_007124.1,3555-3573).
caaggacaacatcaagtta

SEQ ID NO: 119841 - DNA, 19 bp, Homo sapiens
  siRNA target sequence for UTRN (NM_007124.1,3609-3627).
gacgtctgagctgaatgtt

SEQ ID NO: 119842 - DNA, 19 bp, Homo sapiens
  siRNA target sequence for UTRN (NM_007124.1,3634-3652).
gagaattaccaacttcttt

SEQ ID NO: 119843 - DNA, 19 bp, Homo sapiens
  siRNA target sequence for UTRN (NM_007124.1,3642-3660).
ccaacttctttgtaataga

SEQ ID NO: 119844 - DNA, 19 bp, Homo sapiens
  siRNA target sequence for UTRN (NM_007124.1,3695-3713).
ggtcttgttggattgaact

SEQ ID NO: 119845 - DNA, 19 bp, Homo sapiens
  siRNA target sequence for UTRN (NM_007124.1,3704-3722).
ggattgaactgcttcacta

SEQ ID NO: 119846 - DNA, 19 bp, Homo sapiens
  siRNA target sequence for UTRN (NM_007124.1,3705-3723).
gattgaactgcttcactat

SEQ ID NO: 119847 - DNA, 19 bp, Homo sapiens
  siRNA target sequence for UTRN (NM_007124.1,3718-3736).
cactatttggatcttgaaa

SEQ ID NO: 119848 - DNA, 19 bp, Homo sapiens
  siRNA target sequence for UTRN (NM_007124.1,3737-3755).
ctacctggttaaacacttt

SEQ ID NO: 119849 - DNA, 19 bp, Homo sapiens
  siRNA target sequence for UTRN (NM_007124.1,3741-3759).
ctggttaaacactttggaa

SEQ ID NO: 119850 - DNA, 19 bp, Homo sapiens
  siRNA target sequence for UTRN (NM_007124.1,3840-3858).
gcgccacccggcagataat

SEQ ID NO: 119851 - DNA, 19 bp, Homo sapiens
  siRNA target sequence for UTRN (NM_007124.1,3876-3894).
gcttggccagactctgatt

SEQ ID NO: 119852 - DNA, 19 bp, Homo sapiens
  siRNA target sequence for UTRN (NM_007124.1,3938-3956).
ctttcaacagccgatatga

SEQ ID NO: 119853 - DNA, 19 bp, Homo sapiens
  siRNA target sequence for UTRN (NM_007124.1,3945-3963).
cagccgatatgaagatcta

SEQ ID NO: 119854 - DNA, 19 bp, Homo sapiens
  siRNA target sequence for UTRN (NM_007124.1,3948-3966).
ccgatatgaagatctaagt

SEQ ID NO: 119855 - DNA, 19 bp, Homo sapiens
  siRNA target sequence for UTRN (NM_007124.1,4025-4043).
ctgaccagatgcttcaagt

SEQ ID NO: 119856 - DNA, 19 bp, Homo sapiens
  siRNA target sequence for UTRN (NM_007124.1,4089-4107).
cctgactgacaggatagat

SEQ ID NO: 119857 - DNA, 19 bp, Homo sapiens
  siRNA target sequence for UTRN (NM_007124.1,4098-4116).
caggatagatgctttccaa

SEQ ID NO: 119858 - DNA, 19 bp, Homo sapiens
  siRNA target sequence for UTRN (NM_007124.1,4273-4291).
cgagaggtgtccacaaagt

SEQ ID NO: 119859 - DNA, 19 bp, Homo sapiens
  siRNA target sequence for UTRN (NM_007124.1,4358-4376).
gcgtgaaagcagaacttca

SEQ ID NO: 119860 - DNA, 19 bp, Homo sapiens
  siRNA target sequence for UTRN (NM_007124.1,4426-4444).
gacaagtgtatgaaactgt

SEQ ID NO: 119861 - DNA, 19 bp, Homo sapiens
  siRNA target sequence for UTRN (NM_007124.1,4428-4446).
caagtgtatgaaactgtat

SEQ ID NO: 119862 - DNA, 19 bp, Homo sapiens
  siRNA target sequence for UTRN (NM_007124.1,4735-4753).
gacttggatacagaaattt

SEQ ID NO: 119863 - DNA, 19 bp, Homo sapiens
  siRNA target sequence for UTRN (NM_007124.1,4820-4838).
gtagtgctgccctgcaaaa

SEQ ID NO: 119864 - DNA, 19 bp, Homo sapiens
  siRNA target sequence for UTRN (NM_007124.1,4823-4841).
gtgctgccctgcaaaactt

SEQ ID NO: 119865 - DNA, 19 bp, Homo sapiens
  siRNA target sequence for UTRN (NM_007124.1,4848-4866).
gggcagtgagcctatttta

SEQ ID NO: 119866 - DNA, 19 bp, Homo sapiens
  siRNA target sequence for UTRN (NM_007124.1,4850-4868).
gcagtgagcctattttaga

SEQ ID NO: 119867 - DNA, 19 bp, Homo sapiens
  siRNA target sequence for UTRN (NM_007124.1,4909-4927).
cgtacctggactgaagatt

SEQ ID NO: 119868 - DNA, 19 bp, Homo sapiens
  siRNA target sequence for UTRN (NM_007124.1,4956-4974).
ccagctagaaatatttgat

SEQ ID NO: 119869 - DNA, 19 bp, Homo sapiens
  siRNA target sequence for UTRN (NM_007124.1,4975-4993).
gggaacgtggctcacataa

SEQ ID NO: 119870 - DNA, 19 bp, Homo sapiens
  siRNA target sequence for UTRN (NM_007124.1,4989-5007).
cataagtacctggctttat

SEQ ID NO: 119871 - DNA, 19 bp, Homo sapiens
  siRNA target sequence for UTRN (NM_007124.1,5121-5139).
ccgcgatcaagcccttatt

SEQ ID NO: 119872 - DNA, 19 bp, Homo sapiens
  siRNA target sequence for UTRN (NM_007124.1,5122-5140).
cgcgatcaagcccttattt

SEQ ID NO: 119873 - DNA, 19 bp, Homo sapiens
  siRNA target sequence for UTRN (NM_007124.1,5217-5235).
ggtgtctcaacatatcaaa

SEQ ID NO: 119874 - DNA, 19 bp, Homo sapiens
  siRNA target sequence for UTRN (NM_007124.1,5218-5236).
gtgtctcaacatatcaaaa

SEQ ID NO: 119875 - DNA, 19 bp, Homo sapiens
  siRNA target sequence for UTRN (NM_007124.1,5220-5238).
gtctcaacatatcaaaagt

SEQ ID NO: 119876 - DNA, 19 bp, Homo sapiens
  siRNA target sequence for UTRN (NM_007124.1,5255-5273).
ctcaggaaccattatacca

SEQ ID NO: 119877 - DNA, 19 bp, Homo sapiens
  siRNA target sequence for UTRN (NM_007124.1,5257-5275).
caggaaccattataccaat

SEQ ID NO: 119878 - DNA, 19 bp, Homo sapiens
  siRNA target sequence for UTRN (NM_007124.1,5283-5301).
caccactgaaacatttgaa

SEQ ID NO: 119879 - DNA, 19 bp, Homo sapiens
  siRNA target sequence for UTRN (NM_007124.1,5376-5394).
cttggaatccagtgatgaa

SEQ ID NO: 119880 - DNA, 19 bp, Homo sapiens
  siRNA target sequence for UTRN (NM_007124.1,5420-5438).
cccagattgaggaagttct

SEQ ID NO: 119881 - DNA, 19 bp, Homo sapiens
  siRNA target sequence for UTRN (NM_007124.1,5421-5439).
ccagattgaggaagttcta

SEQ ID NO: 119882 - DNA, 19 bp, Homo sapiens
  siRNA target sequence for UTRN (NM_007124.1,5461-5479).
catcaacctatggaagata

SEQ ID NO: 119883 - DNA, 19 bp, Homo sapiens
  siRNA target sequence for UTRN (NM_007124.1,5488-5506).
gaaaagatccgtttgcaat

SEQ ID NO: 119884 - DNA, 19 bp, Homo sapiens
  siRNA target sequence for UTRN (NM_007124.1,5512-5530).
cttttgcatactagataca

SEQ ID NO: 119885 - DNA, 19 bp, Homo sapiens
  siRNA target sequence for UTRN (NM_007124.1,5517-5535).
gcatactagatacaacaaa

SEQ ID NO: 119886 - DNA, 19 bp, Homo sapiens
  siRNA target sequence for UTRN (NM_007124.1,5685-5703).
caacactgctatttacgaa

SEQ ID NO: 119887 - DNA, 19 bp, Homo sapiens
  siRNA target sequence for UTRN (NM_007124.1,5690-5708).
ctgctatttacgaagactt

SEQ ID NO: 119888 - DNA, 19 bp, Homo sapiens
  siRNA target sequence for UTRN (NM_007124.1,5818-5836).
ggacctgaagccattcaga

SEQ ID NO: 119889 - DNA, 19 bp, Homo sapiens
  siRNA target sequence for UTRN (NM_007124.1,5819-5837).
gacctgaagccattcagat

SEQ ID NO: 119890 - DNA, 19 bp, Homo sapiens
  siRNA target sequence for UTRN (NM_007124.1,5835-5853).
gatcagagatacacttact

SEQ ID NO: 119891 - DNA, 19 bp, Homo sapiens
  siRNA target sequence for UTRN (NM_007124.1,5894-5912).
gtgatcggaaaggttgttt

SEQ ID NO: 119892 - DNA, 19 bp, Homo sapiens
  siRNA target sequence for UTRN (NM_007124.1,5929-5947).
gaatggagacagttccatt

SEQ ID NO: 119893 - DNA, 19 bp, Homo sapiens
  siRNA target sequence for UTRN (NM_007124.1,5959-5977).
gacctcacacagtggataa

SEQ ID NO: 119894 - DNA, 19 bp, Homo sapiens
  siRNA target sequence for UTRN (NM_007124.1,5961-5979).
cctcacacagtggataaca

SEQ ID NO: 119895 - DNA, 19 bp, Homo sapiens
  siRNA target sequence for UTRN (NM_007124.1,6017-6035).
gtggcagcctggacttaga

SEQ ID NO: 119896 - DNA, 19 bp, Homo sapiens
  siRNA target sequence for UTRN (NM_007124.1,6078-6096).
cagccaccagcccagtttt

SEQ ID NO: 119897 - DNA, 19 bp, Homo sapiens
  siRNA target sequence for UTRN (NM_007124.1,6081-6099).
ccaccagcccagttttgca

SEQ ID NO: 119898 - DNA, 19 bp, Homo sapiens
  siRNA target sequence for UTRN (NM_007124.1,6089-6107).
ccagttttgcagcactaaa

SEQ ID NO: 119899 - DNA, 19 bp, Homo sapiens
  siRNA target sequence for UTRN (NM_007124.1,6186-6204).
ccaacgctgggatgcaatt

SEQ ID NO: 119900 - DNA, 19 bp, Homo sapiens
  siRNA target sequence for UTRN (NM_007124.1,6205-6223).
gttgcagaagtgaaggata

SEQ ID NO: 119901 - DNA, 19 bp, Homo sapiens
  siRNA target sequence for UTRN (NM_007124.1,6233-6251).
ggctaaaaggagaaagtaa

SEQ ID NO: 119902 - DNA, 19 bp, Homo sapiens
  siRNA target sequence for UTRN (NM_007124.1,6270-6288).
gcatcagctagatgagatt

SEQ ID NO: 119903 - DNA, 19 bp, Homo sapiens
  siRNA target sequence for UTRN (NM_007124.1,6271-6289).
catcagctagatgagatta

SEQ ID NO: 119904 - DNA, 19 bp, Homo sapiens
  siRNA target sequence for UTRN (NM_007124.1,6274-6292).
cagctagatgagattatct

SEQ ID NO: 119905 - DNA, 19 bp, Homo sapiens
  siRNA target sequence for UTRN (NM_007124.1,6276-6294).
gctagatgagattatctgt

SEQ ID NO: 119906 - DNA, 19 bp, Homo sapiens
  siRNA target sequence for UTRN (NM_007124.1,6302-6320).
caaaggctgagcatgctat

SEQ ID NO: 119907 - DNA, 19 bp, Homo sapiens
  siRNA target sequence for UTRN (NM_007124.1,6306-6324).
ggctgagcatgctatgcaa

SEQ ID NO: 119908 - DNA, 19 bp, Homo sapiens
  siRNA target sequence for UTRN (NM_007124.1,6310-6328).
gagcatgctatgcaaaaga

SEQ ID NO: 119909 - DNA, 19 bp, Homo sapiens
  siRNA target sequence for UTRN (NM_007124.1,6316-6334).
gctatgcaaaagagatcaa

SEQ ID NO: 119910 - DNA, 19 bp, Homo sapiens
  siRNA target sequence for UTRN (NM_007124.1,6338-6356).
ccgaattgggagaaaacct

SEQ ID NO: 119911 - DNA, 19 bp, Homo sapiens
  siRNA target sequence for UTRN (NM_007124.1,6368-6386).
gagacttaactcaagaaat

SEQ ID NO: 119912 - DNA, 19 bp, Homo sapiens
  siRNA target sequence for UTRN (NM_007124.1,6443-6461).
cagataaaagtctgagttt

SEQ ID NO: 119913 - DNA, 19 bp, Homo sapiens
  siRNA target sequence for UTRN (NM_007124.1,6484-6502).
gaaagcttaaggactgtaa

SEQ ID NO: 119914 - DNA, 19 bp, Homo sapiens
  siRNA target sequence for UTRN (NM_007124.1,6499-6517).
gtaaatatgacatggaata

SEQ ID NO: 119915 - DNA, 19 bp, Homo sapiens
  siRNA target sequence for UTRN (NM_007124.1,6559-6577).
caggagcccagttctgttt

SEQ ID NO: 119916 - DNA, 19 bp, Homo sapiens
  siRNA target sequence for UTRN (NM_007124.1,6587-6605).
ggattgctgctcatcctaa

SEQ ID NO: 119917 - DNA, 19 bp, Homo sapiens
  siRNA target sequence for UTRN (NM_007124.1,6588-6606).
gattgctgctcatcctaat

SEQ ID NO: 119918 - DNA, 19 bp, Homo sapiens
  siRNA target sequence for UTRN (NM_007124.1,6615-6633).
ggtggtgctagtatcatct

SEQ ID NO: 119919 - DNA, 19 bp, Homo sapiens
  siRNA target sequence for UTRN (NM_007124.1,6658-6676).
catcgtacttcggaaattt

SEQ ID NO: 119920 - DNA, 19 bp, Homo sapiens
  siRNA target sequence for UTRN (NM_007124.1,6661-6679).
cgtacttcggaaatttcaa

SEQ ID NO: 119921 - DNA, 19 bp, Homo sapiens
  siRNA target sequence for UTRN (NM_007124.1,6662-6680).
gtacttcggaaatttcaat

SEQ ID NO: 119922 - DNA, 19 bp, Homo sapiens
  siRNA target sequence for UTRN (NM_007124.1,6688-6706).
gatcttgataaaactataa

SEQ ID NO: 119923 - DNA, 19 bp, Homo sapiens
  siRNA target sequence for UTRN (NM_007124.1,6715-6733).
gccgactggctggtattaa

SEQ ID NO: 119924 - DNA, 19 bp, Homo sapiens
  siRNA target sequence for UTRN (NM_007124.1,6716-6734).
ccgactggctggtattaat

SEQ ID NO: 119925 - DNA, 19 bp, Homo sapiens
  siRNA target sequence for UTRN (NM_007124.1,6741-6759).
gatgctgaagtccaacatt

SEQ ID NO: 119926 - DNA, 19 bp, Homo sapiens
  siRNA target sequence for UTRN (NM_007124.1,6775-6793).
gtagaagagatcaataaga

SEQ ID NO: 119927 - DNA, 19 bp, Homo sapiens
  siRNA target sequence for UTRN (NM_007124.1,6841-6859).
cctcagctggattatgttt

SEQ ID NO: 119928 - DNA, 19 bp, Homo sapiens
  siRNA target sequence for UTRN (NM_007124.1,6842-6860).
ctcagctggattatgtttt

SEQ ID NO: 119929 - DNA, 19 bp, Homo sapiens
  siRNA target sequence for UTRN (NM_007124.1,6863-6881).
cattggcacagaatttgaa

SEQ ID NO: 119930 - DNA, 19 bp, Homo sapiens
  siRNA target sequence for UTRN (NM_007124.1,6901-6919).
gatatgagaacagcaatta

SEQ ID NO: 119931 - DNA, 19 bp, Homo sapiens
  siRNA target sequence for UTRN (NM_007124.1,7068-7086).
ggctcgactctatattctt

SEQ ID NO: 119932 - DNA, 19 bp, Homo sapiens
  siRNA target sequence for UTRN (NM_007124.1,7070-7088).
ctcgactctatattcttca

SEQ ID NO: 119933 - DNA, 19 bp, Homo sapiens
  siRNA target sequence for UTRN (NM_007124.1,7101-7119).
ggatccactcaccaaacaa

SEQ ID NO: 119934 - DNA, 19 bp, Homo sapiens
  siRNA target sequence for UTRN (NM_007124.1,7102-7120).
gatccactcaccaaacaaa

SEQ ID NO: 119935 - DNA, 19 bp, Homo sapiens
  siRNA target sequence for UTRN (NM_007124.1,7105-7123).
ccactcaccaaacaaattt

SEQ ID NO: 119936 - DNA, 19 bp, Homo sapiens
  siRNA target sequence for UTRN (NM_007124.1,7345-7363).
cgcagagatctggaaaact

SEQ ID NO: 119937 - DNA, 19 bp, Homo sapiens
  siRNA target sequence for UTRN (NM_007124.1,7433-7451).
ctcttcaggatagtatctt

SEQ ID NO: 119938 - DNA, 19 bp, Homo sapiens
  siRNA target sequence for UTRN (NM_007124.1,7502-7520).
cccacaatgacatatttaa

SEQ ID NO: 119939 - DNA, 19 bp, Homo sapiens
  siRNA target sequence for UTRN (NM_007124.1,7588-7606).
caacatcgactggatgata

SEQ ID NO: 119940 - DNA, 19 bp, Homo sapiens
  siRNA target sequence for UTRN (NM_007124.1,7591-7609).
catcgactggatgatatga

SEQ ID NO: 119941 - DNA, 19 bp, Homo sapiens
  siRNA target sequence for UTRN (NM_007124.1,7600-7618).
gatgatatgaaccaaagat

SEQ ID NO: 119942 - DNA, 19 bp, Homo sapiens
  siRNA target sequence for UTRN (NM_007124.1,7701-7719).
cttagaagaactgatcaaa

SEQ ID NO: 119943 - DNA, 19 bp, Homo sapiens
  siRNA target sequence for UTRN (NM_007124.1,7711-7729).
ctgatcaaatggctgaata

SEQ ID NO: 119944 - DNA, 19 bp, Homo sapiens
  siRNA target sequence for UTRN (NM_007124.1,7716-7734).
caaatggctgaatatgaaa

SEQ ID NO: 119945 - DNA, 19 bp, Homo sapiens
  siRNA target sequence for UTRN (NM_007124.1,7781-7799).
ccttacagctccagtatga

SEQ ID NO: 119946 - DNA, 19 bp, Homo sapiens
  siRNA target sequence for UTRN (NM_007124.1,7789-7807).
ctccagtatgaccattgta

SEQ ID NO: 119947 - DNA, 19 bp, Homo sapiens
  siRNA target sequence for UTRN (NM_007124.1,7983-8001).
gcgcaaacagtcttctgaa

SEQ ID NO: 119948 - DNA, 19 bp, Homo sapiens
  siRNA target sequence for UTRN (NM_007124.1,8151-8169).
gaagcccgtgggagactta

SEQ ID NO: 119949 - DNA, 19 bp, Homo sapiens
  siRNA target sequence for UTRN (NM_007124.1,8156-8174).
ccgtgggagacttactcat

SEQ ID NO: 119950 - DNA, 19 bp, Homo sapiens
  siRNA target sequence for UTRN (NM_007124.1,8161-8179).
ggagacttactcattgact

SEQ ID NO: 119951 - DNA, 19 bp, Homo sapiens
  siRNA target sequence for UTRN (NM_007124.1,8180-8198).
cgctgcaggatcacattga

SEQ ID NO: 119952 - DNA, 19 bp, Homo sapiens
  siRNA target sequence for UTRN (NM_007124.1,8205-8223).
catggcatttagagaagaa

SEQ ID NO: 119953 - DNA, 19 bp, Homo sapiens
  siRNA target sequence for UTRN (NM_007124.1,8221-8239).
gaaattgcaccaatcaact

SEQ ID NO: 119954 - DNA, 19 bp, Homo sapiens
  siRNA target sequence for UTRN (NM_007124.1,8245-8263).
gttaaaacggtgaatgatt

SEQ ID NO: 119955 - DNA, 19 bp, Homo sapiens
  siRNA target sequence for UTRN (NM_007124.1,8408-8426).
gaccatcctctcagcattt

SEQ ID NO: 119956 - DNA, 19 bp, Homo sapiens
  siRNA target sequence for UTRN (NM_007124.1,8448-8466).
gccgtggcaaagatccatt

SEQ ID NO: 119957 - DNA, 19 bp, Homo sapiens
  siRNA target sequence for UTRN (NM_007124.1,8449-8467).
ccgtggcaaagatccattt

SEQ ID NO: 119958 - DNA, 19 bp, Homo sapiens
  siRNA target sequence for UTRN (NM_007124.1,8454-8472).
gcaaagatccatttcacat

SEQ ID NO: 119959 - DNA, 19 bp, Homo sapiens
  siRNA target sequence for UTRN (NM_007124.1,8455-8473).
caaagatccatttcacata

SEQ ID NO: 119960 - DNA, 19 bp, Homo sapiens
  siRNA target sequence for UTRN (NM_007124.1,8528-8546).
ctaaaatgaccgaactctt

SEQ ID NO: 119961 - DNA, 19 bp, Homo sapiens
  siRNA target sequence for UTRN (NM_007124.1,8553-8571).
ccttgctgacctgaataat

SEQ ID NO: 119962 - DNA, 19 bp, Homo sapiens
  siRNA target sequence for UTRN (NM_007124.1,8585-8603).
cctaccgtacagcaatcaa

SEQ ID NO: 119963 - DNA, 19 bp, Homo sapiens
  siRNA target sequence for UTRN (NM_007124.1,8586-8604).
ctaccgtacagcaatcaaa

SEQ ID NO: 119964 - DNA, 19 bp, Homo sapiens
  siRNA target sequence for UTRN (NM_007124.1,8614-8632).
ctacaaaaagcactatgtt

SEQ ID NO: 119965 - DNA, 19 bp, Homo sapiens
  siRNA target sequence for UTRN (NM_007124.1,8635-8653).
gatctcttagagttgagta

SEQ ID NO: 119966 - DNA, 19 bp, Homo sapiens
  siRNA target sequence for UTRN (NM_007124.1,8638-8656).
ctcttagagttgagtacaa

SEQ ID NO: 119967 - DNA, 19 bp, Homo sapiens
  siRNA target sequence for UTRN (NM_007124.1,8646-8664).
gttgagtacaacaaatgaa

SEQ ID NO: 119968 - DNA, 19 bp, Homo sapiens
  siRNA target sequence for UTRN (NM_007124.1,8781-8799).
cgttccactctgtgttgat

SEQ ID NO: 119969 - DNA, 19 bp, Homo sapiens
  siRNA target sequence for UTRN (NM_007124.1,8785-8803).
ccactctgtgttgatatgt

SEQ ID NO: 119970 - DNA, 19 bp, Homo sapiens
  siRNA target sequence for UTRN (NM_007124.1,8794-8812).
gttgatatgtgtctcaatt

SEQ ID NO: 119971 - DNA, 19 bp, Homo sapiens
  siRNA target sequence for UTRN (NM_007124.1,8813-8831).
ggttgctcaatgtctatga

SEQ ID NO: 119972 - DNA, 19 bp, Homo sapiens
  siRNA target sequence for UTRN (NM_007124.1,8834-8852).
cgggtcgaactggaaaaat

SEQ ID NO: 119973 - DNA, 19 bp, Homo sapiens
  siRNA target sequence for UTRN (NM_007124.1,8836-8854).
ggtcgaactggaaaaatta

SEQ ID NO: 119974 - DNA, 19 bp, Homo sapiens
  siRNA target sequence for UTRN (NM_007124.1,8973-8991).
gggcctgttacttcatgat

SEQ ID NO: 119975 - DNA, 19 bp, Homo sapiens
  siRNA target sequence for UTRN (NM_007124.1,9065-9083).
gctgcttccaacagaataa

SEQ ID NO: 119976 - DNA, 19 bp, Homo sapiens
  siRNA target sequence for UTRN (NM_007124.1,9068-9086).
gcttccaacagaataacaa

SEQ ID NO: 119977 - DNA, 19 bp, Homo sapiens
  siRNA target sequence for UTRN (NM_007124.1,9069-9087).
cttccaacagaataacaat

SEQ ID NO: 119978 - DNA, 19 bp, Homo sapiens
  siRNA target sequence for UTRN (NM_007124.1,9182-9200).
cggagactgcaaaacatca

SEQ ID NO: 119979 - DNA, 19 bp, Homo sapiens
  siRNA target sequence for UTRN (NM_007124.1,9246-9264).
gtatagaagccttaagcat

SEQ ID NO: 119980 - DNA, 19 bp, Homo sapiens
  siRNA target sequence for UTRN (NM_007124.1,9274-9292).
gatgtctgccagagttgtt

SEQ ID NO: 119981 - DNA, 19 bp, Homo sapiens
  siRNA target sequence for UTRN (NM_007124.1,9308-9326).
cagcaaaaggtcacaaatt

SEQ ID NO: 119982 - DNA, 19 bp, Homo sapiens
  siRNA target sequence for UTRN (NM_007124.1,9333-9351).
cccaatggtggaatattgt

SEQ ID NO: 119983 - DNA, 19 bp, Homo sapiens
  siRNA target sequence for UTRN (NM_007124.1,9335-9353).
caatggtggaatattgtat

SEQ ID NO: 119984 - DNA, 19 bp, Homo sapiens
  siRNA target sequence for UTRN (NM_007124.1,9339-9357).
ggtggaatattgtatacct

SEQ ID NO: 119985 - DNA, 19 bp, Homo sapiens
  siRNA target sequence for UTRN (NM_007124.1,9340-9358).
gtggaatattgtataccta

SEQ ID NO: 119986 - DNA, 19 bp, Homo sapiens
  siRNA target sequence for UTRN (NM_007124.1,9359-9377).
caacatctggggaagatgt

SEQ ID NO: 119987 - DNA, 19 bp, Homo sapiens
  siRNA target sequence for UTRN (NM_007124.1,9373-9391).
gatgtacgagacttcacaa

SEQ ID NO: 119988 - DNA, 19 bp, Homo sapiens
  siRNA target sequence for UTRN (NM_007124.1,9382-9400).
gacttcacaaaggtactta

SEQ ID NO: 119989 - DNA, 19 bp, Homo sapiens
  siRNA target sequence for UTRN (NM_007124.1,9486-9504).
cttagagactcctatcaca

SEQ ID NO: 119990 - DNA, 19 bp, Homo sapiens
  siRNA target sequence for UTRN (NM_007124.1,9545-9563).
ctcctcaactgtttcatga

SEQ ID NO: 119991 - DNA, 19 bp, Homo sapiens
  siRNA target sequence for UTRN (NM_007124.1,9559-9577).
catgatgacacccattcaa

SEQ ID NO: 119992 - DNA, 19 bp, Homo sapiens
  siRNA target sequence for UTRN (NM_007124.1,9562-9580).
gatgacacccattcaagaa

SEQ ID NO: 119993 - DNA, 19 bp, Homo sapiens
  siRNA target sequence for UTRN (NM_007124.1,9567-9585).
cacccattcaagaatagaa

SEQ ID NO: 119994 - DNA, 19 bp, Homo sapiens
  siRNA target sequence for UTRN (NM_007124.1,9569-9587).
cccattcaagaatagaaca

SEQ ID NO: 119995 - DNA, 19 bp, Homo sapiens
  siRNA target sequence for UTRN (NM_007124.1,9598-9616).
cgactggcccagatggaaa

SEQ ID NO: 119996 - DNA, 19 bp, Homo sapiens
  siRNA target sequence for UTRN (NM_007124.1,9617-9635).
ggactaatgggtcttttct

SEQ ID NO: 119997 - DNA, 19 bp, Homo sapiens
  siRNA target sequence for UTRN (NM_007124.1,9625-9643).
gggtcttttctcactgata

SEQ ID NO: 119998 - DNA, 19 bp, Homo sapiens
  siRNA target sequence for UTRN (NM_007124.1,9890-9908).
caccgccagagtcgattat

SEQ ID NO: 119999 - DNA, 19 bp, Homo sapiens
  siRNA target sequence for UTRN (NM_007124.1,9892-9910).
ccgccagagtcgattatat

SEQ ID NO: 120000 - DNA, 19 bp, Homo sapiens
  siRNA target sequence for UTRN (NM_007124.1,9894-9912).
gccagagtcgattatatct

SEQ ID NO: 120001 - DNA, 19 bp, Homo sapiens
  siRNA target sequence for UTRN (NM_007124.1,9930-9948).
ggattcagaacttatagca

SEQ ID NO: 120002 - DNA, 19 bp, Homo sapiens
  siRNA target sequence for UTRN (NM_007124.1,9985-10003).
gaggctaggatgcagattt

SEQ ID NO: 120003 - DNA, 19 bp, Homo sapiens
  siRNA target sequence for UTRN (NM_007124.1,9987-10005).
ggctaggatgcagatttta

SEQ ID NO: 120004 - DNA, 19 bp, Homo sapiens
  siRNA target sequence for UTRN (NM_007124.1,10059-10077).
ggagcagcctgaatctgat

SEQ ID NO: 120005 - DNA, 19 bp, Homo sapiens
  siRNA target sequence for VASP (NM_003370.1,452-470).
cgtccggggtgtcaagtat

SEQ ID NO: 120006 - DNA, 19 bp, Homo sapiens
  siRNA target sequence for VASP (NM_003370.1,453-471).
gtccggggtgtcaagtata

SEQ ID NO: 120007 - DNA, 19 bp, Homo sapiens
  siRNA target sequence for VASP (NM_003370.1,457-475).
ggggtgtcaagtataacca

SEQ ID NO: 120008 - DNA, 19 bp, Homo sapiens
  siRNA target sequence for VASP (NM_003370.1,951-969).
gccaaactcaggaaagtca

SEQ ID NO: 120009 - DNA, 19 bp, Homo sapiens
  siRNA target sequence for VASP (NM_003370.1,1258-1276).
cgcccagctccagtgatta

SEQ ID NO: 120010 - DNA, 19 bp, Homo sapiens
  siRNA target sequence for VASP (NM_003370.1,1260-1278).
cccagctccagtgattact

SEQ ID NO: 120011 - DNA, 19 bp, Homo sapiens
  siRNA target sequence for VCL (NM_003373.2,147-165).
cccacctggtgataatgca

SEQ ID NO: 120012 - DNA, 19 bp, Homo sapiens
  siRNA target sequence for VCL (NM_003373.2,244-262).
cctcgtccgggttggaaaa

SEQ ID NO: 120013 - DNA, 19 bp, Homo sapiens
  siRNA target sequence for VCL (NM_003373.2,391-409).
gcctgctcgagattatcta

SEQ ID NO: 120014 - DNA, 19 bp, Homo sapiens
  siRNA target sequence for VCL (NM_003373.2,392-410).
cctgctcgagattatctaa

SEQ ID NO: 120015 - DNA, 19 bp, Homo sapiens
  siRNA target sequence for VCL (NM_003373.2,393-411).
ctgctcgagattatctaat

SEQ ID NO: 120016 - DNA, 19 bp, Homo sapiens
  siRNA target sequence for VCL (NM_003373.2,396-414).
ctcgagattatctaattga

SEQ ID NO: 120017 - DNA, 19 bp, Homo sapiens
  siRNA target sequence for VCL (NM_003373.2,467-485).
gaggctgaggtccgtaaaa

SEQ ID NO: 120018 - DNA, 19 bp, Homo sapiens
  siRNA target sequence for VCL (NM_003373.2,470-488).
gctgaggtccgtaaaatta

SEQ ID NO: 120019 - DNA, 19 bp, Homo sapiens
  siRNA target sequence for VCL (NM_003373.2,471-489).
ctgaggtccgtaaaattat

SEQ ID NO: 120020 - DNA, 19 bp, Homo sapiens
  siRNA target sequence for VCL (NM_003373.2,473-491).
gaggtccgtaaaattatta

SEQ ID NO: 120021 - DNA, 19 bp, Homo sapiens
  siRNA target sequence for VCL (NM_003373.2,475-493).
ggtccgtaaaattattaga

SEQ ID NO: 120022 - DNA, 19 bp, Homo sapiens
  siRNA target sequence for VCL (NM_003373.2,478-496).
ccgtaaaattattagagtt

SEQ ID NO: 120023 - DNA, 19 bp, Homo sapiens
  siRNA target sequence for VCL (NM_003373.2,479-497).
cgtaaaattattagagttt

SEQ ID NO: 120024 - DNA, 19 bp, Homo sapiens
  siRNA target sequence for VCL (NM_003373.2,548-566).
gaagatttggtcacttaca

SEQ ID NO: 120025 - DNA, 19 bp, Homo sapiens
  siRNA target sequence for VCL (NM_003373.2,551-569).
gatttggtcacttacacaa

SEQ ID NO: 120026 - DNA, 19 bp, Homo sapiens
  siRNA target sequence for VCL (NM_003373.2,559-577).
cacttacacaaagaatctt

SEQ ID NO: 120027 - DNA, 19 bp, Homo sapiens
  siRNA target sequence for VCL (NM_003373.2,579-597).
ggccaggaatgactaagat

SEQ ID NO: 120028 - DNA, 19 bp, Homo sapiens
  siRNA target sequence for VCL (NM_003373.2,666-684).
cgatgaacaccgtgaaaga

SEQ ID NO: 120029 - DNA, 19 bp, Homo sapiens
  siRNA target sequence for VCL (NM_003373.2,773-791).
cgcaattttactgtagaaa

SEQ ID NO: 120030 - DNA, 19 bp, Homo sapiens
  siRNA target sequence for VCL (NM_003373.2,900-918).
ccatagactccaaactgaa

SEQ ID NO: 120031 - DNA, 19 bp, Homo sapiens
  siRNA target sequence for VCL (NM_003373.2,976-994).
ggccatcagacagatctta

SEQ ID NO: 120032 - DNA, 19 bp, Homo sapiens
  siRNA target sequence for VCL (NM_003373.2,1045-1063).
gattctgggaacttgcaaa

SEQ ID NO: 120033 - DNA, 19 bp, Homo sapiens
  siRNA target sequence for VCL (NM_003373.2,1051-1069).
gggaacttgcaaaatgcta

SEQ ID NO: 120034 - DNA, 19 bp, Homo sapiens
  siRNA target sequence for VCL (NM_003373.2,1229-1247).
cagagcattgcaaagaaga

SEQ ID NO: 120035 - DNA, 19 bp, Homo sapiens
  siRNA target sequence for VCL (NM_003373.2,1267-1285).
gcttgcagatccaaatggt

SEQ ID NO: 120036 - DNA, 19 bp, Homo sapiens
  siRNA target sequence for VCL (NM_003373.2,1321-1339).
ggctgaagctcggaaaata

SEQ ID NO: 120037 - DNA, 19 bp, Homo sapiens
  siRNA target sequence for VCL (NM_003373.2,1382-1400).
cgttcccttggggaaatat

SEQ ID NO: 120038 - DNA, 19 bp, Homo sapiens
  siRNA target sequence for VCL (NM_003373.2,1583-1601).
gcacagcggtggattgata

SEQ ID NO: 120039 - DNA, 19 bp, Homo sapiens
  siRNA target sequence for VCL (NM_003373.2,1584-1602).
cacagcggtggattgataa

SEQ ID NO: 120040 - DNA, 19 bp, Homo sapiens
  siRNA target sequence for VCL (NM_003373.2,1662-1680).
ggcatcgtctggctaatgt

SEQ ID NO: 120041 - DNA, 19 bp, Homo sapiens
  siRNA target sequence for VCL (NM_003373.2,1663-1681).
gcatcgtctggctaatgtt

SEQ ID NO: 120042 - DNA, 19 bp, Homo sapiens
  siRNA target sequence for VCL (NM_003373.2,1664-1682).
catcgtctggctaatgtta

SEQ ID NO: 120043 - DNA, 19 bp, Homo sapiens
  siRNA target sequence for VCL (NM_003373.2,1667-1685).
cgtctggctaatgttatga

SEQ ID NO: 120044 - DNA, 19 bp, Homo sapiens
  siRNA target sequence for VCL (NM_003373.2,1668-1686).
gtctggctaatgttatgat

SEQ ID NO: 120045 - DNA, 19 bp, Homo sapiens
  siRNA target sequence for VCL (NM_003373.2,1689-1707).
ggccttatcggcaagatct

SEQ ID NO: 120046 - DNA, 19 bp, Homo sapiens
  siRNA target sequence for VCL (NM_003373.2,1690-1708).
gccttatcggcaagatctt

SEQ ID NO: 120047 - DNA, 19 bp, Homo sapiens
  siRNA target sequence for VCL (NM_003373.2,1692-1710).
cttatcggcaagatcttct

SEQ ID NO: 120048 - DNA, 19 bp, Homo sapiens
  siRNA target sequence for VCL (NM_003373.2,1808-1826).
cagctccaagactccttaa

SEQ ID NO: 120049 - DNA, 19 bp, Homo sapiens
  siRNA target sequence for VCL (NM_003373.2,1822-1840).
cttaaaggatctaaaagct

SEQ ID NO: 120050 - DNA, 19 bp, Homo sapiens
  siRNA target sequence for VCL (NM_003373.2,2030-2048).
gcggttggtactgctaata

SEQ ID NO: 120051 - DNA, 19 bp, Homo sapiens
  siRNA target sequence for VCL (NM_003373.2,2031-2049).
cggttggtactgctaataa

SEQ ID NO: 120052 - DNA, 19 bp, Homo sapiens
  siRNA target sequence for VCL (NM_003373.2,2032-2050).
ggttggtactgctaataaa

SEQ ID NO: 120053 - DNA, 19 bp, Homo sapiens
  siRNA target sequence for VCL (NM_003373.2,2033-2051).
gttggtactgctaataaat

SEQ ID NO: 120054 - DNA, 19 bp, Homo sapiens
  siRNA target sequence for VCL (NM_003373.2,2113-2131).
ctcggctgctcgtatctta

SEQ ID NO: 120055 - DNA, 19 bp, Homo sapiens
  siRNA target sequence for VCL (NM_003373.2,2115-2133).
cggctgctcgtatcttact

SEQ ID NO: 120056 - DNA, 19 bp, Homo sapiens
  siRNA target sequence for VCL (NM_003373.2,2117-2135).
gctgctcgtatcttactta

SEQ ID NO: 120057 - DNA, 19 bp, Homo sapiens
  siRNA target sequence for VCL (NM_003373.2,2121-2139).
ctcgtatcttacttaggaa

SEQ ID NO: 120058 - DNA, 19 bp, Homo sapiens
  siRNA target sequence for VCL (NM_003373.2,2182-2200).
gaaccagtggatcgataat

SEQ ID NO: 120059 - DNA, 19 bp, Homo sapiens
  siRNA target sequence for VCL (NM_003373.2,2185-2203).
ccagtggatcgataatgtt

SEQ ID NO: 120060 - DNA, 19 bp, Homo sapiens
  siRNA target sequence for VCL (NM_003373.2,2188-2206).
gtggatcgataatgttgaa

SEQ ID NO: 120061 - DNA, 19 bp, Homo sapiens
  siRNA target sequence for VCL (NM_003373.2,2190-2208).
ggatcgataatgttgaaaa

SEQ ID NO: 120062 - DNA, 19 bp, Homo sapiens
  siRNA target sequence for VCL (NM_003373.2,2191-2209).
gatcgataatgttgaaaaa

SEQ ID NO: 120063 - DNA, 19 bp, Homo sapiens
  siRNA target sequence for VCL (NM_003373.2,2447-2465).
gatgaattgagcaaaacca

SEQ ID NO: 120064 - DNA, 19 bp, Homo sapiens
  siRNA target sequence for VCL (NM_003373.2,2513-2531).
gaccctggactgcaaaaga

SEQ ID NO: 120065 - DNA, 19 bp, Homo sapiens
  siRNA target sequence for VCL (NM_003373.2,2804-2822).
gatgaagctcgcaaatggt

SEQ ID NO: 120066 - DNA, 19 bp, Homo sapiens
  siRNA target sequence for VCL (NM_003373.2,2913-2931).
ccaagcgggcactcattca

SEQ ID NO: 120067 - DNA, 19 bp, Homo sapiens
  siRNA target sequence for VCL (NM_003373.2,2990-3008).
gccaagcagtgcacagata

SEQ ID NO: 120068 - DNA, 19 bp, Homo sapiens
  siRNA target sequence for VCL (NM_003373.2,2991-3009).
ccaagcagtgcacagataa

SEQ ID NO: 120069 - DNA, 19 bp, Homo sapiens
  siRNA target sequence for VCL (NM_003373.2,3001-3019).
cacagataaacggattaga

SEQ ID NO: 120070 - DNA, 19 bp, Homo sapiens
  siRNA target sequence for VCL (NM_003373.2,3041-3059).
gagcgaatcccaaccataa

SEQ ID NO: 120071 - DNA, 19 bp, Homo sapiens
  siRNA target sequence for VCL (NM_003373.2,3044-3062).
cgaatcccaaccataagca

SEQ ID NO: 120072 - DNA, 19 bp, Homo sapiens
  siRNA target sequence for VCL (NM_003373.2,3207-3225).
ctgaagctgcttcaatcaa

SEQ ID NO: 120073 - DNA, 19 bp, Homo sapiens
  siRNA target sequence for VCL (NM_003373.2,3215-3233).
gcttcaatcaaaattcgaa

SEQ ID NO: 120074 - DNA, 19 bp, Homo sapiens
  siRNA target sequence for VCL (NM_003373.2,3234-3252).
cagatgctggatttacact

SEQ ID NO: 120075 - DNA, 19 bp, Homo sapiens
  siRNA target sequence for VCL (NM_003373.2,3249-3267).
cactgcgctgggttagaaa

SEQ ID NO: 120076 - DNA, 19 bp, Homo sapiens
  siRNA target sequence for VCL (NM_003373.2,3253-3271).
gcgctgggttagaaagact

SEQ ID NO: 120077 - DNA, 19 bp, Homo sapiens
  siRNA target sequence for VCL (NM_014000.1,2845-2863).
cgctgaggtgggtataggt

SEQ ID NO: 120078 - DNA, 19 bp, Homo sapiens
  siRNA target sequence for VCL (NM_014000.1,2944-2962).
gctgttaatgccatccaat

SEQ ID NO: 120079 - DNA, 19 bp, Homo sapiens
  siRNA target sequence for VCL (NM_014000.1,3014-3032).
gctaccaagtggtctagta

SEQ ID NO: 120080 - DNA, 19 bp, Homo sapiens
  siRNA target sequence for VILL (NM_015873.1,23-41).
gcccaagaccagcatttct

SEQ ID NO: 120081 - DNA, 19 bp, Homo sapiens
  siRNA target sequence for VILL (NM_015873.1,142-160).
cggacctcatgcagatcat

SEQ ID NO: 120082 - DNA, 19 bp, Homo sapiens
  siRNA target sequence for VILL (NM_015873.1,202-220).
ccacgcccagcaaggatat

SEQ ID NO: 120083 - DNA, 19 bp, Homo sapiens
  siRNA target sequence for VILL (NM_015873.1,205-223).
cgcccagcaaggatatcaa

SEQ ID NO: 120084 - DNA, 19 bp, Homo sapiens
  siRNA target sequence for VILL (NM_015873.1,360-378).
ggcttcaagatctatgtgt

SEQ ID NO: 120085 - DNA, 19 bp, Homo sapiens
  siRNA target sequence for VILL (NM_015873.1,566-584).
cgggagggataaatcgatt

SEQ ID NO: 120086 - DNA, 19 bp, Homo sapiens
  siRNA target sequence for VILL (NM_015873.1,571-589).
gggataaatcgattcatgt

SEQ ID NO: 120087 - DNA, 19 bp, Homo sapiens
  siRNA target sequence for VILL (NM_015873.1,572-590).
ggataaatcgattcatgta

SEQ ID NO: 120088 - DNA, 19 bp, Homo sapiens
  siRNA target sequence for VILL (NM_015873.1,611-629).
gcacacccagcctaagtta

SEQ ID NO: 120089 - DNA, 19 bp, Homo sapiens
  siRNA target sequence for VILL (NM_015873.1,679-697).
ggtgcatccaggacttaca

SEQ ID NO: 120090 - DNA, 19 bp, Homo sapiens
  siRNA target sequence for VILL (NM_015873.1,789-807).
cagtacatcctgtacctat

SEQ ID NO: 120091 - DNA, 19 bp, Homo sapiens
  siRNA target sequence for VILL (NM_015873.1,821-839).
ggccactgcggatgagatt

SEQ ID NO: 120092 - DNA, 19 bp, Homo sapiens
  siRNA target sequence for VILL (NM_015873.1,823-841).
ccactgcggatgagattga

SEQ ID NO: 120093 - DNA, 19 bp, Homo sapiens
  siRNA target sequence for VILL (NM_015873.1,853-871).
gcaacgctgaggaactaga

SEQ ID NO: 120094 - DNA, 19 bp, Homo sapiens
  siRNA target sequence for VILL (NM_015873.1,854-872).
caacgctgaggaactagat

SEQ ID NO: 120095 - DNA, 19 bp, Homo sapiens
  siRNA target sequence for VILL (NM_015873.1,863-881).
ggaactagatgtcatgtat

SEQ ID NO: 120096 - DNA, 19 bp, Homo sapiens
  siRNA target sequence for VILL (NM_015873.1,1278-1296).
ccctaccccagcaacaaga

SEQ ID NO: 120097 - DNA, 19 bp, Homo sapiens
  siRNA target sequence for VILL (NM_015873.1,1319-1337).
cttccagccacgactgttt

SEQ ID NO: 120098 - DNA, 19 bp, Homo sapiens
  siRNA target sequence for VILL (NM_015873.1,1323-1341).
cagccacgactgtttgagt

SEQ ID NO: 120099 - DNA, 19 bp, Homo sapiens
  siRNA target sequence for VILL (NM_015873.1,1404-1422).
gacaagtatgacatcatgt

SEQ ID NO: 120100 - DNA, 19 bp, Homo sapiens
  siRNA target sequence for VILL (NM_015873.1,1575-1593).
cctcccaccttcattggat

SEQ ID NO: 120101 - DNA, 19 bp, Homo sapiens
  siRNA target sequence for VILL (NM_015873.1,1693-1711).
cagcagaagtcaacaactt

SEQ ID NO: 120102 - DNA, 19 bp, Homo sapiens
  siRNA target sequence for VILL (NM_015873.1,1781-1799).
ggacagctcagagaatgat

SEQ ID NO: 120103 - DNA, 19 bp, Homo sapiens
  siRNA target sequence for VILL (NM_015873.1,1939-1957).
cccgcagggagttctatct

SEQ ID NO: 120104 - DNA, 19 bp, Homo sapiens
  siRNA target sequence for VILL (NM_015873.1,1987-2005).
ggaaatccaaggaggaatt

SEQ ID NO: 120105 - DNA, 19 bp, Homo sapiens
  siRNA target sequence for WASF2 (NM_006990.1,216-234).
cgaccgactacaggttaaa

SEQ ID NO: 120106 - DNA, 19 bp, Homo sapiens
  siRNA target sequence for WASL (NM_003941.2,456-474).
cagcagtggtgcagttata

SEQ ID NO: 120107 - DNA, 19 bp, Homo sapiens
  siRNA target sequence for WASL (NM_003941.2,476-494).
gcagcagatcggaactgta

SEQ ID NO: 120108 - DNA, 19 bp, Homo sapiens
  siRNA target sequence for WASL (NM_003941.2,477-495).
cagcagatcggaactgtat

SEQ ID NO: 120109 - DNA, 19 bp, Homo sapiens
  siRNA target sequence for WASL (NM_003941.2,597-615).
gggaacaagagctatacaa

SEQ ID NO: 120110 - DNA, 19 bp, Homo sapiens
  siRNA target sequence for WASL (NM_003941.2,639-657).
gaggatattttcatacctt

SEQ ID NO: 120111 - DNA, 19 bp, Homo sapiens
  siRNA target sequence for WASL (NM_003941.2,742-760).
gggccgtcgacaaaggaaa

SEQ ID NO: 120112 - DNA, 19 bp, Homo sapiens
  siRNA target sequence for WASL (NM_003941.2,745-763).
ccgtcgacaaaggaaatct

SEQ ID NO: 120113 - DNA, 19 bp, Homo sapiens
  siRNA target sequence for WASL (NM_003941.2,747-765).
gtcgacaaaggaaatctga

SEQ ID NO: 120114 - DNA, 19 bp, Homo sapiens
  siRNA target sequence for WASL (NM_003941.2,780-798).
ccccaaatggtcctaatct

SEQ ID NO: 120115 - DNA, 19 bp, Homo sapiens
  siRNA target sequence for WASL (NM_003941.2,781-799).
cccaaatggtcctaatcta

SEQ ID NO: 120116 - DNA, 19 bp, Homo sapiens
  siRNA target sequence for WASL (NM_003941.2,800-818).
cccatggctacagttgata

SEQ ID NO: 120117 - DNA, 19 bp, Homo sapiens
  siRNA target sequence for WASL (NM_003941.2,855-873).
gtccacaagtcaacaacat

SEQ ID NO: 120118 - DNA, 19 bp, Homo sapiens
  siRNA target sequence for WASL (NM_003941.2,857-875).
ccacaagtcaacaacatct

SEQ ID NO: 120119 - DNA, 19 bp, Homo sapiens
  siRNA target sequence for WASL (NM_003941.2,984-1002).
caaatacaggctttgatct

SEQ ID NO: 120120 - DNA, 19 bp, Homo sapiens
  siRNA target sequence for WASL (NM_003941.2,990-1008).
caggctttgatctgaataa

SEQ ID NO: 120121 - DNA, 19 bp, Homo sapiens
  siRNA target sequence for WASL (NM_003941.2,993-1011).
gctttgatctgaataattt

SEQ ID NO: 120122 - DNA, 19 bp, Homo sapiens
  siRNA target sequence for WASL (NM_003941.2,1036-1054).
cgatatgtgtggaatctca

SEQ ID NO: 120123 - DNA, 19 bp, Homo sapiens
  siRNA target sequence for WASL (NM_003941.2,1051-1069).
ctcagaggcacaacttaaa

SEQ ID NO: 120124 - DNA, 19 bp, Homo sapiens
  siRNA target sequence for WASL (NM_003941.2,1335-1353).
caccaccgccaaataggat

SEQ ID NO: 120125 - DNA, 19 bp, Homo sapiens
  siRNA target sequence for WASL (NM_003941.2,1575-1593).
gtgctcagctaaaaaaagt

SEQ ID NO: 120126 - DNA, 19 bp, Homo sapiens
  siRNA target sequence for WASL (NM_003941.2,1652-1670).
cgacagggtatccaactaa

SEQ ID NO: 120127 - DNA, 19 bp, Homo sapiens
  siRNA target sequence for WASL (NM_003941.2,1653-1671).
gacagggtatccaactaaa

SEQ ID NO: 120128 - DNA, 19 bp, Homo sapiens
  siRNA target sequence for WASL (NM_003941.2,1655-1673).
cagggtatccaactaaaat

SEQ ID NO: 120129 - DNA, 19 bp, Homo sapiens
  siRNA target sequence for WASL (NM_003941.2,1659-1677).
gtatccaactaaaatctgt

SEQ ID NO: 120130 - DNA, 19 bp, Homo sapiens
  siRNA target sequence for WASL (NM_003941.2,1734-1752).
gtgcattaatggaagtgat

SEQ ID NO: 120131 - DNA, 19 bp, Homo sapiens
  siRNA target sequence for WASPIP (NM_003387.3,266-284).
ccaatactggacaaaccta

SEQ ID NO: 120132 - DNA, 19 bp, Homo sapiens
  siRNA target sequence for WASPIP (NM_003387.3,436-454).
cacggccaacagggataat

SEQ ID NO: 120133 - DNA, 19 bp, Homo sapiens
  siRNA target sequence for WASPIP (NM_003387.3,438-456).
cggccaacagggataatga

SEQ ID NO: 120134 - DNA, 19 bp, Homo sapiens
  siRNA target sequence for WASPIP (NM_003387.3,439-457).
ggccaacagggataatgat

SEQ ID NO: 120135 - DNA, 19 bp, Homo sapiens
  siRNA target sequence for WASPIP (NM_003387.3,440-458).
gccaacagggataatgatt

SEQ ID NO: 120136 - DNA, 19 bp, Homo sapiens
  siRNA target sequence for WASPIP (NM_003387.3,787-805).
gggaggaggctcaatacgt

SEQ ID NO: 120137 - DNA, 19 bp, Homo sapiens
  siRNA target sequence for WASPIP (NM_003387.3,867-885).
gcagggccttggatgacaa

SEQ ID NO: 120138 - DNA, 19 bp, Homo sapiens
  siRNA target sequence for WASPIP (NM_003387.3,951-969).
ctcctcctcagaacaacaa

SEQ ID NO: 120139 - DNA, 19 bp, Homo sapiens
  siRNA target sequence for WASPIP (NM_003387.3,1097-1115).
ctcccacagcggaatctgt

SEQ ID NO: 120140 - DNA, 19 bp, Homo sapiens
  siRNA target sequence for WASPIP (NM_003387.3,1391-1409).
ccaccatcaacatctatta

SEQ ID NO: 120141 - DNA, 19 bp, Homo sapiens
  siRNA target sequence for WASPIP (NM_003387.3,1528-1546).
caaactggcaagaaacgaa

SEQ ID NO: 120142 - DNA, 19 bp, Homo sapiens
  siRNA target sequence for WASPIP (NM_003387.3,1556-1574).
ggatccaaccgaagagaaa

SEQ ID NO: 120143 - DNA, 19 bp, Homo sapiens
  siRNA target sequence for WDR1 (NM_005112.3,277-295).
cgaccctaagggcaacaat

SEQ ID NO: 120144 - DNA, 19 bp, Homo sapiens
  siRNA target sequence for WDR1 (NM_005112.3,278-296).
gaccctaagggcaacaatt

SEQ ID NO: 120145 - DNA, 19 bp, Homo sapiens
  siRNA target sequence for WDR1 (NM_005112.3,311-329).
ggaaagtgcgtcatcctaa

SEQ ID NO: 120146 - DNA, 19 bp, Homo sapiens
  siRNA target sequence for WDR1 (NM_005112.3,401-419).
gcgcccagcggattctaca

SEQ ID NO: 120147 - DNA, 19 bp, Homo sapiens
  siRNA target sequence for WDR1 (NM_005112.3,402-420).
cgcccagcggattctacat

SEQ ID NO: 120148 - DNA, 19 bp, Homo sapiens
  siRNA target sequence for WDR1 (NM_005112.3,476-494).
cacctgttgaagtatgagt

SEQ ID NO: 120149 - DNA, 19 bp, Homo sapiens
  siRNA target sequence for WDR1 (NM_005112.3,500-518).
cctttcgctgggaagatca

SEQ ID NO: 120150 - DNA, 19 bp, Homo sapiens
  siRNA target sequence for WDR1 (NM_005112.3,528-546).
cttggactgaagacagtaa

SEQ ID NO: 120151 - DNA, 19 bp, Homo sapiens
  siRNA target sequence for WDR1 (NM_005112.3,725-743).
gagggacccccattcaagt

SEQ ID NO: 120152 - DNA, 19 bp, Homo sapiens
  siRNA target sequence for WDR1 (NM_005112.3,728-746).
ggacccccattcaagttca

SEQ ID NO: 120153 - DNA, 19 bp, Homo sapiens
  siRNA target sequence for WDR1 (NM_005112.3,778-796).
caactgtgtgcgattctct

SEQ ID NO: 120154 - DNA, 19 bp, Homo sapiens
  siRNA target sequence for WDR1 (NM_005112.3,830-848).
gacggccagatatacatct

SEQ ID NO: 120155 - DNA, 19 bp, Homo sapiens
  siRNA target sequence for WDR1 (NM_005112.3,905-923).
ggtgggatttacgcaatta

SEQ ID NO: 120156 - DNA, 19 bp, Homo sapiens
  siRNA target sequence for WDR1 (NM_005112.3,908-926).
gggatttacgcaattagtt

SEQ ID NO: 120157 - DNA, 19 bp, Homo sapiens
  siRNA target sequence for WDR1 (NM_005112.3,1089-1107).
ccctgtccgggtacatcaa

SEQ ID NO: 120158 - DNA, 19 bp, Homo sapiens
  siRNA target sequence for WDR1 (NM_005112.3,1091-1109).
ctgtccgggtacatcaact

SEQ ID NO: 120159 - DNA, 19 bp, Homo sapiens
  siRNA target sequence for WDR1 (NM_005112.3,1093-1111).
gtccgggtacatcaactat

SEQ ID NO: 120160 - DNA, 19 bp, Homo sapiens
  siRNA target sequence for WDR1 (NM_005112.3,1095-1113).
ccgggtacatcaactatct

SEQ ID NO: 120161 - DNA, 19 bp, Homo sapiens
  siRNA target sequence for WDR1 (NM_005112.3,1174-1192).
gtgtctgacggtgcataaa

SEQ ID NO: 120162 - DNA, 19 bp, Homo sapiens
  siRNA target sequence for WDR1 (NM_005112.3,1176-1194).
gtctgacggtgcataaaaa

SEQ ID NO: 120163 - DNA, 19 bp, Homo sapiens
  siRNA target sequence for WDR1 (NM_005112.3,1398-1416).
gcggacaaggagttgtgaa

SEQ ID NO: 120164 - DNA, 19 bp, Homo sapiens
  siRNA target sequence for WDR1 (NM_005112.3,1399-1417).
cggacaaggagttgtgaaa

SEQ ID NO: 120165 - DNA, 19 bp, Homo sapiens
  siRNA target sequence for WDR1 (NM_005112.3,1401-1419).
gacaaggagttgtgaaact

SEQ ID NO: 120166 - DNA, 19 bp, Homo sapiens
  siRNA target sequence for WDR1 (NM_005112.3,1471-1489).
cgtgtgcattggacagatt

SEQ ID NO: 120167 - DNA, 19 bp, Homo sapiens
  siRNA target sequence for WDR1 (NM_005112.3,1601-1619).
ggcaacgtccgcctgtatt

SEQ ID NO: 120168 - DNA, 19 bp, Homo sapiens
  siRNA target sequence for WDR1 (NM_005112.3,1765-1783).
ctactcggagaacaatgtt

SEQ ID NO: 120169 - DNA, 19 bp, Homo sapiens
  siRNA target sequence for WDR1 (NM_017491.2,1791-1809).
gacaccatgcaaaaatcgt

SEQ ID NO: 120170 - DNA, 19 bp, Homo sapiens
  siRNA target sequence for WDR1 (NM_017491.2,1816-1834).
ggcctggtccccagacaat

SEQ ID NO: 120171 - DNA, 19 bp, Homo sapiens
  siRNA target sequence for WDR1 (NM_017491.2,1819-1837).
ctggtccccagacaatgaa

SEQ ID NO: 120172 - DNA, 19 bp, Homo sapiens
  siRNA target sequence for WDR1 (NM_017491.2,1821-1839).
ggtccccagacaatgaaca

SEQ ID NO: 120173 - DNA, 19 bp, Homo sapiens
  siRNA target sequence for WDR1 (NM_017491.2,1858-1876).
ggacatgatggtgtatgtt

SEQ ID NO: 120174 - DNA, 19 bp, Homo sapiens
  siRNA target sequence for WDR1 (NM_017491.2,1997-2015).
gtcaaggagtggacaatca

SEQ ID NO: 120175 - DNA, 19 bp, Homo sapiens
  siRNA target sequence for DCX (NM_000555.2,180-198).
cactcccccttcatagtca

SEQ ID NO: 120176 - DNA, 19 bp, Homo sapiens
  siRNA target sequence for DCX (NM_000555.2,182-200).
ctcccccttcatagtcatt

SEQ ID NO: 120177 - DNA, 19 bp, Homo sapiens
  siRNA target sequence for DCX (NM_000555.2,187-205).
ccttcatagtcattgtact

SEQ ID NO: 120178 - DNA, 19 bp, Homo sapiens
  siRNA target sequence for DCX (NM_000555.2,253-271).
ctccttctgttctcttcaa

SEQ ID NO: 120179 - DNA, 19 bp, Homo sapiens
  siRNA target sequence for DCX (NM_000555.2,286-304).
ggctatggattcatttaca

SEQ ID NO: 120180 - DNA, 19 bp, Homo sapiens
  siRNA target sequence for DCX (NM_000555.2,287-305).
gctatggattcatttacaa

SEQ ID NO: 120181 - DNA, 19 bp, Homo sapiens
  siRNA target sequence for DCX (NM_000555.2,297-315).
catttacaactgttagtca

SEQ ID NO: 120182 - DNA, 19 bp, Homo sapiens
  siRNA target sequence for DCX (NM_000555.2,360-378).
gcccgaagttccaatttga

SEQ ID NO: 120183 - DNA, 19 bp, Homo sapiens
  siRNA target sequence for DCX (NM_000555.2,362-380).
ccgaagttccaatttgata

SEQ ID NO: 120184 - DNA, 19 bp, Homo sapiens
  siRNA target sequence for DCX (NM_000555.2,396-414).
ctctgaggttccaccaaaa

SEQ ID NO: 120185 - DNA, 19 bp, Homo sapiens
  siRNA target sequence for DCX (NM_000555.2,402-420).
ggttccaccaaaatatgga

SEQ ID NO: 120186 - DNA, 19 bp, Homo sapiens
  siRNA target sequence for DCX (NM_000555.2,409-427).
ccaaaatatggaacttgat

SEQ ID NO: 120187 - DNA, 19 bp, Homo sapiens
  siRNA target sequence for DCX (NM_000555.2,440-458).
gacgaaagagataagacat

SEQ ID NO: 120188 - DNA, 19 bp, Homo sapiens
  siRNA target sequence for DCX (NM_000555.2,469-487).
gcgaggctcccggatgaat

SEQ ID NO: 120189 - DNA, 19 bp, Homo sapiens
  siRNA target sequence for DCX (NM_000555.2,545-563).
caggcactgagtaatgaga

SEQ ID NO: 120190 - DNA, 19 bp, Homo sapiens
  siRNA target sequence for DCX (NM_000555.2,708-726).
ctcagggagtgcgttacat

SEQ ID NO: 120191 - DNA, 19 bp, Homo sapiens
  siRNA target sequence for DCX (NM_000555.2,795-813).
gttcctcagacaacttctt

SEQ ID NO: 120192 - DNA, 19 bp, Homo sapiens
  siRNA target sequence for DCX (NM_000555.2,850-868).
ctggtctgtcaacgtaaaa

SEQ ID NO: 120193 - DNA, 19 bp, Homo sapiens
  siRNA target sequence for DCX (NM_000555.2,853-871).
gtctgtcaacgtaaaaaca

SEQ ID NO: 120194 - DNA, 19 bp, Homo sapiens
  siRNA target sequence for DCX (NM_000555.2,1075-1093).
ggagaccggggttgtcaaa

SEQ ID NO: 120195 - DNA, 19 bp, Homo sapiens
  siRNA target sequence for DCX (NM_000555.2,1076-1094).
gagaccggggttgtcaaaa

SEQ ID NO: 120196 - DNA, 19 bp, Homo sapiens
  siRNA target sequence for DCX (NM_000555.2,1078-1096).
gaccggggttgtcaaaaaa

SEQ ID NO: 120197 - DNA, 19 bp, Homo sapiens
  siRNA target sequence for DCX (NM_000555.2,1082-1100).
ggggttgtcaaaaaactct

SEQ ID NO: 120198 - DNA, 19 bp, Homo sapiens
  siRNA target sequence for DCX (NM_000555.2,1083-1101).
gggttgtcaaaaaactcta

SEQ ID NO: 120199 - DNA, 19 bp, Homo sapiens
  siRNA target sequence for DCX (NM_000555.2,1099-1117).
ctacactctggatggaaaa

SEQ ID NO: 120200 - DNA, 19 bp, Homo sapiens
  siRNA target sequence for DCX (NM_000555.2,1166-1184).
gcctgtggtcctgaaaaat

SEQ ID NO: 120201 - DNA, 19 bp, Homo sapiens
  siRNA target sequence for DCX (NM_000555.2,1167-1185).
cctgtggtcctgaaaaatt

SEQ ID NO: 120202 - DNA, 19 bp, Homo sapiens
  siRNA target sequence for DCX (NM_000555.2,1187-1205).
cgctatgctcaggatgatt

SEQ ID NO: 120203 - DNA, 19 bp, Homo sapiens
  siRNA target sequence for HOOK3 (NM_032410.2,298-316).
ggatccagacatttaatgt

SEQ ID NO: 120204 - DNA, 19 bp, Homo sapiens
  siRNA target sequence for HOOK3 (NM_032410.2,329-347).
ccagaccgtggaagattta

SEQ ID NO: 120205 - DNA, 19 bp, Homo sapiens
  siRNA target sequence for HOOK3 (NM_032410.2,330-348).
cagaccgtggaagatttaa

SEQ ID NO: 120206 - DNA, 19 bp, Homo sapiens
  siRNA target sequence for HOOK3 (NM_032410.2,334-352).
ccgtggaagatttaacgaa

SEQ ID NO: 120207 - DNA, 19 bp, Homo sapiens
  siRNA target sequence for HOOK3 (NM_032410.2,335-353).
cgtggaagatttaacgaat

SEQ ID NO: 120208 - DNA, 19 bp, Homo sapiens
  siRNA target sequence for HOOK3 (NM_032410.2,366-384).
gcccaggttcttcaaaaga

SEQ ID NO: 120209 - DNA, 19 bp, Homo sapiens
  siRNA target sequence for HOOK3 (NM_032410.2,441-459).
gataattggaggctaaaga

SEQ ID NO: 120210 - DNA, 19 bp, Homo sapiens
  siRNA target sequence for HOOK3 (NM_032410.2,495-513).
gattataatcatgagattt

SEQ ID NO: 120211 - DNA, 19 bp, Homo sapiens
  siRNA target sequence for HOOK3 (NM_032410.2,516-534).
ggacagcaaattaatgact

SEQ ID NO: 120212 - DNA, 19 bp, Homo sapiens
  siRNA target sequence for HOOK3 (NM_032410.2,593-611).
gatgcttcagctcatctta

SEQ ID NO: 120213 - DNA, 19 bp, Homo sapiens
  siRNA target sequence for HOOK3 (NM_032410.2,710-728).
gctgatgagtaaagaatct

SEQ ID NO: 120214 - DNA, 19 bp, Homo sapiens
  siRNA target sequence for HOOK3 (NM_032410.2,742-760).
gaaatgatgcctatgttga

SEQ ID NO: 120215 - DNA, 19 bp, Homo sapiens
  siRNA target sequence for HOOK3 (NM_032410.2,768-786).
cgtcagctgaagaaaacta

SEQ ID NO: 120216 - DNA, 19 bp, Homo sapiens
  siRNA target sequence for HOOK3 (NM_032410.2,829-847).
ctcaaagatgccatgaact

SEQ ID NO: 120217 - DNA, 19 bp, Homo sapiens
  siRNA target sequence for HOOK3 (NM_032410.2,914-932).
ggaaagactcaatcaatct

SEQ ID NO: 120218 - DNA, 19 bp, Homo sapiens
  siRNA target sequence for HOOK3 (NM_032410.2,921-939).
ctcaatcaatctgattcta

SEQ ID NO: 120219 - DNA, 19 bp, Homo sapiens
  siRNA target sequence for HOOK3 (NM_032410.2,977-995).
gcagctccagactcaatta

SEQ ID NO: 120220 - DNA, 19 bp, Homo sapiens
  siRNA target sequence for HOOK3 (NM_032410.2,980-998).
gctccagactcaattagaa

SEQ ID NO: 120221 - DNA, 19 bp, Homo sapiens
  siRNA target sequence for HOOK3 (NM_032410.2,1032-1050).
gccaaagatgattatcgaa

SEQ ID NO: 120222 - DNA, 19 bp, Homo sapiens
  siRNA target sequence for HOOK3 (NM_032410.2,1033-1051).
ccaaagatgattatcgaat

SEQ ID NO: 120223 - DNA, 19 bp, Homo sapiens
  siRNA target sequence for HOOK3 (NM_032410.2,1048-1066).
gaatacgttgtgaagagtt

SEQ ID NO: 120224 - DNA, 19 bp, Homo sapiens
  siRNA target sequence for HOOK3 (NM_032410.2,1151-1169).
cgacgtgctgagacattct

SEQ ID NO: 120225 - DNA, 19 bp, Homo sapiens
  siRNA target sequence for HOOK3 (NM_032410.2,1152-1170).
gacgtgctgagacattctt

SEQ ID NO: 120226 - DNA, 19 bp, Homo sapiens
  siRNA target sequence for HOOK3 (NM_032410.2,1195-1213).
gtcaagtagaatcttataa

SEQ ID NO: 120227 - DNA, 19 bp, Homo sapiens
  siRNA target sequence for HOOK3 (NM_032410.2,1224-1242).
gaagaccttggtgatttaa

SEQ ID NO: 120228 - DNA, 19 bp, Homo sapiens
  siRNA target sequence for HOOK3 (NM_032410.2,1243-1261).
ggcggcaggttaaactctt

SEQ ID NO: 120229 - DNA, 19 bp, Homo sapiens
  siRNA target sequence for HOOK3 (NM_032410.2,1244-1262).
gcggcaggttaaactctta

SEQ ID NO: 120230 - DNA, 19 bp, Homo sapiens
  siRNA target sequence for HOOK3 (NM_032410.2,1246-1264).
ggcaggttaaactcttaga

SEQ ID NO: 120231 - DNA, 19 bp, Homo sapiens
  siRNA target sequence for HOOK3 (NM_032410.2,1277-1295).
catgtatatgcagaatact

SEQ ID NO: 120232 - DNA, 19 bp, Homo sapiens
  siRNA target sequence for HOOK3 (NM_032410.2,1298-1316).
cagtctagaggaagagtta

SEQ ID NO: 120233 - DNA, 19 bp, Homo sapiens
  siRNA target sequence for HOOK3 (NM_032410.2,1325-1343).
caacgcagcgcgaagtcaa

SEQ ID NO: 120234 - DNA, 19 bp, Homo sapiens
  siRNA target sequence for HOOK3 (NM_032410.2,1328-1346).
cgcagcgcgaagtcaactt

SEQ ID NO: 120235 - DNA, 19 bp, Homo sapiens
  siRNA target sequence for HOOK3 (NM_032410.2,1332-1350).
gcgcgaagtcaacttgaaa

SEQ ID NO: 120236 - DNA, 19 bp, Homo sapiens
  siRNA target sequence for HOOK3 (NM_032410.2,1336-1354).
gaagtcaacttgaaaccta

SEQ ID NO: 120237 - DNA, 19 bp, Homo sapiens
  siRNA target sequence for HOOK3 (NM_032410.2,1341-1359).
caacttgaaacctacaaga

SEQ ID NO: 120238 - DNA, 19 bp, Homo sapiens
  siRNA target sequence for HOOK3 (NM_032410.2,1358-1376).
gagacaggtagtagaacta

SEQ ID NO: 120239 - DNA, 19 bp, Homo sapiens
  siRNA target sequence for HOOK3 (NM_032410.2,1368-1386).
gtagaactacaaaacagat

SEQ ID NO: 120240 - DNA, 19 bp, Homo sapiens
  siRNA target sequence for HOOK3 (NM_032410.2,1371-1389).
gaactacaaaacagattat

SEQ ID NO: 120241 - DNA, 19 bp, Homo sapiens
  siRNA target sequence for HOOK3 (NM_032410.2,1382-1400).
cagattatccgaagaatca

SEQ ID NO: 120242 - DNA, 19 bp, Homo sapiens
  siRNA target sequence for HOOK3 (NM_032410.2,1433-1451).
gcggctaaaagaaaaagtt

SEQ ID NO: 120243 - DNA, 19 bp, Homo sapiens
  siRNA target sequence for HOOK3 (NM_032410.2,1600-1618).
gtctagctgcagagattgt

SEQ ID NO: 120244 - DNA, 19 bp, Homo sapiens
  siRNA target sequence for HOOK3 (NM_032410.2,1602-1620).
ctagctgcagagattgtta

SEQ ID NO: 120245 - DNA, 19 bp, Homo sapiens
  siRNA target sequence for HOOK3 (NM_032410.2,1647-1665).
cgtcttcagcatgagaata

SEQ ID NO: 120246 - DNA, 19 bp, Homo sapiens
  siRNA target sequence for HOOK3 (NM_032410.2,1648-1666).
gtcttcagcatgagaataa

SEQ ID NO: 120247 - DNA, 19 bp, Homo sapiens
  siRNA target sequence for HOOK3 (NM_032410.2,1655-1673).
gcatgagaataagatgtta

SEQ ID NO: 120248 - DNA, 19 bp, Homo sapiens
  siRNA target sequence for HOOK3 (NM_032410.2,1718-1736).
gcagagccttctagatgat

SEQ ID NO: 120249 - DNA, 19 bp, Homo sapiens
  siRNA target sequence for HOOK3 (NM_032410.2,1723-1741).
gccttctagatgatgcaaa

SEQ ID NO: 120250 - DNA, 19 bp, Homo sapiens
  siRNA target sequence for HOOK3 (NM_032410.2,1724-1742).
ccttctagatgatgcaaat

SEQ ID NO: 120251 - DNA, 19 bp, Homo sapiens
  siRNA target sequence for HOOK3 (NM_032410.2,1738-1756).
caaatctacgcaagaatga

SEQ ID NO: 120252 - DNA, 19 bp, Homo sapiens
  siRNA target sequence for HOOK3 (NM_032410.2,1769-1787).
gaataggctggtgaatcaa

SEQ ID NO: 120253 - DNA, 19 bp, Homo sapiens
  siRNA target sequence for HOOK3 (NM_032410.2,1796-1814).
ggaagtacagtcacaagtt

SEQ ID NO: 120254 - DNA, 19 bp, Homo sapiens
  siRNA target sequence for HOOK3 (NM_032410.2,1857-1875).
gaagattcagtccttctaa

SEQ ID NO: 120255 - DNA, 19 bp, Homo sapiens
  siRNA target sequence for HOOK3 (NM_032410.2,1978-1996).
gctccttaaaaattgaaga

SEQ ID NO: 120256 - DNA, 19 bp, Homo sapiens
  siRNA target sequence for HOOK3 (NM_032410.2,2046-2064).
gaacgatacaaaaaatact

SEQ ID NO: 120257 - DNA, 19 bp, Homo sapiens
  siRNA target sequence for HOOK3 (NM_032410.2,2080-2098).
gtgtcatccgtactttaga

SEQ ID NO: 120258 - DNA, 19 bp, Homo sapiens
  siRNA target sequence for HOOK3 (NM_032410.2,2165-2183).
ccgactgttccactcatta

SEQ ID NO: 120259 - DNA, 19 bp, Homo sapiens
  siRNA target sequence for HOOK3 (NM_032410.2,2167-2185).
gactgttccactcattaga

SEQ ID NO: 120260 - DNA, 19 bp, Homo sapiens
  siRNA target sequence for HOOK3 (NM_032410.2,2169-2187).
ctgttccactcattagaga

SEQ ID NO: 120261 - DNA, 19 bp, Homo sapiens
  siRNA target sequence for HOOK3 (NM_032410.2,2238-2256).
gttagtgcctggtacaata

SEQ ID NO: 120262 - DNA, 19 bp, Homo sapiens
  siRNA target sequence for HOOK3 (NM_032410.2,2305-2323).
caggctcagggcagtcatt

SEQ ID NO: 120263 - DNA, 19 bp, Homo sapiens
  siRNA target sequence for HOOK3 (NM_032410.2,2308-2326).
gctcagggcagtcatttct

SEQ ID NO: 120264 - DNA, 19 bp, Homo sapiens
  siRNA target sequence for MAPRE1 (NM_012325.1,67-85).
ggcagtgaacgtatactca

SEQ ID NO: 120265 - DNA, 19 bp, Homo sapiens
  siRNA target sequence for MAPRE1 (NM_012325.1,68-86).
gcagtgaacgtatactcaa

SEQ ID NO: 120266 - DNA, 19 bp, Homo sapiens
  siRNA target sequence for MAPRE1 (NM_012325.1,87-105).
cgtcagtgaccagtgataa

SEQ ID NO: 120267 - DNA, 19 bp, Homo sapiens
  siRNA target sequence for MAPRE1 (NM_012325.1,92-110).
gtgaccagtgataacctaa

SEQ ID NO: 120268 - DNA, 19 bp, Homo sapiens
  siRNA target sequence for MAPRE1 (NM_012325.1,125-143).
ctggcctggatcaatgagt

SEQ ID NO: 120269 - DNA, 19 bp, Homo sapiens
  siRNA target sequence for MAPRE1 (NM_012325.1,181-199).
ctcaggggctgcgtattgt

SEQ ID NO: 120270 - DNA, 19 bp, Homo sapiens
  siRNA target sequence for MAPRE1 (NM_012325.1,187-205).
ggctgcgtattgtcagttt

SEQ ID NO: 120271 - DNA, 19 bp, Homo sapiens
  siRNA target sequence for MAPRE1 (NM_012325.1,188-206).
gctgcgtattgtcagttta

SEQ ID NO: 120272 - DNA, 19 bp, Homo sapiens
  siRNA target sequence for MAPRE1 (NM_012325.1,192-210).
cgtattgtcagtttatgga

SEQ ID NO: 120273 - DNA, 19 bp, Homo sapiens
  siRNA target sequence for MAPRE1 (NM_012325.1,247-265).
gaaattccaagctaagcta

SEQ ID NO: 120274 - DNA, 19 bp, Homo sapiens
  siRNA target sequence for MAPRE1 (NM_012325.1,296-314).
ctacaagcaggttttaaga

SEQ ID NO: 120275 - DNA, 19 bp, Homo sapiens
  siRNA target sequence for MAPRE1 (NM_012325.1,339-357).
ctgtggacaaattagtaaa

SEQ ID NO: 120276 - DNA, 19 bp, Homo sapiens
  siRNA target sequence for MAPRE1 (NM_012325.1,364-382).
gtttcaggacaattttgaa

SEQ ID NO: 120277 - DNA, 19 bp, Homo sapiens
  siRNA target sequence for MAPRE1 (NM_012325.1,403-421).
gtttttcgatgcaaactat

SEQ ID NO: 120278 - DNA, 19 bp, Homo sapiens
  siRNA target sequence for MAPRE1 (NM_012325.1,594-612).
ctggtgtggtgcgaaagaa

SEQ ID NO: 120279 - DNA, 19 bp, Homo sapiens
  siRNA target sequence for MAPRE1 (NM_012325.1,658-676).
gcaggtcaacgtattgaaa

SEQ ID NO: 120280 - DNA, 19 bp, Homo sapiens
  siRNA target sequence for MAPRE1 (NM_012325.1,661-679).
ggtcaacgtattgaaactt

SEQ ID NO: 120281 - DNA, 19 bp, Homo sapiens
  siRNA target sequence for MAPRE1 (NM_012325.1,662-680).
gtcaacgtattgaaactta

SEQ ID NO: 120282 - DNA, 19 bp, Homo sapiens
  siRNA target sequence for MAPRE1 (NM_012325.1,718-736).
cggaaagctacggaacatt

SEQ ID NO: 120283 - DNA, 19 bp, Homo sapiens
  siRNA target sequence for MAPRE1 (NM_012325.1,720-738).
gaaagctacggaacattga

SEQ ID NO: 120284 - DNA, 19 bp, Homo sapiens
  siRNA target sequence for MAPRE1 (NM_012325.1,728-746).
cggaacattgaattgattt

SEQ ID NO: 120285 - DNA, 19 bp, Homo sapiens
  siRNA target sequence for MAPRE1 (NM_012325.1,762-780).
gggaaaacgaccctgtatt

SEQ ID NO: 120286 - DNA, 19 bp, Homo sapiens
  siRNA target sequence for MAPRE1 (NM_012325.1,781-799).
gcagaggattgtagacatt

SEQ ID NO: 120287 - DNA, 19 bp, Homo sapiens
  siRNA target sequence for MAPRE1 (NM_012325.1,810-828).
cagatgaaggctttgtgat

SEQ ID NO: 120288 - DNA, 19 bp, Homo sapiens
  siRNA target sequence for MAPRE2 (NM_014268.1,138-156).
ccccaaatggcgagaacaa

SEQ ID NO: 120289 - DNA, 19 bp, Homo sapiens
  siRNA target sequence for MAPRE2 (NM_014268.1,218-236).
ggggagcgttcctacagtt

SEQ ID NO: 120290 - DNA, 19 bp, Homo sapiens
  siRNA target sequence for MAPRE2 (NM_014268.1,244-262).
ggcggtcaatgtgtattct

SEQ ID NO: 120291 - DNA, 19 bp, Homo sapiens
  siRNA target sequence for MAPRE2 (NM_014268.1,245-263).
gcggtcaatgtgtattcta

SEQ ID NO: 120292 - DNA, 19 bp, Homo sapiens
  siRNA target sequence for MAPRE2 (NM_014268.1,254-272).
gtgtattctacctcgataa

SEQ ID NO: 120293 - DNA, 19 bp, Homo sapiens
  siRNA target sequence for MAPRE2 (NM_014268.1,267-285).
cgataacccaagagactat

SEQ ID NO: 120294 - DNA, 19 bp, Homo sapiens
  siRNA target sequence for MAPRE2 (NM_014268.1,306-324).
catgggttaatgacatagt

SEQ ID NO: 120295 - DNA, 19 bp, Homo sapiens
  siRNA target sequence for MAPRE2 (NM_014268.1,310-328).
ggttaatgacatagtatct

SEQ ID NO: 120296 - DNA, 19 bp, Homo sapiens
  siRNA target sequence for MAPRE2 (NM_014268.1,311-329).
gttaatgacatagtatctt

SEQ ID NO: 120297 - DNA, 19 bp, Homo sapiens
  siRNA target sequence for MAPRE2 (NM_014268.1,365-383).
gcggcctattgccaattca

SEQ ID NO: 120298 - DNA, 19 bp, Homo sapiens
  siRNA target sequence for MAPRE2 (NM_014268.1,366-384).
cggcctattgccaattcat

SEQ ID NO: 120299 - DNA, 19 bp, Homo sapiens
  siRNA target sequence for MAPRE2 (NM_014268.1,392-410).
ctcttccctggctgcatta

SEQ ID NO: 120300 - DNA, 19 bp, Homo sapiens
  siRNA target sequence for MAPRE2 (NM_014268.1,480-498).
catcatttaagcgaatgaa

SEQ ID NO: 120301 - DNA, 19 bp, Homo sapiens
  siRNA target sequence for MAPRE2 (NM_014268.1,492-510).
gaatgaacgttgataaggt

SEQ ID NO: 120302 - DNA, 19 bp, Homo sapiens
  siRNA target sequence for MAPRE2 (NM_014268.1,496-514).
gaacgttgataaggtaatt

SEQ ID NO: 120303 - DNA, 19 bp, Homo sapiens
  siRNA target sequence for MAPRE2 (NM_014268.1,499-517).
cgttgataaggtaattcca

SEQ ID NO: 120304 - DNA, 19 bp, Homo sapiens
  siRNA target sequence for MAPRE2 (NM_014268.1,598-616).
cgatgggaaggagtatgat

SEQ ID NO: 120305 - DNA, 19 bp, Homo sapiens
  siRNA target sequence for MAPRE2 (NM_014268.1,657-675).
ctgaccctggtgaacagat

SEQ ID NO: 120306 - DNA, 19 bp, Homo sapiens
  siRNA target sequence for MAPRE2 (NM_014268.1,679-697).
caacctgccaaaaaagtct

SEQ ID NO: 120307 - DNA, 19 bp, Homo sapiens
  siRNA target sequence for MAPRE2 (NM_014268.1,719-737).
gcaggtgcagctaaatcaa

SEQ ID NO: 120308 - DNA, 19 bp, Homo sapiens
  siRNA target sequence for MAPRE2 (NM_014268.1,837-855).
cgcaggtcatacagcttaa

SEQ ID NO: 120309 - DNA, 19 bp, Homo sapiens
  siRNA target sequence for MAPRE2 (NM_014268.1,857-875).
gaacaggtacattcattaa

SEQ ID NO: 120310 - DNA, 19 bp, Homo sapiens
  siRNA target sequence for MAPRE3 (NM_012326.2,198-216).
gagtcgccatgatatgctt

SEQ ID NO: 120311 - DNA, 19 bp, Homo sapiens
  siRNA target sequence for MAPRE3 (NM_012326.2,240-258).
cctcaactataccaagata

SEQ ID NO: 120312 - DNA, 19 bp, Homo sapiens
  siRNA target sequence for MAPRE3 (NM_012326.2,336-354).
gaagttccaggccaaacta

SEQ ID NO: 120313 - DNA, 19 bp, Homo sapiens
  siRNA target sequence for MAPRE3 (NM_012326.2,578-596).
gtgatcagatcttcaacaa

SEQ ID NO: 120314 - DNA, 19 bp, Homo sapiens
  siRNA target sequence for MAPRE3 (NM_012326.2,641-659).
ccacaggcccaaaaaacat

SEQ ID NO: 120315 - DNA, 19 bp, Homo sapiens
  siRNA target sequence for MAPRE3 (NM_012326.2,817-835).
gaacgtgacttctacttca

SEQ ID NO: 120316 - DNA, 19 bp, Homo sapiens
  siRNA target sequence for MAPRE3 (NM_012326.2,880-898).
gaaaacagccctgttatct

SEQ ID NO: 120317 - DNA, 19 bp, Homo sapiens
  siRNA target sequence for TUBGCP5 (NM_052903.1,249-267).
cgaaggaatttatgaaaaa

SEQ ID NO: 120318 - DNA, 19 bp, Homo sapiens
  siRNA target sequence for TUBGCP5 (NM_052903.1,298-316).
gctagttggaagagattaa

SEQ ID NO: 120319 - DNA, 19 bp, Homo sapiens
  siRNA target sequence for TUBGCP5 (NM_052903.1,334-352).
gcaccacttcccagtataa

SEQ ID NO: 120320 - DNA, 19 bp, Homo sapiens
  siRNA target sequence for TUBGCP5 (NM_052903.1,335-353).
caccacttcccagtataaa

SEQ ID NO: 120321 - DNA, 19 bp, Homo sapiens
  siRNA target sequence for TUBGCP5 (NM_052903.1,525-543).
gtacatggacacaccaaat

SEQ ID NO: 120322 - DNA, 19 bp, Homo sapiens
  siRNA target sequence for TUBGCP5 (NM_052903.1,571-589).
gatcaacagcccttaagca

SEQ ID NO: 120323 - DNA, 19 bp, Homo sapiens
  siRNA target sequence for TUBGCP5 (NM_052903.1,590-608).
gagaggactctggaattca

SEQ ID NO: 120324 - DNA, 19 bp, Homo sapiens
  siRNA target sequence for TUBGCP5 (NM_052903.1,617-635).
ggacaccgttagaagaaca

SEQ ID NO: 120325 - DNA, 19 bp, Homo sapiens
  siRNA target sequence for TUBGCP5 (NM_052903.1,618-636).
gacaccgttagaagaacaa

SEQ ID NO: 120326 - DNA, 19 bp, Homo sapiens
  siRNA target sequence for TUBGCP5 (NM_052903.1,620-638).
caccgttagaagaacaaga

SEQ ID NO: 120327 - DNA, 19 bp, Homo sapiens
  siRNA target sequence for TUBGCP5 (NM_052903.1,623-641).
cgttagaagaacaagatca

SEQ ID NO: 120328 - DNA, 19 bp, Homo sapiens
  siRNA target sequence for TUBGCP5 (NM_052903.1,662-680).
gtatcagttggaaagatga

SEQ ID NO: 120329 - DNA, 19 bp, Homo sapiens
  siRNA target sequence for TUBGCP5 (NM_052903.1,741-759).
ctcccagtttcctcatagt

SEQ ID NO: 120330 - DNA, 19 bp, Homo sapiens
  siRNA target sequence for TUBGCP5 (NM_052903.1,752-770).
ctcatagtttacatttgca

SEQ ID NO: 120331 - DNA, 19 bp, Homo sapiens
  siRNA target sequence for TUBGCP5 (NM_052903.1,758-776).
gtttacatttgcactctaa

SEQ ID NO: 120332 - DNA, 19 bp, Homo sapiens
  siRNA target sequence for TUBGCP5 (NM_052903.1,807-825).
cagcagtgatccattgtat

SEQ ID NO: 120333 - DNA, 19 bp, Homo sapiens
  siRNA target sequence for TUBGCP5 (NM_052903.1,809-827).
gcagtgatccattgtatgt

SEQ ID NO: 120334 - DNA, 19 bp, Homo sapiens
  siRNA target sequence for TUBGCP5 (NM_052903.1,832-850).
gatgacagggttttggtta

SEQ ID NO: 120335 - DNA, 19 bp, Homo sapiens
  siRNA target sequence for TUBGCP5 (NM_052903.1,870-888).
ggaaaccctatggttactt

SEQ ID NO: 120336 - DNA, 19 bp, Homo sapiens
  siRNA target sequence for TUBGCP5 (NM_052903.1,882-900).
gttactttcaggagtgaaa

SEQ ID NO: 120337 - DNA, 19 bp, Homo sapiens
  siRNA target sequence for TUBGCP5 (NM_052903.1,996-1014).
ggaacaaatagcagcatat

SEQ ID NO: 120338 - DNA, 19 bp, Homo sapiens
  siRNA target sequence for TUBGCP5 (NM_052903.1,1088-1106).
gaagtgggtctgttcctaa

SEQ ID NO: 120339 - DNA, 19 bp, Homo sapiens
  siRNA target sequence for TUBGCP5 (NM_052903.1,1091-1109).
gtgggtctgttcctaagaa

SEQ ID NO: 120340 - DNA, 19 bp, Homo sapiens
  siRNA target sequence for TUBGCP5 (NM_052903.1,1093-1111).
gggtctgttcctaagaagt

SEQ ID NO: 120341 - DNA, 19 bp, Homo sapiens
  siRNA target sequence for TUBGCP5 (NM_052903.1,1130-1148).
gaacctaccaggctttcat

SEQ ID NO: 120342 - DNA, 19 bp, Homo sapiens
  siRNA target sequence for TUBGCP5 (NM_052903.1,1146-1164).
catgtgggccctgtacaaa

SEQ ID NO: 120343 - DNA, 19 bp, Homo sapiens
  siRNA target sequence for TUBGCP5 (NM_052903.1,1149-1167).
gtgggccctgtacaaatat

SEQ ID NO: 120344 - DNA, 19 bp, Homo sapiens
  siRNA target sequence for TUBGCP5 (NM_052903.1,1241-1259).
caatagtggtggacaagtt

SEQ ID NO: 120345 - DNA, 19 bp, Homo sapiens
  siRNA target sequence for TUBGCP5 (NM_052903.1,1257-1275).
gttggcacctcgattgtct

SEQ ID NO: 120346 - DNA, 19 bp, Homo sapiens
  siRNA target sequence for TUBGCP5 (NM_052903.1,1290-1308).
gcacaaagtgtttagtact

SEQ ID NO: 120347 - DNA, 19 bp, Homo sapiens
  siRNA target sequence for TUBGCP5 (NM_052903.1,1325-1343).
cacctgatactcgaaatgt

SEQ ID NO: 120348 - DNA, 19 bp, Homo sapiens
  siRNA target sequence for TUBGCP5 (NM_052903.1,1381-1399).
gccattcttgaatatgaca

SEQ ID NO: 120349 - DNA, 19 bp, Homo sapiens
  siRNA target sequence for TUBGCP5 (NM_052903.1,1382-1400).
ccattcttgaatatgacaa

SEQ ID NO: 120350 - DNA, 19 bp, Homo sapiens
  siRNA target sequence for TUBGCP5 (NM_052903.1,1383-1401).
cattcttgaatatgacaat

SEQ ID NO: 120351 - DNA, 19 bp, Homo sapiens
  siRNA target sequence for TUBGCP5 (NM_052903.1,1582-1600).
gcaacttacacgttatata

SEQ ID NO: 120352 - DNA, 19 bp, Homo sapiens
  siRNA target sequence for TUBGCP5 (NM_052903.1,1592-1610).
cgttatatagcgtatcaga

SEQ ID NO: 120353 - DNA, 19 bp, Homo sapiens
  siRNA target sequence for TUBGCP5 (NM_052903.1,1593-1611).
gttatatagcgtatcagaa

SEQ ID NO: 120354 - DNA, 19 bp, Homo sapiens
  siRNA target sequence for TUBGCP5 (NM_052903.1,2027-2045).
gtgactttcacgagaagtt

SEQ ID NO: 120355 - DNA, 19 bp, Homo sapiens
  siRNA target sequence for TUBGCP5 (NM_052903.1,2043-2061).
gtttgctggtggtgatgta

SEQ ID NO: 120356 - DNA, 19 bp, Homo sapiens
  siRNA target sequence for TUBGCP5 (NM_052903.1,2088-2106).
gacatgccagacttttgaa

SEQ ID NO: 120357 - DNA, 19 bp, Homo sapiens
  siRNA target sequence for TUBGCP5 (NM_052903.1,2121-2139).
ctgcctctatcctcatatt

SEQ ID NO: 120358 - DNA, 19 bp, Homo sapiens
  siRNA target sequence for TUBGCP5 (NM_052903.1,2123-2141).
gcctctatcctcatattga

SEQ ID NO: 120359 - DNA, 19 bp, Homo sapiens
  siRNA target sequence for TUBGCP5 (NM_052903.1,2125-2143).
ctctatcctcatattgaca

SEQ ID NO: 120360 - DNA, 19 bp, Homo sapiens
  siRNA target sequence for TUBGCP5 (NM_052903.1,2140-2158).
gacaagcagtatctagatt

SEQ ID NO: 120361 - DNA, 19 bp, Homo sapiens
  siRNA target sequence for TUBGCP5 (NM_052903.1,2170-2188).
ctcatgcaaactctaaaaa

SEQ ID NO: 120362 - DNA, 19 bp, Homo sapiens
  siRNA target sequence for TUBGCP5 (NM_052903.1,2191-2209).
gattacaggttggtagaat

SEQ ID NO: 120363 - DNA, 19 bp, Homo sapiens
  siRNA target sequence for TUBGCP5 (NM_052903.1,2246-2264).
gaggagataccatgtatga

SEQ ID NO: 120364 - DNA, 19 bp, Homo sapiens
  siRNA target sequence for TUBGCP5 (NM_052903.1,2263-2281).
gacttctacacgtcaattt

SEQ ID NO: 120365 - DNA, 19 bp, Homo sapiens
  siRNA target sequence for TUBGCP5 (NM_052903.1,2265-2283).
cttctacacgtcaattttt

SEQ ID NO: 120366 - DNA, 19 bp, Homo sapiens
  siRNA target sequence for TUBGCP5 (NM_052903.1,2273-2291).
cgtcaatttttgataaaat

SEQ ID NO: 120367 - DNA, 19 bp, Homo sapiens
  siRNA target sequence for TUBGCP5 (NM_052903.1,2358-2376).
gcgttatcctgaagatagt

SEQ ID NO: 120368 - DNA, 19 bp, Homo sapiens
  siRNA target sequence for TUBGCP5 (NM_052903.1,2359-2377).
cgttatcctgaagatagtt

SEQ ID NO: 120369 - DNA, 19 bp, Homo sapiens
  siRNA target sequence for TUBGCP5 (NM_052903.1,2371-2389).
gatagttcacgtctatcta

SEQ ID NO: 120370 - DNA, 19 bp, Homo sapiens
  siRNA target sequence for TUBGCP5 (NM_052903.1,2378-2396).
cacgtctatctatatcttt

SEQ ID NO: 120371 - DNA, 19 bp, Homo sapiens
  siRNA target sequence for TUBGCP5 (NM_052903.1,2424-2442).
gctgcctgttcatatctta

SEQ ID NO: 120372 - DNA, 19 bp, Homo sapiens
  siRNA target sequence for TUBGCP5 (NM_052903.1,2427-2445).
gcctgttcatatcttagat

SEQ ID NO: 120373 - DNA, 19 bp, Homo sapiens
  siRNA target sequence for TUBGCP5 (NM_052903.1,2471-2489).
catggcccgtggacattgt

SEQ ID NO: 120374 - DNA, 19 bp, Homo sapiens
  siRNA target sequence for TUBGCP5 (NM_052903.1,2474-2492).
ggcccgtggacattgttat

SEQ ID NO: 120375 - DNA, 19 bp, Homo sapiens
  siRNA target sequence for TUBGCP5 (NM_052903.1,2476-2494).
cccgtggacattgttataa

SEQ ID NO: 120376 - DNA, 19 bp, Homo sapiens
  siRNA target sequence for TUBGCP5 (NM_052903.1,2478-2496).
cgtggacattgttataagt

SEQ ID NO: 120377 - DNA, 19 bp, Homo sapiens
  siRNA target sequence for TUBGCP5 (NM_052903.1,2479-2497).
gtggacattgttataagtt

SEQ ID NO: 120378 - DNA, 19 bp, Homo sapiens
  siRNA target sequence for TUBGCP5 (NM_052903.1,2504-2522).
gtcaaaaaatttataatca

SEQ ID NO: 120379 - DNA, 19 bp, Homo sapiens
  siRNA target sequence for TUBGCP5 (NM_052903.1,2530-2548).
cttctcttattgcaaataa

SEQ ID NO: 120380 - DNA, 19 bp, Homo sapiens
  siRNA target sequence for TUBGCP5 (NM_052903.1,2603-2621).
cagaaaaaccacgacttaa

SEQ ID NO: 120381 - DNA, 19 bp, Homo sapiens
  siRNA target sequence for TUBGCP5 (NM_052903.1,2654-2672).
ctcagttcggaccacaaaa

SEQ ID NO: 120382 - DNA, 19 bp, Homo sapiens
  siRNA target sequence for TUBGCP5 (NM_052903.1,2658-2676).
gttcggaccacaaaaagaa

SEQ ID NO: 120383 - DNA, 19 bp, Homo sapiens
  siRNA target sequence for TUBGCP5 (NM_052903.1,2678-2696).
cagtaagacagcagattca

SEQ ID NO: 120384 - DNA, 19 bp, Homo sapiens
  siRNA target sequence for TUBGCP5 (NM_052903.1,2695-2713).
catcgcatgttcctcttaa

SEQ ID NO: 120385 - DNA, 19 bp, Homo sapiens
  siRNA target sequence for TUBGCP5 (NM_052903.1,2777-2795).
gtacagggctggagtttca

SEQ ID NO: 120386 - DNA, 19 bp, Homo sapiens
  siRNA target sequence for TUBGCP5 (NM_052903.1,2812-2830).
gccaaggatttagatcaat

SEQ ID NO: 120387 - DNA, 19 bp, Homo sapiens
  siRNA target sequence for TUBGCP5 (NM_052903.1,2813-2831).
ccaaggatttagatcaatt

SEQ ID NO: 120388 - DNA, 19 bp, Homo sapiens
  siRNA target sequence for TUBGCP5 (NM_052903.1,2872-2890).
cggtgtctgctgagagaaa

SEQ ID NO: 120389 - DNA, 19 bp, Homo sapiens
  siRNA target sequence for TUBGCP5 (NM_052903.1,2892-2910).
ggtcagctttgtgaaagaa

SEQ ID NO: 120390 - DNA, 19 bp, Homo sapiens
  siRNA target sequence for TUBGCP5 (NM_052903.1,2912-2930).
ctatcatgaaggtgttgaa

SEQ ID NO: 120391 - DNA, 19 bp, Homo sapiens
  siRNA target sequence for TUBGCP5 (NM_052903.1,2970-2988).
gggcacttggcgaatggaa

SEQ ID NO: 120392 - DNA, 19 bp, Homo sapiens
  siRNA target sequence for TUBGCP5 (NM_052903.1,2978-2996).
ggcgaatggaatctataga

SEQ ID NO: 120393 - DNA, 19 bp, Homo sapiens
  siRNA target sequence for TUBGCP6 (NM_020461.2,228-246).
ctacaatgctcttttcaca

SEQ ID NO: 120394 - DNA, 19 bp, Homo sapiens
  siRNA target sequence for TUBGCP6 (NM_020461.2,295-313).
ctaccagcgagaaacaaga

SEQ ID NO: 120395 - DNA, 19 bp, Homo sapiens
  siRNA target sequence for TUBGCP6 (NM_020461.2,485-503).
cgagaaaacgagactactt

SEQ ID NO: 120396 - DNA, 19 bp, Homo sapiens
  siRNA target sequence for TUBGCP6 (NM_020461.2,535-553).
ccgtacagcggctatgatt

SEQ ID NO: 120397 - DNA, 19 bp, Homo sapiens
  siRNA target sequence for TUBGCP6 (NM_020461.2,555-573).
cgacgacctgagtgtgttt

SEQ ID NO: 120398 - DNA, 19 bp, Homo sapiens
  siRNA target sequence for TUBGCP6 (NM_020461.2,623-641).
gcatgatccaggaaacact

SEQ ID NO: 120399 - DNA, 19 bp, Homo sapiens
  siRNA target sequence for TUBGCP6 (NM_020461.2,680-698).
ccgtcgggctcttctcatt

SEQ ID NO: 120400 - DNA, 19 bp, Homo sapiens
  siRNA target sequence for TUBGCP6 (NM_020461.2,681-699).
cgtcgggctcttctcattt

SEQ ID NO: 120401 - DNA, 19 bp, Homo sapiens
  siRNA target sequence for TUBGCP6 (NM_020461.2,684-702).
cgggctcttctcatttggt

SEQ ID NO: 120402 - DNA, 19 bp, Homo sapiens
  siRNA target sequence for TUBGCP6 (NM_020461.2,830-848).
ctgggctggctattaaggt

SEQ ID NO: 120403 - DNA, 19 bp, Homo sapiens
  siRNA target sequence for TUBGCP6 (NM_020461.2,886-904).
cagtcagcgtccaacttga

SEQ ID NO: 120404 - DNA, 19 bp, Homo sapiens
  siRNA target sequence for TUBGCP6 (NM_020461.2,953-971).
gggaagccgcacttaccta

SEQ ID NO: 120405 - DNA, 19 bp, Homo sapiens
  siRNA target sequence for TUBGCP6 (NM_020461.2,954-972).
ggaagccgcacttacctat

SEQ ID NO: 120406 - DNA, 19 bp, Homo sapiens
  siRNA target sequence for TUBGCP6 (NM_020461.2,1055-1073).
gggacgctttcgacaagtt

SEQ ID NO: 120407 - DNA, 19 bp, Homo sapiens
  siRNA target sequence for TUBGCP6 (NM_020461.2,1170-1188).
cgtgctgaacgtcttgatt

SEQ ID NO: 120408 - DNA, 19 bp, Homo sapiens
  siRNA target sequence for TUBGCP6 (NM_020461.2,1415-1433).
ggaggtacctgcagtatta

SEQ ID NO: 120409 - DNA, 19 bp, Homo sapiens
  siRNA target sequence for TUBGCP6 (NM_020461.2,1469-1487).
gcctcctcaccattggttt

SEQ ID NO: 120410 - DNA, 19 bp, Homo sapiens
  siRNA target sequence for TUBGCP6 (NM_020461.2,1747-1765).
gcttatggcgagttcatga

SEQ ID NO: 120411 - DNA, 19 bp, Homo sapiens
  siRNA target sequence for TUBGCP6 (NM_020461.2,1748-1766).
cttatggcgagttcatgat

SEQ ID NO: 120412 - DNA, 19 bp, Homo sapiens
  siRNA target sequence for TUBGCP6 (NM_020461.2,1786-1804).
ctcagcttccgagataagt

SEQ ID NO: 120413 - DNA, 19 bp, Homo sapiens
  siRNA target sequence for TUBGCP6 (NM_020461.2,1873-1891).
cacattgcccacgacatat

SEQ ID NO: 120414 - DNA, 19 bp, Homo sapiens
  siRNA target sequence for TUBGCP6 (NM_020461.2,1894-1912).
gtctgcggaaagaccatta

SEQ ID NO: 120415 - DNA, 19 bp, Homo sapiens
  siRNA target sequence for TUBGCP6 (NM_020461.2,1898-1916).
gcggaaagaccattaacct

SEQ ID NO: 120416 - DNA, 19 bp, Homo sapiens
  siRNA target sequence for TUBGCP6 (NM_020461.2,1972-1990).
cggatctcggtgattttct

SEQ ID NO: 120417 - DNA, 19 bp, Homo sapiens
  siRNA target sequence for TUBGCP6 (NM_020461.2,1999-2017).
gagttgaaggagattgaga

SEQ ID NO: 120418 - DNA, 19 bp, Homo sapiens
  siRNA target sequence for TUBGCP6 (NM_020461.2,2079-2097).
ggaggagaaggaattacgt

SEQ ID NO: 120419 - DNA, 19 bp, Homo sapiens
  siRNA target sequence for TUBGCP6 (NM_020461.2,2088-2106).
ggaattacgtatggaaatt

SEQ ID NO: 120420 - DNA, 19 bp, Homo sapiens
  siRNA target sequence for TUBGCP6 (NM_020461.2,2207-2225).
ggaagcgtgagcagtttca

SEQ ID NO: 120421 - DNA, 19 bp, Homo sapiens
  siRNA target sequence for TUBGCP6 (NM_020461.2,2228-2246).
ggctgaaagaacaatttgt

SEQ ID NO: 120422 - DNA, 19 bp, Homo sapiens
  siRNA target sequence for TUBGCP6 (NM_020461.2,2469-2487).
gagtgcacggcttcgtttt

SEQ ID NO: 120423 - DNA, 19 bp, Homo sapiens
  siRNA target sequence for TUBGCP6 (NM_020461.2,2474-2492).
cacggcttcgttttctctt

SEQ ID NO: 120424 - DNA, 19 bp, Homo sapiens
  siRNA target sequence for TUBGCP6 (NM_020461.2,2477-2495).
ggcttcgttttctcttaga

SEQ ID NO: 120425 - DNA, 19 bp, Homo sapiens
  siRNA target sequence for TUBGCP6 (NM_020461.2,2863-2881).
gtggcgctgcagaccatta

SEQ ID NO: 120426 - DNA, 19 bp, Homo sapiens
  siRNA target sequence for TUBGCP6 (NM_020461.2,2866-2884).
gcgctgcagaccattaact

SEQ ID NO: 120427 - DNA, 19 bp, Homo sapiens
  siRNA target sequence for TUBGCP6 (NM_020461.2,3214-3232).
ggggactacgcttctgaaa

SEQ ID NO: 120428 - DNA, 19 bp, Homo sapiens
  siRNA target sequence for TUBGCP6 (NM_020461.2,3215-3233).
gggactacgcttctgaaat

SEQ ID NO: 120429 - DNA, 19 bp, Homo sapiens
  siRNA target sequence for TUBGCP6 (NM_020461.2,3216-3234).
ggactacgcttctgaaata

SEQ ID NO: 120430 - DNA, 19 bp, Homo sapiens
  siRNA target sequence for TUBGCP6 (NM_020461.2,3342-3360).
ccacggacacgtatccaat

SEQ ID NO: 120431 - DNA, 19 bp, Homo sapiens
  siRNA target sequence for TUBGCP6 (NM_020461.2,4059-4077).
gccacggctgcctgtagaa

SEQ ID NO: 120432 - DNA, 19 bp, Homo sapiens
  siRNA target sequence for TUBGCP6 (NM_020461.2,4061-4079).
cacggctgcctgtagaagt

SEQ ID NO: 120433 - DNA, 19 bp, Homo sapiens
  siRNA target sequence for TUBGCP6 (NM_020461.2,4609-4627).
gccgctgtcgactacttct

SEQ ID NO: 120434 - DNA, 19 bp, Homo sapiens
  siRNA target sequence for TUBGCP6 (NM_020461.2,4610-4628).
ccgctgtcgactacttctt

SEQ ID NO: 120435 - DNA, 19 bp, Homo sapiens
  siRNA target sequence for TUBGCP6 (NM_020461.2,4929-4947).
ggactggcctctcaacatt

SEQ ID NO: 120436 - DNA, 19 bp, Homo sapiens
  siRNA target sequence for TUBGCP6 (NM_020461.2,4934-4952).
ggcctctcaacattgtcat

SEQ ID NO: 120437 - DNA, 19 bp, Homo sapiens
  siRNA target sequence for UNC84B (NM_015374.1,306-324).
gtcagagcaccctgtttaa

SEQ ID NO: 120438 - DNA, 19 bp, Homo sapiens
  siRNA target sequence for UNC84B (NM_015374.1,351-369).
ggaaatccagcaacatgaa

SEQ ID NO: 120439 - DNA, 19 bp, Homo sapiens
  siRNA target sequence for UNC84B (NM_015374.1,895-913).
gacgtatggtgcttggtat

SEQ ID NO: 120440 - DNA, 19 bp, Homo sapiens
  siRNA target sequence for UNC84B (NM_015374.1,1008-1026).
gagactcatcgccacattt

SEQ ID NO: 120441 - DNA, 19 bp, Homo sapiens
  siRNA target sequence for UNC84B (NM_015374.1,1239-1257).
ctgccctgaaggaggattt

SEQ ID NO: 120442 - DNA, 19 bp, Homo sapiens
  siRNA target sequence for UNC84B (NM_015374.1,1515-1533).
gctcggtggcggaagaagt

SEQ ID NO: 120443 - DNA, 19 bp, Homo sapiens
  siRNA target sequence for UNC84B (NM_015374.1,1566-1584).
gggacgacgtggaatctca

SEQ ID NO: 120444 - DNA, 19 bp, Homo sapiens
  siRNA target sequence for UNC84B (NM_015374.1,1753-1771).
cctgacgctgcagaaagaa

SEQ ID NO: 120445 - DNA, 19 bp, Homo sapiens
  siRNA target sequence for UNC84B (NM_015374.1,1891-1909).
catcagcacccgatgttct

SEQ ID NO: 120446 - DNA, 19 bp, Homo sapiens
  siRNA target sequence for UNC84B (NM_015374.1,2225-2243).
gacggcgagcctattcaga

SEQ ID NO: 120447 - DNA, 19 bp, Homo sapiens
  siRNA target sequence for UNC84B (NM_015374.1,2234-2252).
cctattcagacgtttcact

SEQ ID NO: 120448 - DNA, 19 bp, Homo sapiens
  siRNA target sequence for UNC84B (NM_015374.1,2235-2253).
ctattcagacgtttcactt

SEQ ID NO: 120449 - DNA, 19 bp, Homo sapiens
  siRNA target sequence for UNC84B (NM_015374.1,2291-2309).
ctgcggatcctgactaact

SEQ ID NO: 120450 - DNA, 19 bp, Homo sapiens
  siRNA target sequence for GABARAP (NM_007278.1,148-166).
gctctgagggcgagaagat

SEQ ID NO: 120451 - DNA, 19 bp, Homo sapiens
  siRNA target sequence for GABARAP (NM_007278.1,185-203).
ccgggtgccggtgatagta

SEQ ID NO: 120452 - DNA, 19 bp, Homo sapiens
  siRNA target sequence for GABARAP (NM_007278.1,187-205).
gggtgccggtgatagtaga

SEQ ID NO: 120453 - DNA, 19 bp, Homo sapiens
  siRNA target sequence for GABARAP (NM_007278.1,188-206).
ggtgccggtgatagtagaa

SEQ ID NO: 120454 - DNA, 19 bp, Homo sapiens
  siRNA target sequence for GABARAP (NM_007278.1,189-207).
gtgccggtgatagtagaaa

SEQ ID NO: 120455 - DNA, 19 bp, Homo sapiens
  siRNA target sequence for GABARAP (NM_007278.1,293-311).
gatccggaagcgaattcat

SEQ ID NO: 120456 - DNA, 19 bp, Homo sapiens
  siRNA target sequence for GABARAP (NM_007278.1,318-336).
gctgaggatgccttgtttt

SEQ ID NO: 120457 - DNA, 19 bp, Homo sapiens
  siRNA target sequence for GAPCENA (NM_012197.2,407-425).
ccgcttcatccaccattaa

SEQ ID NO: 120458 - DNA, 19 bp, Homo sapiens
  siRNA target sequence for GAPCENA (NM_012197.2,434-452).
cattagtagggctccaaaa

SEQ ID NO: 120459 - DNA, 19 bp, Homo sapiens
  siRNA target sequence for GAPCENA (NM_012197.2,459-477).
gatgagcctaccagtgaaa

SEQ ID NO: 120460 - DNA, 19 bp, Homo sapiens
  siRNA target sequence for GAPCENA (NM_012197.2,546-564).
cagtaaactgacttactta

SEQ ID NO: 120461 - DNA, 19 bp, Homo sapiens
  siRNA target sequence for GAPCENA (NM_012197.2,601-619).
gaagccttaaggatgatgt

SEQ ID NO: 120462 - DNA, 19 bp, Homo sapiens
  siRNA target sequence for GAPCENA (NM_012197.2,612-630).
gatgatgtccatcttaaga

SEQ ID NO: 120463 - DNA, 19 bp, Homo sapiens
  siRNA target sequence for GAPCENA (NM_012197.2,661-679).
ctttcagtgccgaatgtgt

SEQ ID NO: 120464 - DNA, 19 bp, Homo sapiens
  siRNA target sequence for GAPCENA (NM_012197.2,671-689).
cgaatgtgtctgaaggaat

SEQ ID NO: 120465 - DNA, 19 bp, Homo sapiens
  siRNA target sequence for GAPCENA (NM_012197.2,727-745).
gcaaactaccctatctaca

SEQ ID NO: 120466 - DNA, 19 bp, Homo sapiens
  siRNA target sequence for GAPCENA (NM_012197.2,728-746).
caaactaccctatctacaa

SEQ ID NO: 120467 - DNA, 19 bp, Homo sapiens
  siRNA target sequence for GAPCENA (NM_012197.2,804-822).
cactgaaagtcattacaat

SEQ ID NO: 120468 - DNA, 19 bp, Homo sapiens
  siRNA target sequence for GAPCENA (NM_012197.2,843-861).
cgtcttccggtgtgaaata

SEQ ID NO: 120469 - DNA, 19 bp, Homo sapiens
  siRNA target sequence for GAPCENA (NM_012197.2,846-864).
cttccggtgtgaaatacaa

SEQ ID NO: 120470 - DNA, 19 bp, Homo sapiens
  siRNA target sequence for GAPCENA (NM_012197.2,849-867).
ccggtgtgaaatacaagaa

SEQ ID NO: 120471 - DNA, 19 bp, Homo sapiens
  siRNA target sequence for GAPCENA (NM_012197.2,868-886).
gctgtaagccggatacttt

SEQ ID NO: 120472 - DNA, 19 bp, Homo sapiens
  siRNA target sequence for GAPCENA (NM_012197.2,869-887).
ctgtaagccggatacttta

SEQ ID NO: 120473 - DNA, 19 bp, Homo sapiens
  siRNA target sequence for GAPCENA (NM_012197.2,871-889).
gtaagccggatactttaca

SEQ ID NO: 120474 - DNA, 19 bp, Homo sapiens
  siRNA target sequence for GAPCENA (NM_012197.2,875-893).
gccggatactttacagttt

SEQ ID NO: 120475 - DNA, 19 bp, Homo sapiens
  siRNA target sequence for GAPCENA (NM_012197.2,876-894).
ccggatactttacagtttt

SEQ ID NO: 120476 - DNA, 19 bp, Homo sapiens
  siRNA target sequence for GAPCENA (NM_012197.2,956-974).
ctcctgacagtgacatctt

SEQ ID NO: 120477 - DNA, 19 bp, Homo sapiens
  siRNA target sequence for GAPCENA (NM_012197.2,958-976).
cctgacagtgacatcttta

SEQ ID NO: 120478 - DNA, 19 bp, Homo sapiens
  siRNA target sequence for GAPCENA (NM_012197.2,961-979).
gacagtgacatctttacct

SEQ ID NO: 120479 - DNA, 19 bp, Homo sapiens
  siRNA target sequence for GAPCENA (NM_012197.2,1009-1027).
gatggtaaaggttatttta

SEQ ID NO: 120480 - DNA, 19 bp, Homo sapiens
  siRNA target sequence for GAPCENA (NM_012197.2,1066-1084).
ctacgccaaggaattgata

SEQ ID NO: 120481 - DNA, 19 bp, Homo sapiens
  siRNA target sequence for GAPCENA (NM_012197.2,1098-1116).
ctatgtgcagcaaacaact

SEQ ID NO: 120482 - DNA, 19 bp, Homo sapiens
  siRNA target sequence for GAPCENA (NM_012197.2,1102-1120).
gtgcagcaaacaactaata

SEQ ID NO: 120483 - DNA, 19 bp, Homo sapiens
  siRNA target sequence for GAPCENA (NM_012197.2,1107-1125).
gcaaacaactaataaagaa

SEQ ID NO: 120484 - DNA, 19 bp, Homo sapiens
  siRNA target sequence for GAPCENA (NM_012197.2,1184-1202).
gtgacatgcacttattaga

SEQ ID NO: 120485 - DNA, 19 bp, Homo sapiens
  siRNA target sequence for GAPCENA (NM_012197.2,1186-1204).
gacatgcacttattagatt

SEQ ID NO: 120486 - DNA, 19 bp, Homo sapiens
  siRNA target sequence for GAPCENA (NM_012197.2,1191-1209).
gcacttattagatttggaa

SEQ ID NO: 120487 - DNA, 19 bp, Homo sapiens
  siRNA target sequence for GAPCENA (NM_012197.2,1206-1224).
ggaatctatgggcaaaagt

SEQ ID NO: 120488 - DNA, 19 bp, Homo sapiens
  siRNA target sequence for GAPCENA (NM_012197.2,1207-1225).
gaatctatgggcaaaagtt

SEQ ID NO: 120489 - DNA, 19 bp, Homo sapiens
  siRNA target sequence for GAPCENA (NM_012197.2,1228-1246).
gatggaaagtcgtatgtta

SEQ ID NO: 120490 - DNA, 19 bp, Homo sapiens
  siRNA target sequence for GAPCENA (NM_012197.2,1231-1249).
ggaaagtcgtatgttatta

SEQ ID NO: 120491 - DNA, 19 bp, Homo sapiens
  siRNA target sequence for GAPCENA (NM_012197.2,1250-1268).
cggggagctggaatccaaa

SEQ ID NO: 120492 - DNA, 19 bp, Homo sapiens
  siRNA target sequence for GAPCENA (NM_012197.2,1251-1269).
ggggagctggaatccaaaa

SEQ ID NO: 120493 - DNA, 19 bp, Homo sapiens
  siRNA target sequence for GAPCENA (NM_012197.2,1271-1289).
ccccacattttcaagttgt

SEQ ID NO: 120494 - DNA, 19 bp, Homo sapiens
  siRNA target sequence for GAPCENA (NM_012197.2,1329-1347).
cacagctgtagatttggta

SEQ ID NO: 120495 - DNA, 19 bp, Homo sapiens
  siRNA target sequence for GAPCENA (NM_012197.2,1333-1351).
gctgtagatttggtaataa

SEQ ID NO: 120496 - DNA, 19 bp, Homo sapiens
  siRNA target sequence for GAPCENA (NM_012197.2,1395-1413).
ccgcgtttgctcacctaat

SEQ ID NO: 120497 - DNA, 19 bp, Homo sapiens
  siRNA target sequence for GAPCENA (NM_012197.2,1397-1415).
gcgtttgctcacctaatga

SEQ ID NO: 120498 - DNA, 19 bp, Homo sapiens
  siRNA target sequence for GAPCENA (NM_012197.2,1406-1424).
cacctaatgaaagattatt

SEQ ID NO: 120499 - DNA, 19 bp, Homo sapiens
  siRNA target sequence for GAPCENA (NM_012197.2,1408-1426).
cctaatgaaagattattct

SEQ ID NO: 120500 - DNA, 19 bp, Homo sapiens
  siRNA target sequence for GAPCENA (NM_012197.2,1431-1449).
cttcagcaaacgtagtact

SEQ ID NO: 120501 - DNA, 19 bp, Homo sapiens
  siRNA target sequence for GAPCENA (NM_012197.2,1434-1452).
cagcaaacgtagtactact

SEQ ID NO: 120502 - DNA, 19 bp, Homo sapiens
  siRNA target sequence for GAPCENA (NM_012197.2,1437-1455).
caaacgtagtactactgaa

SEQ ID NO: 120503 - DNA, 19 bp, Homo sapiens
  siRNA target sequence for GAPCENA (NM_012197.2,1441-1459).
cgtagtactactgaaaatt

SEQ ID NO: 120504 - DNA, 19 bp, Homo sapiens
  siRNA target sequence for GAPCENA (NM_012197.2,1442-1460).
gtagtactactgaaaattt

SEQ ID NO: 120505 - DNA, 19 bp, Homo sapiens
  siRNA target sequence for GAPCENA (NM_012197.2,1512-1530).
cactttatatgaagttgta

SEQ ID NO: 120506 - DNA, 19 bp, Homo sapiens
  siRNA target sequence for GAPCENA (NM_012197.2,1597-1615).
cagtctggatcgcaaagtt

SEQ ID NO: 120507 - DNA, 19 bp, Homo sapiens
  siRNA target sequence for GAPCENA (NM_012197.2,1599-1617).
gtctggatcgcaaagttca

SEQ ID NO: 120508 - DNA, 19 bp, Homo sapiens
  siRNA target sequence for GAPCENA (NM_012197.2,1684-1702).
ggtgatgtatccaaagaat

SEQ ID NO: 120509 - DNA, 19 bp, Homo sapiens
  siRNA target sequence for GAPCENA (NM_012197.2,1748-1766).
ggcatctcaacttgaatgt

SEQ ID NO: 120510 - DNA, 19 bp, Homo sapiens
  siRNA target sequence for GAPCENA (NM_012197.2,1750-1768).
catctcaacttgaatgtga

SEQ ID NO: 120511 - DNA, 19 bp, Homo sapiens
  siRNA target sequence for GAPCENA (NM_012197.2,1776-1794).
gcagttgtcatccttagta

SEQ ID NO: 120512 - DNA, 19 bp, Homo sapiens
  siRNA target sequence for GAPCENA (NM_012197.2,1777-1795).
cagttgtcatccttagtaa

SEQ ID NO: 120513 - DNA, 19 bp, Homo sapiens
  siRNA target sequence for GAPCENA (NM_012197.2,1779-1797).
gttgtcatccttagtaaga

SEQ ID NO: 120514 - DNA, 19 bp, Homo sapiens
  siRNA target sequence for GAPCENA (NM_012197.2,1844-1862).
caggctgtcataacaatga

SEQ ID NO: 120515 - DNA, 19 bp, Homo sapiens
  siRNA target sequence for GAPCENA (NM_012197.2,1873-1891).
gagaaataccgcattctta

SEQ ID NO: 120516 - DNA, 19 bp, Homo sapiens
  siRNA target sequence for GAPCENA (NM_012197.2,1918-1936).
gctatcacccgggatatta

SEQ ID NO: 120517 - DNA, 19 bp, Homo sapiens
  siRNA target sequence for GAPCENA (NM_012197.2,1919-1937).
ctatcacccgggatattaa

SEQ ID NO: 120518 - DNA, 19 bp, Homo sapiens
  siRNA target sequence for GAPCENA (NM_012197.2,1928-1946).
gggatattaaccgaacatt

SEQ ID NO: 120519 - DNA, 19 bp, Homo sapiens
  siRNA target sequence for GAPCENA (NM_012197.2,1984-2002).
ggacaagattccttatata

SEQ ID NO: 120520 - DNA, 19 bp, Homo sapiens
  siRNA target sequence for GAPCENA (NM_012197.2,1985-2003).
gacaagattccttatataa

SEQ ID NO: 120521 - DNA, 19 bp, Homo sapiens
  siRNA target sequence for GAPCENA (NM_012197.2,2203-2221).
cgcctcatgcaggaataca

SEQ ID NO: 120522 - DNA, 19 bp, Homo sapiens
  siRNA target sequence for GAPCENA (NM_012197.2,2205-2223).
cctcatgcaggaatacatt

SEQ ID NO: 120523 - DNA, 19 bp, Homo sapiens
  siRNA target sequence for GAPCENA (NM_012197.2,2235-2253).
caaccacttcctggatata

SEQ ID NO: 120524 - DNA, 19 bp, Homo sapiens
  siRNA target sequence for GAPCENA (NM_012197.2,2256-2274).
ccttgaagcacacatgtat

SEQ ID NO: 120525 - DNA, 19 bp, Homo sapiens
  siRNA target sequence for GAPCENA (NM_012197.2,2337-2355).
catcgacctgcttttatgt

SEQ ID NO: 120526 - DNA, 19 bp, Homo sapiens
  siRNA target sequence for GAPCENA (NM_012197.2,2380-2398).
gtcgcccttggattattaa

SEQ ID NO: 120527 - DNA, 19 bp, Homo sapiens
  siRNA target sequence for GAPCENA (NM_012197.2,2385-2403).
ccttggattattaaagact

SEQ ID NO: 120528 - DNA, 19 bp, Homo sapiens
  siRNA target sequence for GAPCENA (NM_012197.2,2472-2490).
gagataccgctcagaagaa

SEQ ID NO: 120529 - DNA, 19 bp, Homo sapiens
  siRNA target sequence for GAPCENA (NM_012197.2,2474-2492).
gataccgctcagaagaaaa

SEQ ID NO: 120530 - DNA, 19 bp, Homo sapiens
  siRNA target sequence for GAPCENA (NM_012197.2,2519-2537).
gcaacatgaagattagtca

SEQ ID NO: 120531 - DNA, 19 bp, Homo sapiens
  siRNA target sequence for GAPCENA (NM_012197.2,2614-2632).
cgatttgagcgggagaata

SEQ ID NO: 120532 - DNA, 19 bp, Homo sapiens
  siRNA target sequence for GAPCENA (NM_012197.2,2625-2643).
ggagaataggcgtctacaa

SEQ ID NO: 120533 - DNA, 19 bp, Homo sapiens
  siRNA target sequence for GAPCENA (NM_012197.2,2824-2842).
gaagagtctgctcagttaa

SEQ ID NO: 120534 - DNA, 19 bp, Homo sapiens
  siRNA target sequence for GAPCENA (NM_012197.2,2829-2847).
gtctgctcagttaaaagaa

SEQ ID NO: 120535 - DNA, 19 bp, Homo sapiens
  siRNA target sequence for GAPCENA (NM_012197.2,2871-2889).
ggcagaatctgagattaaa

SEQ ID NO: 120536 - DNA, 19 bp, Homo sapiens
  siRNA target sequence for GAPCENA (NM_012197.2,3013-3031).
gagcggtgccgggaatttt

SEQ ID NO: 120537 - DNA, 19 bp, Homo sapiens
  siRNA target sequence for GAPCENA (NM_012197.2,3016-3034).
cggtgccgggaatttttca

SEQ ID NO: 120538 - DNA, 19 bp, Homo sapiens
  siRNA target sequence for GAPCENA (NM_012197.2,3020-3038).
gccgggaatttttcaacaa

SEQ ID NO: 120539 - DNA, 19 bp, Homo sapiens
  siRNA target sequence for GAPCENA (NM_012197.2,3036-3054).
caaagaagggcgtgtaaaa

SEQ ID NO: 120540 - DNA, 19 bp, Homo sapiens
  siRNA target sequence for GAPCENA (NM_012197.2,3046-3064).
cgtgtaaaaggcataagct

SEQ ID NO: 120541 - DNA, 19 bp, Homo sapiens
  siRNA target sequence for GAPCENA (NM_012197.2,3062-3080).
gctcaaccaaggaggtttt

SEQ ID NO: 120542 - DNA, 19 bp, Homo sapiens
  siRNA target sequence for GAPCENA (NM_012197.2,3063-3081).
ctcaaccaaggaggtttta

SEQ ID NO: 120543 - DNA, 19 bp, Homo sapiens
  siRNA target sequence for GAPCENA (NM_012197.2,3171-3189).
ggaggccgagtgtaagata

SEQ ID NO: 120544 - DNA, 19 bp, Homo sapiens
  siRNA target sequence for GAPCENA (NM_012197.2,3239-3257).
ccaagaagacgtggtttaa

SEQ ID NO: 120545 - DNA, 19 bp, Homo sapiens
  siRNA target sequence for GAPCENA (NM_012197.2,3259-3277).
cgaacactgagctccataa

SEQ ID NO: 120546 - DNA, 19 bp, Homo sapiens
  siRNA target sequence for GAPCENA (NM_012197.2,3260-3278).
gaacactgagctccataaa

SEQ ID NO: 120547 - DNA, 19 bp, Homo sapiens
  siRNA target sequence for LMOD1 (NM_012134.1,283-301).
gaaaccagacggagaaaca

SEQ ID NO: 120548 - DNA, 19 bp, Homo sapiens
  siRNA target sequence for LMOD1 (NM_012134.1,506-524).
gaggggtggtttaaagaaa

SEQ ID NO: 120549 - DNA, 19 bp, Homo sapiens
  siRNA target sequence for LMOD1 (NM_012134.1,510-528).
ggtggtttaaagaaaagct

SEQ ID NO: 120550 - DNA, 19 bp, Homo sapiens
  siRNA target sequence for LMOD1 (NM_012134.1,511-529).
gtggtttaaagaaaagctt

SEQ ID NO: 120551 - DNA, 19 bp, Homo sapiens
  siRNA target sequence for LMOD1 (NM_012134.1,1064-1082).
ggcagctcccagcatattt

SEQ ID NO: 120552 - DNA, 19 bp, Homo sapiens
  siRNA target sequence for LMOD1 (NM_012134.1,1069-1087).
ctcccagcatatttgatga

SEQ ID NO: 120553 - DNA, 19 bp, Homo sapiens
  siRNA target sequence for LMOD1 (NM_012134.1,1126-1144).
ctgaggtgaacgtcaacaa

SEQ ID NO: 120554 - DNA, 19 bp, Homo sapiens
  siRNA target sequence for LMOD1 (NM_012134.1,1128-1146).
gaggtgaacgtcaacaact

SEQ ID NO: 120555 - DNA, 19 bp, Homo sapiens
  siRNA target sequence for LMOD1 (NM_012134.1,1145-1163).
ctcagactgcatcacaaat

SEQ ID NO: 120556 - DNA, 19 bp, Homo sapiens
  siRNA target sequence for LMOD1 (NM_012134.1,1149-1167).
gactgcatcacaaatgaga

SEQ ID NO: 120557 - DNA, 19 bp, Homo sapiens
  siRNA target sequence for LMOD1 (NM_012134.1,1166-1184).
gatcttggtccggtttact

SEQ ID NO: 120558 - DNA, 19 bp, Homo sapiens
  siRNA target sequence for TNNT1 (NM_003283.3,166-184).
gaggaacgccccaaaccaa

SEQ ID NO: 120559 - DNA, 19 bp, Homo sapiens
  siRNA target sequence for TNNT1 (NM_003283.3,236-254).
gcgttgacttcgatgacat

SEQ ID NO: 120560 - DNA, 19 bp, Homo sapiens
  siRNA target sequence for TNNT1 (NM_003283.3,294-312).
gacactcatcgatgtacat

SEQ ID NO: 120561 - DNA, 19 bp, Homo sapiens
  siRNA target sequence for TNNT1 (NM_003283.3,296-314).
cactcatcgatgtacattt

SEQ ID NO: 120562 - DNA, 19 bp, Homo sapiens
  siRNA target sequence for TNNT3 (NM_006757.1,200-218).
gtcagaacaaagacctaat

SEQ ID NO: 120563 - DNA, 19 bp, Homo sapiens
  siRNA target sequence for TNNT3 (NM_006757.1,557-575).
gacgcaagccgctcaacat

SEQ ID NO: 120564 - DNA, 19 bp, Homo sapiens
  siRNA target sequence for KIFAP3 (NM_014970.2,284-302).
gacgccagatacctcaaaa

SEQ ID NO: 120565 - DNA, 19 bp, Homo sapiens
  siRNA target sequence for KIFAP3 (NM_014970.2,287-305).
gccagatacctcaaaagga

SEQ ID NO: 120566 - DNA, 19 bp, Homo sapiens
  siRNA target sequence for KIFAP3 (NM_014970.2,315-333).
gagggaatatagatgtaca

SEQ ID NO: 120567 - DNA, 19 bp, Homo sapiens
  siRNA target sequence for KIFAP3 (NM_014970.2,403-421).
catgttgggagaacgaaaa

SEQ ID NO: 120568 - DNA, 19 bp, Homo sapiens
  siRNA target sequence for KIFAP3 (NM_014970.2,413-431).
gaacgaaaagaatgtcaaa

SEQ ID NO: 120569 - DNA, 19 bp, Homo sapiens
  siRNA target sequence for KIFAP3 (NM_014970.2,452-470).
ctcaatgccaacacagata

SEQ ID NO: 120570 - DNA, 19 bp, Homo sapiens
  siRNA target sequence for KIFAP3 (NM_014970.2,483-501).
caaggaaggtggttgaaga

SEQ ID NO: 120571 - DNA, 19 bp, Homo sapiens
  siRNA target sequence for KIFAP3 (NM_014970.2,536-554).
gtagaacagctgttgtact

SEQ ID NO: 120572 - DNA, 19 bp, Homo sapiens
  siRNA target sequence for KIFAP3 (NM_014970.2,560-578).
cagaaccgccgtgattcat

SEQ ID NO: 120573 - DNA, 19 bp, Homo sapiens
  siRNA target sequence for KIFAP3 (NM_014970.2,565-583).
ccgccgtgattcattgtca

SEQ ID NO: 120574 - DNA, 19 bp, Homo sapiens
  siRNA target sequence for KIFAP3 (NM_014970.2,656-674).
gttgctaacattaatgaca

SEQ ID NO: 120575 - DNA, 19 bp, Homo sapiens
  siRNA target sequence for KIFAP3 (NM_014970.2,680-698).
gaatatattgagttattat

SEQ ID NO: 120576 - DNA, 19 bp, Homo sapiens
  siRNA target sequence for KIFAP3 (NM_014970.2,742-760).
gcagcttgctcgaaatcct

SEQ ID NO: 120577 - DNA, 19 bp, Homo sapiens
  siRNA target sequence for KIFAP3 (NM_014970.2,773-791).
gaactactattgaatgaaa

SEQ ID NO: 120578 - DNA, 19 bp, Homo sapiens
  siRNA target sequence for KIFAP3 (NM_014970.2,836-854).
caaagtgtcgagttagcta

SEQ ID NO: 120579 - DNA, 19 bp, Homo sapiens
  siRNA target sequence for KIFAP3 (NM_014970.2,842-860).
gtcgagttagctacaaaca

SEQ ID NO: 120580 - DNA, 19 bp, Homo sapiens
  siRNA target sequence for KIFAP3 (NM_014970.2,905-923).
ggacttattactcactata

SEQ ID NO: 120581 - DNA, 19 bp, Homo sapiens
  siRNA target sequence for KIFAP3 (NM_014970.2,906-924).
gacttattactcactataa

SEQ ID NO: 120582 - DNA, 19 bp, Homo sapiens
  siRNA target sequence for KIFAP3 (NM_014970.2,908-926).
cttattactcactataaaa

SEQ ID NO: 120583 - DNA, 19 bp, Homo sapiens
  siRNA target sequence for KIFAP3 (NM_014970.2,929-947).
ggagctctgtgtatgaata

SEQ ID NO: 120584 - DNA, 19 bp, Homo sapiens
  siRNA target sequence for KIFAP3 (NM_014970.2,932-950).
gctctgtgtatgaatatta

SEQ ID NO: 120585 - DNA, 19 bp, Homo sapiens
  siRNA target sequence for KIFAP3 (NM_014970.2,937-955).
gtgtatgaatattattgat

SEQ ID NO: 120586 - DNA, 19 bp, Homo sapiens
  siRNA target sequence for KIFAP3 (NM_014970.2,939-957).
gtatgaatattattgatca

SEQ ID NO: 120587 - DNA, 19 bp, Homo sapiens
  siRNA target sequence for KIFAP3 (NM_014970.2,1033-1051).
ccaaaccttgagaaaggat

SEQ ID NO: 120588 - DNA, 19 bp, Homo sapiens
  siRNA target sequence for KIFAP3 (NM_014970.2,1034-1052).
caaaccttgagaaaggatt

SEQ ID NO: 120589 - DNA, 19 bp, Homo sapiens
  siRNA target sequence for KIFAP3 (NM_014970.2,1110-1128).
gagttgctctttatttgct

SEQ ID NO: 120590 - DNA, 19 bp, Homo sapiens
  siRNA target sequence for KIFAP3 (NM_014970.2,1149-1167).
ctcgtaccgaactgaaaat

SEQ ID NO: 120591 - DNA, 19 bp, Homo sapiens
  siRNA target sequence for KIFAP3 (NM_014970.2,1151-1169).
cgtaccgaactgaaaatga

SEQ ID NO: 120592 - DNA, 19 bp, Homo sapiens
  siRNA target sequence for KIFAP3 (NM_014970.2,1170-1188).
ggaacaagaacatagttca

SEQ ID NO: 120593 - DNA, 19 bp, Homo sapiens
  siRNA target sequence for KIFAP3 (NM_014970.2,1202-1220).
gcccttgatcgggacaatt

SEQ ID NO: 120594 - DNA, 19 bp, Homo sapiens
  siRNA target sequence for KIFAP3 (NM_014970.2,1203-1221).
cccttgatcgggacaattt

SEQ ID NO: 120595 - DNA, 19 bp, Homo sapiens
  siRNA target sequence for KIFAP3 (NM_014970.2,1204-1222).
ccttgatcgggacaatttt

SEQ ID NO: 120596 - DNA, 19 bp, Homo sapiens
  siRNA target sequence for KIFAP3 (NM_014970.2,1360-1378).
caccctccgacttttacta

SEQ ID NO: 120597 - DNA, 19 bp, Homo sapiens
  siRNA target sequence for KIFAP3 (NM_014970.2,1362-1380).
ccctccgacttttactaaa

SEQ ID NO: 120598 - DNA, 19 bp, Homo sapiens
  siRNA target sequence for KIFAP3 (NM_014970.2,1366-1384).
ccgacttttactaaaccta

SEQ ID NO: 120599 - DNA, 19 bp, Homo sapiens
  siRNA target sequence for KIFAP3 (NM_014970.2,1367-1385).
cgacttttactaaacctat

SEQ ID NO: 120600 - DNA, 19 bp, Homo sapiens
  siRNA target sequence for KIFAP3 (NM_014970.2,1395-1413).
caggactgaggaataagat

SEQ ID NO: 120601 - DNA, 19 bp, Homo sapiens
  siRNA target sequence for KIFAP3 (NM_014970.2,1404-1422).
ggaataagatggtacaagt

SEQ ID NO: 120602 - DNA, 19 bp, Homo sapiens
  siRNA target sequence for KIFAP3 (NM_014970.2,1405-1423).
gaataagatggtacaagtt

SEQ ID NO: 120603 - DNA, 19 bp, Homo sapiens
  siRNA target sequence for KIFAP3 (NM_014970.2,1445-1463).
gcactcctaggcaatgaca

SEQ ID NO: 120604 - DNA, 19 bp, Homo sapiens
  siRNA target sequence for KIFAP3 (NM_014970.2,1446-1464).
cactcctaggcaatgacaa

SEQ ID NO: 120605 - DNA, 19 bp, Homo sapiens
  siRNA target sequence for KIFAP3 (NM_014970.2,1504-1522).
catggatgaccgctttaaa

SEQ ID NO: 120606 - DNA, 19 bp, Homo sapiens
  siRNA target sequence for KIFAP3 (NM_014970.2,1507-1525).
ggatgaccgctttaaatca

SEQ ID NO: 120607 - DNA, 19 bp, Homo sapiens
  siRNA target sequence for KIFAP3 (NM_014970.2,1513-1531).
ccgctttaaatcaatgttt

SEQ ID NO: 120608 - DNA, 19 bp, Homo sapiens
  siRNA target sequence for KIFAP3 (NM_014970.2,1541-1559).
gactgtataccacagttaa

SEQ ID NO: 120609 - DNA, 19 bp, Homo sapiens
  siRNA target sequence for KIFAP3 (NM_014970.2,1545-1563).
gtataccacagttaatgaa

SEQ ID NO: 120610 - DNA, 19 bp, Homo sapiens
  siRNA target sequence for KIFAP3 (NM_014970.2,1564-1582).
gatgctgtttgaatgttca

SEQ ID NO: 120611 - DNA, 19 bp, Homo sapiens
  siRNA target sequence for KIFAP3 (NM_014970.2,1590-1608).
gaattgacttggaactcat

SEQ ID NO: 120612 - DNA, 19 bp, Homo sapiens
  siRNA target sequence for KIFAP3 (NM_014970.2,1595-1613).
gacttggaactcatttctt

SEQ ID NO: 120613 - DNA, 19 bp, Homo sapiens
  siRNA target sequence for KIFAP3 (NM_014970.2,1632-1650).
ctaacaaaagaaatgtaca

SEQ ID NO: 120614 - DNA, 19 bp, Homo sapiens
  siRNA target sequence for KIFAP3 (NM_014970.2,1687-1705).
gaagagggctctgaagttt

SEQ ID NO: 120615 - DNA, 19 bp, Homo sapiens
  siRNA target sequence for KIFAP3 (NM_014970.2,1693-1711).
ggctctgaagtttaaggat

SEQ ID NO: 120616 - DNA, 19 bp, Homo sapiens
  siRNA target sequence for KIFAP3 (NM_014970.2,1747-1765).
gcatgatggaccaactaaa

SEQ ID NO: 120617 - DNA, 19 bp, Homo sapiens
  siRNA target sequence for KIFAP3 (NM_014970.2,1748-1766).
catgatggaccaactaaaa

SEQ ID NO: 120618 - DNA, 19 bp, Homo sapiens
  siRNA target sequence for KIFAP3 (NM_014970.2,1754-1772).
ggaccaactaaaaatctgt

SEQ ID NO: 120619 - DNA, 19 bp, Homo sapiens
  siRNA target sequence for KIFAP3 (NM_014970.2,1797-1815).
cagcccagatctctaatga

SEQ ID NO: 120620 - DNA, 19 bp, Homo sapiens
  siRNA target sequence for KIFAP3 (NM_014970.2,1825-1843).
ggagtttgtgattgaatgt

SEQ ID NO: 120621 - DNA, 19 bp, Homo sapiens
  siRNA target sequence for KIFAP3 (NM_014970.2,1880-1898).
gactgggaattggttctta

SEQ ID NO: 120622 - DNA, 19 bp, Homo sapiens
  siRNA target sequence for KIFAP3 (NM_014970.2,1882-1900).
ctgggaattggttcttaaa

SEQ ID NO: 120623 - DNA, 19 bp, Homo sapiens
  siRNA target sequence for KIFAP3 (NM_014970.2,1913-1931).
gttccatacctcaaggata

SEQ ID NO: 120624 - DNA, 19 bp, Homo sapiens
  siRNA target sequence for KIFAP3 (NM_014970.2,1917-1935).
catacctcaaggataaact

SEQ ID NO: 120625 - DNA, 19 bp, Homo sapiens
  siRNA target sequence for KIFAP3 (NM_014970.2,1921-1939).
cctcaaggataaactaaaa

SEQ ID NO: 120626 - DNA, 19 bp, Homo sapiens
  siRNA target sequence for KIFAP3 (NM_014970.2,1924-1942).
caaggataaactaaaacca

SEQ ID NO: 120627 - DNA, 19 bp, Homo sapiens
  siRNA target sequence for KIFAP3 (NM_014970.2,1973-1991).
gtggttataatgattggaa

SEQ ID NO: 120628 - DNA, 19 bp, Homo sapiens
  siRNA target sequence for KIFAP3 (NM_014970.2,2046-2064).
ctgcactcattgaattgct

SEQ ID NO: 120629 - DNA, 19 bp, Homo sapiens
  siRNA target sequence for KIFAP3 (NM_014970.2,2138-2156).
gccacaagagacgtcataa

SEQ ID NO: 120630 - DNA, 19 bp, Homo sapiens
  siRNA target sequence for KIFAP3 (NM_014970.2,2139-2157).
ccacaagagacgtcataat

SEQ ID NO: 120631 - DNA, 19 bp, Homo sapiens
  siRNA target sequence for KIFAP3 (NM_014970.2,2147-2165).
gacgtcataatcaaggaaa

SEQ ID NO: 120632 - DNA, 19 bp, Homo sapiens
  siRNA target sequence for KIFAP3 (NM_014970.2,2168-2186).
caggctccagcatatctca

SEQ ID NO: 120633 - DNA, 19 bp, Homo sapiens
  siRNA target sequence for KIFAP3 (NM_014970.2,2172-2190).
ctccagcatatctcataga

SEQ ID NO: 120634 - DNA, 19 bp, Homo sapiens
  siRNA target sequence for KIFAP3 (NM_014970.2,2178-2196).
catatctcatagacctaat

SEQ ID NO: 120635 - DNA, 19 bp, Homo sapiens
  siRNA target sequence for KIFAP3 (NM_014970.2,2189-2207).
gacctaatgcatgataaga

SEQ ID NO: 120636 - DNA, 19 bp, Homo sapiens
  siRNA target sequence for KIFAP3 (NM_014970.2,2191-2209).
cctaatgcatgataagaat

SEQ ID NO: 120637 - DNA, 19 bp, Homo sapiens
  siRNA target sequence for KIFAP3 (NM_014970.2,2192-2210).
ctaatgcatgataagaata

SEQ ID NO: 120638 - DNA, 19 bp, Homo sapiens
  siRNA target sequence for KIFAP3 (NM_014970.2,2197-2215).
gcatgataagaataatgaa

SEQ ID NO: 120639 - DNA, 19 bp, Homo sapiens
  siRNA target sequence for KIFAP3 (NM_014970.2,2218-2236).
ccgaaaggtctgtgataat

SEQ ID NO: 120640 - DNA, 19 bp, Homo sapiens
  siRNA target sequence for KIFAP3 (NM_014970.2,2219-2237).
cgaaaggtctgtgataata

SEQ ID NO: 120641 - DNA, 19 bp, Homo sapiens
  siRNA target sequence for KIFAP3 (NM_014970.2,2224-2242).
ggtctgtgataatacatta

SEQ ID NO: 120642 - DNA, 19 bp, Homo sapiens
  siRNA target sequence for KIFAP3 (NM_014970.2,2296-2314).
gtttcgctggcataactct

SEQ ID NO: 120643 - DNA, 19 bp, Homo sapiens
  siRNA target sequence for KIFAP3 (NM_014970.2,2351-2369).
gagagtgagcagtacttgt

SEQ ID NO: 120644 - DNA, 19 bp, Homo sapiens
  siRNA target sequence for KIFAP3 (NM_014970.2,2353-2371).
gagtgagcagtacttgtat

SEQ ID NO: 120645 - DNA, 19 bp, Homo sapiens
  siRNA target sequence for KIFAP3 (NM_014970.2,2362-2380).
gtacttgtatggtgatgat

SEQ ID NO: 120646 - DNA, 19 bp, Homo sapiens
  siRNA target sequence for KIFAP3 (NM_014970.2,2434-2452).
ctacaactcagatggatta

SEQ ID NO: 120647 - DNA, 19 bp, Homo sapiens
  siRNA target sequence for KIFAP3 (NM_014970.2,2437-2455).
caactcagatggattaatt

SEQ ID NO: 120648 - DNA, 19 bp, Homo sapiens
  siRNA target sequence for KIFAP3 (NM_014970.2,2469-2487).
ccataagtcccgatttctt

SEQ ID NO: 120649 - DNA, 19 bp, Homo sapiens
  siRNA target sequence for KIFAP3 (NM_014970.2,2477-2495).
cccgatttcttcaatgatt

SEQ ID NO: 120650 - DNA, 19 bp, Homo sapiens
  siRNA target sequence for KIFAP3 (NM_014970.2,2478-2496).
ccgatttcttcaatgatta

SEQ ID NO: 120651 - DNA, 19 bp, Homo sapiens
  siRNA target sequence for KIFAP3 (NM_014970.2,2516-2534).
gttgttgggcagcattcat

SEQ ID NO: 120652 - DNA, 19 bp, Homo sapiens
  siRNA target sequence for KIFAP3 (NM_014970.2,2566-2584).
ccaaccagttggcattctt

SEQ ID NO: 120653 - DNA, 19 bp, Homo sapiens
  siRNA target sequence for KIFAP3 (NM_014970.2,2613-2631).
gccctgatgaaccttacta

SEQ ID NO: 120654 - DNA, 19 bp, Homo sapiens
  siRNA target sequence for KIFAP3 (NM_014970.2,2616-2634).
ctgatgaaccttactacta

SEQ ID NO: 120655 - DNA, 19 bp, Homo sapiens
  siRNA target sequence for MAPK8IP1 (NM_005456.2,1780-1798).
gtgtctttcctgcctatta

SEQ ID NO: 120656 - DNA, 19 bp, Homo sapiens
  siRNA target sequence for MAPK8IP2 (NM_012324.2,193-211).
gacataagcctggaagaat

SEQ ID NO: 120657 - DNA, 19 bp, Homo sapiens
  siRNA target sequence for MAPK8IP2 (NM_012324.2,195-213).
cataagcctggaagaattt

SEQ ID NO: 120658 - DNA, 19 bp, Homo sapiens
  siRNA target sequence for MAPK8IP2 (NM_012324.2,332-350).
gctccttccaggatgactt

SEQ ID NO: 120659 - DNA, 19 bp, Homo sapiens
  siRNA target sequence for MAPK8IP2 (NM_012324.2,363-381).
gatgatcgatgacaatgaa

SEQ ID NO: 120660 - DNA, 19 bp, Homo sapiens
  siRNA target sequence for MAPK8IP2 (NM_012324.2,1177-1195).
ctggtgagccgcatgatct

SEQ ID NO: 120661 - DNA, 19 bp, Homo sapiens
  siRNA target sequence for MAPK8IP2 (NM_012324.2,2039-2057).
ggttccgtggcttcaacat

SEQ ID NO: 120662 - DNA, 19 bp, Homo sapiens
  siRNA target sequence for MAPK8IP2 (NM_012324.2,2064-2082).
gggggagcgcggtgtgttt

SEQ ID NO: 120663 - DNA, 19 bp, Homo sapiens
  siRNA target sequence for MAPK8IP2 (NM_012324.2,2363-2381).
gccatttcttccagatgaa

SEQ ID NO: 120664 - DNA, 19 bp, Homo sapiens
  siRNA target sequence for MAPK8IP2 (NM_012324.2,2408-2426).
cccgcaacagctgctattt

SEQ ID NO: 120665 - DNA, 19 bp, Homo sapiens
  siRNA target sequence for MAPK8IP2 (NM_012324.2,2564-2582).
gccccacggaggacatcta

SEQ ID NO: 120666 - DNA, 19 bp, Homo sapiens
  siRNA target sequence for MAPK8IP3 (NM_015133.1,411-429).
gctgaaggccaagaactat

SEQ ID NO: 120667 - DNA, 19 bp, Homo sapiens
  siRNA target sequence for MAPK8IP3 (NM_015133.1,423-441).
gaactatgccgatcagatt

SEQ ID NO: 120668 - DNA, 19 bp, Homo sapiens
  siRNA target sequence for MAPK8IP3 (NM_015133.1,944-962).
gccgcaacatggaagtaca

SEQ ID NO: 120669 - DNA, 19 bp, Homo sapiens
  siRNA target sequence for MAPK8IP3 (NM_015133.1,975-993).
gatgcgcaacgtcagtata

SEQ ID NO: 120670 - DNA, 19 bp, Homo sapiens
  siRNA target sequence for MAPK8IP3 (NM_015133.1,1016-1034).
ggtctgatgttcaagacat

SEQ ID NO: 120671 - DNA, 19 bp, Homo sapiens
  siRNA target sequence for MAPK8IP3 (NM_015133.1,1017-1035).
gtctgatgttcaagacatt

SEQ ID NO: 120672 - DNA, 19 bp, Homo sapiens
  siRNA target sequence for MAPK8IP3 (NM_015133.1,1298-1316).
ccaaaaacgccttgaatgt

SEQ ID NO: 120673 - DNA, 19 bp, Homo sapiens
  siRNA target sequence for MAPK8IP3 (NM_015133.1,1393-1411).
gctaagcaggccaaagtca

SEQ ID NO: 120674 - DNA, 19 bp, Homo sapiens
  siRNA target sequence for MAPK8IP3 (NM_015133.1,1394-1412).
ctaagcaggccaaagtcaa

SEQ ID NO: 120675 - DNA, 19 bp, Homo sapiens
  siRNA target sequence for MAPK8IP3 (NM_015133.1,1481-1499).
gccgtgaacccaaagaaga

SEQ ID NO: 120676 - DNA, 19 bp, Homo sapiens
  siRNA target sequence for MAPK8IP3 (NM_015133.1,1526-1544).
gtacagaatcggacaaaat

SEQ ID NO: 120677 - DNA, 19 bp, Homo sapiens
  siRNA target sequence for MAPK8IP3 (NM_015133.1,1648-1666).
cggtggactgagatgatca

SEQ ID NO: 120678 - DNA, 19 bp, Homo sapiens
  siRNA target sequence for MAPK8IP3 (NM_015133.1,2044-2062).
gaggacacgcggatgaaga

SEQ ID NO: 120679 - DNA, 19 bp, Homo sapiens
  siRNA target sequence for MAPK8IP3 (NM_015133.1,3093-3111).
gtgggatctgagcaactat

SEQ ID NO: 120680 - DNA, 19 bp, Homo sapiens
  siRNA target sequence for MAPK8IP3 (NM_015133.1,3095-3113).
gggatctgagcaactatca

SEQ ID NO: 120681 - DNA, 19 bp, Homo sapiens
  siRNA target sequence for MAPK8IP3 (NM_015133.1,3104-3122).
gcaactatcacctaatgga

SEQ ID NO: 120682 - DNA, 19 bp, Homo sapiens
  siRNA target sequence for MAPK8IP3 (NM_015133.1,3568-3586).
gggctccgagccaataaga

SEQ ID NO: 120683 - DNA, 19 bp, Homo sapiens
  siRNA target sequence for MAPK8IP3 (NM_015133.1,3570-3588).
gctccgagccaataagaca

SEQ ID NO: 120684 - DNA, 19 bp, Homo sapiens
  siRNA target sequence for MAPK8IP3 (NM_015133.1,3571-3589).
ctccgagccaataagacat

SEQ ID NO: 120685 - DNA, 19 bp, Homo sapiens
  siRNA target sequence for MAPK8IP3 (NM_015133.1,3724-3742).
cgcgatgccgtgaagttct

SEQ ID NO: 120686 - DNA, 19 bp, Homo sapiens
  siRNA target sequence for MAPK8IP3 (NM_015133.1,3725-3743).
gcgatgccgtgaagttctt

SEQ ID NO: 120687 - DNA, 19 bp, Homo sapiens
  siRNA target sequence for MAPK8IP3 (NM_015133.1,3726-3744).
cgatgccgtgaagttcttt

SEQ ID NO: 120688 - DNA, 19 bp, Homo sapiens
  siRNA target sequence for MAPK8IP3 (NM_015133.1,3980-3998).
cagagcgcagtcacatcat

SEQ ID NO: 120689 - DNA, 19 bp, Homo sapiens
  siRNA target sequence for MAPK8IP3 (NM_033392.2,1343-1361).
cagtgcgcgatgatttctt

SEQ ID NO: 120690 - DNA, 19 bp, Homo sapiens
  siRNA target sequence for MAPK8IP3 (NM_033392.2,3339-3357).
gcagatagagaagtcattt

SEQ ID NO: 120691 - DNA, 19 bp, Homo sapiens
  siRNA target sequence for TRIM2 (NM_015271.2,224-242).
cctggaacggtacaagaat

SEQ ID NO: 120692 - DNA, 19 bp, Homo sapiens
  siRNA target sequence for TRIM2 (NM_015271.2,280-298).
ggtgcctgcagaactacat

SEQ ID NO: 120693 - DNA, 19 bp, Homo sapiens
  siRNA target sequence for TRIM2 (NM_015271.2,281-299).
gtgcctgcagaactacatt

SEQ ID NO: 120694 - DNA, 19 bp, Homo sapiens
  siRNA target sequence for TRIM2 (NM_015271.2,373-391).
cgctccagaacaatttctt

SEQ ID NO: 120695 - DNA, 19 bp, Homo sapiens
  siRNA target sequence for TRIM2 (NM_015271.2,671-689).
gctcccagaaatagattct

SEQ ID NO: 120696 - DNA, 19 bp, Homo sapiens
  siRNA target sequence for TRIM2 (NM_015271.2,717-735).
catcagttaaccaaccaaa

SEQ ID NO: 120697 - DNA, 19 bp, Homo sapiens
  siRNA target sequence for TRIM2 (NM_015271.2,742-760).
gcatcgtggatgacattca

SEQ ID NO: 120698 - DNA, 19 bp, Homo sapiens
  siRNA target sequence for TRIM2 (NM_015271.2,799-817).
gcaagagtgtgctgcttat

SEQ ID NO: 120699 - DNA, 19 bp, Homo sapiens
  siRNA target sequence for TRIM2 (NM_015271.2,805-823).
gtgtgctgcttatggaatt

SEQ ID NO: 120700 - DNA, 19 bp, Homo sapiens
  siRNA target sequence for TRIM2 (NM_015271.2,1085-1103).
caacctcgggacgatctta

SEQ ID NO: 120701 - DNA, 19 bp, Homo sapiens
  siRNA target sequence for TRIM2 (NM_015271.2,1089-1107).
ctcgggacgatcttaacca

SEQ ID NO: 120702 - DNA, 19 bp, Homo sapiens
  siRNA target sequence for TRIM2 (NM_015271.2,1305-1323).
ggcacctatgagtttttgt

SEQ ID NO: 120703 - DNA, 19 bp, Homo sapiens
  siRNA target sequence for TRIM2 (NM_015271.2,1306-1324).
gcacctatgagtttttgta

SEQ ID NO: 120704 - DNA, 19 bp, Homo sapiens
  siRNA target sequence for TRIM2 (NM_015271.2,1384-1402).
gaggcagcccgtttaagct

SEQ ID NO: 120705 - DNA, 19 bp, Homo sapiens
  siRNA target sequence for TRIM2 (NM_015271.2,1446-1464).
gtgaagaggcgcgttaagt

SEQ ID NO: 120706 - DNA, 19 bp, Homo sapiens
  siRNA target sequence for TRIM2 (NM_015271.2,1517-1535).
gtacagcactggaaaacga

SEQ ID NO: 120707 - DNA, 19 bp, Homo sapiens
  siRNA target sequence for TRIM2 (NM_015271.2,1545-1563).
cccatcgaagacgatttga

SEQ ID NO: 120708 - DNA, 19 bp, Homo sapiens
  siRNA target sequence for TRIM2 (NM_015271.2,1546-1564).
ccatcgaagacgatttgat

SEQ ID NO: 120709 - DNA, 19 bp, Homo sapiens
  siRNA target sequence for TRIM2 (NM_015271.2,1550-1568).
cgaagacgatttgatcttt

SEQ ID NO: 120710 - DNA, 19 bp, Homo sapiens
  siRNA target sequence for TRIM2 (NM_015271.2,1565-1583).
ctttcgagtgggtaccaaa

SEQ ID NO: 120711 - DNA, 19 bp, Homo sapiens
  siRNA target sequence for TRIM2 (NM_015271.2,1569-1587).
cgagtgggtaccaaaggaa

SEQ ID NO: 120712 - DNA, 19 bp, Homo sapiens
  siRNA target sequence for TRIM2 (NM_015271.2,1616-1634).
gggggtagctgcatctaca

SEQ ID NO: 120713 - DNA, 19 bp, Homo sapiens
  siRNA target sequence for TRIM2 (NM_015271.2,1617-1635).
ggggtagctgcatctacaa

SEQ ID NO: 120714 - DNA, 19 bp, Homo sapiens
  siRNA target sequence for TRIM2 (NM_015271.2,1630-1648).
ctacaaatggaaagatatt

SEQ ID NO: 120715 - DNA, 19 bp, Homo sapiens
  siRNA target sequence for TRIM2 (NM_015271.2,1773-1791).
cccagtggggacataatca

SEQ ID NO: 120716 - DNA, 19 bp, Homo sapiens
  siRNA target sequence for TRIM2 (NM_015271.2,1896-1914).
gaccgcaatgggcacatta

SEQ ID NO: 120717 - DNA, 19 bp, Homo sapiens
  siRNA target sequence for TRIM2 (NM_015271.2,1898-1916).
ccgcaatgggcacattatt

SEQ ID NO: 120718 - DNA, 19 bp, Homo sapiens
  siRNA target sequence for TRIM2 (NM_015271.2,1900-1918).
gcaatgggcacattattgt

SEQ ID NO: 120719 - DNA, 19 bp, Homo sapiens
  siRNA target sequence for TRIM2 (NM_015271.2,1956-1974).
ccaaacgggaaaatagtca

SEQ ID NO: 120720 - DNA, 19 bp, Homo sapiens
  siRNA target sequence for TRIM2 (NM_015271.2,1979-1997).
gtttggtagccgaggaaat

SEQ ID NO: 120721 - DNA, 19 bp, Homo sapiens
  siRNA target sequence for TRIM2 (NM_015271.2,2041-2059).
gcaataatgagattattat

SEQ ID NO: 120722 - DNA, 19 bp, Homo sapiens
  siRNA target sequence for TRIM2 (NM_015271.2,2114-2132).
gttgaagtttggctcaaat

SEQ ID NO: 120723 - DNA, 19 bp, Homo sapiens
  siRNA target sequence for TRIM2 (NM_015271.2,2235-2253).
gatgggagtggatcatttt

SEQ ID NO: 120724 - DNA, 19 bp, Homo sapiens
  siRNA target sequence for TRIM2 (NM_015271.2,2295-2313).
caaggcctggccctaactt

SEQ ID NO: 120725 - DNA, 19 bp, Homo sapiens
  siRNA target sequence for TRIM2 (NM_015271.2,2330-2348).
ggttgcagactctggaaat

SEQ ID NO: 120726 - DNA, 19 bp, Homo sapiens
  siRNA target sequence for TRIM2 (NM_015271.2,2353-2371).
gtttcaaagtctatcgata

SEQ ID NO: 120727 - DNA, 19 bp, Homo sapiens
  siRNA target sequence for TRIM2 (NM_015271.2,2357-2375).
caaagtctatcgatactta

SEQ ID NO: 120728 - DNA, 19 bp, Homo sapiens
  siRNA target sequence for TRIM2 (NM_015271.2,2361-2379).
gtctatcgatacttacagt

SEQ ID NO: 120729 - DNA, 19 bp, Homo sapiens
  siRNA target sequence for TNKS1BP1 (NM_033396.1,861-879).
cccgcctcacctttaacca

SEQ ID NO: 120730 - DNA, 19 bp, Homo sapiens
  siRNA target sequence for TNKS1BP1 (NM_033396.1,1089-1107).
cggagctacctgctgatat

SEQ ID NO: 120731 - DNA, 19 bp, Homo sapiens
  siRNA target sequence for TNKS1BP1 (NM_033396.1,1217-1235).
cttcacccgcctgataaga

SEQ ID NO: 120732 - DNA, 19 bp, Homo sapiens
  siRNA target sequence for TNKS1BP1 (NM_033396.1,1220-1238).
cacccgcctgataagagtt

SEQ ID NO: 120733 - DNA, 19 bp, Homo sapiens
  siRNA target sequence for TNKS1BP1 (NM_033396.1,1505-1523).
ctcactcggacgtttccat

SEQ ID NO: 120734 - DNA, 19 bp, Homo sapiens
  siRNA target sequence for TNKS1BP1 (NM_033396.1,1576-1594).
ggttcagcgccgattctct

SEQ ID NO: 120735 - DNA, 19 bp, Homo sapiens
  siRNA target sequence for TNKS1BP1 (NM_033396.1,1706-1724).
gagtccaactggagcttat

SEQ ID NO: 120736 - DNA, 19 bp, Homo sapiens
  siRNA target sequence for TNKS1BP1 (NM_033396.1,2297-2315).
gaggctcaagacttgtgta

SEQ ID NO: 120737 - DNA, 19 bp, Homo sapiens
  siRNA target sequence for TNKS1BP1 (NM_033396.1,2721-2739).
gcagccaagaccagagtaa

SEQ ID NO: 120738 - DNA, 19 bp, Homo sapiens
  siRNA target sequence for TNKS1BP1 (NM_033396.1,2722-2740).
cagccaagaccagagtaaa

SEQ ID NO: 120739 - DNA, 19 bp, Homo sapiens
  siRNA target sequence for TNKS1BP1 (NM_033396.1,2932-2950).
ctacagtagtcgagatgta

SEQ ID NO: 120740 - DNA, 19 bp, Homo sapiens
  siRNA target sequence for TNKS1BP1 (NM_033396.1,3164-3182).
gggaagagcgcttggataa

SEQ ID NO: 120741 - DNA, 19 bp, Homo sapiens
  siRNA target sequence for TNKS1BP1 (NM_033396.1,3220-3238).
cgcccaggacagaagcttt

SEQ ID NO: 120742 - DNA, 19 bp, Homo sapiens
  siRNA target sequence for TNKS1BP1 (NM_033396.1,3560-3578).
ggctgggtcggtgagttta

SEQ ID NO: 120743 - DNA, 19 bp, Homo sapiens
  siRNA target sequence for TNKS1BP1 (NM_033396.1,3660-3678).
gtgagaggagctatcagtt

SEQ ID NO: 120744 - DNA, 19 bp, Homo sapiens
  siRNA target sequence for TNKS1BP1 (NM_033396.1,3982-4000).
ggactggacttctgatgtt

SEQ ID NO: 120745 - DNA, 19 bp, Homo sapiens
  siRNA target sequence for TNKS1BP1 (NM_033396.1,3983-4001).
gactggacttctgatgtta

SEQ ID NO: 120746 - DNA, 19 bp, Homo sapiens
  siRNA target sequence for TNKS1BP1 (NM_033396.1,4100-4118).
gccggagagttccttaaat

SEQ ID NO: 120747 - DNA, 19 bp, Homo sapiens
  siRNA target sequence for TNKS1BP1 (NM_033396.1,4102-4120).
cggagagttccttaaatca

SEQ ID NO: 120748 - DNA, 19 bp, Homo sapiens
  siRNA target sequence for TNKS1BP1 (NM_033396.1,4103-4121).
ggagagttccttaaatcaa

SEQ ID NO: 120749 - DNA, 19 bp, Homo sapiens
  siRNA target sequence for TNKS1BP1 (NM_033396.1,4231-4249).
gatggactggggtaacaat

SEQ ID NO: 120750 - DNA, 19 bp, Homo sapiens
  siRNA target sequence for TNKS1BP1 (NM_033396.1,5002-5020).
cctcgacagtgccatgtat

SEQ ID NO: 120751 - DNA, 19 bp, Homo sapiens
  siRNA target sequence for TNKS1BP1 (NM_033396.1,5223-5241).
gcaccaaggggctgaaagt

SEQ ID NO: 120752 - DNA, 19 bp, Homo sapiens
  siRNA target sequence for TNKS1BP1 (NM_033396.1,5353-5371).
cgcggtccagcgttcgaaa

SEQ ID NO: 120753 - DNA, 19 bp, Homo sapiens
  siRNA target sequence for TNKS1BP1 (NM_033396.1,5354-5372).
gcggtccagcgttcgaaat

SEQ ID NO: 120754 - DNA, 19 bp, Homo sapiens
  siRNA target sequence for TNKS1BP1 (NM_033396.1,5357-5375).
gtccagcgttcgaaatcct

SEQ ID NO: 120755 - DNA, 19 bp, Homo sapiens
  siRNA target sequence for TNKS1BP1 (NM_033396.1,5460-5478).
ggcttcaagccctgaaact

SEQ ID NO: 120756 - DNA, 19 bp, Homo sapiens
  siRNA target sequence for ARGBP2 (NM_003603.2,795-813).
cgaccaaacctacaagata

SEQ ID NO: 120757 - DNA, 19 bp, Homo sapiens
  siRNA target sequence for ARGBP2 (NM_003603.2,796-814).
gaccaaacctacaagataa

SEQ ID NO: 120758 - DNA, 19 bp, Homo sapiens
  siRNA target sequence for ARGBP2 (NM_003603.2,822-840).
ccaactcagagccagataa

SEQ ID NO: 120759 - DNA, 19 bp, Homo sapiens
  siRNA target sequence for ARGBP2 (NM_003603.2,864-882).
gccgtgagtcccatgagtt

SEQ ID NO: 120760 - DNA, 19 bp, Homo sapiens
  siRNA target sequence for ARGBP2 (NM_003603.2,865-883).
ccgtgagtcccatgagtta

SEQ ID NO: 120761 - DNA, 19 bp, Homo sapiens
  siRNA target sequence for ARGBP2 (NM_003603.2,867-885).
gtgagtcccatgagttact

SEQ ID NO: 120762 - DNA, 19 bp, Homo sapiens
  siRNA target sequence for ARGBP2 (NM_003603.2,869-887).
gagtcccatgagttactat

SEQ ID NO: 120763 - DNA, 19 bp, Homo sapiens
  siRNA target sequence for ARGBP2 (NM_003603.2,1172-1190).
gacgatgtttaagcaaatt

SEQ ID NO: 120764 - DNA, 19 bp, Homo sapiens
  siRNA target sequence for ARGBP2 (NM_003603.2,1174-1192).
cgatgtttaagcaaattca

SEQ ID NO: 120765 - DNA, 19 bp, Homo sapiens
  siRNA target sequence for ARGBP2 (NM_003603.2,1217-1235).
cacagacatgtataatact

SEQ ID NO: 120766 - DNA, 19 bp, Homo sapiens
  siRNA target sequence for ARGBP2 (NM_003603.2,1223-1241).
catgtataatactccttat

SEQ ID NO: 120767 - DNA, 19 bp, Homo sapiens
  siRNA target sequence for ARGBP2 (NM_003603.2,1226-1244).
gtataatactccttataca

SEQ ID NO: 120768 - DNA, 19 bp, Homo sapiens
  siRNA target sequence for ARGBP2 (NM_003603.2,1425-1443).
gatcggtcttcaacagaaa

SEQ ID NO: 120769 - DNA, 19 bp, Homo sapiens
  siRNA target sequence for ARGBP2 (NM_003603.2,1525-1543).
ctggcaagtcatcaattct

SEQ ID NO: 120770 - DNA, 19 bp, Homo sapiens
  siRNA target sequence for ARGBP2 (NM_003603.2,1567-1585).
gcataaatccagatgacat

SEQ ID NO: 120771 - DNA, 19 bp, Homo sapiens
  siRNA target sequence for ARGBP2 (NM_003603.2,1568-1586).
cataaatccagatgacata

SEQ ID NO: 120772 - DNA, 19 bp, Homo sapiens
  siRNA target sequence for ARGBP2 (NM_003603.2,1601-1619).
gccctggtataaattcttt

SEQ ID NO: 120773 - DNA, 19 bp, Homo sapiens
  siRNA target sequence for ARGBP2 (NM_003603.2,1661-1679).
ggactatgttcaagatcat

SEQ ID NO: 120774 - DNA, 19 bp, Homo sapiens
  siRNA target sequence for ARGBP2 (NM_003603.2,1694-1712).
caatgaggcctccttgtat

SEQ ID NO: 120775 - DNA, 19 bp, Homo sapiens
  siRNA target sequence for ARGBP2 (NM_003603.2,1815-1833).
cggggcttgggagatcaaa

SEQ ID NO: 120776 - DNA, 19 bp, Homo sapiens
  siRNA target sequence for ARGBP2 (NM_003603.2,1872-1890).
ggatcaagcaccactctta

SEQ ID NO: 120777 - DNA, 19 bp, Homo sapiens
  siRNA target sequence for ARGBP2 (NM_003603.2,1876-1894).
caagcaccactcttacaaa

SEQ ID NO: 120778 - DNA, 19 bp, Homo sapiens
  siRNA target sequence for ARGBP2 (NM_003603.2,1940-1958).
ccgtgagtcccctagaagt

SEQ ID NO: 120779 - DNA, 19 bp, Homo sapiens
  siRNA target sequence for ARGBP2 (NM_003603.2,1941-1959).
cgtgagtcccctagaagtt

SEQ ID NO: 120780 - DNA, 19 bp, Homo sapiens
  siRNA target sequence for ARGBP2 (NM_003603.2,1942-1960).
gtgagtcccctagaagtta

SEQ ID NO: 120781 - DNA, 19 bp, Homo sapiens
  siRNA target sequence for ARGBP2 (NM_003603.2,1944-1962).
gagtcccctagaagttact

SEQ ID NO: 120782 - DNA, 19 bp, Homo sapiens
  siRNA target sequence for ARGBP2 (NM_003603.2,1946-1964).
gtcccctagaagttactca

SEQ ID NO: 120783 - DNA, 19 bp, Homo sapiens
  siRNA target sequence for ARGBP2 (NM_003603.2,2037-2055).
gcaaaagctgtttatgatt

SEQ ID NO: 120784 - DNA, 19 bp, Homo sapiens
  siRNA target sequence for ARGBP2 (NM_003603.2,2164-2182).
gcatcttcccgatctcata

SEQ ID NO: 120785 - DNA, 19 bp, Homo sapiens
  siRNA target sequence for ARGBP2 (NM_003603.2,2168-2186).
cttcccgatctcatacgta

SEQ ID NO: 120786 - DNA, 19 bp, Homo sapiens
  siRNA target sequence for ARGBP2 (NM_003603.2,2173-2191).
cgatctcatacgtagagaa

SEQ ID NO: 120787 - DNA, 19 bp, Homo sapiens
  siRNA target sequence for ARGBP2 (NM_003603.2,2174-2192).
gatctcatacgtagagaaa

SEQ ID NO: 120788 - DNA, 19 bp, Homo sapiens
  siRNA target sequence for ARGBP2 (NM_003603.2,2259-2277).
gaagctatagccaaataca

SEQ ID NO: 120789 - DNA, 19 bp, Homo sapiens
  siRNA target sequence for ARGBP2 (NM_003603.2,2262-2280).
gctatagccaaatacaact

SEQ ID NO: 120790 - DNA, 19 bp, Homo sapiens
  siRNA target sequence for ARGBP2 (NM_003603.2,2263-2281).
ctatagccaaatacaactt

SEQ ID NO: 120791 - DNA, 19 bp, Homo sapiens
  siRNA target sequence for ARGBP2 (NM_003603.2,2453-2471).
ctaccctgaccctccaata

SEQ ID NO: 120792 - DNA, 19 bp, Homo sapiens
  siRNA target sequence for ARGBP2 (NM_003603.2,2474-2492).
ccacagctattctagtgat

SEQ ID NO: 120793 - DNA, 19 bp, Homo sapiens
  siRNA target sequence for ARGBP2 (NM_003603.2,2475-2493).
cacagctattctagtgata

SEQ ID NO: 120794 - DNA, 19 bp, Homo sapiens
  siRNA target sequence for ARGBP2 (NM_003603.2,2479-2497).
gctattctagtgataggat

SEQ ID NO: 120795 - DNA, 19 bp, Homo sapiens
  siRNA target sequence for ARGBP2 (NM_003603.2,2480-2498).
ctattctagtgataggatt

SEQ ID NO: 120796 - DNA, 19 bp, Homo sapiens
  siRNA target sequence for ARGBP2 (NM_003603.2,2499-2517).
cacagcttgagctcaaata

SEQ ID NO: 120797 - DNA, 19 bp, Homo sapiens
  siRNA target sequence for ARGBP2 (NM_003603.2,2568-2586).
ccgtttcaggctctgtata

SEQ ID NO: 120798 - DNA, 19 bp, Homo sapiens
  siRNA target sequence for ARGBP2 (NM_003603.2,2569-2587).
cgtttcaggctctgtataa

SEQ ID NO: 120799 - DNA, 19 bp, Homo sapiens
  siRNA target sequence for ARGBP2 (NM_003603.2,2576-2594).
ggctctgtataactatact

SEQ ID NO: 120800 - DNA, 19 bp, Homo sapiens
  siRNA target sequence for ARGBP2 (NM_003603.2,2704-2722).
gtactttccccggaaacta

SEQ ID NO: 120801 - DNA, 19 bp, Homo sapiens
  siRNA target sequence for ARGBP2 (NM_021069.1,1435-1453).
ggggatgatagcaaaatat

SEQ ID NO: 120802 - DNA, 19 bp, Homo sapiens
  siRNA target sequence for ARGBP2 (NM_021069.1,1437-1455).
ggatgatagcaaaatatgt

SEQ ID NO: 120803 - DNA, 19 bp, Homo sapiens
  siRNA target sequence for ARGBP2 (NM_021069.1,1491-1509).
cccctccagtgagttagat

SEQ ID NO: 120804 - DNA, 19 bp, Homo sapiens
  siRNA target sequence for ARGBP2 (NM_021069.1,1492-1510).
ccctccagtgagttagatt

SEQ ID NO: 120805 - DNA, 19 bp, Homo sapiens
  siRNA target sequence for ARGBP2 (NM_021069.1,1493-1511).
cctccagtgagttagatta

SEQ ID NO: 120806 - DNA, 19 bp, Homo sapiens
  siRNA target sequence for ARGBP2 (NM_021069.1,1551-1569).
ctcaccaagagccattagt

SEQ ID NO: 120807 - DNA, 19 bp, Homo sapiens
  siRNA target sequence for ARGBP2 (NM_021069.1,1553-1571).
caccaagagccattagttt

SEQ ID NO: 120808 - DNA, 19 bp, Homo sapiens
  siRNA target sequence for ARGBP2 (NM_021069.1,1594-1612).
cggcaaaacgcagaaatct

SEQ ID NO: 120809 - DNA, 19 bp, Homo sapiens
  siRNA target sequence for ARGBP2 (NM_021069.1,1658-1676).
gctgtgacgatctcctaaa

SEQ ID NO: 120810 - DNA, 19 bp, Homo sapiens
  siRNA target sequence for ARGBP2 (NM_021069.1,1661-1679).
gtgacgatctcctaaacga

SEQ ID NO: 120811 - DNA, 19 bp, Homo sapiens
  siRNA target sequence for ARGBP2 (NM_021069.1,1722-1740).
catgggctccctgttatgt

SEQ ID NO: 120812 - DNA, 19 bp, Homo sapiens
  siRNA target sequence for ARGBP2 (NM_021069.1,1801-1819).
cgcagtaacggcagatcaa

SEQ ID NO: 120813 - DNA, 19 bp, Homo sapiens
  siRNA target sequence for ARGBP2 (NM_021069.1,2033-2051).
cacgcatctccgaattcga

SEQ ID NO: 120814 - DNA, 19 bp, Homo sapiens
  siRNA target sequence for ARGBP2 (NM_021069.1,2035-2053).
cgcatctccgaattcgaaa

SEQ ID NO: 120815 - DNA, 19 bp, Homo sapiens
  siRNA target sequence for ARGBP2 (NM_021069.1,2036-2054).
gcatctccgaattcgaaaa

SEQ ID NO: 120816 - DNA, 19 bp, Homo sapiens
  siRNA target sequence for ARGBP2 (NM_021069.1,2115-2133).
cctagaaccaccgcaaaat

SEQ ID NO: 120817 - DNA, 19 bp, Homo sapiens
  siRNA target sequence for ARGBP2 (NM_021069.1,2144-2162).
ccaagaggcggttttccat

SEQ ID NO: 120818 - DNA, 19 bp, Homo sapiens
  siRNA target sequence for ARGBP2 (NM_021069.1,2145-2163).
caagaggcggttttccatt

SEQ ID NO: 120819 - DNA, 19 bp, Homo sapiens
  siRNA target sequence for ARGBP2 (NM_021069.1,2213-2231).
ggcgaggctgccagtctaa

SEQ ID NO: 120820 - DNA, 19 bp, Homo sapiens
  siRNA target sequence for ARGBP2 (NM_021069.1,2234-2252).
ccctggtgcccattcacat

SEQ ID NO: 120821 - DNA, 19 bp, Homo sapiens
  siRNA target sequence for ARGBP2 (NM_021069.1,2235-2253).
cctggtgcccattcacatt

SEQ ID NO: 120822 - DNA, 19 bp, Homo sapiens
  siRNA target sequence for ARGBP2 (NM_021069.1,2324-2342).
ccgaccacagtgactacat

SEQ ID NO: 120823 - DNA, 19 bp, Homo sapiens
  siRNA target sequence for ARGBP2 (NM_021069.1,2383-2401).
gatcacttttccttcacat

SEQ ID NO: 120824 - DNA, 19 bp, Homo sapiens
  siRNA target sequence for ARGBP2 (NM_021069.1,2397-2415).
cacatcctccgaaagcttt

SEQ ID NO: 120825 - DNA, 19 bp, Homo sapiens
  siRNA target sequence for ARGBP2 (NM_021069.1,2496-2514).
ggcctcctacactcgattt

SEQ ID NO: 120826 - DNA, 19 bp, Homo sapiens
  siRNA target sequence for ARGBP2 (NM_021069.1,2497-2515).
gcctcctacactcgattta

SEQ ID NO: 120827 - DNA, 19 bp, Homo sapiens
  siRNA target sequence for ARGBP2 (NM_021069.1,2507-2525).
ctcgatttaccacaatgtt

SEQ ID NO: 120828 - DNA, 19 bp, Homo sapiens
  siRNA target sequence for ARGBP2 (NM_021069.1,2509-2527).
cgatttaccacaatgttaa

SEQ ID NO: 120829 - DNA, 19 bp, Homo sapiens
  siRNA target sequence for ARGBP2 (NM_021069.1,2719-2737).
gacatctgtgaccaaatta

SEQ ID NO: 120830 - DNA, 19 bp, Homo sapiens
  siRNA target sequence for ARGBP2 (NM_021069.1,2880-2898).
gcctcccgatggtgctatt

SEQ ID NO: 120831 - DNA, 19 bp, Homo sapiens
  siRNA target sequence for ARGBP2 (NM_021069.1,2882-2900).
ctcccgatggtgctattca

SEQ ID NO: 120832 - DNA, 19 bp, Homo sapiens
  siRNA target sequence for ARGBP2 (NM_021069.1,2886-2904).
cgatggtgctattcattgt

SEQ ID NO: 120833 - DNA, 19 bp, Homo sapiens
  siRNA target sequence for ARGBP2 (NM_021069.1,2903-2921).
gtccaccctaccagaatga

SEQ ID NO: 120834 - DNA, 19 bp, Homo sapiens
  siRNA target sequence for ARGBP2 (NM_021069.1,2905-2923).
ccaccctaccagaatgact

SEQ ID NO: 120835 - DNA, 19 bp, Homo sapiens
  siRNA target sequence for ARGBP2 (NM_021069.1,2937-2955).
ccgcagtgcctctttccaa

SEQ ID NO: 120836 - DNA, 19 bp, Homo sapiens
  siRNA target sequence for BAIAP2 (NM_006340.1,120-138).
gcaccggctcacggaaaat

SEQ ID NO: 120837 - DNA, 19 bp, Homo sapiens
  siRNA target sequence for BAIAP2 (NM_006340.1,124-142).
cggctcacggaaaatgtct

SEQ ID NO: 120838 - DNA, 19 bp, Homo sapiens
  siRNA target sequence for BAIAP2 (NM_006340.1,127-145).
ctcacggaaaatgtctata

SEQ ID NO: 120839 - DNA, 19 bp, Homo sapiens
  siRNA target sequence for BAIAP2 (NM_006340.1,169-187).
cctagcctccggaacttca

SEQ ID NO: 120840 - DNA, 19 bp, Homo sapiens
  siRNA target sequence for BAIAP2 (NM_006340.1,170-188).
ctagcctccggaacttcat

SEQ ID NO: 120841 - DNA, 19 bp, Homo sapiens
  siRNA target sequence for BAIAP2 (NM_006340.1,288-306).
gagccagggctccaaagaa

SEQ ID NO: 120842 - DNA, 19 bp, Homo sapiens
  siRNA target sequence for BAIAP2 (NM_006340.1,290-308).
gccagggctccaaagaact

SEQ ID NO: 120843 - DNA, 19 bp, Homo sapiens
  siRNA target sequence for BAIAP2 (NM_006340.1,446-464).
ctgcgctgaagaaatacca

SEQ ID NO: 120844 - DNA, 19 bp, Homo sapiens
  siRNA target sequence for BAIAP2 (NM_006340.1,545-563).
gcaagaatcctcagaagta

SEQ ID NO: 120845 - DNA, 19 bp, Homo sapiens
  siRNA target sequence for BAIAP2 (NM_006340.1,628-646).
gtgtccgacggctacaaga

SEQ ID NO: 120846 - DNA, 19 bp, Homo sapiens
  siRNA target sequence for CDC42EP3 (NM_006449.3,1147-1165).
gtctttggagatatttcct

SEQ ID NO: 120847 - DNA, 19 bp, Homo sapiens
  siRNA target sequence for CDC42EP3 (NM_006449.3,1176-1194).
gaactacgagcttttacct

SEQ ID NO: 120848 - DNA, 19 bp, Homo sapiens
  siRNA target sequence for CDC42EP3 (NM_006449.3,1221-1239).
ccagttccctgggcataat

SEQ ID NO: 120849 - DNA, 19 bp, Homo sapiens
  siRNA target sequence for CDC42EP3 (NM_006449.3,1290-1308).
ctccccggtgctcaaaaat

SEQ ID NO: 120850 - DNA, 19 bp, Homo sapiens
  siRNA target sequence for CDC42EP3 (NM_006449.3,1334-1352).
gatcccaagctctcatgtt

SEQ ID NO: 120851 - DNA, 19 bp, Homo sapiens
  siRNA target sequence for CDC42EP3 (NM_006449.3,1345-1363).
ctcatgttgcccttattgt

SEQ ID NO: 120852 - DNA, 19 bp, Homo sapiens
  siRNA target sequence for CDC42EP3 (NM_006449.3,1347-1365).
catgttgcccttattgtca

SEQ ID NO: 120853 - DNA, 19 bp, Homo sapiens
  siRNA target sequence for CDC42EP3 (NM_006449.3,1431-1449).
gcccgtcatggaggaaaaa

SEQ ID NO: 120854 - DNA, 19 bp, Homo sapiens
  siRNA target sequence for CDC42EP3 (NM_006449.3,1590-1608).
gccagccgaggacatgttt

SEQ ID NO: 120855 - DNA, 19 bp, Homo sapiens
  siRNA target sequence for CDC42EP3 (NM_006449.3,1619-1637).
ccccatgcgagctcatcaa

SEQ ID NO: 120856 - DNA, 19 bp, Homo sapiens
  siRNA target sequence for CDC42EP3 (NM_006449.3,1702-1720).
gatcttgggccctcacttt

SEQ ID NO: 120857 - DNA, 19 bp, Homo sapiens
  siRNA target sequence for CDC42EP3 (NM_006449.3,1723-1741).
gatgaggtgctgaatgtaa

SEQ ID NO: 120858 - DNA, 19 bp, Homo sapiens
  siRNA target sequence for CDC42EP3 (NM_006449.3,1731-1749).
gctgaatgtaatggataaa

SEQ ID NO: 120859 - DNA, 19 bp, Homo sapiens
  siRNA target sequence for AF3P21 (NM_016453.2,303-321).
ccatcgaggctgtacacaa

SEQ ID NO: 120860 - DNA, 19 bp, Homo sapiens
  siRNA target sequence for AF3P21 (NM_016453.2,1065-1083).
ctggcctgagccacgaatt

SEQ ID NO: 120861 - DNA, 19 bp, Homo sapiens
  siRNA target sequence for AF3P21 (NM_016453.2,1067-1085).
ggcctgagccacgaattat

SEQ ID NO: 120862 - DNA, 19 bp, Homo sapiens
  siRNA target sequence for AF3P21 (NM_016453.2,1090-1108).
ggtggccatcggcatcata

SEQ ID NO: 120863 - DNA, 19 bp, Homo sapiens
  siRNA target sequence for AF3P21 (NM_016453.2,1288-1306).
gcgcagttgggcactatat

SEQ ID NO: 120864 - DNA, 19 bp, Homo sapiens
  siRNA target sequence for AF3P21 (NM_016453.2,1290-1308).
gcagttgggcactatatga

SEQ ID NO: 120865 - DNA, 19 bp, Homo sapiens
  siRNA target sequence for AF3P21 (NM_016453.2,1369-1387).
ccctgaagtttgcaagaaa

SEQ ID NO: 120866 - DNA, 19 bp, Homo sapiens
  siRNA target sequence for AF3P21 (NM_016453.2,1586-1604).
caccagaaactctgttact

SEQ ID NO: 120867 - DNA, 19 bp, Homo sapiens
  siRNA target sequence for AF3P21 (NM_016453.2,1827-1845).
gcaaacacgccaatgtcaa

SEQ ID NO: 120868 - DNA, 19 bp, Homo sapiens
  siRNA target sequence for AF3P21 (NM_016453.2,1832-1850).
cacgccaatgtcaagatct

SEQ ID NO: 120869 - DNA, 19 bp, Homo sapiens
  siRNA target sequence for AF3P21 (NM_016453.2,1889-1907).
gaccctgtgcgcatcttca

SEQ ID NO: 120870 - DNA, 19 bp, Homo sapiens
  siRNA target sequence for AF3P21 (NM_016453.2,1891-1909).
ccctgtgcgcatcttcaaa

SEQ ID NO: 120871 - DNA, 19 bp, Homo sapiens
  siRNA target sequence for AF3P21 (NM_016453.2,2194-2212).
ccagatggaccgcatgatt

SEQ ID NO: 120872 - DNA, 19 bp, Homo sapiens
  siRNA target sequence for DLG1 (NM_004087.1,192-210).
ccggtccggaagcaagata

SEQ ID NO: 120873 - DNA, 19 bp, Homo sapiens
  siRNA target sequence for DLG1 (NM_004087.1,217-235).
gagcattgcaccttttgga

SEQ ID NO: 120874 - DNA, 19 bp, Homo sapiens
  siRNA target sequence for DLG1 (NM_004087.1,275-293).
gctcagaagttccatagaa

SEQ ID NO: 120875 - DNA, 19 bp, Homo sapiens
  siRNA target sequence for DLG1 (NM_004087.1,286-304).
ccatagaacgggttattaa

SEQ ID NO: 120876 - DNA, 19 bp, Homo sapiens
  siRNA target sequence for DLG1 (NM_004087.1,323-341).
ctttcaggctttaatagat

SEQ ID NO: 120877 - DNA, 19 bp, Homo sapiens
  siRNA target sequence for DLG1 (NM_004087.1,362-380).
gaccttactggataatcca

SEQ ID NO: 120878 - DNA, 19 bp, Homo sapiens
  siRNA target sequence for DLG1 (NM_004087.1,364-382).
ccttactggataatccaaa

SEQ ID NO: 120879 - DNA, 19 bp, Homo sapiens
  siRNA target sequence for DLG1 (NM_004087.1,365-383).
cttactggataatccaaaa

SEQ ID NO: 120880 - DNA, 19 bp, Homo sapiens
  siRNA target sequence for DLG1 (NM_004087.1,371-389).
ggataatccaaaatgtata

SEQ ID NO: 120881 - DNA, 19 bp, Homo sapiens
  siRNA target sequence for DLG1 (NM_004087.1,401-419).
gccgtctgaaccaattcaa

SEQ ID NO: 120882 - DNA, 19 bp, Homo sapiens
  siRNA target sequence for DLG1 (NM_004087.1,411-429).
ccaattcaacctgtgaata

SEQ ID NO: 120883 - DNA, 19 bp, Homo sapiens
  siRNA target sequence for DLG1 (NM_004087.1,546-564).
catatttccccacaaatca

SEQ ID NO: 120884 - DNA, 19 bp, Homo sapiens
  siRNA target sequence for DLG1 (NM_004087.1,554-572).
cccacaaatcacaaatgaa

SEQ ID NO: 120885 - DNA, 19 bp, Homo sapiens
  siRNA target sequence for DLG1 (NM_004087.1,575-593).
gataggtccagaattggtt

SEQ ID NO: 120886 - DNA, 19 bp, Homo sapiens
  siRNA target sequence for DLG1 (NM_004087.1,597-615).
gtctcagagaagaacttat

SEQ ID NO: 120887 - DNA, 19 bp, Homo sapiens
  siRNA target sequence for DLG1 (NM_004087.1,611-629).
cttatcagagattgagaat

SEQ ID NO: 120888 - DNA, 19 bp, Homo sapiens
  siRNA target sequence for DLG1 (NM_004087.1,786-804).
gtactggtcaacacagata

SEQ ID NO: 120889 - DNA, 19 bp, Homo sapiens
  siRNA target sequence for DLG1 (NM_004087.1,809-827).
ggaaacaccaacttacgtt

SEQ ID NO: 120890 - DNA, 19 bp, Homo sapiens
  siRNA target sequence for DLG1 (NM_004087.1,810-828).
gaaacaccaacttacgtta

SEQ ID NO: 120891 - DNA, 19 bp, Homo sapiens
  siRNA target sequence for DLG1 (NM_004087.1,991-1009).
gaagattgcgggtcaatga

SEQ ID NO: 120892 - DNA, 19 bp, Homo sapiens
  siRNA target sequence for DLG1 (NM_004087.1,998-1016).
gcgggtcaatgactgtata

SEQ ID NO: 120893 - DNA, 19 bp, Homo sapiens
  siRNA target sequence for DLG1 (NM_004087.1,999-1017).
cgggtcaatgactgtatat

SEQ ID NO: 120894 - DNA, 19 bp, Homo sapiens
  siRNA target sequence for DLG1 (NM_004087.1,1038-1056).
gttcgtgatgtaacacata

SEQ ID NO: 120895 - DNA, 19 bp, Homo sapiens
  siRNA target sequence for DLG1 (NM_004087.1,1088-1106).
gtctattgtacgcttgtat

SEQ ID NO: 120896 - DNA, 19 bp, Homo sapiens
  siRNA target sequence for DLG1 (NM_004087.1,1255-1273).
gaggtgcagcacataagga

SEQ ID NO: 120897 - DNA, 19 bp, Homo sapiens
  siRNA target sequence for DLG1 (NM_004087.1,1305-1323).
gcagtgaataacgtatgtt

SEQ ID NO: 120898 - DNA, 19 bp, Homo sapiens
  siRNA target sequence for DLG1 (NM_004087.1,1306-1324).
cagtgaataacgtatgttt

SEQ ID NO: 120899 - DNA, 19 bp, Homo sapiens
  siRNA target sequence for DLG1 (NM_004087.1,1310-1328).
gaataacgtatgtttagaa

SEQ ID NO: 120900 - DNA, 19 bp, Homo sapiens
  siRNA target sequence for DLG1 (NM_004087.1,1396-1414).
caaaacccacaagtatgta

SEQ ID NO: 120901 - DNA, 19 bp, Homo sapiens
  siRNA target sequence for DLG1 (NM_004087.1,1426-1444).
gctatgcaccacctgatat

SEQ ID NO: 120902 - DNA, 19 bp, Homo sapiens
  siRNA target sequence for DLG1 (NM_004087.1,1437-1455).
cctgatatcaccaactctt

SEQ ID NO: 120903 - DNA, 19 bp, Homo sapiens
  siRNA target sequence for DLG1 (NM_004087.1,1459-1477).
ctcagcctgttgataacca

SEQ ID NO: 120904 - DNA, 19 bp, Homo sapiens
  siRNA target sequence for DLG1 (NM_004087.1,1464-1482).
cctgttgataaccatgtta

SEQ ID NO: 120905 - DNA, 19 bp, Homo sapiens
  siRNA target sequence for DLG1 (NM_004087.1,1523-1541).
cagatactccccagtttct

SEQ ID NO: 120906 - DNA, 19 bp, Homo sapiens
  siRNA target sequence for DLG1 (NM_004087.1,1573-1591).
gggaacctagaaaagttgt

SEQ ID NO: 120907 - DNA, 19 bp, Homo sapiens
  siRNA target sequence for DLG1 (NM_004087.1,1606-1624).
caacgggccttggtttcaa

SEQ ID NO: 120908 - DNA, 19 bp, Homo sapiens
  siRNA target sequence for DLG1 (NM_004087.1,1708-1726).
gaaaaggagatcgtattat

SEQ ID NO: 120909 - DNA, 19 bp, Homo sapiens
  siRNA target sequence for DLG1 (NM_004087.1,1719-1737).
cgtattatatcggtaaaca

SEQ ID NO: 120910 - DNA, 19 bp, Homo sapiens
  siRNA target sequence for DLG1 (NM_004087.1,1745-1763).
cctcagagctgctagtcat

SEQ ID NO: 120911 - DNA, 19 bp, Homo sapiens
  siRNA target sequence for DLG1 (NM_004087.1,1770-1788).
gcagcagctgcattgaaaa

SEQ ID NO: 120912 - DNA, 19 bp, Homo sapiens
  siRNA target sequence for DLG1 (NM_004087.1,1792-1810).
ctggccaggctgtcacaat

SEQ ID NO: 120913 - DNA, 19 bp, Homo sapiens
  siRNA target sequence for DLG1 (NM_004087.1,1805-1823).
cacaattgttgcacaatat

SEQ ID NO: 120914 - DNA, 19 bp, Homo sapiens
  siRNA target sequence for DLG1 (NM_004087.1,1869-1887).
cgggagcagatgatgaata

SEQ ID NO: 120915 - DNA, 19 bp, Homo sapiens
  siRNA target sequence for DLG1 (NM_004087.1,1874-1892).
gcagatgatgaatagtagt

SEQ ID NO: 120916 - DNA, 19 bp, Homo sapiens
  siRNA target sequence for DLG1 (NM_004087.1,1880-1898).
gatgaatagtagtattagt

SEQ ID NO: 120917 - DNA, 19 bp, Homo sapiens
  siRNA target sequence for DLG1 (NM_004087.1,2024-2042).
cctccatgttattaatgct

SEQ ID NO: 120918 - DNA, 19 bp, Homo sapiens
  siRNA target sequence for DLG1 (NM_004087.1,2025-2043).
ctccatgttattaatgctt

SEQ ID NO: 120919 - DNA, 19 bp, Homo sapiens
  siRNA target sequence for DLG1 (NM_004087.1,2093-2111).
cgatgaggtcggagtgatt

SEQ ID NO: 120920 - DNA, 19 bp, Homo sapiens
  siRNA target sequence for DLG1 (NM_004087.1,2102-2120).
cggagtgattcccagtaaa

SEQ ID NO: 120921 - DNA, 19 bp, Homo sapiens
  siRNA target sequence for DLG1 (NM_004087.1,2116-2134).
gtaaacgcagagttgagaa

SEQ ID NO: 120922 - DNA, 19 bp, Homo sapiens
  siRNA target sequence for DLG1 (NM_004087.1,2139-2157).
gaacgagcccgattaaaaa

SEQ ID NO: 120923 - DNA, 19 bp, Homo sapiens
  siRNA target sequence for DLG1 (NM_004087.1,2143-2161).
gagcccgattaaaaacagt

SEQ ID NO: 120924 - DNA, 19 bp, Homo sapiens
  siRNA target sequence for DLG1 (NM_004087.1,2283-2301).
gatgctgaccagcatgtaa

SEQ ID NO: 120925 - DNA, 19 bp, Homo sapiens
  siRNA target sequence for DLG1 (NM_004087.1,2286-2304).
gctgaccagcatgtaactt

SEQ ID NO: 120926 - DNA, 19 bp, Homo sapiens
  siRNA target sequence for DLG1 (NM_004087.1,2291-2309).
ccagcatgtaacttctaat

SEQ ID NO: 120927 - DNA, 19 bp, Homo sapiens
  siRNA target sequence for DLG1 (NM_004087.1,2305-2323).
ctaatgccagcgatagtga

SEQ ID NO: 120928 - DNA, 19 bp, Homo sapiens
  siRNA target sequence for DLG1 (NM_004087.1,2335-2353).
gtggtcaagaagaatacgt

SEQ ID NO: 120929 - DNA, 19 bp, Homo sapiens
  siRNA target sequence for DLG1 (NM_004087.1,2340-2358).
caagaagaatacgtcttat

SEQ ID NO: 120930 - DNA, 19 bp, Homo sapiens
  siRNA target sequence for DLG1 (NM_004087.1,2343-2361).
gaagaatacgtcttatctt

SEQ ID NO: 120931 - DNA, 19 bp, Homo sapiens
  siRNA target sequence for DLG1 (NM_004087.1,2359-2377).
cttatgaaccagtgaatca

SEQ ID NO: 120932 - DNA, 19 bp, Homo sapiens
  siRNA target sequence for DLG1 (NM_004087.1,2395-2413).
ctcgaccagtgatcatatt

SEQ ID NO: 120933 - DNA, 19 bp, Homo sapiens
  siRNA target sequence for DLG1 (NM_004087.1,2494-2512).
ctagaccaaaacgagatta

SEQ ID NO: 120934 - DNA, 19 bp, Homo sapiens
  siRNA target sequence for DLG1 (NM_004087.1,2497-2515).
gaccaaaacgagattatga

SEQ ID NO: 120935 - DNA, 19 bp, Homo sapiens
  siRNA target sequence for DLG1 (NM_004087.1,2524-2542).
gaagagattatcattttgt

SEQ ID NO: 120936 - DNA, 19 bp, Homo sapiens
  siRNA target sequence for DLG1 (NM_004087.1,2599-2617).
gccagtataacaatcatct

SEQ ID NO: 120937 - DNA, 19 bp, Homo sapiens
  siRNA target sequence for DLG1 (NM_004087.1,2600-2618).
ccagtataacaatcatcta

SEQ ID NO: 120938 - DNA, 19 bp, Homo sapiens
  siRNA target sequence for DLG1 (NM_004087.1,2601-2619).
cagtataacaatcatctat

SEQ ID NO: 120939 - DNA, 19 bp, Homo sapiens
  siRNA target sequence for DLG1 (NM_004087.1,2834-2852).
ggaacaggagtttactgaa

SEQ ID NO: 120940 - DNA, 19 bp, Homo sapiens
  siRNA target sequence for DLG1 (NM_004087.1,2900-2918).
ccaagtgaaacagatcata

SEQ ID NO: 120941 - DNA, 19 bp, Homo sapiens
  siRNA target sequence for DLG1 (NM_004087.1,2922-2940).
gaacaatctggttcttaca

SEQ ID NO: 120942 - DNA, 19 bp, Homo sapiens
  siRNA target sequence for JUP (NM_002230.1,160-178).
ctgagtggcagcagacata

SEQ ID NO: 120943 - DNA, 19 bp, Homo sapiens
  siRNA target sequence for JUP (NM_002230.1,162-180).
gagtggcagcagacataca

SEQ ID NO: 120944 - DNA, 19 bp, Homo sapiens
  siRNA target sequence for JUP (NM_002230.1,493-511).
cggccattgtgcatctcat

SEQ ID NO: 120945 - DNA, 19 bp, Homo sapiens
  siRNA target sequence for JUP (NM_002230.1,918-936).
gccgacgggctgcaaaaga

SEQ ID NO: 120946 - DNA, 19 bp, Homo sapiens
  siRNA target sequence for JUP (NM_002230.1,1073-1091).
catgcgtaactacagttat

SEQ ID NO: 120947 - DNA, 19 bp, Homo sapiens
  siRNA target sequence for JUP (NM_002230.1,1135-1153).
ccgtgtgtcccagcaataa

SEQ ID NO: 120948 - DNA, 19 bp, Homo sapiens
  siRNA target sequence for JUP (NM_002230.1,1541-1559).
ctctgtgcgtctcaactat

SEQ ID NO: 120949 - DNA, 19 bp, Homo sapiens
  siRNA target sequence for JUP (NM_002230.1,2171-2189).
gagcatgattcccatcaat

SEQ ID NO: 120950 - DNA, 19 bp, Homo sapiens
  siRNA target sequence for MYLIP (NM_013262.3,332-350).
ggcgactgggaatcataga

SEQ ID NO: 120951 - DNA, 19 bp, Homo sapiens
  siRNA target sequence for MYLIP (NM_013262.3,341-359).
gaatcatagaagttgacta

SEQ ID NO: 120952 - DNA, 19 bp, Homo sapiens
  siRNA target sequence for MYLIP (NM_013262.3,369-387).
gcagtttacgggtagcaaa

SEQ ID NO: 120953 - DNA, 19 bp, Homo sapiens
  siRNA target sequence for MYLIP (NM_013262.3,378-396).
gggtagcaaaggtgaaagt

SEQ ID NO: 120954 - DNA, 19 bp, Homo sapiens
  siRNA target sequence for MYLIP (NM_013262.3,379-397).
ggtagcaaaggtgaaagtt

SEQ ID NO: 120955 - DNA, 19 bp, Homo sapiens
  siRNA target sequence for MYLIP (NM_013262.3,380-398).
gtagcaaaggtgaaagttt

SEQ ID NO: 120956 - DNA, 19 bp, Homo sapiens
  siRNA target sequence for MYLIP (NM_013262.3,447-465).
cccttacaggcttaaactt

SEQ ID NO: 120957 - DNA, 19 bp, Homo sapiens
  siRNA target sequence for MYLIP (NM_013262.3,448-466).
ccttacaggcttaaactta

SEQ ID NO: 120958 - DNA, 19 bp, Homo sapiens
  siRNA target sequence for MYLIP (NM_013262.3,505-523).
gagcagactaggcatatct

SEQ ID NO: 120959 - DNA, 19 bp, Homo sapiens
  siRNA target sequence for MYLIP (NM_013262.3,507-525).
gcagactaggcatatcttt

SEQ ID NO: 120960 - DNA, 19 bp, Homo sapiens
  siRNA target sequence for MYLIP (NM_013262.3,553-571).
gcaggccacctcttgtgtt

SEQ ID NO: 120961 - DNA, 19 bp, Homo sapiens
  siRNA target sequence for MYLIP (NM_013262.3,633-651).
ccagaacactgccaagtat

SEQ ID NO: 120962 - DNA, 19 bp, Homo sapiens
  siRNA target sequence for MYLIP (NM_013262.3,634-652).
cagaacactgccaagtata

SEQ ID NO: 120963 - DNA, 19 bp, Homo sapiens
  siRNA target sequence for MYLIP (NM_013262.3,696-714).
gaacagcattgttgcaaaa

SEQ ID NO: 120964 - DNA, 19 bp, Homo sapiens
  siRNA target sequence for MYLIP (NM_013262.3,768-786).
gattgtgtcggcaatggaa

SEQ ID NO: 120965 - DNA, 19 bp, Homo sapiens
  siRNA target sequence for MYLIP (NM_013262.3,850-868).
ggacctgaaggaatctcaa

SEQ ID NO: 120966 - DNA, 19 bp, Homo sapiens
  siRNA target sequence for MYLIP (NM_013262.3,851-869).
gacctgaaggaatctcaat

SEQ ID NO: 120967 - DNA, 19 bp, Homo sapiens
  siRNA target sequence for MYLIP (NM_013262.3,856-874).
gaaggaatctcaatttgta

SEQ ID NO: 120968 - DNA, 19 bp, Homo sapiens
  siRNA target sequence for MYLIP (NM_013262.3,866-884).
caatttgtaaagatgactt

SEQ ID NO: 120969 - DNA, 19 bp, Homo sapiens
  siRNA target sequence for MYLIP (NM_013262.3,877-895).
gatgactttagcccaatta

SEQ ID NO: 120970 - DNA, 19 bp, Homo sapiens
  siRNA target sequence for MYLIP (NM_013262.3,880-898).
gactttagcccaattaata

SEQ ID NO: 120971 - DNA, 19 bp, Homo sapiens
  siRNA target sequence for MYLIP (NM_013262.3,889-907).
ccaattaataggatagctt

SEQ ID NO: 120972 - DNA, 19 bp, Homo sapiens
  siRNA target sequence for MYLIP (NM_013262.3,890-908).
caattaataggatagctta

SEQ ID NO: 120973 - DNA, 19 bp, Homo sapiens
  siRNA target sequence for MYLIP (NM_013262.3,980-998).
gcatcgtgctcttgtttaa

SEQ ID NO: 120974 - DNA, 19 bp, Homo sapiens
  siRNA target sequence for MYLIP (NM_013262.3,1026-1044).
gctctaccgagcgataaca

SEQ ID NO: 120975 - DNA, 19 bp, Homo sapiens
  siRNA target sequence for MYLIP (NM_013262.3,1043-1061).
cagagacgcacgcattcta

SEQ ID NO: 120976 - DNA, 19 bp, Homo sapiens
  siRNA target sequence for MYLIP (NM_013262.3,1190-1208).
catcaaaggaggtgtatga

SEQ ID NO: 120977 - DNA, 19 bp, Homo sapiens
  siRNA target sequence for MYLIP (NM_013262.3,1240-1258).
gttgtggacctcgtttcaa

SEQ ID NO: 120978 - DNA, 19 bp, Homo sapiens
  siRNA target sequence for MYLIP (NM_013262.3,1285-1303).
cctctgaagtcctcagaaa

SEQ ID NO: 120979 - DNA, 19 bp, Homo sapiens
  siRNA target sequence for MYLIP (NM_013262.3,1541-1559).
cgcacaccagtcttctcaa

SEQ ID NO: 120980 - DNA, 19 bp, Homo sapiens
  siRNA target sequence for MYLIP (NM_013262.3,1542-1560).
gcacaccagtcttctcaat

SEQ ID NO: 120981 - DNA, 19 bp, Homo sapiens
  siRNA target sequence for PKD2 (NM_000297.2,693-711).
cagcactaaccgagagaaa

SEQ ID NO: 120982 - DNA, 19 bp, Homo sapiens
  siRNA target sequence for PKD2 (NM_000297.2,695-713).
gcactaaccgagagaaata

SEQ ID NO: 120983 - DNA, 19 bp, Homo sapiens
  siRNA target sequence for PKD2 (NM_000297.2,698-716).
ctaaccgagagaaatacct

SEQ ID NO: 120984 - DNA, 19 bp, Homo sapiens
  siRNA target sequence for PKD2 (NM_000297.2,702-720).
ccgagagaaataccttaaa

SEQ ID NO: 120985 - DNA, 19 bp, Homo sapiens
  siRNA target sequence for PKD2 (NM_000297.2,703-721).
cgagagaaataccttaaaa

SEQ ID NO: 120986 - DNA, 19 bp, Homo sapiens
  siRNA target sequence for PKD2 (NM_000297.2,738-756).
ggtcacatacctccttttt

SEQ ID NO: 120987 - DNA, 19 bp, Homo sapiens
  siRNA target sequence for PKD2 (NM_000297.2,794-812).
gctccaatgtgtactacta

SEQ ID NO: 120988 - DNA, 19 bp, Homo sapiens
  siRNA target sequence for PKD2 (NM_000297.2,854-872).
ccaaaacggagaaaactaa

SEQ ID NO: 120989 - DNA, 19 bp, Homo sapiens
  siRNA target sequence for PKD2 (NM_000297.2,860-878).
cggagaaaactaactttaa

SEQ ID NO: 120990 - DNA, 19 bp, Homo sapiens
  siRNA target sequence for PKD2 (NM_000297.2,981-999).
ccgaagtttcatcttctat

SEQ ID NO: 120991 - DNA, 19 bp, Homo sapiens
  siRNA target sequence for PKD2 (NM_000297.2,983-1001).
gaagtttcatcttctatga

SEQ ID NO: 120992 - DNA, 19 bp, Homo sapiens
  siRNA target sequence for PKD2 (NM_000297.2,1011-1029).
gttaggggttccacgaata

SEQ ID NO: 120993 - DNA, 19 bp, Homo sapiens
  siRNA target sequence for PKD2 (NM_000297.2,1031-1049).
ggcaactccgagtcagaaa

SEQ ID NO: 120994 - DNA, 19 bp, Homo sapiens
  siRNA target sequence for PKD2 (NM_000297.2,1032-1050).
gcaactccgagtcagaaat

SEQ ID NO: 120995 - DNA, 19 bp, Homo sapiens
  siRNA target sequence for PKD2 (NM_000297.2,1072-1090).
gacttgagagatgaaatta

SEQ ID NO: 120996 - DNA, 19 bp, Homo sapiens
  siRNA target sequence for PKD2 (NM_000297.2,1153-1171).
ggaaccgcttggatctaca

SEQ ID NO: 120997 - DNA, 19 bp, Homo sapiens
  siRNA target sequence for PKD2 (NM_000297.2,1201-1219).
cactggggaatcattgcaa

SEQ ID NO: 120998 - DNA, 19 bp, Homo sapiens
  siRNA target sequence for PKD2 (NM_000297.2,1205-1223).
ggggaatcattgcaactta

SEQ ID NO: 120999 - DNA, 19 bp, Homo sapiens
  siRNA target sequence for PKD2 (NM_000297.2,1234-1252).
ggctattatctggatttgt

SEQ ID NO: 121000 - DNA, 19 bp, Homo sapiens
  siRNA target sequence for PKD2 (NM_000297.2,1266-1284).
ggaaacagctgcacaagtt

SEQ ID NO: 121001 - DNA, 19 bp, Homo sapiens
  siRNA target sequence for PKD2 (NM_000297.2,1282-1300).
gttgctagcctcaagaaaa

SEQ ID NO: 121002 - DNA, 19 bp, Homo sapiens
  siRNA target sequence for PKD2 (NM_000297.2,1286-1304).
ctagcctcaagaaaaatgt

SEQ ID NO: 121003 - DNA, 19 bp, Homo sapiens
  siRNA target sequence for PKD2 (NM_000297.2,1322-1340).
ccagggcaacttttattga

SEQ ID NO: 121004 - DNA, 19 bp, Homo sapiens
  siRNA target sequence for PKD2 (NM_000297.2,1325-1343).
gggcaacttttattgactt

SEQ ID NO: 121005 - DNA, 19 bp, Homo sapiens
  siRNA target sequence for PKD2 (NM_000297.2,1348-1366).
gtgtacaacgccaacatta

SEQ ID NO: 121006 - DNA, 19 bp, Homo sapiens
  siRNA target sequence for PKD2 (NM_000297.2,1376-1394).
gtgtggtcaggttattggt

SEQ ID NO: 121007 - DNA, 19 bp, Homo sapiens
  siRNA target sequence for PKD2 (NM_000297.2,1419-1437).
gattccatcttggcaattt

SEQ ID NO: 121008 - DNA, 19 bp, Homo sapiens
  siRNA target sequence for PKD2 (NM_000297.2,1455-1473).
ccgatatgtcacaactttt

SEQ ID NO: 121009 - DNA, 19 bp, Homo sapiens
  siRNA target sequence for PKD2 (NM_000297.2,1545-1563).
ggaaattcgcattcacaaa

SEQ ID NO: 121010 - DNA, 19 bp, Homo sapiens
  siRNA target sequence for PKD2 (NM_000297.2,1553-1571).
gcattcacaaactacacta

SEQ ID NO: 121011 - DNA, 19 bp, Homo sapiens
  siRNA target sequence for PKD2 (NM_000297.2,1554-1572).
cattcacaaactacactat

SEQ ID NO: 121012 - DNA, 19 bp, Homo sapiens
  siRNA target sequence for PKD2 (NM_000297.2,1558-1576).
cacaaactacactatttca

SEQ ID NO: 121013 - DNA, 19 bp, Homo sapiens
  siRNA target sequence for PKD2 (NM_000297.2,1614-1632).
gctgtcagtggtagctata

SEQ ID NO: 121014 - DNA, 19 bp, Homo sapiens
  siRNA target sequence for PKD2 (NM_000297.2,1617-1635).
gtcagtggtagctatagga

SEQ ID NO: 121015 - DNA, 19 bp, Homo sapiens
  siRNA target sequence for PKD2 (NM_000297.2,1627-1645).
gctataggaattaacatat

SEQ ID NO: 121016 - DNA, 19 bp, Homo sapiens
  siRNA target sequence for PKD2 (NM_000297.2,1628-1646).
ctataggaattaacatata

SEQ ID NO: 121017 - DNA, 19 bp, Homo sapiens
  siRNA target sequence for PKD2 (NM_000297.2,1662-1680).
ggaggtgctactacagttt

SEQ ID NO: 121018 - DNA, 19 bp, Homo sapiens
  siRNA target sequence for PKD2 (NM_000297.2,1775-1793).
ggattaagctcttcaaatt

SEQ ID NO: 121019 - DNA, 19 bp, Homo sapiens
  siRNA target sequence for PKD2 (NM_000297.2,1905-1923).
gttggcataccttgtcttt

SEQ ID NO: 121020 - DNA, 19 bp, Homo sapiens
  siRNA target sequence for PKD2 (NM_000297.2,1925-1943).
gcactcaggtcgatgactt

SEQ ID NO: 121021 - DNA, 19 bp, Homo sapiens
  siRNA target sequence for PKD2 (NM_000297.2,1933-1951).
gtcgatgacttcagtactt

SEQ ID NO: 121022 - DNA, 19 bp, Homo sapiens
  siRNA target sequence for PKD2 (NM_000297.2,1968-1986).
cactcaattccgtatcatt

SEQ ID NO: 121023 - DNA, 19 bp, Homo sapiens
  siRNA target sequence for PKD2 (NM_000297.2,2029-2047).
gttttgggaccaatttatt

SEQ ID NO: 121024 - DNA, 19 bp, Homo sapiens
  siRNA target sequence for PKD2 (NM_000297.2,2035-2053).
ggaccaatttatttcacta

SEQ ID NO: 121025 - DNA, 19 bp, Homo sapiens
  siRNA target sequence for PKD2 (NM_000297.2,2038-2056).
ccaatttatttcactacat

SEQ ID NO: 121026 - DNA, 19 bp, Homo sapiens
  siRNA target sequence for PKD2 (NM_000297.2,2324-2342).
cagagattgaggcaatatt

SEQ ID NO: 121027 - DNA, 19 bp, Homo sapiens
  siRNA target sequence for PKD2 (NM_000297.2,2326-2344).
gagattgaggcaatattca

SEQ ID NO: 121028 - DNA, 19 bp, Homo sapiens
  siRNA target sequence for PKD2 (NM_000297.2,2565-2583).
cgtttcttacgaagagttt

SEQ ID NO: 121029 - DNA, 19 bp, Homo sapiens
  siRNA target sequence for PKD2 (NM_000297.2,2570-2588).
cttacgaagagtttcaagt

SEQ ID NO: 121030 - DNA, 19 bp, Homo sapiens
  siRNA target sequence for PKD2 (NM_000297.2,2628-2646).
cagcatagtgtccaagatt

SEQ ID NO: 121031 - DNA, 19 bp, Homo sapiens
  siRNA target sequence for PKD2 (NM_000297.2,2655-2673).
gatcgtgaagctagagatt

SEQ ID NO: 121032 - DNA, 19 bp, Homo sapiens
  siRNA target sequence for PKD2 (NM_000297.2,2786-2804).
ggctagtacgtgaagagtt

SEQ ID NO: 121033 - DNA, 19 bp, Homo sapiens
  siRNA target sequence for PKD2 (NM_000297.2,2834-2852).
cccagatcagtcatggttt

SEQ ID NO: 121034 - DNA, 19 bp, Homo sapiens
  siRNA target sequence for PKD2 (NM_000297.2,2835-2853).
ccagatcagtcatggttta

SEQ ID NO: 121035 - DNA, 19 bp, Homo sapiens
  siRNA target sequence for PKD2 (NM_000297.2,2855-2873).
gcacgccagtgggactaaa

SEQ ID NO: 121036 - DNA, 19 bp, Homo sapiens
  siRNA target sequence for PKD2 (NM_000297.2,2856-2874).
cacgccagtgggactaaat

SEQ ID NO: 121037 - DNA, 19 bp, Homo sapiens
  siRNA target sequence for PKD2 (NM_000297.2,2859-2877).
gccagtgggactaaatggt

SEQ ID NO: 121038 - DNA, 19 bp, Homo sapiens
  siRNA target sequence for RPH3AL (NM_006987.2,531-549).
ccatgaggcggaatgtgat

SEQ ID NO: 121039 - DNA, 19 bp, Homo sapiens
  siRNA target sequence for RPH3AL (NM_006987.2,637-655).
gaaagtctgcaccaaatgt

SEQ ID NO: 121040 - DNA, 19 bp, Homo sapiens
  siRNA target sequence for RPH3AL (NM_006987.2,687-705).
ccctgtggctgtgtaagat

SEQ ID NO: 121041 - DNA, 19 bp, Homo sapiens
  siRNA target sequence for RPH3AL (NM_006987.2,754-772).
caaagggctccccaagtat

SEQ ID NO: 121042 - DNA, 19 bp, Homo sapiens
  siRNA target sequence for RPH3AL (NM_006987.2,759-777).
ggctccccaagtatatctt

SEQ ID NO: 121043 - DNA, 19 bp, Homo sapiens
  siRNA target sequence for SDC1 (NM_002997.3,313-331).
cgcaaattgtggctactaa

SEQ ID NO: 121044 - DNA, 19 bp, Homo sapiens
  siRNA target sequence for SDC1 (NM_002997.3,314-332).
gcaaattgtggctactaat

SEQ ID NO: 121045 - DNA, 19 bp, Homo sapiens
  siRNA target sequence for SDC1 (NM_002997.3,396-414).
ggtgctttgcaagatatca

SEQ ID NO: 121046 - DNA, 19 bp, Homo sapiens
  siRNA target sequence for SDC1 (NM_002997.3,888-906).
gaaacctcgggggagaata

SEQ ID NO: 121047 - DNA, 19 bp, Homo sapiens
  siRNA target sequence for SDC2 (NM_002998.2,674-692).
ctgacatctgataaagaca

SEQ ID NO: 121048 - DNA, 19 bp, Homo sapiens
  siRNA target sequence for SDC2 (NM_002998.2,678-696).
catctgataaagacatgta

SEQ ID NO: 121049 - DNA, 19 bp, Homo sapiens
  siRNA target sequence for SDC2 (NM_002998.2,722-740).
gcttcaggagtgtatccta

SEQ ID NO: 121050 - DNA, 19 bp, Homo sapiens
  siRNA target sequence for SDC2 (NM_002998.2,723-741).
cttcaggagtgtatcctat

SEQ ID NO: 121051 - DNA, 19 bp, Homo sapiens
  siRNA target sequence for SDC2 (NM_002998.2,726-744).
caggagtgtatcctattga

SEQ ID NO: 121052 - DNA, 19 bp, Homo sapiens
  siRNA target sequence for SDC2 (NM_002998.2,738-756).
ctattgatgacgatgacta

SEQ ID NO: 121053 - DNA, 19 bp, Homo sapiens
  siRNA target sequence for SDC2 (NM_002998.2,816-834).
ctcgaccacttccaaagat

SEQ ID NO: 121054 - DNA, 19 bp, Homo sapiens
  siRNA target sequence for SDC2 (NM_002998.2,827-845).
ccaaagatactgttgacta

SEQ ID NO: 121055 - DNA, 19 bp, Homo sapiens
  siRNA target sequence for SDC2 (NM_002998.2,863-881).
gaaaccacgacgctgaata

SEQ ID NO: 121056 - DNA, 19 bp, Homo sapiens
  siRNA target sequence for SDC2 (NM_002998.2,870-888).
cgacgctgaatatacagaa

SEQ ID NO: 121057 - DNA, 19 bp, Homo sapiens
  siRNA target sequence for SDC2 (NM_002998.2,924-942).
ctgataaagagaaagttca

SEQ ID NO: 121058 - DNA, 19 bp, Homo sapiens
  siRNA target sequence for SDC2 (NM_002998.2,971-989).
ccagccgaagaggatacaa

SEQ ID NO: 121059 - DNA, 19 bp, Homo sapiens
  siRNA target sequence for SDC2 (NM_002998.2,972-990).
cagccgaagaggatacaaa

SEQ ID NO: 121060 - DNA, 19 bp, Homo sapiens
  siRNA target sequence for SDC2 (NM_002998.2,975-993).
ccgaagaggatacaaatgt

SEQ ID NO: 121061 - DNA, 19 bp, Homo sapiens
  siRNA target sequence for SDC2 (NM_002998.2,1009-1027).
ctcagacagtctgtttaaa

SEQ ID NO: 121062 - DNA, 19 bp, Homo sapiens
  siRNA target sequence for SDC2 (NM_002998.2,1051-1069).
cattgctggtggagttatt

SEQ ID NO: 121063 - DNA, 19 bp, Homo sapiens
  siRNA target sequence for SDC2 (NM_002998.2,1061-1079).
ggagttattggctttctct

SEQ ID NO: 121064 - DNA, 19 bp, Homo sapiens
  siRNA target sequence for SDC2 (NM_002998.2,1062-1080).
gagttattggctttctctt

SEQ ID NO: 121065 - DNA, 19 bp, Homo sapiens
  siRNA target sequence for SDC2 (NM_002998.2,1106-1124).
gtgtatcgcatgagaaaga

SEQ ID NO: 121066 - DNA, 19 bp, Homo sapiens
  siRNA target sequence for SDC2 (NM_002998.2,1184-1202).
gcacctactaaggagtttt

SEQ ID NO: 121067 - DNA, 19 bp, Homo sapiens
  siRNA target sequence for SDC3 (NM_014654.1,1594-1612).
caggagtcgggcattgaga

SEQ ID NO: 121068 - DNA, 19 bp, Homo sapiens
  siRNA target sequence for SDC3 (NM_014654.1,1620-1638).
gcgcttcagcccagatgta

SEQ ID NO: 121069 - DNA, 19 bp, Homo sapiens
  siRNA target sequence for SDC3 (NM_014654.1,2481-2499).
ggtgctcgtagctgtgatt

SEQ ID NO: 121070 - DNA, 19 bp, Homo sapiens
  siRNA target sequence for SDC3 (NM_014654.1,2538-2556).
ggtcacactgctcatctat

SEQ ID NO: 121071 - DNA, 19 bp, Homo sapiens
  siRNA target sequence for SDC4 (NM_002999.2,339-357).
ccaccgaacccaagaaact

SEQ ID NO: 121072 - DNA, 19 bp, Homo sapiens
  siRNA target sequence for SDC4 (NM_002999.2,340-358).
caccgaacccaagaaacta

SEQ ID NO: 121073 - DNA, 19 bp, Homo sapiens
  siRNA target sequence for SDC4 (NM_002999.2,342-360).
ccgaacccaagaaactaga

SEQ ID NO: 121074 - DNA, 19 bp, Homo sapiens
  siRNA target sequence for SDC4 (NM_002999.2,371-389).
gttatccccaagagaatct

SEQ ID NO: 121075 - DNA, 19 bp, Homo sapiens
  siRNA target sequence for SDC4 (NM_002999.2,384-402).
gaatctcacccgttgaaga

SEQ ID NO: 121076 - DNA, 19 bp, Homo sapiens
  siRNA target sequence for SDC4 (NM_002999.2,587-605).
ggcaagaaacccatctaca

SEQ ID NO: 121077 - DNA, 19 bp, Homo sapiens
  siRNA target sequence for SSH3BP1 (NM_005470.1,131-149).
gggcgctgatcgagagtta

SEQ ID NO: 121078 - DNA, 19 bp, Homo sapiens
  siRNA target sequence for SSH3BP1 (NM_005470.1,226-244).
gagaccaaagcctatacaa

SEQ ID NO: 121079 - DNA, 19 bp, Homo sapiens
  siRNA target sequence for SSH3BP1 (NM_005470.1,237-255).
ctatacaacccaatctcta

SEQ ID NO: 121080 - DNA, 19 bp, Homo sapiens
  siRNA target sequence for SSH3BP1 (NM_005470.1,246-264).
ccaatctctagctagtgtt

SEQ ID NO: 121081 - DNA, 19 bp, Homo sapiens
  siRNA target sequence for SSH3BP1 (NM_005470.1,256-274).
gctagtgttgcttatcaaa

SEQ ID NO: 121082 - DNA, 19 bp, Homo sapiens
  siRNA target sequence for SSH3BP1 (NM_005470.1,257-275).
ctagtgttgcttatcaaat

SEQ ID NO: 121083 - DNA, 19 bp, Homo sapiens
  siRNA target sequence for SSH3BP1 (NM_005470.1,362-380).
cacagactgtggatattca

SEQ ID NO: 121084 - DNA, 19 bp, Homo sapiens
  siRNA target sequence for SSH3BP1 (NM_005470.1,434-452).
catcaagaactcacaaaat

SEQ ID NO: 121085 - DNA, 19 bp, Homo sapiens
  siRNA target sequence for SSH3BP1 (NM_005470.1,471-489).
ggagcgccctgtaaggtat

SEQ ID NO: 121086 - DNA, 19 bp, Homo sapiens
  siRNA target sequence for SSH3BP1 (NM_005470.1,472-490).
gagcgccctgtaaggtata

SEQ ID NO: 121087 - DNA, 19 bp, Homo sapiens
  siRNA target sequence for SSH3BP1 (NM_005470.1,474-492).
gcgccctgtaaggtatatt

SEQ ID NO: 121088 - DNA, 19 bp, Homo sapiens
  siRNA target sequence for SSH3BP1 (NM_005470.1,493-511).
cggaaacctatcgattaca

SEQ ID NO: 121089 - DNA, 19 bp, Homo sapiens
  siRNA target sequence for SSH3BP1 (NM_005470.1,495-513).
gaaacctatcgattacaca

SEQ ID NO: 121090 - DNA, 19 bp, Homo sapiens
  siRNA target sequence for SSH3BP1 (NM_005470.1,586-604).
ggcacactgtcgagaacaa

SEQ ID NO: 121091 - DNA, 19 bp, Homo sapiens
  siRNA target sequence for SSH3BP1 (NM_005470.1,588-606).
cacactgtcgagaacaaat

SEQ ID NO: 121092 - DNA, 19 bp, Homo sapiens
  siRNA target sequence for SSH3BP1 (NM_005470.1,657-675).
gggacggaatactccttat

SEQ ID NO: 121093 - DNA, 19 bp, Homo sapiens
  siRNA target sequence for SSH3BP1 (NM_005470.1,658-676).
ggacggaatactccttata

SEQ ID NO: 121094 - DNA, 19 bp, Homo sapiens
  siRNA target sequence for SSH3BP1 (NM_005470.1,659-677).
gacggaatactccttataa

SEQ ID NO: 121095 - DNA, 19 bp, Homo sapiens
  siRNA target sequence for SSH3BP1 (NM_005470.1,698-716).
ccccaacagttcctaatga

SEQ ID NO: 121096 - DNA, 19 bp, Homo sapiens
  siRNA target sequence for SSH3BP1 (NM_005470.1,700-718).
ccaacagttcctaatgact

SEQ ID NO: 121097 - DNA, 19 bp, Homo sapiens
  siRNA target sequence for SSH3BP1 (NM_005470.1,701-719).
caacagttcctaatgacta

SEQ ID NO: 121098 - DNA, 19 bp, Homo sapiens
  siRNA target sequence for SSH3BP1 (NM_005470.1,704-722).
cagttcctaatgactatat

SEQ ID NO: 121099 - DNA, 19 bp, Homo sapiens
  siRNA target sequence for SSH3BP1 (NM_005470.1,760-778).
ggcaggacagcatctttaa

SEQ ID NO: 121100 - DNA, 19 bp, Homo sapiens
  siRNA target sequence for SSH3BP1 (NM_005470.1,792-810).
gacacacagtggaagtagt

SEQ ID NO: 121101 - DNA, 19 bp, Homo sapiens
  siRNA target sequence for SSH3BP1 (NM_005470.1,887-905).
ccactattggaccagaaaa

SEQ ID NO: 121102 - DNA, 19 bp, Homo sapiens
  siRNA target sequence for SSH3BP1 (NM_005470.1,1042-1060).
cacaactctactacttctt

SEQ ID NO: 121103 - DNA, 19 bp, Homo sapiens
  siRNA target sequence for SSH3BP1 (NM_005470.1,1091-1109).
cctctgtgactgctcaatt

SEQ ID NO: 121104 - DNA, 19 bp, Homo sapiens
  siRNA target sequence for SSH3BP1 (NM_005470.1,1092-1110).
ctctgtgactgctcaattt

SEQ ID NO: 121105 - DNA, 19 bp, Homo sapiens
  siRNA target sequence for SSH3BP1 (NM_005470.1,1135-1153).
ggtccactttattctcaaa

SEQ ID NO: 121106 - DNA, 19 bp, Homo sapiens
  siRNA target sequence for SSH3BP1 (NM_005470.1,1274-1292).
cacctccaccagatgacat

SEQ ID NO: 121107 - DNA, 19 bp, Homo sapiens
  siRNA target sequence for SSH3BP1 (NM_005470.1,1371-1389).
gtataatgatccatatgca

SEQ ID NO: 121108 - DNA, 19 bp, Homo sapiens
  siRNA target sequence for SSH3BP1 (NM_005470.1,1426-1444).
gagaaagttgttgcaatat

SEQ ID NO: 121109 - DNA, 19 bp, Homo sapiens
  siRNA target sequence for SSH3BP1 (NM_005470.1,1428-1446).
gaaagttgttgcaatatat

SEQ ID NO: 121110 - DNA, 19 bp, Homo sapiens
  siRNA target sequence for SSH3BP1 (NM_005470.1,1485-1503).
ggagggtgcaatcatttat

SEQ ID NO: 121111 - DNA, 19 bp, Homo sapiens
  siRNA target sequence for SSH3BP1 (NM_005470.1,1488-1506).
gggtgcaatcatttatgtt

SEQ ID NO: 121112 - DNA, 19 bp, Homo sapiens
  siRNA target sequence for SSH3BP1 (NM_005470.1,1489-1507).
ggtgcaatcatttatgtta

SEQ ID NO: 121113 - DNA, 19 bp, Homo sapiens
  siRNA target sequence for SSH3BP1 (NM_005470.1,1490-1508).
gtgcaatcatttatgttat

SEQ ID NO: 121114 - DNA, 19 bp, Homo sapiens
  siRNA target sequence for SSH3BP1 (NM_005470.1,1567-1585).
cctgggaactatgttgaat

SEQ ID NO: 121115 - DNA, 19 bp, Homo sapiens
  siRNA target sequence for SSH3BP1 (NM_005470.1,1570-1588).
gggaactatgttgaatcaa

SEQ ID NO: 121116 - DNA, 19 bp, Homo sapiens
  siRNA target sequence for SSH3BP1 (NM_005470.1,1571-1589).
ggaactatgttgaatcaat

SEQ ID NO: 121117 - DNA, 19 bp, Homo sapiens
  siRNA target sequence for SSH3BP1 (NM_005470.1,1582-1600).
gaatcaatcatgcactata

SEQ ID NO: 121118 - DNA, 19 bp, Homo sapiens
  siRNA target sequence for SSH3BP1 (NM_005470.1,1586-1604).
caatcatgcactatactga

SEQ ID NO: 121119 - DNA, 19 bp, Homo sapiens
  siRNA target sequence for PPP3R1 (NM_000945.2,391-409).
gggaaatgaggcaagttat

SEQ ID NO: 121120 - DNA, 19 bp, Homo sapiens
  siRNA target sequence for PPP3R1 (NM_000945.2,401-419).
gcaagttatcctttggaaa

SEQ ID NO: 121121 - DNA, 19 bp, Homo sapiens
  siRNA target sequence for PPP3R1 (NM_000945.2,475-493).
gcttgatttggacaattct

SEQ ID NO: 121122 - DNA, 19 bp, Homo sapiens
  siRNA target sequence for PPP3R1 (NM_000945.2,485-503).
gacaattctggttctttga

SEQ ID NO: 121123 - DNA, 19 bp, Homo sapiens
  siRNA target sequence for PPP3R1 (NM_000945.2,517-535).
catgtctctgcctgagtta

SEQ ID NO: 121124 - DNA, 19 bp, Homo sapiens
  siRNA target sequence for PPP3R1 (NM_000945.2,530-548).
gagttacaacagaatcctt

SEQ ID NO: 121125 - DNA, 19 bp, Homo sapiens
  siRNA target sequence for PPP3R1 (NM_000945.2,532-550).
gttacaacagaatccttta

SEQ ID NO: 121126 - DNA, 19 bp, Homo sapiens
  siRNA target sequence for PPP3R1 (NM_000945.2,546-564).
ctttagtacagcgagtaat

SEQ ID NO: 121127 - DNA, 19 bp, Homo sapiens
  siRNA target sequence for PPP3R1 (NM_000945.2,551-569).
gtacagcgagtaatagata

SEQ ID NO: 121128 - DNA, 19 bp, Homo sapiens
  siRNA target sequence for PPP3R1 (NM_000945.2,554-572).
cagcgagtaatagatatat

SEQ ID NO: 121129 - DNA, 19 bp, Homo sapiens
  siRNA target sequence for PPP3R1 (NM_000945.2,558-576).
gagtaatagatatattcga

SEQ ID NO: 121130 - DNA, 19 bp, Homo sapiens
  siRNA target sequence for PPP3R1 (NM_000945.2,671-689).
gctttccgtatctatgaca

SEQ ID NO: 121131 - DNA, 19 bp, Homo sapiens
  siRNA target sequence for PPP3R1 (NM_000945.2,677-695).
cgtatctatgacatggata

SEQ ID NO: 121132 - DNA, 19 bp, Homo sapiens
  siRNA target sequence for PPP3R1 (NM_000945.2,748-766).
ggggaacaatctgaaagat

SEQ ID NO: 121133 - DNA, 19 bp, Homo sapiens
  siRNA target sequence for PPP3R1 (NM_000945.2,749-767).
gggaacaatctgaaagata

SEQ ID NO: 121134 - DNA, 19 bp, Homo sapiens
  siRNA target sequence for ADCY1 (NM_021116.1,333-351).
cgctgctcgtggtaaccaa

SEQ ID NO: 121135 - DNA, 19 bp, Homo sapiens
  siRNA target sequence for ADCY1 (NM_021116.1,911-929).
cagaggcacgacaatgtga

SEQ ID NO: 121136 - DNA, 19 bp, Homo sapiens
  siRNA target sequence for ADCY1 (NM_021116.1,1018-1036).
cggcaagttcgatgaatta

SEQ ID NO: 121137 - DNA, 19 bp, Homo sapiens
  siRNA target sequence for ADCY1 (NM_021116.1,1049-1067).
cactgtcgccgcatcaaga

SEQ ID NO: 121138 - DNA, 19 bp, Homo sapiens
  siRNA target sequence for ADCY1 (NM_021116.1,1051-1069).
ctgtcgccgcatcaagatt

SEQ ID NO: 121139 - DNA, 19 bp, Homo sapiens
  siRNA target sequence for ADCY1 (NM_021116.1,1053-1071).
gtcgccgcatcaagattct

SEQ ID NO: 121140 - DNA, 19 bp, Homo sapiens
  siRNA target sequence for ADCY1 (NM_021116.1,1144-1162).
gggactcgacatgattgat

SEQ ID NO: 121141 - DNA, 19 bp, Homo sapiens
  siRNA target sequence for ADCY1 (NM_021116.1,1145-1163).
ggactcgacatgattgata

SEQ ID NO: 121142 - DNA, 19 bp, Homo sapiens
  siRNA target sequence for ADCY1 (NM_021116.1,1328-1346).
gggaaggttcatatcacaa

SEQ ID NO: 121143 - DNA, 19 bp, Homo sapiens
  siRNA target sequence for ADCY1 (NM_021116.1,1329-1347).
ggaaggttcatatcacaaa

SEQ ID NO: 121144 - DNA, 19 bp, Homo sapiens
  siRNA target sequence for ADCY1 (NM_021116.1,1413-1431).
gtttcttgaaaactcataa

SEQ ID NO: 121145 - DNA, 19 bp, Homo sapiens
  siRNA target sequence for ADCY1 (NM_021116.1,1425-1443).
ctcataacatcgaaacctt

SEQ ID NO: 121146 - DNA, 19 bp, Homo sapiens
  siRNA target sequence for ADCY1 (NM_021116.1,1427-1445).
cataacatcgaaacctttt

SEQ ID NO: 121147 - DNA, 19 bp, Homo sapiens
  siRNA target sequence for ADCY1 (NM_021116.1,1432-1450).
catcgaaaccttttttatt

SEQ ID NO: 121148 - DNA, 19 bp, Homo sapiens
  siRNA target sequence for ADCY1 (NM_021116.1,1455-1473).
catcccatcgccgaaagat

SEQ ID NO: 121149 - DNA, 19 bp, Homo sapiens
  siRNA target sequence for ADCY1 (NM_021116.1,1458-1476).
cccatcgccgaaagatatt

SEQ ID NO: 121150 - DNA, 19 bp, Homo sapiens
  siRNA target sequence for ADCY1 (NM_021116.1,1459-1477).
ccatcgccgaaagatattt

SEQ ID NO: 121151 - DNA, 19 bp, Homo sapiens
  siRNA target sequence for ADCY1 (NM_021116.1,1505-1523).
ccggccaaaaggatgaagt

SEQ ID NO: 121152 - DNA, 19 bp, Homo sapiens
  siRNA target sequence for ADCY1 (NM_021116.1,1506-1524).
cggccaaaaggatgaagtt

SEQ ID NO: 121153 - DNA, 19 bp, Homo sapiens
  siRNA target sequence for ADCY1 (NM_021116.1,1559-1577).
cactgccggaaaatgttca

SEQ ID NO: 121154 - DNA, 19 bp, Homo sapiens
  siRNA target sequence for ADCY1 (NM_021116.1,1622-1640).
gacaagcggagggcattaa

SEQ ID NO: 121155 - DNA, 19 bp, Homo sapiens
  siRNA target sequence for ADCY1 (NM_021116.1,1624-1642).
caagcggagggcattaaga

SEQ ID NO: 121156 - DNA, 19 bp, Homo sapiens
  siRNA target sequence for ADCY1 (NM_021116.1,1627-1645).
gcggagggcattaagaaca

SEQ ID NO: 121157 - DNA, 19 bp, Homo sapiens
  siRNA target sequence for ADCY1 (NM_021116.1,1658-1676).
ctcagaaaccgctcatctt

SEQ ID NO: 121158 - DNA, 19 bp, Homo sapiens
  siRNA target sequence for ADCY1 (NM_021116.1,1712-1730).
cgcgtcaacaggtacatca

SEQ ID NO: 121159 - DNA, 19 bp, Homo sapiens
  siRNA target sequence for ADCY1 (NM_021116.1,1726-1744).
catcagccgcctcttagaa

SEQ ID NO: 121160 - DNA, 19 bp, Homo sapiens
  siRNA target sequence for ADCY1 (NM_021116.1,1769-1787).
gcagacctgaacttcttta

SEQ ID NO: 121161 - DNA, 19 bp, Homo sapiens
  siRNA target sequence for ADCY1 (NM_021116.1,1805-1823).
gtcgaacgggagcaaaagt

SEQ ID NO: 121162 - DNA, 19 bp, Homo sapiens
  siRNA target sequence for ADCY1 (NM_021116.1,1832-1850).
cttcaggacgagtatttca

SEQ ID NO: 121163 - DNA, 19 bp, Homo sapiens
  siRNA target sequence for ADCY1 (NM_021116.1,1895-1913).
cttgtctaccttctaatat

SEQ ID NO: 121164 - DNA, 19 bp, Homo sapiens
  siRNA target sequence for ADCY1 (NM_021116.1,2015-2033).
gggtgcctgacgattcaga

SEQ ID NO: 121165 - DNA, 19 bp, Homo sapiens
  siRNA target sequence for ADCY1 (NM_021116.1,2016-2034).
ggtgcctgacgattcagat

SEQ ID NO: 121166 - DNA, 19 bp, Homo sapiens
  siRNA target sequence for ADCY1 (NM_021116.1,2017-2035).
gtgcctgacgattcagatt

SEQ ID NO: 121167 - DNA, 19 bp, Homo sapiens
  siRNA target sequence for ADCY1 (NM_021116.1,2036-2054).
cgcactgtcctgtgtattt

SEQ ID NO: 121168 - DNA, 19 bp, Homo sapiens
  siRNA target sequence for ADCY1 (NM_021116.1,2235-2253).
ccctcccgctagccatatt

SEQ ID NO: 121169 - DNA, 19 bp, Homo sapiens
  siRNA target sequence for ADCY1 (NM_021116.1,2237-2255).
ctcccgctagccatatttt

SEQ ID NO: 121170 - DNA, 19 bp, Homo sapiens
  siRNA target sequence for ADCY1 (NM_021116.1,2586-2604).
ggaacatggacctctacta

SEQ ID NO: 121171 - DNA, 19 bp, Homo sapiens
  siRNA target sequence for ADCY1 (NM_021116.1,2616-2634).
cccaggtgggcgtcatgtt

SEQ ID NO: 121172 - DNA, 19 bp, Homo sapiens
  siRNA target sequence for ADCY1 (NM_021116.1,2617-2635).
ccaggtgggcgtcatgttt

SEQ ID NO: 121173 - DNA, 19 bp, Homo sapiens
  siRNA target sequence for ADCY1 (NM_021116.1,2829-2847).
cggggaccaaggctaagaa

SEQ ID NO: 121174 - DNA, 19 bp, Homo sapiens
  siRNA target sequence for ADCY1 (NM_021116.1,2944-2962).
cctccgagttggcatcaat

SEQ ID NO: 121175 - DNA, 19 bp, Homo sapiens
  siRNA target sequence for ADCY1 (NM_021116.1,2947-2965).
ccgagttggcatcaatgtt

SEQ ID NO: 121176 - DNA, 19 bp, Homo sapiens
  siRNA target sequence for ADCY1 (NM_021116.1,3163-3181).
cgagatgttgacatacttt

SEQ ID NO: 121177 - DNA, 19 bp, Homo sapiens
  siRNA target sequence for ADCY1 (NM_021116.1,3227-3245).
ggcttggatcggaaaatgt

SEQ ID NO: 121178 - DNA, 19 bp, Homo sapiens
  siRNA target sequence for ADCY1 (NM_021116.1,3229-3247).
cttggatcggaaaatgtgt

SEQ ID NO: 121179 - DNA, 19 bp, Homo sapiens
  siRNA target sequence for ADD3 (NM_016824.1,44-62).
gccagccaaggcgtgatta

SEQ ID NO: 121180 - DNA, 19 bp, Homo sapiens
  siRNA target sequence for ADD3 (NM_016824.1,86-104).
cctcacaaagagagatatt

SEQ ID NO: 121181 - DNA, 19 bp, Homo sapiens
  siRNA target sequence for ADD3 (NM_016824.1,148-166).
gaacatgtctcctgatcta

SEQ ID NO: 121182 - DNA, 19 bp, Homo sapiens
  siRNA target sequence for ADD3 (NM_016824.1,159-177).
ctgatctacgacaagactt

SEQ ID NO: 121183 - DNA, 19 bp, Homo sapiens
  siRNA target sequence for ADD3 (NM_016824.1,164-182).
ctacgacaagacttcaaca

SEQ ID NO: 121184 - DNA, 19 bp, Homo sapiens
  siRNA target sequence for ADD3 (NM_016824.1,277-295).
ccacaacccaactggatta

SEQ ID NO: 121185 - DNA, 19 bp, Homo sapiens
  siRNA target sequence for ADD3 (NM_016824.1,280-298).
caacccaactggattacta

SEQ ID NO: 121186 - DNA, 19 bp, Homo sapiens
  siRNA target sequence for ADD3 (NM_016824.1,285-303).
caactggattactagcatt

SEQ ID NO: 121187 - DNA, 19 bp, Homo sapiens
  siRNA target sequence for ADD3 (NM_016824.1,372-390).
gcatggtcacacctatcaa

SEQ ID NO: 121188 - DNA, 19 bp, Homo sapiens
  siRNA target sequence for ADD3 (NM_016824.1,405-423).
cagatacatcctcatatgt

SEQ ID NO: 121189 - DNA, 19 bp, Homo sapiens
  siRNA target sequence for ADD3 (NM_016824.1,407-425).
gatacatcctcatatgtga

SEQ ID NO: 121190 - DNA, 19 bp, Homo sapiens
  siRNA target sequence for ADD3 (NM_016824.1,459-477).
gcctgtacagacttgtaga

SEQ ID NO: 121191 - DNA, 19 bp, Homo sapiens
  siRNA target sequence for ADD3 (NM_016824.1,466-484).
cagacttgtagacttgttt

SEQ ID NO: 121192 - DNA, 19 bp, Homo sapiens
  siRNA target sequence for ADD3 (NM_016824.1,499-517).
ggcaaatacctatatctca

SEQ ID NO: 121193 - DNA, 19 bp, Homo sapiens
  siRNA target sequence for ADD3 (NM_016824.1,532-550).
ggagcaagaccacattata

SEQ ID NO: 121194 - DNA, 19 bp, Homo sapiens
  siRNA target sequence for ADD3 (NM_016824.1,533-551).
gagcaagaccacattataa

SEQ ID NO: 121195 - DNA, 19 bp, Homo sapiens
  siRNA target sequence for ADD3 (NM_016824.1,559-577).
cagaggcctatctttttct

SEQ ID NO: 121196 - DNA, 19 bp, Homo sapiens
  siRNA target sequence for ADD3 (NM_016824.1,582-600).
ctacagcctccaatttggt

SEQ ID NO: 121197 - DNA, 19 bp, Homo sapiens
  siRNA target sequence for ADD3 (NM_016824.1,601-619).
gaaagtcaatataatagga

SEQ ID NO: 121198 - DNA, 19 bp, Homo sapiens
  siRNA target sequence for ADD3 (NM_016824.1,629-647).
gaccagggaagtaccaatt

SEQ ID NO: 121199 - DNA, 19 bp, Homo sapiens
  siRNA target sequence for ADD3 (NM_016824.1,632-650).
cagggaagtaccaatttga

SEQ ID NO: 121200 - DNA, 19 bp, Homo sapiens
  siRNA target sequence for ADD3 (NM_016824.1,672-690).
gtccccatgctgcaatcta

SEQ ID NO: 121201 - DNA, 19 bp, Homo sapiens
  siRNA target sequence for ADD3 (NM_016824.1,674-692).
ccccatgctgcaatctatt

SEQ ID NO: 121202 - DNA, 19 bp, Homo sapiens
  siRNA target sequence for ADD3 (NM_016824.1,676-694).
ccatgctgcaatctattca

SEQ ID NO: 121203 - DNA, 19 bp, Homo sapiens
  siRNA target sequence for ADD3 (NM_016824.1,693-711).
caacacgtcctgatgttaa

SEQ ID NO: 121204 - DNA, 19 bp, Homo sapiens
  siRNA target sequence for ADD3 (NM_016824.1,783-801).
ctcaagagtctcttcttct

SEQ ID NO: 121205 - DNA, 19 bp, Homo sapiens
  siRNA target sequence for ADD3 (NM_016824.1,872-890).
gttctgggaccaagttgta

SEQ ID NO: 121206 - DNA, 19 bp, Homo sapiens
  siRNA target sequence for ADD3 (NM_016824.1,895-913).
gctggtactcaggaatcat

SEQ ID NO: 121207 - DNA, 19 bp, Homo sapiens
  siRNA target sequence for ADD3 (NM_016824.1,1011-1029).
caggtggagtagacaatct

SEQ ID NO: 121208 - DNA, 19 bp, Homo sapiens
  siRNA target sequence for ADD3 (NM_016824.1,1031-1049).
catgtactggactttcaga

SEQ ID NO: 121209 - DNA, 19 bp, Homo sapiens
  siRNA target sequence for ADD3 (NM_016824.1,1122-1140).
ggaaggttggcgaaattga

SEQ ID NO: 121210 - DNA, 19 bp, Homo sapiens
  siRNA target sequence for ADD3 (NM_016824.1,1126-1144).
ggttggcgaaattgagttt

SEQ ID NO: 121211 - DNA, 19 bp, Homo sapiens
  siRNA target sequence for ADD3 (NM_016824.1,1165-1183).
ggacaacttggggtataga

SEQ ID NO: 121212 - DNA, 19 bp, Homo sapiens
  siRNA target sequence for ADD3 (NM_016824.1,1166-1184).
gacaacttggggtatagaa

SEQ ID NO: 121213 - DNA, 19 bp, Homo sapiens
  siRNA target sequence for ADD3 (NM_016824.1,1168-1186).
caacttggggtatagaaca

SEQ ID NO: 121214 - DNA, 19 bp, Homo sapiens
  siRNA target sequence for ADD3 (NM_016824.1,1253-1271).
gcaactgtgactgcttttt

SEQ ID NO: 121215 - DNA, 19 bp, Homo sapiens
  siRNA target sequence for ADD3 (NM_016824.1,1272-1290).
cctttgaagacgatacagt

SEQ ID NO: 121216 - DNA, 19 bp, Homo sapiens
  siRNA target sequence for ADD3 (NM_016824.1,1328-1346).
cagcgtgaaaaaacaagat

SEQ ID NO: 121217 - DNA, 19 bp, Homo sapiens
  siRNA target sequence for ADD3 (NM_016824.1,1348-1366).
gctgaactcaccaaatact

SEQ ID NO: 121218 - DNA, 19 bp, Homo sapiens
  siRNA target sequence for ADD3 (NM_016824.1,1349-1367).
ctgaactcaccaaatactt

SEQ ID NO: 121219 - DNA, 19 bp, Homo sapiens
  siRNA target sequence for ADD3 (NM_016824.1,1365-1383).
cttacatgaaagtgaatgt

SEQ ID NO: 121220 - DNA, 19 bp, Homo sapiens
  siRNA target sequence for ADD3 (NM_016824.1,1445-1463).
gaagactcatctaaagtta

SEQ ID NO: 121221 - DNA, 19 bp, Homo sapiens
  siRNA target sequence for ADD3 (NM_016824.1,1466-1484).
ggtggaacacctatcaaaa

SEQ ID NO: 121222 - DNA, 19 bp, Homo sapiens
  siRNA target sequence for ADD3 (NM_016824.1,1467-1485).
gtggaacacctatcaaaat

SEQ ID NO: 121223 - DNA, 19 bp, Homo sapiens
  siRNA target sequence for ADD3 (NM_016824.1,1470-1488).
gaacacctatcaaaattga

SEQ ID NO: 121224 - DNA, 19 bp, Homo sapiens
  siRNA target sequence for ADD3 (NM_016824.1,1522-1540).
cccgaatgaggtactagaa

SEQ ID NO: 121225 - DNA, 19 bp, Homo sapiens
  siRNA target sequence for ADD3 (NM_016824.1,1524-1542).
cgaatgaggtactagaaaa

SEQ ID NO: 121226 - DNA, 19 bp, Homo sapiens
  siRNA target sequence for ADD3 (NM_016824.1,1625-1643).
gataagccaccttctacta

SEQ ID NO: 121227 - DNA, 19 bp, Homo sapiens
  siRNA target sequence for ADD3 (NM_016824.1,1631-1649).
ccaccttctactatgcaat

SEQ ID NO: 121228 - DNA, 19 bp, Homo sapiens
  siRNA target sequence for ADD3 (NM_016824.1,1632-1650).
caccttctactatgcaatt

SEQ ID NO: 121229 - DNA, 19 bp, Homo sapiens
  siRNA target sequence for ADD3 (NM_016824.1,1638-1656).
ctactatgcaatttgaaga

SEQ ID NO: 121230 - DNA, 19 bp, Homo sapiens
  siRNA target sequence for ADD3 (NM_016824.1,1709-1727).
ggagaacttgaagagtata

SEQ ID NO: 121231 - DNA, 19 bp, Homo sapiens
  siRNA target sequence for ADD3 (NM_016824.1,1712-1730).
gaacttgaagagtataaga

SEQ ID NO: 121232 - DNA, 19 bp, Homo sapiens
  siRNA target sequence for ADD3 (NM_016824.1,1723-1741).
gtataagaggacaatcgaa

SEQ ID NO: 121233 - DNA, 19 bp, Homo sapiens
  siRNA target sequence for ADD3 (NM_016824.1,1729-1747).
gaggacaatcgaacgtaaa

SEQ ID NO: 121234 - DNA, 19 bp, Homo sapiens
  siRNA target sequence for ADD3 (NM_016824.1,1731-1749).
ggacaatcgaacgtaaaca

SEQ ID NO: 121235 - DNA, 19 bp, Homo sapiens
  siRNA target sequence for ADD3 (NM_016824.1,1732-1750).
gacaatcgaacgtaaacaa

SEQ ID NO: 121236 - DNA, 19 bp, Homo sapiens
  siRNA target sequence for ADD3 (NM_016824.1,1734-1752).
caatcgaacgtaaacaaca

SEQ ID NO: 121237 - DNA, 19 bp, Homo sapiens
  siRNA target sequence for ADD3 (NM_016824.1,1792-1810).
cgcttcatctgtttcacaa

SEQ ID NO: 121238 - DNA, 19 bp, Homo sapiens
  siRNA target sequence for ADD3 (NM_016824.1,1824-1842).
ctcagtcaccgcaaaatgt

SEQ ID NO: 121239 - DNA, 19 bp, Homo sapiens
  siRNA target sequence for ADD3 (NM_016824.1,1901-1919).
gtgcctgtcatggtagtaa

SEQ ID NO: 121240 - DNA, 19 bp, Homo sapiens
  siRNA target sequence for ADD3 (NM_016824.1,1903-1921).
gcctgtcatggtagtaaat

SEQ ID NO: 121241 - DNA, 19 bp, Homo sapiens
  siRNA target sequence for ADD3 (NM_016824.1,1964-1982).
cgagtgagtaggttaagca

SEQ ID NO: 121242 - DNA, 19 bp, Homo sapiens
  siRNA target sequence for ADD3 (NM_016824.1,2005-2023).
cgagattactattaagtct

SEQ ID NO: 121243 - DNA, 19 bp, Homo sapiens
  siRNA target sequence for AKAP5 (NM_004857.2,1307-1325).
gaaattcatgtagaaaaca

SEQ ID NO: 121244 - DNA, 19 bp, Homo sapiens
  siRNA target sequence for AKAP5 (NM_004857.2,1541-1559).
cttgtaacacgcaggaaaa

SEQ ID NO: 121245 - DNA, 19 bp, Homo sapiens
  siRNA target sequence for AKAP5 (NM_004857.2,1544-1562).
gtaacacgcaggaaaaggt

SEQ ID NO: 121246 - DNA, 19 bp, Homo sapiens
  siRNA target sequence for AKAP5 (NM_004857.2,1587-1605).
cattggagggtgaaatgca

SEQ ID NO: 121247 - DNA, 19 bp, Homo sapiens
  siRNA target sequence for AKAP5 (NM_004857.2,1661-1679).
cttaagattccctgcataa

SEQ ID NO: 121248 - DNA, 19 bp, Homo sapiens
  siRNA target sequence for AKAP5 (NM_004857.2,1692-1710).
ggccaaaaaggagtaatca

SEQ ID NO: 121249 - DNA, 19 bp, Homo sapiens
  siRNA target sequence for AKAP5 (NM_004857.2,1701-1719).
ggagtaatcattccaaaat

SEQ ID NO: 121250 - DNA, 19 bp, Homo sapiens
  siRNA target sequence for AKAP5 (NM_004857.2,1702-1720).
gagtaatcattccaaaatt

SEQ ID NO: 121251 - DNA, 19 bp, Homo sapiens
  siRNA target sequence for AKAP5 (NM_004857.2,1819-1837).
gtcaacccaggatctaagt

SEQ ID NO: 121252 - DNA, 19 bp, Homo sapiens
  siRNA target sequence for AKAP5 (NM_004857.2,1821-1839).
caacccaggatctaagtga

SEQ ID NO: 121253 - DNA, 19 bp, Homo sapiens
  siRNA target sequence for AKAP5 (NM_004857.2,1862-1880).
gatgaggtctgtgaatcaa

SEQ ID NO: 121254 - DNA, 19 bp, Homo sapiens
  siRNA target sequence for AKAP5 (NM_004857.2,1868-1886).
gtctgtgaatcaaatgtga

SEQ ID NO: 121255 - DNA, 19 bp, Homo sapiens
  siRNA target sequence for AKAP5 (NM_004857.2,1943-1961).
gggcattctgctattcaaa

SEQ ID NO: 121256 - DNA, 19 bp, Homo sapiens
  siRNA target sequence for AKAP5 (NM_004857.2,2024-2042).
caagcaagcccacttgaaa

SEQ ID NO: 121257 - DNA, 19 bp, Homo sapiens
  siRNA target sequence for AKAP5 (NM_004857.2,2027-2045).
gcaagcccacttgaaactt

SEQ ID NO: 121258 - DNA, 19 bp, Homo sapiens
  siRNA target sequence for AKAP5 (NM_004857.2,2094-2112).
ctgcaattccagatcaaca

SEQ ID NO: 121259 - DNA, 19 bp, Homo sapiens
  siRNA target sequence for AKAP5 (NM_004857.2,2195-2213).
gaaactaagccaaaagata

SEQ ID NO: 121260 - DNA, 19 bp, Homo sapiens
  siRNA target sequence for AKAP5 (NM_004857.2,2204-2222).
ccaaaagatactgaattga

SEQ ID NO: 121261 - DNA, 19 bp, Homo sapiens
  siRNA target sequence for AKAP5 (NM_004857.2,2289-2307).
gaatggagccaattgctat

SEQ ID NO: 121262 - DNA, 19 bp, Homo sapiens
  siRNA target sequence for AKAP5 (NM_004857.2,2294-2312).
gagccaattgctattatta

SEQ ID NO: 121263 - DNA, 19 bp, Homo sapiens
  siRNA target sequence for AKAP5 (NM_004857.2,2396-2414).
caagtaggggtttttgcta

SEQ ID NO: 121264 - DNA, 19 bp, Homo sapiens
  siRNA target sequence for AKAP5 (NM_004857.2,2402-2420).
ggggtttttgctaatgata

SEQ ID NO: 121265 - DNA, 19 bp, Homo sapiens
  siRNA target sequence for AKAP5 (NM_004857.2,2436-2454).
gaacttcagaacaatatga

SEQ ID NO: 121266 - DNA, 19 bp, Homo sapiens
  siRNA target sequence for AKAP5 (NM_004857.2,2472-2490).
cagcctcttctctagtcaa

SEQ ID NO: 121267 - DNA, 19 bp, Homo sapiens
  siRNA target sequence for AKAP5 (NM_004857.2,2481-2499).
ctctagtcaagaatgctat

SEQ ID NO: 121268 - DNA, 19 bp, Homo sapiens
  siRNA target sequence for AKAP5 (NM_004857.2,2496-2514).
ctattcagttgtcaataga

SEQ ID NO: 121269 - DNA, 19 bp, Homo sapiens
  siRNA target sequence for GAP43 (NM_002045.2,133-151).
cgaccaaaagattgaacaa

SEQ ID NO: 121270 - DNA, 19 bp, Homo sapiens
  siRNA target sequence for GAP43 (NM_002045.2,179-197).
cataaggccgcaaccaaaa

SEQ ID NO: 121271 - DNA, 19 bp, Homo sapiens
  siRNA target sequence for GAP43 (NM_002045.2,215-233).
ggacacataacaaggaaaa

SEQ ID NO: 121272 - DNA, 19 bp, Homo sapiens
  siRNA target sequence for GAP43 (NM_002045.2,309-327).
ccgatggggtggagaagaa

SEQ ID NO: 121273 - DNA, 19 bp, Homo sapiens
  siRNA target sequence for GAP43 (NM_002045.2,493-511).
ctcagctgagacagaaagt

SEQ ID NO: 121274 - DNA, 19 bp, Homo sapiens
  siRNA target sequence for GAP43 (NM_002045.2,506-524).
gaaagtgccactaaagctt

SEQ ID NO: 121275 - DNA, 19 bp, Homo sapiens
  siRNA target sequence for GAP43 (NM_002045.2,541-559).
gtcctccaaggctgaagat

SEQ ID NO: 121276 - DNA, 19 bp, Homo sapiens
  siRNA target sequence for GAP43 (NM_002045.2,719-737).
gtagatgaaaccaaaccta

SEQ ID NO: 121277 - DNA, 19 bp, Homo sapiens
  siRNA target sequence for GAP43 (NM_002045.2,751-769).
gcaggacgagggtaaagaa

SEQ ID NO: 121278 - DNA, 19 bp, Homo sapiens
  siRNA target sequence for IQGAP1 (NM_003870.2,180-198).
gtcagaacgtggcttatga

SEQ ID NO: 121279 - DNA, 19 bp, Homo sapiens
  siRNA target sequence for IQGAP1 (NM_003870.2,182-200).
cagaacgtggcttatgagt

SEQ ID NO: 121280 - DNA, 19 bp, Homo sapiens
  siRNA target sequence for IQGAP1 (NM_003870.2,240-258).
catgcctaggggaagatct

SEQ ID NO: 121281 - DNA, 19 bp, Homo sapiens
  siRNA target sequence for IQGAP1 (NM_003870.2,277-295).
ggaggaggggcttaggaat

SEQ ID NO: 121282 - DNA, 19 bp, Homo sapiens
  siRNA target sequence for IQGAP1 (NM_003870.2,309-327).
ccaaactggggaacttctt

SEQ ID NO: 121283 - DNA, 19 bp, Homo sapiens
  siRNA target sequence for IQGAP1 (NM_003870.2,343-361).
gtccctgaaaaaaatctat

SEQ ID NO: 121284 - DNA, 19 bp, Homo sapiens
  siRNA target sequence for IQGAP1 (NM_003870.2,386-404).
gcgactggcctccacttta

SEQ ID NO: 121285 - DNA, 19 bp, Homo sapiens
  siRNA target sequence for IQGAP1 (NM_003870.2,388-406).
gactggcctccactttaga

SEQ ID NO: 121286 - DNA, 19 bp, Homo sapiens
  siRNA target sequence for IQGAP1 (NM_003870.2,390-408).
ctggcctccactttagaca

SEQ ID NO: 121287 - DNA, 19 bp, Homo sapiens
  siRNA target sequence for IQGAP1 (NM_003870.2,437-455).
gccatggatgagattggat

SEQ ID NO: 121288 - DNA, 19 bp, Homo sapiens
  siRNA target sequence for IQGAP1 (NM_003870.2,438-456).
ccatggatgagattggatt

SEQ ID NO: 121289 - DNA, 19 bp, Homo sapiens
  siRNA target sequence for IQGAP1 (NM_003870.2,448-466).
gattggattgcctaagatt

SEQ ID NO: 121290 - DNA, 19 bp, Homo sapiens
  siRNA target sequence for IQGAP1 (NM_003870.2,509-527).
ccaagatgtatctactgta

SEQ ID NO: 121291 - DNA, 19 bp, Homo sapiens
  siRNA target sequence for IQGAP1 (NM_003870.2,510-528).
caagatgtatctactgtat

SEQ ID NO: 121292 - DNA, 19 bp, Homo sapiens
  siRNA target sequence for IQGAP1 (NM_003870.2,525-543).
gtatccatgcactcagttt

SEQ ID NO: 121293 - DNA, 19 bp, Homo sapiens
  siRNA target sequence for IQGAP1 (NM_003870.2,561-579).
gcctggcccctcagattca

SEQ ID NO: 121294 - DNA, 19 bp, Homo sapiens
  siRNA target sequence for IQGAP1 (NM_003870.2,562-580).
cctggcccctcagattcaa

SEQ ID NO: 121295 - DNA, 19 bp, Homo sapiens
  siRNA target sequence for IQGAP1 (NM_003870.2,570-588).
ctcagattcaagacctata

SEQ ID NO: 121296 - DNA, 19 bp, Homo sapiens
  siRNA target sequence for IQGAP1 (NM_003870.2,841-859).
cacttaccaggatatactt

SEQ ID NO: 121297 - DNA, 19 bp, Homo sapiens
  siRNA target sequence for IQGAP1 (NM_003870.2,843-861).
cttaccaggatatacttta

SEQ ID NO: 121298 - DNA, 19 bp, Homo sapiens
  siRNA target sequence for IQGAP1 (NM_003870.2,863-881).
caggctaagcaggacaaaa

SEQ ID NO: 121299 - DNA, 19 bp, Homo sapiens
  siRNA target sequence for IQGAP1 (NM_003870.2,993-1011).
ctgcattagcaaatatcga

SEQ ID NO: 121300 - DNA, 19 bp, Homo sapiens
  siRNA target sequence for IQGAP1 (NM_003870.2,1210-1228).
cagtgctgcccagcaatat

SEQ ID NO: 121301 - DNA, 19 bp, Homo sapiens
  siRNA target sequence for IQGAP1 (NM_003870.2,1212-1230).
gtgctgcccagcaatatca

SEQ ID NO: 121302 - DNA, 19 bp, Homo sapiens
  siRNA target sequence for IQGAP1 (NM_003870.2,1384-1402).
gcgacaaagtcctgaacat

SEQ ID NO: 121303 - DNA, 19 bp, Homo sapiens
  siRNA target sequence for IQGAP1 (NM_003870.2,1385-1403).
cgacaaagtcctgaacata

SEQ ID NO: 121304 - DNA, 19 bp, Homo sapiens
  siRNA target sequence for IQGAP1 (NM_003870.2,1386-1404).
gacaaagtcctgaacataa

SEQ ID NO: 121305 - DNA, 19 bp, Homo sapiens
  siRNA target sequence for IQGAP1 (NM_003870.2,1427-1445).
gtcgcagtggagatgttgt

SEQ ID NO: 121306 - DNA, 19 bp, Homo sapiens
  siRNA target sequence for IQGAP1 (NM_003870.2,1505-1523).
caattgagcagttcagtta

SEQ ID NO: 121307 - DNA, 19 bp, Homo sapiens
  siRNA target sequence for IQGAP1 (NM_003870.2,1520-1538).
gttactggtcttaccaata

SEQ ID NO: 121308 - DNA, 19 bp, Homo sapiens
  siRNA target sequence for IQGAP1 (NM_003870.2,1560-1578).
ggtatctcgatgagttgat

SEQ ID NO: 121309 - DNA, 19 bp, Homo sapiens
  siRNA target sequence for IQGAP1 (NM_003870.2,1641-1659).
cttgcgtggaccatgtgaa

SEQ ID NO: 121310 - DNA, 19 bp, Homo sapiens
  siRNA target sequence for IQGAP1 (NM_003870.2,1695-1713).
ccattggtttaattaatga

SEQ ID NO: 121311 - DNA, 19 bp, Homo sapiens
  siRNA target sequence for IQGAP1 (NM_003870.2,1759-1777).
gattcctgcagctaaactt

SEQ ID NO: 121312 - DNA, 19 bp, Homo sapiens
  siRNA target sequence for IQGAP1 (NM_003870.2,1810-1828).
ccaagacacgctgattaga

SEQ ID NO: 121313 - DNA, 19 bp, Homo sapiens
  siRNA target sequence for IQGAP1 (NM_003870.2,1858-1876).
ggatgagtcagctgtgtta

SEQ ID NO: 121314 - DNA, 19 bp, Homo sapiens
  siRNA target sequence for IQGAP1 (NM_003870.2,1859-1877).
gatgagtcagctgtgttat

SEQ ID NO: 121315 - DNA, 19 bp, Homo sapiens
  siRNA target sequence for IQGAP1 (NM_003870.2,1923-1941).
cccaagaagcacagaagtt

SEQ ID NO: 121316 - DNA, 19 bp, Homo sapiens
  siRNA target sequence for IQGAP1 (NM_003870.2,2045-2063).
cctgagtgtggtgaaactt

SEQ ID NO: 121317 - DNA, 19 bp, Homo sapiens
  siRNA target sequence for IQGAP1 (NM_003870.2,2046-2064).
ctgagtgtggtgaaactta

SEQ ID NO: 121318 - DNA, 19 bp, Homo sapiens
  siRNA target sequence for IQGAP1 (NM_003870.2,2099-2117).
ctggcagtaggagataata

SEQ ID NO: 121319 - DNA, 19 bp, Homo sapiens
  siRNA target sequence for IQGAP1 (NM_003870.2,2131-2149).
gaagcactgggtaaaaggt

SEQ ID NO: 121320 - DNA, 19 bp, Homo sapiens
  siRNA target sequence for IQGAP1 (NM_003870.2,2139-2157).
gggtaaaaggtggatatta

SEQ ID NO: 121321 - DNA, 19 bp, Homo sapiens
  siRNA target sequence for IQGAP1 (NM_003870.2,2194-2212).
ggatgaacctccaaatttt

SEQ ID NO: 121322 - DNA, 19 bp, Homo sapiens
  siRNA target sequence for IQGAP1 (NM_003870.2,2264-2282).
ggggtgactgccgcatata

SEQ ID NO: 121323 - DNA, 19 bp, Homo sapiens
  siRNA target sequence for IQGAP1 (NM_003870.2,2265-2283).
gggtgactgccgcatataa

SEQ ID NO: 121324 - DNA, 19 bp, Homo sapiens
  siRNA target sequence for IQGAP1 (NM_003870.2,2337-2355).
gctgccgtggatacttagt

SEQ ID NO: 121325 - DNA, 19 bp, Homo sapiens
  siRNA target sequence for IQGAP1 (NM_003870.2,2338-2356).
ctgccgtggatacttagtt

SEQ ID NO: 121326 - DNA, 19 bp, Homo sapiens
  siRNA target sequence for IQGAP1 (NM_003870.2,2476-2494).
cctgcgctcccacaaagat

SEQ ID NO: 121327 - DNA, 19 bp, Homo sapiens
  siRNA target sequence for IQGAP1 (NM_003870.2,2563-2581).
gtacttccgggaccatata

SEQ ID NO: 121328 - DNA, 19 bp, Homo sapiens
  siRNA target sequence for IQGAP1 (NM_003870.2,2671-2689).
ggttgtggtccgaaaattt

SEQ ID NO: 121329 - DNA, 19 bp, Homo sapiens
  siRNA target sequence for IQGAP1 (NM_003870.2,2759-2777).
gttatcaccctcattcgtt

SEQ ID NO: 121330 - DNA, 19 bp, Homo sapiens
  siRNA target sequence for IQGAP1 (NM_003870.2,2798-2816).
gacctcaatctcatggata

SEQ ID NO: 121331 - DNA, 19 bp, Homo sapiens
  siRNA target sequence for IQGAP1 (NM_003870.2,2825-2843).
ggactgctagtgaaaaata

SEQ ID NO: 121332 - DNA, 19 bp, Homo sapiens
  siRNA target sequence for IQGAP1 (NM_003870.2,2834-2852).
gtgaaaaataagattacgt

SEQ ID NO: 121333 - DNA, 19 bp, Homo sapiens
  siRNA target sequence for IQGAP1 (NM_003870.2,2984-3002).
gcttaccagcacctgtttt

SEQ ID NO: 121334 - DNA, 19 bp, Homo sapiens
  siRNA target sequence for IQGAP1 (NM_003870.2,3139-3157).
cctgcggctctttaagaca

SEQ ID NO: 121335 - DNA, 19 bp, Homo sapiens
  siRNA target sequence for IQGAP1 (NM_003870.2,3178-3196).
gtcgaaggtagatcagatt

SEQ ID NO: 121336 - DNA, 19 bp, Homo sapiens
  siRNA target sequence for IQGAP1 (NM_003870.2,3202-3220).
gattgtgacaggaaatcct

SEQ ID NO: 121337 - DNA, 19 bp, Homo sapiens
  siRNA target sequence for IQGAP1 (NM_003870.2,3213-3231).
gaaatcctacggttattaa

SEQ ID NO: 121338 - DNA, 19 bp, Homo sapiens
  siRNA target sequence for IQGAP1 (NM_003870.2,3219-3237).
ctacggttattaaaatggt

SEQ ID NO: 121339 - DNA, 19 bp, Homo sapiens
  siRNA target sequence for IQGAP1 (NM_003870.2,3290-3308).
gccccagtcgtgaaggaaa

SEQ ID NO: 121340 - DNA, 19 bp, Homo sapiens
  siRNA target sequence for IQGAP1 (NM_003870.2,3293-3311).
ccagtcgtgaaggaaatta

SEQ ID NO: 121341 - DNA, 19 bp, Homo sapiens
  siRNA target sequence for IQGAP1 (NM_003870.2,3298-3316).
cgtgaaggaaattatggat

SEQ ID NO: 121342 - DNA, 19 bp, Homo sapiens
  siRNA target sequence for IQGAP1 (NM_003870.2,3317-3335).
gacaaatctctcaacatca

SEQ ID NO: 121343 - DNA, 19 bp, Homo sapiens
  siRNA target sequence for IQGAP1 (NM_003870.2,3341-3359).
gaccctgtggatatttaca

SEQ ID NO: 121344 - DNA, 19 bp, Homo sapiens
  siRNA target sequence for IQGAP1 (NM_003870.2,3430-3448).
gcaggcgctagctcatgaa

SEQ ID NO: 121345 - DNA, 19 bp, Homo sapiens
  siRNA target sequence for IQGAP1 (NM_003870.2,3435-3453).
cgctagctcatgaagaagt

SEQ ID NO: 121346 - DNA, 19 bp, Homo sapiens
  siRNA target sequence for IQGAP1 (NM_003870.2,3494-3512).
gtgacagacaagtttctct

SEQ ID NO: 121347 - DNA, 19 bp, Homo sapiens
  siRNA target sequence for IQGAP1 (NM_003870.2,3521-3539).
gtcagctctgtggacaaaa

SEQ ID NO: 121348 - DNA, 19 bp, Homo sapiens
  siRNA target sequence for IQGAP1 (NM_003870.2,3729-3747).
cagaccaacgccgaaatct

SEQ ID NO: 121349 - DNA, 19 bp, Homo sapiens
  siRNA target sequence for IQGAP1 (NM_003870.2,3750-3768).
gctccattgcaaaaatgct

SEQ ID NO: 121350 - DNA, 19 bp, Homo sapiens
  siRNA target sequence for IQGAP1 (NM_003870.2,3776-3794).
gctgcttccaataagatgt

SEQ ID NO: 121351 - DNA, 19 bp, Homo sapiens
  siRNA target sequence for IQGAP1 (NM_003870.2,3777-3795).
ctgcttccaataagatgtt

SEQ ID NO: 121352 - DNA, 19 bp, Homo sapiens
  siRNA target sequence for IQGAP1 (NM_003870.2,3790-3808).
gatgtttctgggagataat

SEQ ID NO: 121353 - DNA, 19 bp, Homo sapiens
  siRNA target sequence for IQGAP1 (NM_003870.2,3810-3828).
cccacttaagcatcattaa

SEQ ID NO: 121354 - DNA, 19 bp, Homo sapiens
  siRNA target sequence for IQGAP1 (NM_003870.2,3811-3829).
ccacttaagcatcattaat

SEQ ID NO: 121355 - DNA, 19 bp, Homo sapiens
  siRNA target sequence for IQGAP1 (NM_003870.2,3914-3932).
gtggatgagtactctgatt

SEQ ID NO: 121356 - DNA, 19 bp, Homo sapiens
  siRNA target sequence for IQGAP1 (NM_003870.2,3916-3934).
ggatgagtactctgattta

SEQ ID NO: 121357 - DNA, 19 bp, Homo sapiens
  siRNA target sequence for IQGAP1 (NM_003870.2,3920-3938).
gagtactctgatttagtaa

SEQ ID NO: 121358 - DNA, 19 bp, Homo sapiens
  siRNA target sequence for IQGAP1 (NM_003870.2,3941-3959).
ctcaccaaaccagtaatct

SEQ ID NO: 121359 - DNA, 19 bp, Homo sapiens
  siRNA target sequence for IQGAP1 (NM_003870.2,3966-3984).
ccattggtgaaatcatcaa

SEQ ID NO: 121360 - DNA, 19 bp, Homo sapiens
  siRNA target sequence for IQGAP1 (NM_003870.2,4026-4044).
cggagcacaatgatccaat

SEQ ID NO: 121361 - DNA, 19 bp, Homo sapiens
  siRNA target sequence for IQGAP1 (NM_003870.2,4098-4116).
gggaaagctctggcaattt

SEQ ID NO: 121362 - DNA, 19 bp, Homo sapiens
  siRNA target sequence for IQGAP1 (NM_003870.2,4100-4118).
gaaagctctggcaatttaa

SEQ ID NO: 121363 - DNA, 19 bp, Homo sapiens
  siRNA target sequence for IQGAP1 (NM_003870.2,4210-4228).
ggatgctcgaaccatctta

SEQ ID NO: 121364 - DNA, 19 bp, Homo sapiens
  siRNA target sequence for IQGAP1 (NM_003870.2,4214-4232).
gctcgaaccatcttactga

SEQ ID NO: 121365 - DNA, 19 bp, Homo sapiens
  siRNA target sequence for IQGAP1 (NM_003870.2,4215-4233).
ctcgaaccatcttactgaa

SEQ ID NO: 121366 - DNA, 19 bp, Homo sapiens
  siRNA target sequence for IQGAP1 (NM_003870.2,4217-4235).
cgaaccatcttactgaata

SEQ ID NO: 121367 - DNA, 19 bp, Homo sapiens
  siRNA target sequence for IQGAP1 (NM_003870.2,4221-4239).
ccatcttactgaatacaaa

SEQ ID NO: 121368 - DNA, 19 bp, Homo sapiens
  siRNA target sequence for IQGAP1 (NM_003870.2,4225-4243).
cttactgaatacaaaacgt

SEQ ID NO: 121369 - DNA, 19 bp, Homo sapiens
  siRNA target sequence for IQGAP1 (NM_003870.2,4242-4260).
gtttaattgtggatgtcat

SEQ ID NO: 121370 - DNA, 19 bp, Homo sapiens
  siRNA target sequence for IQGAP1 (NM_003870.2,4274-4292).
ggagagaccttgactgaaa

SEQ ID NO: 121371 - DNA, 19 bp, Homo sapiens
  siRNA target sequence for IQGAP1 (NM_003870.2,4416-4434).
gcaacctcactcttcaaga

SEQ ID NO: 121372 - DNA, 19 bp, Homo sapiens
  siRNA target sequence for IQGAP1 (NM_003870.2,4482-4500).
gaaccgtggacccaaagaa

SEQ ID NO: 121373 - DNA, 19 bp, Homo sapiens
  siRNA target sequence for IQGAP1 (NM_003870.2,4522-4540).
cgacattgccagggatatt

SEQ ID NO: 121374 - DNA, 19 bp, Homo sapiens
  siRNA target sequence for IQGAP1 (NM_003870.2,4566-4584).
ggagaaaggccgaactagt

SEQ ID NO: 121375 - DNA, 19 bp, Homo sapiens
  siRNA target sequence for IQGAP1 (NM_003870.2,4569-4587).
gaaaggccgaactagtgaa

SEQ ID NO: 121376 - DNA, 19 bp, Homo sapiens
  siRNA target sequence for IQGAP1 (NM_003870.2,4634-4652).
ggggagcaggtggattact

SEQ ID NO: 121377 - DNA, 19 bp, Homo sapiens
  siRNA target sequence for IQGAP1 (NM_003870.2,4635-4653).
gggagcaggtggattacta

SEQ ID NO: 121378 - DNA, 19 bp, Homo sapiens
  siRNA target sequence for IQGAP1 (NM_003870.2,4640-4658).
caggtggattactataaaa

SEQ ID NO: 121379 - DNA, 19 bp, Homo sapiens
  siRNA target sequence for IQGAP1 (NM_003870.2,4643-4661).
gtggattactataaaagct

SEQ ID NO: 121380 - DNA, 19 bp, Homo sapiens
  siRNA target sequence for IQGAP1 (NM_003870.2,4764-4782).
cagcagcaagactacatga

SEQ ID NO: 121381 - DNA, 19 bp, Homo sapiens
  siRNA target sequence for IQGAP1 (NM_003870.2,4788-4806).
gagttcttctggaaattga

SEQ ID NO: 121382 - DNA, 19 bp, Homo sapiens
  siRNA target sequence for IQGAP1 (NM_003870.2,4811-4829).
ctgcaagtgaatcagttta

SEQ ID NO: 121383 - DNA, 19 bp, Homo sapiens
  siRNA target sequence for IQGAP1 (NM_003870.2,4813-4831).
gcaagtgaatcagtttaaa

SEQ ID NO: 121384 - DNA, 19 bp, Homo sapiens
  siRNA target sequence for IQGAP1 (NM_003870.2,4888-4906).
caaattcatgggagttcaa

SEQ ID NO: 121385 - DNA, 19 bp, Homo sapiens
  siRNA target sequence for IQGAP1 (NM_003870.2,4899-4917).
gagttcaaatggagacttt

SEQ ID NO: 121386 - DNA, 19 bp, Homo sapiens
  siRNA target sequence for IQGAP1 (NM_003870.2,4958-4976).
ggagttgcagtcatgaaat

SEQ ID NO: 121387 - DNA, 19 bp, Homo sapiens
  siRNA target sequence for IQGAP1 (NM_003870.2,4986-5004).
gagctaaagtaaatgtcaa

SEQ ID NO: 121388 - DNA, 19 bp, Homo sapiens
  siRNA target sequence for ITPKA (NM_002220.1,485-503).
cgaggacgtgggtcagaaa

SEQ ID NO: 121389 - DNA, 19 bp, Homo sapiens
  siRNA target sequence for ITPKA (NM_002220.1,486-504).
gaggacgtgggtcagaaaa

SEQ ID NO: 121390 - DNA, 19 bp, Homo sapiens
  siRNA target sequence for ITPKA (NM_002220.1,541-559).
cggtcataagccctttcaa

SEQ ID NO: 121391 - DNA, 19 bp, Homo sapiens
  siRNA target sequence for ITPKA (NM_002220.1,787-805).
gtgtgctcgactgcaaaat

SEQ ID NO: 121392 - DNA, 19 bp, Homo sapiens
  siRNA target sequence for ITPKA (NM_002220.1,806-824).
gggcgtcaggacttaccta

SEQ ID NO: 121393 - DNA, 19 bp, Homo sapiens
  siRNA target sequence for ITPKA (NM_002220.1,1033-1051).
cctgcagcaccgacttcaa

SEQ ID NO: 121394 - DNA, 19 bp, Homo sapiens
  siRNA target sequence for ITPKA (NM_002220.1,1073-1091).
ggtgcttcgcgtctttgaa

SEQ ID NO: 121395 - DNA, 19 bp, Homo sapiens
  siRNA target sequence for ITPKA (NM_002220.1,1330-1348).
gcgaggacggctatttgct

SEQ ID NO: 121396 - DNA, 19 bp, Homo sapiens
  siRNA target sequence for ITPKA (NM_002220.1,1349-1367).
ggggctggacaatctcatt

SEQ ID NO: 121397 - DNA, 19 bp, Homo sapiens
  siRNA target sequence for ITPKB (NM_002221.2,713-731).
gctcctcgcaggtgaagaa

SEQ ID NO: 121398 - DNA, 19 bp, Homo sapiens
  siRNA target sequence for ITPKB (NM_002221.2,714-732).
ctcctcgcaggtgaagaaa

SEQ ID NO: 121399 - DNA, 19 bp, Homo sapiens
  siRNA target sequence for ITPKB (NM_002221.2,719-737).
cgcaggtgaagaaaggaat

SEQ ID NO: 121400 - DNA, 19 bp, Homo sapiens
  siRNA target sequence for ITPKB (NM_002221.2,783-801).
gggtccatccgcttttgta

SEQ ID NO: 121401 - DNA, 19 bp, Homo sapiens
  siRNA target sequence for ITPKB (NM_002221.2,784-802).
ggtccatccgcttttgtaa

SEQ ID NO: 121402 - DNA, 19 bp, Homo sapiens
  siRNA target sequence for ITPKB (NM_002221.2,788-806).
catccgcttttgtaaggat

SEQ ID NO: 121403 - DNA, 19 bp, Homo sapiens
  siRNA target sequence for ITPKB (NM_002221.2,840-858).
ctcacccacagctatggaa

SEQ ID NO: 121404 - DNA, 19 bp, Homo sapiens
  siRNA target sequence for ITPKB (NM_002221.2,842-860).
cacccacagctatggaaat

SEQ ID NO: 121405 - DNA, 19 bp, Homo sapiens
  siRNA target sequence for ITPKB (NM_002221.2,918-936).
gctgttcggagctagctta

SEQ ID NO: 121406 - DNA, 19 bp, Homo sapiens
  siRNA target sequence for ITPKB (NM_002221.2,919-937).
ctgttcggagctagcttaa

SEQ ID NO: 121407 - DNA, 19 bp, Homo sapiens
  siRNA target sequence for ITPKB (NM_002221.2,949-967).
gaagtggcagcgagagtta

SEQ ID NO: 121408 - DNA, 19 bp, Homo sapiens
  siRNA target sequence for ITPKB (NM_002221.2,952-970).
gtggcagcgagagttacat

SEQ ID NO: 121409 - DNA, 19 bp, Homo sapiens
  siRNA target sequence for ITPKB (NM_002221.2,1481-1499).
gggacgctgcgaaagatct

SEQ ID NO: 121410 - DNA, 19 bp, Homo sapiens
  siRNA target sequence for ITPKB (NM_002221.2,1485-1503).
cgctgcgaaagatctgaaa

SEQ ID NO: 121411 - DNA, 19 bp, Homo sapiens
  siRNA target sequence for ITPKB (NM_002221.2,1813-1831).
ctgcccctgaggaaactgt

SEQ ID NO: 121412 - DNA, 19 bp, Homo sapiens
  siRNA target sequence for ITPKB (NM_002221.2,1971-1989).
caaatcatggaggaagata

SEQ ID NO: 121413 - DNA, 19 bp, Homo sapiens
  siRNA target sequence for ITPKB (NM_002221.2,2060-2078).
gacacgcagggagtttcaa

SEQ ID NO: 121414 - DNA, 19 bp, Homo sapiens
  siRNA target sequence for ITPKB (NM_002221.2,2475-2493).
cgagggaatcaagaaagaa

SEQ ID NO: 121415 - DNA, 19 bp, Homo sapiens
  siRNA target sequence for ITPKB (NM_002221.2,2503-2521).
gtgaaccgggacttcaaga

SEQ ID NO: 121416 - DNA, 19 bp, Homo sapiens
  siRNA target sequence for ITPKB (NM_002221.2,2558-2576).
gagagttcactaaaggaaa

SEQ ID NO: 121417 - DNA, 19 bp, Homo sapiens
  siRNA target sequence for ITPKB (NM_002221.2,2605-2623).
cggctgaaggccattcgaa

SEQ ID NO: 121418 - DNA, 19 bp, Homo sapiens
  siRNA target sequence for ITPKB (NM_002221.2,2616-2634).
cattcgaaccactctagaa

SEQ ID NO: 121419 - DNA, 19 bp, Homo sapiens
  siRNA target sequence for KCNH1 (NM_002238.2,215-233).
cacgtttctggagaatatt

SEQ ID NO: 121420 - DNA, 19 bp, Homo sapiens
  siRNA target sequence for KCNH1 (NM_002238.2,234-252).
gttcggcggtccaatgata

SEQ ID NO: 121421 - DNA, 19 bp, Homo sapiens
  siRNA target sequence for KCNH1 (NM_002238.2,237-255).
cggcggtccaatgatacta

SEQ ID NO: 121422 - DNA, 19 bp, Homo sapiens
  siRNA target sequence for KCNH1 (NM_002238.2,238-256).
ggcggtccaatgatactaa

SEQ ID NO: 121423 - DNA, 19 bp, Homo sapiens
  siRNA target sequence for KCNH1 (NM_002238.2,239-257).
gcggtccaatgatactaat

SEQ ID NO: 121424 - DNA, 19 bp, Homo sapiens
  siRNA target sequence for KCNH1 (NM_002238.2,240-258).
cggtccaatgatactaatt

SEQ ID NO: 121425 - DNA, 19 bp, Homo sapiens
  siRNA target sequence for KCNH1 (NM_002238.2,241-259).
ggtccaatgatactaattt

SEQ ID NO: 121426 - DNA, 19 bp, Homo sapiens
  siRNA target sequence for KCNH1 (NM_002238.2,242-260).
gtccaatgatactaatttt

SEQ ID NO: 121427 - DNA, 19 bp, Homo sapiens
  siRNA target sequence for KCNH1 (NM_002238.2,244-262).
ccaatgatactaattttgt

SEQ ID NO: 121428 - DNA, 19 bp, Homo sapiens
  siRNA target sequence for KCNH1 (NM_002238.2,263-281).
gttggggaatgctcagata

SEQ ID NO: 121429 - DNA, 19 bp, Homo sapiens
  siRNA target sequence for KCNH1 (NM_002238.2,282-300).
gtggactggcctattgtgt

SEQ ID NO: 121430 - DNA, 19 bp, Homo sapiens
  siRNA target sequence for KCNH1 (NM_002238.2,304-322).
gcaatgatggattttgcaa

SEQ ID NO: 121431 - DNA, 19 bp, Homo sapiens
  siRNA target sequence for KCNH1 (NM_002238.2,340-358).
gggcagaagtgatgcaaaa

SEQ ID NO: 121432 - DNA, 19 bp, Homo sapiens
  siRNA target sequence for KCNH1 (NM_002238.2,417-435).
gtgcggcaaacatttgaga

SEQ ID NO: 121433 - DNA, 19 bp, Homo sapiens
  siRNA target sequence for KCNH1 (NM_002238.2,432-450).
gagaactatgagatgaatt

SEQ ID NO: 121434 - DNA, 19 bp, Homo sapiens
  siRNA target sequence for KCNH1 (NM_002238.2,503-521).
gaaaattgctccaattcga

SEQ ID NO: 121435 - DNA, 19 bp, Homo sapiens
  siRNA target sequence for KCNH1 (NM_002238.2,674-692).
ggctccaagcgtgcaaaaa

SEQ ID NO: 121436 - DNA, 19 bp, Homo sapiens
  siRNA target sequence for KCNH1 (NM_002238.2,787-805).
cccctcacatcatcttaca

SEQ ID NO: 121437 - DNA, 19 bp, Homo sapiens
  siRNA target sequence for KCNH1 (NM_002238.2,788-806).
ccctcacatcatcttacat

SEQ ID NO: 121438 - DNA, 19 bp, Homo sapiens
  siRNA target sequence for KCNH1 (NM_002238.2,789-807).
cctcacatcatcttacatt

SEQ ID NO: 121439 - DNA, 19 bp, Homo sapiens
  siRNA target sequence for KCNH1 (NM_002238.2,864-882).
gccatcttggtcccttata

SEQ ID NO: 121440 - DNA, 19 bp, Homo sapiens
  siRNA target sequence for KCNH1 (NM_002238.2,865-883).
ccatcttggtcccttataa

SEQ ID NO: 121441 - DNA, 19 bp, Homo sapiens
  siRNA target sequence for KCNH1 (NM_002238.2,919-937).
ggctggttgttgatagcat

SEQ ID NO: 121442 - DNA, 19 bp, Homo sapiens
  siRNA target sequence for KCNH1 (NM_002238.2,930-948).
gatagcatcgtggatgtta

SEQ ID NO: 121443 - DNA, 19 bp, Homo sapiens
  siRNA target sequence for KCNH1 (NM_002238.2,934-952).
gcatcgtggatgttatctt

SEQ ID NO: 121444 - DNA, 19 bp, Homo sapiens
  siRNA target sequence for KCNH1 (NM_002238.2,957-975).
gtggacattgtgctcaatt

SEQ ID NO: 121445 - DNA, 19 bp, Homo sapiens
  siRNA target sequence for KCNH1 (NM_002238.2,1046-1064).
gaagacgtggtttgtgatt

SEQ ID NO: 121446 - DNA, 19 bp, Homo sapiens
  siRNA target sequence for KCNH1 (NM_002238.2,1078-1096).
gtttgccatatgatgtcat

SEQ ID NO: 121447 - DNA, 19 bp, Homo sapiens
  siRNA target sequence for KCNH1 (NM_002238.2,1132-1150).
gcctgttcagctctctaaa

SEQ ID NO: 121448 - DNA, 19 bp, Homo sapiens
  siRNA target sequence for KCNH1 (NM_002238.2,1133-1151).
cctgttcagctctctaaaa

SEQ ID NO: 121449 - DNA, 19 bp, Homo sapiens
  siRNA target sequence for KCNH1 (NM_002238.2,1136-1154).
gttcagctctctaaaagtt

SEQ ID NO: 121450 - DNA, 19 bp, Homo sapiens
  siRNA target sequence for KCNH1 (NM_002238.2,1190-1208).
gctggaccactacattgaa

SEQ ID NO: 121451 - DNA, 19 bp, Homo sapiens
  siRNA target sequence for KCNH1 (NM_002238.2,1191-1209).
ctggaccactacattgaat

SEQ ID NO: 121452 - DNA, 19 bp, Homo sapiens
  siRNA target sequence for KCNH1 (NM_002238.2,1193-1211).
ggaccactacattgaatat

SEQ ID NO: 121453 - DNA, 19 bp, Homo sapiens
  siRNA target sequence for KCNH1 (NM_002238.2,1196-1214).
ccactacattgaatatgga

SEQ ID NO: 121454 - DNA, 19 bp, Homo sapiens
  siRNA target sequence for KCNH1 (NM_002238.2,1368-1386).
ggcaccccttaccagttta

SEQ ID NO: 121455 - DNA, 19 bp, Homo sapiens
  siRNA target sequence for KCNH1 (NM_002238.2,1369-1387).
gcaccccttaccagtttaa

SEQ ID NO: 121456 - DNA, 19 bp, Homo sapiens
  siRNA target sequence for KCNH1 (NM_002238.2,1436-1454).
ctacatctcctcgttgtat

SEQ ID NO: 121457 - DNA, 19 bp, Homo sapiens
  siRNA target sequence for KCNH1 (NM_002238.2,1442-1460).
ctcctcgttgtatttcaca

SEQ ID NO: 121458 - DNA, 19 bp, Homo sapiens
  siRNA target sequence for KCNH1 (NM_002238.2,1500-1518).
ccatccacagacattgaga

SEQ ID NO: 121459 - DNA, 19 bp, Homo sapiens
  siRNA target sequence for KCNH1 (NM_002238.2,1544-1562).
gattggctcacttctctat

SEQ ID NO: 121460 - DNA, 19 bp, Homo sapiens
  siRNA target sequence for KCNH1 (NM_002238.2,1585-1603).
cgactattttccaacagat

SEQ ID NO: 121461 - DNA, 19 bp, Homo sapiens
  siRNA target sequence for KCNH1 (NM_002238.2,1588-1606).
ctattttccaacagatgta

SEQ ID NO: 121462 - DNA, 19 bp, Homo sapiens
  siRNA target sequence for KCNH1 (NM_002238.2,1664-1682).
ctaccaggtgccaaaagga

SEQ ID NO: 121463 - DNA, 19 bp, Homo sapiens
  siRNA target sequence for KCNH1 (NM_002238.2,1670-1688).
ggtgccaaaaggattgagt

SEQ ID NO: 121464 - DNA, 19 bp, Homo sapiens
  siRNA target sequence for KCNH1 (NM_002238.2,1681-1699).
gattgagtgagcgagtaat

SEQ ID NO: 121465 - DNA, 19 bp, Homo sapiens
  siRNA target sequence for KCNH1 (NM_002238.2,2089-2107).
gtgatctgcatgtgatcaa

SEQ ID NO: 121466 - DNA, 19 bp, Homo sapiens
  siRNA target sequence for KCNH1 (NM_002238.2,2172-2190).
ctgattctgacgtacaact

SEQ ID NO: 121467 - DNA, 19 bp, Homo sapiens
  siRNA target sequence for KCNH1 (NM_002238.2,2213-2231).
gaagatcagcgatgtgaaa

SEQ ID NO: 121468 - DNA, 19 bp, Homo sapiens
  siRNA target sequence for KCNH1 (NM_002238.2,2241-2259).
gaagaacgcatgaaacgaa

SEQ ID NO: 121469 - DNA, 19 bp, Homo sapiens
  siRNA target sequence for KCNH1 (NM_002238.2,2248-2266).
gcatgaaacgaaagaatga

SEQ ID NO: 121470 - DNA, 19 bp, Homo sapiens
  siRNA target sequence for KCNH1 (NM_002238.2,2513-2531).
gccagaccacgcaaagcta

SEQ ID NO: 121471 - DNA, 19 bp, Homo sapiens
  siRNA target sequence for KCNH1 (NM_002238.2,2808-2826).
ctggcagaggtcaagcatt

SEQ ID NO: 121472 - DNA, 19 bp, Homo sapiens
  siRNA target sequence for KCNH1 (NM_002238.2,2812-2830).
cagaggtcaagcattcgtt

SEQ ID NO: 121473 - DNA, 19 bp, Homo sapiens
  siRNA target sequence for KCNH1 (NM_002238.2,2904-2922).
gccttaaacgccaaaatga

SEQ ID NO: 121474 - DNA, 19 bp, Homo sapiens
  siRNA target sequence for KCNH1 (NM_002238.2,2912-2930).
cgccaaaatgaccaatatt

SEQ ID NO: 121475 - DNA, 19 bp, Homo sapiens
  siRNA target sequence for KCNH1 (NM_002238.2,2914-2932).
ccaaaatgaccaatattga

SEQ ID NO: 121476 - DNA, 19 bp, Homo sapiens
  siRNA target sequence for KCNH1 (NM_002238.2,2937-2955).
cagctctctgagatactca

SEQ ID NO: 121477 - DNA, 19 bp, Homo sapiens
  siRNA target sequence for KCNH1 (NM_002238.2,2946-2964).
gagatactcaggatattaa

SEQ ID NO: 121478 - DNA, 19 bp, Homo sapiens
  siRNA target sequence for KCNH1 (NM_002238.2,2984-3002).
gtctcctcaggagttgttt

SEQ ID NO: 121479 - DNA, 19 bp, Homo sapiens
  siRNA target sequence for KCNH1 (NM_002238.2,3027-3045).
gaatcagagagagacattt

SEQ ID NO: 121480 - DNA, 19 bp, Homo sapiens
  siRNA target sequence for KCNH1 (NM_172362.1,1136-1154).
gggtgatccagggaagatt

SEQ ID NO: 121481 - DNA, 19 bp, Homo sapiens
  siRNA target sequence for KCNH1 (NM_172362.1,1140-1158).
gatccagggaagattggtt

SEQ ID NO: 121482 - DNA, 19 bp, Homo sapiens
  siRNA target sequence for KCNH5 (NM_139318.3,78-96).
ggcaccgcagaacacattt

SEQ ID NO: 121483 - DNA, 19 bp, Homo sapiens
  siRNA target sequence for KCNH5 (NM_139318.3,79-97).
gcaccgcagaacacatttt

SEQ ID NO: 121484 - DNA, 19 bp, Homo sapiens
  siRNA target sequence for KCNH5 (NM_139318.3,80-98).
caccgcagaacacattttt

SEQ ID NO: 121485 - DNA, 19 bp, Homo sapiens
  siRNA target sequence for KCNH5 (NM_139318.3,111-129).
caggcgctccagtgaatca

SEQ ID NO: 121486 - DNA, 19 bp, Homo sapiens
  siRNA target sequence for KCNH5 (NM_139318.3,115-133).
cgctccagtgaatcaagtt

SEQ ID NO: 121487 - DNA, 19 bp, Homo sapiens
  siRNA target sequence for KCNH5 (NM_139318.3,116-134).
gctccagtgaatcaagttt

SEQ ID NO: 121488 - DNA, 19 bp, Homo sapiens
  siRNA target sequence for KCNH5 (NM_139318.3,119-137).
ccagtgaatcaagtttctt

SEQ ID NO: 121489 - DNA, 19 bp, Homo sapiens
  siRNA target sequence for KCNH5 (NM_139318.3,157-175).
gtggattggcctgtagttt

SEQ ID NO: 121490 - DNA, 19 bp, Homo sapiens
  siRNA target sequence for KCNH5 (NM_139318.3,159-177).
ggattggcctgtagtttat

SEQ ID NO: 121491 - DNA, 19 bp, Homo sapiens
  siRNA target sequence for KCNH5 (NM_139318.3,184-202).
gacggtttttgtaaactct

SEQ ID NO: 121492 - DNA, 19 bp, Homo sapiens
  siRNA target sequence for KCNH5 (NM_139318.3,217-235).
gctgacgtcatgcagaaaa

SEQ ID NO: 121493 - DNA, 19 bp, Homo sapiens
  siRNA target sequence for KCNH5 (NM_139318.3,220-238).
gacgtcatgcagaaaagca

SEQ ID NO: 121494 - DNA, 19 bp, Homo sapiens
  siRNA target sequence for KCNH5 (NM_139318.3,292-310).
gtcaggcaaacttttgaca

SEQ ID NO: 121495 - DNA, 19 bp, Homo sapiens
  siRNA target sequence for KCNH5 (NM_139318.3,307-325).
gacaactacgaatcaaact

SEQ ID NO: 121496 - DNA, 19 bp, Homo sapiens
  siRNA target sequence for KCNH5 (NM_139318.3,378-396).
gcaaattgcaccaataaga

SEQ ID NO: 121497 - DNA, 19 bp, Homo sapiens
  siRNA target sequence for KCNH5 (NM_139318.3,431-449).
ctttcaaggatattacgtt

SEQ ID NO: 121498 - DNA, 19 bp, Homo sapiens
  siRNA target sequence for KCNH5 (NM_139318.3,438-456).
ggatattacgttgttcaaa

SEQ ID NO: 121499 - DNA, 19 bp, Homo sapiens
  siRNA target sequence for KCNH5 (NM_139318.3,479-497).
caaaaggttggacgaaatt

SEQ ID NO: 121500 - DNA, 19 bp, Homo sapiens
  siRNA target sequence for KCNH5 (NM_139318.3,492-510).
gaaatttgcccgattgaca

SEQ ID NO: 121501 - DNA, 19 bp, Homo sapiens
  siRNA target sequence for KCNH5 (NM_139318.3,544-562).
cagctcacgccaatgaata

SEQ ID NO: 121502 - DNA, 19 bp, Homo sapiens
  siRNA target sequence for KCNH5 (NM_139318.3,546-564).
gctcacgccaatgaataaa

SEQ ID NO: 121503 - DNA, 19 bp, Homo sapiens
  siRNA target sequence for KCNH5 (NM_139318.3,547-565).
ctcacgccaatgaataaaa

SEQ ID NO: 121504 - DNA, 19 bp, Homo sapiens
  siRNA target sequence for KCNH5 (NM_139318.3,549-567).
cacgccaatgaataaaaca

SEQ ID NO: 121505 - DNA, 19 bp, Homo sapiens
  siRNA target sequence for KCNH5 (NM_139318.3,551-569).
cgccaatgaataaaacaga

SEQ ID NO: 121506 - DNA, 19 bp, Homo sapiens
  siRNA target sequence for KCNH5 (NM_139318.3,566-584).
cagaggtggtccataaaca

SEQ ID NO: 121507 - DNA, 19 bp, Homo sapiens
  siRNA target sequence for KCNH5 (NM_139318.3,570-588).
ggtggtccataaacattca

SEQ ID NO: 121508 - DNA, 19 bp, Homo sapiens
  siRNA target sequence for KCNH5 (NM_139318.3,571-589).
gtggtccataaacattcaa

SEQ ID NO: 121509 - DNA, 19 bp, Homo sapiens
  siRNA target sequence for KCNH5 (NM_139318.3,573-591).
ggtccataaacattcaaga

SEQ ID NO: 121510 - DNA, 19 bp, Homo sapiens
  siRNA target sequence for KCNH5 (NM_139318.3,576-594).
ccataaacattcaagacta

SEQ ID NO: 121511 - DNA, 19 bp, Homo sapiens
  siRNA target sequence for KCNH5 (NM_139318.3,587-605).
caagactagctgaagttct

SEQ ID NO: 121512 - DNA, 19 bp, Homo sapiens
  siRNA target sequence for KCNH5 (NM_139318.3,604-622).
cttcagctgggatcagata

SEQ ID NO: 121513 - DNA, 19 bp, Homo sapiens
  siRNA target sequence for KCNH5 (NM_139318.3,619-637).
gatatccttcctcagtata

SEQ ID NO: 121514 - DNA, 19 bp, Homo sapiens
  siRNA target sequence for KCNH5 (NM_139318.3,654-672).
gacgccaccacacattatt

SEQ ID NO: 121515 - DNA, 19 bp, Homo sapiens
  siRNA target sequence for KCNH5 (NM_139318.3,656-674).
cgccaccacacattatttt

SEQ ID NO: 121516 - DNA, 19 bp, Homo sapiens
  siRNA target sequence for KCNH5 (NM_139318.3,657-675).
gccaccacacattatttta

SEQ ID NO: 121517 - DNA, 19 bp, Homo sapiens
  siRNA target sequence for KCNH5 (NM_139318.3,725-743).
ccttctacaccgccattat

SEQ ID NO: 121518 - DNA, 19 bp, Homo sapiens
  siRNA target sequence for KCNH5 (NM_139318.3,729-747).
ctacaccgccattatggtt

SEQ ID NO: 121519 - DNA, 19 bp, Homo sapiens
  siRNA target sequence for KCNH5 (NM_139318.3,735-753).
cgccattatggttccttat

SEQ ID NO: 121520 - DNA, 19 bp, Homo sapiens
  siRNA target sequence for KCNH5 (NM_139318.3,736-754).
gccattatggttccttata

SEQ ID NO: 121521 - DNA, 19 bp, Homo sapiens
  siRNA target sequence for KCNH5 (NM_139318.3,737-755).
ccattatggttccttataa

SEQ ID NO: 121522 - DNA, 19 bp, Homo sapiens
  siRNA target sequence for KCNH5 (NM_139318.3,791-809).
ggctggtactggatagtgt

SEQ ID NO: 121523 - DNA, 19 bp, Homo sapiens
  siRNA target sequence for KCNH5 (NM_139318.3,826-844).
ctggttgacatcgttttaa

SEQ ID NO: 121524 - DNA, 19 bp, Homo sapiens
  siRNA target sequence for KCNH5 (NM_139318.3,828-846).
ggttgacatcgttttaaat

SEQ ID NO: 121525 - DNA, 19 bp, Homo sapiens
  siRNA target sequence for KCNH5 (NM_139318.3,829-847).
gttgacatcgttttaaatt

SEQ ID NO: 121526 - DNA, 19 bp, Homo sapiens
  siRNA target sequence for KCNH5 (NM_139318.3,889-907).
gaccctaagctcataagga

SEQ ID NO: 121527 - DNA, 19 bp, Homo sapiens
  siRNA target sequence for KCNH5 (NM_139318.3,897-915).
gctcataaggatgaactat

SEQ ID NO: 121528 - DNA, 19 bp, Homo sapiens
  siRNA target sequence for KCNH5 (NM_139318.3,906-924).
gatgaactatctgaaaact

SEQ ID NO: 121529 - DNA, 19 bp, Homo sapiens
  siRNA target sequence for KCNH5 (NM_139318.3,936-954).
cgatctgctgtcttgttta

SEQ ID NO: 121530 - DNA, 19 bp, Homo sapiens
  siRNA target sequence for KCNH5 (NM_139318.3,942-960).
gctgtcttgtttaccttat

SEQ ID NO: 121531 - DNA, 19 bp, Homo sapiens
  siRNA target sequence for KCNH5 (NM_139318.3,1044-1062).
gggccgtgtggctaggaaa

SEQ ID NO: 121532 - DNA, 19 bp, Homo sapiens
  siRNA target sequence for KCNH5 (NM_139318.3,1058-1076).
ggaaactggaccattacct

SEQ ID NO: 121533 - DNA, 19 bp, Homo sapiens
  siRNA target sequence for KCNH5 (NM_139318.3,1059-1077).
gaaactggaccattaccta

SEQ ID NO: 121534 - DNA, 19 bp, Homo sapiens
  siRNA target sequence for KCNH5 (NM_139318.3,1063-1081).
ctggaccattacctagaat

SEQ ID NO: 121535 - DNA, 19 bp, Homo sapiens
  siRNA target sequence for KCNH5 (NM_139318.3,1186-1204).
gtcactaacaccatccaaa

SEQ ID NO: 121536 - DNA, 19 bp, Homo sapiens
  siRNA target sequence for KCNH5 (NM_139318.3,1233-1251).
gagcattgggactccatat

SEQ ID NO: 121537 - DNA, 19 bp, Homo sapiens
  siRNA target sequence for KCNH5 (NM_139318.3,1242-1260).
gactccatatcgctacaat

SEQ ID NO: 121538 - DNA, 19 bp, Homo sapiens
  siRNA target sequence for KCNH5 (NM_139318.3,1246-1264).
ccatatcgctacaatacca

SEQ ID NO: 121539 - DNA, 19 bp, Homo sapiens
  siRNA target sequence for KCNH5 (NM_139318.3,1286-1304).
gacccagcaaggattcatt

SEQ ID NO: 121540 - DNA, 19 bp, Homo sapiens
  siRNA target sequence for KCNH5 (NM_139318.3,1289-1307).
ccagcaaggattcattgta

SEQ ID NO: 121541 - DNA, 19 bp, Homo sapiens
  siRNA target sequence for KCNH5 (NM_139318.3,1309-1327).
gtgtcctctctctacttta

SEQ ID NO: 121542 - DNA, 19 bp, Homo sapiens
  siRNA target sequence for KCNH5 (NM_139318.3,1318-1336).
ctctactttaccatgacaa

SEQ ID NO: 121543 - DNA, 19 bp, Homo sapiens
  siRNA target sequence for KCNH5 (NM_139318.3,1332-1350).
gacaagccttacaaccata

SEQ ID NO: 121544 - DNA, 19 bp, Homo sapiens
  siRNA target sequence for KCNH5 (NM_139318.3,1337-1355).
gccttacaaccataggatt

SEQ ID NO: 121545 - DNA, 19 bp, Homo sapiens
  siRNA target sequence for KCNH5 (NM_139318.3,1583-1601).
caacatggtccatgtcaaa

SEQ ID NO: 121546 - DNA, 19 bp, Homo sapiens
  siRNA target sequence for KCNH5 (NM_139318.3,1666-1684).
catctaaaccggaaggttt

SEQ ID NO: 121547 - DNA, 19 bp, Homo sapiens
  siRNA target sequence for KCNH5 (NM_139318.3,1739-1757).
cggtagagttccaaaccat

SEQ ID NO: 121548 - DNA, 19 bp, Homo sapiens
  siRNA target sequence for KCNH5 (NM_139318.3,1744-1762).
gagttccaaaccattcact

SEQ ID NO: 121549 - DNA, 19 bp, Homo sapiens
  siRNA target sequence for KCNH5 (NM_139318.3,1979-1997).
gggaagccttgctcaaagt

SEQ ID NO: 121550 - DNA, 19 bp, Homo sapiens
  siRNA target sequence for KCNH5 (NM_139318.3,2115-2133).
gcgcctccggcagaagaat

SEQ ID NO: 121551 - DNA, 19 bp, Homo sapiens
  siRNA target sequence for KCNH5 (NM_139318.3,2117-2135).
gcctccggcagaagaatga

SEQ ID NO: 121552 - DNA, 19 bp, Homo sapiens
  siRNA target sequence for KCNH5 (NM_139318.3,2260-2278).
gagagccgctccttacaga

SEQ ID NO: 121553 - DNA, 19 bp, Homo sapiens
  siRNA target sequence for KCNH5 (NM_139318.3,2262-2280).
gagccgctccttacagaat

SEQ ID NO: 121554 - DNA, 19 bp, Homo sapiens
  siRNA target sequence for KCNH5 (NM_139318.3,2308-2326).
gtgactgtgtcacagatta

SEQ ID NO: 121555 - DNA, 19 bp, Homo sapiens
  siRNA target sequence for KCNH5 (NM_139318.3,2310-2328).
gactgtgtcacagattact

SEQ ID NO: 121556 - DNA, 19 bp, Homo sapiens
  siRNA target sequence for KCNH5 (NM_139318.3,2339-2357).
cgtctctggcctatgtgaa

SEQ ID NO: 121557 - DNA, 19 bp, Homo sapiens
  siRNA target sequence for KCNH5 (NM_139318.3,2340-2358).
gtctctggcctatgtgaaa

SEQ ID NO: 121558 - DNA, 19 bp, Homo sapiens
  siRNA target sequence for KCNH5 (NM_139318.3,2412-2430).
cggcggtgctgaccaaaaa

SEQ ID NO: 121559 - DNA, 19 bp, Homo sapiens
  siRNA target sequence for KCNH5 (NM_139318.3,2413-2431).
ggcggtgctgaccaaaaat

SEQ ID NO: 121560 - DNA, 19 bp, Homo sapiens
  siRNA target sequence for KCNH5 (NM_139318.3,2415-2433).
cggtgctgaccaaaaatgt

SEQ ID NO: 121561 - DNA, 19 bp, Homo sapiens
  siRNA target sequence for KCNH5 (NM_139318.3,2417-2435).
gtgctgaccaaaaatgtct

SEQ ID NO: 121562 - DNA, 19 bp, Homo sapiens
  siRNA target sequence for KCNH5 (NM_139318.3,2480-2498).
ggtggctgcgactcaagaa

SEQ ID NO: 121563 - DNA, 19 bp, Homo sapiens
  siRNA target sequence for KCNH5 (NM_139318.3,2481-2499).
gtggctgcgactcaagaat

SEQ ID NO: 121564 - DNA, 19 bp, Homo sapiens
  siRNA target sequence for KCNH5 (NM_139318.3,2483-2501).
ggctgcgactcaagaataa

SEQ ID NO: 121565 - DNA, 19 bp, Homo sapiens
  siRNA target sequence for KCNH5 (NM_139318.3,2484-2502).
gctgcgactcaagaataat

SEQ ID NO: 121566 - DNA, 19 bp, Homo sapiens
  siRNA target sequence for KCNH5 (NM_139318.3,2485-2503).
ctgcgactcaagaataata

SEQ ID NO: 121567 - DNA, 19 bp, Homo sapiens
  siRNA target sequence for KCNH5 (NM_139318.3,2532-2550).
ctggaataatgtcactaaa

SEQ ID NO: 121568 - DNA, 19 bp, Homo sapiens
  siRNA target sequence for KCNH5 (NM_139318.3,2535-2553).
gaataatgtcactaaagct

SEQ ID NO: 121569 - DNA, 19 bp, Homo sapiens
  siRNA target sequence for KCNH5 (NM_139318.3,2657-2675).
caaaaagtgaccttcgttt

SEQ ID NO: 121570 - DNA, 19 bp, Homo sapiens
  siRNA target sequence for KCNH5 (NM_139318.3,2663-2681).
gtgaccttcgtttggataa

SEQ ID NO: 121571 - DNA, 19 bp, Homo sapiens
  siRNA target sequence for KCNH5 (NM_139318.3,2777-2795).
cactgcaggaagtcaaaca

SEQ ID NO: 121572 - DNA, 19 bp, Homo sapiens
  siRNA target sequence for KCNH5 (NM_172375.1,1860-1878).
ggtggctattttagatcat

SEQ ID NO: 121573 - DNA, 19 bp, Homo sapiens
  siRNA target sequence for KCNN1 (NM_002248.3,556-574).
ctcggggaaaccctcaaat

SEQ ID NO: 121574 - DNA, 19 bp, Homo sapiens
  siRNA target sequence for KCNN1 (NM_002248.3,1468-1486).
gctcaccaagcgggtaaaa

SEQ ID NO: 121575 - DNA, 19 bp, Homo sapiens
  siRNA target sequence for KCNN1 (NM_002248.3,1509-1527).
gggagacgtggctcatcta

SEQ ID NO: 121576 - DNA, 19 bp, Homo sapiens
  siRNA target sequence for KCNN1 (NM_002248.3,1511-1529).
gagacgtggctcatctaca

SEQ ID NO: 121577 - DNA, 19 bp, Homo sapiens
  siRNA target sequence for KCNN1 (NM_002248.3,1516-1534).
gtggctcatctacaaacat

SEQ ID NO: 121578 - DNA, 19 bp, Homo sapiens
  siRNA target sequence for KCNN1 (NM_002248.3,1697-1715).
gtcatgtacgaccttgtat

SEQ ID NO: 121579 - DNA, 19 bp, Homo sapiens
  siRNA target sequence for KCNN2 (NM_021614.2,648-666).
ccgagatcgtggtgtctaa

SEQ ID NO: 121580 - DNA, 19 bp, Homo sapiens
  siRNA target sequence for KCNN2 (NM_021614.2,663-681).
ctaagcccgagcacaacaa

SEQ ID NO: 121581 - DNA, 19 bp, Homo sapiens
  siRNA target sequence for KCNN2 (NM_021614.2,861-879).
gcgactacgcgctcatctt

SEQ ID NO: 121582 - DNA, 19 bp, Homo sapiens
  siRNA target sequence for KCNN2 (NM_021614.2,943-961).
ggcgtcgctgtattcctta

SEQ ID NO: 121583 - DNA, 19 bp, Homo sapiens
  siRNA target sequence for KCNN2 (NM_021614.2,1018-1036).
gtaccacgccagggaaata

SEQ ID NO: 121584 - DNA, 19 bp, Homo sapiens
  siRNA target sequence for KCNN2 (NM_021614.2,1022-1040).
cacgccagggaaatacagt

SEQ ID NO: 121585 - DNA, 19 bp, Homo sapiens
  siRNA target sequence for KCNN2 (NM_021614.2,1072-1090).
gagaatagccatgacttat

SEQ ID NO: 121586 - DNA, 19 bp, Homo sapiens
  siRNA target sequence for KCNN2 (NM_021614.2,1086-1104).
cttatgagcgtattttctt

SEQ ID NO: 121587 - DNA, 19 bp, Homo sapiens
  siRNA target sequence for KCNN2 (NM_021614.2,1141-1159).
catacctgggaattataca

SEQ ID NO: 121588 - DNA, 19 bp, Homo sapiens
  siRNA target sequence for KCNN2 (NM_021614.2,1209-1227).
ccgctgatgtggatattat

SEQ ID NO: 121589 - DNA, 19 bp, Homo sapiens
  siRNA target sequence for KCNN2 (NM_021614.2,1210-1228).
cgctgatgtggatattatt

SEQ ID NO: 121590 - DNA, 19 bp, Homo sapiens
  siRNA target sequence for KCNN2 (NM_021614.2,1211-1229).
gctgatgtggatattattt

SEQ ID NO: 121591 - DNA, 19 bp, Homo sapiens
  siRNA target sequence for KCNN2 (NM_021614.2,1217-1235).
gtggatattattttatcta

SEQ ID NO: 121592 - DNA, 19 bp, Homo sapiens
  siRNA target sequence for KCNN2 (NM_021614.2,1317-1335).
gcattggagcacttaataa

SEQ ID NO: 121593 - DNA, 19 bp, Homo sapiens
  siRNA target sequence for KCNN2 (NM_021614.2,1342-1360).
cttcaatacacgttttgtt

SEQ ID NO: 121594 - DNA, 19 bp, Homo sapiens
  siRNA target sequence for KCNN2 (NM_021614.2,1352-1370).
cgttttgttatgaagactt

SEQ ID NO: 121595 - DNA, 19 bp, Homo sapiens
  siRNA target sequence for KCNN2 (NM_021614.2,1383-1401).
gcccaggaactgtactctt

SEQ ID NO: 121596 - DNA, 19 bp, Homo sapiens
  siRNA target sequence for KCNN2 (NM_021614.2,1388-1406).
ggaactgtactcttggttt

SEQ ID NO: 121597 - DNA, 19 bp, Homo sapiens
  siRNA target sequence for KCNN2 (NM_021614.2,1394-1412).
gtactcttggtttttagta

SEQ ID NO: 121598 - DNA, 19 bp, Homo sapiens
  siRNA target sequence for KCNN2 (NM_021614.2,1402-1420).
ggtttttagtatctcatta

SEQ ID NO: 121599 - DNA, 19 bp, Homo sapiens
  siRNA target sequence for KCNN2 (NM_021614.2,1496-1514).
ggagcgatgtggttgatat

SEQ ID NO: 121600 - DNA, 19 bp, Homo sapiens
  siRNA target sequence for KCNN2 (NM_021614.2,1499-1517).
gcgatgtggttgatatcaa

SEQ ID NO: 121601 - DNA, 19 bp, Homo sapiens
  siRNA target sequence for KCNN2 (NM_021614.2,1500-1518).
cgatgtggttgatatcaat

SEQ ID NO: 121602 - DNA, 19 bp, Homo sapiens
  siRNA target sequence for KCNN2 (NM_021614.2,1544-1562).
gacatggtacctaacacat

SEQ ID NO: 121603 - DNA, 19 bp, Homo sapiens
  siRNA target sequence for KCNN2 (NM_021614.2,1581-1599).
gcttacttactggaattat

SEQ ID NO: 121604 - DNA, 19 bp, Homo sapiens
  siRNA target sequence for KCNN2 (NM_021614.2,1664-1682).
gaaaaacacgtgcacaatt

SEQ ID NO: 121605 - DNA, 19 bp, Homo sapiens
  siRNA target sequence for KCNN2 (NM_021614.2,1697-1715).
cagctgactaaaagagtaa

SEQ ID NO: 121606 - DNA, 19 bp, Homo sapiens
  siRNA target sequence for KCNN2 (NM_021614.2,1742-1760).
gaaacatggctaatttaca

SEQ ID NO: 121607 - DNA, 19 bp, Homo sapiens
  siRNA target sequence for KCNN2 (NM_021614.2,1783-1801).
gatagatcatgcaaaagta

SEQ ID NO: 121608 - DNA, 19 bp, Homo sapiens
  siRNA target sequence for KCNN2 (NM_021614.2,1918-1936).
catcatgtatgatatgatt

SEQ ID NO: 121609 - DNA, 19 bp, Homo sapiens
  siRNA target sequence for KCNN2 (NM_021614.2,1933-1951).
gatttctgacttaaacgaa

SEQ ID NO: 121610 - DNA, 19 bp, Homo sapiens
  siRNA target sequence for KCNN2 (NM_021614.2,1992-2010).
caaaactagagactttgat

SEQ ID NO: 121611 - DNA, 19 bp, Homo sapiens
  siRNA target sequence for KCNN3 (NM_002249.3,712-730).
gccagctcaatctcaatga

SEQ ID NO: 121612 - DNA, 19 bp, Homo sapiens
  siRNA target sequence for KCNN3 (NM_002249.3,851-869).
catgagctcctgcaagtat

SEQ ID NO: 121613 - DNA, 19 bp, Homo sapiens
  siRNA target sequence for KCNN3 (NM_002249.3,1145-1163).
caggagggccctgtttgaa

SEQ ID NO: 121614 - DNA, 19 bp, Homo sapiens
  siRNA target sequence for KCNN3 (NM_002249.3,1215-1233).
gttgttatggtgatagaga

SEQ ID NO: 121615 - DNA, 19 bp, Homo sapiens
  siRNA target sequence for KCNN3 (NM_002249.3,1239-1257).
ctctcttggggtttgtact

SEQ ID NO: 121616 - DNA, 19 bp, Homo sapiens
  siRNA target sequence for KCNN3 (NM_002249.3,1243-1261).
cttggggtttgtactcaaa

SEQ ID NO: 121617 - DNA, 19 bp, Homo sapiens
  siRNA target sequence for KCNN3 (NM_002249.3,1410-1428).
gagcgcatcctgtacatca

SEQ ID NO: 121618 - DNA, 19 bp, Homo sapiens
  siRNA target sequence for KCNN3 (NM_002249.3,1459-1477).
ccattcctggcgagtacaa

SEQ ID NO: 121619 - DNA, 19 bp, Homo sapiens
  siRNA target sequence for KCNN3 (NM_002249.3,1467-1485).
ggcgagtacaagttcttct

SEQ ID NO: 121620 - DNA, 19 bp, Homo sapiens
  siRNA target sequence for KCNN3 (NM_002249.3,1785-1803).
gaccagcaggacgtaacta

SEQ ID NO: 121621 - DNA, 19 bp, Homo sapiens
  siRNA target sequence for KCNN3 (NM_002249.3,1787-1805).
ccagcaggacgtaactagt

SEQ ID NO: 121622 - DNA, 19 bp, Homo sapiens
  siRNA target sequence for KCNN3 (NM_002249.3,1788-1806).
cagcaggacgtaactagta

SEQ ID NO: 121623 - DNA, 19 bp, Homo sapiens
  siRNA target sequence for KCNN3 (NM_002249.3,1791-1809).
caggacgtaactagtaact

SEQ ID NO: 121624 - DNA, 19 bp, Homo sapiens
  siRNA target sequence for KCNN3 (NM_002249.3,1793-1811).
ggacgtaactagtaacttt

SEQ ID NO: 121625 - DNA, 19 bp, Homo sapiens
  siRNA target sequence for KCNN3 (NM_002249.3,1840-1858).
cattcctttccattggtta

SEQ ID NO: 121626 - DNA, 19 bp, Homo sapiens
  siRNA target sequence for KCNN3 (NM_002249.3,1981-1999).
cggagaagcacgttcataa

SEQ ID NO: 121627 - DNA, 19 bp, Homo sapiens
  siRNA target sequence for KCNN3 (NM_002249.3,2054-2072).
ccttcgggaaacatggtta

SEQ ID NO: 121628 - DNA, 19 bp, Homo sapiens
  siRNA target sequence for KCNN3 (NM_002249.3,2058-2076).
cgggaaacatggttaatct

SEQ ID NO: 121629 - DNA, 19 bp, Homo sapiens
  siRNA target sequence for KCNN3 (NM_002249.3,2209-2227).
ctctggtggacctttccaa

SEQ ID NO: 121630 - DNA, 19 bp, Homo sapiens
  siRNA target sequence for KCNN3 (NM_002249.3,2234-2252).
gaatgtcatgtatgactta

SEQ ID NO: 121631 - DNA, 19 bp, Homo sapiens
  siRNA target sequence for KCNN3 (NM_002249.3,2238-2256).
gtcatgtatgacttaatca

SEQ ID NO: 121632 - DNA, 19 bp, Homo sapiens
  siRNA target sequence for KCNN3 (NM_002249.3,2240-2258).
catgtatgacttaatcaca

SEQ ID NO: 121633 - DNA, 19 bp, Homo sapiens
  siRNA target sequence for KCNN3 (NM_002249.3,2493-2511).
ccgaccccgtacacaagtt

SEQ ID NO: 121634 - DNA, 19 bp, Homo sapiens
  siRNA target sequence for KCNN3 (NM_002249.3,2495-2513).
gaccccgtacacaagttca

SEQ ID NO: 121635 - DNA, 19 bp, Homo sapiens
  siRNA target sequence for KCNN4 (NM_002250.2,564-582).
ctacctgttcctggttaaa

SEQ ID NO: 121636 - DNA, 19 bp, Homo sapiens
  siRNA target sequence for KCNN4 (NM_002250.2,568-586).
ctgttcctggttaaatgca

SEQ ID NO: 121637 - DNA, 19 bp, Homo sapiens
  siRNA target sequence for KCNN4 (NM_002250.2,771-789).
gccgtgcgtgcaggattta

SEQ ID NO: 121638 - DNA, 19 bp, Homo sapiens
  siRNA target sequence for KCNN4 (NM_002250.2,936-954).
cagcatcggcgctctcaat

SEQ ID NO: 121639 - DNA, 19 bp, Homo sapiens
  siRNA target sequence for KCNN4 (NM_002250.2,938-956).
gcatcggcgctctcaatca

SEQ ID NO: 121640 - DNA, 19 bp, Homo sapiens
  siRNA target sequence for KCNN4 (NM_002250.2,939-957).
catcggcgctctcaatcaa

SEQ ID NO: 121641 - DNA, 19 bp, Homo sapiens
  siRNA target sequence for KCNN4 (NM_002250.2,974-992).
ggttcgtggccaagcttta

SEQ ID NO: 121642 - DNA, 19 bp, Homo sapiens
  siRNA target sequence for KCNN4 (NM_002250.2,982-1000).
gccaagctttacatgaaca

SEQ ID NO: 121643 - DNA, 19 bp, Homo sapiens
  siRNA target sequence for KCNN4 (NM_002250.2,1073-1091).
ccgagaggcaggctgttaa

SEQ ID NO: 121644 - DNA, 19 bp, Homo sapiens
  siRNA target sequence for KCNN4 (NM_002250.2,1074-1092).
cgagaggcaggctgttaat

SEQ ID NO: 121645 - DNA, 19 bp, Homo sapiens
  siRNA target sequence for KCNN4 (NM_002250.2,1305-1323).
ggatatccagtataccaaa

SEQ ID NO: 121646 - DNA, 19 bp, Homo sapiens
  siRNA target sequence for KCNN4 (NM_002250.2,1340-1358).
ctgcccgagtgctacaaga

SEQ ID NO: 121647 - DNA, 19 bp, Homo sapiens
  siRNA target sequence for KCNN4 (NM_002250.2,1354-1372).
caagaagcctggatgttct

SEQ ID NO: 121648 - DNA, 19 bp, Homo sapiens
  siRNA target sequence for KCNN4 (NM_002250.2,1451-1469).
gccaggtgcggctgaaaca

SEQ ID NO: 121649 - DNA, 19 bp, Homo sapiens
  siRNA target sequence for MAP2 (NM_002374.2,432-450).
gggtcacagggcacctatt

SEQ ID NO: 121650 - DNA, 19 bp, Homo sapiens
  siRNA target sequence for MAP2 (NM_002374.2,434-452).
gtcacagggcacctattca

SEQ ID NO: 121651 - DNA, 19 bp, Homo sapiens
  siRNA target sequence for MAP2 (NM_002374.2,436-454).
cacagggcacctattcaaa

SEQ ID NO: 121652 - DNA, 19 bp, Homo sapiens
  siRNA target sequence for MAP2 (NM_002374.2,438-456).
cagggcacctattcaaata

SEQ ID NO: 121653 - DNA, 19 bp, Homo sapiens
  siRNA target sequence for MAP2 (NM_002374.2,442-460).
gcacctattcaaataccaa

SEQ ID NO: 121654 - DNA, 19 bp, Homo sapiens
  siRNA target sequence for MAP2 (NM_002374.2,443-461).
cacctattcaaataccaaa

SEQ ID NO: 121655 - DNA, 19 bp, Homo sapiens
  siRNA target sequence for MAP2 (NM_002374.2,523-541).
caaggatagttcaagtagt

SEQ ID NO: 121656 - DNA, 19 bp, Homo sapiens
  siRNA target sequence for MAP2 (NM_002374.2,695-713).
ggaggaagatttacttaca

SEQ ID NO: 121657 - DNA, 19 bp, Homo sapiens
  siRNA target sequence for MAP2 (NM_002374.2,734-752).
cgatcaacaggaattgact

SEQ ID NO: 121658 - DNA, 19 bp, Homo sapiens
  siRNA target sequence for MAP2 (NM_002374.2,844-862).
ctcagccagagacaactaa

SEQ ID NO: 121659 - DNA, 19 bp, Homo sapiens
  siRNA target sequence for MAP2 (NM_002374.2,849-867).
ccagagacaactaaaactt

SEQ ID NO: 121660 - DNA, 19 bp, Homo sapiens
  siRNA target sequence for MAP2 (NM_002374.2,850-868).
cagagacaactaaaactta

SEQ ID NO: 121661 - DNA, 19 bp, Homo sapiens
  siRNA target sequence for MAP2 (NM_002374.2,865-883).
cttaccctgataaaaagga

SEQ ID NO: 121662 - DNA, 19 bp, Homo sapiens
  siRNA target sequence for MAP2 (NM_002374.2,923-941).
gtttgggcacactcttgtt

SEQ ID NO: 121663 - DNA, 19 bp, Homo sapiens
  siRNA target sequence for MAP2 (NM_002374.2,994-1012).
gcattgacctccctaaaga

SEQ ID NO: 121664 - DNA, 19 bp, Homo sapiens
  siRNA target sequence for MAP2 (NM_002374.2,1057-1075).
caacggaagcaaaaaagga

SEQ ID NO: 121665 - DNA, 19 bp, Homo sapiens
  siRNA target sequence for MAP2 (NM_002374.2,1073-1091).
ggatgagtggggtttagtt

SEQ ID NO: 121666 - DNA, 19 bp, Homo sapiens
  siRNA target sequence for MAP2 (NM_002374.2,1115-1133).
gactcccatgagggaaaaa

SEQ ID NO: 121667 - DNA, 19 bp, Homo sapiens
  siRNA target sequence for MAP2 (NM_002374.2,1210-1228).
gcttcactcttcctttaga

SEQ ID NO: 121668 - DNA, 19 bp, Homo sapiens
  siRNA target sequence for MAP2 (NM_002374.2,1531-1549).
ccagtggacaggaacctat

SEQ ID NO: 121669 - DNA, 19 bp, Homo sapiens
  siRNA target sequence for MAP2 (NM_002374.2,1532-1550).
cagtggacaggaacctata

SEQ ID NO: 121670 - DNA, 19 bp, Homo sapiens
  siRNA target sequence for MAP2 (NM_002374.2,1536-1554).
ggacaggaacctatactta

SEQ ID NO: 121671 - DNA, 19 bp, Homo sapiens
  siRNA target sequence for MAP2 (NM_002374.2,1541-1559).
ggaacctatacttactgaa

SEQ ID NO: 121672 - DNA, 19 bp, Homo sapiens
  siRNA target sequence for MAP2 (NM_002374.2,1542-1560).
gaacctatacttactgaaa

SEQ ID NO: 121673 - DNA, 19 bp, Homo sapiens
  siRNA target sequence for MAP2 (NM_002374.2,1625-1643).
gagtaaacccccaaaacct

SEQ ID NO: 121674 - DNA, 19 bp, Homo sapiens
  siRNA target sequence for MAP2 (NM_002374.2,1653-1671).
gaaataggcataattcaga

SEQ ID NO: 121675 - DNA, 19 bp, Homo sapiens
  siRNA target sequence for MAP2 (NM_002374.2,1707-1725).
caagagcctaccacagata

SEQ ID NO: 121676 - DNA, 19 bp, Homo sapiens
  siRNA target sequence for MAP2 (NM_002374.2,1736-1754).
ggactcgttccctgtaagt

SEQ ID NO: 121677 - DNA, 19 bp, Homo sapiens
  siRNA target sequence for MAP2 (NM_002374.2,1737-1755).
gactcgttccctgtaagtt

SEQ ID NO: 121678 - DNA, 19 bp, Homo sapiens
  siRNA target sequence for MAP2 (NM_002374.2,1758-1776).
gagcaagcagttacagatt

SEQ ID NO: 121679 - DNA, 19 bp, Homo sapiens
  siRNA target sequence for MAP2 (NM_002374.2,1811-1829).
gaccgaaccatctgcatta

SEQ ID NO: 121680 - DNA, 19 bp, Homo sapiens
  siRNA target sequence for MAP2 (NM_002374.2,1814-1832).
cgaaccatctgcattaatt

SEQ ID NO: 121681 - DNA, 19 bp, Homo sapiens
  siRNA target sequence for MAP2 (NM_002374.2,1909-1927).
catcagctgagcttgatat

SEQ ID NO: 121682 - DNA, 19 bp, Homo sapiens
  siRNA target sequence for MAP2 (NM_002374.2,1917-1935).
gagcttgatatgccatttt

SEQ ID NO: 121683 - DNA, 19 bp, Homo sapiens
  siRNA target sequence for MAP2 (NM_002374.2,2011-2029).
caggcagtgattactatga

SEQ ID NO: 121684 - DNA, 19 bp, Homo sapiens
  siRNA target sequence for MAP2 (NM_002374.2,2014-2032).
gcagtgattactatgaact

SEQ ID NO: 121685 - DNA, 19 bp, Homo sapiens
  siRNA target sequence for MAP2 (NM_002374.2,2050-2068).
gtgtccatgagtctattga

SEQ ID NO: 121686 - DNA, 19 bp, Homo sapiens
  siRNA target sequence for MAP2 (NM_002374.2,2052-2070).
gtccatgagtctattgata

SEQ ID NO: 121687 - DNA, 19 bp, Homo sapiens
  siRNA target sequence for MAP2 (NM_002374.2,2072-2090).
catgtctcccatgcataaa

SEQ ID NO: 121688 - DNA, 19 bp, Homo sapiens
  siRNA target sequence for MAP2 (NM_002374.2,2075-2093).
gtctcccatgcataaaaat

SEQ ID NO: 121689 - DNA, 19 bp, Homo sapiens
  siRNA target sequence for MAP2 (NM_002374.2,2161-2179).
gcactctcgcacagagtta

SEQ ID NO: 121690 - DNA, 19 bp, Homo sapiens
  siRNA target sequence for MAP2 (NM_002374.2,2206-2224).
gttctcctcaagaaagaat

SEQ ID NO: 121691 - DNA, 19 bp, Homo sapiens
  siRNA target sequence for MAP2 (NM_002374.2,2267-2285).
ccacagtaagaataaggat

SEQ ID NO: 121692 - DNA, 19 bp, Homo sapiens
  siRNA target sequence for MAP2 (NM_002374.2,2291-2309).
gacccttagcaggagttta

SEQ ID NO: 121693 - DNA, 19 bp, Homo sapiens
  siRNA target sequence for MAP2 (NM_002374.2,2317-2335).
gtggtaggtctgcaataga

SEQ ID NO: 121694 - DNA, 19 bp, Homo sapiens
  siRNA target sequence for MAP2 (NM_002374.2,2320-2338).
gtaggtctgcaatagaaca

SEQ ID NO: 121695 - DNA, 19 bp, Homo sapiens
  siRNA target sequence for MAP2 (NM_002374.2,2341-2359).
gaagcatgtcaatcaattt

SEQ ID NO: 121696 - DNA, 19 bp, Homo sapiens
  siRNA target sequence for MAP2 (NM_002374.2,2361-2379).
ccgatgtcttgcctagatt

SEQ ID NO: 121697 - DNA, 19 bp, Homo sapiens
  siRNA target sequence for MAP2 (NM_002374.2,2366-2384).
gtcttgcctagattccata

SEQ ID NO: 121698 - DNA, 19 bp, Homo sapiens
  siRNA target sequence for MAP2 (NM_002374.2,2399-2417).
ctttggtcggggacatgat

SEQ ID NO: 121699 - DNA, 19 bp, Homo sapiens
  siRNA target sequence for MAP2 (NM_002374.2,2403-2421).
ggtcggggacatgatcttt

SEQ ID NO: 121700 - DNA, 19 bp, Homo sapiens
  siRNA target sequence for MAP2 (NM_002374.2,2425-2443).
ctctggcttccgatattct

SEQ ID NO: 121701 - DNA, 19 bp, Homo sapiens
  siRNA target sequence for MAP2 (NM_002374.2,2436-2454).
gatattctaaccaacacta

SEQ ID NO: 121702 - DNA, 19 bp, Homo sapiens
  siRNA target sequence for MAP2 (NM_002374.2,2446-2464).
ccaacactagtggaagtat

SEQ ID NO: 121703 - DNA, 19 bp, Homo sapiens
  siRNA target sequence for MAP2 (NM_002374.2,2450-2468).
cactagtggaagtatggat

SEQ ID NO: 121704 - DNA, 19 bp, Homo sapiens
  siRNA target sequence for MAP2 (NM_002374.2,2516-2534).
cccttgcttccctgtagaa

SEQ ID NO: 121705 - DNA, 19 bp, Homo sapiens
  siRNA target sequence for MAP2 (NM_002374.2,2521-2539).
gcttccctgtagaaagcaa

SEQ ID NO: 121706 - DNA, 19 bp, Homo sapiens
  siRNA target sequence for MAP2 (NM_002374.2,2850-2868).
ggctactgtgtgttcaata

SEQ ID NO: 121707 - DNA, 19 bp, Homo sapiens
  siRNA target sequence for MAP2 (NM_002374.2,2851-2869).
gctactgtgtgttcaataa

SEQ ID NO: 121708 - DNA, 19 bp, Homo sapiens
  siRNA target sequence for MAP2 (NM_002374.2,2919-2937).
ggggagagtggtacctttt

SEQ ID NO: 121709 - DNA, 19 bp, Homo sapiens
  siRNA target sequence for MAP2 (NM_002374.2,2920-2938).
gggagagtggtacctttta

SEQ ID NO: 121710 - DNA, 19 bp, Homo sapiens
  siRNA target sequence for MAP2 (NM_002374.2,2924-2942).
gagtggtaccttttacgaa

SEQ ID NO: 121711 - DNA, 19 bp, Homo sapiens
  siRNA target sequence for MAP2 (NM_002374.2,2939-2957).
cgaaggcactgatgataaa

SEQ ID NO: 121712 - DNA, 19 bp, Homo sapiens
  siRNA target sequence for MAP2 (NM_002374.2,2986-3004).
cactgattgaagtgaaact

SEQ ID NO: 121713 - DNA, 19 bp, Homo sapiens
  siRNA target sequence for MAP2 (NM_002374.2,3016-3034).
gaagagtcaaagatgagtt

SEQ ID NO: 121714 - DNA, 19 bp, Homo sapiens
  siRNA target sequence for MAP2 (NM_002374.2,3032-3050).
gttcagtgttgacaaagaa

SEQ ID NO: 121715 - DNA, 19 bp, Homo sapiens
  siRNA target sequence for MAP2 (NM_002374.2,3048-3066).
gaagcatccgcgcatatct

SEQ ID NO: 121716 - DNA, 19 bp, Homo sapiens
  siRNA target sequence for MAP2 (NM_002374.2,3114-3132).
gctaatgataggttggata

SEQ ID NO: 121717 - DNA, 19 bp, Homo sapiens
  siRNA target sequence for MAP2 (NM_002374.2,3218-3236).
cggattaggagtaacctat

SEQ ID NO: 121718 - DNA, 19 bp, Homo sapiens
  siRNA target sequence for MAP2 (NM_002374.2,3240-3258).
caagctttggccaaagatt

SEQ ID NO: 121719 - DNA, 19 bp, Homo sapiens
  siRNA target sequence for MAP2 (NM_002374.2,3251-3269).
caaagatttgtcaatacca

SEQ ID NO: 121720 - DNA, 19 bp, Homo sapiens
  siRNA target sequence for MAP2 (NM_002374.2,3374-3392).
ccagggtcaactagatgtt

SEQ ID NO: 121721 - DNA, 19 bp, Homo sapiens
  siRNA target sequence for MAP2 (NM_002374.2,3375-3393).
cagggtcaactagatgtta

SEQ ID NO: 121722 - DNA, 19 bp, Homo sapiens
  siRNA target sequence for MAP2 (NM_002374.2,3379-3397).
gtcaactagatgttaaaat

SEQ ID NO: 121723 - DNA, 19 bp, Homo sapiens
  siRNA target sequence for MAP2 (NM_002374.2,3416-3434).
ggcttcagggctaaacata

SEQ ID NO: 121724 - DNA, 19 bp, Homo sapiens
  siRNA target sequence for MAP2 (NM_002374.2,3421-3439).
cagggctaaacatagatga

SEQ ID NO: 121725 - DNA, 19 bp, Homo sapiens
  siRNA target sequence for MAP2 (NM_002374.2,3423-3441).
gggctaaacatagatgata

SEQ ID NO: 121726 - DNA, 19 bp, Homo sapiens
  siRNA target sequence for MAP2 (NM_002374.2,3629-3647).
ggaggagtcctatgaatct

SEQ ID NO: 121727 - DNA, 19 bp, Homo sapiens
  siRNA target sequence for MAP2 (NM_002374.2,3632-3650).
ggagtcctatgaatctagt

SEQ ID NO: 121728 - DNA, 19 bp, Homo sapiens
  siRNA target sequence for MAP2 (NM_002374.2,3712-3730).
ctccagaatcatctctaat

SEQ ID NO: 121729 - DNA, 19 bp, Homo sapiens
  siRNA target sequence for MAP2 (NM_002374.2,3740-3758).
gattgccgtcaaattgtca

SEQ ID NO: 121730 - DNA, 19 bp, Homo sapiens
  siRNA target sequence for MAP2 (NM_002374.2,3881-3899).
catcacgccttctgatgtt

SEQ ID NO: 121731 - DNA, 19 bp, Homo sapiens
  siRNA target sequence for MAP2 (NM_002374.2,3900-3918).
gcagagccattgcatgaaa

SEQ ID NO: 121732 - DNA, 19 bp, Homo sapiens
  siRNA target sequence for MAP2 (NM_002374.2,4000-4018).
gctcagacacccttcagat

SEQ ID NO: 121733 - DNA, 19 bp, Homo sapiens
  siRNA target sequence for MAP2 (NM_002374.2,4001-4019).
ctcagacacccttcagata

SEQ ID NO: 121734 - DNA, 19 bp, Homo sapiens
  siRNA target sequence for MAP2 (NM_002374.2,4166-4184).
ccacagcgtgcgttttgca

SEQ ID NO: 121735 - DNA, 19 bp, Homo sapiens
  siRNA target sequence for MAP2 (NM_002374.2,4213-4231).
gaccatctcctcatgatga

SEQ ID NO: 121736 - DNA, 19 bp, Homo sapiens
  siRNA target sequence for MAP2 (NM_002374.2,4322-4340).
ggttgcactttctgaatat

SEQ ID NO: 121737 - DNA, 19 bp, Homo sapiens
  siRNA target sequence for MAP2 (NM_002374.2,4323-4341).
gttgcactttctgaatata

SEQ ID NO: 121738 - DNA, 19 bp, Homo sapiens
  siRNA target sequence for MAP2 (NM_002374.2,4345-4363).
cagaaacctatgacgatta

SEQ ID NO: 121739 - DNA, 19 bp, Homo sapiens
  siRNA target sequence for MAP2 (NM_002374.2,4351-4369).
cctatgacgattacaaaga

SEQ ID NO: 121740 - DNA, 19 bp, Homo sapiens
  siRNA target sequence for MAP2 (NM_002374.2,4352-4370).
ctatgacgattacaaagat

SEQ ID NO: 121741 - DNA, 19 bp, Homo sapiens
  siRNA target sequence for MAP2 (NM_002374.2,4412-4430).
ctgggtggacactcaagat

SEQ ID NO: 121742 - DNA, 19 bp, Homo sapiens
  siRNA target sequence for MAP2 (NM_002374.2,4415-4433).
ggtggacactcaagatgat

SEQ ID NO: 121743 - DNA, 19 bp, Homo sapiens
  siRNA target sequence for MAP2 (NM_002374.2,4431-4449).
gatgataggagcatcatga

SEQ ID NO: 121744 - DNA, 19 bp, Homo sapiens
  siRNA target sequence for MAP2 (NM_002374.2,4502-4520).
gagatcatctcttgagaaa

SEQ ID NO: 121745 - DNA, 19 bp, Homo sapiens
  siRNA target sequence for MAP2 (NM_002374.2,4564-4582).
ccactcctgaaagaaaagt

SEQ ID NO: 121746 - DNA, 19 bp, Homo sapiens
  siRNA target sequence for MAP2 (NM_002374.2,4687-4705).
ctccctccaggaaattcat

SEQ ID NO: 121747 - DNA, 19 bp, Homo sapiens
  siRNA target sequence for MAP2 (NM_002374.2,4713-4731).
cctgctatcaaatatacta

SEQ ID NO: 121748 - DNA, 19 bp, Homo sapiens
  siRNA target sequence for MAP2 (NM_002374.2,4795-4813).
ctcccagtgtatttaaaca

SEQ ID NO: 121749 - DNA, 19 bp, Homo sapiens
  siRNA target sequence for MAP2 (NM_002374.2,4941-4959).
ctcaacagttctatctctt

SEQ ID NO: 121750 - DNA, 19 bp, Homo sapiens
  siRNA target sequence for MAP2 (NM_002374.2,5056-5074).
ctggcaccccaccaagtta

SEQ ID NO: 121751 - DNA, 19 bp, Homo sapiens
  siRNA target sequence for MAP2 (NM_002374.2,5058-5076).
ggcaccccaccaagttatt

SEQ ID NO: 121752 - DNA, 19 bp, Homo sapiens
  siRNA target sequence for MAP2 (NM_002374.2,5171-5189).
gaagaaggtcgccatcata

SEQ ID NO: 121753 - DNA, 19 bp, Homo sapiens
  siRNA target sequence for MAP2 (NM_002374.2,5219-5237).
caagcagcttcggcttatt

SEQ ID NO: 121754 - DNA, 19 bp, Homo sapiens
  siRNA target sequence for MAP2 (NM_002374.2,5225-5243).
gcttcggcttattaaccaa

SEQ ID NO: 121755 - DNA, 19 bp, Homo sapiens
  siRNA target sequence for MAP2 (NM_002374.2,5280-5298).
ggatcaacagacaacatca

SEQ ID NO: 121756 - DNA, 19 bp, Homo sapiens
  siRNA target sequence for MAP2 (NM_002374.2,5287-5305).
cagacaacatcaaatacca

SEQ ID NO: 121757 - DNA, 19 bp, Homo sapiens
  siRNA target sequence for MAP2 (NM_002374.2,5316-5334).
gggcaggtacaaattgtta

SEQ ID NO: 121758 - DNA, 19 bp, Homo sapiens
  siRNA target sequence for MAP2 (NM_002374.2,5403-5421).
ggtggcggacgtgtgaaaa

SEQ ID NO: 121759 - DNA, 19 bp, Homo sapiens
  siRNA target sequence for MAP2 (NM_002374.2,5404-5422).
gtggcggacgtgtgaaaat

SEQ ID NO: 121760 - DNA, 19 bp, Homo sapiens
  siRNA target sequence for MAP2 (NM_002374.2,5407-5425).
gcggacgtgtgaaaattga

SEQ ID NO: 121761 - DNA, 19 bp, Homo sapiens
  siRNA target sequence for MAP2 (NM_002374.2,5428-5446).
gtgtaaaactagatttcaa

SEQ ID NO: 121762 - DNA, 19 bp, Homo sapiens
  siRNA target sequence for MAP2 (NM_002374.2,5568-5586).
catggggctgagatcatta

SEQ ID NO: 121763 - DNA, 19 bp, Homo sapiens
  siRNA target sequence for MAP2 (NM_002374.2,5622-5640).
cgacgactcagcaatgtct

SEQ ID NO: 121764 - DNA, 19 bp, Homo sapiens
  siRNA target sequence for MAP2 (NM_031846.1,5316-5334).
gggcaggttaggattttaa

SEQ ID NO: 121765 - DNA, 19 bp, Homo sapiens
  siRNA target sequence for MAP2 (NM_031846.1,5319-5337).
caggttaggattttaaaca

SEQ ID NO: 121766 - DNA, 19 bp, Homo sapiens
  siRNA target sequence for MAP2 (NM_031846.1,5339-5357).
gaagatcgattttagcaaa

SEQ ID NO: 121767 - DNA, 19 bp, Homo sapiens
  siRNA target sequence for MAP2 (NM_031846.1,5373-5391).
ggttccaaggataacatca

SEQ ID NO: 121768 - DNA, 19 bp, Homo sapiens
  siRNA target sequence for MAP2 (NM_031846.1,5378-5396).
caaggataacatcaaacat

SEQ ID NO: 121769 - DNA, 19 bp, Homo sapiens
  siRNA target sequence for MAP2 (NM_031846.1,5408-5426).
cggaaatgtacaaattgtt

SEQ ID NO: 121770 - DNA, 19 bp, Homo sapiens
  siRNA target sequence for NOS1 (NM_000620.1,713-731).
caaatccagcccaatgtca

SEQ ID NO: 121771 - DNA, 19 bp, Homo sapiens
  siRNA target sequence for NOS1 (NM_000620.1,862-880).
ggccggagacatcattctt

SEQ ID NO: 121772 - DNA, 19 bp, Homo sapiens
  siRNA target sequence for NOS1 (NM_000620.1,959-977).
cacgtggtcctcattctga

SEQ ID NO: 121773 - DNA, 19 bp, Homo sapiens
  siRNA target sequence for NOS1 (NM_000620.1,1417-1435).
ggacggcaagtcacacaaa

SEQ ID NO: 121774 - DNA, 19 bp, Homo sapiens
  siRNA target sequence for NOS1 (NM_000620.1,1456-1474).
gaacgaccgagtcttcaat

SEQ ID NO: 121775 - DNA, 19 bp, Homo sapiens
  siRNA target sequence for NOS1 (NM_000620.1,1505-1523).
gtcctcaacaacccatatt

SEQ ID NO: 121776 - DNA, 19 bp, Homo sapiens
  siRNA target sequence for NOS1 (NM_000620.1,1671-1689).
cgggatgcactgagtacat

SEQ ID NO: 121777 - DNA, 19 bp, Homo sapiens
  siRNA target sequence for NOS1 (NM_000620.1,1765-1783).
ccctctcgccaaagagttt

SEQ ID NO: 121778 - DNA, 19 bp, Homo sapiens
  siRNA target sequence for NOS1 (NM_000620.1,1766-1784).
cctctcgccaaagagttta

SEQ ID NO: 121779 - DNA, 19 bp, Homo sapiens
  siRNA target sequence for NOS1 (NM_000620.1,1780-1798).
gtttattgatcaatactat

SEQ ID NO: 121780 - DNA, 19 bp, Homo sapiens
  siRNA target sequence for NOS1 (NM_000620.1,1787-1805).
gatcaatactattcatcaa

SEQ ID NO: 121781 - DNA, 19 bp, Homo sapiens
  siRNA target sequence for NOS1 (NM_000620.1,1891-1909).
ggacacagagctcatctat

SEQ ID NO: 121782 - DNA, 19 bp, Homo sapiens
  siRNA target sequence for NOS1 (NM_000620.1,2001-2019).
cggcccacgggatgttcaa

SEQ ID NO: 121783 - DNA, 19 bp, Homo sapiens
  siRNA target sequence for NOS1 (NM_000620.1,2003-2021).
gcccacgggatgttcaact

SEQ ID NO: 121784 - DNA, 19 bp, Homo sapiens
  siRNA target sequence for NOS1 (NM_000620.1,2004-2022).
cccacgggatgttcaacta

SEQ ID NO: 121785 - DNA, 19 bp, Homo sapiens
  siRNA target sequence for NOS1 (NM_000620.1,2006-2024).
cacgggatgttcaactaca

SEQ ID NO: 121786 - DNA, 19 bp, Homo sapiens
  siRNA target sequence for NOS1 (NM_000620.1,2009-2027).
gggatgttcaactacatct

SEQ ID NO: 121787 - DNA, 19 bp, Homo sapiens
  siRNA target sequence for NOS1 (NM_000620.1,2195-2213).
gtgcagttcacagagatat

SEQ ID NO: 121788 - DNA, 19 bp, Homo sapiens
  siRNA target sequence for NOS1 (NM_000620.1,2200-2218).
gttcacagagatatgcata

SEQ ID NO: 121789 - DNA, 19 bp, Homo sapiens
  siRNA target sequence for NOS1 (NM_000620.1,2403-2421).
ccaacatgctcctagagat

SEQ ID NO: 121790 - DNA, 19 bp, Homo sapiens
  siRNA target sequence for NOS1 (NM_000620.1,2498-2516).
gacaactcccgctacaata

SEQ ID NO: 121791 - DNA, 19 bp, Homo sapiens
  siRNA target sequence for NOS1 (NM_000620.1,2599-2617).
caatatcgcggttctctat

SEQ ID NO: 121792 - DNA, 19 bp, Homo sapiens
  siRNA target sequence for NOS1 (NM_000620.1,2659-2677).
cgccaccgagtccttcatt

SEQ ID NO: 121793 - DNA, 19 bp, Homo sapiens
  siRNA target sequence for NOS1 (NM_000620.1,2660-2678).
gccaccgagtccttcatta

SEQ ID NO: 121794 - DNA, 19 bp, Homo sapiens
  siRNA target sequence for NOS1 (NM_000620.1,2661-2679).
ccaccgagtccttcattaa

SEQ ID NO: 121795 - DNA, 19 bp, Homo sapiens
  siRNA target sequence for NOS1 (NM_000620.1,2664-2682).
ccgagtccttcattaagca

SEQ ID NO: 121796 - DNA, 19 bp, Homo sapiens
  siRNA target sequence for NOS1 (NM_000620.1,2802-2820).
ccccctccttcgaatacca

SEQ ID NO: 121797 - DNA, 19 bp, Homo sapiens
  siRNA target sequence for NOS1 (NM_000620.1,3016-3034).
cttgtgtgagatcttcaaa

SEQ ID NO: 121798 - DNA, 19 bp, Homo sapiens
  siRNA target sequence for NOS1 (NM_000620.1,3028-3046).
cttcaaacacgcctttgat

SEQ ID NO: 121799 - DNA, 19 bp, Homo sapiens
  siRNA target sequence for NOS1 (NM_000620.1,3080-3098).
gtgcacctggaacatgaaa

SEQ ID NO: 121800 - DNA, 19 bp, Homo sapiens
  siRNA target sequence for NOS1 (NM_000620.1,3082-3100).
gcacctggaacatgaaact

SEQ ID NO: 121801 - DNA, 19 bp, Homo sapiens
  siRNA target sequence for NOS1 (NM_000620.1,3219-3237).
gctacaaggtccgattcaa

SEQ ID NO: 121802 - DNA, 19 bp, Homo sapiens
  siRNA target sequence for NOS1 (NM_000620.1,3359-3377).
cgagcataccctcactttt

SEQ ID NO: 121803 - DNA, 19 bp, Homo sapiens
  siRNA target sequence for NOS1 (NM_000620.1,3423-3441).
gggagaggatcctgaagat

SEQ ID NO: 121804 - DNA, 19 bp, Homo sapiens
  siRNA target sequence for NOS1 (NM_000620.1,3640-3658).
cacacaaggtctatccaat

SEQ ID NO: 121805 - DNA, 19 bp, Homo sapiens
  siRNA target sequence for NOS1 (NM_000620.1,3687-3705).
ggctccttagccgtcaaaa

SEQ ID NO: 121806 - DNA, 19 bp, Homo sapiens
  siRNA target sequence for NOS1 (NM_000620.1,3723-3741).
ccagtcggtcaactatctt

SEQ ID NO: 121807 - DNA, 19 bp, Homo sapiens
  siRNA target sequence for NOS1 (NM_000620.1,3904-3922).
gcggaacacggctttaggt

SEQ ID NO: 121808 - DNA, 19 bp, Homo sapiens
  siRNA target sequence for NOS1 (NM_000620.1,4099-4117).
ggagtacgaggaatggaaa

SEQ ID NO: 121809 - DNA, 19 bp, Homo sapiens
  siRNA target sequence for NOS1 (NM_000620.1,4477-4495).
ctggcaacagcggcaattt

SEQ ID NO: 121810 - DNA, 19 bp, Homo sapiens
  siRNA target sequence for NOS1 (NM_000620.1,4479-4497).
ggcaacagcggcaatttga

SEQ ID NO: 121811 - DNA, 19 bp, Homo sapiens
  siRNA target sequence for NOS1 (NM_000620.1,4480-4498).
gcaacagcggcaatttgat

SEQ ID NO: 121812 - DNA, 19 bp, Homo sapiens
  siRNA target sequence for NOS1 (NM_000620.1,4481-4499).
caacagcggcaatttgata

SEQ ID NO: 121813 - DNA, 19 bp, Homo sapiens
  siRNA target sequence for NOS1 (NM_000620.1,4486-4504).
gcggcaatttgatatccaa

SEQ ID NO: 121814 - DNA, 19 bp, Homo sapiens
  siRNA target sequence for NOS1 (NM_000620.1,4546-4564).
gtgccggcaatccaagata

SEQ ID NO: 121815 - DNA, 19 bp, Homo sapiens
  siRNA target sequence for NOS1 (NM_000620.1,4549-4567).
ccggcaatccaagatagat

SEQ ID NO: 121816 - DNA, 19 bp, Homo sapiens
  siRNA target sequence for NOS1 (NM_000620.1,4647-4665).
cagacaaaccaaagaagta

SEQ ID NO: 121817 - DNA, 19 bp, Homo sapiens
  siRNA target sequence for NOS1 (NM_000620.1,4781-4799).
gccatccagcgcatcatga

SEQ ID NO: 121818 - DNA, 19 bp, Homo sapiens
  siRNA target sequence for NOS1 (NM_000620.1,4845-4863).
gccggatgagggatgacaa

SEQ ID NO: 121819 - DNA, 19 bp, Homo sapiens
  siRNA target sequence for NOS1 (NM_000620.1,4855-4873).
ggatgacaaccgataccat

SEQ ID NO: 121820 - DNA, 19 bp, Homo sapiens
  siRNA target sequence for NOS1 (NM_000620.1,4865-4883).
cgataccatgaggatattt

SEQ ID NO: 121821 - DNA, 19 bp, Homo sapiens
  siRNA target sequence for NOS1 (NM_000620.1,4910-4928).
gtgaccaaccgccttagat

SEQ ID NO: 121822 - DNA, 19 bp, Homo sapiens
  siRNA target sequence for NOS1 (NM_000620.1,4912-4930).
gaccaaccgccttagatct

SEQ ID NO: 121823 - DNA, 19 bp, Homo sapiens
  siRNA target sequence for NOS2A (NM_000625.3,323-341).
gggaaaaagacatcaacaa

SEQ ID NO: 121824 - DNA, 19 bp, Homo sapiens
  siRNA target sequence for NOS2A (NM_000625.3,383-401).
cacaggatgaccttcagta

SEQ ID NO: 121825 - DNA, 19 bp, Homo sapiens
  siRNA target sequence for NOS2A (NM_000625.3,512-530).
ggcatgtgaggatcaaaaa

SEQ ID NO: 121826 - DNA, 19 bp, Homo sapiens
  siRNA target sequence for NOS2A (NM_000625.3,514-532).
catgtgaggatcaaaaact

SEQ ID NO: 121827 - DNA, 19 bp, Homo sapiens
  siRNA target sequence for NOS2A (NM_000625.3,533-551).
ggggcagcgggatgacttt

SEQ ID NO: 121828 - DNA, 19 bp, Homo sapiens
  siRNA target sequence for NOS2A (NM_000625.3,537-555).
cagcgggatgactttccaa

SEQ ID NO: 121829 - DNA, 19 bp, Homo sapiens
  siRNA target sequence for NOS2A (NM_000625.3,573-591).
ggccaaagggattttaact

SEQ ID NO: 121830 - DNA, 19 bp, Homo sapiens
  siRNA target sequence for NOS2A (NM_000625.3,574-592).
gccaaagggattttaactt

SEQ ID NO: 121831 - DNA, 19 bp, Homo sapiens
  siRNA target sequence for NOS2A (NM_000625.3,605-623).
cttgcctggggtccattat

SEQ ID NO: 121832 - DNA, 19 bp, Homo sapiens
  siRNA target sequence for NOS2A (NM_000625.3,609-627).
cctggggtccattatgact

SEQ ID NO: 121833 - DNA, 19 bp, Homo sapiens
  siRNA target sequence for NOS2A (NM_000625.3,682-700).
ctacctcaagctatcgaat

SEQ ID NO: 121834 - DNA, 19 bp, Homo sapiens
  siRNA target sequence for NOS2A (NM_000625.3,686-704).
ctcaagctatcgaatttgt

SEQ ID NO: 121835 - DNA, 19 bp, Homo sapiens
  siRNA target sequence for NOS2A (NM_000625.3,767-785).
cggtaacaaaggagataga

SEQ ID NO: 121836 - DNA, 19 bp, Homo sapiens
  siRNA target sequence for NOS2A (NM_000625.3,769-787).
gtaacaaaggagatagaaa

SEQ ID NO: 121837 - DNA, 19 bp, Homo sapiens
  siRNA target sequence for NOS2A (NM_000625.3,957-975).
gcgttactccaccaacaat

SEQ ID NO: 121838 - DNA, 19 bp, Homo sapiens
  siRNA target sequence for NOS2A (NM_000625.3,1504-1522).
gctgtcgttgagatcaaca

SEQ ID NO: 121839 - DNA, 19 bp, Homo sapiens
  siRNA target sequence for NOS2A (NM_000625.3,1505-1523).
ctgtcgttgagatcaacat

SEQ ID NO: 121840 - DNA, 19 bp, Homo sapiens
  siRNA target sequence for NOS2A (NM_000625.3,1580-1598).
ctgcagaatccttcatgaa

SEQ ID NO: 121841 - DNA, 19 bp, Homo sapiens
  siRNA target sequence for NOS2A (NM_000625.3,1582-1600).
gcagaatccttcatgaagt

SEQ ID NO: 121842 - DNA, 19 bp, Homo sapiens
  siRNA target sequence for NOS2A (NM_000625.3,1583-1601).
cagaatccttcatgaagta

SEQ ID NO: 121843 - DNA, 19 bp, Homo sapiens
  siRNA target sequence for NOS2A (NM_000625.3,1972-1990).
gtctgcatggataagtaca

SEQ ID NO: 121844 - DNA, 19 bp, Homo sapiens
  siRNA target sequence for NOS2A (NM_000625.3,2025-2043).
ggtggtgaccagtacgttt

SEQ ID NO: 121845 - DNA, 19 bp, Homo sapiens
  siRNA target sequence for NOS2A (NM_000625.3,2087-2105).
cgctcttcatgctgaaaga

SEQ ID NO: 121846 - DNA, 19 bp, Homo sapiens
  siRNA target sequence for NOS2A (NM_000625.3,2168-2186).
gcgcctttgctcatgacat

SEQ ID NO: 121847 - DNA, 19 bp, Homo sapiens
  siRNA target sequence for NOS2A (NM_000625.3,2172-2190).
ctttgctcatgacattgat

SEQ ID NO: 121848 - DNA, 19 bp, Homo sapiens
  siRNA target sequence for NOS2A (NM_000625.3,2177-2195).
ctcatgacattgatcagaa

SEQ ID NO: 121849 - DNA, 19 bp, Homo sapiens
  siRNA target sequence for NOS2A (NM_000625.3,2276-2294).
gctgggccgtgcaaacctt

SEQ ID NO: 121850 - DNA, 19 bp, Homo sapiens
  siRNA target sequence for NOS2A (NM_000625.3,3413-3431).
gcaagcccaaggtctatgt

SEQ ID NO: 121851 - DNA, 19 bp, Homo sapiens
  siRNA target sequence for NOS2A (NM_000625.3,3489-3507).
gccaggccacctctatgtt

SEQ ID NO: 121852 - DNA, 19 bp, Homo sapiens
  siRNA target sequence for NOS2A (NM_000625.3,3589-3607).
caggtcgaggactatttct

SEQ ID NO: 121853 - DNA, 19 bp, Homo sapiens
  siRNA target sequence for NRGN (NM_006176.1,269-287).
gccggacgacgacattcta

SEQ ID NO: 121854 - DNA, 19 bp, Homo sapiens
  siRNA target sequence for NRGN (NM_006176.1,271-289).
cggacgacgacattctaga

SEQ ID NO: 121855 - DNA, 19 bp, Homo sapiens
  siRNA target sequence for PDE1A (NM_005019.2,209-227).
ctagtgccacagagattga

SEQ ID NO: 121856 - DNA, 19 bp, Homo sapiens
  siRNA target sequence for PDE1A (NM_005019.2,243-261).
cacttttaagtatcttaca

SEQ ID NO: 121857 - DNA, 19 bp, Homo sapiens
  siRNA target sequence for PDE1A (NM_005019.2,284-302).
ggcagcgcctgaaaggaat

SEQ ID NO: 121858 - DNA, 19 bp, Homo sapiens
  siRNA target sequence for PDE1A (NM_005019.2,285-303).
gcagcgcctgaaaggaata

SEQ ID NO: 121859 - DNA, 19 bp, Homo sapiens
  siRNA target sequence for PDE1A (NM_005019.2,289-307).
cgcctgaaaggaatactaa

SEQ ID NO: 121860 - DNA, 19 bp, Homo sapiens
  siRNA target sequence for PDE1A (NM_005019.2,324-342).
gctggaaagaggtgatgtt

SEQ ID NO: 121861 - DNA, 19 bp, Homo sapiens
  siRNA target sequence for PDE1A (NM_005019.2,340-358).
gttaacgtcgtcgacttaa

SEQ ID NO: 121862 - DNA, 19 bp, Homo sapiens
  siRNA target sequence for PDE1A (NM_005019.2,346-364).
gtcgtcgacttaaagaaga

SEQ ID NO: 121863 - DNA, 19 bp, Homo sapiens
  siRNA target sequence for PDE1A (NM_005019.2,348-366).
cgtcgacttaaagaagaat

SEQ ID NO: 121864 - DNA, 19 bp, Homo sapiens
  siRNA target sequence for PDE1A (NM_005019.2,390-408).
ggaagcagtttatatcgat

SEQ ID NO: 121865 - DNA, 19 bp, Homo sapiens
  siRNA target sequence for PDE1A (NM_005019.2,394-412).
gcagtttatatcgatgaaa

SEQ ID NO: 121866 - DNA, 19 bp, Homo sapiens
  siRNA target sequence for PDE1A (NM_005019.2,561-579).
cattgtgcatgctgttcaa

SEQ ID NO: 121867 - DNA, 19 bp, Homo sapiens
  siRNA target sequence for PDE1A (NM_005019.2,599-617).
gaatgtaccgaaaaacata

SEQ ID NO: 121868 - DNA, 19 bp, Homo sapiens
  siRNA target sequence for PDE1A (NM_005019.2,603-621).
gtaccgaaaaacatatcat

SEQ ID NO: 121869 - DNA, 19 bp, Homo sapiens
  siRNA target sequence for PDE1A (NM_005019.2,614-632).
catatcatatggttggttt

SEQ ID NO: 121870 - DNA, 19 bp, Homo sapiens
  siRNA target sequence for PDE1A (NM_005019.2,640-658).
ccagcagctgtcatcgtaa

SEQ ID NO: 121871 - DNA, 19 bp, Homo sapiens
  siRNA target sequence for PDE1A (NM_005019.2,644-662).
cagctgtcatcgtaacatt

SEQ ID NO: 121872 - DNA, 19 bp, Homo sapiens
  siRNA target sequence for PDE1A (NM_005019.2,646-664).
gctgtcatcgtaacattaa

SEQ ID NO: 121873 - DNA, 19 bp, Homo sapiens
  siRNA target sequence for PDE1A (NM_005019.2,647-665).
ctgtcatcgtaacattaaa

SEQ ID NO: 121874 - DNA, 19 bp, Homo sapiens
  siRNA target sequence for PDE1A (NM_005019.2,651-669).
catcgtaacattaaaggat

SEQ ID NO: 121875 - DNA, 19 bp, Homo sapiens
  siRNA target sequence for PDE1A (NM_005019.2,721-739).
catagtctgaagtttatga

SEQ ID NO: 121876 - DNA, 19 bp, Homo sapiens
  siRNA target sequence for PDE1A (NM_005019.2,806-824).
cctttgcagaagctttaga

SEQ ID NO: 121877 - DNA, 19 bp, Homo sapiens
  siRNA target sequence for PDE1A (NM_005019.2,826-844).
gttggttacagcaagtaca

SEQ ID NO: 121878 - DNA, 19 bp, Homo sapiens
  siRNA target sequence for PDE1A (NM_005019.2,843-861).
caaaaatccatatcacaat

SEQ ID NO: 121879 - DNA, 19 bp, Homo sapiens
  siRNA target sequence for PDE1A (NM_005019.2,886-904).
caaactgtgcattacataa

SEQ ID NO: 121880 - DNA, 19 bp, Homo sapiens
  siRNA target sequence for PDE1A (NM_005019.2,895-913).
cattacataatgcttcata

SEQ ID NO: 121881 - DNA, 19 bp, Homo sapiens
  siRNA target sequence for PDE1A (NM_005019.2,985-1003).
gagcatacagggacaacaa

SEQ ID NO: 121882 - DNA, 19 bp, Homo sapiens
  siRNA target sequence for PDE1A (NM_005019.2,988-1006).
catacagggacaacaaaca

SEQ ID NO: 121883 - DNA, 19 bp, Homo sapiens
  siRNA target sequence for PDE1A (NM_005019.2,992-1010).
cagggacaacaaacaactt

SEQ ID NO: 121884 - DNA, 19 bp, Homo sapiens
  siRNA target sequence for PDE1A (NM_005019.2,995-1013).
ggacaacaaacaactttca

SEQ ID NO: 121885 - DNA, 19 bp, Homo sapiens
  siRNA target sequence for PDE1A (NM_005019.2,1030-1048).
gatgttgccattttgtata

SEQ ID NO: 121886 - DNA, 19 bp, Homo sapiens
  siRNA target sequence for PDE1A (NM_005019.2,1055-1073).
gctctgtccttgagaatca

SEQ ID NO: 121887 - DNA, 19 bp, Homo sapiens
  siRNA target sequence for PDE1A (NM_005019.2,1077-1095).
cgtgagtgcagcttatcga

SEQ ID NO: 121888 - DNA, 19 bp, Homo sapiens
  siRNA target sequence for PDE1A (NM_005019.2,1159-1177).
cggaacctagtgattgaaa

SEQ ID NO: 121889 - DNA, 19 bp, Homo sapiens
  siRNA target sequence for PDE1A (NM_005019.2,1160-1178).
ggaacctagtgattgaaat

SEQ ID NO: 121890 - DNA, 19 bp, Homo sapiens
  siRNA target sequence for PDE1A (NM_005019.2,1164-1182).
cctagtgattgaaatggtt

SEQ ID NO: 121891 - DNA, 19 bp, Homo sapiens
  siRNA target sequence for PDE1A (NM_005019.2,1201-1219).
ggtcacttccagcaaatta

SEQ ID NO: 121892 - DNA, 19 bp, Homo sapiens
  siRNA target sequence for PDE1A (NM_005019.2,1388-1406).
ctgaattagggcttccatt

SEQ ID NO: 121893 - DNA, 19 bp, Homo sapiens
  siRNA target sequence for PDE1A (NM_005019.2,1390-1408).
gaattagggcttccatttt

SEQ ID NO: 121894 - DNA, 19 bp, Homo sapiens
  siRNA target sequence for PDE1A (NM_005019.2,1440-1458).
ggcccagtcacaaataggt

SEQ ID NO: 121895 - DNA, 19 bp, Homo sapiens
  siRNA target sequence for PDE1A (NM_005019.2,1540-1558).
gcctcaaaagccgaaactt

SEQ ID NO: 121896 - DNA, 19 bp, Homo sapiens
  siRNA target sequence for PDE1A (NM_005019.2,1542-1560).
ctcaaaagccgaaacttct

SEQ ID NO: 121897 - DNA, 19 bp, Homo sapiens
  siRNA target sequence for PDE1A (NM_005019.2,1612-1630).
gcactaagacgatcaaata

SEQ ID NO: 121898 - DNA, 19 bp, Homo sapiens
  siRNA target sequence for PDE1A (NM_005019.2,1788-1806).
ctcagaagacttagtaaat

SEQ ID NO: 121899 - DNA, 19 bp, Homo sapiens
  siRNA target sequence for PDE1B (NM_000924.2,242-260).
gcccccagcaagaagatgt

SEQ ID NO: 121900 - DNA, 19 bp, Homo sapiens
  siRNA target sequence for PDE1B (NM_000924.2,364-382).
gctggaagccgtctacata

SEQ ID NO: 121901 - DNA, 19 bp, Homo sapiens
  siRNA target sequence for PDE1B (NM_000924.2,367-385).
ggaagccgtctacatagat

SEQ ID NO: 121902 - DNA, 19 bp, Homo sapiens
  siRNA target sequence for PDE1B (NM_000924.2,383-401).
gatgagacacggcaaatct

SEQ ID NO: 121903 - DNA, 19 bp, Homo sapiens
  siRNA target sequence for PDE1B (NM_000924.2,575-593).
cggatgttccggagaacat

SEQ ID NO: 121904 - DNA, 19 bp, Homo sapiens
  siRNA target sequence for PDE1B (NM_000924.2,576-594).
ggatgttccggagaacata

SEQ ID NO: 121905 - DNA, 19 bp, Homo sapiens
  siRNA target sequence for PDE1B (NM_000924.2,701-719).
gccctgaggaccattgttt

SEQ ID NO: 121906 - DNA, 19 bp, Homo sapiens
  siRNA target sequence for PDE1B (NM_000924.2,745-763).
catcagccgcttcaagatt

SEQ ID NO: 121907 - DNA, 19 bp, Homo sapiens
  siRNA target sequence for PDE1B (NM_000924.2,757-775).
caagattcccactgtgttt

SEQ ID NO: 121908 - DNA, 19 bp, Homo sapiens
  siRNA target sequence for PDE1B (NM_000924.2,804-822).
caggctatgggaagtacaa

SEQ ID NO: 121909 - DNA, 19 bp, Homo sapiens
  siRNA target sequence for PDE1B (NM_000924.2,812-830).
gggaagtacaagaatcctt

SEQ ID NO: 121910 - DNA, 19 bp, Homo sapiens
  siRNA target sequence for PDE1B (NM_000924.2,861-879).
cccagacagtccattgctt

SEQ ID NO: 121911 - DNA, 19 bp, Homo sapiens
  siRNA target sequence for PDE1B (NM_000924.2,942-960).
ctgcagctatccatgatta

SEQ ID NO: 121912 - DNA, 19 bp, Homo sapiens
  siRNA target sequence for PDE1B (NM_000924.2,1011-1029).
gtgccatcgtgtacaatga

SEQ ID NO: 121913 - DNA, 19 bp, Homo sapiens
  siRNA target sequence for PDE1B (NM_000924.2,1059-1077).
gctctgttttccgattgat

SEQ ID NO: 121914 - DNA, 19 bp, Homo sapiens
  siRNA target sequence for PDE1B (NM_000924.2,1179-1197).
gccatttccagcaagtgaa

SEQ ID NO: 121915 - DNA, 19 bp, Homo sapiens
  siRNA target sequence for PHKA1 (NM_002637.1,781-799).
cagccctggaagcattaga

SEQ ID NO: 121916 - DNA, 19 bp, Homo sapiens
  siRNA target sequence for PHKA1 (NM_002637.1,784-802).
ccctggaagcattagatga

SEQ ID NO: 121917 - DNA, 19 bp, Homo sapiens
  siRNA target sequence for PHKA1 (NM_002637.1,785-803).
cctggaagcattagatgaa

SEQ ID NO: 121918 - DNA, 19 bp, Homo sapiens
  siRNA target sequence for PHKA1 (NM_002637.1,806-824).
ggatctgtttggtgtgaaa

SEQ ID NO: 121919 - DNA, 19 bp, Homo sapiens
  siRNA target sequence for PHKA1 (NM_002637.1,821-839).
gaaaggtgggcctcaatca

SEQ ID NO: 121920 - DNA, 19 bp, Homo sapiens
  siRNA target sequence for PHKA1 (NM_002637.1,825-843).
ggtgggcctcaatcagtta

SEQ ID NO: 121921 - DNA, 19 bp, Homo sapiens
  siRNA target sequence for PHKA1 (NM_002637.1,826-844).
gtgggcctcaatcagttat

SEQ ID NO: 121922 - DNA, 19 bp, Homo sapiens
  siRNA target sequence for PHKA1 (NM_002637.1,830-848).
gcctcaatcagttatccat

SEQ ID NO: 121923 - DNA, 19 bp, Homo sapiens
  siRNA target sequence for PHKA1 (NM_002637.1,902-920).
ccgtgcttcaacatcaaaa

SEQ ID NO: 121924 - DNA, 19 bp, Homo sapiens
  siRNA target sequence for PHKA1 (NM_002637.1,1016-1034).
caagcttcagggtcgttat

SEQ ID NO: 121925 - DNA, 19 bp, Homo sapiens
  siRNA target sequence for PHKA1 (NM_002637.1,1019-1037).
gcttcagggtcgttatggt

SEQ ID NO: 121926 - DNA, 19 bp, Homo sapiens
  siRNA target sequence for PHKA1 (NM_002637.1,1020-1038).
cttcagggtcgttatggtt

SEQ ID NO: 121927 - DNA, 19 bp, Homo sapiens
  siRNA target sequence for PHKA1 (NM_002637.1,1084-1102).
ccaatcgtctgtactatga

SEQ ID NO: 121928 - DNA, 19 bp, Homo sapiens
  siRNA target sequence for PHKA1 (NM_002637.1,1085-1103).
caatcgtctgtactatgaa

SEQ ID NO: 121929 - DNA, 19 bp, Homo sapiens
  siRNA target sequence for PHKA1 (NM_002637.1,1157-1175).
gacatactttattcttgat

SEQ ID NO: 121930 - DNA, 19 bp, Homo sapiens
  siRNA target sequence for PHKA1 (NM_002637.1,1197-1215).
gaacaggttcaagaatata

SEQ ID NO: 121931 - DNA, 19 bp, Homo sapiens
  siRNA target sequence for PHKA1 (NM_002637.1,1295-1313).
cagggtcgatgaagaatat

SEQ ID NO: 121932 - DNA, 19 bp, Homo sapiens
  siRNA target sequence for PHKA1 (NM_002637.1,1301-1319).
cgatgaagaatatcagaat

SEQ ID NO: 121933 - DNA, 19 bp, Homo sapiens
  siRNA target sequence for PHKA1 (NM_002637.1,1436-1454).
cctgaatcgcaggttttct

SEQ ID NO: 121934 - DNA, 19 bp, Homo sapiens
  siRNA target sequence for PHKA1 (NM_002637.1,1437-1455).
ctgaatcgcaggttttcta

SEQ ID NO: 121935 - DNA, 19 bp, Homo sapiens
  siRNA target sequence for PHKA1 (NM_002637.1,1439-1457).
gaatcgcaggttttctact

SEQ ID NO: 121936 - DNA, 19 bp, Homo sapiens
  siRNA target sequence for PHKA1 (NM_002637.1,1487-1505).
ctccattctagctgaaaca

SEQ ID NO: 121937 - DNA, 19 bp, Homo sapiens
  siRNA target sequence for PHKA1 (NM_002637.1,1581-1599).
caaccagctcgtattctca

SEQ ID NO: 121938 - DNA, 19 bp, Homo sapiens
  siRNA target sequence for PHKA1 (NM_002637.1,1613-1631).
cagcctaggatgcaacaat

SEQ ID NO: 121939 - DNA, 19 bp, Homo sapiens
  siRNA target sequence for PHKA1 (NM_002637.1,1616-1634).
cctaggatgcaacaataga

SEQ ID NO: 121940 - DNA, 19 bp, Homo sapiens
  siRNA target sequence for PHKA1 (NM_002637.1,1617-1635).
ctaggatgcaacaatagaa

SEQ ID NO: 121941 - DNA, 19 bp, Homo sapiens
  siRNA target sequence for PHKA1 (NM_002637.1,1667-1685).
gggagtgcttggaacttca

SEQ ID NO: 121942 - DNA, 19 bp, Homo sapiens
  siRNA target sequence for PHKA1 (NM_002637.1,1668-1686).
ggagtgcttggaacttcaa

SEQ ID NO: 121943 - DNA, 19 bp, Homo sapiens
  siRNA target sequence for PHKA1 (NM_002637.1,1678-1696).
gaacttcaaaactctatga

SEQ ID NO: 121944 - DNA, 19 bp, Homo sapiens
  siRNA target sequence for PHKA1 (NM_002637.1,1691-1709).
ctatgacattcggaaaact

SEQ ID NO: 121945 - DNA, 19 bp, Homo sapiens
  siRNA target sequence for PHKA1 (NM_002637.1,1695-1713).
gacattcggaaaactatct

SEQ ID NO: 121946 - DNA, 19 bp, Homo sapiens
  siRNA target sequence for PHKA1 (NM_002637.1,1697-1715).
cattcggaaaactatcttt

SEQ ID NO: 121947 - DNA, 19 bp, Homo sapiens
  siRNA target sequence for PHKA1 (NM_002637.1,1717-1735).
ctttcactccacagtttat

SEQ ID NO: 121948 - DNA, 19 bp, Homo sapiens
  siRNA target sequence for PHKA1 (NM_002637.1,1888-1906).
caagcttgaattcaagtat

SEQ ID NO: 121949 - DNA, 19 bp, Homo sapiens
  siRNA target sequence for PHKA1 (NM_002637.1,2039-2057).
gctgtacagtgaagattat

SEQ ID NO: 121950 - DNA, 19 bp, Homo sapiens
  siRNA target sequence for PHKA1 (NM_002637.1,2133-2151).
gatgaagttgctcgttatt

SEQ ID NO: 121951 - DNA, 19 bp, Homo sapiens
  siRNA target sequence for PHKA1 (NM_002637.1,2146-2164).
gttatttagatcacctttt

SEQ ID NO: 121952 - DNA, 19 bp, Homo sapiens
  siRNA target sequence for PHKA1 (NM_002637.1,2229-2247).
caagctgctgtgcaaacaa

SEQ ID NO: 121953 - DNA, 19 bp, Homo sapiens
  siRNA target sequence for PHKA1 (NM_002637.1,2398-2416).
ctgttcgtgtagaaataca

SEQ ID NO: 121954 - DNA, 19 bp, Homo sapiens
  siRNA target sequence for PHKA1 (NM_002637.1,2496-2514).
caagctgatatcctctata

SEQ ID NO: 121955 - DNA, 19 bp, Homo sapiens
  siRNA target sequence for PHKA1 (NM_002637.1,2500-2518).
ctgatatcctctatatgct

SEQ ID NO: 121956 - DNA, 19 bp, Homo sapiens
  siRNA target sequence for PHKA1 (NM_002637.1,2507-2525).
cctctatatgctgtatact

SEQ ID NO: 121957 - DNA, 19 bp, Homo sapiens
  siRNA target sequence for PHKA1 (NM_002637.1,2508-2526).
ctctatatgctgtatacta

SEQ ID NO: 121958 - DNA, 19 bp, Homo sapiens
  siRNA target sequence for PHKA1 (NM_002637.1,2629-2647).
ggggcctgatccgatacat

SEQ ID NO: 121959 - DNA, 19 bp, Homo sapiens
  siRNA target sequence for PHKA1 (NM_002637.1,2630-2648).
gggcctgatccgatacatt

SEQ ID NO: 121960 - DNA, 19 bp, Homo sapiens
  siRNA target sequence for PHKA1 (NM_002637.1,2631-2649).
ggcctgatccgatacattt

SEQ ID NO: 121961 - DNA, 19 bp, Homo sapiens
  siRNA target sequence for PHKA1 (NM_002637.1,2703-2721).
ctctcccaccagaaacatt

SEQ ID NO: 121962 - DNA, 19 bp, Homo sapiens
  siRNA target sequence for PHKA1 (NM_002637.1,2742-2760).
gaacctcgagaaaagacta

SEQ ID NO: 121963 - DNA, 19 bp, Homo sapiens
  siRNA target sequence for PHKA1 (NM_002637.1,2785-2803).
cgctcactcagctgataga

SEQ ID NO: 121964 - DNA, 19 bp, Homo sapiens
  siRNA target sequence for PHKA1 (NM_002637.1,2786-2804).
gctcactcagctgatagat

SEQ ID NO: 121965 - DNA, 19 bp, Homo sapiens
  siRNA target sequence for PHKA1 (NM_002637.1,2855-2873).
ggtatatctagccatgtat

SEQ ID NO: 121966 - DNA, 19 bp, Homo sapiens
  siRNA target sequence for PHKA1 (NM_002637.1,2856-2874).
gtatatctagccatgtata

SEQ ID NO: 121967 - DNA, 19 bp, Homo sapiens
  siRNA target sequence for PHKA1 (NM_002637.1,2906-2924).
gtttcgacttcgaattggt

SEQ ID NO: 121968 - DNA, 19 bp, Homo sapiens
  siRNA target sequence for PHKA1 (NM_002637.1,2917-2935).
gaattggtctgatcataca

SEQ ID NO: 121969 - DNA, 19 bp, Homo sapiens
  siRNA target sequence for PHKA1 (NM_002637.1,2922-2940).
ggtctgatcatacaagtta

SEQ ID NO: 121970 - DNA, 19 bp, Homo sapiens
  siRNA target sequence for PHKA1 (NM_002637.1,2923-2941).
gtctgatcatacaagttat

SEQ ID NO: 121971 - DNA, 19 bp, Homo sapiens
  siRNA target sequence for PHKA1 (NM_002637.1,2989-3007).
cagagggcctgatgaatct

SEQ ID NO: 121972 - DNA, 19 bp, Homo sapiens
  siRNA target sequence for PHKA1 (NM_002637.1,2991-3009).
gagggcctgatgaatctca

SEQ ID NO: 121973 - DNA, 19 bp, Homo sapiens
  siRNA target sequence for PHKA1 (NM_002637.1,3077-3095).
cgttcgtcccactgattca

SEQ ID NO: 121974 - DNA, 19 bp, Homo sapiens
  siRNA target sequence for PHKA1 (NM_002637.1,3078-3096).
gttcgtcccactgattcaa

SEQ ID NO: 121975 - DNA, 19 bp, Homo sapiens
  siRNA target sequence for PHKA1 (NM_002637.1,3082-3100).
gtcccactgattcaaatgt

SEQ ID NO: 121976 - DNA, 19 bp, Homo sapiens
  siRNA target sequence for PHKA1 (NM_002637.1,3099-3117).
gtcagtcctgctatttcta

SEQ ID NO: 121977 - DNA, 19 bp, Homo sapiens
  siRNA target sequence for PHKA1 (NM_002637.1,3170-3188).
gcagttaaaaagtgagata

SEQ ID NO: 121978 - DNA, 19 bp, Homo sapiens
  siRNA target sequence for PHKA1 (NM_002637.1,3266-3284).
gtcctttcctagtgcatat

SEQ ID NO: 121979 - DNA, 19 bp, Homo sapiens
  siRNA target sequence for PHKA1 (NM_002637.1,3268-3286).
cctttcctagtgcatatga

SEQ ID NO: 121980 - DNA, 19 bp, Homo sapiens
  siRNA target sequence for PHKA1 (NM_002637.1,3341-3359).
ggatggggcactgaataga

SEQ ID NO: 121981 - DNA, 19 bp, Homo sapiens
  siRNA target sequence for PHKA1 (NM_002637.1,3358-3376).
gagttccagttggatttta

SEQ ID NO: 121982 - DNA, 19 bp, Homo sapiens
  siRNA target sequence for PHKA1 (NM_002637.1,3363-3381).
ccagttggattttatcaga

SEQ ID NO: 121983 - DNA, 19 bp, Homo sapiens
  siRNA target sequence for PHKA1 (NM_002637.1,3404-3422).
gtgtcacggactttctgtt

SEQ ID NO: 121984 - DNA, 19 bp, Homo sapiens
  siRNA target sequence for PHKA1 (NM_002637.1,3458-3476).
gatgactccaggtgagatt

SEQ ID NO: 121985 - DNA, 19 bp, Homo sapiens
  siRNA target sequence for PHKA1 (NM_002637.1,3569-3587).
gctggcagatattgaaatt

SEQ ID NO: 121986 - DNA, 19 bp, Homo sapiens
  siRNA target sequence for PHKA1 (NM_002637.1,3699-3717).
cccgcatctggcatctgta

SEQ ID NO: 121987 - DNA, 19 bp, Homo sapiens
  siRNA target sequence for PHKA2 (NM_000292.1,173-191).
ggctggtgcagcaaaccat

SEQ ID NO: 121988 - DNA, 19 bp, Homo sapiens
  siRNA target sequence for PHKA2 (NM_000292.1,251-269).
cctgggtgcgggataacat

SEQ ID NO: 121989 - DNA, 19 bp, Homo sapiens
  siRNA target sequence for PHKA2 (NM_000292.1,254-272).
gggtgcgggataacatcta

SEQ ID NO: 121990 - DNA, 19 bp, Homo sapiens
  siRNA target sequence for PHKA2 (NM_000292.1,256-274).
gtgcgggataacatctaca

SEQ ID NO: 121991 - DNA, 19 bp, Homo sapiens
  siRNA target sequence for PHKA2 (NM_000292.1,259-277).
cgggataacatctacagta

SEQ ID NO: 121992 - DNA, 19 bp, Homo sapiens
  siRNA target sequence for PHKA2 (NM_000292.1,260-278).
gggataacatctacagtat

SEQ ID NO: 121993 - DNA, 19 bp, Homo sapiens
  siRNA target sequence for PHKA2 (NM_000292.1,299-317).
gcatggcctaccgtaagaa

SEQ ID NO: 121994 - DNA, 19 bp, Homo sapiens
  siRNA target sequence for PHKA2 (NM_000292.1,572-590).
ccgcctcaggcttacgtat

SEQ ID NO: 121995 - DNA, 19 bp, Homo sapiens
  siRNA target sequence for PHKA2 (NM_000292.1,582-600).
cttacgtatcattttcact

SEQ ID NO: 121996 - DNA, 19 bp, Homo sapiens
  siRNA target sequence for PHKA2 (NM_000292.1,603-621).
cgatgaggtggccttcata

SEQ ID NO: 121997 - DNA, 19 bp, Homo sapiens
  siRNA target sequence for PHKA2 (NM_000292.1,650-668).
catataaagtcgctgatta

SEQ ID NO: 121998 - DNA, 19 bp, Homo sapiens
  siRNA target sequence for PHKA2 (NM_000292.1,678-696).
ggagcgtggagataagact

SEQ ID NO: 121999 - DNA, 19 bp, Homo sapiens
  siRNA target sequence for PHKA2 (NM_000292.1,679-697).
gagcgtggagataagacta

SEQ ID NO: 122000 - DNA, 19 bp, Homo sapiens
  siRNA target sequence for PHKA2 (NM_000292.1,681-699).
gcgtggagataagactaat

SEQ ID NO: 122001 - DNA, 19 bp, Homo sapiens
  siRNA target sequence for PHKA2 (NM_000292.1,700-718).
cagggcatcccggaattga

SEQ ID NO: 122002 - DNA, 19 bp, Homo sapiens
  siRNA target sequence for PHKA2 (NM_000292.1,702-720).
gggcatcccggaattgaat

SEQ ID NO: 122003 - DNA, 19 bp, Homo sapiens
  siRNA target sequence for PHKA2 (NM_000292.1,749-767).
ctcttgaggcaattgatga

SEQ ID NO: 122004 - DNA, 19 bp, Homo sapiens
  siRNA target sequence for PHKA2 (NM_000292.1,835-853).
cactgccagtctattctgt

SEQ ID NO: 122005 - DNA, 19 bp, Homo sapiens
  siRNA target sequence for PHKA2 (NM_000292.1,866-884).
caagagcgtcgacatctaa

SEQ ID NO: 122006 - DNA, 19 bp, Homo sapiens
  siRNA target sequence for PHKA2 (NM_000292.1,869-887).
gagcgtcgacatctaaaga

SEQ ID NO: 122007 - DNA, 19 bp, Homo sapiens
  siRNA target sequence for PHKA2 (NM_000292.1,871-889).
gcgtcgacatctaaagaaa

SEQ ID NO: 122008 - DNA, 19 bp, Homo sapiens
  siRNA target sequence for PHKA2 (NM_000292.1,872-890).
cgtcgacatctaaagaaat

SEQ ID NO: 122009 - DNA, 19 bp, Homo sapiens
  siRNA target sequence for PHKA2 (NM_000292.1,873-891).
gtcgacatctaaagaaatt

SEQ ID NO: 122010 - DNA, 19 bp, Homo sapiens
  siRNA target sequence for PHKA2 (NM_000292.1,875-893).
cgacatctaaagaaattga

SEQ ID NO: 122011 - DNA, 19 bp, Homo sapiens
  siRNA target sequence for PHKA2 (NM_000292.1,927-945).
ctttgcagtggaagatgta

SEQ ID NO: 122012 - DNA, 19 bp, Homo sapiens
  siRNA target sequence for PHKA2 (NM_000292.1,985-1003).
ctccaggggcgttatggat

SEQ ID NO: 122013 - DNA, 19 bp, Homo sapiens
  siRNA target sequence for PHKA2 (NM_000292.1,1049-1067).
ctaatcgactgcattatga

SEQ ID NO: 122014 - DNA, 19 bp, Homo sapiens
  siRNA target sequence for PHKA2 (NM_000292.1,1110-1128).
gcctgtgttttggacatat

SEQ ID NO: 122015 - DNA, 19 bp, Homo sapiens
  siRNA target sequence for PHKA2 (NM_000292.1,1226-1244).
gcctggtgcctgaactcta

SEQ ID NO: 122016 - DNA, 19 bp, Homo sapiens
  siRNA target sequence for PHKA2 (NM_000292.1,1253-1271).
cgcctaacaaggtagatga

SEQ ID NO: 122017 - DNA, 19 bp, Homo sapiens
  siRNA target sequence for PHKA2 (NM_000292.1,1292-1310).
cagtagaccgagttcctat

SEQ ID NO: 122018 - DNA, 19 bp, Homo sapiens
  siRNA target sequence for PHKA2 (NM_000292.1,1331-1349).
ggggccaatccttgtacat

SEQ ID NO: 122019 - DNA, 19 bp, Homo sapiens
  siRNA target sequence for PHKA2 (NM_000292.1,1362-1380).
gttggcagagggattcctt

SEQ ID NO: 122020 - DNA, 19 bp, Homo sapiens
  siRNA target sequence for PHKA2 (NM_000292.1,1390-1408).
gaaatcgatcccttaaata

SEQ ID NO: 122021 - DNA, 19 bp, Homo sapiens
  siRNA target sequence for PHKA2 (NM_000292.1,1395-1413).
cgatcccttaaatagaaga

SEQ ID NO: 122022 - DNA, 19 bp, Homo sapiens
  siRNA target sequence for PHKA2 (NM_000292.1,1396-1414).
gatcccttaaatagaagat

SEQ ID NO: 122023 - DNA, 19 bp, Homo sapiens
  siRNA target sequence for PHKA2 (NM_000292.1,1441-1459).
gtagtacaagttactgttt

SEQ ID NO: 122024 - DNA, 19 bp, Homo sapiens
  siRNA target sequence for PHKA2 (NM_000292.1,1474-1492).
cacattaaggacttattga

SEQ ID NO: 122025 - DNA, 19 bp, Homo sapiens
  siRNA target sequence for PHKA2 (NM_000292.1,1502-1520).
gggtgaacgtccagagtat

SEQ ID NO: 122026 - DNA, 19 bp, Homo sapiens
  siRNA target sequence for PHKA2 (NM_000292.1,1515-1533).
gagtatcgcggacattcat

SEQ ID NO: 122027 - DNA, 19 bp, Homo sapiens
  siRNA target sequence for PHKA2 (NM_000292.1,1521-1539).
cgcggacattcatccaatt

SEQ ID NO: 122028 - DNA, 19 bp, Homo sapiens
  siRNA target sequence for PHKA2 (NM_000292.1,1523-1541).
cggacattcatccaattca

SEQ ID NO: 122029 - DNA, 19 bp, Homo sapiens
  siRNA target sequence for PHKA2 (NM_000292.1,1554-1572).
ccggattcttagtcacata

SEQ ID NO: 122030 - DNA, 19 bp, Homo sapiens
  siRNA target sequence for PHKA2 (NM_000292.1,1555-1573).
cggattcttagtcacatat

SEQ ID NO: 122031 - DNA, 19 bp, Homo sapiens
  siRNA target sequence for PHKA2 (NM_000292.1,1556-1574).
ggattcttagtcacatata

SEQ ID NO: 122032 - DNA, 19 bp, Homo sapiens
  siRNA target sequence for PHKA2 (NM_000292.1,1577-1595).
ccaagcttggacggaataa

SEQ ID NO: 122033 - DNA, 19 bp, Homo sapiens
  siRNA target sequence for PHKA2 (NM_000292.1,1613-1631).
ggcgaccgtatcgacatat

SEQ ID NO: 122034 - DNA, 19 bp, Homo sapiens
  siRNA target sequence for PHKA2 (NM_000292.1,1614-1632).
gcgaccgtatcgacatatt

SEQ ID NO: 122035 - DNA, 19 bp, Homo sapiens
  siRNA target sequence for PHKA2 (NM_000292.1,1662-1680).
gattaggaaccaaatcttt

SEQ ID NO: 122036 - DNA, 19 bp, Homo sapiens
  siRNA target sequence for PHKA2 (NM_000292.1,1671-1689).
ccaaatctttacttttaca

SEQ ID NO: 122037 - DNA, 19 bp, Homo sapiens
  siRNA target sequence for PHKA2 (NM_000292.1,1720-1738).
ctggccctcgacaatgaga

SEQ ID NO: 122038 - DNA, 19 bp, Homo sapiens
  siRNA target sequence for PHKA2 (NM_000292.1,1826-1844).
gtcgcaccatgctcacaaa

SEQ ID NO: 122039 - DNA, 19 bp, Homo sapiens
  siRNA target sequence for PHKA2 (NM_000292.1,1829-1847).
gcaccatgctcacaaatga

SEQ ID NO: 122040 - DNA, 19 bp, Homo sapiens
  siRNA target sequence for PHKA2 (NM_000292.1,1830-1848).
caccatgctcacaaatgat

SEQ ID NO: 122041 - DNA, 19 bp, Homo sapiens
  siRNA target sequence for PHKA2 (NM_000292.1,1870-1888).
gtgctctccacaattagaa

SEQ ID NO: 122042 - DNA, 19 bp, Homo sapiens
  siRNA target sequence for PHKA2 (NM_000292.1,1877-1895).
ccacaattagaaaactaga

SEQ ID NO: 122043 - DNA, 19 bp, Homo sapiens
  siRNA target sequence for PHKA2 (NM_000292.1,1931-1949).
ggaacctttcggaatttct

SEQ ID NO: 122044 - DNA, 19 bp, Homo sapiens
  siRNA target sequence for PHKA2 (NM_000292.1,1952-1970).
ccacatcgttctacacata

SEQ ID NO: 122045 - DNA, 19 bp, Homo sapiens
  siRNA target sequence for PHKA2 (NM_000292.1,1953-1971).
cacatcgttctacacatat

SEQ ID NO: 122046 - DNA, 19 bp, Homo sapiens
  siRNA target sequence for PHKA2 (NM_000292.1,1955-1973).
catcgttctacacatatct

SEQ ID NO: 122047 - DNA, 19 bp, Homo sapiens
  siRNA target sequence for PHKA2 (NM_000292.1,2051-2069).
cagatttggtaggatatct

SEQ ID NO: 122048 - DNA, 19 bp, Homo sapiens
  siRNA target sequence for PHKA2 (NM_000292.1,2070-2088).
ggaagacacctgtaatcaa

SEQ ID NO: 122049 - DNA, 19 bp, Homo sapiens
  siRNA target sequence for PHKA2 (NM_000292.1,2098-2116).
gacgaacttgaccattata

SEQ ID NO: 122050 - DNA, 19 bp, Homo sapiens
  siRNA target sequence for PHKA2 (NM_000292.1,2101-2119).
gaacttgaccattatatca

SEQ ID NO: 122051 - DNA, 19 bp, Homo sapiens
  siRNA target sequence for PHKA2 (NM_000292.1,2177-2195).
cagaagaccgccatgtctt

SEQ ID NO: 122052 - DNA, 19 bp, Homo sapiens
  siRNA target sequence for PHKA2 (NM_000292.1,2208-2226).
ctccacgcgggacatactt

SEQ ID NO: 122053 - DNA, 19 bp, Homo sapiens
  siRNA target sequence for PHKA2 (NM_000292.1,2211-2229).
cacgcgggacatactttct

SEQ ID NO: 122054 - DNA, 19 bp, Homo sapiens
  siRNA target sequence for PHKA2 (NM_000292.1,2213-2231).
cgcgggacatactttctgt

SEQ ID NO: 122055 - DNA, 19 bp, Homo sapiens
  siRNA target sequence for PHKA2 (NM_000292.1,2260-2278).
ccatttgttcccatgactt

SEQ ID NO: 122056 - DNA, 19 bp, Homo sapiens
  siRNA target sequence for PHKA2 (NM_000292.1,2261-2279).
catttgttcccatgacttt

SEQ ID NO: 122057 - DNA, 19 bp, Homo sapiens
  siRNA target sequence for PHKA2 (NM_000292.1,2271-2289).
catgactttgccgactaaa

SEQ ID NO: 122058 - DNA, 19 bp, Homo sapiens
  siRNA target sequence for PHKA2 (NM_000292.1,2274-2292).
gactttgccgactaaagtt

SEQ ID NO: 122059 - DNA, 19 bp, Homo sapiens
  siRNA target sequence for PHKA2 (NM_000292.1,2276-2294).
ctttgccgactaaagttct

SEQ ID NO: 122060 - DNA, 19 bp, Homo sapiens
  siRNA target sequence for PHKA2 (NM_000292.1,2280-2298).
gccgactaaagttctaagt

SEQ ID NO: 122061 - DNA, 19 bp, Homo sapiens
  siRNA target sequence for PHKA2 (NM_000292.1,2293-2311).
ctaagtgcccaccgtaaat

SEQ ID NO: 122062 - DNA, 19 bp, Homo sapiens
  siRNA target sequence for PHKA2 (NM_000292.1,2297-2315).
gtgcccaccgtaaatcact

SEQ ID NO: 122063 - DNA, 19 bp, Homo sapiens
  siRNA target sequence for PHKA2 (NM_000292.1,2301-2319).
ccaccgtaaatcactgaat

SEQ ID NO: 122064 - DNA, 19 bp, Homo sapiens
  siRNA target sequence for PHKA2 (NM_000292.1,2356-2374).
cctgaaagtgactttcagt

SEQ ID NO: 122065 - DNA, 19 bp, Homo sapiens
  siRNA target sequence for PHKA2 (NM_000292.1,2416-2434).
gttgagcagctaaaagatt

SEQ ID NO: 122066 - DNA, 19 bp, Homo sapiens
  siRNA target sequence for PHKA2 (NM_000292.1,2419-2437).
gagcagctaaaagattgtt

SEQ ID NO: 122067 - DNA, 19 bp, Homo sapiens
  siRNA target sequence for PHKA2 (NM_000292.1,2521-2539).
cacggggtcaccgttcaaa

SEQ ID NO: 122068 - DNA, 19 bp, Homo sapiens
  siRNA target sequence for PHKA2 (NM_000292.1,2525-2543).
gggtcaccgttcaaaacct

SEQ ID NO: 122069 - DNA, 19 bp, Homo sapiens
  siRNA target sequence for PHKA2 (NM_000292.1,2526-2544).
ggtcaccgttcaaaacctt

SEQ ID NO: 122070 - DNA, 19 bp, Homo sapiens
  siRNA target sequence for PHKA2 (NM_000292.1,2811-2829).
ggtttacctggccatgtat

SEQ ID NO: 122071 - DNA, 19 bp, Homo sapiens
  siRNA target sequence for PHKA2 (NM_000292.1,2958-2976).
gaacctcagccctttcgat

SEQ ID NO: 122072 - DNA, 19 bp, Homo sapiens
  siRNA target sequence for PHKA2 (NM_000292.1,2964-2982).
cagccctttcgatatgaaa

SEQ ID NO: 122073 - DNA, 19 bp, Homo sapiens
  siRNA target sequence for PHKA2 (NM_000292.1,2966-2984).
gccctttcgatatgaaaaa

SEQ ID NO: 122074 - DNA, 19 bp, Homo sapiens
  siRNA target sequence for PHKA2 (NM_000292.1,2986-3004).
ctcctgcaccatattctaa

SEQ ID NO: 122075 - DNA, 19 bp, Homo sapiens
  siRNA target sequence for PHKA2 (NM_000292.1,2988-3006).
cctgcaccatattctaagt

SEQ ID NO: 122076 - DNA, 19 bp, Homo sapiens
  siRNA target sequence for PHKA2 (NM_000292.1,3091-3109).
cataccggagtcaccaaaa

SEQ ID NO: 122077 - DNA, 19 bp, Homo sapiens
  siRNA target sequence for PHKA2 (NM_000292.1,3110-3128).
ctgagaggagtggcattaa

SEQ ID NO: 122078 - DNA, 19 bp, Homo sapiens
  siRNA target sequence for PHKA2 (NM_000292.1,3153-3171).
gatgactaggcggtttagt

SEQ ID NO: 122079 - DNA, 19 bp, Homo sapiens
  siRNA target sequence for PHKA2 (NM_000292.1,3162-3180).
gcggtttagtgctgatgaa

SEQ ID NO: 122080 - DNA, 19 bp, Homo sapiens
  siRNA target sequence for PHKA2 (NM_000292.1,3164-3182).
ggtttagtgctgatgaaca

SEQ ID NO: 122081 - DNA, 19 bp, Homo sapiens
  siRNA target sequence for PHKA2 (NM_000292.1,3170-3188).
gtgctgatgaacagttctt

SEQ ID NO: 122082 - DNA, 19 bp, Homo sapiens
  siRNA target sequence for PHKA2 (NM_000292.1,3362-3380).
gggtccccgtgggattcta

SEQ ID NO: 122083 - DNA, 19 bp, Homo sapiens
  siRNA target sequence for PHKA2 (NM_000292.1,3416-3434).
gtctctccatcgatggtta

SEQ ID NO: 122084 - DNA, 19 bp, Homo sapiens
  siRNA target sequence for PHKA2 (NM_000292.1,3468-3486).
cccgcatgagatcaagttt

SEQ ID NO: 122085 - DNA, 19 bp, Homo sapiens
  siRNA target sequence for PHKA2 (NM_000292.1,3754-3772).
gggacgatgacctacctaa

SEQ ID NO: 122086 - DNA, 19 bp, Homo sapiens
  siRNA target sequence for PHKA2 (NM_000292.1,3773-3791).
caagagcagtggcttctta

SEQ ID NO: 122087 - DNA, 19 bp, Homo sapiens
  siRNA target sequence for PHKB (NM_000293.1,95-113).
gctcaggctcagtttatga

SEQ ID NO: 122088 - DNA, 19 bp, Homo sapiens
  siRNA target sequence for PHKB (NM_000293.1,96-114).
ctcaggctcagtttatgaa

SEQ ID NO: 122089 - DNA, 19 bp, Homo sapiens
  siRNA target sequence for PHKB (NM_000293.1,163-181).
gataagttggaccattatt

SEQ ID NO: 122090 - DNA, 19 bp, Homo sapiens
  siRNA target sequence for PHKB (NM_000293.1,228-246).
cggtctctttcccactaaa

SEQ ID NO: 122091 - DNA, 19 bp, Homo sapiens
  siRNA target sequence for PHKB (NM_000293.1,366-384).
ggagcactcagctataaaa

SEQ ID NO: 122092 - DNA, 19 bp, Homo sapiens
  siRNA target sequence for PHKB (NM_000293.1,367-385).
gagcactcagctataaaat

SEQ ID NO: 122093 - DNA, 19 bp, Homo sapiens
  siRNA target sequence for PHKB (NM_000293.1,386-404).
gcatgagaggaattctcta

SEQ ID NO: 122094 - DNA, 19 bp, Homo sapiens
  siRNA target sequence for PHKB (NM_000293.1,424-442).
gataaggtccagcagttta

SEQ ID NO: 122095 - DNA, 19 bp, Homo sapiens
  siRNA target sequence for PHKB (NM_000293.1,447-465).
ggatccacgcccaacaaca

SEQ ID NO: 122096 - DNA, 19 bp, Homo sapiens
  siRNA target sequence for PHKB (NM_000293.1,448-466).
gatccacgcccaacaacat

SEQ ID NO: 122097 - DNA, 19 bp, Homo sapiens
  siRNA target sequence for PHKB (NM_000293.1,587-605).
caggactccagattatcta

SEQ ID NO: 122098 - DNA, 19 bp, Homo sapiens
  siRNA target sequence for PHKB (NM_000293.1,589-607).
ggactccagattatctaca

SEQ ID NO: 122099 - DNA, 19 bp, Homo sapiens
  siRNA target sequence for PHKB (NM_000293.1,590-608).
gactccagattatctacaa

SEQ ID NO: 122100 - DNA, 19 bp, Homo sapiens
  siRNA target sequence for PHKB (NM_000293.1,616-634).
gaggtctcttttattcaaa

SEQ ID NO: 122101 - DNA, 19 bp, Homo sapiens
  siRNA target sequence for PHKB (NM_000293.1,712-730).
ggcagcacagagctacatt

SEQ ID NO: 122102 - DNA, 19 bp, Homo sapiens
  siRNA target sequence for PHKB (NM_000293.1,732-750).
gagctcggttggtttagca

SEQ ID NO: 122103 - DNA, 19 bp, Homo sapiens
  siRNA target sequence for PHKB (NM_000293.1,734-752).
gctcggttggtttagcaaa

SEQ ID NO: 122104 - DNA, 19 bp, Homo sapiens
  siRNA target sequence for PHKB (NM_000293.1,735-753).
ctcggttggtttagcaaaa

SEQ ID NO: 122105 - DNA, 19 bp, Homo sapiens
  siRNA target sequence for PHKB (NM_000293.1,738-756).
ggttggtttagcaaaagca

SEQ ID NO: 122106 - DNA, 19 bp, Homo sapiens
  siRNA target sequence for PHKB (NM_000293.1,754-772).
gcagctctagaagcaatta

SEQ ID NO: 122107 - DNA, 19 bp, Homo sapiens
  siRNA target sequence for PHKB (NM_000293.1,760-778).
ctagaagcaattaatggat

SEQ ID NO: 122108 - DNA, 19 bp, Homo sapiens
  siRNA target sequence for PHKB (NM_000293.1,800-818).
gctgttcgtggtcagttat

SEQ ID NO: 122109 - DNA, 19 bp, Homo sapiens
  siRNA target sequence for PHKB (NM_000293.1,801-819).
ctgttcgtggtcagttata

SEQ ID NO: 122110 - DNA, 19 bp, Homo sapiens
  siRNA target sequence for PHKB (NM_000293.1,803-821).
gttcgtggtcagttatatt

SEQ ID NO: 122111 - DNA, 19 bp, Homo sapiens
  siRNA target sequence for PHKB (NM_000293.1,806-824).
cgtggtcagttatatttgt

SEQ ID NO: 122112 - DNA, 19 bp, Homo sapiens
  siRNA target sequence for PHKB (NM_000293.1,825-843).
ggatctcgatgctcacaat

SEQ ID NO: 122113 - DNA, 19 bp, Homo sapiens
  siRNA target sequence for PHKB (NM_000293.1,878-896).
gagaatcaagatcacataa

SEQ ID NO: 122114 - DNA, 19 bp, Homo sapiens
  siRNA target sequence for PHKB (NM_000293.1,912-930).
gctcccctgcatcagttat

SEQ ID NO: 122115 - DNA, 19 bp, Homo sapiens
  siRNA target sequence for PHKB (NM_000293.1,915-933).
cccctgcatcagttatcct

SEQ ID NO: 122116 - DNA, 19 bp, Homo sapiens
  siRNA target sequence for PHKB (NM_000293.1,945-963).
ggatgatgaagttcttttt

SEQ ID NO: 122117 - DNA, 19 bp, Homo sapiens
  siRNA target sequence for PHKB (NM_000293.1,965-983).
gccagacacttgataaagt

SEQ ID NO: 122118 - DNA, 19 bp, Homo sapiens
  siRNA target sequence for PHKB (NM_000293.1,1023-1041).
cttgagagatgggtataga

SEQ ID NO: 122119 - DNA, 19 bp, Homo sapiens
  siRNA target sequence for PHKB (NM_000293.1,1030-1048).
gatgggtatagaacatcat

SEQ ID NO: 122120 - DNA, 19 bp, Homo sapiens
  siRNA target sequence for PHKB (NM_000293.1,1071-1089).
ctacaagccagctgaaatt

SEQ ID NO: 122121 - DNA, 19 bp, Homo sapiens
  siRNA target sequence for PHKB (NM_000293.1,1077-1095).
gccagctgaaattaagcta

SEQ ID NO: 122122 - DNA, 19 bp, Homo sapiens
  siRNA target sequence for PHKB (NM_000293.1,1131-1149).
cctttatatgatgattgat

SEQ ID NO: 122123 - DNA, 19 bp, Homo sapiens
  siRNA target sequence for PHKB (NM_000293.1,1163-1181).
gcaatcctaagcaagtaca

SEQ ID NO: 122124 - DNA, 19 bp, Homo sapiens
  siRNA target sequence for PHKB (NM_000293.1,1183-1201).
gaatatcaggatcttttga

SEQ ID NO: 122125 - DNA, 19 bp, Homo sapiens
  siRNA target sequence for PHKB (NM_000293.1,1229-1247).
gatatcctgttgtaccaaa

SEQ ID NO: 122126 - DNA, 19 bp, Homo sapiens
  siRNA target sequence for PHKB (NM_000293.1,1261-1279).
ccagctgactttgtagaat

SEQ ID NO: 122127 - DNA, 19 bp, Homo sapiens
  siRNA target sequence for PHKB (NM_000293.1,1262-1280).
cagctgactttgtagaata

SEQ ID NO: 122128 - DNA, 19 bp, Homo sapiens
  siRNA target sequence for PHKB (NM_000293.1,1293-1311).
ccctggtagtcaaaaacga

SEQ ID NO: 122129 - DNA, 19 bp, Homo sapiens
  siRNA target sequence for PHKB (NM_000293.1,1294-1312).
cctggtagtcaaaaacgat

SEQ ID NO: 122130 - DNA, 19 bp, Homo sapiens
  siRNA target sequence for PHKB (NM_000293.1,1329-1347).
ccgtgatggaaaactgttt

SEQ ID NO: 122131 - DNA, 19 bp, Homo sapiens
  siRNA target sequence for PHKB (NM_000293.1,1352-1370).
ggggacaagcactttatat

SEQ ID NO: 122132 - DNA, 19 bp, Homo sapiens
  siRNA target sequence for PHKB (NM_000293.1,1354-1372).
ggacaagcactttatatca

SEQ ID NO: 122133 - DNA, 19 bp, Homo sapiens
  siRNA target sequence for PHKB (NM_000293.1,1355-1373).
gacaagcactttatatcat

SEQ ID NO: 122134 - DNA, 19 bp, Homo sapiens
  siRNA target sequence for PHKB (NM_000293.1,1430-1448).
gctatgtcccactaaagga

SEQ ID NO: 122135 - DNA, 19 bp, Homo sapiens
  siRNA target sequence for PHKB (NM_000293.1,1439-1457).
cactaaaggatcaacgtaa

SEQ ID NO: 122136 - DNA, 19 bp, Homo sapiens
  siRNA target sequence for PHKB (NM_000293.1,1533-1551).
ccaaagacttcaagttttt

SEQ ID NO: 122137 - DNA, 19 bp, Homo sapiens
  siRNA target sequence for PHKB (NM_000293.1,1588-1606).
caagtagaacccattcaga

SEQ ID NO: 122138 - DNA, 19 bp, Homo sapiens
  siRNA target sequence for PHKB (NM_000293.1,1591-1609).
gtagaacccattcagatat

SEQ ID NO: 122139 - DNA, 19 bp, Homo sapiens
  siRNA target sequence for PHKB (NM_000293.1,1620-1638).
ggagcttgtgaaagcttat

SEQ ID NO: 122140 - DNA, 19 bp, Homo sapiens
  siRNA target sequence for PHKB (NM_000293.1,1701-1719).
cctcgggacatcaaagatt

SEQ ID NO: 122141 - DNA, 19 bp, Homo sapiens
  siRNA target sequence for PHKB (NM_000293.1,1733-1751).
gaaagactgtggtttgtta

SEQ ID NO: 122142 - DNA, 19 bp, Homo sapiens
  siRNA target sequence for PHKB (NM_000293.1,1743-1761).
ggtttgttacccgattatt

SEQ ID NO: 122143 - DNA, 19 bp, Homo sapiens
  siRNA target sequence for PHKB (NM_000293.1,1748-1766).
gttacccgattattttcga

SEQ ID NO: 122144 - DNA, 19 bp, Homo sapiens
  siRNA target sequence for PHKB (NM_000293.1,1828-1846).
ctgcagttcattaaacaat

SEQ ID NO: 122145 - DNA, 19 bp, Homo sapiens
  siRNA target sequence for PHKB (NM_000293.1,1882-1900).
ctcatccgggaagacaata

SEQ ID NO: 122146 - DNA, 19 bp, Homo sapiens
  siRNA target sequence for PHKB (NM_000293.1,1887-1905).
ccgggaagacaatataaga

SEQ ID NO: 122147 - DNA, 19 bp, Homo sapiens
  siRNA target sequence for PHKB (NM_000293.1,1911-1929).
ccggttcaaccccatatta

SEQ ID NO: 122148 - DNA, 19 bp, Homo sapiens
  siRNA target sequence for PHKB (NM_000293.1,1913-1931).
ggttcaaccccatattaga

SEQ ID NO: 122149 - DNA, 19 bp, Homo sapiens
  siRNA target sequence for PHKB (NM_000293.1,1914-1932).
gttcaaccccatattagat

SEQ ID NO: 122150 - DNA, 19 bp, Homo sapiens
  siRNA target sequence for PHKB (NM_000293.1,1938-1956).
ggcagcccttaaaaaagga

SEQ ID NO: 122151 - DNA, 19 bp, Homo sapiens
  siRNA target sequence for PHKB (NM_000293.1,1984-2002).
gatcgtctacagacactaa

SEQ ID NO: 122152 - DNA, 19 bp, Homo sapiens
  siRNA target sequence for PHKB (NM_000293.1,1987-2005).
cgtctacagacactaatat

SEQ ID NO: 122153 - DNA, 19 bp, Homo sapiens
  siRNA target sequence for PHKB (NM_000293.1,2014-2032).
gtggtagaacaacttgatt

SEQ ID NO: 122154 - DNA, 19 bp, Homo sapiens
  siRNA target sequence for PHKB (NM_000293.1,2086-2104).
ctagaacctcccaaacatt

SEQ ID NO: 122155 - DNA, 19 bp, Homo sapiens
  siRNA target sequence for PHKB (NM_000293.1,2089-2107).
gaacctcccaaacattcaa

SEQ ID NO: 122156 - DNA, 19 bp, Homo sapiens
  siRNA target sequence for PHKB (NM_000293.1,2154-2172).
gcagccggatgtcaacatt

SEQ ID NO: 122157 - DNA, 19 bp, Homo sapiens
  siRNA target sequence for PHKB (NM_000293.1,2155-2173).
cagccggatgtcaacatta

SEQ ID NO: 122158 - DNA, 19 bp, Homo sapiens
  siRNA target sequence for PHKB (NM_000293.1,2157-2175).
gccggatgtcaacattagt

SEQ ID NO: 122159 - DNA, 19 bp, Homo sapiens
  siRNA target sequence for PHKB (NM_000293.1,2159-2177).
cggatgtcaacattagtga

SEQ ID NO: 122160 - DNA, 19 bp, Homo sapiens
  siRNA target sequence for PHKB (NM_000293.1,2187-2205).
caaacccacccacgaaatt

SEQ ID NO: 122161 - DNA, 19 bp, Homo sapiens
  siRNA target sequence for PHKB (NM_000293.1,2192-2210).
ccacccacgaaattcttca

SEQ ID NO: 122162 - DNA, 19 bp, Homo sapiens
  siRNA target sequence for PHKB (NM_000293.1,2258-2276).
gtatactgctcaaaagaga

SEQ ID NO: 122163 - DNA, 19 bp, Homo sapiens
  siRNA target sequence for PHKB (NM_000293.1,2278-2296).
ggccccaacttcatcacaa

SEQ ID NO: 122164 - DNA, 19 bp, Homo sapiens
  siRNA target sequence for PHKB (NM_000293.1,2279-2297).
gccccaacttcatcacaaa

SEQ ID NO: 122165 - DNA, 19 bp, Homo sapiens
  siRNA target sequence for PHKB (NM_000293.1,2298-2316).
ggaaggtaccgtttctgat

SEQ ID NO: 122166 - DNA, 19 bp, Homo sapiens
  siRNA target sequence for PHKB (NM_000293.1,2319-2337).
cattgagagagtctataga

SEQ ID NO: 122167 - DNA, 19 bp, Homo sapiens
  siRNA target sequence for PHKB (NM_000293.1,2370-2388).
gcgctacggggctgcattt

SEQ ID NO: 122168 - DNA, 19 bp, Homo sapiens
  siRNA target sequence for PHKB (NM_000293.1,2371-2389).
cgctacggggctgcattta

SEQ ID NO: 122169 - DNA, 19 bp, Homo sapiens
  siRNA target sequence for PHKB (NM_000293.1,2406-2424).
ctctatagccccacacatt

SEQ ID NO: 122170 - DNA, 19 bp, Homo sapiens
  siRNA target sequence for PHKB (NM_000293.1,2413-2431).
gccccacacattactactt

SEQ ID NO: 122171 - DNA, 19 bp, Homo sapiens
  siRNA target sequence for PHKB (NM_000293.1,2414-2432).
ccccacacattactacttt

SEQ ID NO: 122172 - DNA, 19 bp, Homo sapiens
  siRNA target sequence for PHKB (NM_000293.1,2502-2520).
gtctccaagagtgattcaa

SEQ ID NO: 122173 - DNA, 19 bp, Homo sapiens
  siRNA target sequence for PHKB (NM_000293.1,2512-2530).
gtgattcaaaacatcatct

SEQ ID NO: 122174 - DNA, 19 bp, Homo sapiens
  siRNA target sequence for PHKB (NM_000293.1,2518-2536).
caaaacatcatctattata

SEQ ID NO: 122175 - DNA, 19 bp, Homo sapiens
  siRNA target sequence for PHKB (NM_000293.1,2523-2541).
catcatctattataagtgt

SEQ ID NO: 122176 - DNA, 19 bp, Homo sapiens
  siRNA target sequence for PHKB (NM_000293.1,2564-2582).
cggtcattcagcaagaact

SEQ ID NO: 122177 - DNA, 19 bp, Homo sapiens
  siRNA target sequence for PHKB (NM_000293.1,2590-2608).
catattggctggatcatct

SEQ ID NO: 122178 - DNA, 19 bp, Homo sapiens
  siRNA target sequence for PHKB (NM_000293.1,2596-2614).
ggctggatcatctccaata

SEQ ID NO: 122179 - DNA, 19 bp, Homo sapiens
  siRNA target sequence for PHKB (NM_000293.1,2708-2726).
cagccttggacttgtatca

SEQ ID NO: 122180 - DNA, 19 bp, Homo sapiens
  siRNA target sequence for PHKB (NM_000293.1,2727-2745).
gctgtcacctagtgaagtt

SEQ ID NO: 122181 - DNA, 19 bp, Homo sapiens
  siRNA target sequence for PHKB (NM_000293.1,2730-2748).
gtcacctagtgaagttaaa

SEQ ID NO: 122182 - DNA, 19 bp, Homo sapiens
  siRNA target sequence for PHKB (NM_000293.1,2814-2832).
cgatgggtctttgaataga

SEQ ID NO: 122183 - DNA, 19 bp, Homo sapiens
  siRNA target sequence for PHKB (NM_000293.1,2834-2852).
ctcccaccgggttctatga

SEQ ID NO: 122184 - DNA, 19 bp, Homo sapiens
  siRNA target sequence for PHKB (NM_000293.1,2920-2938).
caaccaaccctgtcagata

SEQ ID NO: 122185 - DNA, 19 bp, Homo sapiens
  siRNA target sequence for PHKB (NM_000293.1,2923-2941).
ccaaccctgtcagatatga

SEQ ID NO: 122186 - DNA, 19 bp, Homo sapiens
  siRNA target sequence for PHKB (NM_000293.1,3011-3029).
gacagatcgttgtagagtt

SEQ ID NO: 122187 - DNA, 19 bp, Homo sapiens
  siRNA target sequence for PHKB (NM_000293.1,3015-3033).
gatcgttgtagagttactt

SEQ ID NO: 122188 - DNA, 19 bp, Homo sapiens
  siRNA target sequence for PHKB (NM_000293.1,3025-3043).
gagttacttatggttgtat

SEQ ID NO: 122189 - DNA, 19 bp, Homo sapiens
  siRNA target sequence for PHKB (NM_000293.1,3059-3077).
gaaaccccgagctagaatt

SEQ ID NO: 122190 - DNA, 19 bp, Homo sapiens
  siRNA target sequence for PHKB (NM_000293.1,3065-3083).
ccgagctagaatttcaaga

SEQ ID NO: 122191 - DNA, 19 bp, Homo sapiens
  siRNA target sequence for PHKB (NM_000293.1,3069-3087).
gctagaatttcaagacaaa

SEQ ID NO: 122192 - DNA, 19 bp, Homo sapiens
  siRNA target sequence for PHKB (NM_000293.1,3101-3119).
gactggtcaaagaagcatt

SEQ ID NO: 122193 - DNA, 19 bp, Homo sapiens
  siRNA target sequence for PHKB (NM_000293.1,3139-3157).
cagagtcggctaaaggaaa

SEQ ID NO: 122194 - DNA, 19 bp, Homo sapiens
  siRNA target sequence for PHKB (NM_000293.1,3141-3159).
gagtcggctaaaggaaatt

SEQ ID NO: 122195 - DNA, 19 bp, Homo sapiens
  siRNA target sequence for PHKB (NM_000293.1,3143-3161).
gtcggctaaaggaaattga

SEQ ID NO: 122196 - DNA, 19 bp, Homo sapiens
  siRNA target sequence for PPP3CA (NM_000944.2,412-430).
cgagcccaaggcaattgat

SEQ ID NO: 122197 - DNA, 19 bp, Homo sapiens
  siRNA target sequence for PPP3CA (NM_000944.2,487-505).
ccggcttacagcaaaagaa

SEQ ID NO: 122198 - DNA, 19 bp, Homo sapiens
  siRNA target sequence for PPP3CA (NM_000944.2,527-545).
cctcgtgtggatatcttaa

SEQ ID NO: 122199 - DNA, 19 bp, Homo sapiens
  siRNA target sequence for PPP3CA (NM_000944.2,588-606).
cattgagaataataacaga

SEQ ID NO: 122200 - DNA, 19 bp, Homo sapiens
  siRNA target sequence for PPP3CA (NM_000944.2,603-621).
cagagggtgcatcaattct

SEQ ID NO: 122201 - DNA, 19 bp, Homo sapiens
  siRNA target sequence for PPP3CA (NM_000944.2,650-668).
gatgcgccagtcactgttt

SEQ ID NO: 122202 - DNA, 19 bp, Homo sapiens
  siRNA target sequence for PPP3CA (NM_000944.2,736-754).
cactcgctacctcttctta

SEQ ID NO: 122203 - DNA, 19 bp, Homo sapiens
  siRNA target sequence for PPP3CA (NM_000944.2,764-782).
gttgacagagggtacttca

SEQ ID NO: 122204 - DNA, 19 bp, Homo sapiens
  siRNA target sequence for PPP3CA (NM_000944.2,771-789).
gagggtacttcagtattga

SEQ ID NO: 122205 - DNA, 19 bp, Homo sapiens
  siRNA target sequence for PPP3CA (NM_000944.2,872-890).
ctaacagagtatttcacat

SEQ ID NO: 122206 - DNA, 19 bp, Homo sapiens
  siRNA target sequence for PPP3CA (NM_000944.2,913-931).
gtattcagaacgcgtatat

SEQ ID NO: 122207 - DNA, 19 bp, Homo sapiens
  siRNA target sequence for PPP3CA (NM_000944.2,1044-1062).
gaaaattagaccgattcaa

SEQ ID NO: 122208 - DNA, 19 bp, Homo sapiens
  siRNA target sequence for PPP3CA (NM_000944.2,1080-1098).
gacctatgtgtgatatcct

SEQ ID NO: 122209 - DNA, 19 bp, Homo sapiens
  siRNA target sequence for PPP3CA (NM_000944.2,1135-1153).
gactcaggaacatttcact

SEQ ID NO: 122210 - DNA, 19 bp, Homo sapiens
  siRNA target sequence for PPP3CA (NM_000944.2,1167-1185).
gggggtgttcatacttcta

SEQ ID NO: 122211 - DNA, 19 bp, Homo sapiens
  siRNA target sequence for PPP3CA (NM_000944.2,1169-1187).
gggtgttcatacttctaca

SEQ ID NO: 122212 - DNA, 19 bp, Homo sapiens
  siRNA target sequence for PPP3CA (NM_000944.2,1195-1213).
ggctgtatgtgaattctta

SEQ ID NO: 122213 - DNA, 19 bp, Homo sapiens
  siRNA target sequence for PPP3CA (NM_000944.2,1217-1235).
cacaataacttgttatcta

SEQ ID NO: 122214 - DNA, 19 bp, Homo sapiens
  siRNA target sequence for PPP3CA (NM_000944.2,1262-1280).
gcagggtaccgcatgtaca

SEQ ID NO: 122215 - DNA, 19 bp, Homo sapiens
  siRNA target sequence for PPP3CA (NM_000944.2,1364-1382).
gcagtattgaagtatgaga

SEQ ID NO: 122216 - DNA, 19 bp, Homo sapiens
  siRNA target sequence for PPP3CA (NM_000944.2,1365-1383).
cagtattgaagtatgagaa

SEQ ID NO: 122217 - DNA, 19 bp, Homo sapiens
  siRNA target sequence for PPP3CA (NM_000944.2,1577-1595).
gcccggaaagaggtgataa

SEQ ID NO: 122218 - DNA, 19 bp, Homo sapiens
  siRNA target sequence for PPP3CA (NM_000944.2,1699-1717).
gctccccagcggagtactt

SEQ ID NO: 122219 - DNA, 19 bp, Homo sapiens
  siRNA target sequence for PPP3CA (NM_000944.2,1700-1718).
ctccccagcggagtacttt

SEQ ID NO: 122220 - DNA, 19 bp, Homo sapiens
  siRNA target sequence for PPP3CA (NM_000944.2,1702-1720).
ccccagcggagtactttct

SEQ ID NO: 122221 - DNA, 19 bp, Homo sapiens
  siRNA target sequence for PPP3CA (NM_000944.2,1735-1753).
cctgcaaagcgctactgtt

SEQ ID NO: 122222 - DNA, 19 bp, Homo sapiens
  siRNA target sequence for PPP3CA (NM_000944.2,1772-1790).
gaagctatcaaaggatttt

SEQ ID NO: 122223 - DNA, 19 bp, Homo sapiens
  siRNA target sequence for PPP3CA (NM_000944.2,1793-1811).
ccacaacataagatcacta

SEQ ID NO: 122224 - DNA, 19 bp, Homo sapiens
  siRNA target sequence for PPP3CA (NM_000944.2,1828-1846).
gggcttagaccgaattaat

SEQ ID NO: 122225 - DNA, 19 bp, Homo sapiens
  siRNA target sequence for PPP3CA (NM_000944.2,1830-1848).
gcttagaccgaattaatga

SEQ ID NO: 122226 - DNA, 19 bp, Homo sapiens
  siRNA target sequence for PPP3CA (NM_000944.2,1877-1895).
ccctctgacgccaacctta

SEQ ID NO: 122227 - DNA, 19 bp, Homo sapiens
  siRNA target sequence for PPP3CA (NM_000944.2,1878-1896).
cctctgacgccaaccttaa

SEQ ID NO: 122228 - DNA, 19 bp, Homo sapiens
  siRNA target sequence for PPP3CA (NM_000944.2,1911-1929).
ctctcacctcagagactaa

SEQ ID NO: 122229 - DNA, 19 bp, Homo sapiens
  siRNA target sequence for PPP3CA (NM_000944.2,1950-1968).
gtaatagcagcaatattca

SEQ ID NO: 122230 - DNA, 19 bp, Homo sapiens
  siRNA target sequence for PPP3CB (NM_021132.1,226-244).
gcttgacatctgaagaagt

SEQ ID NO: 122231 - DNA, 19 bp, Homo sapiens
  siRNA target sequence for PPP3CB (NM_021132.1,227-245).
cttgacatctgaagaagta

SEQ ID NO: 122232 - DNA, 19 bp, Homo sapiens
  siRNA target sequence for PPP3CB (NM_021132.1,265-283).
ccagggttgatgttctgaa

SEQ ID NO: 122233 - DNA, 19 bp, Homo sapiens
  siRNA target sequence for PPP3CB (NM_021132.1,296-314).
gaaagaaggtcgagtagat

SEQ ID NO: 122234 - DNA, 19 bp, Homo sapiens
  siRNA target sequence for PPP3CB (NM_021132.1,304-322).
gtcgagtagatgaagaaat

SEQ ID NO: 122235 - DNA, 19 bp, Homo sapiens
  siRNA target sequence for PPP3CB (NM_021132.1,325-343).
cgcttagaattatcaatga

SEQ ID NO: 122236 - DNA, 19 bp, Homo sapiens
  siRNA target sequence for PPP3CB (NM_021132.1,456-474).
ggaggatcacctgctaata

SEQ ID NO: 122237 - DNA, 19 bp, Homo sapiens
  siRNA target sequence for PPP3CB (NM_021132.1,468-486).
gctaatacacgataccttt

SEQ ID NO: 122238 - DNA, 19 bp, Homo sapiens
  siRNA target sequence for PPP3CB (NM_021132.1,469-487).
ctaatacacgatacctttt

SEQ ID NO: 122239 - DNA, 19 bp, Homo sapiens
  siRNA target sequence for PPP3CB (NM_021132.1,482-500).
cctttttcttggcgattat

SEQ ID NO: 122240 - DNA, 19 bp, Homo sapiens
  siRNA target sequence for PPP3CB (NM_021132.1,520-538).
gtatagagtgtgtcttata

SEQ ID NO: 122241 - DNA, 19 bp, Homo sapiens
  siRNA target sequence for PPP3CB (NM_021132.1,558-576).
ctatacccaagcacattat

SEQ ID NO: 122242 - DNA, 19 bp, Homo sapiens
  siRNA target sequence for PPP3CB (NM_021132.1,601-619).
gcagacaccttactgaata

SEQ ID NO: 122243 - DNA, 19 bp, Homo sapiens
  siRNA target sequence for PPP3CB (NM_021132.1,602-620).
cagacaccttactgaatat

SEQ ID NO: 122244 - DNA, 19 bp, Homo sapiens
  siRNA target sequence for PPP3CB (NM_021132.1,673-691).
cttgtatggaagcttttga

SEQ ID NO: 122245 - DNA, 19 bp, Homo sapiens
  siRNA target sequence for PPP3CB (NM_021132.1,698-716).
gcctcttgctgcactttta

SEQ ID NO: 122246 - DNA, 19 bp, Homo sapiens
  siRNA target sequence for PPP3CB (NM_021132.1,745-763).
gactttcaccagaaataca

SEQ ID NO: 122247 - DNA, 19 bp, Homo sapiens
  siRNA target sequence for PPP3CB (NM_021132.1,841-859).
ccgatccttctgaagattt

SEQ ID NO: 122248 - DNA, 19 bp, Homo sapiens
  siRNA target sequence for PPP3CB (NM_021132.1,842-860).
cgatccttctgaagatttt

SEQ ID NO: 122249 - DNA, 19 bp, Homo sapiens
  siRNA target sequence for PPP3CB (NM_021132.1,879-897).
gaacattttagtcacaata

SEQ ID NO: 122250 - DNA, 19 bp, Homo sapiens
  siRNA target sequence for PPP3CB (NM_021132.1,898-916).
cagttcgaggatgttctta

SEQ ID NO: 122251 - DNA, 19 bp, Homo sapiens
  siRNA target sequence for PPP3CB (NM_021132.1,993-1011).
caagatgcaggctatagaa

SEQ ID NO: 122252 - DNA, 19 bp, Homo sapiens
  siRNA target sequence for PPP3CB (NM_021132.1,996-1014).
gatgcaggctatagaatgt

SEQ ID NO: 122253 - DNA, 19 bp, Homo sapiens
  siRNA target sequence for PPP3CB (NM_021132.1,999-1017).
gcaggctatagaatgtaca

SEQ ID NO: 122254 - DNA, 19 bp, Homo sapiens
  siRNA target sequence for PPP3CB (NM_021132.1,1030-1048).
ctacagggttcccttcatt

SEQ ID NO: 122255 - DNA, 19 bp, Homo sapiens
  siRNA target sequence for PPP3CB (NM_021132.1,1035-1053).
gggttcccttcattaataa

SEQ ID NO: 122256 - DNA, 19 bp, Homo sapiens
  siRNA target sequence for PPP3CB (NM_021132.1,1161-1179).
ccttactggttgcctaatt

SEQ ID NO: 122257 - DNA, 19 bp, Homo sapiens
  siRNA target sequence for PPP3CB (NM_021132.1,1162-1180).
cttactggttgcctaattt

SEQ ID NO: 122258 - DNA, 19 bp, Homo sapiens
  siRNA target sequence for PPP3CB (NM_021132.1,1168-1186).
ggttgcctaattttatgga

SEQ ID NO: 122259 - DNA, 19 bp, Homo sapiens
  siRNA target sequence for PPP3CB (NM_021132.1,1196-1214).
gtggtctttaccgtttgtt

SEQ ID NO: 122260 - DNA, 19 bp, Homo sapiens
  siRNA target sequence for PPP3CB (NM_021132.1,1252-1270).
gtatttgctctgatgatga

SEQ ID NO: 122261 - DNA, 19 bp, Homo sapiens
  siRNA target sequence for PPP3CB (NM_021132.1,1311-1329).
gcagcccggaaagaaatca

SEQ ID NO: 122262 - DNA, 19 bp, Homo sapiens
  siRNA target sequence for PPP3CB (NM_021132.1,1314-1332).
gcccggaaagaaatcataa

SEQ ID NO: 122263 - DNA, 19 bp, Homo sapiens
  siRNA target sequence for PPP3CB (NM_021132.1,1316-1334).
ccggaaagaaatcataaga

SEQ ID NO: 122264 - DNA, 19 bp, Homo sapiens
  siRNA target sequence for PPP3CB (NM_021132.1,1436-1454).
gttgcctagtggagtgtta

SEQ ID NO: 122265 - DNA, 19 bp, Homo sapiens
  siRNA target sequence for PPP3CB (NM_021132.1,1502-1520).
ggctgaaaaagcaatacga

SEQ ID NO: 122266 - DNA, 19 bp, Homo sapiens
  siRNA target sequence for PPP3CB (NM_021132.1,1557-1575).
gaggcaaagggtttggata

SEQ ID NO: 122267 - DNA, 19 bp, Homo sapiens
  siRNA target sequence for PPP3CB (NM_021132.1,1561-1579).
caaagggtttggataggat

SEQ ID NO: 122268 - DNA, 19 bp, Homo sapiens
  siRNA target sequence for PPP3CB (NM_021132.1,1565-1583).
gggtttggataggatcaat

SEQ ID NO: 122269 - DNA, 19 bp, Homo sapiens
  siRNA target sequence for PPP3CB (NM_021132.1,1614-1632).
cagcaagatggtttcaatt

SEQ ID NO: 122270 - DNA, 19 bp, Homo sapiens
  siRNA target sequence for PPP3CB (NM_021132.1,1662-1680).
cacgggacgggcaaccata

SEQ ID NO: 122271 - DNA, 19 bp, Homo sapiens
  siRNA target sequence for PPP3CC (NM_005605.3,356-374).
ccaccgaccgcgtcatcaa

SEQ ID NO: 122272 - DNA, 19 bp, Homo sapiens
  siRNA target sequence for PPP3CC (NM_005605.3,357-375).
caccgaccgcgtcatcaaa

SEQ ID NO: 122273 - DNA, 19 bp, Homo sapiens
  siRNA target sequence for PPP3CC (NM_005605.3,395-413).
cccaacggcttactttcaa

SEQ ID NO: 122274 - DNA, 19 bp, Homo sapiens
  siRNA target sequence for PPP3CC (NM_005605.3,487-505).
gaggaagtagccttaaaga

SEQ ID NO: 122275 - DNA, 19 bp, Homo sapiens
  siRNA target sequence for PPP3CC (NM_005605.3,490-508).
gaagtagccttaaagataa

SEQ ID NO: 122276 - DNA, 19 bp, Homo sapiens
  siRNA target sequence for PPP3CC (NM_005605.3,543-561).
gactatgatagaagtagat

SEQ ID NO: 122277 - DNA, 19 bp, Homo sapiens
  siRNA target sequence for PPP3CC (NM_005605.3,593-611).
gacaattctttgacctaat

SEQ ID NO: 122278 - DNA, 19 bp, Homo sapiens
  siRNA target sequence for PPP3CC (NM_005605.3,595-613).
caattctttgacctaatga

SEQ ID NO: 122279 - DNA, 19 bp, Homo sapiens
  siRNA target sequence for PPP3CC (NM_005605.3,606-624).
cctaatgaagttatttgaa

SEQ ID NO: 122280 - DNA, 19 bp, Homo sapiens
  siRNA target sequence for PPP3CC (NM_005605.3,628-646).
ggaggatcacctagtaaca

SEQ ID NO: 122281 - DNA, 19 bp, Homo sapiens
  siRNA target sequence for PPP3CC (NM_005605.3,705-723).
gctgtatttatggagttta

SEQ ID NO: 122282 - DNA, 19 bp, Homo sapiens
  siRNA target sequence for PPP3CC (NM_005605.3,717-735).
gagtttaaagattaatcat

SEQ ID NO: 122283 - DNA, 19 bp, Homo sapiens
  siRNA target sequence for PPP3CC (NM_005605.3,808-826).
gaatgtcgaatcaaatatt

SEQ ID NO: 122284 - DNA, 19 bp, Homo sapiens
  siRNA target sequence for PPP3CC (NM_005605.3,916-934).
ggaatgtcacctgaaatta

SEQ ID NO: 122285 - DNA, 19 bp, Homo sapiens
  siRNA target sequence for PPP3CC (NM_005605.3,946-964).
gacattaggaaattagaca

SEQ ID NO: 122286 - DNA, 19 bp, Homo sapiens
  siRNA target sequence for PPP3CC (NM_005605.3,1072-1090).
gtccgagggtgctcttatt

SEQ ID NO: 122287 - DNA, 19 bp, Homo sapiens
  siRNA target sequence for PPP3CC (NM_005605.3,1075-1093).
cgagggtgctcttatttct

SEQ ID NO: 122288 - DNA, 19 bp, Homo sapiens
  siRNA target sequence for PPP3CC (NM_005605.3,1078-1096).
gggtgctcttatttctaca

SEQ ID NO: 122289 - DNA, 19 bp, Homo sapiens
  siRNA target sequence for PPP3CC (NM_005605.3,1097-1115).
gttaccctgcagtttgtga

SEQ ID NO: 122290 - DNA, 19 bp, Homo sapiens
  siRNA target sequence for PPP3CC (NM_005605.3,1122-1140).
gcagaacaataatttacta

SEQ ID NO: 122291 - DNA, 19 bp, Homo sapiens
  siRNA target sequence for PPP3CC (NM_005605.3,1165-1183).
caagatgctgggtatcgaa

SEQ ID NO: 122292 - DNA, 19 bp, Homo sapiens
  siRNA target sequence for PPP3CC (NM_005605.3,1171-1189).
gctgggtatcgaatgtaca

SEQ ID NO: 122293 - DNA, 19 bp, Homo sapiens
  siRNA target sequence for PPP3CC (NM_005605.3,1205-1223).
caggctttccatcacttat

SEQ ID NO: 122294 - DNA, 19 bp, Homo sapiens
  siRNA target sequence for PPP3CC (NM_005605.3,1207-1225).
ggctttccatcacttatta

SEQ ID NO: 122295 - DNA, 19 bp, Homo sapiens
  siRNA target sequence for PPP3CC (NM_005605.3,1214-1232).
catcacttattacaatttt

SEQ ID NO: 122296 - DNA, 19 bp, Homo sapiens
  siRNA target sequence for PPP3CC (NM_005605.3,1469-1487).
gaagcactacagttcgtaa

SEQ ID NO: 122297 - DNA, 19 bp, Homo sapiens
  siRNA target sequence for PPP3CC (NM_005605.3,1478-1496).
cagttcgtaaggagatcat

SEQ ID NO: 122298 - DNA, 19 bp, Homo sapiens
  siRNA target sequence for PPP3CC (NM_005605.3,1480-1498).
gttcgtaaggagatcatca

SEQ ID NO: 122299 - DNA, 19 bp, Homo sapiens
  siRNA target sequence for PPP3CC (NM_005605.3,1527-1545).
ggcacgggtcttttcaatt

SEQ ID NO: 122300 - DNA, 19 bp, Homo sapiens
  siRNA target sequence for PPP3CC (NM_005605.3,1529-1547).
cacgggtcttttcaattct

SEQ ID NO: 122301 - DNA, 19 bp, Homo sapiens
  siRNA target sequence for PPP3CC (NM_005605.3,1622-1640).
caggaggcaagcagactat

SEQ ID NO: 122302 - DNA, 19 bp, Homo sapiens
  siRNA target sequence for PPP3CC (NM_005605.3,1701-1719).
gcacaagatccggagtttt

SEQ ID NO: 122303 - DNA, 19 bp, Homo sapiens
  siRNA target sequence for PPP3CC (NM_005605.3,1729-1747).
cgaggtctggaccgaatta

SEQ ID NO: 122304 - DNA, 19 bp, Homo sapiens
  siRNA target sequence for PPP3CC (NM_005605.3,1730-1748).
gaggtctggaccgaattaa

SEQ ID NO: 122305 - DNA, 19 bp, Homo sapiens
  siRNA target sequence for PPP3CC (NM_005605.3,1733-1751).
gtctggaccgaattaatga

SEQ ID NO: 122306 - DNA, 19 bp, Homo sapiens
  siRNA target sequence for PPP3CC (NM_005605.3,1760-1778).
caccccgaaaggatagcat

SEQ ID NO: 122307 - DNA, 19 bp, Homo sapiens
  siRNA target sequence for PPP3CC (NM_005605.3,1782-1800).
cgctggtgggccaatgaaa

SEQ ID NO: 122308 - DNA, 19 bp, Homo sapiens
  siRNA target sequence for PPP3CC (NM_005605.3,1783-1801).
gctggtgggccaatgaaat

SEQ ID NO: 122309 - DNA, 19 bp, Homo sapiens
  siRNA target sequence for RGS1 (NM_002922.2,57-75).
ctgctaacccaaaggaatt

SEQ ID NO: 122310 - DNA, 19 bp, Homo sapiens
  siRNA target sequence for RGS1 (NM_002922.2,59-77).
gctaacccaaaggaattga

SEQ ID NO: 122311 - DNA, 19 bp, Homo sapiens
  siRNA target sequence for RGS1 (NM_002922.2,84-102).
ccactcattcacttctaga

SEQ ID NO: 122312 - DNA, 19 bp, Homo sapiens
  siRNA target sequence for RGS1 (NM_002922.2,93-111).
cacttctagacgacaaaat

SEQ ID NO: 122313 - DNA, 19 bp, Homo sapiens
  siRNA target sequence for RGS1 (NM_002922.2,121-139).
gaggccaaagacttttgga

SEQ ID NO: 122314 - DNA, 19 bp, Homo sapiens
  siRNA target sequence for RGS1 (NM_002922.2,123-141).
ggccaaagacttttggaat

SEQ ID NO: 122315 - DNA, 19 bp, Homo sapiens
  siRNA target sequence for RGS1 (NM_002922.2,205-223).
gtccaaggatgtactttct

SEQ ID NO: 122316 - DNA, 19 bp, Homo sapiens
  siRNA target sequence for RGS1 (NM_002922.2,233-251).
gtaatgcaatggtctcaat

SEQ ID NO: 122317 - DNA, 19 bp, Homo sapiens
  siRNA target sequence for RGS1 (NM_002922.2,243-261).
ggtctcaatctctggaaaa

SEQ ID NO: 122318 - DNA, 19 bp, Homo sapiens
  siRNA target sequence for RGS1 (NM_002922.2,244-262).
gtctcaatctctggaaaaa

SEQ ID NO: 122319 - DNA, 19 bp, Homo sapiens
  siRNA target sequence for RGS1 (NM_002922.2,343-361).
gctggcttgtgaagactat

SEQ ID NO: 122320 - DNA, 19 bp, Homo sapiens
  siRNA target sequence for RGS1 (NM_002922.2,421-439).
gcattcagatgctgctaaa

SEQ ID NO: 122321 - DNA, 19 bp, Homo sapiens
  siRNA target sequence for RGS1 (NM_002922.2,454-472).
cttccgcactcgagaatct

SEQ ID NO: 122322 - DNA, 19 bp, Homo sapiens
  siRNA target sequence for RGS1 (NM_002922.2,498-516).
cccccacgtgttttgatga

SEQ ID NO: 122323 - DNA, 19 bp, Homo sapiens
  siRNA target sequence for RGS1 (NM_002922.2,499-517).
ccccacgtgttttgatgaa

SEQ ID NO: 122324 - DNA, 19 bp, Homo sapiens
  siRNA target sequence for RGS1 (NM_002922.2,529-547).
catatatactcttatggaa

SEQ ID NO: 122325 - DNA, 19 bp, Homo sapiens
  siRNA target sequence for RGS1 (NM_002922.2,565-583).
gttcctcaaatcagatatt

SEQ ID NO: 122326 - DNA, 19 bp, Homo sapiens
  siRNA target sequence for RGS1 (NM_002922.2,608-626).
caggctaatagcctaaagt

SEQ ID NO: 122327 - DNA, 19 bp, Homo sapiens
  siRNA target sequence for RGS16 (NM_002928.2,218-236).
ggggatctttcttcacaaa

SEQ ID NO: 122328 - DNA, 19 bp, Homo sapiens
  siRNA target sequence for RGS16 (NM_002928.2,272-290).
gttcgagtggggcagtaaa

SEQ ID NO: 122329 - DNA, 19 bp, Homo sapiens
  siRNA target sequence for RGS16 (NM_002928.2,485-503).
cagggcacaccagatcttt

SEQ ID NO: 122330 - DNA, 19 bp, Homo sapiens
  siRNA target sequence for RGS16 (NM_002928.2,487-505).
gggcacaccagatctttga

SEQ ID NO: 122331 - DNA, 19 bp, Homo sapiens
  siRNA target sequence for RGS16 (NM_002928.2,517-535).
gcagtgaggcccctaaaga

SEQ ID NO: 122332 - DNA, 19 bp, Homo sapiens
  siRNA target sequence for RGS16 (NM_002928.2,590-608).
cacagccacatgctttgat

SEQ ID NO: 122333 - DNA, 19 bp, Homo sapiens
  siRNA target sequence for RGS2 (NM_002923.1,128-146).
gatgaaacggaccctttta

SEQ ID NO: 122334 - DNA, 19 bp, Homo sapiens
  siRNA target sequence for RGS2 (NM_002923.1,160-178).
cccgtttgagctacttctt

SEQ ID NO: 122335 - DNA, 19 bp, Homo sapiens
  siRNA target sequence for RGS2 (NM_002923.1,161-179).
ccgtttgagctacttctta

SEQ ID NO: 122336 - DNA, 19 bp, Homo sapiens
  siRNA target sequence for RGS2 (NM_002923.1,293-311).
gctagccagcaaatatggt

SEQ ID NO: 122337 - DNA, 19 bp, Homo sapiens
  siRNA target sequence for RGS2 (NM_002923.1,318-336).
gcattcagggcttttttaa

SEQ ID NO: 122338 - DNA, 19 bp, Homo sapiens
  siRNA target sequence for RGS2 (NM_002923.1,319-337).
cattcagggcttttttaaa

SEQ ID NO: 122339 - DNA, 19 bp, Homo sapiens
  siRNA target sequence for RGS2 (NM_002923.1,458-476).
ggaagctccaaaagagata

SEQ ID NO: 122340 - DNA, 19 bp, Homo sapiens
  siRNA target sequence for RGS2 (NM_002923.1,462-480).
gctccaaaagagataaaca

SEQ ID NO: 122341 - DNA, 19 bp, Homo sapiens
  siRNA target sequence for RGS2 (NM_002923.1,549-567).
gcccagaaaagggtataca

SEQ ID NO: 122342 - DNA, 19 bp, Homo sapiens
  siRNA target sequence for RGS4 (NM_005613.3,159-177).
gcttgaggagtgcaaaaga

SEQ ID NO: 122343 - DNA, 19 bp, Homo sapiens
  siRNA target sequence for RGS4 (NM_005613.3,165-183).
ggagtgcaaaagatatgaa

SEQ ID NO: 122344 - DNA, 19 bp, Homo sapiens
  siRNA target sequence for RGS4 (NM_005613.3,166-184).
gagtgcaaaagatatgaaa

SEQ ID NO: 122345 - DNA, 19 bp, Homo sapiens
  siRNA target sequence for RGS4 (NM_005613.3,213-231).
ctgattcctgtgaacacaa

SEQ ID NO: 122346 - DNA, 19 bp, Homo sapiens
  siRNA target sequence for RGS4 (NM_005613.3,292-310).
caagaaatgggctgaatca

SEQ ID NO: 122347 - DNA, 19 bp, Homo sapiens
  siRNA target sequence for RGS4 (NM_005613.3,347-365).
gctttcaaagctttcttga

SEQ ID NO: 122348 - DNA, 19 bp, Homo sapiens
  siRNA target sequence for RGS4 (NM_005613.3,427-445).
caaatcaccatctaaacta

SEQ ID NO: 122349 - DNA, 19 bp, Homo sapiens
  siRNA target sequence for RGS4 (NM_005613.3,481-499).
ctcagtccaggcaaccaaa

SEQ ID NO: 122350 - DNA, 19 bp, Homo sapiens
  siRNA target sequence for RGS4 (NM_005613.3,544-562).
catgctagagcctacaata

SEQ ID NO: 122351 - DNA, 19 bp, Homo sapiens
  siRNA target sequence for RGS4 (NM_005613.3,548-566).
ctagagcctacaataacct

SEQ ID NO: 122352 - DNA, 19 bp, Homo sapiens
  siRNA target sequence for RGS4 (NM_005613.3,631-649).
caagtctcgattctatctt

SEQ ID NO: 122353 - DNA, 19 bp, Homo sapiens
  siRNA target sequence for RYR2 (NM_001035.1,154-172).
ccagttcctgcgaactgat

SEQ ID NO: 122354 - DNA, 19 bp, Homo sapiens
  siRNA target sequence for RYR2 (NM_001035.1,157-175).
gttcctgcgaactgatgat

SEQ ID NO: 122355 - DNA, 19 bp, Homo sapiens
  siRNA target sequence for RYR2 (NM_001035.1,160-178).
cctgcgaactgatgatgaa

SEQ ID NO: 122356 - DNA, 19 bp, Homo sapiens
  siRNA target sequence for RYR2 (NM_001035.1,265-283).
cttggagtccacttccaat

SEQ ID NO: 122357 - DNA, 19 bp, Homo sapiens
  siRNA target sequence for RYR2 (NM_001035.1,368-386).
gctaacaccgtggagaaat

SEQ ID NO: 122358 - DNA, 19 bp, Homo sapiens
  siRNA target sequence for RYR2 (NM_001035.1,387-405).
cagaagggcaagttgatgt

SEQ ID NO: 122359 - DNA, 19 bp, Homo sapiens
  siRNA target sequence for RYR2 (NM_001035.1,395-413).
caagttgatgtggaaaaat

SEQ ID NO: 122360 - DNA, 19 bp, Homo sapiens
  siRNA target sequence for RYR2 (NM_001035.1,481-499).
gctgcgccattcctatagt

SEQ ID NO: 122361 - DNA, 19 bp, Homo sapiens
  siRNA target sequence for RYR2 (NM_001035.1,492-510).
cctatagtggcatgtatct

SEQ ID NO: 122362 - DNA, 19 bp, Homo sapiens
  siRNA target sequence for RYR2 (NM_001035.1,526-544).
ctcccggtcttcaactgat

SEQ ID NO: 122363 - DNA, 19 bp, Homo sapiens
  siRNA target sequence for RYR2 (NM_001035.1,528-546).
cccggtcttcaactgataa

SEQ ID NO: 122364 - DNA, 19 bp, Homo sapiens
  siRNA target sequence for RYR2 (NM_001035.1,531-549).
ggtcttcaactgataagct

SEQ ID NO: 122365 - DNA, 19 bp, Homo sapiens
  siRNA target sequence for RYR2 (NM_001035.1,540-558).
ctgataagctggcttttga

SEQ ID NO: 122366 - DNA, 19 bp, Homo sapiens
  siRNA target sequence for RYR2 (NM_001035.1,656-674).
gatgacctcatcttagtta

SEQ ID NO: 122367 - DNA, 19 bp, Homo sapiens
  siRNA target sequence for RYR2 (NM_001035.1,691-709).
gtacttgcacttgtcttat

SEQ ID NO: 122368 - DNA, 19 bp, Homo sapiens
  siRNA target sequence for RYR2 (NM_001035.1,788-806).
gcagcccaagggtatctca

SEQ ID NO: 122369 - DNA, 19 bp, Homo sapiens
  siRNA target sequence for RYR2 (NM_001035.1,886-904).
gcagcggagaactgttcat

SEQ ID NO: 122370 - DNA, 19 bp, Homo sapiens
  siRNA target sequence for RYR2 (NM_001035.1,889-907).
gcggagaactgttcattat

SEQ ID NO: 122371 - DNA, 19 bp, Homo sapiens
  siRNA target sequence for RYR2 (NM_001035.1,891-909).
ggagaactgttcattatga

SEQ ID NO: 122372 - DNA, 19 bp, Homo sapiens
  siRNA target sequence for RYR2 (NM_001035.1,948-966).
gactagagacgctaagagt

SEQ ID NO: 122373 - DNA, 19 bp, Homo sapiens
  siRNA target sequence for RYR2 (NM_001035.1,1189-1207).
cggtgactcagtatgctat

SEQ ID NO: 122374 - DNA, 19 bp, Homo sapiens
  siRNA target sequence for RYR2 (NM_001035.1,1190-1208).
ggtgactcagtatgctata

SEQ ID NO: 122375 - DNA, 19 bp, Homo sapiens
  siRNA target sequence for RYR2 (NM_001035.1,1191-1209).
gtgactcagtatgctatat

SEQ ID NO: 122376 - DNA, 19 bp, Homo sapiens
  siRNA target sequence for RYR2 (NM_001035.1,1195-1213).
ctcagtatgctatatacaa

SEQ ID NO: 122377 - DNA, 19 bp, Homo sapiens
  siRNA target sequence for RYR2 (NM_001035.1,1203-1221).
gctatatacaacatgtaga

SEQ ID NO: 122378 - DNA, 19 bp, Homo sapiens
  siRNA target sequence for RYR2 (NM_001035.1,1388-1406).
gtcttccttttcaatagat

SEQ ID NO: 122379 - DNA, 19 bp, Homo sapiens
  siRNA target sequence for RYR2 (NM_001035.1,1454-1472).
gtcgatttgcctatagagt

SEQ ID NO: 122380 - DNA, 19 bp, Homo sapiens
  siRNA target sequence for RYR2 (NM_001035.1,1513-1531).
ccccccagatgagcattta

SEQ ID NO: 122381 - DNA, 19 bp, Homo sapiens
  siRNA target sequence for RYR2 (NM_001035.1,1515-1533).
ccccagatgagcatttaga

SEQ ID NO: 122382 - DNA, 19 bp, Homo sapiens
  siRNA target sequence for RYR2 (NM_001035.1,1726-1744).
gttgctggcggctctaatt

SEQ ID NO: 122383 - DNA, 19 bp, Homo sapiens
  siRNA target sequence for RYR2 (NM_001035.1,1729-1747).
gctggcggctctaattaga

SEQ ID NO: 122384 - DNA, 19 bp, Homo sapiens
  siRNA target sequence for RYR2 (NM_001035.1,1735-1753).
ggctctaattagaggaaat

SEQ ID NO: 122385 - DNA, 19 bp, Homo sapiens
  siRNA target sequence for RYR2 (NM_001035.1,1866-1884).
gtccagaagctctaaatat

SEQ ID NO: 122386 - DNA, 19 bp, Homo sapiens
  siRNA target sequence for RYR2 (NM_001035.1,1892-1910).
gaaggacatattaaatcta

SEQ ID NO: 122387 - DNA, 19 bp, Homo sapiens
  siRNA target sequence for RYR2 (NM_001035.1,1998-2016).
gttctaaccagcatctcat

SEQ ID NO: 122388 - DNA, 19 bp, Homo sapiens
  siRNA target sequence for RYR2 (NM_001035.1,2033-2051).
ccaggaagagacttgttat

SEQ ID NO: 122389 - DNA, 19 bp, Homo sapiens
  siRNA target sequence for RYR2 (NM_001035.1,2037-2055).
gaagagacttgttattgca

SEQ ID NO: 122390 - DNA, 19 bp, Homo sapiens
  siRNA target sequence for RYR2 (NM_001035.1,2082-2100).
gcatgagacccaatatttt

SEQ ID NO: 122391 - DNA, 19 bp, Homo sapiens
  siRNA target sequence for RYR2 (NM_001035.1,2117-2135).
ggttctgctcagtataaga

SEQ ID NO: 122392 - DNA, 19 bp, Homo sapiens
  siRNA target sequence for RYR2 (NM_001035.1,2118-2136).
gttctgctcagtataagaa

SEQ ID NO: 122393 - DNA, 19 bp, Homo sapiens
  siRNA target sequence for RYR2 (NM_001035.1,2251-2269).
cgaagagtggggtggaaat

SEQ ID NO: 122394 - DNA, 19 bp, Homo sapiens
  siRNA target sequence for RYR2 (NM_001035.1,2282-2300).
gatctcttctcctatggat

SEQ ID NO: 122395 - DNA, 19 bp, Homo sapiens
  siRNA target sequence for RYR2 (NM_001035.1,2298-2316).
gatttgatggccttcatct

SEQ ID NO: 122396 - DNA, 19 bp, Homo sapiens
  siRNA target sequence for RYR2 (NM_001035.1,2415-2433).
gcatctcgttccgaattaa

SEQ ID NO: 122397 - DNA, 19 bp, Homo sapiens
  siRNA target sequence for RYR2 (NM_001035.1,2416-2434).
catctcgttccgaattaat

SEQ ID NO: 122398 - DNA, 19 bp, Homo sapiens
  siRNA target sequence for RYR2 (NM_001035.1,2419-2437).
ctcgttccgaattaatgga

SEQ ID NO: 122399 - DNA, 19 bp, Homo sapiens
  siRNA target sequence for RYR2 (NM_001035.1,2436-2454).
gacaacctgttcaaggaat

SEQ ID NO: 122400 - DNA, 19 bp, Homo sapiens
  siRNA target sequence for RYR2 (NM_001035.1,2535-2553).
gagggcgacatggagaatt

SEQ ID NO: 122401 - DNA, 19 bp, Homo sapiens
  siRNA target sequence for RYR2 (NM_001035.1,2537-2555).
gggcgacatggagaattca

SEQ ID NO: 122402 - DNA, 19 bp, Homo sapiens
  siRNA target sequence for RYR2 (NM_001035.1,2571-2589).
ctgggtatgctccttgtta

SEQ ID NO: 122403 - DNA, 19 bp, Homo sapiens
  siRNA target sequence for RYR2 (NM_001035.1,2574-2592).
ggtatgctccttgttatga

SEQ ID NO: 122404 - DNA, 19 bp, Homo sapiens
  siRNA target sequence for RYR2 (NM_001035.1,2740-2758).
gttgcctcctcatctagaa

SEQ ID NO: 122405 - DNA, 19 bp, Homo sapiens
  siRNA target sequence for RYR2 (NM_001035.1,2744-2762).
cctcctcatctagaaagaa

SEQ ID NO: 122406 - DNA, 19 bp, Homo sapiens
  siRNA target sequence for RYR2 (NM_001035.1,2778-2796).
cagagaatatccatgaact

SEQ ID NO: 122407 - DNA, 19 bp, Homo sapiens
  siRNA target sequence for RYR2 (NM_001035.1,2835-2853).
gtccggttagagatgacaa

SEQ ID NO: 122408 - DNA, 19 bp, Homo sapiens
  siRNA target sequence for RYR2 (NM_001035.1,2900-2918).
caggagcgcaattacaact

SEQ ID NO: 122409 - DNA, 19 bp, Homo sapiens
  siRNA target sequence for RYR2 (NM_001035.1,2902-2920).
ggagcgcaattacaactta

SEQ ID NO: 122410 - DNA, 19 bp, Homo sapiens
  siRNA target sequence for RYR2 (NM_001035.1,2964-2982).
gtcatgtgggtatatcaga

SEQ ID NO: 122411 - DNA, 19 bp, Homo sapiens
  siRNA target sequence for RYR2 (NM_001035.1,2971-2989).
gggtatatcagatgaacat

SEQ ID NO: 122412 - DNA, 19 bp, Homo sapiens
  siRNA target sequence for RYR2 (NM_001035.1,3059-3077).
cctatggacctgagcttta

SEQ ID NO: 122413 - DNA, 19 bp, Homo sapiens
  siRNA target sequence for RYR2 (NM_001035.1,3068-3086).
ctgagctttatcaaactca

SEQ ID NO: 122414 - DNA, 19 bp, Homo sapiens
  siRNA target sequence for RYR2 (NM_001035.1,3157-3175).
ccggcagggctggacttat

SEQ ID NO: 122415 - DNA, 19 bp, Homo sapiens
  siRNA target sequence for RYR2 (NM_001035.1,3182-3200).
caacaggacgtaaagaaca

SEQ ID NO: 122416 - DNA, 19 bp, Homo sapiens
  siRNA target sequence for RYR2 (NM_001035.1,3235-3253).
ggatgaccgaaccaagaaa

SEQ ID NO: 122417 - DNA, 19 bp, Homo sapiens
  siRNA target sequence for RYR2 (NM_001035.1,3236-3254).
gatgaccgaaccaagaaat

SEQ ID NO: 122418 - DNA, 19 bp, Homo sapiens
  siRNA target sequence for RYR2 (NM_001035.1,3239-3257).
gaccgaaccaagaaatcca

SEQ ID NO: 122419 - DNA, 19 bp, Homo sapiens
  siRNA target sequence for RYR2 (NM_001035.1,3412-3430).
ggccggacggtggtatttt

SEQ ID NO: 122420 - DNA, 19 bp, Homo sapiens
  siRNA target sequence for RYR2 (NM_001035.1,3414-3432).
ccggacggtggtattttga

SEQ ID NO: 122421 - DNA, 19 bp, Homo sapiens
  siRNA target sequence for RYR2 (NM_001035.1,3415-3433).
cggacggtggtattttgaa

SEQ ID NO: 122422 - DNA, 19 bp, Homo sapiens
  siRNA target sequence for RYR2 (NM_001035.1,3416-3434).
ggacggtggtattttgaat

SEQ ID NO: 122423 - DNA, 19 bp, Homo sapiens
  siRNA target sequence for RYR2 (NM_001035.1,3417-3435).
gacggtggtattttgaatt

SEQ ID NO: 122424 - DNA, 19 bp, Homo sapiens
  siRNA target sequence for RYR2 (NM_001035.1,3472-3490).
gagtcgtcctggttgtcaa

SEQ ID NO: 122425 - DNA, 19 bp, Homo sapiens
  siRNA target sequence for RYR2 (NM_001035.1,3609-3627).
ggtgtatggttgacatgaa

SEQ ID NO: 122426 - DNA, 19 bp, Homo sapiens
  siRNA target sequence for RYR2 (NM_001035.1,3659-3677).
gaaatccttcttgatgatt

SEQ ID NO: 122427 - DNA, 19 bp, Homo sapiens
  siRNA target sequence for RYR2 (NM_001035.1,3752-3770).
caagtgggtaggatgaact

SEQ ID NO: 122428 - DNA, 19 bp, Homo sapiens
  siRNA target sequence for RYR2 (NM_001035.1,3804-3822).
ccatctgtggcttacaaga

SEQ ID NO: 122429 - DNA, 19 bp, Homo sapiens
  siRNA target sequence for RYR2 (NM_001035.1,3830-3848).
gaaccatttgccgttaata

SEQ ID NO: 122430 - DNA, 19 bp, Homo sapiens
  siRNA target sequence for RYR2 (NM_001035.1,3833-3851).
ccatttgccgttaatacaa

SEQ ID NO: 122431 - DNA, 19 bp, Homo sapiens
  siRNA target sequence for RYR2 (NM_001035.1,3909-3927).
caaaccatgaacatataga

SEQ ID NO: 122432 - DNA, 19 bp, Homo sapiens
  siRNA target sequence for RYR2 (NM_001035.1,3953-3971).
gacagttccccatgtttaa

SEQ ID NO: 122433 - DNA, 19 bp, Homo sapiens
  siRNA target sequence for RYR2 (NM_001035.1,3957-3975).
gttccccatgtttaaaggt

SEQ ID NO: 122434 - DNA, 19 bp, Homo sapiens
  siRNA target sequence for RYR2 (NM_001035.1,3973-3991).
ggtcactcagaagtctttt

SEQ ID NO: 122435 - DNA, 19 bp, Homo sapiens
  siRNA target sequence for RYR2 (NM_001035.1,4005-4023).
gcaacactgatatcatgtt

SEQ ID NO: 122436 - DNA, 19 bp, Homo sapiens
  siRNA target sequence for RYR2 (NM_001035.1,4006-4024).
caacactgatatcatgttt

SEQ ID NO: 122437 - DNA, 19 bp, Homo sapiens
  siRNA target sequence for RYR2 (NM_001035.1,4009-4027).
cactgatatcatgttttat

SEQ ID NO: 122438 - DNA, 19 bp, Homo sapiens
  siRNA target sequence for RYR2 (NM_001035.1,4186-4204).
gcccgatcgtgttgacaaa

SEQ ID NO: 122439 - DNA, 19 bp, Homo sapiens
  siRNA target sequence for RYR2 (NM_001035.1,4188-4206).
ccgatcgtgttgacaaaga

SEQ ID NO: 122440 - DNA, 19 bp, Homo sapiens
  siRNA target sequence for RYR2 (NM_001035.1,4190-4208).
gatcgtgttgacaaagaca

SEQ ID NO: 122441 - DNA, 19 bp, Homo sapiens
  siRNA target sequence for RYR2 (NM_001035.1,4214-4232).
gctactaaaccagagttta

SEQ ID NO: 122442 - DNA, 19 bp, Homo sapiens
  siRNA target sequence for RYR2 (NM_001035.1,4215-4233).
ctactaaaccagagtttaa

SEQ ID NO: 122443 - DNA, 19 bp, Homo sapiens
  siRNA target sequence for RYR2 (NM_001035.1,4329-4347).
caagactcaccgaagatgt

SEQ ID NO: 122444 - DNA, 19 bp, Homo sapiens
  siRNA target sequence for RYR2 (NM_001035.1,4358-4376).
gatcgggatgactatgatt

SEQ ID NO: 122445 - DNA, 19 bp, Homo sapiens
  siRNA target sequence for RYR2 (NM_001035.1,4361-4379).
cgggatgactatgatttct

SEQ ID NO: 122446 - DNA, 19 bp, Homo sapiens
  siRNA target sequence for RYR2 (NM_001035.1,4364-4382).
gatgactatgatttcttga

SEQ ID NO: 122447 - DNA, 19 bp, Homo sapiens
  siRNA target sequence for RYR2 (NM_001035.1,4384-4402).
gcaaacgtccacgtactat

SEQ ID NO: 122448 - DNA, 19 bp, Homo sapiens
  siRNA target sequence for RYR2 (NM_001035.1,4385-4403).
caaacgtccacgtactatt

SEQ ID NO: 122449 - DNA, 19 bp, Homo sapiens
  siRNA target sequence for RYR2 (NM_001035.1,4390-4408).
gtccacgtactattactca

SEQ ID NO: 122450 - DNA, 19 bp, Homo sapiens
  siRNA target sequence for RYR2 (NM_001035.1,4442-4460).
gtctgggtgggctggatta

SEQ ID NO: 122451 - DNA, 19 bp, Homo sapiens
  siRNA target sequence for RYR2 (NM_001035.1,4444-4462).
ctgggtgggctggattaca

SEQ ID NO: 122452 - DNA, 19 bp, Homo sapiens
  siRNA target sequence for RYR2 (NM_001035.1,4447-4465).
ggtgggctggattacatca

SEQ ID NO: 122453 - DNA, 19 bp, Homo sapiens
  siRNA target sequence for RYR2 (NM_001035.1,4456-4474).
gattacatcagatttccat

SEQ ID NO: 122454 - DNA, 19 bp, Homo sapiens
  siRNA target sequence for RYR2 (NM_001035.1,4466-4484).
gatttccatcagtatgaca

SEQ ID NO: 122455 - DNA, 19 bp, Homo sapiens
  siRNA target sequence for RYR2 (NM_001035.1,4501-4519).
cagagttcgcacagtaaca

SEQ ID NO: 122456 - DNA, 19 bp, Homo sapiens
  siRNA target sequence for RYR2 (NM_001035.1,4503-4521).
gagttcgcacagtaacagt

SEQ ID NO: 122457 - DNA, 19 bp, Homo sapiens
  siRNA target sequence for RYR2 (NM_001035.1,4505-4523).
gttcgcacagtaacagtta

SEQ ID NO: 122458 - DNA, 19 bp, Homo sapiens
  siRNA target sequence for RYR2 (NM_001035.1,4510-4528).
cacagtaacagttactcta

SEQ ID NO: 122459 - DNA, 19 bp, Homo sapiens
  siRNA target sequence for RYR2 (NM_001035.1,4610-4628).
gggcaaggacgcaacaata

SEQ ID NO: 122460 - DNA, 19 bp, Homo sapiens
  siRNA target sequence for RYR2 (NM_001035.1,4611-4629).
ggcaaggacgcaacaataa

SEQ ID NO: 122461 - DNA, 19 bp, Homo sapiens
  siRNA target sequence for RYR2 (NM_001035.1,4612-4630).
gcaaggacgcaacaataat

SEQ ID NO: 122462 - DNA, 19 bp, Homo sapiens
  siRNA target sequence for RYR2 (NM_001035.1,4662-4680).
ccagcgggctgctcacatt

SEQ ID NO: 122463 - DNA, 19 bp, Homo sapiens
  siRNA target sequence for RYR2 (NM_001035.1,4665-4683).
gcgggctgctcacattcat

SEQ ID NO: 122464 - DNA, 19 bp, Homo sapiens
  siRNA target sequence for RYR2 (NM_001035.1,4666-4684).
cgggctgctcacattcatt

SEQ ID NO: 122465 - DNA, 19 bp, Homo sapiens
  siRNA target sequence for RYR2 (NM_001035.1,4696-4714).
ggaactgagcacatactat

SEQ ID NO: 122466 - DNA, 19 bp, Homo sapiens
  siRNA target sequence for RYR2 (NM_001035.1,4715-4733).
caggtggaaccgagtacaa

SEQ ID NO: 122467 - DNA, 19 bp, Homo sapiens
  siRNA target sequence for RYR2 (NM_001035.1,4717-4735).
ggtggaaccgagtacaaaa

SEQ ID NO: 122468 - DNA, 19 bp, Homo sapiens
  siRNA target sequence for RYR2 (NM_001035.1,4718-4736).
gtggaaccgagtacaaaat

SEQ ID NO: 122469 - DNA, 19 bp, Homo sapiens
  siRNA target sequence for RYR2 (NM_001035.1,4760-4778).
gctacaagtcccaatgttt

SEQ ID NO: 122470 - DNA, 19 bp, Homo sapiens
  siRNA target sequence for RYR2 (NM_001035.1,4761-4779).
ctacaagtcccaatgtttt

SEQ ID NO: 122471 - DNA, 19 bp, Homo sapiens
  siRNA target sequence for RYR2 (NM_001035.1,4764-4782).
caagtcccaatgttttcca

SEQ ID NO: 122472 - DNA, 19 bp, Homo sapiens
  siRNA target sequence for RYR2 (NM_001035.1,4783-4801).
gtttgagttgggaagaata

SEQ ID NO: 122473 - DNA, 19 bp, Homo sapiens
  siRNA target sequence for RYR2 (NM_001035.1,4936-4954).
ggtagatgtgtctcgaata

SEQ ID NO: 122474 - DNA, 19 bp, Homo sapiens
  siRNA target sequence for RYR2 (NM_001035.1,4988-5006).
gatcctctgcagttcatgt

SEQ ID NO: 122475 - DNA, 19 bp, Homo sapiens
  siRNA target sequence for RYR2 (NM_001035.1,5212-5230).
gctgcgtgctggctactat

SEQ ID NO: 122476 - DNA, 19 bp, Homo sapiens
  siRNA target sequence for RYR2 (NM_001035.1,5268-5286).
ctgccaggctcatgatgaa

SEQ ID NO: 122477 - DNA, 19 bp, Homo sapiens
  siRNA target sequence for RYR2 (NM_001035.1,5415-5433).
cccccagttttgtaagcat

SEQ ID NO: 122478 - DNA, 19 bp, Homo sapiens
  siRNA target sequence for RYR2 (NM_001035.1,5479-5497).
cctcaagtccaaaaccata

SEQ ID NO: 122479 - DNA, 19 bp, Homo sapiens
  siRNA target sequence for RYR2 (NM_001035.1,5553-5571).
gagggactactgaattcct

SEQ ID NO: 122480 - DNA, 19 bp, Homo sapiens
  siRNA target sequence for RYR2 (NM_001035.1,5656-5674).
gattgagcccagtgtgttt

SEQ ID NO: 122481 - DNA, 19 bp, Homo sapiens
  siRNA target sequence for RYR2 (NM_001035.1,5813-5831).
ctgccagagccagttaaat

SEQ ID NO: 122482 - DNA, 19 bp, Homo sapiens
  siRNA target sequence for RYR2 (NM_001035.1,5817-5835).
cagagccagttaaattgca

SEQ ID NO: 122483 - DNA, 19 bp, Homo sapiens
  siRNA target sequence for RYR2 (NM_001035.1,5872-5890).
ggtccggcaccggatagaa

SEQ ID NO: 122484 - DNA, 19 bp, Homo sapiens
  siRNA target sequence for RYR2 (NM_001035.1,5881-5899).
ccggatagaagccattgta

SEQ ID NO: 122485 - DNA, 19 bp, Homo sapiens
  siRNA target sequence for RYR2 (NM_001035.1,5922-5940).
ctaagctccaagacaatca

SEQ ID NO: 122486 - DNA, 19 bp, Homo sapiens
  siRNA target sequence for RYR2 (NM_001035.1,6004-6022).
gacaaaggaatttagatca

SEQ ID NO: 122487 - DNA, 19 bp, Homo sapiens
  siRNA target sequence for RYR2 (NM_001035.1,6018-6036).
gatcaccacctcaagaaca

SEQ ID NO: 122488 - DNA, 19 bp, Homo sapiens
  siRNA target sequence for RYR2 (NM_001035.1,6037-6055).
gatcaatatgcttctcaat

SEQ ID NO: 122489 - DNA, 19 bp, Homo sapiens
  siRNA target sequence for RYR2 (NM_001035.1,6362-6380).
gtgagggccatgtttgtgt

SEQ ID NO: 122490 - DNA, 19 bp, Homo sapiens
  siRNA target sequence for RYR2 (NM_001035.1,6400-6418).
cggcattgggggtcttgtt

SEQ ID NO: 122491 - DNA, 19 bp, Homo sapiens
  siRNA target sequence for RYR2 (NM_001035.1,6428-6446).
ccaaagacctacacgataa

SEQ ID NO: 122492 - DNA, 19 bp, Homo sapiens
  siRNA target sequence for RYR2 (NM_001035.1,6433-6451).
gacctacacgataaatggt

SEQ ID NO: 122493 - DNA, 19 bp, Homo sapiens
  siRNA target sequence for RYR2 (NM_001035.1,6481-6499).
ggcatcccttggtcagatt

SEQ ID NO: 122494 - DNA, 19 bp, Homo sapiens
  siRNA target sequence for RYR2 (NM_001035.1,6541-6559).
gctcatgattcgtggatta

SEQ ID NO: 122495 - DNA, 19 bp, Homo sapiens
  siRNA target sequence for RYR2 (NM_001035.1,6551-6569).
cgtggattaggggatatta

SEQ ID NO: 122496 - DNA, 19 bp, Homo sapiens
  siRNA target sequence for RYR2 (NM_001035.1,6552-6570).
gtggattaggggatattat

SEQ ID NO: 122497 - DNA, 19 bp, Homo sapiens
  siRNA target sequence for RYR2 (NM_001035.1,6554-6572).
ggattaggggatattatga

SEQ ID NO: 122498 - DNA, 19 bp, Homo sapiens
  siRNA target sequence for RYR2 (NM_001035.1,6555-6573).
gattaggggatattatgaa

SEQ ID NO: 122499 - DNA, 19 bp, Homo sapiens
  siRNA target sequence for RYR2 (NM_001035.1,6702-6720).
ccaactgttgccgttttct

SEQ ID NO: 122500 - DNA, 19 bp, Homo sapiens
  siRNA target sequence for RYR2 (NM_001035.1,6713-6731).
cgttttctctgttacttct

SEQ ID NO: 122501 - DNA, 19 bp, Homo sapiens
  siRNA target sequence for RYR2 (NM_001035.1,6721-6739).
ctgttacttctgtcgtata

SEQ ID NO: 122502 - DNA, 19 bp, Homo sapiens
  siRNA target sequence for RYR2 (NM_001035.1,6744-6762).
ggcagaatcaaaaagctat

SEQ ID NO: 122503 - DNA, 19 bp, Homo sapiens
  siRNA target sequence for RYR2 (NM_001035.1,6851-6869).
gcagcttcggtgatggata

SEQ ID NO: 122504 - DNA, 19 bp, Homo sapiens
  siRNA target sequence for RYR2 (NM_001035.1,6854-6872).
gcttcggtgatggataata

SEQ ID NO: 122505 - DNA, 19 bp, Homo sapiens
  siRNA target sequence for RYR2 (NM_001035.1,6859-6877).
ggtgatggataataatgaa

SEQ ID NO: 122506 - DNA, 19 bp, Homo sapiens
  siRNA target sequence for RYR2 (NM_001035.1,6892-6910).
gcgtgagccggatctagaa

SEQ ID NO: 122507 - DNA, 19 bp, Homo sapiens
  siRNA target sequence for RYR2 (NM_001035.1,6908-6926).
gaaaaggtagttcgttatt

SEQ ID NO: 122508 - DNA, 19 bp, Homo sapiens
  siRNA target sequence for RYR2 (NM_001035.1,6932-6950).
ggttgtggactgcaaagtt

SEQ ID NO: 122509 - DNA, 19 bp, Homo sapiens
  siRNA target sequence for RYR2 (NM_001035.1,7199-7217).
gatggtccctcaccaaata

SEQ ID NO: 122510 - DNA, 19 bp, Homo sapiens
  siRNA target sequence for RYR2 (NM_001035.1,7218-7236).
gcggatccagtaaaacact

SEQ ID NO: 122511 - DNA, 19 bp, Homo sapiens
  siRNA target sequence for RYR2 (NM_001035.1,7219-7237).
cggatccagtaaaacactt

SEQ ID NO: 122512 - DNA, 19 bp, Homo sapiens
  siRNA target sequence for RYR2 (NM_001035.1,7280-7298).
gcgatcatgaccttctatt

SEQ ID NO: 122513 - DNA, 19 bp, Homo sapiens
  siRNA target sequence for RYR2 (NM_001035.1,7328-7346).
gctcctgagatgcatttga

SEQ ID NO: 122514 - DNA, 19 bp, Homo sapiens
  siRNA target sequence for RYR2 (NM_001035.1,7364-7382).
gaagccatcagaattaggt

SEQ ID NO: 122515 - DNA, 19 bp, Homo sapiens
  siRNA target sequence for RYR2 (NM_001035.1,7412-7430).
gatttggtgggcgttatca

SEQ ID NO: 122516 - DNA, 19 bp, Homo sapiens
  siRNA target sequence for RYR2 (NM_001035.1,7447-7465).
gccaacaatagccaaagat

SEQ ID NO: 122517 - DNA, 19 bp, Homo sapiens
  siRNA target sequence for RYR2 (NM_001035.1,7513-7531).
caaggcagccatggtttta

SEQ ID NO: 122518 - DNA, 19 bp, Homo sapiens
  siRNA target sequence for RYR2 (NM_001035.1,7664-7682).
gccctcaatcggtaccttt

SEQ ID NO: 122519 - DNA, 19 bp, Homo sapiens
  siRNA target sequence for RYR2 (NM_001035.1,7686-7704).
cagccgtcttgccattgtt

SEQ ID NO: 122520 - DNA, 19 bp, Homo sapiens
  siRNA target sequence for RYR2 (NM_001035.1,7688-7706).
gccgtcttgccattgttaa

SEQ ID NO: 122521 - DNA, 19 bp, Homo sapiens
  siRNA target sequence for RYR2 (NM_001035.1,7696-7714).
gccattgttaacaagatgt

SEQ ID NO: 122522 - DNA, 19 bp, Homo sapiens
  siRNA target sequence for RYR2 (NM_001035.1,7738-7756).
gcaccacgcttctctcatt

SEQ ID NO: 122523 - DNA, 19 bp, Homo sapiens
  siRNA target sequence for RYR2 (NM_001035.1,7816-7834).
gcgggattccatagaagtt

SEQ ID NO: 122524 - DNA, 19 bp, Homo sapiens
  siRNA target sequence for RYR2 (NM_001035.1,7854-7872).
gacaactgagaccttctat

SEQ ID NO: 122525 - DNA, 19 bp, Homo sapiens
  siRNA target sequence for RYR2 (NM_001035.1,7869-7887).
ctatgatgcagcacttact

SEQ ID NO: 122526 - DNA, 19 bp, Homo sapiens
  siRNA target sequence for RYR2 (NM_001035.1,7882-7900).
cttactcagaagattagta

SEQ ID NO: 122527 - DNA, 19 bp, Homo sapiens
  siRNA target sequence for RYR2 (NM_001035.1,7890-7908).
gaagattagtatttgatgt

SEQ ID NO: 122528 - DNA, 19 bp, Homo sapiens
  siRNA target sequence for RYR2 (NM_001035.1,7927-7945).
cgcaaagatgcctcttaaa

SEQ ID NO: 122529 - DNA, 19 bp, Homo sapiens
  siRNA target sequence for RYR2 (NM_001035.1,7948-7966).
gctgacaaatcattatgaa

SEQ ID NO: 122530 - DNA, 19 bp, Homo sapiens
  siRNA target sequence for RYR2 (NM_001035.1,8027-8045).
gaagaacttcatttatcaa

SEQ ID NO: 122531 - DNA, 19 bp, Homo sapiens
  siRNA target sequence for RYR2 (NM_001035.1,8156-8174).
gactacatggagtcaaatt

SEQ ID NO: 122532 - DNA, 19 bp, Homo sapiens
  siRNA target sequence for RYR2 (NM_001035.1,8158-8176).
ctacatggagtcaaattat

SEQ ID NO: 122533 - DNA, 19 bp, Homo sapiens
  siRNA target sequence for RYR2 (NM_001035.1,8234-8252).
cctgttgatacctcaaata

SEQ ID NO: 122534 - DNA, 19 bp, Homo sapiens
  siRNA target sequence for RYR2 (NM_001035.1,8295-8313).
cagaacactcccatgacaa

SEQ ID NO: 122535 - DNA, 19 bp, Homo sapiens
  siRNA target sequence for RYR2 (NM_001035.1,8373-8391).
ctaaggttcagccattaat

SEQ ID NO: 122536 - DNA, 19 bp, Homo sapiens
  siRNA target sequence for RYR2 (NM_001035.1,8384-8402).
ccattaatgaagccatata

SEQ ID NO: 122537 - DNA, 19 bp, Homo sapiens
  siRNA target sequence for RYR2 (NM_001035.1,8385-8403).
cattaatgaagccatataa

SEQ ID NO: 122538 - DNA, 19 bp, Homo sapiens
  siRNA target sequence for RYR2 (NM_001035.1,8404-8422).
gctattgtctgaaaaggaa

SEQ ID NO: 122539 - DNA, 19 bp, Homo sapiens
  siRNA target sequence for RYR2 (NM_001035.1,8435-8453).
cgctggccaatcaaagaat

SEQ ID NO: 122540 - DNA, 19 bp, Homo sapiens
  siRNA target sequence for RYR2 (NM_001035.1,8440-8458).
gccaatcaaagaatcttta

SEQ ID NO: 122541 - DNA, 19 bp, Homo sapiens
  siRNA target sequence for RYR2 (NM_001035.1,8524-8542).
caaccggactcgtcgtatt

SEQ ID NO: 122542 - DNA, 19 bp, Homo sapiens
  siRNA target sequence for RYR2 (NM_001035.1,8527-8545).
ccggactcgtcgtatttct

SEQ ID NO: 122543 - DNA, 19 bp, Homo sapiens
  siRNA target sequence for RYR2 (NM_001035.1,8529-8547).
ggactcgtcgtatttctca

SEQ ID NO: 122544 - DNA, 19 bp, Homo sapiens
  siRNA target sequence for RYR2 (NM_001035.1,8596-8614).
cattgacatgagcaatgtt

SEQ ID NO: 122545 - DNA, 19 bp, Homo sapiens
  siRNA target sequence for RYR2 (NM_001035.1,8602-8620).
catgagcaatgttacacta

SEQ ID NO: 122546 - DNA, 19 bp, Homo sapiens
  siRNA target sequence for RYR2 (NM_001035.1,8605-8623).
gagcaatgttacactatct

SEQ ID NO: 122547 - DNA, 19 bp, Homo sapiens
  siRNA target sequence for RYR2 (NM_001035.1,8608-8626).
caatgttacactatctaga

SEQ ID NO: 122548 - DNA, 19 bp, Homo sapiens
  siRNA target sequence for RYR2 (NM_001035.1,8731-8749).
gctggtgccctatgataca

SEQ ID NO: 122549 - DNA, 19 bp, Homo sapiens
  siRNA target sequence for RYR2 (NM_001035.1,8806-8824).
cttgcagatcaatggatat

SEQ ID NO: 122550 - DNA, 19 bp, Homo sapiens
  siRNA target sequence for RYR2 (NM_001035.1,8809-8827).
gcagatcaatggatatgct

SEQ ID NO: 122551 - DNA, 19 bp, Homo sapiens
  siRNA target sequence for RYR2 (NM_001035.1,8860-8878).
cacgccttctattgagaaa

SEQ ID NO: 122552 - DNA, 19 bp, Homo sapiens
  siRNA target sequence for RYR2 (NM_001035.1,8973-8991).
gagaacatttcccttatga

SEQ ID NO: 122553 - DNA, 19 bp, Homo sapiens
  siRNA target sequence for RYR2 (NM_001035.1,9052-9070).
ccatcgtttatacttctta

SEQ ID NO: 122554 - DNA, 19 bp, Homo sapiens
  siRNA target sequence for RYR2 (NM_001035.1,9108-9126).
cttccaacaaagagaaaga

SEQ ID NO: 122555 - DNA, 19 bp, Homo sapiens
  siRNA target sequence for RYR2 (NM_001035.1,9166-9184).
caggcataggatttcacta

SEQ ID NO: 122556 - DNA, 19 bp, Homo sapiens
  siRNA target sequence for RYR2 (NM_001035.1,9189-9207).
gcaatgatgcaacatcaat

SEQ ID NO: 122557 - DNA, 19 bp, Homo sapiens
  siRNA target sequence for RYR2 (NM_001035.1,9194-9212).
gatgcaacatcaattgtca

SEQ ID NO: 122558 - DNA, 19 bp, Homo sapiens
  siRNA target sequence for RYR2 (NM_001035.1,9386-9404).
ggggttactcagattatca

SEQ ID NO: 122559 - DNA, 19 bp, Homo sapiens
  siRNA target sequence for RYR2 (NM_001035.1,9387-9405).
gggttactcagattatcaa

SEQ ID NO: 122560 - DNA, 19 bp, Homo sapiens
  siRNA target sequence for RYR2 (NM_001035.1,9389-9407).
gttactcagattatcaatt

SEQ ID NO: 122561 - DNA, 19 bp, Homo sapiens
  siRNA target sequence for RYR2 (NM_001035.1,9469-9487).
gttcggagaagacctaata

SEQ ID NO: 122562 - DNA, 19 bp, Homo sapiens
  siRNA target sequence for RYR2 (NM_001035.1,9474-9492).
gagaagacctaatattgga

SEQ ID NO: 122563 - DNA, 19 bp, Homo sapiens
  siRNA target sequence for RYR2 (NM_001035.1,9494-9512).
gatgtccaggtgtcttgtt

SEQ ID NO: 122564 - DNA, 19 bp, Homo sapiens
  siRNA target sequence for RYR2 (NM_001035.1,9497-9515).
gtccaggtgtcttgttata

SEQ ID NO: 122565 - DNA, 19 bp, Homo sapiens
  siRNA target sequence for RYR2 (NM_001035.1,9516-9534).
gaattctgactagcttata

SEQ ID NO: 122566 - DNA, 19 bp, Homo sapiens
  siRNA target sequence for RYR2 (NM_001035.1,9521-9539).
ctgactagcttatatgctt

SEQ ID NO: 122567 - DNA, 19 bp, Homo sapiens
  siRNA target sequence for RYR2 (NM_001035.1,9541-9559).
gggaaccagcaagagtatt

SEQ ID NO: 122568 - DNA, 19 bp, Homo sapiens
  siRNA target sequence for RYR2 (NM_001035.1,9542-9560).
ggaaccagcaagagtattt

SEQ ID NO: 122569 - DNA, 19 bp, Homo sapiens
  siRNA target sequence for RYR2 (NM_001035.1,9546-9564).
ccagcaagagtatttacgt

SEQ ID NO: 122570 - DNA, 19 bp, Homo sapiens
  siRNA target sequence for RYR2 (NM_001035.1,9568-9586).
gaggcaacgttctgcatta

SEQ ID NO: 122571 - DNA, 19 bp, Homo sapiens
  siRNA target sequence for RYR2 (NM_001035.1,9571-9589).
gcaacgttctgcattagga

SEQ ID NO: 122572 - DNA, 19 bp, Homo sapiens
  siRNA target sequence for RYR2 (NM_001035.1,9579-9597).
ctgcattaggagaatgtct

SEQ ID NO: 122573 - DNA, 19 bp, Homo sapiens
  siRNA target sequence for RYR2 (NM_001035.1,9702-9720).
ctctcagtttgccaactaa

SEQ ID NO: 122574 - DNA, 19 bp, Homo sapiens
  siRNA target sequence for RYR2 (NM_001035.1,9766-9784).
ggaagaaatcgtggaatta

SEQ ID NO: 122575 - DNA, 19 bp, Homo sapiens
  siRNA target sequence for RYR2 (NM_001035.1,9794-9812).
ggcattcgctacactcaaa

SEQ ID NO: 122576 - DNA, 19 bp, Homo sapiens
  siRNA target sequence for RYR2 (NM_001035.1,9795-9813).
gcattcgctacactcaaat

SEQ ID NO: 122577 - DNA, 19 bp, Homo sapiens
  siRNA target sequence for RYR2 (NM_001035.1,10029-10047).
cccagcctataataaataa

SEQ ID NO: 122578 - DNA, 19 bp, Homo sapiens
  siRNA target sequence for RYR2 (NM_001035.1,10231-10249).
ccctctcttgattagattt

SEQ ID NO: 122579 - DNA, 19 bp, Homo sapiens
  siRNA target sequence for RYR2 (NM_001035.1,10233-10251).
ctctcttgattagatttgt

SEQ ID NO: 122580 - DNA, 19 bp, Homo sapiens
  siRNA target sequence for RYR2 (NM_001035.1,10263-10281).
gggcaaagtggctaaagga

SEQ ID NO: 122581 - DNA, 19 bp, Homo sapiens
  siRNA target sequence for RYR2 (NM_001035.1,10319-10337).
gctgaagtgtttatctact

SEQ ID NO: 122582 - DNA, 19 bp, Homo sapiens
  siRNA target sequence for RYR2 (NM_001035.1,10336-10354).
ctggtcgaagtcccataat

SEQ ID NO: 122583 - DNA, 19 bp, Homo sapiens
  siRNA target sequence for RYR2 (NM_001035.1,10338-10356).
ggtcgaagtcccataattt

SEQ ID NO: 122584 - DNA, 19 bp, Homo sapiens
  siRNA target sequence for RYR2 (NM_001035.1,10341-10359).
cgaagtcccataatttcaa

SEQ ID NO: 122585 - DNA, 19 bp, Homo sapiens
  siRNA target sequence for RYR2 (NM_001035.1,10342-10360).
gaagtcccataatttcaaa

SEQ ID NO: 122586 - DNA, 19 bp, Homo sapiens
  siRNA target sequence for RYR2 (NM_001035.1,10375-10393).
cttcgttgtacagaatgaa

SEQ ID NO: 122587 - DNA, 19 bp, Homo sapiens
  siRNA target sequence for RYR2 (NM_001035.1,10504-10522).
gcagacctctctgattgta

SEQ ID NO: 122588 - DNA, 19 bp, Homo sapiens
  siRNA target sequence for RYR2 (NM_001035.1,10592-10610).
ctggccaaaaatcgattta

SEQ ID NO: 122589 - DNA, 19 bp, Homo sapiens
  siRNA target sequence for RYR2 (NM_001035.1,10604-10622).
cgatttagcctgaaagata

SEQ ID NO: 122590 - DNA, 19 bp, Homo sapiens
  siRNA target sequence for RYR2 (NM_001035.1,10627-10645).
ggatgaagtacgagatata

SEQ ID NO: 122591 - DNA, 19 bp, Homo sapiens
  siRNA target sequence for RYR2 (NM_001035.1,10650-10668).
gcagcaatattcatttaca

SEQ ID NO: 122592 - DNA, 19 bp, Homo sapiens
  siRNA target sequence for RYR2 (NM_001035.1,10651-10669).
cagcaatattcatttacaa

SEQ ID NO: 122593 - DNA, 19 bp, Homo sapiens
  siRNA target sequence for RYR2 (NM_001035.1,10678-10696).
ggaggatcctgctattaga

SEQ ID NO: 122594 - DNA, 19 bp, Homo sapiens
  siRNA target sequence for RYR2 (NM_001035.1,10695-10713).
gatggcaaatggctcttta

SEQ ID NO: 122595 - DNA, 19 bp, Homo sapiens
  siRNA target sequence for RYR2 (NM_001035.1,10698-10716).
ggcaaatggctctttacaa

SEQ ID NO: 122596 - DNA, 19 bp, Homo sapiens
  siRNA target sequence for RYR2 (NM_001035.1,10705-10723).
ggctctttacaaagactta

SEQ ID NO: 122597 - DNA, 19 bp, Homo sapiens
  siRNA target sequence for RYR2 (NM_001035.1,10709-10727).
ctttacaaagacttaccaa

SEQ ID NO: 122598 - DNA, 19 bp, Homo sapiens
  siRNA target sequence for RYR2 (NM_001035.1,10724-10742).
ccaaacaggactgatgata

SEQ ID NO: 122599 - DNA, 19 bp, Homo sapiens
  siRNA target sequence for RYR2 (NM_001035.1,10756-10774).
gaagacggtagaaagagta

SEQ ID NO: 122600 - DNA, 19 bp, Homo sapiens
  siRNA target sequence for RYR2 (NM_001035.1,10761-10779).
cggtagaaagagtattgga

SEQ ID NO: 122601 - DNA, 19 bp, Homo sapiens
  siRNA target sequence for RYR2 (NM_001035.1,10873-10891).
ggctgtatggcataaacta

SEQ ID NO: 122602 - DNA, 19 bp, Homo sapiens
  siRNA target sequence for RYR2 (NM_001035.1,10903-10921).
gaggaaaagggctgttgta

SEQ ID NO: 122603 - DNA, 19 bp, Homo sapiens
  siRNA target sequence for RYR2 (NM_001035.1,10959-10977).
ggcatcgggctgtcaatct

SEQ ID NO: 122604 - DNA, 19 bp, Homo sapiens
  siRNA target sequence for RYR2 (NM_001035.1,10961-10979).
catcgggctgtcaatctct

SEQ ID NO: 122605 - DNA, 19 bp, Homo sapiens
  siRNA target sequence for RYR2 (NM_001035.1,10965-10983).
gggctgtcaatctctttct

SEQ ID NO: 122606 - DNA, 19 bp, Homo sapiens
  siRNA target sequence for RYR2 (NM_001035.1,11119-11137).
gctgatccttctgtttagt

SEQ ID NO: 122607 - DNA, 19 bp, Homo sapiens
  siRNA target sequence for RYR2 (NM_001035.1,11131-11149).
gtttagtcggacagcttta

SEQ ID NO: 122608 - DNA, 19 bp, Homo sapiens
  siRNA target sequence for RYR2 (NM_001035.1,11383-11401).
ggtagcagctactctgaaa

SEQ ID NO: 122609 - DNA, 19 bp, Homo sapiens
  siRNA target sequence for RYR2 (NM_001035.1,11504-11522).
ggcctgatgcagtcatgta

SEQ ID NO: 122610 - DNA, 19 bp, Homo sapiens
  siRNA target sequence for RYR2 (NM_001035.1,11540-11558).
gcatttgagcgacaaaaca

SEQ ID NO: 122611 - DNA, 19 bp, Homo sapiens
  siRNA target sequence for RYR2 (NM_001035.1,11541-11559).
catttgagcgacaaaacaa

SEQ ID NO: 122612 - DNA, 19 bp, Homo sapiens
  siRNA target sequence for RYR2 (NM_001035.1,11704-11722).
gactggcaataatacaact

SEQ ID NO: 122613 - DNA, 19 bp, Homo sapiens
  siRNA target sequence for RYR2 (NM_001035.1,11756-11774).
ctgagagttcaggaatcaa

SEQ ID NO: 122614 - DNA, 19 bp, Homo sapiens
  siRNA target sequence for RYR2 (NM_001035.1,11822-11840).
caaggacaacggaatttct

SEQ ID NO: 122615 - DNA, 19 bp, Homo sapiens
  siRNA target sequence for RYR2 (NM_001035.1,11831-11849).
cggaatttctccaaagcta

SEQ ID NO: 122616 - DNA, 19 bp, Homo sapiens
  siRNA target sequence for RYR2 (NM_001035.1,11847-11865).
ctatccaagtggcaaaaca

SEQ ID NO: 122617 - DNA, 19 bp, Homo sapiens
  siRNA target sequence for RYR2 (NM_001035.1,11864-11882).
caagtctttaacactctta

SEQ ID NO: 122618 - DNA, 19 bp, Homo sapiens
  siRNA target sequence for RYR2 (NM_001035.1,12064-12082).
gttgctgtccatgttagaa

SEQ ID NO: 122619 - DNA, 19 bp, Homo sapiens
  siRNA target sequence for RYR2 (NM_001035.1,12070-12088).
gtccatgttagaaggtaat

SEQ ID NO: 122620 - DNA, 19 bp, Homo sapiens
  siRNA target sequence for RYR2 (NM_001035.1,12072-12090).
ccatgttagaaggtaatgt

SEQ ID NO: 122621 - DNA, 19 bp, Homo sapiens
  siRNA target sequence for RYR2 (NM_001035.1,12073-12091).
catgttagaaggtaatgtt

SEQ ID NO: 122622 - DNA, 19 bp, Homo sapiens
  siRNA target sequence for RYR2 (NM_001035.1,12098-12116).
ggaacgattggcaaacaga

SEQ ID NO: 122623 - DNA, 19 bp, Homo sapiens
  siRNA target sequence for RYR2 (NM_001035.1,12142-12160).
caacaacgtggagatgatt

SEQ ID NO: 122624 - DNA, 19 bp, Homo sapiens
  siRNA target sequence for RYR2 (NM_001035.1,12154-12172).
gatgattctcaaatttttt

SEQ ID NO: 122625 - DNA, 19 bp, Homo sapiens
  siRNA target sequence for RYR2 (NM_001035.1,12194-12212).
gatttgacgtcgtctgata

SEQ ID NO: 122626 - DNA, 19 bp, Homo sapiens
  siRNA target sequence for RYR2 (NM_001035.1,12199-12217).
gacgtcgtctgatactttt

SEQ ID NO: 122627 - DNA, 19 bp, Homo sapiens
  siRNA target sequence for RYR2 (NM_001035.1,12201-12219).
cgtcgtctgatacttttaa

SEQ ID NO: 122628 - DNA, 19 bp, Homo sapiens
  siRNA target sequence for RYR2 (NM_001035.1,12204-12222).
cgtctgatacttttaaaga

SEQ ID NO: 122629 - DNA, 19 bp, Homo sapiens
  siRNA target sequence for RYR2 (NM_001035.1,12236-12254).
ggcaagggagtcatttcca

SEQ ID NO: 122630 - DNA, 19 bp, Homo sapiens
  siRNA target sequence for RYR2 (NM_001035.1,12298-12316).
gcagtcagaaacggaattt

SEQ ID NO: 122631 - DNA, 19 bp, Homo sapiens
  siRNA target sequence for RYR2 (NM_001035.1,12301-12319).
gtcagaaacggaatttctt

SEQ ID NO: 122632 - DNA, 19 bp, Homo sapiens
  siRNA target sequence for RYR2 (NM_001035.1,12305-12323).
gaaacggaatttcttttgt

SEQ ID NO: 122633 - DNA, 19 bp, Homo sapiens
  siRNA target sequence for RYR2 (NM_001035.1,12351-12369).
ccctcgactacgaagagtt

SEQ ID NO: 122634 - DNA, 19 bp, Homo sapiens
  siRNA target sequence for RYR2 (NM_001035.1,12440-12458).
gagcacatgcccaacgata

SEQ ID NO: 122635 - DNA, 19 bp, Homo sapiens
  siRNA target sequence for RYR2 (NM_001035.1,12459-12477).
cccgacttcagacttttct

SEQ ID NO: 122636 - DNA, 19 bp, Homo sapiens
  siRNA target sequence for RYR2 (NM_001035.1,12492-12510).
gcgtcctgaattatttcca

SEQ ID NO: 122637 - DNA, 19 bp, Homo sapiens
  siRNA target sequence for RYR2 (NM_001035.1,12551-12569).
cgcatcgagagggtctatt

SEQ ID NO: 122638 - DNA, 19 bp, Homo sapiens
  siRNA target sequence for RYR2 (NM_001035.1,12552-12570).
gcatcgagagggtctattt

SEQ ID NO: 122639 - DNA, 19 bp, Homo sapiens
  siRNA target sequence for RYR2 (NM_001035.1,12553-12571).
catcgagagggtctatttt

SEQ ID NO: 122640 - DNA, 19 bp, Homo sapiens
  siRNA target sequence for RYR2 (NM_001035.1,12622-12640).
gtccaaaagacagttcata

SEQ ID NO: 122641 - DNA, 19 bp, Homo sapiens
  siRNA target sequence for RYR2 (NM_001035.1,12652-12670).
caacgaaggcggagagaaa

SEQ ID NO: 122642 - DNA, 19 bp, Homo sapiens
  siRNA target sequence for RYR2 (NM_001035.1,12760-12778).
gaggtcagcgaataaggaa

SEQ ID NO: 122643 - DNA, 19 bp, Homo sapiens
  siRNA target sequence for RYR2 (NM_001035.1,12856-12874).
gtttgcgctcaggtacaat

SEQ ID NO: 122644 - DNA, 19 bp, Homo sapiens
  siRNA target sequence for RYR2 (NM_001035.1,12860-12878).
gcgctcaggtacaatatct

SEQ ID NO: 122645 - DNA, 19 bp, Homo sapiens
  siRNA target sequence for RYR2 (NM_001035.1,12863-12881).
ctcaggtacaatatcttga

SEQ ID NO: 122646 - DNA, 19 bp, Homo sapiens
  siRNA target sequence for RYR2 (NM_001035.1,12955-12973).
catggtcacggccttcttt

SEQ ID NO: 122647 - DNA, 19 bp, Homo sapiens
  siRNA target sequence for RYR2 (NM_001035.1,12958-12976).
ggtcacggccttcttttca

SEQ ID NO: 122648 - DNA, 19 bp, Homo sapiens
  siRNA target sequence for RYR2 (NM_001035.1,12959-12977).
gtcacggccttcttttcat

SEQ ID NO: 122649 - DNA, 19 bp, Homo sapiens
  siRNA target sequence for RYR2 (NM_001035.1,12975-12993).
catcctactggagtatttt

SEQ ID NO: 122650 - DNA, 19 bp, Homo sapiens
  siRNA target sequence for RYR2 (NM_001035.1,13072-13090).
cctcgtcgaaggtgctaaa

SEQ ID NO: 122651 - DNA, 19 bp, Homo sapiens
  siRNA target sequence for RYR2 (NM_001035.1,13073-13091).
ctcgtcgaaggtgctaaaa

SEQ ID NO: 122652 - DNA, 19 bp, Homo sapiens
  siRNA target sequence for RYR2 (NM_001035.1,13202-13220).
gaggatctgaccgacttaa

SEQ ID NO: 122653 - DNA, 19 bp, Homo sapiens
  siRNA target sequence for RYR2 (NM_001035.1,13294-13312).
caaactgattcctcataat

SEQ ID NO: 122654 - DNA, 19 bp, Homo sapiens
  siRNA target sequence for RYR2 (NM_001035.1,13298-13316).
ctgattcctcataatccaa

SEQ ID NO: 122655 - DNA, 19 bp, Homo sapiens
  siRNA target sequence for RYR2 (NM_001035.1,13552-13570).
gtcagcattctggaagaaa

SEQ ID NO: 122656 - DNA, 19 bp, Homo sapiens
  siRNA target sequence for RYR2 (NM_001035.1,13600-13618).
ctattttgctcgcaacttt

SEQ ID NO: 122657 - DNA, 19 bp, Homo sapiens
  siRNA target sequence for RYR2 (NM_001035.1,13607-13625).
gctcgcaacttttacaaca

SEQ ID NO: 122658 - DNA, 19 bp, Homo sapiens
  siRNA target sequence for RYR2 (NM_001035.1,13610-13628).
cgcaacttttacaacatga

SEQ ID NO: 122659 - DNA, 19 bp, Homo sapiens
  siRNA target sequence for RYR2 (NM_001035.1,13627-13645).
gagaatgttagccttattt

SEQ ID NO: 122660 - DNA, 19 bp, Homo sapiens
  siRNA target sequence for RYR2 (NM_001035.1,13646-13664).
gtcgcatttgctatcaatt

SEQ ID NO: 122661 - DNA, 19 bp, Homo sapiens
  siRNA target sequence for RYR2 (NM_001035.1,13715-13733).
gagctccccacgagaagtt

SEQ ID NO: 122662 - DNA, 19 bp, Homo sapiens
  siRNA target sequence for RYR2 (NM_001035.1,13717-13735).
gctccccacgagaagttca

SEQ ID NO: 122663 - DNA, 19 bp, Homo sapiens
  siRNA target sequence for RYR2 (NM_001035.1,13718-13736).
ctccccacgagaagttcaa

SEQ ID NO: 122664 - DNA, 19 bp, Homo sapiens
  siRNA target sequence for RYR2 (NM_001035.1,13725-13743).
cgagaagttcaagtgaaaa

SEQ ID NO: 122665 - DNA, 19 bp, Homo sapiens
  siRNA target sequence for RYR2 (NM_001035.1,13767-13785).
gcagctcccatagaatcat

SEQ ID NO: 122666 - DNA, 19 bp, Homo sapiens
  siRNA target sequence for RYR2 (NM_001035.1,13783-13801).
catcgcagttcactatgta

SEQ ID NO: 122667 - DNA, 19 bp, Homo sapiens
  siRNA target sequence for RYR2 (NM_001035.1,13786-13804).
cgcagttcactatgtacta

SEQ ID NO: 122668 - DNA, 19 bp, Homo sapiens
  siRNA target sequence for RYR2 (NM_001035.1,13828-13846).
gcccacgttgcgtatctta

SEQ ID NO: 122669 - DNA, 19 bp, Homo sapiens
  siRNA target sequence for RYR2 (NM_001035.1,13833-13851).
cgttgcgtatcttagctat

SEQ ID NO: 122670 - DNA, 19 bp, Homo sapiens
  siRNA target sequence for RYR2 (NM_001035.1,13887-13905).
gatactactgcttgaaagt

SEQ ID NO: 122671 - DNA, 19 bp, Homo sapiens
  siRNA target sequence for RYR2 (NM_001035.1,13900-13918).
gaaagtcccattggttatt

SEQ ID NO: 122672 - DNA, 19 bp, Homo sapiens
  siRNA target sequence for RYR2 (NM_001035.1,13937-13955).
gtggcacggaaattggaat

SEQ ID NO: 122673 - DNA, 19 bp, Homo sapiens
  siRNA target sequence for RYR2 (NM_001035.1,13939-13957).
ggcacggaaattggaattt

SEQ ID NO: 122674 - DNA, 19 bp, Homo sapiens
  siRNA target sequence for RYR2 (NM_001035.1,13941-13959).
cacggaaattggaatttga

SEQ ID NO: 122675 - DNA, 19 bp, Homo sapiens
  siRNA target sequence for RYR2 (NM_001035.1,13951-13969).
ggaatttgatgggctttat

SEQ ID NO: 122676 - DNA, 19 bp, Homo sapiens
  siRNA target sequence for RYR2 (NM_001035.1,14010-14028).
gggatagactcgtaatcaa

SEQ ID NO: 122677 - DNA, 19 bp, Homo sapiens
  siRNA target sequence for RYR2 (NM_001035.1,14012-14030).
gatagactcgtaatcaaca

SEQ ID NO: 122678 - DNA, 19 bp, Homo sapiens
  siRNA target sequence for RYR2 (NM_001035.1,14033-14051).
cagtcatttcccaacaact

SEQ ID NO: 122679 - DNA, 19 bp, Homo sapiens
  siRNA target sequence for RYR2 (NM_001035.1,14104-14122).
cggccgagacagaatcagt

SEQ ID NO: 122680 - DNA, 19 bp, Homo sapiens
  siRNA target sequence for RYR2 (NM_001035.1,14220-14238).
ccattgatgtgaagtatca

SEQ ID NO: 122681 - DNA, 19 bp, Homo sapiens
  siRNA target sequence for RYR2 (NM_001035.1,14284-14302).
cctagcctggtatatgact

SEQ ID NO: 122682 - DNA, 19 bp, Homo sapiens
  siRNA target sequence for RYR2 (NM_001035.1,14285-14303).
ctagcctggtatatgacta

SEQ ID NO: 122683 - DNA, 19 bp, Homo sapiens
  siRNA target sequence for RYR2 (NM_001035.1,14288-14306).
gcctggtatatgactatgt

SEQ ID NO: 122684 - DNA, 19 bp, Homo sapiens
  siRNA target sequence for RYR2 (NM_001035.1,14305-14323).
gtctgttcttggacactat

SEQ ID NO: 122685 - DNA, 19 bp, Homo sapiens
  siRNA target sequence for RYR2 (NM_001035.1,14307-14325).
ctgttcttggacactataa

SEQ ID NO: 122686 - DNA, 19 bp, Homo sapiens
  siRNA target sequence for RYR2 (NM_001035.1,14309-14327).
gttcttggacactataaca

SEQ ID NO: 122687 - DNA, 19 bp, Homo sapiens
  siRNA target sequence for RYR2 (NM_001035.1,14345-14363).
caccttctcgacattgcta

SEQ ID NO: 122688 - DNA, 19 bp, Homo sapiens
  siRNA target sequence for RYR2 (NM_001035.1,14365-14383).
gggattcaagacattaaga

SEQ ID NO: 122689 - DNA, 19 bp, Homo sapiens
  siRNA target sequence for RYR2 (NM_001035.1,14436-14454).
gcttattagctgttgttgt

SEQ ID NO: 122690 - DNA, 19 bp, Homo sapiens
  siRNA target sequence for RYR2 (NM_001035.1,14444-14462).
gctgttgttgtatacctat

SEQ ID NO: 122691 - DNA, 19 bp, Homo sapiens
  siRNA target sequence for RYR2 (NM_001035.1,14445-14463).
ctgttgttgtatacctata

SEQ ID NO: 122692 - DNA, 19 bp, Homo sapiens
  siRNA target sequence for RYR2 (NM_001035.1,14464-14482).
cactgtggtggcattcaat

SEQ ID NO: 122693 - DNA, 19 bp, Homo sapiens
  siRNA target sequence for RYR2 (NM_001035.1,14488-14506).
ccgaaaattctacaataaa

SEQ ID NO: 122694 - DNA, 19 bp, Homo sapiens
  siRNA target sequence for RYR2 (NM_001035.1,14516-14534).
ggtgatacaccagatatga

SEQ ID NO: 122695 - DNA, 19 bp, Homo sapiens
  siRNA target sequence for RYR2 (NM_001035.1,14517-14535).
gtgatacaccagatatgaa

SEQ ID NO: 122696 - DNA, 19 bp, Homo sapiens
  siRNA target sequence for RYR2 (NM_001035.1,14523-14541).
caccagatatgaaatgtga

SEQ ID NO: 122697 - DNA, 19 bp, Homo sapiens
  siRNA target sequence for RYR2 (NM_001035.1,14533-14551).
gaaatgtgacgatatgcta

SEQ ID NO: 122698 - DNA, 19 bp, Homo sapiens
  siRNA target sequence for RYR2 (NM_001035.1,14542-14560).
cgatatgctaacatgctat

SEQ ID NO: 122699 - DNA, 19 bp, Homo sapiens
  siRNA target sequence for RYR2 (NM_001035.1,14543-14561).
gatatgctaacatgctata

SEQ ID NO: 122700 - DNA, 19 bp, Homo sapiens
  siRNA target sequence for RYR2 (NM_001035.1,14595-14613).
gagggatcggggatgaaat

SEQ ID NO: 122701 - DNA, 19 bp, Homo sapiens
  siRNA target sequence for RYR2 (NM_001035.1,14598-14616).
ggatcggggatgaaatcga

SEQ ID NO: 122702 - DNA, 19 bp, Homo sapiens
  siRNA target sequence for RYR2 (NM_001035.1,14599-14617).
gatcggggatgaaatcgaa

SEQ ID NO: 122703 - DNA, 19 bp, Homo sapiens
  siRNA target sequence for RYR2 (NM_001035.1,14618-14636).
gacccagcaggagatgaat

SEQ ID NO: 122704 - DNA, 19 bp, Homo sapiens
  siRNA target sequence for RYR2 (NM_001035.1,14633-14651).
gaatatgagatctatcgaa

SEQ ID NO: 122705 - DNA, 19 bp, Homo sapiens
  siRNA target sequence for RYR2 (NM_001035.1,14639-14657).
gagatctatcgaatcatct

SEQ ID NO: 122706 - DNA, 19 bp, Homo sapiens
  siRNA target sequence for RYR2 (NM_001035.1,14641-14659).
gatctatcgaatcatcttt

SEQ ID NO: 122707 - DNA, 19 bp, Homo sapiens
  siRNA target sequence for RYR2 (NM_001035.1,14700-14718).
ccataatacaaggtctaat

SEQ ID NO: 122708 - DNA, 19 bp, Homo sapiens
  siRNA target sequence for RYR2 (NM_001035.1,14701-14719).
cataatacaaggtctaatt

SEQ ID NO: 122709 - DNA, 19 bp, Homo sapiens
  siRNA target sequence for RYR2 (NM_001035.1,14858-14876).
cacaacttggctaattact

SEQ ID NO: 122710 - DNA, 19 bp, Homo sapiens
  siRNA target sequence for RYR2 (NM_001035.1,14987-15005).
gattgcttccggaaacagt

SEQ ID NO: 122711 - DNA, 19 bp, Homo sapiens
  siRNA target sequence for RYR2 (NM_001035.1,15004-15022).
gtatgaagaccagctaaat

SEQ ID NO: 122712 - DNA, 19 bp, Homo sapiens
  siRNA target sequence for SLC8A1 (NM_021097.1,20-38).
cttgtggagagctcgaatt

SEQ ID NO: 122713 - DNA, 19 bp, Homo sapiens
  siRNA target sequence for SLC8A1 (NM_021097.1,23-41).
gtggagagctcgaattcca

SEQ ID NO: 122714 - DNA, 19 bp, Homo sapiens
  siRNA target sequence for SLC8A1 (NM_021097.1,30-48).
gctcgaattccagaatgat

SEQ ID NO: 122715 - DNA, 19 bp, Homo sapiens
  siRNA target sequence for SLC8A1 (NM_021097.1,86-104).
caacatgcggcgattaagt

SEQ ID NO: 122716 - DNA, 19 bp, Homo sapiens
  siRNA target sequence for SLC8A1 (NM_021097.1,89-107).
catgcggcgattaagtctt

SEQ ID NO: 122717 - DNA, 19 bp, Homo sapiens
  siRNA target sequence for SLC8A1 (NM_021097.1,92-110).
gcggcgattaagtctttca

SEQ ID NO: 122718 - DNA, 19 bp, Homo sapiens
  siRNA target sequence for SLC8A1 (NM_021097.1,163-181).
cccatgtggaccatgtaat

SEQ ID NO: 122719 - DNA, 19 bp, Homo sapiens
  siRNA target sequence for SLC8A1 (NM_021097.1,164-182).
ccatgtggaccatgtaatt

SEQ ID NO: 122720 - DNA, 19 bp, Homo sapiens
  siRNA target sequence for SLC8A1 (NM_021097.1,220-238).
gtgaatgtactggatcata

SEQ ID NO: 122721 - DNA, 19 bp, Homo sapiens
  siRNA target sequence for SLC8A1 (NM_021097.1,229-247).
ctggatcatattactgtaa

SEQ ID NO: 122722 - DNA, 19 bp, Homo sapiens
  siRNA target sequence for SLC8A1 (NM_021097.1,232-250).
gatcatattactgtaagaa

SEQ ID NO: 122723 - DNA, 19 bp, Homo sapiens
  siRNA target sequence for SLC8A1 (NM_021097.1,306-324).
gctagagctactgtgtatt

SEQ ID NO: 122724 - DNA, 19 bp, Homo sapiens
  siRNA target sequence for SLC8A1 (NM_021097.1,373-391).
ggttcatgtcctctataga

SEQ ID NO: 122725 - DNA, 19 bp, Homo sapiens
  siRNA target sequence for SLC8A1 (NM_021097.1,374-392).
gttcatgtcctctatagaa

SEQ ID NO: 122726 - DNA, 19 bp, Homo sapiens
  siRNA target sequence for SLC8A1 (NM_021097.1,438-456).
ggagagaccaccaagacaa

SEQ ID NO: 122727 - DNA, 19 bp, Homo sapiens
  siRNA target sequence for SLC8A1 (NM_021097.1,497-515).
gatggccctgggatcttct

SEQ ID NO: 122728 - DNA, 19 bp, Homo sapiens
  siRNA target sequence for SLC8A1 (NM_021097.1,524-542).
gattctcctttcagtaatt

SEQ ID NO: 122729 - DNA, 19 bp, Homo sapiens
  siRNA target sequence for SLC8A1 (NM_021097.1,543-561).
gaagtgtgtggccataact

SEQ ID NO: 122730 - DNA, 19 bp, Homo sapiens
  siRNA target sequence for SLC8A1 (NM_021097.1,546-564).
gtgtgtggccataacttca

SEQ ID NO: 122731 - DNA, 19 bp, Homo sapiens
  siRNA target sequence for SLC8A1 (NM_021097.1,601-619).
gtgctgcattcaatatgtt

SEQ ID NO: 122732 - DNA, 19 bp, Homo sapiens
  siRNA target sequence for SLC8A1 (NM_021097.1,720-738).
gcctacacctggctttaca

SEQ ID NO: 122733 - DNA, 19 bp, Homo sapiens
  siRNA target sequence for SLC8A1 (NM_021097.1,721-739).
cctacacctggctttacat

SEQ ID NO: 122734 - DNA, 19 bp, Homo sapiens
  siRNA target sequence for SLC8A1 (NM_021097.1,835-853).
cggataggagacttctgtt

SEQ ID NO: 122735 - DNA, 19 bp, Homo sapiens
  siRNA target sequence for SLC8A1 (NM_021097.1,836-854).
ggataggagacttctgttt

SEQ ID NO: 122736 - DNA, 19 bp, Homo sapiens
  siRNA target sequence for SLC8A1 (NM_021097.1,887-905).
caagcagagggggatgatt

SEQ ID NO: 122737 - DNA, 19 bp, Homo sapiens
  siRNA target sequence for SLC8A1 (NM_021097.1,893-911).
gagggggatgattattgaa

SEQ ID NO: 122738 - DNA, 19 bp, Homo sapiens
  siRNA target sequence for SLC8A1 (NM_021097.1,895-913).
gggggatgattattgaaca

SEQ ID NO: 122739 - DNA, 19 bp, Homo sapiens
  siRNA target sequence for SLC8A1 (NM_021097.1,896-914).
ggggatgattattgaacat

SEQ ID NO: 122740 - DNA, 19 bp, Homo sapiens
  siRNA target sequence for SLC8A1 (NM_021097.1,921-939).
gacaggccatcttctaaga

SEQ ID NO: 122741 - DNA, 19 bp, Homo sapiens
  siRNA target sequence for SLC8A1 (NM_021097.1,954-972).
gacgggaaagtggtcaatt

SEQ ID NO: 122742 - DNA, 19 bp, Homo sapiens
  siRNA target sequence for SLC8A1 (NM_021097.1,959-977).
gaaagtggtcaattctcat

SEQ ID NO: 122743 - DNA, 19 bp, Homo sapiens
  siRNA target sequence for SLC8A1 (NM_021097.1,1049-1067).
gcgagaaatggctaggatt

SEQ ID NO: 122744 - DNA, 19 bp, Homo sapiens
  siRNA target sequence for SLC8A1 (NM_021097.1,1109-1127).
gcaattaatagaattagct

SEQ ID NO: 122745 - DNA, 19 bp, Homo sapiens
  siRNA target sequence for SLC8A1 (NM_021097.1,1139-1157).
cctaagtcagcagcaaaaa

SEQ ID NO: 122746 - DNA, 19 bp, Homo sapiens
  siRNA target sequence for SLC8A1 (NM_021097.1,1196-1214).
gactggagctggcaacatt

SEQ ID NO: 122747 - DNA, 19 bp, Homo sapiens
  siRNA target sequence for SLC8A1 (NM_021097.1,1198-1216).
ctggagctggcaacatttt

SEQ ID NO: 122748 - DNA, 19 bp, Homo sapiens
  siRNA target sequence for SLC8A1 (NM_021097.1,1284-1302).
gaaaatgaccctgttagta

SEQ ID NO: 122749 - DNA, 19 bp, Homo sapiens
  siRNA target sequence for SLC8A1 (NM_021097.1,1300-1318).
gtaagatcttctttgaaca

SEQ ID NO: 122750 - DNA, 19 bp, Homo sapiens
  siRNA target sequence for SLC8A1 (NM_021097.1,1373-1391).
cagaggtggtgatttgact

SEQ ID NO: 122751 - DNA, 19 bp, Homo sapiens
  siRNA target sequence for SLC8A1 (NM_021097.1,1377-1395).
ggtggtgatttgactaaca

SEQ ID NO: 122752 - DNA, 19 bp, Homo sapiens
  siRNA target sequence for SLC8A1 (NM_021097.1,1398-1416).
gtgtttgttgacttcagaa

SEQ ID NO: 122753 - DNA, 19 bp, Homo sapiens
  siRNA target sequence for SLC8A1 (NM_021097.1,1431-1449).
gcaaatgctgggtctgatt

SEQ ID NO: 122754 - DNA, 19 bp, Homo sapiens
  siRNA target sequence for SLC8A1 (NM_021097.1,1440-1458).
gggtctgattatgaattta

SEQ ID NO: 122755 - DNA, 19 bp, Homo sapiens
  siRNA target sequence for SLC8A1 (NM_021097.1,1442-1460).
gtctgattatgaatttact

SEQ ID NO: 122756 - DNA, 19 bp, Homo sapiens
  siRNA target sequence for SLC8A1 (NM_021097.1,1444-1462).
ctgattatgaatttactga

SEQ ID NO: 122757 - DNA, 19 bp, Homo sapiens
  siRNA target sequence for SLC8A1 (NM_021097.1,1507-1525).
gagtgggtatcatagatga

SEQ ID NO: 122758 - DNA, 19 bp, Homo sapiens
  siRNA target sequence for SLC8A1 (NM_021097.1,1557-1575).
gtgcatctcagcaatgtca

SEQ ID NO: 122759 - DNA, 19 bp, Homo sapiens
  siRNA target sequence for SLC8A1 (NM_021097.1,1559-1577).
gcatctcagcaatgtcaaa

SEQ ID NO: 122760 - DNA, 19 bp, Homo sapiens
  siRNA target sequence for SLC8A1 (NM_021097.1,1563-1581).
ctcagcaatgtcaaagtat

SEQ ID NO: 122761 - DNA, 19 bp, Homo sapiens
  siRNA target sequence for SLC8A1 (NM_021097.1,1568-1586).
caatgtcaaagtatcttct

SEQ ID NO: 122762 - DNA, 19 bp, Homo sapiens
  siRNA target sequence for SLC8A1 (NM_021097.1,1604-1622).
catactggaagccaatcat

SEQ ID NO: 122763 - DNA, 19 bp, Homo sapiens
  siRNA target sequence for SLC8A1 (NM_021097.1,1610-1628).
ggaagccaatcatgtttct

SEQ ID NO: 122764 - DNA, 19 bp, Homo sapiens
  siRNA target sequence for SLC8A1 (NM_021097.1,1654-1672).
ccactgccactgtaactat

SEQ ID NO: 122765 - DNA, 19 bp, Homo sapiens
  siRNA target sequence for SLC8A1 (NM_021097.1,1655-1673).
cactgccactgtaactatt

SEQ ID NO: 122766 - DNA, 19 bp, Homo sapiens
  siRNA target sequence for SLC8A1 (NM_021097.1,1748-1766).
ggaggtgaaagtattgaga

SEQ ID NO: 122767 - DNA, 19 bp, Homo sapiens
  siRNA target sequence for SLC8A1 (NM_021097.1,1777-1795).
ctcgaggaaatgttatcgt

SEQ ID NO: 122768 - DNA, 19 bp, Homo sapiens
  siRNA target sequence for SLC8A1 (NM_021097.1,1783-1801).
gaaatgttatcgttccata

SEQ ID NO: 122769 - DNA, 19 bp, Homo sapiens
  siRNA target sequence for SLC8A1 (NM_021097.1,1788-1806).
gttatcgttccatataaaa

SEQ ID NO: 122770 - DNA, 19 bp, Homo sapiens
  siRNA target sequence for SLC8A1 (NM_021097.1,1825-1843).
gaggtggaggggaggattt

SEQ ID NO: 122771 - DNA, 19 bp, Homo sapiens
  siRNA target sequence for SLC8A1 (NM_021097.1,1894-1912).
caatatcagtcaaggtaat

SEQ ID NO: 122772 - DNA, 19 bp, Homo sapiens
  siRNA target sequence for SLC8A1 (NM_021097.1,2010-2028).
gagcttggtggcttcacaa

SEQ ID NO: 122773 - DNA, 19 bp, Homo sapiens
  siRNA target sequence for SLC8A1 (NM_021097.1,2013-2031).
cttggtggcttcacaataa

SEQ ID NO: 122774 - DNA, 19 bp, Homo sapiens
  siRNA target sequence for SLC8A1 (NM_021097.1,2088-2106).
ccgattctctctactgtaa

SEQ ID NO: 122775 - DNA, 19 bp, Homo sapiens
  siRNA target sequence for SLC8A1 (NM_021097.1,2108-2126).
caccattgcagacgaatat

SEQ ID NO: 122776 - DNA, 19 bp, Homo sapiens
  siRNA target sequence for SLC8A1 (NM_021097.1,2450-2468).
cttcgtcccccctactgaa

SEQ ID NO: 122777 - DNA, 19 bp, Homo sapiens
  siRNA target sequence for SLC8A1 (NM_021097.1,2479-2497).
gctgggcgtgtttcattgt

SEQ ID NO: 122778 - DNA, 19 bp, Homo sapiens
  siRNA target sequence for SLC8A1 (NM_021097.1,2600-2618).
cgtcgcacttggaacatca

SEQ ID NO: 122779 - DNA, 19 bp, Homo sapiens
  siRNA target sequence for SLC8A1 (NM_021097.1,2769-2787).
ggggaacagttcaaagtgt

SEQ ID NO: 122780 - DNA, 19 bp, Homo sapiens
  siRNA target sequence for SLC8A1 (NM_021097.1,2825-2843).
catttttgctttcatcaat

SEQ ID NO: 122781 - DNA, 19 bp, Homo sapiens
  siRNA target sequence for SLC8A1 (NM_021097.1,2937-2955).
ctcctatggctcttgtaca

SEQ ID NO: 122782 - DNA, 19 bp, Homo sapiens
  siRNA target sequence for SLC8A1 (NM_021097.1,2939-2957).
cctatggctcttgtacatt

SEQ ID NO: 122783 - DNA, 19 bp, Homo sapiens
  siRNA target sequence for SLC8A1 (NM_021097.1,2973-2991).
gaggcctactgccacataa

SEQ ID NO: 122784 - DNA, 19 bp, Homo sapiens
  siRNA target sequence for SLC8A3 (NM_033262.3,977-995).
gccagggtcattgtctatt

SEQ ID NO: 122785 - DNA, 19 bp, Homo sapiens
  siRNA target sequence for SLC8A3 (NM_033262.3,998-1016).
gtggccctgatatacatgt

SEQ ID NO: 122786 - DNA, 19 bp, Homo sapiens
  siRNA target sequence for SLC8A3 (NM_033262.3,1042-1060).
ccgcttcatggcatctatt

SEQ ID NO: 122787 - DNA, 19 bp, Homo sapiens
  siRNA target sequence for SLC8A3 (NM_033262.3,1219-1237).
gtgtggtcatgggttcatt

SEQ ID NO: 122788 - DNA, 19 bp, Homo sapiens
  siRNA target sequence for SLC8A3 (NM_033262.3,1249-1267).
gggaccttctaccattgta

SEQ ID NO: 122789 - DNA, 19 bp, Homo sapiens
  siRNA target sequence for SLC8A3 (NM_033262.3,1274-1292).
gcagccttcaacatgttca

SEQ ID NO: 122790 - DNA, 19 bp, Homo sapiens
  siRNA target sequence for SLC8A3 (NM_033262.3,1275-1293).
cagccttcaacatgttcat

SEQ ID NO: 122791 - DNA, 19 bp, Homo sapiens
  siRNA target sequence for SLC8A3 (NM_033262.3,1349-1367).
catctacgagtcttcttca

SEQ ID NO: 122792 - DNA, 19 bp, Homo sapiens
  siRNA target sequence for SLC8A3 (NM_033262.3,1352-1370).
ctacgagtcttcttcatca

SEQ ID NO: 122793 - DNA, 19 bp, Homo sapiens
  siRNA target sequence for SLC8A3 (NM_033262.3,1372-1390).
cgctgcttggagtatcttt

SEQ ID NO: 122794 - DNA, 19 bp, Homo sapiens
  siRNA target sequence for SLC8A3 (NM_033262.3,1392-1410).
cctacatctggctctatat

SEQ ID NO: 122795 - DNA, 19 bp, Homo sapiens
  siRNA target sequence for SLC8A3 (NM_033262.3,1565-1583).
cgaggaattatcatagaga

SEQ ID NO: 122796 - DNA, 19 bp, Homo sapiens
  siRNA target sequence for SLC8A3 (NM_033262.3,2026-2044).
catgtcaaagaccatgtat

SEQ ID NO: 122797 - DNA, 19 bp, Homo sapiens
  siRNA target sequence for SLC8A3 (NM_033262.3,2078-2096).
gcaggggctgactatgagt

SEQ ID NO: 122798 - DNA, 19 bp, Homo sapiens
  siRNA target sequence for SLC8A3 (NM_033262.3,2143-2161).
gttctccgtgggcataatt

SEQ ID NO: 122799 - DNA, 19 bp, Homo sapiens
  siRNA target sequence for SLC8A3 (NM_033262.3,2182-2200).
ggatgaacacttctttgta

SEQ ID NO: 122800 - DNA, 19 bp, Homo sapiens
  siRNA target sequence for SLC8A3 (NM_033262.3,2183-2201).
gatgaacacttctttgtaa

SEQ ID NO: 122801 - DNA, 19 bp, Homo sapiens
  siRNA target sequence for SLC8A3 (NM_033262.3,2242-2260).
ggggatgcctccagcaata

SEQ ID NO: 122802 - DNA, 19 bp, Homo sapiens
  siRNA target sequence for SLC8A3 (NM_033262.3,2243-2261).
gggatgcctccagcaatat

SEQ ID NO: 122803 - DNA, 19 bp, Homo sapiens
  siRNA target sequence for SLC8A3 (NM_033262.3,2438-2456).
gtcatcgtcccctttagga

SEQ ID NO: 122804 - DNA, 19 bp, Homo sapiens
  siRNA target sequence for SLC8A3 (NM_033262.3,2446-2464).
cccctttaggacagtagaa

SEQ ID NO: 122805 - DNA, 19 bp, Homo sapiens
  siRNA target sequence for SLC8A3 (NM_033262.3,2478-2496).
gtggcggtgaggactttga

SEQ ID NO: 122806 - DNA, 19 bp, Homo sapiens
  siRNA target sequence for SLC8A3 (NM_033262.3,2639-2657).
cagaaagcgctcctgttat

SEQ ID NO: 122807 - DNA, 19 bp, Homo sapiens
  siRNA target sequence for SLC8A3 (NM_033262.3,2641-2659).
gaaagcgctcctgttatct

SEQ ID NO: 122808 - DNA, 19 bp, Homo sapiens
  siRNA target sequence for SLC8A3 (NM_033262.3,2728-2746).
gggtgaacaccccaaacta

SEQ ID NO: 122809 - DNA, 19 bp, Homo sapiens
  siRNA target sequence for SLC8A3 (NM_033262.3,2740-2758).
caaactagaagtcatcatt

SEQ ID NO: 122810 - DNA, 19 bp, Homo sapiens
  siRNA target sequence for SLC8A3 (NM_033262.3,2838-2856).
cctggagggaccagttcat

SEQ ID NO: 122811 - DNA, 19 bp, Homo sapiens
  siRNA target sequence for SLC8A3 (NM_033262.3,3094-3112).
cattggtctcaaagattca

SEQ ID NO: 122812 - DNA, 19 bp, Homo sapiens
  siRNA target sequence for SLC8A3 (NM_033262.3,3145-3163).
ctctgtcccagatacgttt

SEQ ID NO: 122813 - DNA, 19 bp, Homo sapiens
  siRNA target sequence for SLC8A3 (NM_033262.3,3372-3390).
gcatcagcgtgctcttgta

SEQ ID NO: 122814 - DNA, 19 bp, Homo sapiens
  siRNA target sequence for SLC8A3 (NM_033262.3,3498-3516).
cactagaggcctattgcta

SEQ ID NO: 122815 - DNA, 19 bp, Homo sapiens
  siRNA target sequence for SLC8A3 (NM_058240.2,2544-2562).
ccataagggttaaaatagt

SEQ ID NO: 122816 - DNA, 19 bp, Homo sapiens
  siRNA target sequence for SLC8A3 (NM_058240.2,2623-2641).
gatggaacgtggaatatca

SEQ ID NO: 122817 - DNA, 19 bp, Homo sapiens
  siRNA target sequence for SLC8A3 (NM_182933.1,2524-2542).
gaatgatgaaactgtatgt

SEQ ID NO: 122818 - DNA, 19 bp, Homo sapiens
  siRNA target sequence for STRN (NM_003162.1,505-523).
ctacaggaggtgggttata

SEQ ID NO: 122819 - DNA, 19 bp, Homo sapiens
  siRNA target sequence for STRN (NM_003162.1,562-580).
gctttgttgggcttttcaa

SEQ ID NO: 122820 - DNA, 19 bp, Homo sapiens
  siRNA target sequence for STRN (NM_003162.1,689-707).
ctgcctccgtgctggataa

SEQ ID NO: 122821 - DNA, 19 bp, Homo sapiens
  siRNA target sequence for STRN (NM_003162.1,691-709).
gcctccgtgctggataatt

SEQ ID NO: 122822 - DNA, 19 bp, Homo sapiens
  siRNA target sequence for STRN (NM_003162.1,692-710).
cctccgtgctggataattt

SEQ ID NO: 122823 - DNA, 19 bp, Homo sapiens
  siRNA target sequence for STRN (NM_003162.1,695-713).
ccgtgctggataatttcaa

SEQ ID NO: 122824 - DNA, 19 bp, Homo sapiens
  siRNA target sequence for STRN (NM_003162.1,778-796).
gagaaaagcgtcattgata

SEQ ID NO: 122825 - DNA, 19 bp, Homo sapiens
  siRNA target sequence for STRN (NM_003162.1,780-798).
gaaaagcgtcattgatact

SEQ ID NO: 122826 - DNA, 19 bp, Homo sapiens
  siRNA target sequence for STRN (NM_003162.1,786-804).
cgtcattgatacttcaaca

SEQ ID NO: 122827 - DNA, 19 bp, Homo sapiens
  siRNA target sequence for STRN (NM_003162.1,793-811).
gatacttcaacaattgtta

SEQ ID NO: 122828 - DNA, 19 bp, Homo sapiens
  siRNA target sequence for STRN (NM_003162.1,825-843).
gcctgacagcggtgaagat

SEQ ID NO: 122829 - DNA, 19 bp, Homo sapiens
  siRNA target sequence for STRN (NM_003162.1,835-853).
ggtgaagatcgagatacaa

SEQ ID NO: 122830 - DNA, 19 bp, Homo sapiens
  siRNA target sequence for STRN (NM_003162.1,836-854).
gtgaagatcgagatacaaa

SEQ ID NO: 122831 - DNA, 19 bp, Homo sapiens
  siRNA target sequence for STRN (NM_003162.1,859-877).
gctctaaaggagtttgact

SEQ ID NO: 122832 - DNA, 19 bp, Homo sapiens
  siRNA target sequence for STRN (NM_003162.1,860-878).
ctctaaaggagtttgactt

SEQ ID NO: 122833 - DNA, 19 bp, Homo sapiens
  siRNA target sequence for STRN (NM_003162.1,984-1002).
ccagggagtaattaccaaa

SEQ ID NO: 122834 - DNA, 19 bp, Homo sapiens
  siRNA target sequence for STRN (NM_003162.1,988-1006).
ggagtaattaccaaactca

SEQ ID NO: 122835 - DNA, 19 bp, Homo sapiens
  siRNA target sequence for STRN (NM_003162.1,989-1007).
gagtaattaccaaactcaa

SEQ ID NO: 122836 - DNA, 19 bp, Homo sapiens
  siRNA target sequence for STRN (NM_003162.1,1050-1068).
gaggcccaataggtcaaaa

SEQ ID NO: 122837 - DNA, 19 bp, Homo sapiens
  siRNA target sequence for STRN (NM_003162.1,1052-1070).
ggcccaataggtcaaaact

SEQ ID NO: 122838 - DNA, 19 bp, Homo sapiens
  siRNA target sequence for STRN (NM_003162.1,1053-1071).
gcccaataggtcaaaacta

SEQ ID NO: 122839 - DNA, 19 bp, Homo sapiens
  siRNA target sequence for STRN (NM_003162.1,1055-1073).
ccaataggtcaaaactaca

SEQ ID NO: 122840 - DNA, 19 bp, Homo sapiens
  siRNA target sequence for STRN (NM_003162.1,1056-1074).
caataggtcaaaactacaa

SEQ ID NO: 122841 - DNA, 19 bp, Homo sapiens
  siRNA target sequence for STRN (NM_003162.1,1072-1090).
caagatatgcttgctaatt

SEQ ID NO: 122842 - DNA, 19 bp, Homo sapiens
  siRNA target sequence for STRN (NM_003162.1,1293-1311).
ccttacggtggccaatgaa

SEQ ID NO: 122843 - DNA, 19 bp, Homo sapiens
  siRNA target sequence for STRN (NM_003162.1,1309-1327).
gaagcagactcactaactt

SEQ ID NO: 122844 - DNA, 19 bp, Homo sapiens
  siRNA target sequence for STRN (NM_003162.1,1313-1331).
cagactcactaacttatga

SEQ ID NO: 122845 - DNA, 19 bp, Homo sapiens
  siRNA target sequence for STRN (NM_003162.1,1315-1333).
gactcactaacttatgata

SEQ ID NO: 122846 - DNA, 19 bp, Homo sapiens
  siRNA target sequence for STRN (NM_003162.1,1317-1335).
ctcactaacttatgatata

SEQ ID NO: 122847 - DNA, 19 bp, Homo sapiens
  siRNA target sequence for STRN (NM_003162.1,1321-1339).
ctaacttatgatatagcaa

SEQ ID NO: 122848 - DNA, 19 bp, Homo sapiens
  siRNA target sequence for STRN (NM_003162.1,1325-1343).
cttatgatatagcaaacaa

SEQ ID NO: 122849 - DNA, 19 bp, Homo sapiens
  siRNA target sequence for STRN (NM_003162.1,1372-1390).
cctaagtttacattgagaa

SEQ ID NO: 122850 - DNA, 19 bp, Homo sapiens
  siRNA target sequence for STRN (NM_003162.1,1382-1400).
cattgagaagtcactttga

SEQ ID NO: 122851 - DNA, 19 bp, Homo sapiens
  siRNA target sequence for STRN (NM_003162.1,1426-1444).
cccattgagcctgttttga

SEQ ID NO: 122852 - DNA, 19 bp, Homo sapiens
  siRNA target sequence for STRN (NM_003162.1,1427-1445).
ccattgagcctgttttgat

SEQ ID NO: 122853 - DNA, 19 bp, Homo sapiens
  siRNA target sequence for STRN (NM_003162.1,1428-1446).
cattgagcctgttttgata

SEQ ID NO: 122854 - DNA, 19 bp, Homo sapiens
  siRNA target sequence for STRN (NM_003162.1,1562-1580).
cagtgctttgtgtggtaat

SEQ ID NO: 122855 - DNA, 19 bp, Homo sapiens
  siRNA target sequence for STRN (NM_003162.1,1632-1650).
gggctggaataccactaat

SEQ ID NO: 122856 - DNA, 19 bp, Homo sapiens
  siRNA target sequence for STRN (NM_003162.1,1656-1674).
catcgacccctatgattct

SEQ ID NO: 122857 - DNA, 19 bp, Homo sapiens
  siRNA target sequence for STRN (NM_003162.1,1659-1677).
cgacccctatgattcttat

SEQ ID NO: 122858 - DNA, 19 bp, Homo sapiens
  siRNA target sequence for STRN (NM_003162.1,1662-1680).
cccctatgattcttatgat

SEQ ID NO: 122859 - DNA, 19 bp, Homo sapiens
  siRNA target sequence for STRN (NM_003162.1,1725-1743).
ctggggtttggcttatagt

SEQ ID NO: 122860 - DNA, 19 bp, Homo sapiens
  siRNA target sequence for STRN (NM_003162.1,1745-1763).
cagcacatcagcgtttgtt

SEQ ID NO: 122861 - DNA, 19 bp, Homo sapiens
  siRNA target sequence for STRN (NM_003162.1,1747-1765).
gcacatcagcgtttgttgt

SEQ ID NO: 122862 - DNA, 19 bp, Homo sapiens
  siRNA target sequence for STRN (NM_003162.1,1780-1798).
ggcactctgcgtttatgga

SEQ ID NO: 122863 - DNA, 19 bp, Homo sapiens
  siRNA target sequence for STRN (NM_003162.1,1781-1799).
gcactctgcgtttatggaa

SEQ ID NO: 122864 - DNA, 19 bp, Homo sapiens
  siRNA target sequence for STRN (NM_003162.1,1782-1800).
cactctgcgtttatggaat

SEQ ID NO: 122865 - DNA, 19 bp, Homo sapiens
  siRNA target sequence for STRN (NM_003162.1,1786-1804).
ctgcgtttatggaatacaa

SEQ ID NO: 122866 - DNA, 19 bp, Homo sapiens
  siRNA target sequence for STRN (NM_003162.1,1809-1827).
ggttgctccagcactaagt

SEQ ID NO: 122867 - DNA, 19 bp, Homo sapiens
  siRNA target sequence for STRN (NM_003162.1,1813-1831).
gctccagcactaagtgtat

SEQ ID NO: 122868 - DNA, 19 bp, Homo sapiens
  siRNA target sequence for STRN (NM_003162.1,1883-1901).
gtgacccgagccatatggt

SEQ ID NO: 122869 - DNA, 19 bp, Homo sapiens
  siRNA target sequence for STRN (NM_003162.1,1954-1972).
cgcattctcactttagaat

SEQ ID NO: 122870 - DNA, 19 bp, Homo sapiens
  siRNA target sequence for STRN (NM_003162.1,1962-1980).
cactttagaatccaatgta

SEQ ID NO: 122871 - DNA, 19 bp, Homo sapiens
  siRNA target sequence for STRN (NM_003162.1,1969-1987).
gaatccaatgtagatacaa

SEQ ID NO: 122872 - DNA, 19 bp, Homo sapiens
  siRNA target sequence for STRN (NM_003162.1,2000-2018).
cctgccaaataaatagagt

SEQ ID NO: 122873 - DNA, 19 bp, Homo sapiens
  siRNA target sequence for STRN (NM_003162.1,2064-2082).
caggcacatcaaattctat

SEQ ID NO: 122874 - DNA, 19 bp, Homo sapiens
  siRNA target sequence for STRN (NM_003162.1,2066-2084).
ggcacatcaaattctatga

SEQ ID NO: 122875 - DNA, 19 bp, Homo sapiens
  siRNA target sequence for STRN (NM_003162.1,2067-2085).
gcacatcaaattctatgat

SEQ ID NO: 122876 - DNA, 19 bp, Homo sapiens
  siRNA target sequence for STRN (NM_003162.1,2068-2086).
cacatcaaattctatgata

SEQ ID NO: 122877 - DNA, 19 bp, Homo sapiens
  siRNA target sequence for STRN (NM_003162.1,2152-2170).
gatcccaatggcctttact

SEQ ID NO: 122878 - DNA, 19 bp, Homo sapiens
  siRNA target sequence for STRN (NM_003162.1,2156-2174).
ccaatggcctttacttgat

SEQ ID NO: 122879 - DNA, 19 bp, Homo sapiens
  siRNA target sequence for STRN (NM_003162.1,2181-2199).
cagtcatgactgttcaata

SEQ ID NO: 122880 - DNA, 19 bp, Homo sapiens
  siRNA target sequence for STRN (NM_003162.1,2185-2203).
catgactgttcaatacgtt

SEQ ID NO: 122881 - DNA, 19 bp, Homo sapiens
  siRNA target sequence for STRN (NM_003162.1,2188-2206).
gactgttcaatacgtttat

SEQ ID NO: 122882 - DNA, 19 bp, Homo sapiens
  siRNA target sequence for STRN (NM_003162.1,2192-2210).
gttcaatacgtttatggaa

SEQ ID NO: 122883 - DNA, 19 bp, Homo sapiens
  siRNA target sequence for STRN (NM_003162.1,2243-2261).
cagctcatcgaaaaaagtt

SEQ ID NO: 122884 - DNA, 19 bp, Homo sapiens
  siRNA target sequence for STRN (NM_003162.1,2259-2277).
gtttgaagaatcgattcat

SEQ ID NO: 122885 - DNA, 19 bp, Homo sapiens
  siRNA target sequence for STRN (NM_003162.1,2270-2288).
cgattcatgatgtagcttt

SEQ ID NO: 122886 - DNA, 19 bp, Homo sapiens
  siRNA target sequence for STRN (NM_003162.1,2290-2308).
cacccatccaaatgctata

SEQ ID NO: 122887 - DNA, 19 bp, Homo sapiens
  siRNA target sequence for STRN (NM_003162.1,2292-2310).
cccatccaaatgctatata

SEQ ID NO: 122888 - DNA, 19 bp, Homo sapiens
  siRNA target sequence for STRN (NM_003162.1,2324-2342).
ctgacgcactggctaaagt

SEQ ID NO: 122889 - DNA, 19 bp, Homo sapiens
  siRNA target sequence for STRN (NM_003162.1,2326-2344).
gacgcactggctaaagtct

SEQ ID NO: 122890 - DNA, 19 bp, Homo sapiens
  siRNA target sequence for STRN3 (NM_014574.2,483-501).
ccggattgcatttctacaa

SEQ ID NO: 122891 - DNA, 19 bp, Homo sapiens
  siRNA target sequence for STRN3 (NM_014574.2,528-546).
gaagaaggacttagtaaga

SEQ ID NO: 122892 - DNA, 19 bp, Homo sapiens
  siRNA target sequence for STRN3 (NM_014574.2,534-552).
ggacttagtaagaagaata

SEQ ID NO: 122893 - DNA, 19 bp, Homo sapiens
  siRNA target sequence for STRN3 (NM_014574.2,555-573).
gatgttagagtatgcatta

SEQ ID NO: 122894 - DNA, 19 bp, Homo sapiens
  siRNA target sequence for STRN3 (NM_014574.2,691-709).
cctcagaatagccagttaa

SEQ ID NO: 122895 - DNA, 19 bp, Homo sapiens
  siRNA target sequence for STRN3 (NM_014574.2,694-712).
cagaatagccagttaacgt

SEQ ID NO: 122896 - DNA, 19 bp, Homo sapiens
  siRNA target sequence for STRN3 (NM_014574.2,717-735).
gcaaggcagacagctttta

SEQ ID NO: 122897 - DNA, 19 bp, Homo sapiens
  siRNA target sequence for STRN3 (NM_014574.2,745-763).
cttcaggaagtaggttata

SEQ ID NO: 122898 - DNA, 19 bp, Homo sapiens
  siRNA target sequence for STRN3 (NM_014574.2,792-810).
gcgggtaaggtcattactt

SEQ ID NO: 122899 - DNA, 19 bp, Homo sapiens
  siRNA target sequence for STRN3 (NM_014574.2,801-819).
gtcattacttggactatct

SEQ ID NO: 122900 - DNA, 19 bp, Homo sapiens
  siRNA target sequence for STRN3 (NM_014574.2,914-932).
ggtcctctggtgatgttct

SEQ ID NO: 122901 - DNA, 19 bp, Homo sapiens
  siRNA target sequence for STRN3 (NM_014574.2,915-933).
gtcctctggtgatgttctt

SEQ ID NO: 122902 - DNA, 19 bp, Homo sapiens
  siRNA target sequence for STRN3 (NM_014574.2,928-946).
gttcttgagacgttcaatt

SEQ ID NO: 122903 - DNA, 19 bp, Homo sapiens
  siRNA target sequence for STRN3 (NM_014574.2,931-949).
cttgagacgttcaatttct

SEQ ID NO: 122904 - DNA, 19 bp, Homo sapiens
  siRNA target sequence for STRN3 (NM_014574.2,1018-1036).
gacaaacatcggatgaata

SEQ ID NO: 122905 - DNA, 19 bp, Homo sapiens
  siRNA target sequence for STRN3 (NM_014574.2,1024-1042).
catcggatgaataaacata

SEQ ID NO: 122906 - DNA, 19 bp, Homo sapiens
  siRNA target sequence for STRN3 (NM_014574.2,1027-1045).
cggatgaataaacataaaa

SEQ ID NO: 122907 - DNA, 19 bp, Homo sapiens
  siRNA target sequence for STRN3 (NM_014574.2,1076-1094).
ctgacgatcctgatactga

SEQ ID NO: 122908 - DNA, 19 bp, Homo sapiens
  siRNA target sequence for STRN3 (NM_014574.2,1180-1198).
gaatgggctgaaccaataa

SEQ ID NO: 122909 - DNA, 19 bp, Homo sapiens
  siRNA target sequence for STRN3 (NM_014574.2,1184-1202).
gggctgaaccaataacgtt

SEQ ID NO: 122910 - DNA, 19 bp, Homo sapiens
  siRNA target sequence for STRN3 (NM_014574.2,1185-1203).
ggctgaaccaataacgttt

SEQ ID NO: 122911 - DNA, 19 bp, Homo sapiens
  siRNA target sequence for STRN3 (NM_014574.2,1189-1207).
gaaccaataacgtttccat

SEQ ID NO: 122912 - DNA, 19 bp, Homo sapiens
  siRNA target sequence for STRN3 (NM_014574.2,1210-1228).
ggaggaggcaagtcattta

SEQ ID NO: 122913 - DNA, 19 bp, Homo sapiens
  siRNA target sequence for STRN3 (NM_014574.2,1279-1297).
gcagacttgacggtaacaa

SEQ ID NO: 122914 - DNA, 19 bp, Homo sapiens
  siRNA target sequence for STRN3 (NM_014574.2,1280-1298).
cagacttgacggtaacaaa

SEQ ID NO: 122915 - DNA, 19 bp, Homo sapiens
  siRNA target sequence for STRN3 (NM_014574.2,1284-1302).
cttgacggtaacaaatgat

SEQ ID NO: 122916 - DNA, 19 bp, Homo sapiens
  siRNA target sequence for STRN3 (NM_014574.2,1341-1359).
ctttcgaaagacatggaat

SEQ ID NO: 122917 - DNA, 19 bp, Homo sapiens
  siRNA target sequence for STRN3 (NM_014574.2,1350-1368).
gacatggaatcccaagtat

SEQ ID NO: 122918 - DNA, 19 bp, Homo sapiens
  siRNA target sequence for STRN3 (NM_014574.2,1355-1373).
ggaatcccaagtatacact

SEQ ID NO: 122919 - DNA, 19 bp, Homo sapiens
  siRNA target sequence for STRN3 (NM_014574.2,1356-1374).
gaatcccaagtatacacta

SEQ ID NO: 122920 - DNA, 19 bp, Homo sapiens
  siRNA target sequence for STRN3 (NM_014574.2,1370-1388).
cactacgtagccattttga

SEQ ID NO: 122921 - DNA, 19 bp, Homo sapiens
  siRNA target sequence for STRN3 (NM_014574.2,1390-1408).
ggagtacgggcattagctt

SEQ ID NO: 122922 - DNA, 19 bp, Homo sapiens
  siRNA target sequence for STRN3 (NM_014574.2,1391-1409).
gagtacgggcattagcttt

SEQ ID NO: 122923 - DNA, 19 bp, Homo sapiens
  siRNA target sequence for STRN3 (NM_014574.2,1447-1465).
gaccataccctgaaacttt

SEQ ID NO: 122924 - DNA, 19 bp, Homo sapiens
  siRNA target sequence for STRN3 (NM_014574.2,1491-1509).
caaaaagagtgcctcttta

SEQ ID NO: 122925 - DNA, 19 bp, Homo sapiens
  siRNA target sequence for STRN3 (NM_014574.2,1545-1563).
cggccctgttctgtcatta

SEQ ID NO: 122926 - DNA, 19 bp, Homo sapiens
  siRNA target sequence for STRN3 (NM_014574.2,1548-1566).
ccctgttctgtcattagct

SEQ ID NO: 122927 - DNA, 19 bp, Homo sapiens
  siRNA target sequence for STRN3 (NM_014574.2,1549-1567).
cctgttctgtcattagcta

SEQ ID NO: 122928 - DNA, 19 bp, Homo sapiens
  siRNA target sequence for STRN3 (NM_014574.2,1557-1575).
gtcattagctattagttct

SEQ ID NO: 122929 - DNA, 19 bp, Homo sapiens
  siRNA target sequence for STRN3 (NM_014574.2,1589-1607).
gttttagtggtggtattga

SEQ ID NO: 122930 - DNA, 19 bp, Homo sapiens
  siRNA target sequence for STRN3 (NM_014574.2,1613-1631).
ccatccagtggtggaatat

SEQ ID NO: 122931 - DNA, 19 bp, Homo sapiens
  siRNA target sequence for STRN3 (NM_014574.2,1637-1655).
gtcccagtgtagatccata

SEQ ID NO: 122932 - DNA, 19 bp, Homo sapiens
  siRNA target sequence for STRN3 (NM_014574.2,1640-1658).
ccagtgtagatccatatga

SEQ ID NO: 122933 - DNA, 19 bp, Homo sapiens
  siRNA target sequence for STRN3 (NM_014574.2,1645-1663).
gtagatccatatgatacat

SEQ ID NO: 122934 - DNA, 19 bp, Homo sapiens
  siRNA target sequence for STRN3 (NM_014574.2,1661-1679).
catatgagccaaatgttct

SEQ ID NO: 122935 - DNA, 19 bp, Homo sapiens
  siRNA target sequence for STRN3 (NM_014574.2,1686-1704).
cactttagttggtcataca

SEQ ID NO: 122936 - DNA, 19 bp, Homo sapiens
  siRNA target sequence for STRN3 (NM_014574.2,1711-1729).
gtttggggtcttgcttata

SEQ ID NO: 122937 - DNA, 19 bp, Homo sapiens
  siRNA target sequence for STRN3 (NM_014574.2,1733-1751).
gcataaaaaatcaattact

SEQ ID NO: 122938 - DNA, 19 bp, Homo sapiens
  siRNA target sequence for STRN3 (NM_014574.2,1769-1787).
gcactgttaggttatggaa

SEQ ID NO: 122939 - DNA, 19 bp, Homo sapiens
  siRNA target sequence for STRN3 (NM_014574.2,1805-1823).
catgtatttgcacttacaa

SEQ ID NO: 122940 - DNA, 19 bp, Homo sapiens
  siRNA target sequence for STRN3 (NM_014574.2,1836-1854).
gcatggaatacctacatca

SEQ ID NO: 122941 - DNA, 19 bp, Homo sapiens
  siRNA target sequence for STRN3 (NM_014574.2,1868-1886).
gctgtgatccagctcatat

SEQ ID NO: 122942 - DNA, 19 bp, Homo sapiens
  siRNA target sequence for STRN3 (NM_014574.2,1873-1891).
gatccagctcatatggtaa

SEQ ID NO: 122943 - DNA, 19 bp, Homo sapiens
  siRNA target sequence for STRN3 (NM_014574.2,1902-1920).
cactggtagtgcagtaatt

SEQ ID NO: 122944 - DNA, 19 bp, Homo sapiens
  siRNA target sequence for STRN3 (NM_014574.2,1907-1925).
gtagtgcagtaatttatga

SEQ ID NO: 122945 - DNA, 19 bp, Homo sapiens
  siRNA target sequence for STRN3 (NM_014574.2,1941-1959).
gtcattggtgatactttca

SEQ ID NO: 122946 - DNA, 19 bp, Homo sapiens
  siRNA target sequence for STRN3 (NM_014574.2,1966-1984).
gtagattctggtttacaat

SEQ ID NO: 122947 - DNA, 19 bp, Homo sapiens
  siRNA target sequence for STRN3 (NM_014574.2,1973-1991).
ctggtttacaatctaataa

SEQ ID NO: 122948 - DNA, 19 bp, Homo sapiens
  siRNA target sequence for STRN3 (NM_014574.2,1976-1994).
gtttacaatctaataatca

SEQ ID NO: 122949 - DNA, 19 bp, Homo sapiens
  siRNA target sequence for STRN3 (NM_014574.2,1993-2011).
catatcaacagagtagtaa

SEQ ID NO: 122950 - DNA, 19 bp, Homo sapiens
  siRNA target sequence for STRN3 (NM_014574.2,1998-2016).
caacagagtagtaagtcat

SEQ ID NO: 122951 - DNA, 19 bp, Homo sapiens
  siRNA target sequence for STRN3 (NM_014574.2,2018-2036).
ccacacttcctgttacaat

SEQ ID NO: 122952 - DNA, 19 bp, Homo sapiens
  siRNA target sequence for STRN3 (NM_014574.2,2019-2037).
cacacttcctgttacaata

SEQ ID NO: 122953 - DNA, 19 bp, Homo sapiens
  siRNA target sequence for STRN3 (NM_014574.2,2033-2051).
caataactgctcatgaaga

SEQ ID NO: 122954 - DNA, 19 bp, Homo sapiens
  siRNA target sequence for STRN3 (NM_014574.2,2058-2076).
catcaaattttttgacaat

SEQ ID NO: 122955 - DNA, 19 bp, Homo sapiens
  siRNA target sequence for STRN3 (NM_014574.2,2110-2128).
cacttggatgctgttacaa

SEQ ID NO: 122956 - DNA, 19 bp, Homo sapiens
  siRNA target sequence for STRN3 (NM_014574.2,2129-2147).
gtctagcagtagatcctaa

SEQ ID NO: 122957 - DNA, 19 bp, Homo sapiens
  siRNA target sequence for STRN3 (NM_014574.2,2211-2229).
gacatgtgtgcaagaaata

SEQ ID NO: 122958 - DNA, 19 bp, Homo sapiens
  siRNA target sequence for STRN3 (NM_014574.2,2318-2336).
ctcttgccaaagtatttgt

SEQ ID NO: 122959 - DNA, 19 bp, Homo sapiens
  siRNA target sequence for STRN3 (NM_014574.2,2320-2338).
cttgccaaagtatttgtat

SEQ ID NO: 122960 - DNA, 19 bp, Homo sapiens
  siRNA target sequence for STRN4 (NM_013403.1,350-368).
ggatcaagatgctagagta

SEQ ID NO: 122961 - DNA, 19 bp, Homo sapiens
  siRNA target sequence for STRN4 (NM_013403.1,381-399).
ggaaagggccaaatatcat

SEQ ID NO: 122962 - DNA, 19 bp, Homo sapiens
  siRNA target sequence for STRN4 (NM_013403.1,388-406).
gccaaatatcataaactga

SEQ ID NO: 122963 - DNA, 19 bp, Homo sapiens
  siRNA target sequence for STRN4 (NM_013403.1,893-911).
ctctggtgcccgaaatgga

SEQ ID NO: 122964 - DNA, 19 bp, Homo sapiens
  siRNA target sequence for STRN4 (NM_013403.1,943-961).
gctatcaatgagtttgatt

SEQ ID NO: 122965 - DNA, 19 bp, Homo sapiens
  siRNA target sequence for STRN4 (NM_013403.1,1093-1111).
gggctgcccccaaaagtga

SEQ ID NO: 122966 - DNA, 19 bp, Homo sapiens
  siRNA target sequence for STRN4 (NM_013403.1,1255-1273).
gacagcaaagatgctttta

SEQ ID NO: 122967 - DNA, 19 bp, Homo sapiens
  siRNA target sequence for STRN4 (NM_013403.1,1309-1327).
cactacgacggcattcgtt

SEQ ID NO: 122968 - DNA, 19 bp, Homo sapiens
  siRNA target sequence for STRN4 (NM_013403.1,1408-1426).
gcggtcacggccaagaaga

SEQ ID NO: 122969 - DNA, 19 bp, Homo sapiens
  siRNA target sequence for STRN4 (NM_013403.1,1433-1451).
cgctagatgtggaacctat

SEQ ID NO: 122970 - DNA, 19 bp, Homo sapiens
  siRNA target sequence for STRN4 (NM_013403.1,1434-1452).
gctagatgtggaacctata

SEQ ID NO: 122971 - DNA, 19 bp, Homo sapiens
  siRNA target sequence for STRN4 (NM_013403.1,1498-1516).
ggcagcaacagtgaatact

SEQ ID NO: 122972 - DNA, 19 bp, Homo sapiens
  siRNA target sequence for STRN4 (NM_013403.1,1531-1549).
gcagatgcctgcatccata

SEQ ID NO: 122973 - DNA, 19 bp, Homo sapiens
  siRNA target sequence for STRN4 (NM_013403.1,1542-1560).
catccatagttggaagatt

SEQ ID NO: 122974 - DNA, 19 bp, Homo sapiens
  siRNA target sequence for STRN4 (NM_013403.1,1835-1853).
ctggcgacaccgtcttgta

SEQ ID NO: 122975 - DNA, 19 bp, Homo sapiens
  siRNA target sequence for STRN4 (NM_013403.1,1838-1856).
gcgacaccgtcttgtatga

SEQ ID NO: 122976 - DNA, 19 bp, Homo sapiens
  siRNA target sequence for STRN4 (NM_013403.1,1840-1858).
gacaccgtcttgtatgaca

SEQ ID NO: 122977 - DNA, 19 bp, Homo sapiens
  siRNA target sequence for STRN4 (NM_013403.1,2242-2260).
ctggccaaggtcttcgtat

SEQ ID NO: 122978 - DNA, 19 bp, Homo sapiens
  siRNA target sequence for IL18R1 (NM_003855.2,48-66).
gaccctttgggtgcttata

SEQ ID NO: 122979 - DNA, 19 bp, Homo sapiens
  siRNA target sequence for IL18R1 (NM_003855.2,51-69).
cctttgggtgcttatatct

SEQ ID NO: 122980 - DNA, 19 bp, Homo sapiens
  siRNA target sequence for IL18R1 (NM_003855.2,95-113).
cacgtccccacattactgt

SEQ ID NO: 122981 - DNA, 19 bp, Homo sapiens
  siRNA target sequence for IL18R1 (NM_003855.2,121-139).
ggggaacctttctatctga

SEQ ID NO: 122982 - DNA, 19 bp, Homo sapiens
  siRNA target sequence for IL18R1 (NM_003855.2,122-140).
gggaacctttctatctgaa

SEQ ID NO: 122983 - DNA, 19 bp, Homo sapiens
  siRNA target sequence for IL18R1 (NM_003855.2,123-141).
ggaacctttctatctgaaa

SEQ ID NO: 122984 - DNA, 19 bp, Homo sapiens
  siRNA target sequence for IL18R1 (NM_003855.2,152-170).
gttcacttgcacatgagat

SEQ ID NO: 122985 - DNA, 19 bp, Homo sapiens
  siRNA target sequence for IL18R1 (NM_003855.2,237-255).
gagttcctcgagaattgct

SEQ ID NO: 122986 - DNA, 19 bp, Homo sapiens
  siRNA target sequence for IL18R1 (NM_003855.2,281-299).
ggccagttgagttgaatga

SEQ ID NO: 122987 - DNA, 19 bp, Homo sapiens
  siRNA target sequence for IL18R1 (NM_003855.2,283-301).
ccagttgagttgaatgaca

SEQ ID NO: 122988 - DNA, 19 bp, Homo sapiens
  siRNA target sequence for IL18R1 (NM_003855.2,392-410).
gacaagtaactagtaaaat

SEQ ID NO: 122989 - DNA, 19 bp, Homo sapiens
  siRNA target sequence for IL18R1 (NM_003855.2,508-526).
ctactggagaacaataaaa

SEQ ID NO: 122990 - DNA, 19 bp, Homo sapiens
  siRNA target sequence for IL18R1 (NM_003855.2,519-537).
caataaaaacccaacgata

SEQ ID NO: 122991 - DNA, 19 bp, Homo sapiens
  siRNA target sequence for IL18R1 (NM_003855.2,540-558).
gaagaacgccgagtttgaa

SEQ ID NO: 122992 - DNA, 19 bp, Homo sapiens
  siRNA target sequence for IL18R1 (NM_003855.2,626-644).
ccttcaatataacaatagt

SEQ ID NO: 122993 - DNA, 19 bp, Homo sapiens
  siRNA target sequence for IL18R1 (NM_003855.2,643-661).
gtggaagatcgcagtaata

SEQ ID NO: 122994 - DNA, 19 bp, Homo sapiens
  siRNA target sequence for IL18R1 (NM_003855.2,693-711).
ccatgttgcagtggaatta

SEQ ID NO: 122995 - DNA, 19 bp, Homo sapiens
  siRNA target sequence for IL18R1 (NM_003855.2,705-723).
ggaattaggaaaaaacgta

SEQ ID NO: 122996 - DNA, 19 bp, Homo sapiens
  siRNA target sequence for IL18R1 (NM_003855.2,706-724).
gaattaggaaaaaacgtaa

SEQ ID NO: 122997 - DNA, 19 bp, Homo sapiens
  siRNA target sequence for IL18R1 (NM_003855.2,791-809).
gatcggatcctaatataca

SEQ ID NO: 122998 - DNA, 19 bp, Homo sapiens
  siRNA target sequence for IL18R1 (NM_003855.2,794-812).
cggatcctaatatacatga

SEQ ID NO: 122999 - DNA, 19 bp, Homo sapiens
  siRNA target sequence for IL18R1 (NM_003855.2,1079-1097).
gagttgacttggttctatt

SEQ ID NO: 123000 - DNA, 19 bp, Homo sapiens
  siRNA target sequence for IL18R1 (NM_003855.2,1084-1102).
gacttggttctattttata

SEQ ID NO: 123001 - DNA, 19 bp, Homo sapiens
  siRNA target sequence for IL18R1 (NM_003855.2,1112-1130).
cgagaagagatgaaacatt

SEQ ID NO: 123002 - DNA, 19 bp, Homo sapiens
  siRNA target sequence for IL18R1 (NM_003855.2,1153-1171).
gcttttgtgtcttacctaa

SEQ ID NO: 123003 - DNA, 19 bp, Homo sapiens
  siRNA target sequence for IL18R1 (NM_003855.2,1226-1244).
ccagggtgttggagaaaca

SEQ ID NO: 123004 - DNA, 19 bp, Homo sapiens
  siRNA target sequence for IL18R1 (NM_003855.2,1249-1267).
gggtataagttatgcatat

SEQ ID NO: 123005 - DNA, 19 bp, Homo sapiens
  siRNA target sequence for IL18R1 (NM_003855.2,1331-1349).
gccgaagactaatcattgt

SEQ ID NO: 123006 - DNA, 19 bp, Homo sapiens
  siRNA target sequence for IL18R1 (NM_003855.2,1344-1362).
cattgtcctaagtaaaagt

SEQ ID NO: 123007 - DNA, 19 bp, Homo sapiens
  siRNA target sequence for IL18R1 (NM_003855.2,1348-1366).
gtcctaagtaaaagttata

SEQ ID NO: 123008 - DNA, 19 bp, Homo sapiens
  siRNA target sequence for IL18R1 (NM_003855.2,1355-1373).
gtaaaagttatatgtctaa

SEQ ID NO: 123009 - DNA, 19 bp, Homo sapiens
  siRNA target sequence for IL18R1 (NM_003855.2,1377-1395).
ggtcaggtatgaacttgaa

SEQ ID NO: 123010 - DNA, 19 bp, Homo sapiens
  siRNA target sequence for IL18R1 (NM_003855.2,1397-1415).
gtggactccatgaagcatt

SEQ ID NO: 123011 - DNA, 19 bp, Homo sapiens
  siRNA target sequence for IL18R1 (NM_003855.2,1456-1474).
cctgttactgacttcacat

SEQ ID NO: 123012 - DNA, 19 bp, Homo sapiens
  siRNA target sequence for IL18R1 (NM_003855.2,1472-1490).
cattcttgccccaatcact

SEQ ID NO: 123013 - DNA, 19 bp, Homo sapiens
  siRNA target sequence for IL18R1 (NM_003855.2,1479-1497).
gccccaatcactaaagctt

SEQ ID NO: 123014 - DNA, 19 bp, Homo sapiens
  siRNA target sequence for IL18R1 (NM_003855.2,1521-1539).
gtggaaggccgataaatct

SEQ ID NO: 123015 - DNA, 19 bp, Homo sapiens
  siRNA target sequence for IL18R1 (NM_003855.2,1523-1541).
ggaaggccgataaatctct

SEQ ID NO: 123016 - DNA, 19 bp, Homo sapiens
  siRNA target sequence for IL18R1 (NM_003855.2,1529-1547).
ccgataaatctctttctta

SEQ ID NO: 123017 - DNA, 19 bp, Homo sapiens
  siRNA target sequence for IL18R1 (NM_003855.2,1530-1548).
cgataaatctctttcttat

SEQ ID NO: 123018 - DNA, 19 bp, Homo sapiens
  siRNA target sequence for IL18R1 (NM_003855.2,1620-1638).
ggaagtcttgcctgttctt

SEQ ID NO: 123019 - DNA, 19 bp, Homo sapiens
  siRNA target sequence for IL18R1 (NM_003855.2,1621-1639).
gaagtcttgcctgttcttt

SEQ ID NO: 123020 - DNA, 19 bp, Homo sapiens
  siRNA target sequence for IL18RAP (NM_003853.2,518-536).
gttgcaggagagcgaatta

SEQ ID NO: 123021 - DNA, 19 bp, Homo sapiens
  siRNA target sequence for IL18RAP (NM_003853.2,524-542).
ggagagcgaattaaaggat

SEQ ID NO: 123022 - DNA, 19 bp, Homo sapiens
  siRNA target sequence for IL18RAP (NM_003853.2,525-543).
gagagcgaattaaaggatt

SEQ ID NO: 123023 - DNA, 19 bp, Homo sapiens
  siRNA target sequence for IL18RAP (NM_003853.2,527-545).
gagcgaattaaaggattta

SEQ ID NO: 123024 - DNA, 19 bp, Homo sapiens
  siRNA target sequence for IL18RAP (NM_003853.2,591-609).
caaggagtgaagaggaatt

SEQ ID NO: 123025 - DNA, 19 bp, Homo sapiens
  siRNA target sequence for IL18RAP (NM_003853.2,708-726).
gtagtaacgacctatctga

SEQ ID NO: 123026 - DNA, 19 bp, Homo sapiens
  siRNA target sequence for IL18RAP (NM_003853.2,736-754).
gtaccaacaaccttcgaat

SEQ ID NO: 123027 - DNA, 19 bp, Homo sapiens
  siRNA target sequence for IL18RAP (NM_003853.2,747-765).
cttcgaatggagatccatt

SEQ ID NO: 123028 - DNA, 19 bp, Homo sapiens
  siRNA target sequence for IL18RAP (NM_003853.2,829-847).
cccaggggtgaataattct

SEQ ID NO: 123029 - DNA, 19 bp, Homo sapiens
  siRNA target sequence for IL18RAP (NM_003853.2,874-892).
gattaagagcccctatgat

SEQ ID NO: 123030 - DNA, 19 bp, Homo sapiens
  siRNA target sequence for IL18RAP (NM_003853.2,897-915).
cctgttgtgtcaagatgat

SEQ ID NO: 123031 - DNA, 19 bp, Homo sapiens
  siRNA target sequence for IL18RAP (NM_003853.2,907-925).
caagatgattttagaagtt

SEQ ID NO: 123032 - DNA, 19 bp, Homo sapiens
  siRNA target sequence for IL18RAP (NM_003853.2,950-968).
gagtattccgcatcacata

SEQ ID NO: 123033 - DNA, 19 bp, Homo sapiens
  siRNA target sequence for IL18RAP (NM_003853.2,988-1006).
gagcactggctctatttct

SEQ ID NO: 123034 - DNA, 19 bp, Homo sapiens
  siRNA target sequence for IL18RAP (NM_003853.2,1024-1042).
ccaaagtgatgcacaaagt

SEQ ID NO: 123035 - DNA, 19 bp, Homo sapiens
  siRNA target sequence for IL18RAP (NM_003853.2,1046-1064).
gcggtaacctggtacaaga

SEQ ID NO: 123036 - DNA, 19 bp, Homo sapiens
  siRNA target sequence for IL18RAP (NM_003853.2,1123-1141).
ctatcaccagggcacatat

SEQ ID NO: 123037 - DNA, 19 bp, Homo sapiens
  siRNA target sequence for IL18RAP (NM_003853.2,1129-1147).
ccagggcacatatgtatgt

SEQ ID NO: 123038 - DNA, 19 bp, Homo sapiens
  siRNA target sequence for IL18RAP (NM_003853.2,1133-1151).
ggcacatatgtatgtgatt

SEQ ID NO: 123039 - DNA, 19 bp, Homo sapiens
  siRNA target sequence for IL18RAP (NM_003853.2,1180-1198).
gacagtcagagctgttgtt

SEQ ID NO: 123040 - DNA, 19 bp, Homo sapiens
  siRNA target sequence for IL18RAP (NM_003853.2,1340-1358).
gtcataaaatggtacatca

SEQ ID NO: 123041 - DNA, 19 bp, Homo sapiens
  siRNA target sequence for IL18RAP (NM_003853.2,1388-1406).
gtacctgaggcgaaaagta

SEQ ID NO: 123042 - DNA, 19 bp, Homo sapiens
  siRNA target sequence for IL18RAP (NM_003853.2,1394-1412).
gaggcgaaaagtattaaat

SEQ ID NO: 123043 - DNA, 19 bp, Homo sapiens
  siRNA target sequence for IL18RAP (NM_003853.2,1397-1415).
gcgaaaagtattaaatcca

SEQ ID NO: 123044 - DNA, 19 bp, Homo sapiens
  siRNA target sequence for IL18RAP (NM_003853.2,1427-1445).
gaaatcattgagcgtaata

SEQ ID NO: 123045 - DNA, 19 bp, Homo sapiens
  siRNA target sequence for IL18RAP (NM_003853.2,1499-1517).
gtccagaactccattggaa

SEQ ID NO: 123046 - DNA, 19 bp, Homo sapiens
  siRNA target sequence for IL18RAP (NM_003853.2,1524-1542).
cccagtccgtccaactgaa

SEQ ID NO: 123047 - DNA, 19 bp, Homo sapiens
  siRNA target sequence for IL18RAP (NM_003853.2,1525-1543).
ccagtccgtccaactgaaa

SEQ ID NO: 123048 - DNA, 19 bp, Homo sapiens
  siRNA target sequence for IL18RAP (NM_003853.2,1528-1546).
gtccgtccaactgaaagaa

SEQ ID NO: 123049 - DNA, 19 bp, Homo sapiens
  siRNA target sequence for IL18RAP (NM_003853.2,1530-1548).
ccgtccaactgaaagaaaa

SEQ ID NO: 123050 - DNA, 19 bp, Homo sapiens
  siRNA target sequence for IL18RAP (NM_003853.2,1632-1650).
ggcactggattgaaatagt

SEQ ID NO: 123051 - DNA, 19 bp, Homo sapiens
  siRNA target sequence for IL18RAP (NM_003853.2,1686-1704).
cgcttggggataaaaagga

SEQ ID NO: 123052 - DNA, 19 bp, Homo sapiens
  siRNA target sequence for IL18RAP (NM_003853.2,1687-1705).
gcttggggataaaaaggat

SEQ ID NO: 123053 - DNA, 19 bp, Homo sapiens
  siRNA target sequence for IL18RAP (NM_003853.2,1718-1736).
gtatcctatgcaaaatgga

SEQ ID NO: 123054 - DNA, 19 bp, Homo sapiens
  siRNA target sequence for IL18RAP (NM_003853.2,1745-1763).
ccaagtgaggccacttcat

SEQ ID NO: 123055 - DNA, 19 bp, Homo sapiens
  siRNA target sequence for IL18RAP (NM_003853.2,1780-1798).
cttggccctgagcctattt

SEQ ID NO: 123056 - DNA, 19 bp, Homo sapiens
  siRNA target sequence for IL18RAP (NM_003853.2,1834-1852).
gtgtttgcttgaaagagat

SEQ ID NO: 123057 - DNA, 19 bp, Homo sapiens
  siRNA target sequence for IL18RAP (NM_003853.2,1927-1945).
gagccccaactatgtcaat

SEQ ID NO: 123058 - DNA, 19 bp, Homo sapiens
  siRNA target sequence for IL18RAP (NM_003853.2,1942-1960).
caatggacccagtatcttt

SEQ ID NO: 123059 - DNA, 19 bp, Homo sapiens
  siRNA target sequence for IL18RAP (NM_003853.2,1986-2004).
ccttggatgatcaaacact

SEQ ID NO: 123060 - DNA, 19 bp, Homo sapiens
  siRNA target sequence for IL18RAP (NM_003853.2,2051-2069).
ctacctcatctcgtgaaaa

SEQ ID NO: 123061 - DNA, 19 bp, Homo sapiens
  siRNA target sequence for IL18RAP (NM_003853.2,2101-2119).
gagaggcttaaaatcagtt

SEQ ID NO: 123062 - DNA, 19 bp, Homo sapiens
  siRNA target sequence for IL18RAP (NM_003853.2,2227-2245).
gaaaggactcagtagaaca

SEQ ID NO: 123063 - DNA, 19 bp, Homo sapiens
  siRNA target sequence for IL18RAP (NM_003853.2,2231-2249).
ggactcagtagaacagaaa

SEQ ID NO: 123064 - DNA, 19 bp, Homo sapiens
  siRNA target sequence for IL1R1 (NM_000877.2,91-109).
gttactcagacttatttgt

SEQ ID NO: 123065 - DNA, 19 bp, Homo sapiens
  siRNA target sequence for IL1R1 (NM_000877.2,97-115).
cagacttatttgtttcata

SEQ ID NO: 123066 - DNA, 19 bp, Homo sapiens
  siRNA target sequence for IL1R1 (NM_000877.2,108-126).
gtttcatagctctactgat

SEQ ID NO: 123067 - DNA, 19 bp, Homo sapiens
  siRNA target sequence for IL1R1 (NM_000877.2,216-234).
ctcttaacccaaatgaaca

SEQ ID NO: 123068 - DNA, 19 bp, Homo sapiens
  siRNA target sequence for IL1R1 (NM_000877.2,230-248).
gaacacaaaggcactataa

SEQ ID NO: 123069 - DNA, 19 bp, Homo sapiens
  siRNA target sequence for IL1R1 (NM_000877.2,239-257).
ggcactataacttggtata

SEQ ID NO: 123070 - DNA, 19 bp, Homo sapiens
  siRNA target sequence for IL1R1 (NM_000877.2,297-315).
ccaggattcatcaacacaa

SEQ ID NO: 123071 - DNA, 19 bp, Homo sapiens
  siRNA target sequence for IL1R1 (NM_000877.2,349-367).
ggattcaggacattactat

SEQ ID NO: 123072 - DNA, 19 bp, Homo sapiens
  siRNA target sequence for IL1R1 (NM_000877.2,350-368).
gattcaggacattactatt

SEQ ID NO: 123073 - DNA, 19 bp, Homo sapiens
  siRNA target sequence for IL1R1 (NM_000877.2,364-382).
ctattgcgtggtaagaaat

SEQ ID NO: 123074 - DNA, 19 bp, Homo sapiens
  siRNA target sequence for IL1R1 (NM_000877.2,384-402).
catcttactgcctcagaat

SEQ ID NO: 123075 - DNA, 19 bp, Homo sapiens
  siRNA target sequence for IL1R1 (NM_000877.2,424-442).
ggagaatgagcctaactta

SEQ ID NO: 123076 - DNA, 19 bp, Homo sapiens
  siRNA target sequence for IL1R1 (NM_000877.2,425-443).
gagaatgagcctaacttat

SEQ ID NO: 123077 - DNA, 19 bp, Homo sapiens
  siRNA target sequence for IL1R1 (NM_000877.2,427-445).
gaatgagcctaacttatgt

SEQ ID NO: 123078 - DNA, 19 bp, Homo sapiens
  siRNA target sequence for IL1R1 (NM_000877.2,433-451).
gcctaacttatgttataat

SEQ ID NO: 123079 - DNA, 19 bp, Homo sapiens
  siRNA target sequence for IL1R1 (NM_000877.2,453-471).
cacaagccatatttaagca

SEQ ID NO: 123080 - DNA, 19 bp, Homo sapiens
  siRNA target sequence for IL1R1 (NM_000877.2,497-515).
ggacttgtgtgcccttata

SEQ ID NO: 123081 - DNA, 19 bp, Homo sapiens
  siRNA target sequence for IL1R1 (NM_000877.2,507-525).
gcccttatatggagttttt

SEQ ID NO: 123082 - DNA, 19 bp, Homo sapiens
  siRNA target sequence for IL1R1 (NM_000877.2,542-560).
gagttacctaaattacagt

SEQ ID NO: 123083 - DNA, 19 bp, Homo sapiens
  siRNA target sequence for IL1R1 (NM_000877.2,568-586).
ggattgcaaacctctactt

SEQ ID NO: 123084 - DNA, 19 bp, Homo sapiens
  siRNA target sequence for IL1R1 (NM_000877.2,573-591).
gcaaacctctacttcttga

SEQ ID NO: 123085 - DNA, 19 bp, Homo sapiens
  siRNA target sequence for IL1R1 (NM_000877.2,601-619).
ctttagtggagtcaaagat

SEQ ID NO: 123086 - DNA, 19 bp, Homo sapiens
  siRNA target sequence for IL1R1 (NM_000877.2,621-639).
ggctcatcgtgatgaatgt

SEQ ID NO: 123087 - DNA, 19 bp, Homo sapiens
  siRNA target sequence for IL1R1 (NM_000877.2,669-687).
gtcatgcatcctacacata

SEQ ID NO: 123088 - DNA, 19 bp, Homo sapiens
  siRNA target sequence for IL1R1 (NM_000877.2,671-689).
catgcatcctacacatact

SEQ ID NO: 123089 - DNA, 19 bp, Homo sapiens
  siRNA target sequence for IL1R1 (NM_000877.2,684-702).
catacttgggcaagcaata

SEQ ID NO: 123090 - DNA, 19 bp, Homo sapiens
  siRNA target sequence for IL1R1 (NM_000877.2,688-706).
cttgggcaagcaatatcct

SEQ ID NO: 123091 - DNA, 19 bp, Homo sapiens
  siRNA target sequence for IL1R1 (NM_000877.2,691-709).
gggcaagcaatatcctatt

SEQ ID NO: 123092 - DNA, 19 bp, Homo sapiens
  siRNA target sequence for IL1R1 (NM_000877.2,692-710).
ggcaagcaatatcctatta

SEQ ID NO: 123093 - DNA, 19 bp, Homo sapiens
  siRNA target sequence for IL1R1 (NM_000877.2,705-723).
ctattacccgggtaataga

SEQ ID NO: 123094 - DNA, 19 bp, Homo sapiens
  siRNA target sequence for IL1R1 (NM_000877.2,713-731).
cgggtaatagaatttatta

SEQ ID NO: 123095 - DNA, 19 bp, Homo sapiens
  siRNA target sequence for IL1R1 (NM_000877.2,763-781).
gattgtgagcccagctaat

SEQ ID NO: 123096 - DNA, 19 bp, Homo sapiens
  siRNA target sequence for IL1R1 (NM_000877.2,767-785).
gtgagcccagctaatgaga

SEQ ID NO: 123097 - DNA, 19 bp, Homo sapiens
  siRNA target sequence for IL1R1 (NM_000877.2,803-821).
ggatcccagatacaattga

SEQ ID NO: 123098 - DNA, 19 bp, Homo sapiens
  siRNA target sequence for IL1R1 (NM_000877.2,804-822).
gatcccagatacaattgat

SEQ ID NO: 123099 - DNA, 19 bp, Homo sapiens
  siRNA target sequence for IL1R1 (NM_000877.2,835-853).
cggccagttgagtgacatt

SEQ ID NO: 123100 - DNA, 19 bp, Homo sapiens
  siRNA target sequence for IL1R1 (NM_000877.2,897-915).
cagtgctaggggaagacta

SEQ ID NO: 123101 - DNA, 19 bp, Homo sapiens
  siRNA target sequence for IL1R1 (NM_000877.2,899-917).
gtgctaggggaagactatt

SEQ ID NO: 123102 - DNA, 19 bp, Homo sapiens
  siRNA target sequence for IL1R1 (NM_000877.2,955-973).
cctcatcacagtgcttaat

SEQ ID NO: 123103 - DNA, 19 bp, Homo sapiens
  siRNA target sequence for IL1R1 (NM_000877.2,956-974).
ctcatcacagtgcttaata

SEQ ID NO: 123104 - DNA, 19 bp, Homo sapiens
  siRNA target sequence for IL1R1 (NM_000877.2,967-985).
gcttaatatatcggaaatt

SEQ ID NO: 123105 - DNA, 19 bp, Homo sapiens
  siRNA target sequence for IL1R1 (NM_000877.2,979-997).
ggaaattgaaagtagattt

SEQ ID NO: 123106 - DNA, 19 bp, Homo sapiens
  siRNA target sequence for IL1R1 (NM_000877.2,993-1011).
gattttataaacatccatt

SEQ ID NO: 123107 - DNA, 19 bp, Homo sapiens
  siRNA target sequence for IL1R1 (NM_000877.2,1017-1035).
gttttgccaagaatacaca

SEQ ID NO: 123108 - DNA, 19 bp, Homo sapiens
  siRNA target sequence for IL1R1 (NM_000877.2,1023-1041).
ccaagaatacacatggtat

SEQ ID NO: 123109 - DNA, 19 bp, Homo sapiens
  siRNA target sequence for IL1R1 (NM_000877.2,1027-1045).
gaatacacatggtatagat

SEQ ID NO: 123110 - DNA, 19 bp, Homo sapiens
  siRNA target sequence for IL1R1 (NM_000877.2,1037-1055).
ggtatagatgcagcatata

SEQ ID NO: 123111 - DNA, 19 bp, Homo sapiens
  siRNA target sequence for IL1R1 (NM_000877.2,1085-1103).
cagaagcacatgattggta

SEQ ID NO: 123112 - DNA, 19 bp, Homo sapiens
  siRNA target sequence for IL1R1 (NM_000877.2,1087-1105).
gaagcacatgattggtata

SEQ ID NO: 123113 - DNA, 19 bp, Homo sapiens
  siRNA target sequence for IL1R1 (NM_000877.2,1090-1108).
gcacatgattggtatatgt

SEQ ID NO: 123114 - DNA, 19 bp, Homo sapiens
  siRNA target sequence for IL1R1 (NM_000877.2,1109-1127).
gtcacgttgacagtcataa

SEQ ID NO: 123115 - DNA, 19 bp, Homo sapiens
  siRNA target sequence for IL1R1 (NM_000877.2,1113-1131).
cgttgacagtcataattgt

SEQ ID NO: 123116 - DNA, 19 bp, Homo sapiens
  siRNA target sequence for IL1R1 (NM_000877.2,1147-1165).
ctataaaatcttcaagatt

SEQ ID NO: 123117 - DNA, 19 bp, Homo sapiens
  siRNA target sequence for IL1R1 (NM_000877.2,1207-1225).
cccaataaaagcttcagat

SEQ ID NO: 123118 - DNA, 19 bp, Homo sapiens
  siRNA target sequence for IL1R1 (NM_000877.2,1231-1249).
gacctatgacgcatatata

SEQ ID NO: 123119 - DNA, 19 bp, Homo sapiens
  siRNA target sequence for IL1R1 (NM_000877.2,1233-1251).
cctatgacgcatatatact

SEQ ID NO: 123120 - DNA, 19 bp, Homo sapiens
  siRNA target sequence for IL1R1 (NM_000877.2,1241-1259).
gcatatatactgtatccaa

SEQ ID NO: 123121 - DNA, 19 bp, Homo sapiens
  siRNA target sequence for IL1R1 (NM_000877.2,1319-1337).
gaggtcttggaaaaacagt

SEQ ID NO: 123122 - DNA, 19 bp, Homo sapiens
  siRNA target sequence for IL1R1 (NM_000877.2,1372-1390).
ctacgttggggaagacatt

SEQ ID NO: 123123 - DNA, 19 bp, Homo sapiens
  siRNA target sequence for IL1R1 (NM_000877.2,1375-1393).
cgttggggaagacattgtt

SEQ ID NO: 123124 - DNA, 19 bp, Homo sapiens
  siRNA target sequence for IL1R1 (NM_000877.2,1396-1414).
ggtcattaatgaaaacgta

SEQ ID NO: 123125 - DNA, 19 bp, Homo sapiens
  siRNA target sequence for IL1R1 (NM_000877.2,1423-1441).
cagaagactgattatcatt

SEQ ID NO: 123126 - DNA, 19 bp, Homo sapiens
  siRNA target sequence for IL1R1 (NM_000877.2,1430-1448).
ctgattatcattttagtca

SEQ ID NO: 123127 - DNA, 19 bp, Homo sapiens
  siRNA target sequence for IL1R1 (NM_000877.2,1468-1486).
ctggctgggtggttcatct

SEQ ID NO: 123128 - DNA, 19 bp, Homo sapiens
  siRNA target sequence for IL1R1 (NM_000877.2,1490-1508).
gagcaaatagccatgtata

SEQ ID NO: 123129 - DNA, 19 bp, Homo sapiens
  siRNA target sequence for IL1R1 (NM_000877.2,1573-1591).
gaaaatgccagaatcgatt

SEQ ID NO: 123130 - DNA, 19 bp, Homo sapiens
  siRNA target sequence for IL1R1 (NM_000877.2,1580-1598).
ccagaatcgattaaattca

SEQ ID NO: 123131 - DNA, 19 bp, Homo sapiens
  siRNA target sequence for IL1R1 (NM_000877.2,1587-1605).
cgattaaattcattaagca

SEQ ID NO: 123132 - DNA, 19 bp, Homo sapiens
  siRNA target sequence for IL1R1 (NM_000877.2,1622-1640).
cgctggtcaggggacttta

SEQ ID NO: 123133 - DNA, 19 bp, Homo sapiens
  siRNA target sequence for IL1R1 (NM_000877.2,1624-1642).
ctggtcaggggactttaca

SEQ ID NO: 123134 - DNA, 19 bp, Homo sapiens
  siRNA target sequence for IL1R1 (NM_000877.2,1626-1644).
ggtcaggggactttacaca

SEQ ID NO: 123135 - DNA, 19 bp, Homo sapiens
  siRNA target sequence for IL1R1 (NM_000877.2,1705-1723).
gcgacggtcaccttcatct

SEQ ID NO: 123136 - DNA, 19 bp, Homo sapiens
  siRNA target sequence for IL1R1 (NM_000877.2,1706-1724).
cgacggtcaccttcatcta

SEQ ID NO: 123137 - DNA, 19 bp, Homo sapiens
  siRNA target sequence for IL1R1 (NM_000877.2,1710-1728).
ggtcaccttcatctaaaca

SEQ ID NO: 123138 - DNA, 19 bp, Homo sapiens
  siRNA target sequence for IL1R1 (NM_000877.2,1719-1737).
catctaaacaccagttact

SEQ ID NO: 123139 - DNA, 19 bp, Homo sapiens
  siRNA target sequence for IL1RAP (NM_002182.2,223-241).
gtgtagtgagtctctactt

SEQ ID NO: 123140 - DNA, 19 bp, Homo sapiens
  siRNA target sequence for IL1RAP (NM_002182.2,225-243).
gtagtgagtctctactttt

SEQ ID NO: 123141 - DNA, 19 bp, Homo sapiens
  siRNA target sequence for IL1RAP (NM_002182.2,230-248).
gagtctctacttttatgga

SEQ ID NO: 123142 - DNA, 19 bp, Homo sapiens
  siRNA target sequence for IL1RAP (NM_002182.2,302-320).
gaggcaaatccaagtgttt

SEQ ID NO: 123143 - DNA, 19 bp, Homo sapiens
  siRNA target sequence for IL1RAP (NM_002182.2,304-322).
ggcaaatccaagtgtttga

SEQ ID NO: 123144 - DNA, 19 bp, Homo sapiens
  siRNA target sequence for IL1RAP (NM_002182.2,327-345).
gagccagctcgcatcaagt

SEQ ID NO: 123145 - DNA, 19 bp, Homo sapiens
  siRNA target sequence for IL1RAP (NM_002182.2,341-359).
caagtgcccactctttgaa

SEQ ID NO: 123146 - DNA, 19 bp, Homo sapiens
  siRNA target sequence for IL1RAP (NM_002182.2,351-369).
ctctttgaacacttcttga

SEQ ID NO: 123147 - DNA, 19 bp, Homo sapiens
  siRNA target sequence for IL1RAP (NM_002182.2,402-420).
cttactctgatctggtatt

SEQ ID NO: 123148 - DNA, 19 bp, Homo sapiens
  siRNA target sequence for IL1RAP (NM_002182.2,467-485).
ccccgagaaccgcattagt

SEQ ID NO: 123149 - DNA, 19 bp, Homo sapiens
  siRNA target sequence for IL1RAP (NM_002182.2,468-486).
cccgagaaccgcattagta

SEQ ID NO: 123150 - DNA, 19 bp, Homo sapiens
  siRNA target sequence for IL1RAP (NM_002182.2,469-487).
ccgagaaccgcattagtaa

SEQ ID NO: 123151 - DNA, 19 bp, Homo sapiens
  siRNA target sequence for IL1RAP (NM_002182.2,478-496).
gcattagtaaggagaaaga

SEQ ID NO: 123152 - DNA, 19 bp, Homo sapiens
  siRNA target sequence for IL1RAP (NM_002182.2,479-497).
cattagtaaggagaaagat

SEQ ID NO: 123153 - DNA, 19 bp, Homo sapiens
  siRNA target sequence for IL1RAP (NM_002182.2,551-569).
gttaaggaacactacatat

SEQ ID NO: 123154 - DNA, 19 bp, Homo sapiens
  siRNA target sequence for IL1RAP (NM_002182.2,636-654).
ctcccagtgcataaactgt

SEQ ID NO: 123155 - DNA, 19 bp, Homo sapiens
  siRNA target sequence for IL1RAP (NM_002182.2,639-657).
ccagtgcataaactgtata

SEQ ID NO: 123156 - DNA, 19 bp, Homo sapiens
  siRNA target sequence for IL1RAP (NM_002182.2,644-662).
gcataaactgtatatagaa

SEQ ID NO: 123157 - DNA, 19 bp, Homo sapiens
  siRNA target sequence for IL1RAP (NM_002182.2,676-694).
ggatcacttgtccaaatgt

SEQ ID NO: 123158 - DNA, 19 bp, Homo sapiens
  siRNA target sequence for IL1RAP (NM_002182.2,685-703).
gtccaaatgtagatggata

SEQ ID NO: 123159 - DNA, 19 bp, Homo sapiens
  siRNA target sequence for IL1RAP (NM_002182.2,717-735).
gtcaaaccgactatcactt

SEQ ID NO: 123160 - DNA, 19 bp, Homo sapiens
  siRNA target sequence for IL1RAP (NM_002182.2,723-741).
ccgactatcacttggtata

SEQ ID NO: 123161 - DNA, 19 bp, Homo sapiens
  siRNA target sequence for IL1RAP (NM_002182.2,724-742).
cgactatcacttggtatat

SEQ ID NO: 123162 - DNA, 19 bp, Homo sapiens
  siRNA target sequence for IL1RAP (NM_002182.2,736-754).
ggtatatgggctgttataa

SEQ ID NO: 123163 - DNA, 19 bp, Homo sapiens
  siRNA target sequence for IL1RAP (NM_002182.2,737-755).
gtatatgggctgttataaa

SEQ ID NO: 123164 - DNA, 19 bp, Homo sapiens
  siRNA target sequence for IL1RAP (NM_002182.2,744-762).
ggctgttataaaatacaga

SEQ ID NO: 123165 - DNA, 19 bp, Homo sapiens
  siRNA target sequence for IL1RAP (NM_002182.2,780-798).
cccgaaggtatgaacttga

SEQ ID NO: 123166 - DNA, 19 bp, Homo sapiens
  siRNA target sequence for IL1RAP (NM_002182.2,803-821).
cctcattgccttaatttca

SEQ ID NO: 123167 - DNA, 19 bp, Homo sapiens
  siRNA target sequence for IL1RAP (NM_002182.2,886-904).
ggactctgactgtaaaggt

SEQ ID NO: 123168 - DNA, 19 bp, Homo sapiens
  siRNA target sequence for IL1RAP (NM_002182.2,887-905).
gactctgactgtaaaggta

SEQ ID NO: 123169 - DNA, 19 bp, Homo sapiens
  siRNA target sequence for IL1RAP (NM_002182.2,979-997).
caggagaggagctactcat

SEQ ID NO: 123170 - DNA, 19 bp, Homo sapiens
  siRNA target sequence for IL1RAP (NM_002182.2,999-1017).
ccctgtacggtctatttta

SEQ ID NO: 123171 - DNA, 19 bp, Homo sapiens
  siRNA target sequence for IL1RAP (NM_002182.2,1003-1021).
gtacggtctattttagttt

SEQ ID NO: 123172 - DNA, 19 bp, Homo sapiens
  siRNA target sequence for IL1RAP (NM_002182.2,1006-1024).
cggtctattttagttttct

SEQ ID NO: 123173 - DNA, 19 bp, Homo sapiens
  siRNA target sequence for IL1RAP (NM_002182.2,1048-1066).
ggtggaccattgatggaaa

SEQ ID NO: 123174 - DNA, 19 bp, Homo sapiens
  siRNA target sequence for IL1RAP (NM_002182.2,1072-1090).
ctgatgacatcactattga

SEQ ID NO: 123175 - DNA, 19 bp, Homo sapiens
  siRNA target sequence for IL1RAP (NM_002182.2,1089-1107).
gatgtcaccattaacgaaa

SEQ ID NO: 123176 - DNA, 19 bp, Homo sapiens
  siRNA target sequence for IL1RAP (NM_002182.2,1094-1112).
caccattaacgaaagtata

SEQ ID NO: 123177 - DNA, 19 bp, Homo sapiens
  siRNA target sequence for IL1RAP (NM_002182.2,1103-1121).
cgaaagtataagtcatagt

SEQ ID NO: 123178 - DNA, 19 bp, Homo sapiens
  siRNA target sequence for IL1RAP (NM_002182.2,1104-1122).
gaaagtataagtcatagta

SEQ ID NO: 123179 - DNA, 19 bp, Homo sapiens
  siRNA target sequence for IL1RAP (NM_002182.2,1182-1200).
ctcaagcgcagctatgtct

SEQ ID NO: 123180 - DNA, 19 bp, Homo sapiens
  siRNA target sequence for IL1RAP (NM_002182.2,1376-1394).
ggctcattttggaacagat

SEQ ID NO: 123181 - DNA, 19 bp, Homo sapiens
  siRNA target sequence for IL1RAP (NM_002182.2,1407-1425).
gatggaaaagagtatgata

SEQ ID NO: 123182 - DNA, 19 bp, Homo sapiens
  siRNA target sequence for IL1RAP (NM_002182.2,1458-1476).
gaagaatttgtattactga

SEQ ID NO: 123183 - DNA, 19 bp, Homo sapiens
  siRNA target sequence for IL1RAP (NM_002182.2,1477-1495).
ccctccgtggagttttgga

SEQ ID NO: 123184 - DNA, 19 bp, Homo sapiens
  siRNA target sequence for IL1RAP (NM_002182.2,1593-1611).
cgcctcctggttgttctaa

SEQ ID NO: 123185 - DNA, 19 bp, Homo sapiens
  siRNA target sequence for IL1RAP (NM_002182.2,1686-1704).
ggcaacatcaacgtcattt

SEQ ID NO: 123186 - DNA, 19 bp, Homo sapiens
  siRNA target sequence for IL1RAP (NM_002182.2,1687-1705).
gcaacatcaacgtcatttt

SEQ ID NO: 123187 - DNA, 19 bp, Homo sapiens
  siRNA target sequence for IL1RAP (NM_002182.2,1762-1780).
cggtgctcacggtcattaa

SEQ ID NO: 123188 - DNA, 19 bp, Homo sapiens
  siRNA target sequence for IL1RAP (NM_002182.2,1764-1782).
gtgctcacggtcattaaat

SEQ ID NO: 123189 - DNA, 19 bp, Homo sapiens
  siRNA target sequence for IL1RAP (NM_002182.2,1881-1899).
gagcagggcctctcgtatt

SEQ ID NO: 123190 - DNA, 19 bp, Homo sapiens
  siRNA target sequence for IL1RAP (NM_002182.2,1883-1901).
gcagggcctctcgtattca

SEQ ID NO: 123191 - DNA, 19 bp, Homo sapiens
  siRNA target sequence for IL1RAP (NM_002182.2,1884-1902).
cagggcctctcgtattcat

SEQ ID NO: 123192 - DNA, 19 bp, Homo sapiens
  siRNA target sequence for IL1RAP (NM_002182.2,1886-1904).
gggcctctcgtattcatct

SEQ ID NO: 123193 - DNA, 19 bp, Homo sapiens
  siRNA target sequence for IL1RAP (NM_002182.2,1887-1905).
ggcctctcgtattcatctt

SEQ ID NO: 123194 - DNA, 19 bp, Homo sapiens
  siRNA target sequence for IL1RAP (NM_002182.2,1888-1906).
gcctctcgtattcatcttt

SEQ ID NO: 123195 - DNA, 19 bp, Homo sapiens
  siRNA target sequence for IL1RAP (NM_002182.2,1890-1908).
ctctcgtattcatctttga

SEQ ID NO: 123196 - DNA, 19 bp, Homo sapiens
  siRNA target sequence for IL1RAP (NM_002182.2,1894-1912).
cgtattcatctttgaaaaa

SEQ ID NO: 123197 - DNA, 19 bp, Homo sapiens
  siRNA target sequence for IL1RAP (NM_134470.2,1244-1262).
ggtgaagcagaaaggtaat

SEQ ID NO: 123198 - DNA, 19 bp, Homo sapiens
  siRNA target sequence for IL1RAP (NM_134470.2,1245-1263).
gtgaagcagaaaggtaata

SEQ ID NO: 123199 - DNA, 19 bp, Homo sapiens
  siRNA target sequence for IL1RAP (NM_134470.2,1247-1265).
gaagcagaaaggtaataga

SEQ ID NO: 123200 - DNA, 19 bp, Homo sapiens
  siRNA target sequence for IL1RAPL1 (NM_014271.2,638-656).
ctccgattccacacttgat

SEQ ID NO: 123201 - DNA, 19 bp, Homo sapiens
  siRNA target sequence for IL1RAPL1 (NM_014271.2,658-676).
ctcttatacgctactttta

SEQ ID NO: 123202 - DNA, 19 bp, Homo sapiens
  siRNA target sequence for IL1RAPL1 (NM_014271.2,660-678).
cttatacgctacttttact

SEQ ID NO: 123203 - DNA, 19 bp, Homo sapiens
  siRNA target sequence for IL1RAPL1 (NM_014271.2,668-686).
ctacttttactcagagttt

SEQ ID NO: 123204 - DNA, 19 bp, Homo sapiens
  siRNA target sequence for IL1RAPL1 (NM_014271.2,725-743).
ctgactggtctatcgatat

SEQ ID NO: 123205 - DNA, 19 bp, Homo sapiens
  siRNA target sequence for IL1RAPL1 (NM_014271.2,731-749).
ggtctatcgatatcaagaa

SEQ ID NO: 123206 - DNA, 19 bp, Homo sapiens
  siRNA target sequence for IL1RAPL1 (NM_014271.2,732-750).
gtctatcgatatcaagaaa

SEQ ID NO: 123207 - DNA, 19 bp, Homo sapiens
  siRNA target sequence for IL1RAPL1 (NM_014271.2,734-752).
ctatcgatatcaagaaata

SEQ ID NO: 123208 - DNA, 19 bp, Homo sapiens
  siRNA target sequence for IL1RAPL1 (NM_014271.2,769-787).
gagcctgttcgaatcaaat

SEQ ID NO: 123209 - DNA, 19 bp, Homo sapiens
  siRNA target sequence for IL1RAPL1 (NM_014271.2,771-789).
gcctgttcgaatcaaatgt

SEQ ID NO: 123210 - DNA, 19 bp, Homo sapiens
  siRNA target sequence for IL1RAPL1 (NM_014271.2,788-806).
gtgcactcttttatggtta

SEQ ID NO: 123211 - DNA, 19 bp, Homo sapiens
  siRNA target sequence for IL1RAPL1 (NM_014271.2,790-808).
gcactcttttatggttata

SEQ ID NO: 123212 - DNA, 19 bp, Homo sapiens
  siRNA target sequence for IL1RAPL1 (NM_014271.2,791-809).
cactcttttatggttatat

SEQ ID NO: 123213 - DNA, 19 bp, Homo sapiens
  siRNA target sequence for IL1RAPL1 (NM_014271.2,793-811).
ctcttttatggttatatca

SEQ ID NO: 123214 - DNA, 19 bp, Homo sapiens
  siRNA target sequence for IL1RAPL1 (NM_014271.2,802-820).
ggttatatcagaacaaatt

SEQ ID NO: 123215 - DNA, 19 bp, Homo sapiens
  siRNA target sequence for IL1RAPL1 (NM_014271.2,803-821).
gttatatcagaacaaatta

SEQ ID NO: 123216 - DNA, 19 bp, Homo sapiens
  siRNA target sequence for IL1RAPL1 (NM_014271.2,836-854).
gtgctggactcagtttgat

SEQ ID NO: 123217 - DNA, 19 bp, Homo sapiens
  siRNA target sequence for IL1RAPL1 (NM_014271.2,838-856).
gctggactcagtttgatgt

SEQ ID NO: 123218 - DNA, 19 bp, Homo sapiens
  siRNA target sequence for IL1RAPL1 (NM_014271.2,899-917).
cctttgacggaagtagaat

SEQ ID NO: 123219 - DNA, 19 bp, Homo sapiens
  siRNA target sequence for IL1RAPL1 (NM_014271.2,942-960).
gttccggccaacattgcta

SEQ ID NO: 123220 - DNA, 19 bp, Homo sapiens
  siRNA target sequence for IL1RAPL1 (NM_014271.2,1025-1043).
cactgacagtgggtgaaaa

SEQ ID NO: 123221 - DNA, 19 bp, Homo sapiens
  siRNA target sequence for IL1RAPL1 (NM_014271.2,1045-1063).
gacactggactctgctata

SEQ ID NO: 123222 - DNA, 19 bp, Homo sapiens
  siRNA target sequence for IL1RAPL1 (NM_014271.2,1047-1065).
cactggactctgctataat

SEQ ID NO: 123223 - DNA, 19 bp, Homo sapiens
  siRNA target sequence for IL1RAPL1 (NM_014271.2,1051-1069).
ggactctgctataattcca

SEQ ID NO: 123224 - DNA, 19 bp, Homo sapiens
  siRNA target sequence for IL1RAPL1 (NM_014271.2,1121-1139).
gccgtgacatagaggattt

SEQ ID NO: 123225 - DNA, 19 bp, Homo sapiens
  siRNA target sequence for IL1RAPL1 (NM_014271.2,1196-1214).
catggaggccaagtattgt

SEQ ID NO: 123226 - DNA, 19 bp, Homo sapiens
  siRNA target sequence for IL1RAPL1 (NM_014271.2,1199-1217).
ggaggccaagtattgtatt

SEQ ID NO: 123227 - DNA, 19 bp, Homo sapiens
  siRNA target sequence for IL1RAPL1 (NM_014271.2,1202-1220).
ggccaagtattgtattcaa

SEQ ID NO: 123228 - DNA, 19 bp, Homo sapiens
  siRNA target sequence for IL1RAPL1 (NM_014271.2,1296-1314).
ctttgttgtgagaagaact

SEQ ID NO: 123229 - DNA, 19 bp, Homo sapiens
  siRNA target sequence for IL1RAPL1 (NM_014271.2,1303-1321).
gtgagaagaactactgaat

SEQ ID NO: 123230 - DNA, 19 bp, Homo sapiens
  siRNA target sequence for IL1RAPL1 (NM_014271.2,1354-1372).
cccaagcttttgtatccta

SEQ ID NO: 123231 - DNA, 19 bp, Homo sapiens
  siRNA target sequence for IL1RAPL1 (NM_014271.2,1355-1373).
ccaagcttttgtatcctat

SEQ ID NO: 123232 - DNA, 19 bp, Homo sapiens
  siRNA target sequence for IL1RAPL1 (NM_014271.2,1407-1425).
gggtgactctgctaatcta

SEQ ID NO: 123233 - DNA, 19 bp, Homo sapiens
  siRNA target sequence for IL1RAPL1 (NM_014271.2,1408-1426).
ggtgactctgctaatctaa

SEQ ID NO: 123234 - DNA, 19 bp, Homo sapiens
  siRNA target sequence for IL1RAPL1 (NM_014271.2,1456-1474).
gatgtcagtcctttaattt

SEQ ID NO: 123235 - DNA, 19 bp, Homo sapiens
  siRNA target sequence for IL1RAPL1 (NM_014271.2,1527-1545).
ggaaagtgacattagaatt

SEQ ID NO: 123236 - DNA, 19 bp, Homo sapiens
  siRNA target sequence for IL1RAPL1 (NM_014271.2,1619-1637).
gaaattactcctgttatgt

SEQ ID NO: 123237 - DNA, 19 bp, Homo sapiens
  siRNA target sequence for IL1RAPL1 (NM_014271.2,1663-1681).
gccagcgttctccttcata

SEQ ID NO: 123238 - DNA, 19 bp, Homo sapiens
  siRNA target sequence for IL1RAPL1 (NM_014271.2,1664-1682).
ccagcgttctccttcataa

SEQ ID NO: 123239 - DNA, 19 bp, Homo sapiens
  siRNA target sequence for IL1RAPL1 (NM_014271.2,1668-1686).
cgttctccttcataaacga

SEQ ID NO: 123240 - DNA, 19 bp, Homo sapiens
  siRNA target sequence for IL1RAPL1 (NM_014271.2,1678-1696).
cataaacgagagctaatgt

SEQ ID NO: 123241 - DNA, 19 bp, Homo sapiens
  siRNA target sequence for IL1RAPL1 (NM_014271.2,1748-1766).
gtttggtgaccatctacaa

SEQ ID NO: 123242 - DNA, 19 bp, Homo sapiens
  siRNA target sequence for IL1RAPL1 (NM_014271.2,1753-1771).
gtgaccatctacaagtgtt

SEQ ID NO: 123243 - DNA, 19 bp, Homo sapiens
  siRNA target sequence for IL1RAPL1 (NM_014271.2,1761-1779).
ctacaagtgttacaagata

SEQ ID NO: 123244 - DNA, 19 bp, Homo sapiens
  siRNA target sequence for IL1RAPL1 (NM_014271.2,1789-1807).
ctcttctacaggaatcatt

SEQ ID NO: 123245 - DNA, 19 bp, Homo sapiens
  siRNA target sequence for IL1RAPL1 (NM_014271.2,1846-1864).
gatgcatacttatcataca

SEQ ID NO: 123246 - DNA, 19 bp, Homo sapiens
  siRNA target sequence for IL1RAPL1 (NM_014271.2,1877-1895).
ctgaccagtggaatcaaga

SEQ ID NO: 123247 - DNA, 19 bp, Homo sapiens
  siRNA target sequence for IL1RAPL1 (NM_014271.2,1913-1931).
gttttgcccttgaaatcct

SEQ ID NO: 123248 - DNA, 19 bp, Homo sapiens
  siRNA target sequence for IL1RAPL1 (NM_014271.2,1930-1948).
ctacctgatatgcttgaaa

SEQ ID NO: 123249 - DNA, 19 bp, Homo sapiens
  siRNA target sequence for IL1RAPL1 (NM_014271.2,1965-1983).
gttgtttataccagataga

SEQ ID NO: 123250 - DNA, 19 bp, Homo sapiens
  siRNA target sequence for IL1RAPL1 (NM_014271.2,1968-1986).
gtttataccagatagagat

SEQ ID NO: 123251 - DNA, 19 bp, Homo sapiens
  siRNA target sequence for IL1RAPL1 (NM_014271.2,2024-2042).
gatgtgtagatcaaagcaa

SEQ ID NO: 123252 - DNA, 19 bp, Homo sapiens
  siRNA target sequence for IL1RAPL1 (NM_014271.2,2058-2076).
catgaccccaaattacgta

SEQ ID NO: 123253 - DNA, 19 bp, Homo sapiens
  siRNA target sequence for IL1RAPL1 (NM_014271.2,2064-2082).
cccaaattacgtagttaga

SEQ ID NO: 123254 - DNA, 19 bp, Homo sapiens
  siRNA target sequence for IL1RAPL1 (NM_014271.2,2065-2083).
ccaaattacgtagttagaa

SEQ ID NO: 123255 - DNA, 19 bp, Homo sapiens
  siRNA target sequence for IL1RAPL1 (NM_014271.2,2106-2124).
ggaaaccagacttcgaaat

SEQ ID NO: 123256 - DNA, 19 bp, Homo sapiens
  siRNA target sequence for IL1RAPL1 (NM_014271.2,2107-2125).
gaaaccagacttcgaaata

SEQ ID NO: 123257 - DNA, 19 bp, Homo sapiens
  siRNA target sequence for IL1RAPL1 (NM_014271.2,2226-2244).
gctcctgacggtcattaaa

SEQ ID NO: 123258 - DNA, 19 bp, Homo sapiens
  siRNA target sequence for IL1RAPL1 (NM_014271.2,2227-2245).
ctcctgacggtcattaaat

SEQ ID NO: 123259 - DNA, 19 bp, Homo sapiens
  siRNA target sequence for IL1RAPL1 (NM_014271.2,2251-2269).
ggaccaaaatgcaacaagt

SEQ ID NO: 123260 - DNA, 19 bp, Homo sapiens
  siRNA target sequence for IL1RAPL1 (NM_014271.2,2252-2270).
gaccaaaatgcaacaagtt

SEQ ID NO: 123261 - DNA, 19 bp, Homo sapiens
  siRNA target sequence for IL1RAPL1 (NM_014271.2,2283-2301).
ctggaaacgtttacagtat

SEQ ID NO: 123262 - DNA, 19 bp, Homo sapiens
  siRNA target sequence for IL1RAPL1 (NM_014271.2,2285-2303).
ggaaacgtttacagtatga

SEQ ID NO: 123263 - DNA, 19 bp, Homo sapiens
  siRNA target sequence for IL1RAPL1 (NM_014271.2,2318-2336).
ggatagaacccattacaca

SEQ ID NO: 123264 - DNA, 19 bp, Homo sapiens
  siRNA target sequence for IL1RAPL1 (NM_014271.2,2333-2351).
cacatgagcaggctttaga

SEQ ID NO: 123265 - DNA, 19 bp, Homo sapiens
  siRNA target sequence for IL1RAPL1 (NM_014271.2,2387-2405).
ctgtctcggccatttccat

SEQ ID NO: 123266 - DNA, 19 bp, Homo sapiens
  siRNA target sequence for IL1RAPL1 (NM_014271.2,2449-2467).
ctccgttctacctttcaca

SEQ ID NO: 123267 - DNA, 19 bp, Homo sapiens
  siRNA target sequence for IL1RAPL1 (NM_014271.2,2466-2484).
caacacgtaccattcacaa

SEQ ID NO: 123268 - DNA, 19 bp, Homo sapiens
  siRNA target sequence for IL1RAPL1 (NM_014271.2,2607-2625).
gcagcggccacagacaaaa

SEQ ID NO: 123269 - DNA, 19 bp, Homo sapiens
  siRNA target sequence for IL1RAPL1 (NM_014271.2,2611-2629).
cggccacagacaaaatcga

SEQ ID NO: 123270 - DNA, 19 bp, Homo sapiens
  siRNA target sequence for IL1RAPL1 (NM_014271.2,2685-2703).
gccaagggagaccagtata

SEQ ID NO: 123271 - DNA, 19 bp, Homo sapiens
  siRNA target sequence for IL1RAPL1 (NM_014271.2,2686-2704).
ccaagggagaccagtatat

SEQ ID NO: 123272 - DNA, 19 bp, Homo sapiens
  siRNA target sequence for IL1RAPL2 (NM_017416.1,780-798).
ccttgtggtctgttctgta

SEQ ID NO: 123273 - DNA, 19 bp, Homo sapiens
  siRNA target sequence for IL1RAPL2 (NM_017416.1,796-814).
gtagtcagcacaaatctga

SEQ ID NO: 123274 - DNA, 19 bp, Homo sapiens
  siRNA target sequence for IL1RAPL2 (NM_017416.1,862-880).
gtggatctcaagacataca

SEQ ID NO: 123275 - DNA, 19 bp, Homo sapiens
  siRNA target sequence for IL1RAPL2 (NM_017416.1,895-913).
gaaccagtccgagtgaaat

SEQ ID NO: 123276 - DNA, 19 bp, Homo sapiens
  siRNA target sequence for IL1RAPL2 (NM_017416.1,974-992).
ggcttatgtggtacaaaaa

SEQ ID NO: 123277 - DNA, 19 bp, Homo sapiens
  siRNA target sequence for IL1RAPL2 (NM_017416.1,1045-1063).
gaggaagattcaatatggt

SEQ ID NO: 123278 - DNA, 19 bp, Homo sapiens
  siRNA target sequence for IL1RAPL2 (NM_017416.1,1047-1065).
ggaagattcaatatggttt

SEQ ID NO: 123279 - DNA, 19 bp, Homo sapiens
  siRNA target sequence for IL1RAPL2 (NM_017416.1,1079-1097).
cacaagacagtggattcta

SEQ ID NO: 123280 - DNA, 19 bp, Homo sapiens
  siRNA target sequence for IL1RAPL2 (NM_017416.1,1081-1099).
caagacagtggattctaca

SEQ ID NO: 123281 - DNA, 19 bp, Homo sapiens
  siRNA target sequence for IL1RAPL2 (NM_017416.1,1084-1102).
gacagtggattctacactt

SEQ ID NO: 123282 - DNA, 19 bp, Homo sapiens
  siRNA target sequence for IL1RAPL2 (NM_017416.1,1187-1205).
gcaggatccgctatttaga

SEQ ID NO: 123283 - DNA, 19 bp, Homo sapiens
  siRNA target sequence for IL1RAPL2 (NM_017416.1,1188-1206).
caggatccgctatttagaa

SEQ ID NO: 123284 - DNA, 19 bp, Homo sapiens
  siRNA target sequence for IL1RAPL2 (NM_017416.1,1190-1208).
ggatccgctatttagaaaa

SEQ ID NO: 123285 - DNA, 19 bp, Homo sapiens
  siRNA target sequence for IL1RAPL2 (NM_017416.1,1194-1212).
ccgctatttagaaaaatct

SEQ ID NO: 123286 - DNA, 19 bp, Homo sapiens
  siRNA target sequence for IL1RAPL2 (NM_017416.1,1269-1287).
cgatcaggagcctgatgtt

SEQ ID NO: 123287 - DNA, 19 bp, Homo sapiens
  siRNA target sequence for IL1RAPL2 (NM_017416.1,1279-1297).
cctgatgttgtgtggtata

SEQ ID NO: 123288 - DNA, 19 bp, Homo sapiens
  siRNA target sequence for IL1RAPL2 (NM_017416.1,1280-1298).
ctgatgttgtgtggtataa

SEQ ID NO: 123289 - DNA, 19 bp, Homo sapiens
  siRNA target sequence for IL1RAPL2 (NM_017416.1,1285-1303).
gttgtgtggtataaggaat

SEQ ID NO: 123290 - DNA, 19 bp, Homo sapiens
  siRNA target sequence for IL1RAPL2 (NM_017416.1,1319-1337).
ggagaagcataataataca

SEQ ID NO: 123291 - DNA, 19 bp, Homo sapiens
  siRNA target sequence for IL1RAPL2 (NM_017416.1,1322-1340).
gaagcataataatacagaa

SEQ ID NO: 123292 - DNA, 19 bp, Homo sapiens
  siRNA target sequence for IL1RAPL2 (NM_017416.1,1349-1367).
ctcttctgatccaagaagt

SEQ ID NO: 123293 - DNA, 19 bp, Homo sapiens
  siRNA target sequence for IL1RAPL2 (NM_017416.1,1423-1441).
gtaagacgaacaactgaat

SEQ ID NO: 123294 - DNA, 19 bp, Homo sapiens
  siRNA target sequence for IL1RAPL2 (NM_017416.1,1494-1512).
ggagaatcagccaagtgtt

SEQ ID NO: 123295 - DNA, 19 bp, Homo sapiens
  siRNA target sequence for IL1RAPL2 (NM_017416.1,1495-1513).
gagaatcagccaagtgtta

SEQ ID NO: 123296 - DNA, 19 bp, Homo sapiens
  siRNA target sequence for IL1RAPL2 (NM_017416.1,1576-1594).
gagtctgggccaatgatct

SEQ ID NO: 123297 - DNA, 19 bp, Homo sapiens
  siRNA target sequence for IL1RAPL2 (NM_017416.1,1624-1642).
gaactggcaggtcacatta

SEQ ID NO: 123298 - DNA, 19 bp, Homo sapiens
  siRNA target sequence for IL1RAPL2 (NM_017416.1,1629-1647).
ggcaggtcacattagagaa

SEQ ID NO: 123299 - DNA, 19 bp, Homo sapiens
  siRNA target sequence for IL1RAPL2 (NM_017416.1,1726-1744).
gctgacctggcgaattata

SEQ ID NO: 123300 - DNA, 19 bp, Homo sapiens
  siRNA target sequence for IL1RAPL2 (NM_017416.1,1729-1747).
gacctggcgaattatacct

SEQ ID NO: 123301 - DNA, 19 bp, Homo sapiens
  siRNA target sequence for IL1RAPL2 (NM_017416.1,1791-1809).
gctgcgtaaaaaggattta

SEQ ID NO: 123302 - DNA, 19 bp, Homo sapiens
  siRNA target sequence for IL1RAPL2 (NM_017416.1,1792-1810).
ctgcgtaaaaaggatttaa

SEQ ID NO: 123303 - DNA, 19 bp, Homo sapiens
  siRNA target sequence for IL1RAPL2 (NM_017416.1,1795-1813).
cgtaaaaaggatttaatct

SEQ ID NO: 123304 - DNA, 19 bp, Homo sapiens
  siRNA target sequence for IL1RAPL2 (NM_017416.1,1870-1888).
gtggtcatttacaaatgct

SEQ ID NO: 123305 - DNA, 19 bp, Homo sapiens
  siRNA target sequence for IL1RAPL2 (NM_017416.1,1963-1981).
gatgcctatctctcttaca

SEQ ID NO: 123306 - DNA, 19 bp, Homo sapiens
  siRNA target sequence for IL1RAPL2 (NM_017416.1,1966-1984).
gcctatctctcttacacaa

SEQ ID NO: 123307 - DNA, 19 bp, Homo sapiens
  siRNA target sequence for IL1RAPL2 (NM_017416.1,1990-2008).
gaccaagatactttagact

SEQ ID NO: 123308 - DNA, 19 bp, Homo sapiens
  siRNA target sequence for IL1RAPL2 (NM_017416.1,2053-2071).
gatgtcctggaaaaacact

SEQ ID NO: 123309 - DNA, 19 bp, Homo sapiens
  siRNA target sequence for IL1RAPL2 (NM_017416.1,2059-2077).
ctggaaaaacactatggat

SEQ ID NO: 123310 - DNA, 19 bp, Homo sapiens
  siRNA target sequence for IL1RAPL2 (NM_017416.1,2136-2154).
cacaagatatgttgaacaa

SEQ ID NO: 123311 - DNA, 19 bp, Homo sapiens
  siRNA target sequence for IL1RAPL2 (NM_017416.1,2172-2190).
cgtgctaactccagactat

SEQ ID NO: 123312 - DNA, 19 bp, Homo sapiens
  siRNA target sequence for IL1RAPL2 (NM_017416.1,2175-2193).
gctaactccagactatatt

SEQ ID NO: 123313 - DNA, 19 bp, Homo sapiens
  siRNA target sequence for IL1RAPL2 (NM_017416.1,2196-2214).
cagacggggatggagtatt

SEQ ID NO: 123314 - DNA, 19 bp, Homo sapiens
  siRNA target sequence for IL1RAPL2 (NM_017416.1,2198-2216).
gacggggatggagtatttt

SEQ ID NO: 123315 - DNA, 19 bp, Homo sapiens
  siRNA target sequence for IL1RAPL2 (NM_017416.1,2201-2219).
ggggatggagtattttcga

SEQ ID NO: 123316 - DNA, 19 bp, Homo sapiens
  siRNA target sequence for IL1RAPL2 (NM_017416.1,2202-2220).
gggatggagtattttcgaa

SEQ ID NO: 123317 - DNA, 19 bp, Homo sapiens
  siRNA target sequence for IL1RAPL2 (NM_017416.1,2245-2263).
ctagtcagtggagaaatca

SEQ ID NO: 123318 - DNA, 19 bp, Homo sapiens
  siRNA target sequence for IL1RAPL2 (NM_017416.1,2274-2292).
gattgagtgtacagaatta

SEQ ID NO: 123319 - DNA, 19 bp, Homo sapiens
  siRNA target sequence for IL1RAPL2 (NM_017416.1,2402-2420).
ggaagcacttagtatatga

SEQ ID NO: 123320 - DNA, 19 bp, Homo sapiens
  siRNA target sequence for IL1RAPL2 (NM_017416.1,2403-2421).
gaagcacttagtatatgaa

SEQ ID NO: 123321 - DNA, 19 bp, Homo sapiens
  siRNA target sequence for IL1RAPL2 (NM_017416.1,2472-2490).
cgcagaacaaggacttttt

SEQ ID NO: 123322 - DNA, 19 bp, Homo sapiens
  siRNA target sequence for IL1RAPL2 (NM_017416.1,2499-2517).
ccagcctataccctctatt

SEQ ID NO: 123323 - DNA, 19 bp, Homo sapiens
  siRNA target sequence for IL1RAPL2 (NM_017416.1,2602-2620).
cactgttgcagaggttata

SEQ ID NO: 123324 - DNA, 19 bp, Homo sapiens
  siRNA target sequence for IL1RAPL2 (NM_017416.1,2606-2624).
gttgcagaggttataaaca

SEQ ID NO: 123325 - DNA, 19 bp, Homo sapiens
  siRNA target sequence for IL1RAPL2 (NM_017416.1,2609-2627).
gcagaggttataaacatga

SEQ ID NO: 123326 - DNA, 19 bp, Homo sapiens
  siRNA target sequence for IL1RAPL2 (NM_017416.1,2612-2630).
gaggttataaacatgagat

SEQ ID NO: 123327 - DNA, 19 bp, Homo sapiens
  siRNA target sequence for IL1RAPL2 (NM_017416.1,2643-2661).
cttgccagtaccttcctta

SEQ ID NO: 123328 - DNA, 19 bp, Homo sapiens
  siRNA target sequence for IL1RAPL2 (NM_017416.1,2664-2682).
caaccaccatacttattgt

SEQ ID NO: 123329 - DNA, 19 bp, Homo sapiens
  siRNA target sequence for IL1RAPL2 (NM_017416.1,2706-2724).
cggacagctaccccttaat

SEQ ID NO: 123330 - DNA, 19 bp, Homo sapiens
  siRNA target sequence for IL1RAPL2 (NM_017416.1,2707-2725).
ggacagctaccccttaata

SEQ ID NO: 123331 - DNA, 19 bp, Homo sapiens
  siRNA target sequence for IL1RAPL2 (NM_017416.1,2710-2728).
cagctaccccttaataaca

SEQ ID NO: 123332 - DNA, 19 bp, Homo sapiens
  siRNA target sequence for IL1RAPL2 (NM_017416.1,2737-2755).
gatacccaggaatttcaca

SEQ ID NO: 123333 - DNA, 19 bp, Homo sapiens
  siRNA target sequence for IL1RL1 (NM_003856.2,235-253).
ggttttggatcttagcaat

SEQ ID NO: 123334 - DNA, 19 bp, Homo sapiens
  siRNA target sequence for IL1RL1 (NM_003856.2,255-273).
ctcacaattctcatgtatt

SEQ ID NO: 123335 - DNA, 19 bp, Homo sapiens
  siRNA target sequence for IL1RL1 (NM_003856.2,277-295).
cagcagcaaagtttagtaa

SEQ ID NO: 123336 - DNA, 19 bp, Homo sapiens
  siRNA target sequence for IL1RL1 (NM_003856.2,334-352).
gatgtcctagacaaggaaa

SEQ ID NO: 123337 - DNA, 19 bp, Homo sapiens
  siRNA target sequence for IL1RL1 (NM_003856.2,339-357).
cctagacaaggaaaaccta

SEQ ID NO: 123338 - DNA, 19 bp, Homo sapiens
  siRNA target sequence for IL1RL1 (NM_003856.2,343-361).
gacaaggaaaacctagtta

SEQ ID NO: 123339 - DNA, 19 bp, Homo sapiens
  siRNA target sequence for IL1RL1 (NM_003856.2,358-376).
gttacaccgtggattggta

SEQ ID NO: 123340 - DNA, 19 bp, Homo sapiens
  siRNA target sequence for IL1RL1 (NM_003856.2,365-383).
cgtggattggtattactca

SEQ ID NO: 123341 - DNA, 19 bp, Homo sapiens
  siRNA target sequence for IL1RL1 (NM_003856.2,369-387).
gattggtattactcacaaa

SEQ ID NO: 123342 - DNA, 19 bp, Homo sapiens
  siRNA target sequence for IL1RL1 (NM_003856.2,436-454).
gccaacttctgaagtttct

SEQ ID NO: 123343 - DNA, 19 bp, Homo sapiens
  siRNA target sequence for IL1RL1 (NM_003856.2,471-489).
gattctggtatttatacct

SEQ ID NO: 123344 - DNA, 19 bp, Homo sapiens
  siRNA target sequence for IL1RL1 (NM_003856.2,478-496).
gtatttatacctgtattgt

SEQ ID NO: 123345 - DNA, 19 bp, Homo sapiens
  siRNA target sequence for IL1RL1 (NM_003856.2,495-513).
gtcagaagtcccacattca

SEQ ID NO: 123346 - DNA, 19 bp, Homo sapiens
  siRNA target sequence for IL1RL1 (NM_003856.2,497-515).
cagaagtcccacattcaat

SEQ ID NO: 123347 - DNA, 19 bp, Homo sapiens
  siRNA target sequence for IL1RL1 (NM_003856.2,528-546).
gcgaatgtcaccatatata

SEQ ID NO: 123348 - DNA, 19 bp, Homo sapiens
  siRNA target sequence for IL1RL1 (NM_003856.2,529-547).
cgaatgtcaccatatataa

SEQ ID NO: 123349 - DNA, 19 bp, Homo sapiens
  siRNA target sequence for IL1RL1 (NM_003856.2,567-585).
gttccagattatttgatgt

SEQ ID NO: 123350 - DNA, 19 bp, Homo sapiens
  siRNA target sequence for IL1RL1 (NM_003856.2,631-649).
ctaccattgacctctacaa

SEQ ID NO: 123351 - DNA, 19 bp, Homo sapiens
  siRNA target sequence for IL1RL1 (NM_003856.2,658-676).
cacctcttgagtggtttaa

SEQ ID NO: 123352 - DNA, 19 bp, Homo sapiens
  siRNA target sequence for IL1RL1 (NM_003856.2,660-678).
cctcttgagtggtttaaga

SEQ ID NO: 123353 - DNA, 19 bp, Homo sapiens
  siRNA target sequence for IL1RL1 (NM_003856.2,661-679).
ctcttgagtggtttaagaa

SEQ ID NO: 123354 - DNA, 19 bp, Homo sapiens
  siRNA target sequence for IL1RL1 (NM_003856.2,707-725).
cagggcgcacaagtcattt

SEQ ID NO: 123355 - DNA, 19 bp, Homo sapiens
  siRNA target sequence for IL1RL1 (NM_003856.2,709-727).
gggcgcacaagtcattttt

SEQ ID NO: 123356 - DNA, 19 bp, Homo sapiens
  siRNA target sequence for IL1RL1 (NM_003856.2,748-766).
ctgaggacgcaggtgatta

SEQ ID NO: 123357 - DNA, 19 bp, Homo sapiens
  siRNA target sequence for IL1RL1 (NM_003856.2,772-790).
gtaaatttatacacaatga

SEQ ID NO: 123358 - DNA, 19 bp, Homo sapiens
  siRNA target sequence for IL1RL1 (NM_003856.2,973-991).
ccgtcctgtggcagcttaa

SEQ ID NO: 123359 - DNA, 19 bp, Homo sapiens
  siRNA target sequence for IL1RL1 (NM_003856.2,974-992).
cgtcctgtggcagcttaat

SEQ ID NO: 123360 - DNA, 19 bp, Homo sapiens
  siRNA target sequence for IL1RL1 (NM_003856.2,977-995).
cctgtggcagcttaatgga

SEQ ID NO: 123361 - DNA, 19 bp, Homo sapiens
  siRNA target sequence for IL1RL1 (NM_003856.2,978-996).
ctgtggcagcttaatggaa

SEQ ID NO: 123362 - DNA, 19 bp, Homo sapiens
  siRNA target sequence for IL1RL1 (NM_003856.2,982-1000).
ggcagcttaatggaacaaa

SEQ ID NO: 123363 - DNA, 19 bp, Homo sapiens
  siRNA target sequence for IL1RL1 (NM_003856.2,1061-1079).
caatgggctggcttgtcta

SEQ ID NO: 123364 - DNA, 19 bp, Homo sapiens
  siRNA target sequence for IL1RL1 (NM_003856.2,1066-1084).
ggctggcttgtctagacat

SEQ ID NO: 123365 - DNA, 19 bp, Homo sapiens
  siRNA target sequence for IL1RL1 (NM_003856.2,1077-1095).
ctagacatggttttaagaa

SEQ ID NO: 123366 - DNA, 19 bp, Homo sapiens
  siRNA target sequence for IL1RL1 (NM_003856.2,1082-1100).
catggttttaagaatagct

SEQ ID NO: 123367 - DNA, 19 bp, Homo sapiens
  siRNA target sequence for IL1RL1 (NM_003856.2,1138-1156).
gtctggccctgaatttgca

SEQ ID NO: 123368 - DNA, 19 bp, Homo sapiens
  siRNA target sequence for IL1RL1 (NM_003856.2,1165-1183).
gaaggcacaccgtaagact

SEQ ID NO: 123369 - DNA, 19 bp, Homo sapiens
  siRNA target sequence for IL1RL1 (NM_003856.2,1169-1187).
gcacaccgtaagactaagt

SEQ ID NO: 123370 - DNA, 19 bp, Homo sapiens
  siRNA target sequence for IL1RL1 (NM_003856.2,1170-1188).
cacaccgtaagactaagta

SEQ ID NO: 123371 - DNA, 19 bp, Homo sapiens
  siRNA target sequence for IL1RL1 (NM_003856.2,1175-1193).
cgtaagactaagtaggaaa

SEQ ID NO: 123372 - DNA, 19 bp, Homo sapiens
  siRNA target sequence for IL1RL1 (NM_003856.2,1176-1194).
gtaagactaagtaggaaaa

SEQ ID NO: 123373 - DNA, 19 bp, Homo sapiens
  siRNA target sequence for IL1RL1 (NM_016232.4,1250-1268).
catagcatctactgcataa

SEQ ID NO: 123374 - DNA, 19 bp, Homo sapiens
  siRNA target sequence for IL1RL1 (NM_016232.4,1261-1279).
ctgcataattgcagtatgt

SEQ ID NO: 123375 - DNA, 19 bp, Homo sapiens
  siRNA target sequence for IL1RL1 (NM_016232.4,1264-1282).
cataattgcagtatgtagt

SEQ ID NO: 123376 - DNA, 19 bp, Homo sapiens
  siRNA target sequence for IL1RL1 (NM_016232.4,1271-1289).
gcagtatgtagtgtatttt

SEQ ID NO: 123377 - DNA, 19 bp, Homo sapiens
  siRNA target sequence for IL1RL1 (NM_016232.4,1272-1290).
cagtatgtagtgtattttt

SEQ ID NO: 123378 - DNA, 19 bp, Homo sapiens
  siRNA target sequence for IL1RL1 (NM_016232.4,1304-1322).
gtcctggttatcatcctaa

SEQ ID NO: 123379 - DNA, 19 bp, Homo sapiens
  siRNA target sequence for IL1RL1 (NM_016232.4,1306-1324).
cctggttatcatcctaaaa

SEQ ID NO: 123380 - DNA, 19 bp, Homo sapiens
  siRNA target sequence for IL1RL1 (NM_016232.4,1351-1369).
ctggagagacatagctaaa

SEQ ID NO: 123381 - DNA, 19 bp, Homo sapiens
  siRNA target sequence for IL1RL1 (NM_016232.4,1354-1372).
gagagacatagctaaacct

SEQ ID NO: 123382 - DNA, 19 bp, Homo sapiens
  siRNA target sequence for IL1RL1 (NM_016232.4,1364-1382).
gctaaaccttacaagacta

SEQ ID NO: 123383 - DNA, 19 bp, Homo sapiens
  siRNA target sequence for IL1RL1 (NM_016232.4,1415-1433).
gtctacccacggaactaca

SEQ ID NO: 123384 - DNA, 19 bp, Homo sapiens
  siRNA target sequence for IL1RL1 (NM_016232.4,1417-1435).
ctacccacggaactacaaa

SEQ ID NO: 123385 - DNA, 19 bp, Homo sapiens
  siRNA target sequence for IL1RL1 (NM_016232.4,1421-1439).
ccacggaactacaaatcca

SEQ ID NO: 123386 - DNA, 19 bp, Homo sapiens
  siRNA target sequence for IL1RL1 (NM_016232.4,1455-1473).
gtcgtgtagagcactttgt

SEQ ID NO: 123387 - DNA, 19 bp, Homo sapiens
  siRNA target sequence for IL1RL1 (NM_016232.4,1486-1504).
gcctgatgttcttgaaaat

SEQ ID NO: 123388 - DNA, 19 bp, Homo sapiens
  siRNA target sequence for IL1RL1 (NM_016232.4,1487-1505).
cctgatgttcttgaaaata

SEQ ID NO: 123389 - DNA, 19 bp, Homo sapiens
  siRNA target sequence for IL1RL1 (NM_016232.4,1593-1611).
gcaggcggcacattttcat

SEQ ID NO: 123390 - DNA, 19 bp, Homo sapiens
  siRNA target sequence for IL1RL1 (NM_016232.4,1690-1708).
cgacgccaaggtgatactt

SEQ ID NO: 123391 - DNA, 19 bp, Homo sapiens
  siRNA target sequence for IL1RL1 (NM_016232.4,1695-1713).
ccaaggtgatacttattga

SEQ ID NO: 123392 - DNA, 19 bp, Homo sapiens
  siRNA target sequence for IL1RL1 (NM_016232.4,1763-1781).
gactccctccagcatctta

SEQ ID NO: 123393 - DNA, 19 bp, Homo sapiens
  siRNA target sequence for IL1RL1 (NM_016232.4,1768-1786).
cctccagcatcttatgaaa

SEQ ID NO: 123394 - DNA, 19 bp, Homo sapiens
  siRNA target sequence for IL1RL1 (NM_016232.4,1771-1789).
ccagcatcttatgaaagta

SEQ ID NO: 123395 - DNA, 19 bp, Homo sapiens
  siRNA target sequence for IL1RL1 (NM_016232.4,1787-1805).
gtacaggggaccatcaagt

SEQ ID NO: 123396 - DNA, 19 bp, Homo sapiens
  siRNA target sequence for IL1RL1 (NM_016232.4,1813-1831).
ggaccacattgccaataaa

SEQ ID NO: 123397 - DNA, 19 bp, Homo sapiens
  siRNA target sequence for IL1RL1 (NM_016232.4,1817-1835).
cacattgccaataaaaggt

SEQ ID NO: 123398 - DNA, 19 bp, Homo sapiens
  siRNA target sequence for IL1RL1 (NM_016232.4,1833-1851).
ggtccctgaattctaaatt

SEQ ID NO: 123399 - DNA, 19 bp, Homo sapiens
  siRNA target sequence for IL1RL1 (NM_016232.4,1876-1894).
gcctgtgccaagcaaaatt

SEQ ID NO: 123400 - DNA, 19 bp, Homo sapiens
  siRNA target sequence for IL1RL1 (NM_173459.1,840-858).
gtttggtgtcagagtttct

SEQ ID NO: 123401 - DNA, 19 bp, Homo sapiens
  siRNA target sequence for IL1RL1 (NM_173459.1,875-893).
cttaatctttagtaatact

SEQ ID NO: 123402 - DNA, 19 bp, Homo sapiens
  siRNA target sequence for IL1RL1 (NM_173459.1,899-917).
gattcaaagtctaatgaga

SEQ ID NO: 123403 - DNA, 19 bp, Homo sapiens
  siRNA target sequence for IL1RL1 (NM_173459.1,916-934).
gaggctttgtgatggtata

SEQ ID NO: 123404 - DNA, 19 bp, Homo sapiens
  siRNA target sequence for IL1RL1 (NM_173459.1,929-947).
ggtatactatggtgtacat

SEQ ID NO: 123405 - DNA, 19 bp, Homo sapiens
  siRNA target sequence for IL1RL1 (NM_173459.1,930-948).
gtatactatggtgtacata

SEQ ID NO: 123406 - DNA, 19 bp, Homo sapiens
  siRNA target sequence for IL1RL1 (NM_173459.1,952-970).
gttgtcgagtggtttttaa

SEQ ID NO: 123407 - DNA, 19 bp, Homo sapiens
  siRNA target sequence for IL1RL1 (NM_173459.1,980-998).
gcaatactttcaacatcat

SEQ ID NO: 123408 - DNA, 19 bp, Homo sapiens
  siRNA target sequence for IL1RL2 (NM_003854.2,280-298).
gtcagtgtaacatggtata

SEQ ID NO: 123409 - DNA, 19 bp, Homo sapiens
  siRNA target sequence for IL1RL2 (NM_003854.2,349-367).
caggacgagacttggattt

SEQ ID NO: 123410 - DNA, 19 bp, Homo sapiens
  siRNA target sequence for IL1RL2 (NM_003854.2,354-372).
cgagacttggattttgttt

SEQ ID NO: 123411 - DNA, 19 bp, Homo sapiens
  siRNA target sequence for IL1RL2 (NM_003854.2,398-416).
gagtctaccaatgtgttat

SEQ ID NO: 123412 - DNA, 19 bp, Homo sapiens
  siRNA target sequence for IL1RL2 (NM_003854.2,400-418).
gtctaccaatgtgttataa

SEQ ID NO: 123413 - DNA, 19 bp, Homo sapiens
  siRNA target sequence for IL1RL2 (NM_003854.2,425-443).
gagacagctgtcatagaat

SEQ ID NO: 123414 - DNA, 19 bp, Homo sapiens
  siRNA target sequence for IL1RL2 (NM_003854.2,429-447).
cagctgtcatagaatacat

SEQ ID NO: 123415 - DNA, 19 bp, Homo sapiens
  siRNA target sequence for IL1RL2 (NM_003854.2,431-449).
gctgtcatagaatacatgt

SEQ ID NO: 123416 - DNA, 19 bp, Homo sapiens
  siRNA target sequence for IL1RL2 (NM_003854.2,483-501).
cacttccataggtggttta

SEQ ID NO: 123417 - DNA, 19 bp, Homo sapiens
  siRNA target sequence for IL1RL2 (NM_003854.2,488-506).
ccataggtggtttaccaaa

SEQ ID NO: 123418 - DNA, 19 bp, Homo sapiens
  siRNA target sequence for IL1RL2 (NM_003854.2,493-511).
ggtggtttaccaaatttat

SEQ ID NO: 123419 - DNA, 19 bp, Homo sapiens
  siRNA target sequence for IL1RL2 (NM_003854.2,512-530).
cagatgagtacaagcaaat

SEQ ID NO: 123420 - DNA, 19 bp, Homo sapiens
  siRNA target sequence for IL1RL2 (NM_003854.2,568-586).
ctgcacttcccgaagagtt

SEQ ID NO: 123421 - DNA, 19 bp, Homo sapiens
  siRNA target sequence for IL1RL2 (NM_003854.2,573-591).
cttcccgaagagttgtgtt

SEQ ID NO: 123422 - DNA, 19 bp, Homo sapiens
  siRNA target sequence for IL1RL2 (NM_003854.2,589-607).
gttttgggtccaataaagt

SEQ ID NO: 123423 - DNA, 19 bp, Homo sapiens
  siRNA target sequence for IL1RL2 (NM_003854.2,615-633).
ggactgtaacgagattaaa

SEQ ID NO: 123424 - DNA, 19 bp, Homo sapiens
  siRNA target sequence for IL1RL2 (NM_003854.2,634-652).
ggggagcggttcactgttt

SEQ ID NO: 123425 - DNA, 19 bp, Homo sapiens
  siRNA target sequence for IL1RL2 (NM_003854.2,635-653).
gggagcggttcactgtttt

SEQ ID NO: 123426 - DNA, 19 bp, Homo sapiens
  siRNA target sequence for IL1RL2 (NM_003854.2,639-657).
gcggttcactgttttggaa

SEQ ID NO: 123427 - DNA, 19 bp, Homo sapiens
  siRNA target sequence for IL1RL2 (NM_003854.2,706-724).
gcgtgtcaagccatactga

SEQ ID NO: 123428 - DNA, 19 bp, Homo sapiens
  siRNA target sequence for IL1RL2 (NM_003854.2,734-752).
ggaagcagtacgaggtttt

SEQ ID NO: 123429 - DNA, 19 bp, Homo sapiens
  siRNA target sequence for IL1RL2 (NM_003854.2,735-753).
gaagcagtacgaggtttta

SEQ ID NO: 123430 - DNA, 19 bp, Homo sapiens
  siRNA target sequence for IL1RL2 (NM_003854.2,738-756).
gcagtacgaggttttaaat

SEQ ID NO: 123431 - DNA, 19 bp, Homo sapiens
  siRNA target sequence for IL1RL2 (NM_003854.2,757-775).
ggcatcactgtgagcatta

SEQ ID NO: 123432 - DNA, 19 bp, Homo sapiens
  siRNA target sequence for IL1RL2 (NM_003854.2,800-818).
gtgtccctaaaatcattta

SEQ ID NO: 123433 - DNA, 19 bp, Homo sapiens
  siRNA target sequence for IL1RL2 (NM_003854.2,805-823).
cctaaaatcatttatccaa

SEQ ID NO: 123434 - DNA, 19 bp, Homo sapiens
  siRNA target sequence for IL1RL2 (NM_003854.2,813-831).
catttatccaaaaaatcat

SEQ ID NO: 123435 - DNA, 19 bp, Homo sapiens
  siRNA target sequence for IL1RL2 (NM_003854.2,846-864).
gcttggtaccactctgatt

SEQ ID NO: 123436 - DNA, 19 bp, Homo sapiens
  siRNA target sequence for IL1RL2 (NM_003854.2,883-901).
gacaccaaggataatacaa

SEQ ID NO: 123437 - DNA, 19 bp, Homo sapiens
  siRNA target sequence for IL1RL2 (NM_003854.2,885-903).
caccaaggataatacaaat

SEQ ID NO: 123438 - DNA, 19 bp, Homo sapiens
  siRNA target sequence for IL1RL2 (NM_003854.2,907-925).
cgatgctggagagtcaata

SEQ ID NO: 123439 - DNA, 19 bp, Homo sapiens
  siRNA target sequence for IL1RL2 (NM_003854.2,908-926).
gatgctggagagtcaataa

SEQ ID NO: 123440 - DNA, 19 bp, Homo sapiens
  siRNA target sequence for IL1RL2 (NM_003854.2,933-951).
ggtggatgattactatgat

SEQ ID NO: 123441 - DNA, 19 bp, Homo sapiens
  siRNA target sequence for IL1RL2 (NM_003854.2,988-1006).
gtctcttttcgggaacata

SEQ ID NO: 123442 - DNA, 19 bp, Homo sapiens
  siRNA target sequence for IL1RL2 (NM_003854.2,992-1010).
cttttcgggaacataattt

SEQ ID NO: 123443 - DNA, 19 bp, Homo sapiens
  siRNA target sequence for IL1RL2 (NM_003854.2,1003-1021).
cataatttgtacacagtaa

SEQ ID NO: 123444 - DNA, 19 bp, Homo sapiens
  siRNA target sequence for IL1RL2 (NM_003854.2,1086-1104).
gtccacagcatacattata

SEQ ID NO: 123445 - DNA, 19 bp, Homo sapiens
  siRNA target sequence for IL1RL2 (NM_003854.2,1088-1106).
ccacagcatacattatatt

SEQ ID NO: 123446 - DNA, 19 bp, Homo sapiens
  siRNA target sequence for IL1RL2 (NM_003854.2,1089-1107).
cacagcatacattatatta

SEQ ID NO: 123447 - DNA, 19 bp, Homo sapiens
  siRNA target sequence for IL1RL2 (NM_003854.2,1110-1128).
gctcccagctccggatttt

SEQ ID NO: 123448 - DNA, 19 bp, Homo sapiens
  siRNA target sequence for IL1RL2 (NM_003854.2,1113-1131).
cccagctccggattttcga

SEQ ID NO: 123449 - DNA, 19 bp, Homo sapiens
  siRNA target sequence for IL1RL2 (NM_003854.2,1123-1141).
gattttcgagcttacttga

SEQ ID NO: 123450 - DNA, 19 bp, Homo sapiens
  siRNA target sequence for IL1RL2 (NM_003854.2,1172-1190).
ctgtgtctgttgtgtacat

SEQ ID NO: 123451 - DNA, 19 bp, Homo sapiens
  siRNA target sequence for IL1RL2 (NM_003854.2,1209-1227).
cgacattgttctttggtat

SEQ ID NO: 123452 - DNA, 19 bp, Homo sapiens
  siRNA target sequence for IL1RL2 (NM_003854.2,1244-1262).
ctacagagaccatagtaga

SEQ ID NO: 123453 - DNA, 19 bp, Homo sapiens
  siRNA target sequence for IL1RL2 (NM_003854.2,1270-1288).
ctgtatgacgcctatgtct

SEQ ID NO: 123454 - DNA, 19 bp, Homo sapiens
  siRNA target sequence for IL1RL2 (NM_003854.2,1272-1290).
gtatgacgcctatgtctta

SEQ ID NO: 123455 - DNA, 19 bp, Homo sapiens
  siRNA target sequence for IL1RL2 (NM_003854.2,1357-1375).
gaggtgttggagagacaat

SEQ ID NO: 123456 - DNA, 19 bp, Homo sapiens
  siRNA target sequence for IL1RL2 (NM_003854.2,1359-1377).
ggtgttggagagacaatgt

SEQ ID NO: 123457 - DNA, 19 bp, Homo sapiens
  siRNA target sequence for IL1RL2 (NM_003854.2,1365-1383).
ggagagacaatgtggatat

SEQ ID NO: 123458 - DNA, 19 bp, Homo sapiens
  siRNA target sequence for IL1RL2 (NM_003854.2,1366-1384).
gagagacaatgtggatata

SEQ ID NO: 123459 - DNA, 19 bp, Homo sapiens
  siRNA target sequence for IL1RL2 (NM_003854.2,1370-1388).
gacaatgtggatataagtt

SEQ ID NO: 123460 - DNA, 19 bp, Homo sapiens
  siRNA target sequence for IL1RL2 (NM_003854.2,1420-1438).
caagccgtggccaatgtca

SEQ ID NO: 123461 - DNA, 19 bp, Homo sapiens
  siRNA target sequence for IL1RL2 (NM_003854.2,1430-1448).
ccaatgtcatcgatgaaaa

SEQ ID NO: 123462 - DNA, 19 bp, Homo sapiens
  siRNA target sequence for IL1RL2 (NM_003854.2,1435-1453).
gtcatcgatgaaaacgtta

SEQ ID NO: 123463 - DNA, 19 bp, Homo sapiens
  siRNA target sequence for IL1RL2 (NM_003854.2,1461-1479).
caggaggctgattgtcatt

SEQ ID NO: 123464 - DNA, 19 bp, Homo sapiens
  siRNA target sequence for IL1RL2 (NM_003854.2,1558-1576).
caggacgggatgaaggtta

SEQ ID NO: 123465 - DNA, 19 bp, Homo sapiens
  siRNA target sequence for IL1RL2 (NM_003854.2,1560-1578).
ggacgggatgaaggttatt

SEQ ID NO: 123466 - DNA, 19 bp, Homo sapiens
  siRNA target sequence for IL1RL2 (NM_003854.2,1564-1582).
gggatgaaggttattctca

SEQ ID NO: 123467 - DNA, 19 bp, Homo sapiens
  siRNA target sequence for IL1RL2 (NM_003854.2,1621-1639).
gagtcaattcagtacatca

SEQ ID NO: 123468 - DNA, 19 bp, Homo sapiens
  siRNA target sequence for IL1RL2 (NM_003854.2,1623-1641).
gtcaattcagtacatcaaa

SEQ ID NO: 123469 - DNA, 19 bp, Homo sapiens
  siRNA target sequence for IL1RL2 (NM_003854.2,1679-1697).
cggagcagtcacagtgtat

SEQ ID NO: 123470 - DNA, 19 bp, Homo sapiens
  siRNA target sequence for MYD88 (NM_002468.2,133-151).
cgcctgtctctgttcttga

SEQ ID NO: 123471 - DNA, 19 bp, Homo sapiens
  siRNA target sequence for MYD88 (NM_002468.2,367-385).
gaggaggattgccaaaagt

SEQ ID NO: 123472 - DNA, 19 bp, Homo sapiens
  siRNA target sequence for MYD88 (NM_002468.2,369-387).
ggaggattgccaaaagtat

SEQ ID NO: 123473 - DNA, 19 bp, Homo sapiens
  siRNA target sequence for MYD88 (NM_002468.2,370-388).
gaggattgccaaaagtata

SEQ ID NO: 123474 - DNA, 19 bp, Homo sapiens
  siRNA target sequence for MYD88 (NM_002468.2,474-492).
gggcatcaccacacttgat

SEQ ID NO: 123475 - DNA, 19 bp, Homo sapiens
  siRNA target sequence for MYD88 (NM_002468.2,593-611).
caaactatcgactgaagtt

SEQ ID NO: 123476 - DNA, 19 bp, Homo sapiens
  siRNA target sequence for MYD88 (NM_002468.2,642-660).
cacctgtgtctggtctatt

SEQ ID NO: 123477 - DNA, 19 bp, Homo sapiens
  siRNA target sequence for MYD88 (NM_002468.2,661-679).
gctagtgagctcatcgaaa

SEQ ID NO: 123478 - DNA, 19 bp, Homo sapiens
  siRNA target sequence for MYD88 (NM_002468.2,790-808).
cgactgatccccatcaagt

SEQ ID NO: 123479 - DNA, 19 bp, Homo sapiens
  siRNA target sequence for MYD88 (NM_002468.2,791-809).
gactgatccccatcaagta

SEQ ID NO: 123480 - DNA, 19 bp, Homo sapiens
  siRNA target sequence for SIGIRR (NM_021805.1,487-505).
gaccagcactgaagtctat

SEQ ID NO: 123481 - DNA, 19 bp, Homo sapiens
  siRNA target sequence for SIGIRR (NM_021805.1,758-776).
cgcaagttcgtgaacttca

SEQ ID NO: 123482 - DNA, 19 bp, Homo sapiens
  siRNA target sequence for SIGIRR (NM_021805.1,984-1002).
cccgcagacccatcttcat

SEQ ID NO: 123483 - DNA, 19 bp, Homo sapiens
  siRNA target sequence for SIGIRR (NM_021805.1,1105-1123).
gactccttcctccgatttt

SEQ ID NO: 123484 - DNA, 19 bp, Homo sapiens
  siRNA target sequence for SIGIRR (NM_021805.1,1109-1127).
ccttcctccgatttttgga

SEQ ID NO: 123485 - DNA, 19 bp, Homo sapiens
  siRNA target sequence for SIGIRR (NM_021805.1,1394-1412).
ctcggctcgcgaaactaca

SEQ ID NO: 123486 - DNA, 19 bp, Homo sapiens
  siRNA target sequence for SIGIRR (NM_021805.1,1436-1454).
ctggtgtccaaggatgata

SEQ ID NO: 123487 - DNA, 19 bp, Homo sapiens
  siRNA target sequence for TLR1 (NM_003263.2,320-338).
cagatcagaatacaattat

SEQ ID NO: 123488 - DNA, 19 bp, Homo sapiens
  siRNA target sequence for TLR1 (NM_003263.2,325-343).
cagaatacaattatctgaa

SEQ ID NO: 123489 - DNA, 19 bp, Homo sapiens
  siRNA target sequence for TLR1 (NM_003263.2,432-450).
cgcaaaattatatatctga

SEQ ID NO: 123490 - DNA, 19 bp, Homo sapiens
  siRNA target sequence for TLR1 (NM_003263.2,459-477).
cttctgacatcttatcact

SEQ ID NO: 123491 - DNA, 19 bp, Homo sapiens
  siRNA target sequence for TLR1 (NM_003263.2,476-494).
ctgtcaaaactgaggattt

SEQ ID NO: 123492 - DNA, 19 bp, Homo sapiens
  siRNA target sequence for TLR1 (NM_003263.2,513-531).
gaatccagtatcttgatat

SEQ ID NO: 123493 - DNA, 19 bp, Homo sapiens
  siRNA target sequence for TLR1 (NM_003263.2,517-535).
ccagtatcttgatatcagt

SEQ ID NO: 123494 - DNA, 19 bp, Homo sapiens
  siRNA target sequence for TLR1 (NM_003263.2,569-587).
gatttgtcccacaacaagt

SEQ ID NO: 123495 - DNA, 19 bp, Homo sapiens
  siRNA target sequence for TLR1 (NM_003263.2,634-652).
cctgtcatttaatgcattt

SEQ ID NO: 123496 - DNA, 19 bp, Homo sapiens
  siRNA target sequence for TLR1 (NM_003263.2,637-655).
gtcatttaatgcatttgat

SEQ ID NO: 123497 - DNA, 19 bp, Homo sapiens
  siRNA target sequence for TLR1 (NM_003263.2,653-671).
gatgccctgcctatatgca

SEQ ID NO: 123498 - DNA, 19 bp, Homo sapiens
  siRNA target sequence for TLR1 (NM_003263.2,661-679).
gcctatatgcaaagagttt

SEQ ID NO: 123499 - DNA, 19 bp, Homo sapiens
  siRNA target sequence for TLR1 (NM_003263.2,680-698).
ggcaatatgtctcaactaa

SEQ ID NO: 123500 - DNA, 19 bp, Homo sapiens
  siRNA target sequence for TLR1 (NM_003263.2,681-699).
gcaatatgtctcaactaaa

SEQ ID NO: 123501 - DNA, 19 bp, Homo sapiens
  siRNA target sequence for TLR1 (NM_003263.2,781-799).
ggtcttaggagagacttat

SEQ ID NO: 123502 - DNA, 19 bp, Homo sapiens
  siRNA target sequence for TLR1 (NM_003263.2,816-834).
ctgagggccttcaagactt

SEQ ID NO: 123503 - DNA, 19 bp, Homo sapiens
  siRNA target sequence for TLR1 (NM_003263.2,818-836).
gagggccttcaagacttta

SEQ ID NO: 123504 - DNA, 19 bp, Homo sapiens
  siRNA target sequence for TLR1 (NM_003263.2,900-918).
cagtcaagactgtagcaaa

SEQ ID NO: 123505 - DNA, 19 bp, Homo sapiens
  siRNA target sequence for TLR1 (NM_003263.2,915-933).
caaatctggaactatctaa

SEQ ID NO: 123506 - DNA, 19 bp, Homo sapiens
  siRNA target sequence for TLR1 (NM_003263.2,920-938).
ctggaactatctaatatca

SEQ ID NO: 123507 - DNA, 19 bp, Homo sapiens
  siRNA target sequence for TLR1 (NM_003263.2,922-940).
ggaactatctaatatcaaa

SEQ ID NO: 123508 - DNA, 19 bp, Homo sapiens
  siRNA target sequence for TLR1 (NM_003263.2,923-941).
gaactatctaatatcaaat

SEQ ID NO: 123509 - DNA, 19 bp, Homo sapiens
  siRNA target sequence for TLR1 (NM_003263.2,942-960).
gtgtgctagaagataacaa

SEQ ID NO: 123510 - DNA, 19 bp, Homo sapiens
  siRNA target sequence for TLR1 (NM_003263.2,944-962).
gtgctagaagataacaaat

SEQ ID NO: 123511 - DNA, 19 bp, Homo sapiens
  siRNA target sequence for TLR1 (NM_003263.2,953-971).
gataacaaatgttcttact

SEQ ID NO: 123512 - DNA, 19 bp, Homo sapiens
  siRNA target sequence for TLR1 (NM_003263.2,963-981).
gttcttacttcctaagtat

SEQ ID NO: 123513 - DNA, 19 bp, Homo sapiens
  siRNA target sequence for TLR1 (NM_003263.2,978-996).
gtattctggcgaaacttca

SEQ ID NO: 123514 - DNA, 19 bp, Homo sapiens
  siRNA target sequence for TLR1 (NM_003263.2,983-1001).
ctggcgaaacttcaaacaa

SEQ ID NO: 123515 - DNA, 19 bp, Homo sapiens
  siRNA target sequence for TLR1 (NM_003263.2,985-1003).
ggcgaaacttcaaacaaat

SEQ ID NO: 123516 - DNA, 19 bp, Homo sapiens
  siRNA target sequence for TLR1 (NM_003263.2,1047-1065).
ggaattctttcattaggat

SEQ ID NO: 123517 - DNA, 19 bp, Homo sapiens
  siRNA target sequence for TLR1 (NM_003263.2,1076-1094).
gtttggcatacaactgtat

SEQ ID NO: 123518 - DNA, 19 bp, Homo sapiens
  siRNA target sequence for TLR1 (NM_003263.2,1080-1098).
ggcatacaactgtatggta

SEQ ID NO: 123519 - DNA, 19 bp, Homo sapiens
  siRNA target sequence for TLR1 (NM_003263.2,1081-1099).
gcatacaactgtatggtat

SEQ ID NO: 123520 - DNA, 19 bp, Homo sapiens
  siRNA target sequence for TLR1 (NM_003263.2,1082-1100).
catacaactgtatggtatt

SEQ ID NO: 123521 - DNA, 19 bp, Homo sapiens
  siRNA target sequence for TLR1 (NM_003263.2,1089-1107).
ctgtatggtatttctcaat

SEQ ID NO: 123522 - DNA, 19 bp, Homo sapiens
  siRNA target sequence for TLR1 (NM_003263.2,1091-1109).
gtatggtatttctcaattt

SEQ ID NO: 123523 - DNA, 19 bp, Homo sapiens
  siRNA target sequence for TLR1 (NM_003263.2,1095-1113).
ggtatttctcaatttcaaa

SEQ ID NO: 123524 - DNA, 19 bp, Homo sapiens
  siRNA target sequence for TLR1 (NM_003263.2,1135-1153).
ggacttcagagattttgat

SEQ ID NO: 123525 - DNA, 19 bp, Homo sapiens
  siRNA target sequence for TLR1 (NM_003263.2,1210-1228).
cggttttccgcaaagttat

SEQ ID NO: 123526 - DNA, 19 bp, Homo sapiens
  siRNA target sequence for TLR1 (NM_003263.2,1218-1236).
cgcaaagttatatctatga

SEQ ID NO: 123527 - DNA, 19 bp, Homo sapiens
  siRNA target sequence for TLR1 (NM_003263.2,1283-1301).
cgcatggtccacatgcttt

SEQ ID NO: 123528 - DNA, 19 bp, Homo sapiens
  siRNA target sequence for TLR1 (NM_003263.2,1298-1316).
ctttgcccatccaaaatta

SEQ ID NO: 123529 - DNA, 19 bp, Homo sapiens
  siRNA target sequence for TLR1 (NM_003263.2,1319-1337).
ccgttcctgcatttggatt

SEQ ID NO: 123530 - DNA, 19 bp, Homo sapiens
  siRNA target sequence for TLR1 (NM_003263.2,1468-1486).
gtctctgcaacaattggat

SEQ ID NO: 123531 - DNA, 19 bp, Homo sapiens
  siRNA target sequence for TLR1 (NM_003263.2,1470-1488).
ctctgcaacaattggatat

SEQ ID NO: 123532 - DNA, 19 bp, Homo sapiens
  siRNA target sequence for TLR1 (NM_003263.2,1483-1501).
ggatattagccagaattct

SEQ ID NO: 123533 - DNA, 19 bp, Homo sapiens
  siRNA target sequence for TLR1 (NM_003263.2,1492-1510).
ccagaattctgtaagctat

SEQ ID NO: 123534 - DNA, 19 bp, Homo sapiens
  siRNA target sequence for TLR1 (NM_003263.2,1500-1518).
ctgtaagctatgatgaaaa

SEQ ID NO: 123535 - DNA, 19 bp, Homo sapiens
  siRNA target sequence for TLR1 (NM_003263.2,1533-1551).
cttggactaaaagtttatt

SEQ ID NO: 123536 - DNA, 19 bp, Homo sapiens
  siRNA target sequence for TLR1 (NM_003263.2,2477-2495).
ccgcagtactccattccta

SEQ ID NO: 123537 - DNA, 19 bp, Homo sapiens
  siRNA target sequence for TLR1 (NM_003263.2,2487-2505).
ccattcctagcagttatca

SEQ ID NO: 123538 - DNA, 19 bp, Homo sapiens
  siRNA target sequence for TLR1 (NM_003263.2,2521-2539).
catggccaggaggacttat

SEQ ID NO: 123539 - DNA, 19 bp, Homo sapiens
  siRNA target sequence for TLR1 (NM_003263.2,2572-2590).
ccttttttgggctaactta

SEQ ID NO: 123540 - DNA, 19 bp, Homo sapiens
  siRNA target sequence for TLR1 (NM_003263.2,2587-2605).
cttaagggcagccattaat

SEQ ID NO: 123541 - DNA, 19 bp, Homo sapiens
  siRNA target sequence for TLR1 (NM_003263.2,2592-2610).
gggcagccattaatattaa

SEQ ID NO: 123542 - DNA, 19 bp, Homo sapiens
  siRNA target sequence for TLR1 (NM_003263.2,2595-2613).
cagccattaatattaagct

SEQ ID NO: 123543 - DNA, 19 bp, Homo sapiens
  siRNA target sequence for TLR10 (NM_030956.1,495-513).
catcagaaacatttacata

SEQ ID NO: 123544 - DNA, 19 bp, Homo sapiens
  siRNA target sequence for TLR10 (NM_030956.1,588-606).
ctccaacatgtctctaaga

SEQ ID NO: 123545 - DNA, 19 bp, Homo sapiens
  siRNA target sequence for TLR10 (NM_030956.1,633-651).
cacaacgacactggattta

SEQ ID NO: 123546 - DNA, 19 bp, Homo sapiens
  siRNA target sequence for TLR10 (NM_030956.1,654-672).
ctataacctcctttttcaa

SEQ ID NO: 123547 - DNA, 19 bp, Homo sapiens
  siRNA target sequence for TLR10 (NM_030956.1,697-715).
gtctccaaactgagagttt

SEQ ID NO: 123548 - DNA, 19 bp, Homo sapiens
  siRNA target sequence for TLR10 (NM_030956.1,717-735).
gattctatgccataacaga

SEQ ID NO: 123549 - DNA, 19 bp, Homo sapiens
  siRNA target sequence for TLR10 (NM_030956.1,725-743).
gccataacagaattcaaca

SEQ ID NO: 123550 - DNA, 19 bp, Homo sapiens
  siRNA target sequence for TLR10 (NM_030956.1,763-781).
gaattcaacaaggagttaa

SEQ ID NO: 123551 - DNA, 19 bp, Homo sapiens
  siRNA target sequence for TLR10 (NM_030956.1,774-792).
ggagttaagatatttagat

SEQ ID NO: 123552 - DNA, 19 bp, Homo sapiens
  siRNA target sequence for TLR10 (NM_030956.1,782-800).
gatatttagatttgtctaa

SEQ ID NO: 123553 - DNA, 19 bp, Homo sapiens
  siRNA target sequence for TLR10 (NM_030956.1,815-833).
gtgtaacttggtatttact

SEQ ID NO: 123554 - DNA, 19 bp, Homo sapiens
  siRNA target sequence for TLR10 (NM_030956.1,832-850).
ctggcaggtctcaggtatt

SEQ ID NO: 123555 - DNA, 19 bp, Homo sapiens
  siRNA target sequence for TLR10 (NM_030956.1,834-852).
ggcaggtctcaggtattta

SEQ ID NO: 123556 - DNA, 19 bp, Homo sapiens
  siRNA target sequence for TLR10 (NM_030956.1,836-854).
caggtctcaggtatttaga

SEQ ID NO: 123557 - DNA, 19 bp, Homo sapiens
  siRNA target sequence for TLR10 (NM_030956.1,928-946).
ggtttgagtggggcaaaaa

SEQ ID NO: 123558 - DNA, 19 bp, Homo sapiens
  siRNA target sequence for TLR10 (NM_030956.1,929-947).
gtttgagtggggcaaaaat

SEQ ID NO: 123559 - DNA, 19 bp, Homo sapiens
  siRNA target sequence for TLR10 (NM_030956.1,973-991).
gctcatctgcatctaaata

SEQ ID NO: 123560 - DNA, 19 bp, Homo sapiens
  siRNA target sequence for TLR10 (NM_030956.1,1033-1051).
ggtagcctgcccatcttaa

SEQ ID NO: 123561 - DNA, 19 bp, Homo sapiens
  siRNA target sequence for TLR10 (NM_030956.1,1034-1052).
gtagcctgcccatcttaaa

SEQ ID NO: 123562 - DNA, 19 bp, Homo sapiens
  siRNA target sequence for TLR10 (NM_030956.1,1108-1126).
cgtgatggaatcaagactt

SEQ ID NO: 123563 - DNA, 19 bp, Homo sapiens
  siRNA target sequence for TLR10 (NM_030956.1,1156-1174).
ggcaaaagccaatttgtaa

SEQ ID NO: 123564 - DNA, 19 bp, Homo sapiens
  siRNA target sequence for TLR10 (NM_030956.1,1180-1198).
gaaatgcaacgaaatctta

SEQ ID NO: 123565 - DNA, 19 bp, Homo sapiens
  siRNA target sequence for TLR10 (NM_030956.1,1185-1203).
gcaacgaaatcttagttta

SEQ ID NO: 123566 - DNA, 19 bp, Homo sapiens
  siRNA target sequence for TLR10 (NM_030956.1,1210-1228).
gctaagacatcggttctat

SEQ ID NO: 123567 - DNA, 19 bp, Homo sapiens
  siRNA target sequence for TLR10 (NM_030956.1,1211-1229).
ctaagacatcggttctatt

SEQ ID NO: 123568 - DNA, 19 bp, Homo sapiens
  siRNA target sequence for TLR10 (NM_030956.1,1217-1235).
catcggttctattgcttaa

SEQ ID NO: 123569 - DNA, 19 bp, Homo sapiens
  siRNA target sequence for TLR10 (NM_030956.1,1220-1238).
cggttctattgcttaataa

SEQ ID NO: 123570 - DNA, 19 bp, Homo sapiens
  siRNA target sequence for TLR10 (NM_030956.1,1255-1273).
gacgaccttttccttatct

SEQ ID NO: 123571 - DNA, 19 bp, Homo sapiens
  siRNA target sequence for TLR10 (NM_030956.1,1257-1275).
cgaccttttccttatctta

SEQ ID NO: 123572 - DNA, 19 bp, Homo sapiens
  siRNA target sequence for TLR10 (NM_030956.1,1295-1313).
cagtggaacactttcagat

SEQ ID NO: 123573 - DNA, 19 bp, Homo sapiens
  siRNA target sequence for TLR10 (NM_030956.1,1311-1329).
gatccgaaatgtgactttt

SEQ ID NO: 123574 - DNA, 19 bp, Homo sapiens
  siRNA target sequence for TLR10 (NM_030956.1,1314-1332).
ccgaaatgtgacttttggt

SEQ ID NO: 123575 - DNA, 19 bp, Homo sapiens
  siRNA target sequence for TLR10 (NM_030956.1,1348-1366).
gaccacaattcatttgact

SEQ ID NO: 123576 - DNA, 19 bp, Homo sapiens
  siRNA target sequence for TLR10 (NM_030956.1,1363-1381).
gactactcaaatactgtaa

SEQ ID NO: 123577 - DNA, 19 bp, Homo sapiens
  siRNA target sequence for TLR10 (NM_030956.1,1408-1426).
catttcagagtgttttaca

SEQ ID NO: 123578 - DNA, 19 bp, Homo sapiens
  siRNA target sequence for TLR10 (NM_030956.1,1495-1513).
caaatgccacacatgcttt

SEQ ID NO: 123579 - DNA, 19 bp, Homo sapiens
  siRNA target sequence for TLR10 (NM_030956.1,1509-1527).
gcttttcccgaattatcct

SEQ ID NO: 123580 - DNA, 19 bp, Homo sapiens
  siRNA target sequence for TLR10 (NM_030956.1,1510-1528).
cttttcccgaattatccta

SEQ ID NO: 123581 - DNA, 19 bp, Homo sapiens
  siRNA target sequence for TLR10 (NM_030956.1,1515-1533).
cccgaattatcctacgaaa

SEQ ID NO: 123582 - DNA, 19 bp, Homo sapiens
  siRNA target sequence for TLR10 (NM_030956.1,1516-1534).
ccgaattatcctacgaaat

SEQ ID NO: 123583 - DNA, 19 bp, Homo sapiens
  siRNA target sequence for TLR10 (NM_030956.1,1517-1535).
cgaattatcctacgaaatt

SEQ ID NO: 123584 - DNA, 19 bp, Homo sapiens
  siRNA target sequence for TLR10 (NM_030956.1,1525-1543).
cctacgaaattccaatatt

SEQ ID NO: 123585 - DNA, 19 bp, Homo sapiens
  siRNA target sequence for TLR10 (NM_030956.1,1563-1581).
cttaacagacgagttgttt

SEQ ID NO: 123586 - DNA, 19 bp, Homo sapiens
  siRNA target sequence for TLR10 (NM_030956.1,1638-1656).
ggagacactttctttagta

SEQ ID NO: 123587 - DNA, 19 bp, Homo sapiens
  siRNA target sequence for TLR10 (NM_030956.1,1639-1657).
gagacactttctttagtaa

SEQ ID NO: 123588 - DNA, 19 bp, Homo sapiens
  siRNA target sequence for TLR10 (NM_030956.1,1687-1705).
cacttggatctgagtcaaa

SEQ ID NO: 123589 - DNA, 19 bp, Homo sapiens
  siRNA target sequence for TLR10 (NM_030956.1,1692-1710).
ggatctgagtcaaaatcta

SEQ ID NO: 123590 - DNA, 19 bp, Homo sapiens
  siRNA target sequence for TLR10 (NM_030956.1,1693-1711).
gatctgagtcaaaatctat

SEQ ID NO: 123591 - DNA, 19 bp, Homo sapiens
  siRNA target sequence for TLR10 (NM_030956.1,1751-1769).
ctgtggtcaatatgaatct

SEQ ID NO: 123592 - DNA, 19 bp, Homo sapiens
  siRNA target sequence for TLR10 (NM_030956.1,1770-1788).
gtcatacaataaattgtct

SEQ ID NO: 123593 - DNA, 19 bp, Homo sapiens
  siRNA target sequence for TLR10 (NM_030956.1,1805-1823).
gcttgcccaaaagtattca

SEQ ID NO: 123594 - DNA, 19 bp, Homo sapiens
  siRNA target sequence for TLR10 (NM_030956.1,1856-1874).
ctgtacctaaagagactat

SEQ ID NO: 123595 - DNA, 19 bp, Homo sapiens
  siRNA target sequence for TLR10 (NM_030956.1,1881-1899).
gatggccttacgagaacta

SEQ ID NO: 123596 - DNA, 19 bp, Homo sapiens
  siRNA target sequence for TLR10 (NM_030956.1,1887-1905).
cttacgagaactaaatatt

SEQ ID NO: 123597 - DNA, 19 bp, Homo sapiens
  siRNA target sequence for TLR10 (NM_030956.1,1891-1909).
cgagaactaaatattgcat

SEQ ID NO: 123598 - DNA, 19 bp, Homo sapiens
  siRNA target sequence for TLR10 (NM_030956.1,2019-2037).
ccaggaagttaaaactcta

SEQ ID NO: 123599 - DNA, 19 bp, Homo sapiens
  siRNA target sequence for TLR10 (NM_030956.1,2020-2038).
caggaagttaaaactctaa

SEQ ID NO: 123600 - DNA, 19 bp, Homo sapiens
  siRNA target sequence for TLR10 (NM_030956.1,2033-2051).
ctctaaatgcgggaagaaa

SEQ ID NO: 123601 - DNA, 19 bp, Homo sapiens
  siRNA target sequence for TLR10 (NM_030956.1,2059-2077).
cggtgtacctgtgaattaa

SEQ ID NO: 123602 - DNA, 19 bp, Homo sapiens
  siRNA target sequence for TLR10 (NM_030956.1,2060-2078).
ggtgtacctgtgaattaaa

SEQ ID NO: 123603 - DNA, 19 bp, Homo sapiens
  siRNA target sequence for TLR10 (NM_030956.1,2118-2136).
ggttggatggtcagattca

SEQ ID NO: 123604 - DNA, 19 bp, Homo sapiens
  siRNA target sequence for TLR10 (NM_030956.1,2131-2149).
gattcatacacctgtgaat

SEQ ID NO: 123605 - DNA, 19 bp, Homo sapiens
  siRNA target sequence for TLR10 (NM_030956.1,2144-2162).
gtgaataccctttaaacct

SEQ ID NO: 123606 - DNA, 19 bp, Homo sapiens
  siRNA target sequence for TLR10 (NM_030956.1,2184-2202).
cgttcatctccacgaatta

SEQ ID NO: 123607 - DNA, 19 bp, Homo sapiens
  siRNA target sequence for TLR10 (NM_030956.1,2185-2203).
gttcatctccacgaattat

SEQ ID NO: 123608 - DNA, 19 bp, Homo sapiens
  siRNA target sequence for TLR10 (NM_030956.1,2188-2206).
catctccacgaattatctt

SEQ ID NO: 123609 - DNA, 19 bp, Homo sapiens
  siRNA target sequence for TLR10 (NM_030956.1,2317-2335).
ggtcaatgcacacaaacat

SEQ ID NO: 123610 - DNA, 19 bp, Homo sapiens
  siRNA target sequence for TLR10 (NM_030956.1,2337-2355).
gcacagggttaggaaaaca

SEQ ID NO: 123611 - DNA, 19 bp, Homo sapiens
  siRNA target sequence for TLR10 (NM_030956.1,2380-2398).
gtccgattccacgcattta

SEQ ID NO: 123612 - DNA, 19 bp, Homo sapiens
  siRNA target sequence for TLR10 (NM_030956.1,2382-2400).
ccgattccacgcatttatt

SEQ ID NO: 123613 - DNA, 19 bp, Homo sapiens
  siRNA target sequence for TLR10 (NM_030956.1,2383-2401).
cgattccacgcatttattt

SEQ ID NO: 123614 - DNA, 19 bp, Homo sapiens
  siRNA target sequence for TLR10 (NM_030956.1,2475-2493).
cttgatttgcctttatgaa

SEQ ID NO: 123615 - DNA, 19 bp, Homo sapiens
  siRNA target sequence for TLR10 (NM_030956.1,2505-2523).
ccctggcaaaagcattagt

SEQ ID NO: 123616 - DNA, 19 bp, Homo sapiens
  siRNA target sequence for TLR10 (NM_030956.1,2516-2534).
gcattagtgaaaatattgt

SEQ ID NO: 123617 - DNA, 19 bp, Homo sapiens
  siRNA target sequence for TLR10 (NM_030956.1,2517-2535).
cattagtgaaaatattgta

SEQ ID NO: 123618 - DNA, 19 bp, Homo sapiens
  siRNA target sequence for TLR10 (NM_030956.1,2533-2551).
gtaagcttcattgagaaaa

SEQ ID NO: 123619 - DNA, 19 bp, Homo sapiens
  siRNA target sequence for TLR10 (NM_030956.1,2680-2698).
cccattccattctattgca

SEQ ID NO: 123620 - DNA, 19 bp, Homo sapiens
  siRNA target sequence for TLR10 (NM_030956.1,2697-2715).
cattcccaccaggtatcat

SEQ ID NO: 123621 - DNA, 19 bp, Homo sapiens
  siRNA target sequence for TLR10 (NM_030956.1,2702-2720).
ccaccaggtatcataaact

SEQ ID NO: 123622 - DNA, 19 bp, Homo sapiens
  siRNA target sequence for TLR10 (NM_030956.1,2706-2724).
caggtatcataaactgaaa

SEQ ID NO: 123623 - DNA, 19 bp, Homo sapiens
  siRNA target sequence for TLR10 (NM_030956.1,2758-2776).
cccaaggataggcgtaaat

SEQ ID NO: 123624 - DNA, 19 bp, Homo sapiens
  siRNA target sequence for TLR10 (NM_030956.1,2760-2778).
caaggataggcgtaaatgt

SEQ ID NO: 123625 - DNA, 19 bp, Homo sapiens
  siRNA target sequence for TLR10 (NM_030956.1,2853-2871).
gacattcacagagttaaat

SEQ ID NO: 123626 - DNA, 19 bp, Homo sapiens
  siRNA target sequence for TLR10 (NM_030956.1,2875-2893).
gagtctcgaggttctacaa

SEQ ID NO: 123627 - DNA, 19 bp, Homo sapiens
  siRNA target sequence for TLR2 (NM_003264.2,176-194).
gggtcttgggggtcatcat

SEQ ID NO: 123628 - DNA, 19 bp, Homo sapiens
  siRNA target sequence for TLR2 (NM_003264.2,178-196).
gtcttgggggtcatcatca

SEQ ID NO: 123629 - DNA, 19 bp, Homo sapiens
  siRNA target sequence for TLR2 (NM_003264.2,261-279).
gggcagctcaggatcttta

SEQ ID NO: 123630 - DNA, 19 bp, Homo sapiens
  siRNA target sequence for TLR2 (NM_003264.2,262-280).
ggcagctcaggatctttaa

SEQ ID NO: 123631 - DNA, 19 bp, Homo sapiens
  siRNA target sequence for TLR2 (NM_003264.2,263-281).
gcagctcaggatctttaaa

SEQ ID NO: 123632 - DNA, 19 bp, Homo sapiens
  siRNA target sequence for TLR2 (NM_003264.2,394-412).
gtgctgacatccaatggaa

SEQ ID NO: 123633 - DNA, 19 bp, Homo sapiens
  siRNA target sequence for TLR2 (NM_003264.2,405-423).
caatggaattaacacaata

SEQ ID NO: 123634 - DNA, 19 bp, Homo sapiens
  siRNA target sequence for TLR2 (NM_003264.2,443-461).
ccctgggcagtcttgaaca

SEQ ID NO: 123635 - DNA, 19 bp, Homo sapiens
  siRNA target sequence for TLR2 (NM_003264.2,447-465).
gggcagtcttgaacattta

SEQ ID NO: 123636 - DNA, 19 bp, Homo sapiens
  siRNA target sequence for TLR2 (NM_003264.2,452-470).
gtcttgaacatttagactt

SEQ ID NO: 123637 - DNA, 19 bp, Homo sapiens
  siRNA target sequence for TLR2 (NM_003264.2,457-475).
gaacatttagacttatcct

SEQ ID NO: 123638 - DNA, 19 bp, Homo sapiens
  siRNA target sequence for TLR2 (NM_003264.2,466-484).
gacttatcctataattact

SEQ ID NO: 123639 - DNA, 19 bp, Homo sapiens
  siRNA target sequence for TLR2 (NM_003264.2,468-486).
cttatcctataattactta

SEQ ID NO: 123640 - DNA, 19 bp, Homo sapiens
  siRNA target sequence for TLR2 (NM_003264.2,473-491).
cctataattacttatctaa

SEQ ID NO: 123641 - DNA, 19 bp, Homo sapiens
  siRNA target sequence for TLR2 (NM_003264.2,474-492).
ctataattacttatctaat

SEQ ID NO: 123642 - DNA, 19 bp, Homo sapiens
  siRNA target sequence for TLR2 (NM_003264.2,627-645).
ggacaccttcactaagatt

SEQ ID NO: 123643 - DNA, 19 bp, Homo sapiens
  siRNA target sequence for TLR2 (NM_003264.2,630-648).
caccttcactaagattcaa

SEQ ID NO: 123644 - DNA, 19 bp, Homo sapiens
  siRNA target sequence for TLR2 (NM_003264.2,690-708).
gattgatgcttcagatcta

SEQ ID NO: 123645 - DNA, 19 bp, Homo sapiens
  siRNA target sequence for TLR2 (NM_003264.2,711-729).
gagctatgagccaaaaagt

SEQ ID NO: 123646 - DNA, 19 bp, Homo sapiens
  siRNA target sequence for TLR2 (NM_003264.2,713-731).
gctatgagccaaaaagttt

SEQ ID NO: 123647 - DNA, 19 bp, Homo sapiens
  siRNA target sequence for TLR2 (NM_003264.2,732-750).
gaagtcaattcagaatgta

SEQ ID NO: 123648 - DNA, 19 bp, Homo sapiens
  siRNA target sequence for TLR2 (NM_003264.2,735-753).
gtcaattcagaatgtaagt

SEQ ID NO: 123649 - DNA, 19 bp, Homo sapiens
  siRNA target sequence for TLR2 (NM_003264.2,812-830).
caagttccgtggaatgttt

SEQ ID NO: 123650 - DNA, 19 bp, Homo sapiens
  siRNA target sequence for TLR2 (NM_003264.2,831-849).
ggaactgcgagatactgat

SEQ ID NO: 123651 - DNA, 19 bp, Homo sapiens
  siRNA target sequence for TLR2 (NM_003264.2,847-865).
gatttggacactttccatt

SEQ ID NO: 123652 - DNA, 19 bp, Homo sapiens
  siRNA target sequence for TLR2 (NM_003264.2,933-951).
caccgatgaaagtttgttt

SEQ ID NO: 123653 - DNA, 19 bp, Homo sapiens
  siRNA target sequence for TLR2 (NM_003264.2,1014-1032).
ccttaatggagttggtaat

SEQ ID NO: 123654 - DNA, 19 bp, Homo sapiens
  siRNA target sequence for TLR2 (NM_003264.2,1043-1061).
ctgataatgacagagttat

SEQ ID NO: 123655 - DNA, 19 bp, Homo sapiens
  siRNA target sequence for TLR2 (NM_003264.2,1069-1087).
ggtaaagtggaaacgttaa

SEQ ID NO: 123656 - DNA, 19 bp, Homo sapiens
  siRNA target sequence for TLR2 (NM_003264.2,1088-1106).
caatccggaggctgcatat

SEQ ID NO: 123657 - DNA, 19 bp, Homo sapiens
  siRNA target sequence for TLR2 (NM_003264.2,1092-1110).
ccggaggctgcatattcca

SEQ ID NO: 123658 - DNA, 19 bp, Homo sapiens
  siRNA target sequence for TLR2 (NM_003264.2,1093-1111).
cggaggctgcatattccaa

SEQ ID NO: 123659 - DNA, 19 bp, Homo sapiens
  siRNA target sequence for TLR2 (NM_003264.2,1305-1323).
ctggccctctctacaaact

SEQ ID NO: 123660 - DNA, 19 bp, Homo sapiens
  siRNA target sequence for TLR2 (NM_003264.2,1311-1329).
ctctctacaaactttaatt

SEQ ID NO: 123661 - DNA, 19 bp, Homo sapiens
  siRNA target sequence for TLR2 (NM_003264.2,1395-1413).
gactaacattgatatcagt

SEQ ID NO: 123662 - DNA, 19 bp, Homo sapiens
  siRNA target sequence for TLR2 (NM_003264.2,1397-1415).
ctaacattgatatcagtaa

SEQ ID NO: 123663 - DNA, 19 bp, Homo sapiens
  siRNA target sequence for TLR2 (NM_003264.2,1405-1423).
gatatcagtaagaatagtt

SEQ ID NO: 123664 - DNA, 19 bp, Homo sapiens
  siRNA target sequence for TLR2 (NM_003264.2,1442-1460).
cttgtcagtggccagaaaa

SEQ ID NO: 123665 - DNA, 19 bp, Homo sapiens
  siRNA target sequence for TLR2 (NM_003264.2,1476-1494).
cttatccagcacacgaata

SEQ ID NO: 123666 - DNA, 19 bp, Homo sapiens
  siRNA target sequence for TLR2 (NM_003264.2,1544-1562).
gcaacaacaatctcaattt

SEQ ID NO: 123667 - DNA, 19 bp, Homo sapiens
  siRNA target sequence for TLR2 (NM_003264.2,1545-1563).
caacaacaatctcaattta

SEQ ID NO: 123668 - DNA, 19 bp, Homo sapiens
  siRNA target sequence for TLR2 (NM_003264.2,1572-1590).
gaatttgccgcaactcaaa

SEQ ID NO: 123669 - DNA, 19 bp, Homo sapiens
  siRNA target sequence for TLR2 (NM_003264.2,1578-1596).
gccgcaactcaaagaactt

SEQ ID NO: 123670 - DNA, 19 bp, Homo sapiens
  siRNA target sequence for TLR2 (NM_003264.2,1635-1653).
ctccctcttacccatgtta

SEQ ID NO: 123671 - DNA, 19 bp, Homo sapiens
  siRNA target sequence for TLR2 (NM_003264.2,1637-1655).
ccctcttacccatgttact

SEQ ID NO: 123672 - DNA, 19 bp, Homo sapiens
  siRNA target sequence for TLR2 (NM_003264.2,1638-1656).
cctcttacccatgttacta

SEQ ID NO: 123673 - DNA, 19 bp, Homo sapiens
  siRNA target sequence for TLR2 (NM_003264.2,1645-1663).
cccatgttactagtattga

SEQ ID NO: 123674 - DNA, 19 bp, Homo sapiens
  siRNA target sequence for TLR2 (NM_003264.2,1654-1672).
ctagtattgaaaatcagta

SEQ ID NO: 123675 - DNA, 19 bp, Homo sapiens
  siRNA target sequence for TLR2 (NM_003264.2,1674-1692).
gaatgcaataactacgttt

SEQ ID NO: 123676 - DNA, 19 bp, Homo sapiens
  siRNA target sequence for TLR2 (NM_003264.2,1678-1696).
gcaataactacgttttcta

SEQ ID NO: 123677 - DNA, 19 bp, Homo sapiens
  siRNA target sequence for TLR2 (NM_003264.2,1679-1697).
caataactacgttttctaa

SEQ ID NO: 123678 - DNA, 19 bp, Homo sapiens
  siRNA target sequence for TLR2 (NM_003264.2,1799-1817).
cactggccaaagtcttgat

SEQ ID NO: 123679 - DNA, 19 bp, Homo sapiens
  siRNA target sequence for TLR2 (NM_003264.2,1815-1833).
gattgattggccagcaaat

SEQ ID NO: 123680 - DNA, 19 bp, Homo sapiens
  siRNA target sequence for TLR2 (NM_003264.2,1987-2005).
catggcctgtggtatatga

SEQ ID NO: 123681 - DNA, 19 bp, Homo sapiens
  siRNA target sequence for TLR2 (NM_003264.2,2463-2481).
ggaaggattttgggtaaat

SEQ ID NO: 123682 - DNA, 19 bp, Homo sapiens
  siRNA target sequence for TLR2 (NM_003264.2,2467-2485).
ggattttgggtaaatctga

SEQ ID NO: 123683 - DNA, 19 bp, Homo sapiens
  siRNA target sequence for TLR6 (NM_006068.2,78-96).
caaagaacctattgttaaa

SEQ ID NO: 123684 - DNA, 19 bp, Homo sapiens
  siRNA target sequence for TLR6 (NM_006068.2,109-127).
gtttgccttatgatcataa

SEQ ID NO: 123685 - DNA, 19 bp, Homo sapiens
  siRNA target sequence for TLR6 (NM_006068.2,113-131).
gccttatgatcataatagt

SEQ ID NO: 123686 - DNA, 19 bp, Homo sapiens
  siRNA target sequence for TLR6 (NM_006068.2,114-132).
ccttatgatcataatagtt

SEQ ID NO: 123687 - DNA, 19 bp, Homo sapiens
  siRNA target sequence for TLR6 (NM_006068.2,150-168).
ctccgacggaaatgaattt

SEQ ID NO: 123688 - DNA, 19 bp, Homo sapiens
  siRNA target sequence for TLR6 (NM_006068.2,153-171).
cgacggaaatgaatttgca

SEQ ID NO: 123689 - DNA, 19 bp, Homo sapiens
  siRNA target sequence for TLR6 (NM_006068.2,182-200).
caaaaagaggtcttattca

SEQ ID NO: 123690 - DNA, 19 bp, Homo sapiens
  siRNA target sequence for TLR6 (NM_006068.2,191-209).
gtcttattcatgttccaaa

SEQ ID NO: 123691 - DNA, 19 bp, Homo sapiens
  siRNA target sequence for TLR6 (NM_006068.2,211-229).
gacctaccgctgaaaacca

SEQ ID NO: 123692 - DNA, 19 bp, Homo sapiens
  siRNA target sequence for TLR6 (NM_006068.2,213-231).
cctaccgctgaaaaccaaa

SEQ ID NO: 123693 - DNA, 19 bp, Homo sapiens
  siRNA target sequence for TLR6 (NM_006068.2,219-237).
gctgaaaaccaaagtctta

SEQ ID NO: 123694 - DNA, 19 bp, Homo sapiens
  siRNA target sequence for TLR6 (NM_006068.2,238-256).
gatatgtctcagaactaca

SEQ ID NO: 123695 - DNA, 19 bp, Homo sapiens
  siRNA target sequence for TLR6 (NM_006068.2,360-378).
caaccaggatttagaatat

SEQ ID NO: 123696 - DNA, 19 bp, Homo sapiens
  siRNA target sequence for TLR6 (NM_006068.2,397-415).
cagttgcaaaagatatcct

SEQ ID NO: 123697 - DNA, 19 bp, Homo sapiens
  siRNA target sequence for TLR6 (NM_006068.2,408-426).
gatatcctgccatcctatt

SEQ ID NO: 123698 - DNA, 19 bp, Homo sapiens
  siRNA target sequence for TLR6 (NM_006068.2,418-436).
catcctattgtgagtttca

SEQ ID NO: 123699 - DNA, 19 bp, Homo sapiens
  siRNA target sequence for TLR6 (NM_006068.2,429-447).
gagtttcaggcatttagat

SEQ ID NO: 123700 - DNA, 19 bp, Homo sapiens
  siRNA target sequence for TLR6 (NM_006068.2,448-466).
ctctcattcaatgatttca

SEQ ID NO: 123701 - DNA, 19 bp, Homo sapiens
  siRNA target sequence for TLR6 (NM_006068.2,494-512).
gcaacttatcacaactgaa

SEQ ID NO: 123702 - DNA, 19 bp, Homo sapiens
  siRNA target sequence for TLR6 (NM_006068.2,565-583).
gctcacttgcatctaagtt

SEQ ID NO: 123703 - DNA, 19 bp, Homo sapiens
  siRNA target sequence for TLR6 (NM_006068.2,573-591).
gcatctaagttatatcctt

SEQ ID NO: 123704 - DNA, 19 bp, Homo sapiens
  siRNA target sequence for TLR6 (NM_006068.2,581-599).
gttatatccttctggattt

SEQ ID NO: 123705 - DNA, 19 bp, Homo sapiens
  siRNA target sequence for TLR6 (NM_006068.2,627-645).
gacagaaagtctacaaatt

SEQ ID NO: 123706 - DNA, 19 bp, Homo sapiens
  siRNA target sequence for TLR6 (NM_006068.2,670-688).
gtttttcacccaactagtt

SEQ ID NO: 123707 - DNA, 19 bp, Homo sapiens
  siRNA target sequence for TLR6 (NM_006068.2,693-711).
cgctatccaagtgaacata

SEQ ID NO: 123708 - DNA, 19 bp, Homo sapiens
  siRNA target sequence for TLR6 (NM_006068.2,705-723).
gaacatatcagttaatact

SEQ ID NO: 123709 - DNA, 19 bp, Homo sapiens
  siRNA target sequence for TLR6 (NM_006068.2,722-740).
ctttagggtgcttacaact

SEQ ID NO: 123710 - DNA, 19 bp, Homo sapiens
  siRNA target sequence for TLR6 (NM_006068.2,728-746).
ggtgcttacaactgactaa

SEQ ID NO: 123711 - DNA, 19 bp, Homo sapiens
  siRNA target sequence for TLR6 (NM_006068.2,731-749).
gcttacaactgactaatat

SEQ ID NO: 123712 - DNA, 19 bp, Homo sapiens
  siRNA target sequence for TLR6 (NM_006068.2,763-781).
gacaactgtcaagttttca

SEQ ID NO: 123713 - DNA, 19 bp, Homo sapiens
  siRNA target sequence for TLR6 (NM_006068.2,801-819).
caccagaggttcaacctta

SEQ ID NO: 123714 - DNA, 19 bp, Homo sapiens
  siRNA target sequence for TLR6 (NM_006068.2,806-824).
gaggttcaaccttactgaa

SEQ ID NO: 123715 - DNA, 19 bp, Homo sapiens
  siRNA target sequence for TLR6 (NM_006068.2,808-826).
ggttcaaccttactgaatt

SEQ ID NO: 123716 - DNA, 19 bp, Homo sapiens
  siRNA target sequence for TLR6 (NM_006068.2,861-879).
cctggtcagagtctttcaa

SEQ ID NO: 123717 - DNA, 19 bp, Homo sapiens
  siRNA target sequence for TLR6 (NM_006068.2,895-913).
cctgtggaatatctcaata

SEQ ID NO: 123718 - DNA, 19 bp, Homo sapiens
  siRNA target sequence for TLR6 (NM_006068.2,898-916).
gtggaatatctcaatattt

SEQ ID NO: 123719 - DNA, 19 bp, Homo sapiens
  siRNA target sequence for TLR6 (NM_006068.2,943-961).
cgtgaagaagattttactt

SEQ ID NO: 123720 - DNA, 19 bp, Homo sapiens
  siRNA target sequence for TLR6 (NM_006068.2,997-1015).
catatcacgaaccaagttt

SEQ ID NO: 123721 - DNA, 19 bp, Homo sapiens
  siRNA target sequence for TLR6 (NM_006068.2,1004-1022).
cgaaccaagtttttctgtt

SEQ ID NO: 123722 - DNA, 19 bp, Homo sapiens
  siRNA target sequence for TLR6 (NM_006068.2,1043-1061).
ccgtgttttctgagatgaa

SEQ ID NO: 123723 - DNA, 19 bp, Homo sapiens
  siRNA target sequence for TLR6 (NM_006068.2,1071-1089).
gttaaccatttcagataca

SEQ ID NO: 123724 - DNA, 19 bp, Homo sapiens
  siRNA target sequence for TLR6 (NM_006068.2,1187-1205).
ccacgttagttaaattgga

SEQ ID NO: 123725 - DNA, 19 bp, Homo sapiens
  siRNA target sequence for TLR6 (NM_006068.2,1195-1213).
gttaaattggagacactta

SEQ ID NO: 123726 - DNA, 19 bp, Homo sapiens
  siRNA target sequence for TLR6 (NM_006068.2,1228-1246).
ggattaaaagaccttttca

SEQ ID NO: 123727 - DNA, 19 bp, Homo sapiens
  siRNA target sequence for TLR6 (NM_006068.2,1252-1270).
ggtctcatgacgaaggata

SEQ ID NO: 123728 - DNA, 19 bp, Homo sapiens
  siRNA target sequence for TLR6 (NM_006068.2,1253-1271).
gtctcatgacgaaggatat

SEQ ID NO: 123729 - DNA, 19 bp, Homo sapiens
  siRNA target sequence for TLR6 (NM_006068.2,1290-1308).
ggatgttagctggaattct

SEQ ID NO: 123730 - DNA, 19 bp, Homo sapiens
  siRNA target sequence for TLR6 (NM_006068.2,1291-1309).
gatgttagctggaattctt

SEQ ID NO: 123731 - DNA, 19 bp, Homo sapiens
  siRNA target sequence for TLR6 (NM_006068.2,1311-1329).
ggaatctggtagacataaa

SEQ ID NO: 123732 - DNA, 19 bp, Homo sapiens
  siRNA target sequence for TLR6 (NM_006068.2,1337-1355).
gcacttgggttgagagtat

SEQ ID NO: 123733 - DNA, 19 bp, Homo sapiens
  siRNA target sequence for TLR6 (NM_006068.2,1338-1356).
cacttgggttgagagtata

SEQ ID NO: 123734 - DNA, 19 bp, Homo sapiens
  siRNA target sequence for TLR6 (NM_006068.2,2030-2048).
gggtgaaaagtgaattggt

SEQ ID NO: 123735 - DNA, 19 bp, Homo sapiens
  siRNA target sequence for TLR6 (NM_006068.2,2046-2064).
ggtaccttacctagaaaaa

SEQ ID NO: 123736 - DNA, 19 bp, Homo sapiens
  siRNA target sequence for TLR6 (NM_006068.2,2328-2346).
catgacgcagcggacttat

SEQ ID NO: 123737 - DNA, 19 bp, Homo sapiens
  siRNA target sequence for TLR6 (NM_006068.2,2333-2351).
cgcagcggacttatttgca

SEQ ID NO: 123738 - DNA, 19 bp, Homo sapiens
  siRNA target sequence for TLR6 (NM_006068.2,2379-2397).
gctcttttgggctaacatt

SEQ ID NO: 123739 - DNA, 19 bp, Homo sapiens
  siRNA target sequence for TLR6 (NM_006068.2,2394-2412).
cattagagccgcttttaat

SEQ ID NO: 123740 - DNA, 19 bp, Homo sapiens
  siRNA target sequence for TLR6 (NM_006068.2,2399-2417).
gagccgcttttaatatgaa

SEQ ID NO: 123741 - DNA, 19 bp, Homo sapiens
  siRNA target sequence for TLR6 (NM_006068.2,2404-2422).
gcttttaatatgaaattaa

SEQ ID NO: 123742 - DNA, 19 bp, Homo sapiens
  siRNA target sequence for IL1R2 (NM_004633.3,236-254).
cgcttgtacgtgttggtaa

SEQ ID NO: 123743 - DNA, 19 bp, Homo sapiens
  siRNA target sequence for IL1R2 (NM_004633.3,237-255).
gcttgtacgtgttggtaat

SEQ ID NO: 123744 - DNA, 19 bp, Homo sapiens
  siRNA target sequence for IL1R2 (NM_004633.3,247-265).
gttggtaatgggagtttct

SEQ ID NO: 123745 - DNA, 19 bp, Homo sapiens
  siRNA target sequence for IL1R2 (NM_004633.3,544-562).
ctacgtctgcactactaga

SEQ ID NO: 123746 - DNA, 19 bp, Homo sapiens
  siRNA target sequence for IL1R2 (NM_004633.3,547-565).
cgtctgcactactagaaat

SEQ ID NO: 123747 - DNA, 19 bp, Homo sapiens
  siRNA target sequence for IL1R2 (NM_004633.3,566-584).
gcttcttactgtgacaaaa

SEQ ID NO: 123748 - DNA, 19 bp, Homo sapiens
  siRNA target sequence for IL1R2 (NM_004633.3,567-585).
cttcttactgtgacaaaat

SEQ ID NO: 123749 - DNA, 19 bp, Homo sapiens
  siRNA target sequence for IL1R2 (NM_004633.3,596-614).
ctcagagtttttgagaata

SEQ ID NO: 123750 - DNA, 19 bp, Homo sapiens
  siRNA target sequence for IL1R2 (NM_004633.3,634-652).
catctcatacccgcaaatt

SEQ ID NO: 123751 - DNA, 19 bp, Homo sapiens
  siRNA target sequence for IL1R2 (NM_004633.3,637-655).
ctcatacccgcaaatttta

SEQ ID NO: 123752 - DNA, 19 bp, Homo sapiens
  siRNA target sequence for IL1R2 (NM_004633.3,663-681).
caacctctggggtattagt

SEQ ID NO: 123753 - DNA, 19 bp, Homo sapiens
  siRNA target sequence for IL1R2 (NM_004633.3,684-702).
gccctgacctgagtgaatt

SEQ ID NO: 123754 - DNA, 19 bp, Homo sapiens
  siRNA target sequence for IL1R2 (NM_004633.3,698-716).
gaattcacccgtgacaaaa

SEQ ID NO: 123755 - DNA, 19 bp, Homo sapiens
  siRNA target sequence for IL1R2 (NM_004633.3,712-730).
caaaactgacgtgaagatt

SEQ ID NO: 123756 - DNA, 19 bp, Homo sapiens
  siRNA target sequence for IL1R2 (NM_004633.3,736-754).
gtacaaggattctcttctt

SEQ ID NO: 123757 - DNA, 19 bp, Homo sapiens
  siRNA target sequence for IL1R2 (NM_004633.3,787-805).
gagggggaccactcactta

SEQ ID NO: 123758 - DNA, 19 bp, Homo sapiens
  siRNA target sequence for IL1R2 (NM_004633.3,789-807).
gggggaccactcacttact

SEQ ID NO: 123759 - DNA, 19 bp, Homo sapiens
  siRNA target sequence for IL1R2 (NM_004633.3,875-893).
cagcaatacaacatcacta

SEQ ID NO: 123760 - DNA, 19 bp, Homo sapiens
  siRNA target sequence for IL1R2 (NM_004633.3,883-901).
caacatcactaggagtatt

SEQ ID NO: 123761 - DNA, 19 bp, Homo sapiens
  siRNA target sequence for IL1R2 (NM_004633.3,902-920).
gagctacgcatcaagaaaa

SEQ ID NO: 123762 - DNA, 19 bp, Homo sapiens
  siRNA target sequence for IL1R2 (NM_004633.3,904-922).
gctacgcatcaagaaaaaa

SEQ ID NO: 123763 - DNA, 19 bp, Homo sapiens
  siRNA target sequence for IL1R2 (NM_004633.3,1105-1123).
ggggccacgccaggaatat

SEQ ID NO: 123764 - DNA, 19 bp, Homo sapiens
  siRNA target sequence for IL1R2 (NM_004633.3,1110-1128).
cacgccaggaatattcaga

SEQ ID NO: 123765 - DNA, 19 bp, Homo sapiens
  siRNA target sequence for IL1R2 (NM_004633.3,1112-1130).
cgccaggaatattcagaaa

SEQ ID NO: 123766 - DNA, 19 bp, Homo sapiens
  siRNA target sequence for IL1R2 (NM_004633.3,1181-1199).
gaggatttgcacatggatt

SEQ ID NO: 123767 - DNA, 19 bp, Homo sapiens
  siRNA target sequence for IL1R2 (NM_004633.3,1337-1355).
cacagacggtgcaaacaca

SEQ ID NO: 123768 - DNA, 19 bp, Homo sapiens
  siRNA target sequence for IL1R2 (NM_004633.3,1390-1408).
gcctcatcatcaagacttt

SEQ ID NO: 123769 - DNA, 19 bp, Homo sapiens
  siRNA target sequence for IL2RA (NM_000417.1,252-270).
cccacacgccacattcaaa

SEQ ID NO: 123770 - DNA, 19 bp, Homo sapiens
  siRNA target sequence for IL2RA (NM_000417.1,286-304).
gaaggaaccatgttgaact

SEQ ID NO: 123771 - DNA, 19 bp, Homo sapiens
  siRNA target sequence for IL2RA (NM_000417.1,315-333).
gagaggtttccgcagaata

SEQ ID NO: 123772 - DNA, 19 bp, Homo sapiens
  siRNA target sequence for IL2RA (NM_000417.1,317-335).
gaggtttccgcagaataaa

SEQ ID NO: 123773 - DNA, 19 bp, Homo sapiens
  siRNA target sequence for IL2RA (NM_000417.1,338-356).
gcgggtcactctatatgct

SEQ ID NO: 123774 - DNA, 19 bp, Homo sapiens
  siRNA target sequence for IL2RA (NM_000417.1,354-372).
gctctgtacaggaaactct

SEQ ID NO: 123775 - DNA, 19 bp, Homo sapiens
  siRNA target sequence for IL2RA (NM_000417.1,417-435).
cactcggaacacaacgaaa

SEQ ID NO: 123776 - DNA, 19 bp, Homo sapiens
  siRNA target sequence for IL2RA (NM_000417.1,563-581).
ccacagagagaatttatca

SEQ ID NO: 123777 - DNA, 19 bp, Homo sapiens
  siRNA target sequence for IL2RA (NM_000417.1,564-582).
cacagagagaatttatcat

SEQ ID NO: 123778 - DNA, 19 bp, Homo sapiens
  siRNA target sequence for IL2RA (NM_000417.1,589-607).
gtggggcagatggtttatt

SEQ ID NO: 123779 - DNA, 19 bp, Homo sapiens
  siRNA target sequence for IL2RA (NM_000417.1,591-609).
ggggcagatggtttattat

SEQ ID NO: 123780 - DNA, 19 bp, Homo sapiens
  siRNA target sequence for IL2RA (NM_000417.1,595-613).
cagatggtttattatcagt

SEQ ID NO: 123781 - DNA, 19 bp, Homo sapiens
  siRNA target sequence for IL2RA (NM_000417.1,649-667).
gctgagagcgtctgcaaaa

SEQ ID NO: 123782 - DNA, 19 bp, Homo sapiens
  siRNA target sequence for IL2RA (NM_000417.1,795-813).
ctgcctcgtcacaacaaca

SEQ ID NO: 123783 - DNA, 19 bp, Homo sapiens
  siRNA target sequence for IL2RA (NM_000417.1,798-816).
cctcgtcacaacaacagat

SEQ ID NO: 123784 - DNA, 19 bp, Homo sapiens
  siRNA target sequence for IL2RA (NM_000417.1,799-817).
ctcgtcacaacaacagatt

SEQ ID NO: 123785 - DNA, 19 bp, Homo sapiens
  siRNA target sequence for IL2RA (NM_000417.1,801-819).
cgtcacaacaacagatttt

SEQ ID NO: 123786 - DNA, 19 bp, Homo sapiens
  siRNA target sequence for IL2RA (NM_000417.1,845-863).
ccatggagacgtccatatt

SEQ ID NO: 123787 - DNA, 19 bp, Homo sapiens
  siRNA target sequence for IL2RA (NM_000417.1,849-867).
ggagacgtccatatttaca

SEQ ID NO: 123788 - DNA, 19 bp, Homo sapiens
  siRNA target sequence for IL2RA (NM_000417.1,852-870).
gacgtccatatttacaaca

SEQ ID NO: 123789 - DNA, 19 bp, Homo sapiens
  siRNA target sequence for IL2RB (NM_000878.2,219-237).
ggcacttcccagttcacat

SEQ ID NO: 123790 - DNA, 19 bp, Homo sapiens
  siRNA target sequence for IL2RB (NM_000878.2,228-246).
cagttcacatgcttctaca

SEQ ID NO: 123791 - DNA, 19 bp, Homo sapiens
  siRNA target sequence for IL2RB (NM_000878.2,398-416).
cctcggagccccagattct

SEQ ID NO: 123792 - DNA, 19 bp, Homo sapiens
  siRNA target sequence for IL2RB (NM_000878.2,563-581).
gacccacagatgcaacata

SEQ ID NO: 123793 - DNA, 19 bp, Homo sapiens
  siRNA target sequence for IL2RB (NM_000878.2,567-585).
cacagatgcaacataagct

SEQ ID NO: 123794 - DNA, 19 bp, Homo sapiens
  siRNA target sequence for IL2RB (NM_000878.2,595-613).
cccaagcctcccactactt

SEQ ID NO: 123795 - DNA, 19 bp, Homo sapiens
  siRNA target sequence for IL2RB (NM_000878.2,889-907).
gggcttttggcttcatcat

SEQ ID NO: 123796 - DNA, 19 bp, Homo sapiens
  siRNA target sequence for IL2RB (NM_000878.2,978-996).
ccagacccctcgaagttct

SEQ ID NO: 123797 - DNA, 19 bp, Homo sapiens
  siRNA target sequence for IL2RB (NM_000878.2,981-999).
gacccctcgaagttctttt

SEQ ID NO: 123798 - DNA, 19 bp, Homo sapiens
  siRNA target sequence for IL2RB (NM_000878.2,1160-1178).
gcctgagcccgcatcctta

SEQ ID NO: 123799 - DNA, 19 bp, Homo sapiens
  siRNA target sequence for IL2RB (NM_000878.2,1161-1179).
cctgagcccgcatccttaa

SEQ ID NO: 123800 - DNA, 19 bp, Homo sapiens
  siRNA target sequence for IL2RB (NM_000878.2,1164-1182).
gagcccgcatccttaagca

SEQ ID NO: 123801 - DNA, 19 bp, Homo sapiens
  siRNA target sequence for IL2RB (NM_000878.2,1210-1228).
ccaaccagggttacttctt

SEQ ID NO: 123802 - DNA, 19 bp, Homo sapiens
  siRNA target sequence for IL2RB (NM_000878.2,1259-1277).
ggcctgccaggtgtacttt

SEQ ID NO: 123803 - DNA, 19 bp, Homo sapiens
  siRNA target sequence for IL2RB (NM_000878.2,1264-1282).
gccaggtgtactttactta

SEQ ID NO: 123804 - DNA, 19 bp, Homo sapiens
  siRNA target sequence for IL2RB (NM_000878.2,1493-1511).
gatgcccccttctttgcaa

SEQ ID NO: 123805 - DNA, 19 bp, Homo sapiens
  siRNA target sequence for IL2RB (NM_000878.2,1691-1709).
ggagttcagggcccttaat

SEQ ID NO: 123806 - DNA, 19 bp, Homo sapiens
  siRNA target sequence for IL2RG (NM_000206.1,17-35).
gttgaagccatcattacca

SEQ ID NO: 123807 - DNA, 19 bp, Homo sapiens
  siRNA target sequence for IL2RG (NM_000206.1,23-41).
gccatcattaccattcaca

SEQ ID NO: 123808 - DNA, 19 bp, Homo sapiens
  siRNA target sequence for IL2RG (NM_000206.1,24-42).
ccatcattaccattcacat

SEQ ID NO: 123809 - DNA, 19 bp, Homo sapiens
  siRNA target sequence for IL2RG (NM_000206.1,77-95).
ggggctgaacacgacaatt

SEQ ID NO: 123810 - DNA, 19 bp, Homo sapiens
  siRNA target sequence for IL2RG (NM_000206.1,79-97).
ggctgaacacgacaattct

SEQ ID NO: 123811 - DNA, 19 bp, Homo sapiens
  siRNA target sequence for IL2RG (NM_000206.1,81-99).
ctgaacacgacaattctga

SEQ ID NO: 123812 - DNA, 19 bp, Homo sapiens
  siRNA target sequence for IL2RG (NM_000206.1,98-116).
gacgcccaatgggaatgaa

SEQ ID NO: 123813 - DNA, 19 bp, Homo sapiens
  siRNA target sequence for IL2RG (NM_000206.1,117-135).
gacaccacagctgatttct

SEQ ID NO: 123814 - DNA, 19 bp, Homo sapiens
  siRNA target sequence for IL2RG (NM_000206.1,209-227).
caatgtcgagtacatgaat

SEQ ID NO: 123815 - DNA, 19 bp, Homo sapiens
  siRNA target sequence for IL2RG (NM_000206.1,273-291).
ctgcattattggtacaaga

SEQ ID NO: 123816 - DNA, 19 bp, Homo sapiens
  siRNA target sequence for IL2RG (NM_000206.1,284-302).
gtacaagaactcggataat

SEQ ID NO: 123817 - DNA, 19 bp, Homo sapiens
  siRNA target sequence for IL2RG (NM_000206.1,287-305).
caagaactcggataatgat

SEQ ID NO: 123818 - DNA, 19 bp, Homo sapiens
  siRNA target sequence for IL2RG (NM_000206.1,290-308).
gaactcggataatgataaa

SEQ ID NO: 123819 - DNA, 19 bp, Homo sapiens
  siRNA target sequence for IL2RG (NM_000206.1,488-506).
gaacctaacacttcacaaa

SEQ ID NO: 123820 - DNA, 19 bp, Homo sapiens
  siRNA target sequence for IL2RG (NM_000206.1,498-516).
cttcacaaactgagtgaat

SEQ ID NO: 123821 - DNA, 19 bp, Homo sapiens
  siRNA target sequence for IL2RG (NM_000206.1,525-543).
gaactgaactggaacaaca

SEQ ID NO: 123822 - DNA, 19 bp, Homo sapiens
  siRNA target sequence for IL2RG (NM_000206.1,544-562).
gattcttgaaccactgttt

SEQ ID NO: 123823 - DNA, 19 bp, Homo sapiens
  siRNA target sequence for IL2RG (NM_000206.1,601-619).
gctggactgaacaatcagt

SEQ ID NO: 123824 - DNA, 19 bp, Homo sapiens
  siRNA target sequence for IL2RG (NM_000206.1,607-625).
ctgaacaatcagtggatta

SEQ ID NO: 123825 - DNA, 19 bp, Homo sapiens
  siRNA target sequence for IL2RG (NM_000206.1,714-732).
gctcagcattggagtgaat

SEQ ID NO: 123826 - DNA, 19 bp, Homo sapiens
  siRNA target sequence for IL2RG (NM_000206.1,746-764).
ccactgggggagcaatact

SEQ ID NO: 123827 - DNA, 19 bp, Homo sapiens
  siRNA target sequence for IL2RG (NM_000206.1,747-765).
cactgggggagcaatactt

SEQ ID NO: 123828 - DNA, 19 bp, Homo sapiens
  siRNA target sequence for IL2RG (NM_000206.1,751-769).
gggggagcaatacttcaaa

SEQ ID NO: 123829 - DNA, 19 bp, Homo sapiens
  siRNA target sequence for IL2RG (NM_000206.1,754-772).
ggagcaatacttcaaaaga

SEQ ID NO: 123830 - DNA, 19 bp, Homo sapiens
  siRNA target sequence for IL2RG (NM_000206.1,790-808).
cattggaagccgtggttat

SEQ ID NO: 123831 - DNA, 19 bp, Homo sapiens
  siRNA target sequence for IL2RG (NM_000206.1,794-812).
ggaagccgtggttatctct

SEQ ID NO: 123832 - DNA, 19 bp, Homo sapiens
  siRNA target sequence for IL2RG (NM_000206.1,899-917).
cctagaggatcttgttact

SEQ ID NO: 123833 - DNA, 19 bp, Homo sapiens
  siRNA target sequence for IL2RG (NM_000206.1,918-936).
gaataccacgggaactttt

SEQ ID NO: 123834 - DNA, 19 bp, Homo sapiens
  siRNA target sequence for IL10RA (NM_001558.2,252-270).
gcgctcctgaggtatggaa

SEQ ID NO: 123835 - DNA, 19 bp, Homo sapiens
  siRNA target sequence for IL10RA (NM_001558.2,253-271).
cgctcctgaggtatggaat

SEQ ID NO: 123836 - DNA, 19 bp, Homo sapiens
  siRNA target sequence for IL10RA (NM_001558.2,254-272).
gctcctgaggtatggaata

SEQ ID NO: 123837 - DNA, 19 bp, Homo sapiens
  siRNA target sequence for IL10RA (NM_001558.2,258-276).
ctgaggtatggaatagagt

SEQ ID NO: 123838 - DNA, 19 bp, Homo sapiens
  siRNA target sequence for IL10RA (NM_001558.2,485-503).
cttcatcctcgggaagatt

SEQ ID NO: 123839 - DNA, 19 bp, Homo sapiens
  siRNA target sequence for IL10RA (NM_001558.2,529-547).
ccgcaaatgacacatatga

SEQ ID NO: 123840 - DNA, 19 bp, Homo sapiens
  siRNA target sequence for IL10RA (NM_001558.2,559-577).
gtcacttccgagagtatga

SEQ ID NO: 123841 - DNA, 19 bp, Homo sapiens
  siRNA target sequence for IL10RA (NM_001558.2,589-607).
gcaaggtgccgggaaactt

SEQ ID NO: 123842 - DNA, 19 bp, Homo sapiens
  siRNA target sequence for IL10RA (NM_001558.2,608-626).
cacgttcacacacaagaaa

SEQ ID NO: 123843 - DNA, 19 bp, Homo sapiens
  siRNA target sequence for IL10RA (NM_001558.2,616-634).
cacacaagaaagtaaaaca

SEQ ID NO: 123844 - DNA, 19 bp, Homo sapiens
  siRNA target sequence for IL10RA (NM_001558.2,697-715).
ctgtcgcttcccgaagtaa

SEQ ID NO: 123845 - DNA, 19 bp, Homo sapiens
  siRNA target sequence for IL10RA (NM_001558.2,699-717).
gtcgcttcccgaagtaaca

SEQ ID NO: 123846 - DNA, 19 bp, Homo sapiens
  siRNA target sequence for IL10RA (NM_001558.2,949-967).
ccatccacccgcttgatga

SEQ ID NO: 123847 - DNA, 19 bp, Homo sapiens
  siRNA target sequence for IL10RA (NM_001558.2,963-981).
gatgaggaggcctttttga

SEQ ID NO: 123848 - DNA, 19 bp, Homo sapiens
  siRNA target sequence for IL10RA (NM_001558.2,1276-1294).
gtggcattgacttagttca

SEQ ID NO: 123849 - DNA, 19 bp, Homo sapiens
  siRNA target sequence for IL10RA (NM_001558.2,1278-1296).
ggcattgacttagttcaaa

SEQ ID NO: 123850 - DNA, 19 bp, Homo sapiens
  siRNA target sequence for IL10RA (NM_001558.2,1279-1297).
gcattgacttagttcaaaa

SEQ ID NO: 123851 - DNA, 19 bp, Homo sapiens
  siRNA target sequence for IL10RA (NM_001558.2,1507-1525).
ggagatgcctggttgatga

SEQ ID NO: 123852 - DNA, 19 bp, Homo sapiens
  siRNA target sequence for IL10RA (NM_001558.2,1548-1566).
ctggccaagggctatttga

SEQ ID NO: 123853 - DNA, 19 bp, Homo sapiens
  siRNA target sequence for IL10RB (NM_000628.3,144-162).
gtcagcattgggaatggta

SEQ ID NO: 123854 - DNA, 19 bp, Homo sapiens
  siRNA target sequence for IL10RB (NM_000628.3,159-177).
ggtaccacctcccgaaaat

SEQ ID NO: 123855 - DNA, 19 bp, Homo sapiens
  siRNA target sequence for IL10RB (NM_000628.3,163-181).
ccacctcccgaaaatgtca

SEQ ID NO: 123856 - DNA, 19 bp, Homo sapiens
  siRNA target sequence for IL10RB (NM_000628.3,178-196).
gtcagaatgaattctgtta

SEQ ID NO: 123857 - DNA, 19 bp, Homo sapiens
  siRNA target sequence for IL10RB (NM_000628.3,182-200).
gaatgaattctgttaattt

SEQ ID NO: 123858 - DNA, 19 bp, Homo sapiens
  siRNA target sequence for IL10RB (NM_000628.3,257-275).
cagctcagtacctaagtta

SEQ ID NO: 123859 - DNA, 19 bp, Homo sapiens
  siRNA target sequence for IL10RB (NM_000628.3,259-277).
gctcagtacctaagttata

SEQ ID NO: 123860 - DNA, 19 bp, Homo sapiens
  siRNA target sequence for IL10RB (NM_000628.3,264-282).
gtacctaagttataggata

SEQ ID NO: 123861 - DNA, 19 bp, Homo sapiens
  siRNA target sequence for IL10RB (NM_000628.3,305-323).
ctaccttgacggaatgtga

SEQ ID NO: 123862 - DNA, 19 bp, Homo sapiens
  siRNA target sequence for IL10RB (NM_000628.3,308-326).
ccttgacggaatgtgattt

SEQ ID NO: 123863 - DNA, 19 bp, Homo sapiens
  siRNA target sequence for IL10RB (NM_000628.3,444-462).
ccctggaatgcaagtagaa

SEQ ID NO: 123864 - DNA, 19 bp, Homo sapiens
  siRNA target sequence for IL10RB (NM_000628.3,446-464).
ctggaatgcaagtagaagt

SEQ ID NO: 123865 - DNA, 19 bp, Homo sapiens
  siRNA target sequence for IL10RB (NM_000628.3,476-494).
ctttacatatgcgtttctt

SEQ ID NO: 123866 - DNA, 19 bp, Homo sapiens
  siRNA target sequence for IL10RB (NM_000628.3,499-517).
cctaaaattgagaatgaat

SEQ ID NO: 123867 - DNA, 19 bp, Homo sapiens
  siRNA target sequence for IL10RB (NM_000628.3,508-526).
gagaatgaatacgaaactt

SEQ ID NO: 123868 - DNA, 19 bp, Homo sapiens
  siRNA target sequence for IL10RB (NM_000628.3,534-552).
gaagaatgtgtataactca

SEQ ID NO: 123869 - DNA, 19 bp, Homo sapiens
  siRNA target sequence for IL10RB (NM_000628.3,543-561).
gtataactcatggacttat

SEQ ID NO: 123870 - DNA, 19 bp, Homo sapiens
  siRNA target sequence for IL10RB (NM_000628.3,554-572).
ggacttataatgtgcaata

SEQ ID NO: 123871 - DNA, 19 bp, Homo sapiens
  siRNA target sequence for IL10RB (NM_000628.3,582-600).
cggtactgatgaaaagttt

SEQ ID NO: 123872 - DNA, 19 bp, Homo sapiens
  siRNA target sequence for IL10RB (NM_000628.3,645-663).
gccatggacaacttattgt

SEQ ID NO: 123873 - DNA, 19 bp, Homo sapiens
  siRNA target sequence for IL10RB (NM_000628.3,647-665).
catggacaacttattgtgt

SEQ ID NO: 123874 - DNA, 19 bp, Homo sapiens
  siRNA target sequence for IL10RB (NM_000628.3,651-669).
gacaacttattgtgttcaa

SEQ ID NO: 123875 - DNA, 19 bp, Homo sapiens
  siRNA target sequence for IL10RB (NM_000628.3,653-671).
caacttattgtgttcaagt

SEQ ID NO: 123876 - DNA, 19 bp, Homo sapiens
  siRNA target sequence for IL10RB (NM_000628.3,832-850).
ctgtggtgcgtttacaaga

SEQ ID NO: 123877 - DNA, 19 bp, Homo sapiens
  siRNA target sequence for IL10RB (NM_000628.3,861-879).
cgccttctcccctaggaat

SEQ ID NO: 123878 - DNA, 19 bp, Homo sapiens
  siRNA target sequence for IL10RB (NM_000628.3,862-880).
gccttctcccctaggaatt

SEQ ID NO: 123879 - DNA, 19 bp, Homo sapiens
  siRNA target sequence for IL10RB (NM_000628.3,867-885).
ctcccctaggaattctctt

SEQ ID NO: 123880 - DNA, 19 bp, Homo sapiens
  siRNA target sequence for IL10RB (NM_000628.3,886-904).
ccacagcacctgaaagagt

SEQ ID NO: 123881 - DNA, 19 bp, Homo sapiens
  siRNA target sequence for IL10RB (NM_000628.3,910-928).
ggccatcctcatcataaca

SEQ ID NO: 123882 - DNA, 19 bp, Homo sapiens
  siRNA target sequence for IL8RA (NM_000634.2,146-164).
gtgggattttgatgatcta

SEQ ID NO: 123883 - DNA, 19 bp, Homo sapiens
  siRNA target sequence for IL8RA (NM_000634.2,205-223).
cctgtatgctagaaactga

SEQ ID NO: 123884 - DNA, 19 bp, Homo sapiens
  siRNA target sequence for IL8RA (NM_000634.2,220-238).
ctgagacactcaacaagta

SEQ ID NO: 123885 - DNA, 19 bp, Homo sapiens
  siRNA target sequence for IL8RA (NM_000634.2,224-242).
gacactcaacaagtatgtt

SEQ ID NO: 123886 - DNA, 19 bp, Homo sapiens
  siRNA target sequence for IL8RA (NM_000634.2,226-244).
cactcaacaagtatgttgt

SEQ ID NO: 123887 - DNA, 19 bp, Homo sapiens
  siRNA target sequence for IL8RA (NM_000634.2,568-586).
gtcacttggtcaagtttgt

SEQ ID NO: 123888 - DNA, 19 bp, Homo sapiens
  siRNA target sequence for IL8RA (NM_000634.2,570-588).
cacttggtcaagtttgttt

SEQ ID NO: 123889 - DNA, 19 bp, Homo sapiens
  siRNA target sequence for IL8RA (NM_000634.2,575-593).
ggtcaagtttgtttgtctt

SEQ ID NO: 123890 - DNA, 19 bp, Homo sapiens
  siRNA target sequence for IL8RA (NM_000634.2,643-661).
gccaggcttaccatccaaa

SEQ ID NO: 123891 - DNA, 19 bp, Homo sapiens
  siRNA target sequence for IL8RA (NM_000634.2,647-665).
ggcttaccatccaaacaat

SEQ ID NO: 123892 - DNA, 19 bp, Homo sapiens
  siRNA target sequence for IL8RA (NM_000634.2,1034-1052).
cgccttcatcggccaaaat

SEQ ID NO: 123893 - DNA, 19 bp, Homo sapiens
  siRNA target sequence for IL8RA (NM_000634.2,1035-1053).
gccttcatcggccaaaatt

SEQ ID NO: 123894 - DNA, 19 bp, Homo sapiens
  siRNA target sequence for IL8RA (NM_000634.2,1036-1054).
ccttcatcggccaaaattt

SEQ ID NO: 123895 - DNA, 19 bp, Homo sapiens
  siRNA target sequence for IL8RA (NM_000634.2,1070-1088).
caagatcctggctatgcat

SEQ ID NO: 123896 - DNA, 19 bp, Homo sapiens
  siRNA target sequence for IL8RA (NM_000634.2,1125-1143).
gttacctcctacacttctt

SEQ ID NO: 123897 - DNA, 19 bp, Homo sapiens
  siRNA target sequence for IL8RA (NM_000634.2,1136-1154).
cacttcttcgtctgtcaat

SEQ ID NO: 123898 - DNA, 19 bp, Homo sapiens
  siRNA target sequence for IL8RA (NM_000634.2,1138-1156).
cttcttcgtctgtcaatgt

SEQ ID NO: 123899 - DNA, 19 bp, Homo sapiens
  siRNA target sequence for IL8RB (NM_001557.2,453-471).
gaaaggtgaagatcttagt

SEQ ID NO: 123900 - DNA, 19 bp, Homo sapiens
  siRNA target sequence for IL8RB (NM_001557.2,458-476).
gtgaagatcttagtaatta

SEQ ID NO: 123901 - DNA, 19 bp, Homo sapiens
  siRNA target sequence for IL8RB (NM_001557.2,463-481).
gatcttagtaattacagtt

SEQ ID NO: 123902 - DNA, 19 bp, Homo sapiens
  siRNA target sequence for IL8RB (NM_001557.2,1383-1401).
cctcaagattctagctata

SEQ ID NO: 123903 - DNA, 19 bp, Homo sapiens
  siRNA target sequence for IL7R (NM_002185.2,92-110).
gacaattctaggtacaact

SEQ ID NO: 123904 - DNA, 19 bp, Homo sapiens
  siRNA target sequence for IL7R (NM_002185.2,94-112).
caattctaggtacaacttt

SEQ ID NO: 123905 - DNA, 19 bp, Homo sapiens
  siRNA target sequence for IL7R (NM_002185.2,106-124).
caacttttggcatggtttt

SEQ ID NO: 123906 - DNA, 19 bp, Homo sapiens
  siRNA target sequence for IL7R (NM_002185.2,189-207).
gaactggatgactactcat

SEQ ID NO: 123907 - DNA, 19 bp, Homo sapiens
  siRNA target sequence for IL7R (NM_002185.2,192-210).
ctggatgactactcattct

SEQ ID NO: 123908 - DNA, 19 bp, Homo sapiens
  siRNA target sequence for IL7R (NM_002185.2,200-218).
ctactcattctcatgctat

SEQ ID NO: 123909 - DNA, 19 bp, Homo sapiens
  siRNA target sequence for IL7R (NM_002185.2,284-302).
catcaccaatctggaattt

SEQ ID NO: 123910 - DNA, 19 bp, Homo sapiens
  siRNA target sequence for IL7R (NM_002185.2,338-356).
gaatttcaggaaactacaa

SEQ ID NO: 123911 - DNA, 19 bp, Homo sapiens
  siRNA target sequence for IL7R (NM_002185.2,431-449).
gagtctaacctgcaaaaaa

SEQ ID NO: 123912 - DNA, 19 bp, Homo sapiens
  siRNA target sequence for IL7R (NM_002185.2,433-451).
gtctaacctgcaaaaaaat

SEQ ID NO: 123913 - DNA, 19 bp, Homo sapiens
  siRNA target sequence for IL7R (NM_002185.2,453-471).
gacctaaccactatagtta

SEQ ID NO: 123914 - DNA, 19 bp, Homo sapiens
  siRNA target sequence for IL7R (NM_002185.2,507-525).
cgggaaggagccaatgact

SEQ ID NO: 123915 - DNA, 19 bp, Homo sapiens
  siRNA target sequence for IL7R (NM_002185.2,592-610).
cttaccgccaggaaaagga

SEQ ID NO: 123916 - DNA, 19 bp, Homo sapiens
  siRNA target sequence for IL7R (NM_002185.2,597-615).
cgccaggaaaaggatgaaa

SEQ ID NO: 123917 - DNA, 19 bp, Homo sapiens
  siRNA target sequence for IL7R (NM_002185.2,617-635).
caaatggacgcatgtgaat

SEQ ID NO: 123918 - DNA, 19 bp, Homo sapiens
  siRNA target sequence for IL7R (NM_002185.2,674-692).
ccaaccggcagcaatgtat

SEQ ID NO: 123919 - DNA, 19 bp, Homo sapiens
  siRNA target sequence for IL7R (NM_002185.2,679-697).
cggcagcaatgtatgagat

SEQ ID NO: 123920 - DNA, 19 bp, Homo sapiens
  siRNA target sequence for IL7R (NM_002185.2,680-698).
ggcagcaatgtatgagatt

SEQ ID NO: 123921 - DNA, 19 bp, Homo sapiens
  siRNA target sequence for IL7R (NM_002185.2,681-699).
gcagcaatgtatgagatta

SEQ ID NO: 123922 - DNA, 19 bp, Homo sapiens
  siRNA target sequence for IL7R (NM_002185.2,682-700).
cagcaatgtatgagattaa

SEQ ID NO: 123923 - DNA, 19 bp, Homo sapiens
  siRNA target sequence for IL7R (NM_002185.2,706-724).
gatccatccctgatcacta

SEQ ID NO: 123924 - DNA, 19 bp, Homo sapiens
  siRNA target sequence for IL7R (NM_002185.2,713-731).
ccctgatcactattttaaa

SEQ ID NO: 123925 - DNA, 19 bp, Homo sapiens
  siRNA target sequence for IL7R (NM_002185.2,742-760).
gtgaatggagtccaagtta

SEQ ID NO: 123926 - DNA, 19 bp, Homo sapiens
  siRNA target sequence for IL7R (NM_002185.2,753-771).
ccaagttattacttcagaa

SEQ ID NO: 123927 - DNA, 19 bp, Homo sapiens
  siRNA target sequence for IL7R (NM_002185.2,796-814).
gggagatggatcctatctt

SEQ ID NO: 123928 - DNA, 19 bp, Homo sapiens
  siRNA target sequence for IL7R (NM_002185.2,797-815).
ggagatggatcctatctta

SEQ ID NO: 123929 - DNA, 19 bp, Homo sapiens
  siRNA target sequence for IL7R (NM_002185.2,800-818).
gatggatcctatcttacta

SEQ ID NO: 123930 - DNA, 19 bp, Homo sapiens
  siRNA target sequence for IL7R (NM_002185.2,816-834).
ctaaccatcagcattttga

SEQ ID NO: 123931 - DNA, 19 bp, Homo sapiens
  siRNA target sequence for IL7R (NM_002185.2,875-893).
gttatggaaaaaaaggatt

SEQ ID NO: 123932 - DNA, 19 bp, Homo sapiens
  siRNA target sequence for IL7R (NM_002185.2,910-928).
ccagtctccccgatcataa

SEQ ID NO: 123933 - DNA, 19 bp, Homo sapiens
  siRNA target sequence for IL7R (NM_002185.2,913-931).
gtctccccgatcataagaa

SEQ ID NO: 123934 - DNA, 19 bp, Homo sapiens
  siRNA target sequence for IL7R (NM_002185.2,915-933).
ctccccgatcataagaaga

SEQ ID NO: 123935 - DNA, 19 bp, Homo sapiens
  siRNA target sequence for IL7R (NM_002185.2,998-1016).
cctggactgccagattcat

SEQ ID NO: 123936 - DNA, 19 bp, Homo sapiens
  siRNA target sequence for IL7R (NM_002185.2,999-1017).
ctggactgccagattcata

SEQ ID NO: 123937 - DNA, 19 bp, Homo sapiens
  siRNA target sequence for IL7R (NM_002185.2,1028-1046).
cattcaagctagagatgaa

SEQ ID NO: 123938 - DNA, 19 bp, Homo sapiens
  siRNA target sequence for IL7R (NM_002185.2,1054-1072).
gttttctgcaagatacgtt

SEQ ID NO: 123939 - DNA, 19 bp, Homo sapiens
  siRNA target sequence for IL7R (NM_002185.2,1069-1087).
cgtttcctcagcaactaga

SEQ ID NO: 123940 - DNA, 19 bp, Homo sapiens
  siRNA target sequence for IL7R (NM_002185.2,1135-1153).
gcccatctgaggatgtagt

SEQ ID NO: 123941 - DNA, 19 bp, Homo sapiens
  siRNA target sequence for IL7R (NM_002185.2,1216-1234).
catgtgacgcccctattct

SEQ ID NO: 123942 - DNA, 19 bp, Homo sapiens
  siRNA target sequence for IL7R (NM_002185.2,1259-1277).
cagggagagtggcaagaat

SEQ ID NO: 123943 - DNA, 19 bp, Homo sapiens
  siRNA target sequence for IL7R (NM_002185.2,1386-1404).
cagggtcagcccattctta

SEQ ID NO: 123944 - DNA, 19 bp, Homo sapiens
  siRNA target sequence for IL6R (NM_000565.2,583-601).
gggtagagccggaagacaa

SEQ ID NO: 123945 - DNA, 19 bp, Homo sapiens
  siRNA target sequence for IL6R (NM_000565.2,584-602).
ggtagagccggaagacaat

SEQ ID NO: 123946 - DNA, 19 bp, Homo sapiens
  siRNA target sequence for IL6R (NM_000565.2,701-719).
ccacgactctggaaactat

SEQ ID NO: 123947 - DNA, 19 bp, Homo sapiens
  siRNA target sequence for IL6R (NM_000565.2,702-720).
cacgactctggaaactatt

SEQ ID NO: 123948 - DNA, 19 bp, Homo sapiens
  siRNA target sequence for IL6R (NM_000565.2,809-827).
gagccccctcagcaatgtt

SEQ ID NO: 123949 - DNA, 19 bp, Homo sapiens
  siRNA target sequence for IL6R (NM_000565.2,811-829).
gccccctcagcaatgttgt

SEQ ID NO: 123950 - DNA, 19 bp, Homo sapiens
  siRNA target sequence for IL6R (NM_000565.2,878-896).
gctcttggtgaggaagttt

SEQ ID NO: 123951 - DNA, 19 bp, Homo sapiens
  siRNA target sequence for IL6R (NM_000565.2,921-939).
caggagccgtgccagtatt

SEQ ID NO: 123952 - DNA, 19 bp, Homo sapiens
  siRNA target sequence for IL6R (NM_000565.2,1032-1050).
gggagcaagttcagcaaaa

SEQ ID NO: 123953 - DNA, 19 bp, Homo sapiens
  siRNA target sequence for IL6R (NM_000565.2,1034-1052).
gagcaagttcagcaaaact

SEQ ID NO: 123954 - DNA, 19 bp, Homo sapiens
  siRNA target sequence for IL6R (NM_000565.2,1037-1055).
caagttcagcaaaactcaa

SEQ ID NO: 123955 - DNA, 19 bp, Homo sapiens
  siRNA target sequence for IL6R (NM_000565.2,1086-1104).
gatccgcctgccaacatca

SEQ ID NO: 123956 - DNA, 19 bp, Homo sapiens
  siRNA target sequence for IL6R (NM_000565.2,1165-1183).
cctggaactcatctttcta

SEQ ID NO: 123957 - DNA, 19 bp, Homo sapiens
  siRNA target sequence for IL6R (NM_000565.2,1209-1227).
cgggctgaacggtcaaaga

SEQ ID NO: 123958 - DNA, 19 bp, Homo sapiens
  siRNA target sequence for IL6R (NM_000565.2,1212-1230).
gctgaacggtcaaagacat

SEQ ID NO: 123959 - DNA, 19 bp, Homo sapiens
  siRNA target sequence for IL6R (NM_000565.2,1213-1231).
ctgaacggtcaaagacatt

SEQ ID NO: 123960 - DNA, 19 bp, Homo sapiens
  siRNA target sequence for IL6R (NM_000565.2,1215-1233).
gaacggtcaaagacattca

SEQ ID NO: 123961 - DNA, 19 bp, Homo sapiens
  siRNA target sequence for IL6R (NM_000565.2,1218-1236).
cggtcaaagacattcacaa

SEQ ID NO: 123962 - DNA, 19 bp, Homo sapiens
  siRNA target sequence for IL6R (NM_000565.2,1430-1448).
gcaggcacttactactaat

SEQ ID NO: 123963 - DNA, 19 bp, Homo sapiens
  siRNA target sequence for IL6R (NM_000565.2,1431-1449).
caggcacttactactaata

SEQ ID NO: 123964 - DNA, 19 bp, Homo sapiens
  siRNA target sequence for IL6R (NM_000565.2,1433-1451).
ggcacttactactaataaa

SEQ ID NO: 123965 - DNA, 19 bp, Homo sapiens
  siRNA target sequence for IL6R (NM_000565.2,1499-1517).
cccagtgcaagattcttct

SEQ ID NO: 123966 - DNA, 19 bp, Homo sapiens
  siRNA target sequence for IL6R (NM_000565.2,1500-1518).
ccagtgcaagattcttctt

SEQ ID NO: 123967 - DNA, 19 bp, Homo sapiens
  siRNA target sequence for IL6R (NM_000565.2,1746-1764).
ctggggtctgacaatacct

SEQ ID NO: 123968 - DNA, 19 bp, Homo sapiens
  siRNA target sequence for IL6R (NM_000565.2,1795-1813).
cacggagcccttatgacat

SEQ ID NO: 123969 - DNA, 19 bp, Homo sapiens
  siRNA target sequence for IL6ST (NM_002184.2,276-294).
gctagtgcaagccttgttt

SEQ ID NO: 123970 - DNA, 19 bp, Homo sapiens
  siRNA target sequence for IL6ST (NM_002184.2,277-295).
ctagtgcaagccttgttta

SEQ ID NO: 123971 - DNA, 19 bp, Homo sapiens
  siRNA target sequence for IL6ST (NM_002184.2,300-318).
cctcaccactgaatctaca

SEQ ID NO: 123972 - DNA, 19 bp, Homo sapiens
  siRNA target sequence for IL6ST (NM_002184.2,328-346).
ctagatccatgtggttata

SEQ ID NO: 123973 - DNA, 19 bp, Homo sapiens
  siRNA target sequence for IL6ST (NM_002184.2,331-349).
gatccatgtggttatatca

SEQ ID NO: 123974 - DNA, 19 bp, Homo sapiens
  siRNA target sequence for IL6ST (NM_002184.2,353-371).
ctgaatctccagttgtaca

SEQ ID NO: 123975 - DNA, 19 bp, Homo sapiens
  siRNA target sequence for IL6ST (NM_002184.2,367-385).
gtacaacttcattctaatt

SEQ ID NO: 123976 - DNA, 19 bp, Homo sapiens
  siRNA target sequence for IL6ST (NM_002184.2,408-426).
ggaaaaatgtatggattat

SEQ ID NO: 123977 - DNA, 19 bp, Homo sapiens
  siRNA target sequence for IL6ST (NM_002184.2,473-491).
ctattcctaaggagcaata

SEQ ID NO: 123978 - DNA, 19 bp, Homo sapiens
  siRNA target sequence for IL6ST (NM_002184.2,478-496).
cctaaggagcaatatacta

SEQ ID NO: 123979 - DNA, 19 bp, Homo sapiens
  siRNA target sequence for IL6ST (NM_002184.2,522-540).
cacctttacagatatagct

SEQ ID NO: 123980 - DNA, 19 bp, Homo sapiens
  siRNA target sequence for IL6ST (NM_002184.2,556-574).
ctcacttgcaacattctta

SEQ ID NO: 123981 - DNA, 19 bp, Homo sapiens
  siRNA target sequence for IL6ST (NM_002184.2,560-578).
cttgcaacattcttacatt

SEQ ID NO: 123982 - DNA, 19 bp, Homo sapiens
  siRNA target sequence for IL6ST (NM_002184.2,575-593).
cattcggacagcttgaaca

SEQ ID NO: 123983 - DNA, 19 bp, Homo sapiens
  siRNA target sequence for IL6ST (NM_002184.2,579-597).
cggacagcttgaacagaat

SEQ ID NO: 123984 - DNA, 19 bp, Homo sapiens
  siRNA target sequence for IL6ST (NM_002184.2,581-599).
gacagcttgaacagaatgt

SEQ ID NO: 123985 - DNA, 19 bp, Homo sapiens
  siRNA target sequence for IL6ST (NM_002184.2,712-730).
cacttggagacaaacttca

SEQ ID NO: 123986 - DNA, 19 bp, Homo sapiens
  siRNA target sequence for IL6ST (NM_002184.2,795-813).
ctcatgcactgttgattat

SEQ ID NO: 123987 - DNA, 19 bp, Homo sapiens
  siRNA target sequence for IL6ST (NM_002184.2,874-892).
gttacatcagatcatatca

SEQ ID NO: 123988 - DNA, 19 bp, Homo sapiens
  siRNA target sequence for IL6ST (NM_002184.2,878-896).
catcagatcatatcaattt

SEQ ID NO: 123989 - DNA, 19 bp, Homo sapiens
  siRNA target sequence for IL6ST (NM_002184.2,891-909).
caattttgatcctgtatat

SEQ ID NO: 123990 - DNA, 19 bp, Homo sapiens
  siRNA target sequence for IL6ST (NM_002184.2,918-936).
gcccaatccgccacataat

SEQ ID NO: 123991 - DNA, 19 bp, Homo sapiens
  siRNA target sequence for IL6ST (NM_002184.2,919-937).
cccaatccgccacataatt

SEQ ID NO: 123992 - DNA, 19 bp, Homo sapiens
  siRNA target sequence for IL6ST (NM_002184.2,920-938).
ccaatccgccacataattt

SEQ ID NO: 123993 - DNA, 19 bp, Homo sapiens
  siRNA target sequence for IL6ST (NM_002184.2,926-944).
cgccacataatttatcagt

SEQ ID NO: 123994 - DNA, 19 bp, Homo sapiens
  siRNA target sequence for IL6ST (NM_002184.2,957-975).
ggaactgtctagtatctta

SEQ ID NO: 123995 - DNA, 19 bp, Homo sapiens
  siRNA target sequence for IL6ST (NM_002184.2,958-976).
gaactgtctagtatcttaa

SEQ ID NO: 123996 - DNA, 19 bp, Homo sapiens
  siRNA target sequence for IL6ST (NM_002184.2,983-1001).
catggaccaacccaagtat

SEQ ID NO: 123997 - DNA, 19 bp, Homo sapiens
  siRNA target sequence for IL6ST (NM_002184.2,990-1008).
caacccaagtattaagagt

SEQ ID NO: 123998 - DNA, 19 bp, Homo sapiens
  siRNA target sequence for IL6ST (NM_002184.2,994-1012).
ccaagtattaagagtgtta

SEQ ID NO: 123999 - DNA, 19 bp, Homo sapiens
  siRNA target sequence for IL6ST (NM_002184.2,995-1013).
caagtattaagagtgttat

SEQ ID NO: 124000 - DNA, 19 bp, Homo sapiens
  siRNA target sequence for IL6ST (NM_002184.2,998-1016).
gtattaagagtgttataat

SEQ ID NO: 124001 - DNA, 19 bp, Homo sapiens
  siRNA target sequence for IL6ST (NM_002184.2,1005-1023).
gagtgttataatactaaaa

SEQ ID NO: 124002 - DNA, 19 bp, Homo sapiens
  siRNA target sequence for IL6ST (NM_002184.2,1092-1110).
cacccgatcttcattcact

SEQ ID NO: 124003 - DNA, 19 bp, Homo sapiens
  siRNA target sequence for IL6ST (NM_002184.2,1111-1129).
gtccaagaccttaaacctt

SEQ ID NO: 124004 - DNA, 19 bp, Homo sapiens
  siRNA target sequence for IL6ST (NM_002184.2,1208-1226).
gtgggatcacctatgaaga

SEQ ID NO: 124005 - DNA, 19 bp, Homo sapiens
  siRNA target sequence for IL6ST (NM_002184.2,1210-1228).
gggatcacctatgaagata

SEQ ID NO: 124006 - DNA, 19 bp, Homo sapiens
  siRNA target sequence for IL6ST (NM_002184.2,1232-1250).
catctaaagcaccaagttt

SEQ ID NO: 124007 - DNA, 19 bp, Homo sapiens
  siRNA target sequence for IL6ST (NM_002184.2,1240-1258).
gcaccaagtttctggtata

SEQ ID NO: 124008 - DNA, 19 bp, Homo sapiens
  siRNA target sequence for IL6ST (NM_002184.2,1283-1301).
gctacagaactgtacaact

SEQ ID NO: 124009 - DNA, 19 bp, Homo sapiens
  siRNA target sequence for IL6ST (NM_002184.2,1337-1355).
gaaaaatcttggattatga

SEQ ID NO: 124010 - DNA, 19 bp, Homo sapiens
  siRNA target sequence for IL6ST (NM_002184.2,1418-1436).
cagtaaatctcacaaatga

SEQ ID NO: 124011 - DNA, 19 bp, Homo sapiens
  siRNA target sequence for IL6ST (NM_002184.2,1428-1446).
cacaaatgatcgctatcta

SEQ ID NO: 124012 - DNA, 19 bp, Homo sapiens
  siRNA target sequence for IL6ST (NM_002184.2,1444-1462).
ctagcaaccctaacagtaa

SEQ ID NO: 124013 - DNA, 19 bp, Homo sapiens
  siRNA target sequence for IL6ST (NM_002184.2,1448-1466).
caaccctaacagtaagaaa

SEQ ID NO: 124014 - DNA, 19 bp, Homo sapiens
  siRNA target sequence for IL6ST (NM_002184.2,1483-1501).
gatgcagctgttttaacta

SEQ ID NO: 124015 - DNA, 19 bp, Homo sapiens
  siRNA target sequence for IL6ST (NM_002184.2,1528-1546).
caccctgtaatggatctta

SEQ ID NO: 124016 - DNA, 19 bp, Homo sapiens
  siRNA target sequence for IL6ST (NM_002184.2,1530-1548).
ccctgtaatggatcttaaa

SEQ ID NO: 124017 - DNA, 19 bp, Homo sapiens
  siRNA target sequence for IL6ST (NM_002184.2,1534-1552).
gtaatggatcttaaagcat

SEQ ID NO: 124018 - DNA, 19 bp, Homo sapiens
  siRNA target sequence for IL6ST (NM_002184.2,1618-1636).
cttgagtggtgtgtgttat

SEQ ID NO: 124019 - DNA, 19 bp, Homo sapiens
  siRNA target sequence for IL6ST (NM_002184.2,1639-1657).
gataaagcaccctgtatca

SEQ ID NO: 124020 - DNA, 19 bp, Homo sapiens
  siRNA target sequence for IL6ST (NM_002184.2,1682-1700).
ccgtgcatcgcacctattt

SEQ ID NO: 124021 - DNA, 19 bp, Homo sapiens
  siRNA target sequence for IL6ST (NM_002184.2,1683-1701).
cgtgcatcgcacctattta

SEQ ID NO: 124022 - DNA, 19 bp, Homo sapiens
  siRNA target sequence for IL6ST (NM_002184.2,1684-1702).
gtgcatcgcacctatttaa

SEQ ID NO: 124023 - DNA, 19 bp, Homo sapiens
  siRNA target sequence for IL6ST (NM_002184.2,1728-1746).
ctatttgataacagttact

SEQ ID NO: 124024 - DNA, 19 bp, Homo sapiens
  siRNA target sequence for IL6ST (NM_002184.2,1768-1786).
ggaagccctgaatccataa

SEQ ID NO: 124025 - DNA, 19 bp, Homo sapiens
  siRNA target sequence for IL6ST (NM_002184.2,1822-1840).
cctactgttcggacaaaaa

SEQ ID NO: 124026 - DNA, 19 bp, Homo sapiens
  siRNA target sequence for IL6ST (NM_002184.2,1848-1866).
gaaaaacgaagctgtctta

SEQ ID NO: 124027 - DNA, 19 bp, Homo sapiens
  siRNA target sequence for IL6ST (NM_002184.2,1885-1903).
gttgatgttcagaatggat

SEQ ID NO: 124028 - DNA, 19 bp, Homo sapiens
  siRNA target sequence for IL6ST (NM_002184.2,1888-1906).
gatgttcagaatggattta

SEQ ID NO: 124029 - DNA, 19 bp, Homo sapiens
  siRNA target sequence for IL6ST (NM_002184.2,1891-1909).
gttcagaatggatttatca

SEQ ID NO: 124030 - DNA, 19 bp, Homo sapiens
  siRNA target sequence for IL6ST (NM_002184.2,1975-1993).
cacacagaatatacattgt

SEQ ID NO: 124031 - DNA, 19 bp, Homo sapiens
  siRNA target sequence for IL6ST (NM_002184.2,2003-2021).
ctagtgacacattgtacat

SEQ ID NO: 124032 - DNA, 19 bp, Homo sapiens
  siRNA target sequence for IL6ST (NM_002184.2,2012-2030).
cattgtacatggtacgaat

SEQ ID NO: 124033 - DNA, 19 bp, Homo sapiens
  siRNA target sequence for IL6ST (NM_002184.2,2031-2049).
ggcagcatacacagatgaa

SEQ ID NO: 124034 - DNA, 19 bp, Homo sapiens
  siRNA target sequence for IL6ST (NM_002184.2,2058-2076).
ggatggtccagaattcact

SEQ ID NO: 124035 - DNA, 19 bp, Homo sapiens
  siRNA target sequence for IL6ST (NM_002184.2,2059-2077).
gatggtccagaattcactt

SEQ ID NO: 124036 - DNA, 19 bp, Homo sapiens
  siRNA target sequence for IL6ST (NM_002184.2,2075-2093).
cttttactaccccaaagtt

SEQ ID NO: 124037 - DNA, 19 bp, Homo sapiens
  siRNA target sequence for IL6ST (NM_002184.2,2122-2140).
gtgcctgtttgcttagcat

SEQ ID NO: 124038 - DNA, 19 bp, Homo sapiens
  siRNA target sequence for IL6ST (NM_002184.2,2128-2146).
gtttgcttagcattcctat

SEQ ID NO: 124039 - DNA, 19 bp, Homo sapiens
  siRNA target sequence for IL6ST (NM_002184.2,2133-2151).
cttagcattcctattgaca

SEQ ID NO: 124040 - DNA, 19 bp, Homo sapiens
  siRNA target sequence for IL6ST (NM_002184.2,2162-2180).
gagtgctgttctgctttaa

SEQ ID NO: 124041 - DNA, 19 bp, Homo sapiens
  siRNA target sequence for IL6ST (NM_002184.2,2164-2182).
gtgctgttctgctttaata

SEQ ID NO: 124042 - DNA, 19 bp, Homo sapiens
  siRNA target sequence for IL6ST (NM_002184.2,2184-2202).
gcgagacctaattaaaaaa

SEQ ID NO: 124043 - DNA, 19 bp, Homo sapiens
  siRNA target sequence for IL6ST (NM_002184.2,2273-2291).
ggcacaattttaattcaaa

SEQ ID NO: 124044 - DNA, 19 bp, Homo sapiens
  siRNA target sequence for IL6ST (NM_002184.2,2311-2329).
ggcaatttcactgatgtaa

SEQ ID NO: 124045 - DNA, 19 bp, Homo sapiens
  siRNA target sequence for IL6ST (NM_002184.2,2384-2402).
cattggacctgttcaaaaa

SEQ ID NO: 124046 - DNA, 19 bp, Homo sapiens
  siRNA target sequence for IL6ST (NM_002184.2,2443-2461).
gggtcttcatgcatgtcat

SEQ ID NO: 124047 - DNA, 19 bp, Homo sapiens
  siRNA target sequence for IL6ST (NM_002184.2,2497-2515).
gaatcttcacaaaacactt

SEQ ID NO: 124048 - DNA, 19 bp, Homo sapiens
  siRNA target sequence for IL6ST (NM_002184.2,2598-2616).
gtctacccagcccttgtta

SEQ ID NO: 124049 - DNA, 19 bp, Homo sapiens
  siRNA target sequence for IL6ST (NM_002184.2,2600-2618).
ctacccagcccttgttaga

SEQ ID NO: 124050 - DNA, 19 bp, Homo sapiens
  siRNA target sequence for IL6ST (NM_002184.2,2625-2643).
ggagcggccagaagatcta

SEQ ID NO: 124051 - DNA, 19 bp, Homo sapiens
  siRNA target sequence for IL6ST (NM_002184.2,2630-2648).
ggccagaagatctacaatt

SEQ ID NO: 124052 - DNA, 19 bp, Homo sapiens
  siRNA target sequence for IL6ST (NM_002184.2,2631-2649).
gccagaagatctacaatta

SEQ ID NO: 124053 - DNA, 19 bp, Homo sapiens
  siRNA target sequence for IL6ST (NM_002184.2,2726-2744).
ccagtccagatatttcaca

SEQ ID NO: 124054 - DNA, 19 bp, Homo sapiens
  siRNA target sequence for IL6ST (NM_002184.2,2727-2745).
cagtccagatatttcacat

SEQ ID NO: 124055 - DNA, 19 bp, Homo sapiens
  siRNA target sequence for IL6ST (NM_002184.2,2729-2747).
gtccagatatttcacattt

SEQ ID NO: 124056 - DNA, 19 bp, Homo sapiens
  siRNA target sequence for IL6ST (NM_002184.2,2760-2778).
gcaagtttcatcagtcaat

SEQ ID NO: 124057 - DNA, 19 bp, Homo sapiens
  siRNA target sequence for IL6ST (NM_002184.2,2805-2823).
gcagatttcagatcatatt

SEQ ID NO: 124058 - DNA, 19 bp, Homo sapiens
  siRNA target sequence for IL6ST (NM_002184.2,2934-2952).
ggaggctgcgactgatgaa

SEQ ID NO: 124059 - DNA, 19 bp, Homo sapiens
  siRNA target sequence for IL6ST (NM_002184.2,2947-2965).
gatgaaggcatgcctaaaa

SEQ ID NO: 124060 - DNA, 19 bp, Homo sapiens
  siRNA target sequence for IL6ST (NM_002184.2,2953-2971).
ggcatgcctaaaagttact

SEQ ID NO: 124061 - DNA, 19 bp, Homo sapiens
  siRNA target sequence for IL6ST (NM_002184.2,2954-2972).
gcatgcctaaaagttactt

SEQ ID NO: 124062 - DNA, 19 bp, Homo sapiens
  siRNA target sequence for CSF2RB (NM_000395.1,347-365).
gacgttgactacttctcat

SEQ ID NO: 124063 - DNA, 19 bp, Homo sapiens
  siRNA target sequence for CSF2RB (NM_000395.1,969-987).
cgacccacggccaatacat

SEQ ID NO: 124064 - DNA, 19 bp, Homo sapiens
  siRNA target sequence for CSF2RB (NM_000395.1,1092-1110).
gcctgcgctgggaaacaat

SEQ ID NO: 124065 - DNA, 19 bp, Homo sapiens
  siRNA target sequence for CSF2RB (NM_000395.1,1094-1112).
ctgcgctgggaaacaatga

SEQ ID NO: 124066 - DNA, 19 bp, Homo sapiens
  siRNA target sequence for CSF2RB (NM_000395.1,2145-2163).
gagtggcctctggttatgt

SEQ ID NO: 124067 - DNA, 19 bp, Homo sapiens
  siRNA target sequence for CSF2RB (NM_000395.1,2147-2165).
gtggcctctggttatgtct

SEQ ID NO: 124068 - DNA, 19 bp, Homo sapiens
  siRNA target sequence for CSF2RB (NM_000395.1,2166-2184).
cctctgcagacctggtatt

SEQ ID NO: 124069 - DNA, 19 bp, Homo sapiens
  siRNA target sequence for CSF2RB (NM_000395.1,2179-2197).
ggtattcaccccaaactca

SEQ ID NO: 124070 - DNA, 19 bp, Homo sapiens
  siRNA target sequence for CSF2RB (NM_000395.1,2477-2495).
cagcaagtgggcgactatt

SEQ ID NO: 124071 - DNA, 19 bp, Homo sapiens
  siRNA target sequence for CSF2RB (NM_000395.1,2480-2498).
caagtgggcgactattgct

SEQ ID NO: 124072 - DNA, 19 bp, Homo sapiens
  siRNA target sequence for CSF2RB (NM_000395.1,2527-2545).
ctcgctccggagtaaacct

SEQ ID NO: 124073 - DNA, 19 bp, Homo sapiens
  siRNA target sequence for CSF2RB (NM_000395.1,2556-2574).
gacccggtcctgagatcaa

SEQ ID NO: 124074 - DNA, 19 bp, Homo sapiens
  siRNA target sequence for CSF2RB (NM_000395.1,2559-2577).
ccggtcctgagatcaagaa

SEQ ID NO: 124075 - DNA, 19 bp, Homo sapiens
  siRNA target sequence for IL5RA (NM_000564.2,622-640).
catcgtggcgcatgtatta

SEQ ID NO: 124076 - DNA, 19 bp, Homo sapiens
  siRNA target sequence for IL5RA (NM_000564.2,632-650).
catgtattactcatccttt

SEQ ID NO: 124077 - DNA, 19 bp, Homo sapiens
  siRNA target sequence for IL5RA (NM_000564.2,713-731).
cctgtcaatttcaccatta

SEQ ID NO: 124078 - DNA, 19 bp, Homo sapiens
  siRNA target sequence for IL5RA (NM_000564.2,718-736).
caatttcaccattaaagtt

SEQ ID NO: 124079 - DNA, 19 bp, Homo sapiens
  siRNA target sequence for IL5RA (NM_000564.2,738-756).
ctggtttggctcaagttct

SEQ ID NO: 124080 - DNA, 19 bp, Homo sapiens
  siRNA target sequence for IL5RA (NM_000564.2,741-759).
gtttggctcaagttctttt

SEQ ID NO: 124081 - DNA, 19 bp, Homo sapiens
  siRNA target sequence for IL5RA (NM_000564.2,787-805).
gcaaaggaatgttaatcta

SEQ ID NO: 124082 - DNA, 19 bp, Homo sapiens
  siRNA target sequence for IL5RA (NM_000564.2,792-810).
ggaatgttaatctagaata

SEQ ID NO: 124083 - DNA, 19 bp, Homo sapiens
  siRNA target sequence for IL5RA (NM_000564.2,803-821).
ctagaatatcaagtgaaaa

SEQ ID NO: 124084 - DNA, 19 bp, Homo sapiens
  siRNA target sequence for IL5RA (NM_000564.2,883-901).
cctccacaaaggcttttca

SEQ ID NO: 124085 - DNA, 19 bp, Homo sapiens
  siRNA target sequence for IL5RA (NM_000564.2,954-972).
gggcttctgctgaacttca

SEQ ID NO: 124086 - DNA, 19 bp, Homo sapiens
  siRNA target sequence for IL5RA (NM_000564.2,955-973).
ggcttctgctgaacttcat

SEQ ID NO: 124087 - DNA, 19 bp, Homo sapiens
  siRNA target sequence for IL5RA (NM_000564.2,985-1003).
gtctcctggaacctcaatt

SEQ ID NO: 124088 - DNA, 19 bp, Homo sapiens
  siRNA target sequence for IL5RA (NM_000564.2,990-1008).
ctggaacctcaattgtgaa

SEQ ID NO: 124089 - DNA, 19 bp, Homo sapiens
  siRNA target sequence for IL5RA (NM_000564.2,1027-1045).
cactacagaagacaattat

SEQ ID NO: 124090 - DNA, 19 bp, Homo sapiens
  siRNA target sequence for IL5RA (NM_000564.2,1037-1055).
gacaattattcacgtttaa

SEQ ID NO: 124091 - DNA, 19 bp, Homo sapiens
  siRNA target sequence for IL5RA (NM_000564.2,1106-1124).
cctgaggacacgcagtatt

SEQ ID NO: 124092 - DNA, 19 bp, Homo sapiens
  siRNA target sequence for IL5RA (NM_000564.2,1142-1160).
ggctcttggactgaagaat

SEQ ID NO: 124093 - DNA, 19 bp, Homo sapiens
  siRNA target sequence for IL5RA (NM_000564.2,1245-1263).
ggcttgcggtgcttgttaa

SEQ ID NO: 124094 - DNA, 19 bp, Homo sapiens
  siRNA target sequence for IL5RA (NM_000564.2,1284-1302).
ctatcaggccctttgatca

SEQ ID NO: 124095 - DNA, 19 bp, Homo sapiens
  siRNA target sequence for IL5RA (NM_000564.2,1316-1334).
cacgccattgatcaaataa

SEQ ID NO: 124096 - DNA, 19 bp, Homo sapiens
  siRNA target sequence for IL5RA (NM_000564.2,1318-1336).
cgccattgatcaaataaat

SEQ ID NO: 124097 - DNA, 19 bp, Homo sapiens
  siRNA target sequence for IL5RA (NM_000564.2,1345-1363).
gaatgtcacagcagagatt

SEQ ID NO: 124098 - DNA, 19 bp, Homo sapiens
  siRNA target sequence for IL5RA (NM_000564.2,1402-1420).
gtctgcttttccaatccat

SEQ ID NO: 124099 - DNA, 19 bp, Homo sapiens
  siRNA target sequence for IL5RA (NM_000564.2,1445-1463).
cacaatacaaggaatggat

SEQ ID NO: 124100 - DNA, 19 bp, Homo sapiens
  siRNA target sequence for IL5RA (NM_000564.2,1488-1506).
ccaatgcattcatctcaat

SEQ ID NO: 124101 - DNA, 19 bp, Homo sapiens
  siRNA target sequence for IL5RA (NM_000564.2,1586-1604).
gagtggagccaacctattt

SEQ ID NO: 124102 - DNA, 19 bp, Homo sapiens
  siRNA target sequence for IL5RA (NM_000564.2,1590-1608).
ggagccaacctatttatgt

SEQ ID NO: 124103 - DNA, 19 bp, Homo sapiens
  siRNA target sequence for IL5RA (NM_000564.2,1669-1687).
ctgcttcatcttgttaatt

SEQ ID NO: 124104 - DNA, 19 bp, Homo sapiens
  siRNA target sequence for IL5RA (NM_000564.2,1710-1728).
gtcatttatggatcaagtt

SEQ ID NO: 124105 - DNA, 19 bp, Homo sapiens
  siRNA target sequence for IL5RA (NM_000564.2,1743-1761).
cagcaccaaaaagtaatat

SEQ ID NO: 124106 - DNA, 19 bp, Homo sapiens
  siRNA target sequence for IL5RA (NM_000564.2,1771-1789).
ctttgtaaccactaactat

SEQ ID NO: 124107 - DNA, 19 bp, Homo sapiens
  siRNA target sequence for IL5RA (NM_000564.2,1775-1793).
gtaaccactaactatgaga

SEQ ID NO: 124108 - DNA, 19 bp, Homo sapiens
  siRNA target sequence for IL5RA (NM_000564.2,1801-1819).
gtccagtgagacggaaatt

SEQ ID NO: 124109 - DNA, 19 bp, Homo sapiens
  siRNA target sequence for IL4R (NM_000418.1,342-360).
ccgagctccgcctgttgta

SEQ ID NO: 124110 - DNA, 19 bp, Homo sapiens
  siRNA target sequence for IL4R (NM_000418.1,610-628).
cccgtatccccctgacaat

SEQ ID NO: 124111 - DNA, 19 bp, Homo sapiens
  siRNA target sequence for IL4R (NM_000418.1,611-629).
ccgtatccccctgacaatt

SEQ ID NO: 124112 - DNA, 19 bp, Homo sapiens
  siRNA target sequence for IL4R (NM_000418.1,620-638).
cctgacaattacctgtata

SEQ ID NO: 124113 - DNA, 19 bp, Homo sapiens
  siRNA target sequence for IL4R (NM_000418.1,646-664).
cacctatgcagtcaacatt

SEQ ID NO: 124114 - DNA, 19 bp, Homo sapiens
  siRNA target sequence for IL4R (NM_000418.1,656-674).
gtcaacatttggagtgaaa

SEQ ID NO: 124115 - DNA, 19 bp, Homo sapiens
  siRNA target sequence for IL4R (NM_000418.1,680-698).
ccggcagatttcagaatct

SEQ ID NO: 124116 - DNA, 19 bp, Homo sapiens
  siRNA target sequence for IL4R (NM_000418.1,681-699).
cggcagatttcagaatcta

SEQ ID NO: 124117 - DNA, 19 bp, Homo sapiens
  siRNA target sequence for IL4R (NM_000418.1,888-906).
gcgtttcctgcattgtcat

SEQ ID NO: 124118 - DNA, 19 bp, Homo sapiens
  siRNA target sequence for IL4R (NM_000418.1,937-955).
catcaccaagattaagaaa

SEQ ID NO: 124119 - DNA, 19 bp, Homo sapiens
  siRNA target sequence for IL4R (NM_000418.1,992-1010).
cgcctcgtggctataataa

SEQ ID NO: 124120 - DNA, 19 bp, Homo sapiens
  siRNA target sequence for IL4R (NM_000418.1,993-1011).
gcctcgtggctataataat

SEQ ID NO: 124121 - DNA, 19 bp, Homo sapiens
  siRNA target sequence for IL4R (NM_000418.1,1252-1270).
gcgatgtgtggagttgttt

SEQ ID NO: 124122 - DNA, 19 bp, Homo sapiens
  siRNA target sequence for IL4R (NM_000418.1,1254-1272).
gatgtgtggagttgtttga

SEQ ID NO: 124123 - DNA, 19 bp, Homo sapiens
  siRNA target sequence for IL4R (NM_000418.1,2598-2616).
cccccaaaatcgtgaactt

SEQ ID NO: 124124 - DNA, 19 bp, Homo sapiens
  siRNA target sequence for IL4R (NM_000418.1,2599-2617).
ccccaaaatcgtgaacttt

SEQ ID NO: 124125 - DNA, 19 bp, Homo sapiens
  siRNA target sequence for IL4R (NM_000418.1,2622-2640).
ccgtgggacccacatacat

SEQ ID NO: 124126 - DNA, 19 bp, Homo sapiens
  siRNA target sequence for IL4R (NM_000418.1,2624-2642).
gtgggacccacatacatga

SEQ ID NO: 124127 - DNA, 19 bp, Homo sapiens
  siRNA target sequence for IL3RA (NM_002183.2,390-408).
cctgtctcctgcaaacgaa

SEQ ID NO: 124128 - DNA, 19 bp, Homo sapiens
  siRNA target sequence for IL3RA (NM_002183.2,430-448).
cacgaacctaaggatgaaa

SEQ ID NO: 124129 - DNA, 19 bp, Homo sapiens
  siRNA target sequence for IL3RA (NM_002183.2,483-501).
gaaatgtgaccgatatcga

SEQ ID NO: 124130 - DNA, 19 bp, Homo sapiens
  siRNA target sequence for IL3RA (NM_002183.2,492-510).
ccgatatcgagtgtgttaa

SEQ ID NO: 124131 - DNA, 19 bp, Homo sapiens
  siRNA target sequence for IL3RA (NM_002183.2,493-511).
cgatatcgagtgtgttaaa

SEQ ID NO: 124132 - DNA, 19 bp, Homo sapiens
  siRNA target sequence for IL3RA (NM_002183.2,525-543).
ctatgccggcagtgaacaa

SEQ ID NO: 124133 - DNA, 19 bp, Homo sapiens
  siRNA target sequence for IL3RA (NM_002183.2,533-551).
gcagtgaacaatagctatt

SEQ ID NO: 124134 - DNA, 19 bp, Homo sapiens
  siRNA target sequence for IL3RA (NM_002183.2,660-678).
gggcaggtgcggagaatct

SEQ ID NO: 124135 - DNA, 19 bp, Homo sapiens
  siRNA target sequence for IL3RA (NM_002183.2,692-710).
catgacgtggatttcttga

SEQ ID NO: 124136 - DNA, 19 bp, Homo sapiens
  siRNA target sequence for IL3RA (NM_002183.2,777-795).
ccaacaggcgtcaacagta

SEQ ID NO: 124137 - DNA, 19 bp, Homo sapiens
  siRNA target sequence for IL3RA (NM_002183.2,796-814).
cgagtgtcttcactacaaa

SEQ ID NO: 124138 - DNA, 19 bp, Homo sapiens
  siRNA target sequence for IL3RA (NM_002183.2,840-858).
ggtgtcgtttcgatgacat

SEQ ID NO: 124139 - DNA, 19 bp, Homo sapiens
  siRNA target sequence for IL3RA (NM_002183.2,924-942).
gtatcccctgcacagataa

SEQ ID NO: 124140 - DNA, 19 bp, Homo sapiens
  siRNA target sequence for IL3RA (NM_002183.2,938-956).
gataagtttgtcgtctttt

SEQ ID NO: 124141 - DNA, 19 bp, Homo sapiens
  siRNA target sequence for IL3RA (NM_002183.2,985-1003).
catgactgcaaagtgtaat

SEQ ID NO: 124142 - DNA, 19 bp, Homo sapiens
  siRNA target sequence for IL3RA (NM_002183.2,999-1017).
gtaataagacacattcctt

SEQ ID NO: 124143 - DNA, 19 bp, Homo sapiens
  siRNA target sequence for IL3RA (NM_002183.2,1038-1056).
gtcatttcaatcgcaaatt

SEQ ID NO: 124144 - DNA, 19 bp, Homo sapiens
  siRNA target sequence for IL3RA (NM_002183.2,1059-1077).
gctatgagcttcagataca

SEQ ID NO: 124145 - DNA, 19 bp, Homo sapiens
  siRNA target sequence for IL3RA (NM_002183.2,1145-1163).
ggaacgtacacagtacaaa

SEQ ID NO: 124146 - DNA, 19 bp, Homo sapiens
  siRNA target sequence for IL3RA (NM_002183.2,1234-1252).
ggaggagggcgcaaacaca

SEQ ID NO: 124147 - DNA, 19 bp, Homo sapiens
  siRNA target sequence for IL3RA (NM_002183.2,1315-1333).
cgtgatctgcagaaggtat

SEQ ID NO: 124148 - DNA, 19 bp, Homo sapiens
  siRNA target sequence for IL3RA (NM_002183.2,1356-1374).
cccgcatccctcacatgaa

SEQ ID NO: 124149 - DNA, 19 bp, Homo sapiens
  siRNA target sequence for IL3RA (NM_002183.2,1357-1375).
ccgcatccctcacatgaaa

SEQ ID NO: 124150 - DNA, 19 bp, Homo sapiens
  siRNA target sequence for IL3RA (NM_002183.2,1386-1404).
gtgacagcttccaaaacga

SEQ ID NO: 124151 - DNA, 19 bp, Homo sapiens
  siRNA target sequence for IL9R (NM_002186.2,885-903).
gtagaggaggagcgttata

SEQ ID NO: 124152 - DNA, 19 bp, Homo sapiens
  siRNA target sequence for IL21R (NM_021798.2,359-377).
cctgccacatggatgtatt

SEQ ID NO: 124153 - DNA, 19 bp, Homo sapiens
  siRNA target sequence for IL21R (NM_021798.2,387-405).
ggccgacgacattttcagt

SEQ ID NO: 124154 - DNA, 19 bp, Homo sapiens
  siRNA target sequence for IL21R (NM_021798.2,418-436).
gaccagtctggcaactact

SEQ ID NO: 124155 - DNA, 19 bp, Homo sapiens
  siRNA target sequence for IL21R (NM_021798.2,530-548).
cctggcgctcagattacga

SEQ ID NO: 124156 - DNA, 19 bp, Homo sapiens
  siRNA target sequence for IL21R (NM_021798.2,531-549).
ctggcgctcagattacgaa

SEQ ID NO: 124157 - DNA, 19 bp, Homo sapiens
  siRNA target sequence for IL21R (NM_021798.2,751-769).
caggggacctggagtgaat

SEQ ID NO: 124158 - DNA, 19 bp, Homo sapiens
  siRNA target sequence for IL21R (NM_021798.2,773-791).
gtgacccggtcatctttca

SEQ ID NO: 124159 - DNA, 19 bp, Homo sapiens
  siRNA target sequence for IL21R (NM_021798.2,794-812).
cccagtcagaggagttaaa

SEQ ID NO: 124160 - DNA, 19 bp, Homo sapiens
  siRNA target sequence for IL21R (NM_021798.2,844-862).
ctcctgcttgtcatagtct

SEQ ID NO: 124161 - DNA, 19 bp, Homo sapiens
  siRNA target sequence for IL21R (NM_021798.2,1234-1252).
ggcctggtgtccattgaca

SEQ ID NO: 124162 - DNA, 19 bp, Homo sapiens
  siRNA target sequence for IL17R (NM_014339.3,280-298).
ctgcacggtcaagaatagt

SEQ ID NO: 124163 - DNA, 19 bp, Homo sapiens
  siRNA target sequence for IL17R (NM_014339.3,407-425).
cccgtggctcacatcgaat

SEQ ID NO: 124164 - DNA, 19 bp, Homo sapiens
  siRNA target sequence for IL17R (NM_014339.3,457-475).
cctcgagggtgcagagtta

SEQ ID NO: 124165 - DNA, 19 bp, Homo sapiens
  siRNA target sequence for IL17R (NM_014339.3,458-476).
ctcgagggtgcagagttat

SEQ ID NO: 124166 - DNA, 19 bp, Homo sapiens
  siRNA target sequence for IL17R (NM_014339.3,460-478).
cgagggtgcagagttatct

SEQ ID NO: 124167 - DNA, 19 bp, Homo sapiens
  siRNA target sequence for IL17R (NM_014339.3,508-526).
gtgcgtcaggtttgagttt

SEQ ID NO: 124168 - DNA, 19 bp, Homo sapiens
  siRNA target sequence for IL17R (NM_014339.3,512-530).
gtcaggtttgagtttctgt

SEQ ID NO: 124169 - DNA, 19 bp, Homo sapiens
  siRNA target sequence for IL17R (NM_014339.3,548-566).
cacaggcggtggcgtttta

SEQ ID NO: 124170 - DNA, 19 bp, Homo sapiens
  siRNA target sequence for IL17R (NM_014339.3,552-570).
ggcggtggcgttttacctt

SEQ ID NO: 124171 - DNA, 19 bp, Homo sapiens
  siRNA target sequence for IL17R (NM_014339.3,826-844).
gatcctgctgaccagtttt

SEQ ID NO: 124172 - DNA, 19 bp, Homo sapiens
  siRNA target sequence for IL17R (NM_014339.3,937-955).
cactctacgcaaccttaaa

SEQ ID NO: 124173 - DNA, 19 bp, Homo sapiens
  siRNA target sequence for IL17R (NM_014339.3,1266-1284).
ggaaggtctggatcatcta

SEQ ID NO: 124174 - DNA, 19 bp, Homo sapiens
  siRNA target sequence for IL17R (NM_014339.3,1878-1896).
ccgactggttcgaatgtga

SEQ ID NO: 124175 - DNA, 19 bp, Homo sapiens
  siRNA target sequence for IL12RB2 (NM_001559.2,693-711).
ggctgttgattaaagcaaa

SEQ ID NO: 124176 - DNA, 19 bp, Homo sapiens
  siRNA target sequence for IL12RB2 (NM_001559.2,745-763).
gaagccttcccatgtaatt

SEQ ID NO: 124177 - DNA, 19 bp, Homo sapiens
  siRNA target sequence for IL12RB2 (NM_001559.2,748-766).
gccttcccatgtaatttta

SEQ ID NO: 124178 - DNA, 19 bp, Homo sapiens
  siRNA target sequence for IL12RB2 (NM_001559.2,767-785).
cttggatccactgtcaata

SEQ ID NO: 124179 - DNA, 19 bp, Homo sapiens
  siRNA target sequence for IL12RB2 (NM_001559.2,770-788).
ggatccactgtcaatatta

SEQ ID NO: 124180 - DNA, 19 bp, Homo sapiens
  siRNA target sequence for IL12RB2 (NM_001559.2,807-825).
gacaaggctgctttcacta

SEQ ID NO: 124181 - DNA, 19 bp, Homo sapiens
  siRNA target sequence for IL12RB2 (NM_001559.2,831-849).
gacgtaacaagttaatcct

SEQ ID NO: 124182 - DNA, 19 bp, Homo sapiens
  siRNA target sequence for IL12RB2 (NM_001559.2,841-859).
gttaatcctgtacaagttt

SEQ ID NO: 124183 - DNA, 19 bp, Homo sapiens
  siRNA target sequence for IL12RB2 (NM_001559.2,881-899).
catggccactccctcaatt

SEQ ID NO: 124184 - DNA, 19 bp, Homo sapiens
  siRNA target sequence for IL12RB2 (NM_001559.2,923-941).
ggtacaaccttgtttgtct

SEQ ID NO: 124185 - DNA, 19 bp, Homo sapiens
  siRNA target sequence for IL12RB2 (NM_001559.2,952-970).
ctgtatcaatagtgatgaa

SEQ ID NO: 124186 - DNA, 19 bp, Homo sapiens
  siRNA target sequence for IL12RB2 (NM_001559.2,954-972).
gtatcaatagtgatgaaat

SEQ ID NO: 124187 - DNA, 19 bp, Homo sapiens
  siRNA target sequence for IL12RB2 (NM_001559.2,1010-1028).
ccagaacagcctcaaaatt

SEQ ID NO: 124188 - DNA, 19 bp, Homo sapiens
  siRNA target sequence for IL12RB2 (NM_001559.2,1082-1100).
ggacgagacacccacttat

SEQ ID NO: 124189 - DNA, 19 bp, Homo sapiens
  siRNA target sequence for IL12RB2 (NM_001559.2,1083-1101).
gacgagacacccacttata

SEQ ID NO: 124190 - DNA, 19 bp, Homo sapiens
  siRNA target sequence for IL12RB2 (NM_001559.2,1085-1103).
cgagacacccacttataca

SEQ ID NO: 124191 - DNA, 19 bp, Homo sapiens
  siRNA target sequence for IL12RB2 (NM_001559.2,1093-1111).
ccacttatacactgagtat

SEQ ID NO: 124192 - DNA, 19 bp, Homo sapiens
  siRNA target sequence for IL12RB2 (NM_001559.2,1096-1114).
cttatacactgagtatact

SEQ ID NO: 124193 - DNA, 19 bp, Homo sapiens
  siRNA target sequence for IL12RB2 (NM_001559.2,1118-1136).
cagctaagtggaccaaaaa

SEQ ID NO: 124194 - DNA, 19 bp, Homo sapiens
  siRNA target sequence for IL12RB2 (NM_001559.2,1120-1138).
gctaagtggaccaaaaaat

SEQ ID NO: 124195 - DNA, 19 bp, Homo sapiens
  siRNA target sequence for IL12RB2 (NM_001559.2,1316-1334).
cctccgtgggacattagaa

SEQ ID NO: 124196 - DNA, 19 bp, Homo sapiens
  siRNA target sequence for IL12RB2 (NM_001559.2,1319-1337).
ccgtgggacattagaatca

SEQ ID NO: 124197 - DNA, 19 bp, Homo sapiens
  siRNA target sequence for IL12RB2 (NM_001559.2,1320-1338).
cgtgggacattagaatcaa

SEQ ID NO: 124198 - DNA, 19 bp, Homo sapiens
  siRNA target sequence for IL12RB2 (NM_001559.2,1387-1405).
gggactggtactgcttaat

SEQ ID NO: 124199 - DNA, 19 bp, Homo sapiens
  siRNA target sequence for IL12RB2 (NM_001559.2,1399-1417).
gcttaatcgactcagatat

SEQ ID NO: 124200 - DNA, 19 bp, Homo sapiens
  siRNA target sequence for IL12RB2 (NM_001559.2,1431-1449).
gcaggctctggaatatggt

SEQ ID NO: 124201 - DNA, 19 bp, Homo sapiens
  siRNA target sequence for IL12RB2 (NM_001559.2,1434-1452).
ggctctggaatatggttaa

SEQ ID NO: 124202 - DNA, 19 bp, Homo sapiens
  siRNA target sequence for IL12RB2 (NM_001559.2,1435-1453).
gctctggaatatggttaat

SEQ ID NO: 124203 - DNA, 19 bp, Homo sapiens
  siRNA target sequence for IL12RB2 (NM_001559.2,1462-1480).
ggccaaaggaagacatgat

SEQ ID NO: 124204 - DNA, 19 bp, Homo sapiens
  siRNA target sequence for IL12RB2 (NM_001559.2,1557-1575).
gtgattggagtgaatcatt

SEQ ID NO: 124205 - DNA, 19 bp, Homo sapiens
  siRNA target sequence for IL12RB2 (NM_001559.2,1600-1618).
gcctactgggatgttagat

SEQ ID NO: 124206 - DNA, 19 bp, Homo sapiens
  siRNA target sequence for IL12RB2 (NM_001559.2,1826-1844).
gctgtgtctgcagcaaatt

SEQ ID NO: 124207 - DNA, 19 bp, Homo sapiens
  siRNA target sequence for IL12RB2 (NM_001559.2,1859-1877).
ctgcccactcgtattaaca

SEQ ID NO: 124208 - DNA, 19 bp, Homo sapiens
  siRNA target sequence for IL12RB2 (NM_001559.2,1861-1879).
gcccactcgtattaacata

SEQ ID NO: 124209 - DNA, 19 bp, Homo sapiens
  siRNA target sequence for IL12RB2 (NM_001559.2,1862-1880).
cccactcgtattaacataa

SEQ ID NO: 124210 - DNA, 19 bp, Homo sapiens
  siRNA target sequence for IL12RB2 (NM_001559.2,2172-2190).
ccatcctgggtaactctaa

SEQ ID NO: 124211 - DNA, 19 bp, Homo sapiens
  siRNA target sequence for IL12RB2 (NM_001559.2,2236-2254).
ggaaaaggggagcatttta

SEQ ID NO: 124212 - DNA, 19 bp, Homo sapiens
  siRNA target sequence for IL12RB2 (NM_001559.2,2290-2308).
gggctgcctcctccattat

SEQ ID NO: 124213 - DNA, 19 bp, Homo sapiens
  siRNA target sequence for IL12RB2 (NM_001559.2,2295-2313).
gcctcctccattataggat

SEQ ID NO: 124214 - DNA, 19 bp, Homo sapiens
  siRNA target sequence for IL12RB2 (NM_001559.2,2296-2314).
cctcctccattataggata

SEQ ID NO: 124215 - DNA, 19 bp, Homo sapiens
  siRNA target sequence for IL12RB2 (NM_001559.2,2300-2318).
ctccattataggatatact

SEQ ID NO: 124216 - DNA, 19 bp, Homo sapiens
  siRNA target sequence for IL12RB2 (NM_001559.2,2365-2383).
ctacagagtctcccaaaat

SEQ ID NO: 124217 - DNA, 19 bp, Homo sapiens
  siRNA target sequence for IL12RB2 (NM_001559.2,2467-2485).
cggaaatgagagggaattt

SEQ ID NO: 124218 - DNA, 19 bp, Homo sapiens
  siRNA target sequence for IL12RB2 (NM_001559.2,2492-2510).
caaggtaaagccaattgga

SEQ ID NO: 124219 - DNA, 19 bp, Homo sapiens
  siRNA target sequence for IL12RB2 (NM_001559.2,2515-2533).
gtttgtggcaccaagcatt

SEQ ID NO: 124220 - DNA, 19 bp, Homo sapiens
  siRNA target sequence for IL12RB2 (NM_001559.2,2568-2586).
cgcattacttccagcaaaa

SEQ ID NO: 124221 - DNA, 19 bp, Homo sapiens
  siRNA target sequence for IL12RB2 (NM_001559.2,2639-2657).
ccagatccagcaaatagca

SEQ ID NO: 124222 - DNA, 19 bp, Homo sapiens
  siRNA target sequence for IL12RB2 (NM_001559.2,2655-2673).
gcacttgcgctaagaaata

SEQ ID NO: 124223 - DNA, 19 bp, Homo sapiens
  siRNA target sequence for IL12RB2 (NM_001559.2,2656-2674).
cacttgcgctaagaaatat

SEQ ID NO: 124224 - DNA, 19 bp, Homo sapiens
  siRNA target sequence for IL12RB2 (NM_001559.2,2725-2743).
ctggcccacgcctgaagat

SEQ ID NO: 124225 - DNA, 19 bp, Homo sapiens
  siRNA target sequence for IL12RB2 (NM_001559.2,2922-2940).
gacaactggtggatctgta

SEQ ID NO: 124226 - DNA, 19 bp, Homo sapiens
  siRNA target sequence for IL12RB2 (NM_001559.2,3040-3058).
cttaccctccaacatagat

SEQ ID NO: 124227 - DNA, 19 bp, Homo sapiens
  siRNA target sequence for IL12RB2 (NM_001559.2,3115-3133).
gcacatctccctttctgtt

SEQ ID NO: 124228 - DNA, 19 bp, Homo sapiens
  siRNA target sequence for IL13RA2 (NM_000640.2,140-158).
cttggctatcggatgctta

SEQ ID NO: 124229 - DNA, 19 bp, Homo sapiens
  siRNA target sequence for IL13RA2 (NM_000640.2,143-161).
ggctatcggatgcttatat

SEQ ID NO: 124230 - DNA, 19 bp, Homo sapiens
  siRNA target sequence for IL13RA2 (NM_000640.2,144-162).
gctatcggatgcttatata

SEQ ID NO: 124231 - DNA, 19 bp, Homo sapiens
  siRNA target sequence for IL13RA2 (NM_000640.2,204-222).
gacaccgagataaaagtta

SEQ ID NO: 124232 - DNA, 19 bp, Homo sapiens
  siRNA target sequence for IL13RA2 (NM_000640.2,249-267).
gatcccggatacttaggtt

SEQ ID NO: 124233 - DNA, 19 bp, Homo sapiens
  siRNA target sequence for IL13RA2 (NM_000640.2,253-271).
ccggatacttaggttatct

SEQ ID NO: 124234 - DNA, 19 bp, Homo sapiens
  siRNA target sequence for IL13RA2 (NM_000640.2,255-273).
ggatacttaggttatctct

SEQ ID NO: 124235 - DNA, 19 bp, Homo sapiens
  siRNA target sequence for IL13RA2 (NM_000640.2,256-274).
gatacttaggttatctcta

SEQ ID NO: 124236 - DNA, 19 bp, Homo sapiens
  siRNA target sequence for IL13RA2 (NM_000640.2,314-332).
ggaatgcacagtggaatat

SEQ ID NO: 124237 - DNA, 19 bp, Homo sapiens
  siRNA target sequence for IL13RA2 (NM_000640.2,344-362).
ccgaaacattggtagtgaa

SEQ ID NO: 124238 - DNA, 19 bp, Homo sapiens
  siRNA target sequence for IL13RA2 (NM_000640.2,345-363).
cgaaacattggtagtgaaa

SEQ ID NO: 124239 - DNA, 19 bp, Homo sapiens
  siRNA target sequence for IL13RA2 (NM_000640.2,371-389).
gaccatcattactaagaat

SEQ ID NO: 124240 - DNA, 19 bp, Homo sapiens
  siRNA target sequence for IL13RA2 (NM_000640.2,373-391).
ccatcattactaagaatct

SEQ ID NO: 124241 - DNA, 19 bp, Homo sapiens
  siRNA target sequence for IL13RA2 (NM_000640.2,422-440).
gggcattgaagcgaagata

SEQ ID NO: 124242 - DNA, 19 bp, Homo sapiens
  siRNA target sequence for IL13RA2 (NM_000640.2,437-455).
gatacacacgcttttacca

SEQ ID NO: 124243 - DNA, 19 bp, Homo sapiens
  siRNA target sequence for IL13RA2 (NM_000640.2,491-509).
ctgggcagaaactacttat

SEQ ID NO: 124244 - DNA, 19 bp, Homo sapiens
  siRNA target sequence for IL13RA2 (NM_000640.2,512-530).
gatatcaccacaaggaatt

SEQ ID NO: 124245 - DNA, 19 bp, Homo sapiens
  siRNA target sequence for IL13RA2 (NM_000640.2,548-566).
ggatatggattgcgtatat

SEQ ID NO: 124246 - DNA, 19 bp, Homo sapiens
  siRNA target sequence for IL13RA2 (NM_000640.2,554-572).
ggattgcgtatattacaat

SEQ ID NO: 124247 - DNA, 19 bp, Homo sapiens
  siRNA target sequence for IL13RA2 (NM_000640.2,555-573).
gattgcgtatattacaatt

SEQ ID NO: 124248 - DNA, 19 bp, Homo sapiens
  siRNA target sequence for IL13RA2 (NM_000640.2,601-619).
ctggcataggtgtacttct

SEQ ID NO: 124249 - DNA, 19 bp, Homo sapiens
  siRNA target sequence for IL13RA2 (NM_000640.2,612-630).
gtacttcttgataccaatt

SEQ ID NO: 124250 - DNA, 19 bp, Homo sapiens
  siRNA target sequence for IL13RA2 (NM_000640.2,615-633).
cttcttgataccaattaca

SEQ ID NO: 124251 - DNA, 19 bp, Homo sapiens
  siRNA target sequence for IL13RA2 (NM_000640.2,653-671).
gggcttggatcatgcatta

SEQ ID NO: 124252 - DNA, 19 bp, Homo sapiens
  siRNA target sequence for IL13RA2 (NM_000640.2,666-684).
gcattacagtgtgttgatt

SEQ ID NO: 124253 - DNA, 19 bp, Homo sapiens
  siRNA target sequence for IL13RA2 (NM_000640.2,667-685).
cattacagtgtgttgatta

SEQ ID NO: 124254 - DNA, 19 bp, Homo sapiens
  siRNA target sequence for IL13RA2 (NM_000640.2,731-749).
ggaggcatcagactataaa

SEQ ID NO: 124255 - DNA, 19 bp, Homo sapiens
  siRNA target sequence for IL13RA2 (NM_000640.2,735-753).
gcatcagactataaagatt

SEQ ID NO: 124256 - DNA, 19 bp, Homo sapiens
  siRNA target sequence for IL13RA2 (NM_000640.2,788-806).
gcctatcagatccagttat

SEQ ID NO: 124257 - DNA, 19 bp, Homo sapiens
  siRNA target sequence for IL13RA2 (NM_000640.2,789-807).
cctatcagatccagttatt

SEQ ID NO: 124258 - DNA, 19 bp, Homo sapiens
  siRNA target sequence for IL13RA2 (NM_000640.2,790-808).
ctatcagatccagttattt

SEQ ID NO: 124259 - DNA, 19 bp, Homo sapiens
  siRNA target sequence for IL13RA2 (NM_000640.2,838-856).
ctttgccgccagtctatct

SEQ ID NO: 124260 - DNA, 19 bp, Homo sapiens
  siRNA target sequence for IL13RA2 (NM_000640.2,842-860).
gccgccagtctatcttact

SEQ ID NO: 124261 - DNA, 19 bp, Homo sapiens
  siRNA target sequence for IL13RA2 (NM_000640.2,843-861).
ccgccagtctatcttactt

SEQ ID NO: 124262 - DNA, 19 bp, Homo sapiens
  siRNA target sequence for IL13RA2 (NM_000640.2,844-862).
cgccagtctatcttacttt

SEQ ID NO: 124263 - DNA, 19 bp, Homo sapiens
  siRNA target sequence for IL13RA2 (NM_000640.2,845-863).
gccagtctatcttactttt

SEQ ID NO: 124264 - DNA, 19 bp, Homo sapiens
  siRNA target sequence for IL13RA2 (NM_000640.2,846-864).
ccagtctatcttactttta

SEQ ID NO: 124265 - DNA, 19 bp, Homo sapiens
  siRNA target sequence for IL13RA2 (NM_000640.2,868-886).
gggagagttcatgtgaaat

SEQ ID NO: 124266 - DNA, 19 bp, Homo sapiens
  siRNA target sequence for IL13RA2 (NM_000640.2,902-920).
catacctttgggacctatt

SEQ ID NO: 124267 - DNA, 19 bp, Homo sapiens
  siRNA target sequence for IL13RA2 (NM_000640.2,922-940).
cagcaaggtgttttgatta

SEQ ID NO: 124268 - DNA, 19 bp, Homo sapiens
  siRNA target sequence for IL13RA2 (NM_000640.2,971-989).
cttggtgactgctacagtt

SEQ ID NO: 124269 - DNA, 19 bp, Homo sapiens
  siRNA target sequence for IL13RA2 (NM_000640.2,974-992).
ggtgactgctacagttgaa

SEQ ID NO: 124270 - DNA, 19 bp, Homo sapiens
  siRNA target sequence for IL13RA2 (NM_000640.2,979-997).
ctgctacagttgaaaatga

SEQ ID NO: 124271 - DNA, 19 bp, Homo sapiens
  siRNA target sequence for IL13RA2 (NM_000640.2,1023-1041).
gaaacccgacaattatgct

SEQ ID NO: 124272 - DNA, 19 bp, Homo sapiens
  siRNA target sequence for IL13RA2 (NM_000640.2,1028-1046).
ccgacaattatgctttgta

SEQ ID NO: 124273 - DNA, 19 bp, Homo sapiens
  siRNA target sequence for IL13RA2 (NM_000640.2,1032-1050).
caattatgctttgtagtaa

SEQ ID NO: 124274 - DNA, 19 bp, Homo sapiens
  siRNA target sequence for IL13RA2 (NM_000640.2,1093-1111).
gtgagtggagtgataaaca

SEQ ID NO: 124275 - DNA, 19 bp, Homo sapiens
  siRNA target sequence for IL13RA2 (NM_000640.2,1128-1146).
gacctatcgaagaaaactt

SEQ ID NO: 124276 - DNA, 19 bp, Homo sapiens
  siRNA target sequence for IL13RA2 (NM_000640.2,1161-1179).
ctaccatttggtttcatct

SEQ ID NO: 124277 - DNA, 19 bp, Homo sapiens
  siRNA target sequence for IL13RA2 (NM_000640.2,1222-1240).
caaacacctacccaaaaat

SEQ ID NO: 124278 - DNA, 19 bp, Homo sapiens
  siRNA target sequence for IL13RA2 (NM_000640.2,1226-1244).
cacctacccaaaaatgatt

SEQ ID NO: 124279 - DNA, 19 bp, Homo sapiens
  siRNA target sequence for IL15RA (NM_002189.2,238-256).
ctccagggagcggtacatt

SEQ ID NO: 124280 - DNA, 19 bp, Homo sapiens
  siRNA target sequence for IL15RA (NM_002189.2,241-259).
cagggagcggtacatttgt

SEQ ID NO: 124281 - DNA, 19 bp, Homo sapiens
  siRNA target sequence for IL15RA (NM_002189.2,243-261).
gggagcggtacatttgtaa

SEQ ID NO: 124282 - DNA, 19 bp, Homo sapiens
  siRNA target sequence for IL15RA (NM_002189.2,245-263).
gagcggtacatttgtaact

SEQ ID NO: 124283 - DNA, 19 bp, Homo sapiens
  siRNA target sequence for IL15RA (NM_002189.2,247-265).
gcggtacatttgtaactct

SEQ ID NO: 124284 - DNA, 19 bp, Homo sapiens
  siRNA target sequence for IL15RA (NM_002189.2,300-318).
cggagtgcgtgttgaacaa

SEQ ID NO: 124285 - DNA, 19 bp, Homo sapiens
  siRNA target sequence for IL15RA (NM_002189.2,347-365).
cccagtctcaaatgcatta

SEQ ID NO: 124286 - DNA, 19 bp, Homo sapiens
  siRNA target sequence for IL15RA (NM_002189.2,349-367).
cagtctcaaatgcattaga

SEQ ID NO: 124287 - DNA, 19 bp, Homo sapiens
  siRNA target sequence for IL15RA (NM_002189.2,395-413).
gcgccaccctccacagtaa

SEQ ID NO: 124288 - DNA, 19 bp, Homo sapiens
  siRNA target sequence for IL15RA (NM_002189.2,504-522).
ccacaacagcagctattgt

SEQ ID NO: 124289 - DNA, 19 bp, Homo sapiens
  siRNA target sequence for IL15RA (NM_002189.2,655-673).
ccagccgccaggtgtgtat

SEQ ID NO: 124290 - DNA, 19 bp, Homo sapiens
  siRNA target sequence for IL15RA (NM_002189.2,785-803).
ccgctggccagcgttgaaa

SEQ ID NO: 124291 - DNA, 19 bp, Homo sapiens
  siRNA target sequence for IL15RA (NM_002189.2,786-804).
cgctggccagcgttgaaat

SEQ ID NO: 124292 - DNA, 19 bp, Homo sapiens
  siRNA target sequence for IL15RA (NM_002189.2,790-808).
ggccagcgttgaaatggaa

SEQ ID NO: 124293 - DNA, 19 bp, Homo sapiens
  siRNA target sequence for IL17RB (NM_018725.2,96-114).
cgagagccgaccgttcaat

SEQ ID NO: 124294 - DNA, 19 bp, Homo sapiens
  siRNA target sequence for IL17RB (NM_018725.2,143-161).
gtggatgctacaacatgat

SEQ ID NO: 124295 - DNA, 19 bp, Homo sapiens
  siRNA target sequence for IL17RB (NM_018725.2,146-164).
gatgctacaacatgatcta

SEQ ID NO: 124296 - DNA, 19 bp, Homo sapiens
  siRNA target sequence for IL17RB (NM_018725.2,188-206).
ccgagtagaacctgttaca

SEQ ID NO: 124297 - DNA, 19 bp, Homo sapiens
  siRNA target sequence for IL17RB (NM_018725.2,189-207).
cgagtagaacctgttacaa

SEQ ID NO: 124298 - DNA, 19 bp, Homo sapiens
  siRNA target sequence for IL17RB (NM_018725.2,192-210).
gtagaacctgttacaacta

SEQ ID NO: 124299 - DNA, 19 bp, Homo sapiens
  siRNA target sequence for IL17RB (NM_018725.2,213-231).
gttgcaacaggggactatt

SEQ ID NO: 124300 - DNA, 19 bp, Homo sapiens
  siRNA target sequence for IL17RB (NM_018725.2,217-235).
caacaggggactattcaat

SEQ ID NO: 124301 - DNA, 19 bp, Homo sapiens
  siRNA target sequence for IL17RB (NM_018725.2,222-240).
ggggactattcaattttga

SEQ ID NO: 124302 - DNA, 19 bp, Homo sapiens
  siRNA target sequence for IL17RB (NM_018725.2,223-241).
gggactattcaattttgat

SEQ ID NO: 124303 - DNA, 19 bp, Homo sapiens
  siRNA target sequence for IL17RB (NM_018725.2,270-288).
gccagcatccgcttgttga

SEQ ID NO: 124304 - DNA, 19 bp, Homo sapiens
  siRNA target sequence for IL17RB (NM_018725.2,271-289).
ccagcatccgcttgttgaa

SEQ ID NO: 124305 - DNA, 19 bp, Homo sapiens
  siRNA target sequence for IL17RB (NM_018725.2,287-305).
gaaggccaccaagatttgt

SEQ ID NO: 124306 - DNA, 19 bp, Homo sapiens
  siRNA target sequence for IL17RB (NM_018725.2,304-322).
gtgtgacgggcaaaagcaa

SEQ ID NO: 124307 - DNA, 19 bp, Homo sapiens
  siRNA target sequence for IL17RB (NM_018725.2,337-355).
gctgtgtgaggtgcaatta

SEQ ID NO: 124308 - DNA, 19 bp, Homo sapiens
  siRNA target sequence for IL17RB (NM_018725.2,534-552).
gaccacataatgaaatata

SEQ ID NO: 124309 - DNA, 19 bp, Homo sapiens
  siRNA target sequence for IL17RB (NM_018725.2,646-664).
ctcccctgggaaacagata

SEQ ID NO: 124310 - DNA, 19 bp, Homo sapiens
  siRNA target sequence for IL17RB (NM_018725.2,661-679).
gatacatggctcttatcca

SEQ ID NO: 124311 - DNA, 19 bp, Homo sapiens
  siRNA target sequence for IL17RB (NM_018725.2,686-704).
cactatcatcgggttttct

SEQ ID NO: 124312 - DNA, 19 bp, Homo sapiens
  siRNA target sequence for IL17RB (NM_018725.2,688-706).
ctatcatcgggttttctca

SEQ ID NO: 124313 - DNA, 19 bp, Homo sapiens
  siRNA target sequence for IL17RB (NM_018725.2,757-775).
cagtgactggggatagtga

SEQ ID NO: 124314 - DNA, 19 bp, Homo sapiens
  siRNA target sequence for IL17RB (NM_018725.2,785-803).
ggtgcagctgactccatat

SEQ ID NO: 124315 - DNA, 19 bp, Homo sapiens
  siRNA target sequence for IL17RB (NM_018725.2,786-804).
gtgcagctgactccatatt

SEQ ID NO: 124316 - DNA, 19 bp, Homo sapiens
  siRNA target sequence for IL17RB (NM_018725.2,820-838).
gcgactgcatccgacataa

SEQ ID NO: 124317 - DNA, 19 bp, Homo sapiens
  siRNA target sequence for IL17RB (NM_018725.2,821-839).
cgactgcatccgacataaa

SEQ ID NO: 124318 - DNA, 19 bp, Homo sapiens
  siRNA target sequence for IL17RB (NM_018725.2,830-848).
ccgacataaaggaacagtt

SEQ ID NO: 124319 - DNA, 19 bp, Homo sapiens
  siRNA target sequence for IL17RB (NM_018725.2,874-892).
ctttccctctggataacaa

SEQ ID NO: 124320 - DNA, 19 bp, Homo sapiens
  siRNA target sequence for IL17RB (NM_018725.2,959-977).
ggtggcagggatctatcta

SEQ ID NO: 124321 - DNA, 19 bp, Homo sapiens
  siRNA target sequence for IL17RB (NM_018725.2,960-978).
gtggcagggatctatctaa

SEQ ID NO: 124322 - DNA, 19 bp, Homo sapiens
  siRNA target sequence for IL17RB (NM_018725.2,963-981).
gcagggatctatctaatgt

SEQ ID NO: 124323 - DNA, 19 bp, Homo sapiens
  siRNA target sequence for IL17RB (NM_018725.2,985-1003).
ggcacgaaaggatcaagaa

SEQ ID NO: 124324 - DNA, 19 bp, Homo sapiens
  siRNA target sequence for IL17RB (NM_018725.2,1077-1095).
catcacacaatttgttact

SEQ ID NO: 124325 - DNA, 19 bp, Homo sapiens
  siRNA target sequence for IL17RB (NM_018725.2,1186-1204).
ggcttgccactcaaaagaa

SEQ ID NO: 124326 - DNA, 19 bp, Homo sapiens
  siRNA target sequence for IL17RB (NM_018725.2,1373-1391).
cgtggtggtctactttaga

SEQ ID NO: 124327 - DNA, 19 bp, Homo sapiens
  siRNA target sequence for IL17RB (NM_018725.2,1379-1397).
ggtctactttagagagatt

SEQ ID NO: 124328 - DNA, 19 bp, Homo sapiens
  siRNA target sequence for IL17RB (NM_172234.1,778-796).
gtgctacggtgcaggtaaa

SEQ ID NO: 124329 - DNA, 19 bp, Homo sapiens
  siRNA target sequence for IL17RB (NM_172234.1,780-798).
gctacggtgcaggtaaagt

SEQ ID NO: 124330 - DNA, 19 bp, Homo sapiens
  siRNA target sequence for IL17RB (NM_172234.1,781-799).
ctacggtgcaggtaaagtt

SEQ ID NO: 124331 - DNA, 19 bp, Homo sapiens
  siRNA target sequence for IL17RB (NM_172234.1,835-853).
gactgttccatcattcatt

SEQ ID NO: 124332 - DNA, 19 bp, Homo sapiens
  siRNA target sequence for IL17RB (NM_172234.1,839-857).
gttccatcattcattgctt

SEQ ID NO: 124333 - DNA, 19 bp, Homo sapiens
  siRNA target sequence for IL17RB (NM_172234.1,842-860).
ccatcattcattgctttta

SEQ ID NO: 124334 - DNA, 19 bp, Homo sapiens
  siRNA target sequence for IL17RB (NM_172234.1,843-861).
catcattcattgcttttaa

SEQ ID NO: 124335 - DNA, 19 bp, Homo sapiens
  siRNA target sequence for IL18BP (NM_005699.2,1040-1058).
gccactgcctcagttagaa

SEQ ID NO: 124336 - DNA, 19 bp, Homo sapiens
  siRNA target sequence for IL18BP (NM_005699.2,1108-1126).
gcagtgtccagcattggaa

SEQ ID NO: 124337 - DNA, 19 bp, Homo sapiens
  siRNA target sequence for IL18BP (NM_005699.2,1466-1484).
gagctctgcttccatatgt

SEQ ID NO: 124338 - DNA, 19 bp, Homo sapiens
  siRNA target sequence for CCR5 (NM_000579.1,380-398).
caatctatgacatcaatta

SEQ ID NO: 124339 - DNA, 19 bp, Homo sapiens
  siRNA target sequence for CCR5 (NM_000579.1,384-402).
ctatgacatcaattattat

SEQ ID NO: 124340 - DNA, 19 bp, Homo sapiens
  siRNA target sequence for CCR5 (NM_000579.1,407-425).
cggagccctgccaaaaaat

SEQ ID NO: 124341 - DNA, 19 bp, Homo sapiens
  siRNA target sequence for CCR5 (NM_000579.1,631-649).
gcccagtgggactttggaa

SEQ ID NO: 124342 - DNA, 19 bp, Homo sapiens
  siRNA target sequence for CCR5 (NM_000579.1,636-654).
gtgggactttggaaataca

SEQ ID NO: 124343 - DNA, 19 bp, Homo sapiens
  siRNA target sequence for CCR5 (NM_000579.1,638-656).
gggactttggaaatacaat

SEQ ID NO: 124344 - DNA, 19 bp, Homo sapiens
  siRNA target sequence for CCR5 (NM_000579.1,640-658).
gactttggaaatacaatgt

SEQ ID NO: 124345 - DNA, 19 bp, Homo sapiens
  siRNA target sequence for CCR5 (NM_000579.1,664-682).
ctcttgacagggctctatt

SEQ ID NO: 124346 - DNA, 19 bp, Homo sapiens
  siRNA target sequence for CCR5 (NM_000579.1,669-687).
gacagggctctattttata

SEQ ID NO: 124347 - DNA, 19 bp, Homo sapiens
  siRNA target sequence for CCR5 (NM_000579.1,852-870).
ctttaccagatctcaaaaa

SEQ ID NO: 124348 - DNA, 19 bp, Homo sapiens
  siRNA target sequence for CCR5 (NM_000579.1,904-922).
ccatacagtcagtatcaat

SEQ ID NO: 124349 - DNA, 19 bp, Homo sapiens
  siRNA target sequence for CCR5 (NM_000579.1,905-923).
catacagtcagtatcaatt

SEQ ID NO: 124350 - DNA, 19 bp, Homo sapiens
  siRNA target sequence for CCR5 (NM_000579.1,1354-1372).
gagcgagcaagctcagttt

SEQ ID NO: 124351 - DNA, 19 bp, Homo sapiens
  siRNA target sequence for CCR5 (NM_000579.1,1357-1375).
cgagcaagctcagtttaca

SEQ ID NO: 124352 - DNA, 19 bp, Homo sapiens
  siRNA target sequence for CCR6 (NM_004367.3,302-320).
cgactccagtgaagattat

SEQ ID NO: 124353 - DNA, 19 bp, Homo sapiens
  siRNA target sequence for CCR6 (NM_004367.3,326-344).
gtcagtcaatacttcatat

SEQ ID NO: 124354 - DNA, 19 bp, Homo sapiens
  siRNA target sequence for CCR6 (NM_004367.3,354-372).
gattctgagatgttactgt

SEQ ID NO: 124355 - DNA, 19 bp, Homo sapiens
  siRNA target sequence for CCR6 (NM_004367.3,502-520).
ctatgacagacgtctatct

SEQ ID NO: 124356 - DNA, 19 bp, Homo sapiens
  siRNA target sequence for CCR6 (NM_004367.3,510-528).
gacgtctatctcttgaaca

SEQ ID NO: 124357 - DNA, 19 bp, Homo sapiens
  siRNA target sequence for CCR6 (NM_004367.3,540-558).
gacatcctctttgttctta

SEQ ID NO: 124358 - DNA, 19 bp, Homo sapiens
  siRNA target sequence for CCR6 (NM_004367.3,613-631).
ccacgtgcaagttgctaaa

SEQ ID NO: 124359 - DNA, 19 bp, Homo sapiens
  siRNA target sequence for CCR6 (NM_004367.3,614-632).
cacgtgcaagttgctaaaa

SEQ ID NO: 124360 - DNA, 19 bp, Homo sapiens
  siRNA target sequence for CCR6 (NM_004367.3,634-652).
gcatctatgccatcaactt

SEQ ID NO: 124361 - DNA, 19 bp, Homo sapiens
  siRNA target sequence for CCR6 (NM_004367.3,731-749).
gctccgatccagaacacta

SEQ ID NO: 124362 - DNA, 19 bp, Homo sapiens
  siRNA target sequence for CCR6 (NM_004367.3,745-763).
cactaccgcgcagcaaaat

SEQ ID NO: 124363 - DNA, 19 bp, Homo sapiens
  siRNA target sequence for CCR6 (NM_004367.3,747-765).
ctaccgcgcagcaaaatca

SEQ ID NO: 124364 - DNA, 19 bp, Homo sapiens
  siRNA target sequence for CCR6 (NM_004367.3,750-768).
ccgcgcagcaaaatcatct

SEQ ID NO: 124365 - DNA, 19 bp, Homo sapiens
  siRNA target sequence for CCR6 (NM_004367.3,783-801).
gggctgtcagtcatcatct

SEQ ID NO: 124366 - DNA, 19 bp, Homo sapiens
  siRNA target sequence for CCR6 (NM_004367.3,911-929).
ggggcttgagctactcttt

SEQ ID NO: 124367 - DNA, 19 bp, Homo sapiens
  siRNA target sequence for CCR6 (NM_004367.3,986-1004).
cttggtgcaagctcagaat

SEQ ID NO: 124368 - DNA, 19 bp, Homo sapiens
  siRNA target sequence for CCR6 (NM_004367.3,1088-1106).
gcttgtgacggctgcaaat

SEQ ID NO: 124369 - DNA, 19 bp, Homo sapiens
  siRNA target sequence for CCR6 (NM_004367.3,1089-1107).
cttgtgacggctgcaaatt

SEQ ID NO: 124370 - DNA, 19 bp, Homo sapiens
  siRNA target sequence for CCR6 (NM_004367.3,1126-1144).
cctgccagagcgaaaagct

SEQ ID NO: 124371 - DNA, 19 bp, Homo sapiens
  siRNA target sequence for CCR6 (NM_004367.3,1129-1147).
gccagagcgaaaagctaat

SEQ ID NO: 124372 - DNA, 19 bp, Homo sapiens
  siRNA target sequence for CCR6 (NM_004367.3,1130-1148).
ccagagcgaaaagctaatt

SEQ ID NO: 124373 - DNA, 19 bp, Homo sapiens
  siRNA target sequence for CCR6 (NM_004367.3,1142-1160).
gctaattggctatacgaaa

SEQ ID NO: 124374 - DNA, 19 bp, Homo sapiens
  siRNA target sequence for CCR6 (NM_004367.3,1203-1221).
cctgtgctctacgctttta

SEQ ID NO: 124375 - DNA, 19 bp, Homo sapiens
  siRNA target sequence for CCR6 (NM_004367.3,1273-1291).
gtgtgagaaggaagtacaa

SEQ ID NO: 124376 - DNA, 19 bp, Homo sapiens
  siRNA target sequence for CCR6 (NM_004367.3,1348-1366).
gtgagaccgcagataacga

SEQ ID NO: 124377 - DNA, 19 bp, Homo sapiens
  siRNA target sequence for CCR6 (NM_004367.3,1371-1389).
gcgtcgtccttcactatgt

SEQ ID NO: 124378 - DNA, 19 bp, Homo sapiens
  siRNA target sequence for CCR8 (NM_005201.2,149-167).
caacagtgaccgactacta

SEQ ID NO: 124379 - DNA, 19 bp, Homo sapiens
  siRNA target sequence for CCR8 (NM_005201.2,190-208).
ccctgtgatgcggaactta

SEQ ID NO: 124380 - DNA, 19 bp, Homo sapiens
  siRNA target sequence for CCR8 (NM_005201.2,191-209).
cctgtgatgcggaacttat

SEQ ID NO: 124381 - DNA, 19 bp, Homo sapiens
  siRNA target sequence for CCR8 (NM_005201.2,192-210).
ctgtgatgcggaacttatt

SEQ ID NO: 124382 - DNA, 19 bp, Homo sapiens
  siRNA target sequence for CCR8 (NM_005201.2,225-243).
gttgctccttgctgtcttt

SEQ ID NO: 124383 - DNA, 19 bp, Homo sapiens
  siRNA target sequence for CCR8 (NM_005201.2,318-336).
gaggagcatcacagatgta

SEQ ID NO: 124384 - DNA, 19 bp, Homo sapiens
  siRNA target sequence for CCR8 (NM_005201.2,323-341).
gcatcacagatgtatacct

SEQ ID NO: 124385 - DNA, 19 bp, Homo sapiens
  siRNA target sequence for CCR8 (NM_005201.2,329-347).
cagatgtatacctcttgaa

SEQ ID NO: 124386 - DNA, 19 bp, Homo sapiens
  siRNA target sequence for CCR8 (NM_005201.2,418-436).
gtgtttgggactgtaatgt

SEQ ID NO: 124387 - DNA, 19 bp, Homo sapiens
  siRNA target sequence for CCR8 (NM_005201.2,533-551).
ccgtgtatgccctaaaggt

SEQ ID NO: 124388 - DNA, 19 bp, Homo sapiens
  siRNA target sequence for CCR8 (NM_005201.2,609-627).
ggctaccatcccattgcta

SEQ ID NO: 124389 - DNA, 19 bp, Homo sapiens
  siRNA target sequence for CCR8 (NM_005201.2,614-632).
ccatcccattgctagtgtt

SEQ ID NO: 124390 - DNA, 19 bp, Homo sapiens
  siRNA target sequence for CCR8 (NM_005201.2,615-633).
catcccattgctagtgttt

SEQ ID NO: 124391 - DNA, 19 bp, Homo sapiens
  siRNA target sequence for CCR8 (NM_005201.2,620-638).
cattgctagtgttttacca

SEQ ID NO: 124392 - DNA, 19 bp, Homo sapiens
  siRNA target sequence for CCR8 (NM_005201.2,645-663).
ctctgaagatggtgttcta

SEQ ID NO: 124393 - DNA, 19 bp, Homo sapiens
  siRNA target sequence for CCR8 (NM_005201.2,664-682).
cagtgttattcattttaca

SEQ ID NO: 124394 - DNA, 19 bp, Homo sapiens
  siRNA target sequence for CCR8 (NM_005201.2,744-762).
gatcccattcaccatcttt

SEQ ID NO: 124395 - DNA, 19 bp, Homo sapiens
  siRNA target sequence for CCR8 (NM_005201.2,748-766).
ccattcaccatctttatgt

SEQ ID NO: 124396 - DNA, 19 bp, Homo sapiens
  siRNA target sequence for CCR8 (NM_005201.2,849-867).
ggtcattgcatctttactt

SEQ ID NO: 124397 - DNA, 19 bp, Homo sapiens
  siRNA target sequence for CCR8 (NM_005201.2,1117-1135).
gagagctgtgaaaagtcat

SEQ ID NO: 124398 - DNA, 19 bp, Homo sapiens
  siRNA target sequence for CCR8 (NM_005201.2,1160-1178).
gttcctccagcgtagacta

SEQ ID NO: 124399 - DNA, 19 bp, Homo sapiens
  siRNA target sequence for CCR8 (NM_005201.2,1163-1181).
cctccagcgtagactacat

SEQ ID NO: 124400 - DNA, 19 bp, Homo sapiens
  siRNA target sequence for CCR8 (NM_005201.2,1164-1182).
ctccagcgtagactacatt

SEQ ID NO: 124401 - DNA, 19 bp, Homo sapiens
  siRNA target sequence for CCR9 (NM_006641.2,119-137).
gatgactatggctctgaat

SEQ ID NO: 124402 - DNA, 19 bp, Homo sapiens
  siRNA target sequence for CCR9 (NM_006641.2,152-170).
gaagactacgttaacttca

SEQ ID NO: 124403 - DNA, 19 bp, Homo sapiens
  siRNA target sequence for CCR9 (NM_006641.2,155-173).
gactacgttaacttcaact

SEQ ID NO: 124404 - DNA, 19 bp, Homo sapiens
  siRNA target sequence for CCR9 (NM_006641.2,276-294).
gtcttgttatccttgtcta

SEQ ID NO: 124405 - DNA, 19 bp, Homo sapiens
  siRNA target sequence for CCR9 (NM_006641.2,324-342).
ccgacatgttccttttgaa

SEQ ID NO: 124406 - DNA, 19 bp, Homo sapiens
  siRNA target sequence for CCR9 (NM_006641.2,325-343).
cgacatgttccttttgaat

SEQ ID NO: 124407 - DNA, 19 bp, Homo sapiens
  siRNA target sequence for CCR9 (NM_006641.2,471-489).
gctgtgtgttgctgatcat

SEQ ID NO: 124408 - DNA, 19 bp, Homo sapiens
  siRNA target sequence for CCR9 (NM_006641.2,496-514).
cagcgtggacaggtacatt

SEQ ID NO: 124409 - DNA, 19 bp, Homo sapiens
  siRNA target sequence for CCR9 (NM_006641.2,558-576).
ggcttttgtacagcaaaat

SEQ ID NO: 124410 - DNA, 19 bp, Homo sapiens
  siRNA target sequence for CCR9 (NM_006641.2,662-680).
gctatctgcaccatggttt

SEQ ID NO: 124411 - DNA, 19 bp, Homo sapiens
  siRNA target sequence for CCR9 (NM_006641.2,663-681).
ctatctgcaccatggttta

SEQ ID NO: 124412 - DNA, 19 bp, Homo sapiens
  siRNA target sequence for CCR9 (NM_006641.2,771-789).
gctgctataccatcatcat

SEQ ID NO: 124413 - DNA, 19 bp, Homo sapiens
  siRNA target sequence for CCR9 (NM_006641.2,772-790).
ctgctataccatcatcatt

SEQ ID NO: 124414 - DNA, 19 bp, Homo sapiens
  siRNA target sequence for CCR9 (NM_006641.2,824-842).
cacaaagccctaaaagtga

SEQ ID NO: 124415 - DNA, 19 bp, Homo sapiens
  siRNA target sequence for CCR9 (NM_006641.2,851-869).
gtcctgaccgtctttgtct

SEQ ID NO: 124416 - DNA, 19 bp, Homo sapiens
  siRNA target sequence for CCR9 (NM_006641.2,947-965).
gtttccaccaacattgaca

SEQ ID NO: 124417 - DNA, 19 bp, Homo sapiens
  siRNA target sequence for CCR9 (NM_006641.2,1097-1115).
gcccagtgggtttcattta

SEQ ID NO: 124418 - DNA, 19 bp, Homo sapiens
  siRNA target sequence for CCR9 (NM_006641.2,1099-1117).
ccagtgggtttcatttaca

SEQ ID NO: 124419 - DNA, 19 bp, Homo sapiens
  siRNA target sequence for CCRL1 (NM_016557.2,145-163).
cttatgactacagtcaata

SEQ ID NO: 124420 - DNA, 19 bp, Homo sapiens
  siRNA target sequence for CCRL1 (NM_016557.2,215-233).
ccctgtattcctcacaata

SEQ ID NO: 124421 - DNA, 19 bp, Homo sapiens
  siRNA target sequence for CCRL1 (NM_016557.2,246-264).
ggacttgcaggcaattcca

SEQ ID NO: 124422 - DNA, 19 bp, Homo sapiens
  siRNA target sequence for CCRL1 (NM_016557.2,262-280).
ccatggtagtggcaattta

SEQ ID NO: 124423 - DNA, 19 bp, Homo sapiens
  siRNA target sequence for CCRL1 (NM_016557.2,263-281).
catggtagtggcaatttat

SEQ ID NO: 124424 - DNA, 19 bp, Homo sapiens
  siRNA target sequence for CCRL1 (NM_016557.2,304-322).
ccaaaacagatgtgtacat

SEQ ID NO: 124425 - DNA, 19 bp, Homo sapiens
  siRNA target sequence for CCRL1 (NM_016557.2,312-330).
gatgtgtacatcctgaatt

SEQ ID NO: 124426 - DNA, 19 bp, Homo sapiens
  siRNA target sequence for CCRL1 (NM_016557.2,339-357).
gcagatttactccttctat

SEQ ID NO: 124427 - DNA, 19 bp, Homo sapiens
  siRNA target sequence for CCRL1 (NM_016557.2,365-383).
gcctttttgggctgttaat

SEQ ID NO: 124428 - DNA, 19 bp, Homo sapiens
  siRNA target sequence for CCRL1 (NM_016557.2,432-450).
gccttgtacacactaaact

SEQ ID NO: 124429 - DNA, 19 bp, Homo sapiens
  siRNA target sequence for CCRL1 (NM_016557.2,433-451).
ccttgtacacactaaactt

SEQ ID NO: 124430 - DNA, 19 bp, Homo sapiens
  siRNA target sequence for CCRL1 (NM_016557.2,493-511).
gatatgtggcagtaactaa

SEQ ID NO: 124431 - DNA, 19 bp, Homo sapiens
  siRNA target sequence for CCRL1 (NM_016557.2,589-607).
gcataccccagctggtttt

SEQ ID NO: 124432 - DNA, 19 bp, Homo sapiens
  siRNA target sequence for CCRL1 (NM_016557.2,596-614).
ccagctggttttttataca

SEQ ID NO: 124433 - DNA, 19 bp, Homo sapiens
  siRNA target sequence for CCRL1 (NM_016557.2,600-618).
ctggttttttatacagtaa

SEQ ID NO: 124434 - DNA, 19 bp, Homo sapiens
  siRNA target sequence for CCRL1 (NM_016557.2,650-668).
ccgctacctaggaacatca

SEQ ID NO: 124435 - DNA, 19 bp, Homo sapiens
  siRNA target sequence for CCRL1 (NM_016557.2,651-669).
cgctacctaggaacatcaa

SEQ ID NO: 124436 - DNA, 19 bp, Homo sapiens
  siRNA target sequence for CCRL1 (NM_016557.2,652-670).
gctacctaggaacatcaat

SEQ ID NO: 124437 - DNA, 19 bp, Homo sapiens
  siRNA target sequence for CCRL1 (NM_016557.2,660-678).
ggaacatcaatgaaagcat

SEQ ID NO: 124438 - DNA, 19 bp, Homo sapiens
  siRNA target sequence for CCRL1 (NM_016557.2,664-682).
catcaatgaaagcattgat

SEQ ID NO: 124439 - DNA, 19 bp, Homo sapiens
  siRNA target sequence for CCRL1 (NM_016557.2,667-685).
caatgaaagcattgattca

SEQ ID NO: 124440 - DNA, 19 bp, Homo sapiens
  siRNA target sequence for CCRL1 (NM_016557.2,690-708).
ctagagatctgcattggat

SEQ ID NO: 124441 - DNA, 19 bp, Homo sapiens
  siRNA target sequence for CCRL1 (NM_016557.2,711-729).
gtagtaccctttcttatta

SEQ ID NO: 124442 - DNA, 19 bp, Homo sapiens
  siRNA target sequence for CCRL1 (NM_016557.2,732-750).
ggggtgtgctactttatca

SEQ ID NO: 124443 - DNA, 19 bp, Homo sapiens
  siRNA target sequence for CCRL1 (NM_016557.2,734-752).
ggtgtgctactttatcaca

SEQ ID NO: 124444 - DNA, 19 bp, Homo sapiens
  siRNA target sequence for CCRL1 (NM_016557.2,790-808).
ctcgacccctaaaagttct

SEQ ID NO: 124445 - DNA, 19 bp, Homo sapiens
  siRNA target sequence for CCRL1 (NM_016557.2,809-827).
gctcacagtcgttatagtt

SEQ ID NO: 124446 - DNA, 19 bp, Homo sapiens
  siRNA target sequence for CCRL1 (NM_016557.2,868-886).
gccgagccatagacatcat

SEQ ID NO: 124447 - DNA, 19 bp, Homo sapiens
  siRNA target sequence for CCRL1 (NM_016557.2,870-888).
cgagccatagacatcatct

SEQ ID NO: 124448 - DNA, 19 bp, Homo sapiens
  siRNA target sequence for CCRL1 (NM_016557.2,871-889).
gagccatagacatcatcta

SEQ ID NO: 124449 - DNA, 19 bp, Homo sapiens
  siRNA target sequence for CCRL1 (NM_016557.2,1108-1126).
cagagccaaccagtacttt

SEQ ID NO: 124450 - DNA, 19 bp, Homo sapiens
  siRNA target sequence for CCRL1 (NM_016557.2,1110-1128).
gagccaaccagtactttta

SEQ ID NO: 124451 - DNA, 19 bp, Homo sapiens
  siRNA target sequence for CCRL1 (NM_016557.2,1113-1131).
ccaaccagtacttttagca

SEQ ID NO: 124452 - DNA, 19 bp, Homo sapiens
  siRNA target sequence for CCRL1 (NM_016557.2,1114-1132).
caaccagtacttttagcat

SEQ ID NO: 124453 - DNA, 19 bp, Homo sapiens
  siRNA target sequence for GPR2 (NM_016602.1,81-99).
cactgccggagctttgcta

SEQ ID NO: 124454 - DNA, 19 bp, Homo sapiens
  siRNA target sequence for GPR2 (NM_016602.1,570-588).
gacgctgtcgcctcatctt

SEQ ID NO: 124455 - DNA, 19 bp, Homo sapiens
  siRNA target sequence for CXCR3 (NM_001504.1,131-149).
gaacttcagctcttcctat

SEQ ID NO: 124456 - DNA, 19 bp, Homo sapiens
  siRNA target sequence for CXCR3 (NM_001504.1,448-466).
caggtgccctcttcaacat

SEQ ID NO: 124457 - DNA, 19 bp, Homo sapiens
  siRNA target sequence for CXCR3 (NM_001504.1,512-530).
ccgctacctgaacatagtt

SEQ ID NO: 124458 - DNA, 19 bp, Homo sapiens
  siRNA target sequence for CXCR3 (NM_001504.1,514-532).
gctacctgaacatagttca

SEQ ID NO: 124459 - DNA, 19 bp, Homo sapiens
  siRNA target sequence for CXCR3 (NM_001504.1,515-533).
ctacctgaacatagttcat

SEQ ID NO: 124460 - DNA, 19 bp, Homo sapiens
  siRNA target sequence for CXCR3 (NM_001504.1,615-633).
gccctcccagacttcatct

SEQ ID NO: 124461 - DNA, 19 bp, Homo sapiens
  siRNA target sequence for CXCR3 (NM_001504.1,1024-1042).
cctttgtaggggtcaagtt

SEQ ID NO: 124462 - DNA, 19 bp, Homo sapiens
  siRNA target sequence for CCBP2 (NM_001296.3,498-516).
gtcttcgggagtttcttgt

SEQ ID NO: 124463 - DNA, 19 bp, Homo sapiens
  siRNA target sequence for CCBP2 (NM_001296.3,521-539).
gatggtgagcactctttat

SEQ ID NO: 124464 - DNA, 19 bp, Homo sapiens
  siRNA target sequence for CCBP2 (NM_001296.3,524-542).
ggtgagcactctttatact

SEQ ID NO: 124465 - DNA, 19 bp, Homo sapiens
  siRNA target sequence for CCBP2 (NM_001296.3,525-543).
gtgagcactctttatacta

SEQ ID NO: 124466 - DNA, 19 bp, Homo sapiens
  siRNA target sequence for CCBP2 (NM_001296.3,688-706).
ccgtctccatccctgatat

SEQ ID NO: 124467 - DNA, 19 bp, Homo sapiens
  siRNA target sequence for CCBP2 (NM_001296.3,698-716).
ccctgatatggtctttgta

SEQ ID NO: 124468 - DNA, 19 bp, Homo sapiens
  siRNA target sequence for CCBP2 (NM_001296.3,745-763).
ggaactgccacgcagattt

SEQ ID NO: 124469 - DNA, 19 bp, Homo sapiens
  siRNA target sequence for CCBP2 (NM_001296.3,769-787).
ggcatgggaccatttggaa

SEQ ID NO: 124470 - DNA, 19 bp, Homo sapiens
  siRNA target sequence for CCBP2 (NM_001296.3,834-852).
ctccttgccatgatcttct

SEQ ID NO: 124471 - DNA, 19 bp, Homo sapiens
  siRNA target sequence for CCBP2 (NM_001296.3,837-855).
cttgccatgatcttcttct

SEQ ID NO: 124472 - DNA, 19 bp, Homo sapiens
  siRNA target sequence for CCBP2 (NM_001296.3,940-958).
ccttcttcgtgctatggtt

SEQ ID NO: 124473 - DNA, 19 bp, Homo sapiens
  siRNA target sequence for CCBP2 (NM_001296.3,950-968).
gctatggttcccatacaat

SEQ ID NO: 124474 - DNA, 19 bp, Homo sapiens
  siRNA target sequence for CCBP2 (NM_001296.3,1185-1203).
gcccaggcctcattatcca

SEQ ID NO: 124475 - DNA, 19 bp, Homo sapiens
  siRNA target sequence for CCBP2 (NM_001296.3,1298-1316).
ggatgtggggaataaatca

SEQ ID NO: 124476 - DNA, 19 bp, Homo sapiens
  siRNA target sequence for CCL13 (NM_005408.2,170-188).
ctacttgctgcttcacatt

SEQ ID NO: 124477 - DNA, 19 bp, Homo sapiens
  siRNA target sequence for CCL13 (NM_005408.2,185-203).
catttagcagtaagaagat

SEQ ID NO: 124478 - DNA, 19 bp, Homo sapiens
  siRNA target sequence for CCL13 (NM_005408.2,352-370).
gctcacaccctgaagactt

SEQ ID NO: 124479 - DNA, 19 bp, Homo sapiens
  siRNA target sequence for CCR1 (NM_001295.1,97-115).
cgaccacagagtttgacta

SEQ ID NO: 124480 - DNA, 19 bp, Homo sapiens
  siRNA target sequence for CCR1 (NM_001295.1,98-116).
gaccacagagtttgactat

SEQ ID NO: 124481 - DNA, 19 bp, Homo sapiens
  siRNA target sequence for CCR1 (NM_001295.1,178-196).
ctctgtactccttggtatt

SEQ ID NO: 124482 - DNA, 19 bp, Homo sapiens
  siRNA target sequence for CCR1 (NM_001295.1,231-249).
ctggtccttgtgcaataca

SEQ ID NO: 124483 - DNA, 19 bp, Homo sapiens
  siRNA target sequence for CCR1 (NM_001295.1,325-343).
ccttctggatcgactacaa

SEQ ID NO: 124484 - DNA, 19 bp, Homo sapiens
  siRNA target sequence for CCR1 (NM_001295.1,331-349).
ggatcgactacaagttgaa

SEQ ID NO: 124485 - DNA, 19 bp, Homo sapiens
  siRNA target sequence for CCR1 (NM_001295.1,366-384).
ggtgatgccatgtgtaaga

SEQ ID NO: 124486 - DNA, 19 bp, Homo sapiens
  siRNA target sequence for CCR1 (NM_001295.1,367-385).
gtgatgccatgtgtaagat

SEQ ID NO: 124487 - DNA, 19 bp, Homo sapiens
  siRNA target sequence for CCR1 (NM_001295.1,490-508).
gggcacggaccgtcacttt

SEQ ID NO: 124488 - DNA, 19 bp, Homo sapiens
  siRNA target sequence for CCR1 (NM_001295.1,553-571).
cttccatgccaggcttata

SEQ ID NO: 124489 - DNA, 19 bp, Homo sapiens
  siRNA target sequence for CCR1 (NM_001295.1,557-575).
catgccaggcttatacttt

SEQ ID NO: 124490 - DNA, 19 bp, Homo sapiens
  siRNA target sequence for CCR1 (NM_001295.1,561-579).
ccaggcttatacttttcca

SEQ ID NO: 124491 - DNA, 19 bp, Homo sapiens
  siRNA target sequence for CCR1 (NM_001295.1,562-580).
caggcttatacttttccaa

SEQ ID NO: 124492 - DNA, 19 bp, Homo sapiens
  siRNA target sequence for CCR1 (NM_001295.1,581-599).
gacccaatgggaattcact

SEQ ID NO: 124493 - DNA, 19 bp, Homo sapiens
  siRNA target sequence for CCR1 (NM_001295.1,640-658).
gagagtggaagctgtttca

SEQ ID NO: 124494 - DNA, 19 bp, Homo sapiens
  siRNA target sequence for CCR1 (NM_001295.1,741-759).
ctaagacgaccaaatgaga

SEQ ID NO: 124495 - DNA, 19 bp, Homo sapiens
  siRNA target sequence for CCR1 (NM_001295.1,766-784).
ccaaagctgtccgtttgat

SEQ ID NO: 124496 - DNA, 19 bp, Homo sapiens
  siRNA target sequence for CCR1 (NM_001295.1,772-790).
ctgtccgtttgatttttgt

SEQ ID NO: 124497 - DNA, 19 bp, Homo sapiens
  siRNA target sequence for CCR1 (NM_001295.1,778-796).
gtttgatttttgtcatcat

SEQ ID NO: 124498 - DNA, 19 bp, Homo sapiens
  siRNA target sequence for CCR1 (NM_001295.1,791-809).
catcatgatcatctttttt

SEQ ID NO: 124499 - DNA, 19 bp, Homo sapiens
  siRNA target sequence for CCR1 (NM_001295.1,818-836).
gaccccctacaatttgact

SEQ ID NO: 124500 - DNA, 19 bp, Homo sapiens
  siRNA target sequence for CCR1 (NM_001295.1,820-838).
ccccctacaatttgactat

SEQ ID NO: 124501 - DNA, 19 bp, Homo sapiens
  siRNA target sequence for CCR1 (NM_001295.1,821-839).
cccctacaatttgactata

SEQ ID NO: 124502 - DNA, 19 bp, Homo sapiens
  siRNA target sequence for CCR1 (NM_001295.1,1023-1041).
gctgtgcacctggttaaat

SEQ ID NO: 124503 - DNA, 19 bp, Homo sapiens
  siRNA target sequence for CCR2 (NM_000647.3,91-109).
catctcgttctcggtttat

SEQ ID NO: 124504 - DNA, 19 bp, Homo sapiens
  siRNA target sequence for CCR2 (NM_000647.3,97-115).
gttctcggtttatcagaaa

SEQ ID NO: 124505 - DNA, 19 bp, Homo sapiens
  siRNA target sequence for CCR2 (NM_000647.3,119-137).
caacgagagcggtgaagaa

SEQ ID NO: 124506 - DNA, 19 bp, Homo sapiens
  siRNA target sequence for CCR2 (NM_000647.3,132-150).
gaagaagtcaccacctttt

SEQ ID NO: 124507 - DNA, 19 bp, Homo sapiens
  siRNA target sequence for CCR2 (NM_000647.3,138-156).
gtcaccaccttttttgatt

SEQ ID NO: 124508 - DNA, 19 bp, Homo sapiens
  siRNA target sequence for CCR2 (NM_000647.3,164-182).
cggtgctccctgtcataaa

SEQ ID NO: 124509 - DNA, 19 bp, Homo sapiens
  siRNA target sequence for CCR2 (NM_000647.3,263-281).
gctggtcgtcctcatctta

SEQ ID NO: 124510 - DNA, 19 bp, Homo sapiens
  siRNA target sequence for CCR2 (NM_000647.3,266-284).
ggtcgtcctcatcttaata

SEQ ID NO: 124511 - DNA, 19 bp, Homo sapiens
  siRNA target sequence for CCR2 (NM_000647.3,267-285).
gtcgtcctcatcttaataa

SEQ ID NO: 124512 - DNA, 19 bp, Homo sapiens
  siRNA target sequence for CCR2 (NM_000647.3,448-466).
gttattttggcggaatctt

SEQ ID NO: 124513 - DNA, 19 bp, Homo sapiens
  siRNA target sequence for CCR2 (NM_000647.3,647-665).
ctgtggcccttattttcca

SEQ ID NO: 124514 - DNA, 19 bp, Homo sapiens
  siRNA target sequence for CCR2 (NM_000647.3,663-681).
ccacgaggatggaataatt

SEQ ID NO: 124515 - DNA, 19 bp, Homo sapiens
  siRNA target sequence for CCR2 (NM_000647.3,664-682).
cacgaggatggaataattt

SEQ ID NO: 124516 - DNA, 19 bp, Homo sapiens
  siRNA target sequence for CCR2 (NM_000647.3,686-704).
cacaataatgaggaacatt

SEQ ID NO: 124517 - DNA, 19 bp, Homo sapiens
  siRNA target sequence for CCR2 (NM_000647.3,1016-1034).
cagaagcctttttcacata

SEQ ID NO: 124518 - DNA, 19 bp, Homo sapiens
  siRNA target sequence for CCR3 (NM_001837.2,524-542).
cactgatggcccagtttgt

SEQ ID NO: 124519 - DNA, 19 bp, Homo sapiens
  siRNA target sequence for CCR3 (NM_001837.2,597-615).
ggtgatgatcctcataaaa

SEQ ID NO: 124520 - DNA, 19 bp, Homo sapiens
  siRNA target sequence for CCR3 (NM_001837.2,598-616).
gtgatgatcctcataaaat

SEQ ID NO: 124521 - DNA, 19 bp, Homo sapiens
  siRNA target sequence for CCR3 (NM_001837.2,628-646).
cgaattatgaccaacatct

SEQ ID NO: 124522 - DNA, 19 bp, Homo sapiens
  siRNA target sequence for CCR3 (NM_001837.2,925-943).
gctcttcctgaatttatct

SEQ ID NO: 124523 - DNA, 19 bp, Homo sapiens
  siRNA target sequence for CCR3 (NM_001837.2,932-950).
ctgaatttatcttctatga

SEQ ID NO: 124524 - DNA, 19 bp, Homo sapiens
  siRNA target sequence for CCR3 (NM_001837.2,934-952).
gaatttatcttctatgaga

SEQ ID NO: 124525 - DNA, 19 bp, Homo sapiens
  siRNA target sequence for CCR3 (NM_001837.2,974-992).
ctctttgcagtgctcttta

SEQ ID NO: 124526 - DNA, 19 bp, Homo sapiens
  siRNA target sequence for CCR3 (NM_001837.2,997-1015).
gaggatacagtatatagct

SEQ ID NO: 124527 - DNA, 19 bp, Homo sapiens
  siRNA target sequence for CCR3 (NM_001837.2,1110-1128).
gctgaggtgccccagtaaa

SEQ ID NO: 124528 - DNA, 19 bp, Homo sapiens
  siRNA target sequence for CCR3 (NM_001837.2,1159-1177).
gtcatcatggcggtgtttt

SEQ ID NO: 124529 - DNA, 19 bp, Homo sapiens
  siRNA target sequence for CCR3 (NM_001837.2,1209-1227).
ccttctctcttcctatcaa

SEQ ID NO: 124530 - DNA, 19 bp, Homo sapiens
  siRNA target sequence for CCR3 (NM_001837.2,1210-1228).
cttctctcttcctatcaat

SEQ ID NO: 124531 - DNA, 19 bp, Homo sapiens
  siRNA target sequence for CCR3 (NM_001837.2,1472-1490).
cagagccggaactctctat

SEQ ID NO: 124532 - DNA, 19 bp, Homo sapiens
  siRNA target sequence for CCR3 (NM_001837.2,1477-1495).
ccggaactctctattgtgt

SEQ ID NO: 124533 - DNA, 19 bp, Homo sapiens
  siRNA target sequence for CCR3 (NM_001837.2,1478-1496).
cggaactctctattgtgtt

SEQ ID NO: 124534 - DNA, 19 bp, Homo sapiens
  siRNA target sequence for CCR4 (NM_005508.2,56-74).
gaaccccacggatatagca

SEQ ID NO: 124535 - DNA, 19 bp, Homo sapiens
  siRNA target sequence for CCR4 (NM_005508.2,79-97).
ccaccctcgatgaaagcat

SEQ ID NO: 124536 - DNA, 19 bp, Homo sapiens
  siRNA target sequence for CCR4 (NM_005508.2,80-98).
caccctcgatgaaagcata

SEQ ID NO: 124537 - DNA, 19 bp, Homo sapiens
  siRNA target sequence for CCR4 (NM_005508.2,82-100).
ccctcgatgaaagcatata

SEQ ID NO: 124538 - DNA, 19 bp, Homo sapiens
  siRNA target sequence for CCR4 (NM_005508.2,84-102).
ctcgatgaaagcatataca

SEQ ID NO: 124539 - DNA, 19 bp, Homo sapiens
  siRNA target sequence for CCR4 (NM_005508.2,94-112).
gcatatacagcaattacta

SEQ ID NO: 124540 - DNA, 19 bp, Homo sapiens
  siRNA target sequence for CCR4 (NM_005508.2,104-122).
caattactatctgtatgaa

SEQ ID NO: 124541 - DNA, 19 bp, Homo sapiens
  siRNA target sequence for CCR4 (NM_005508.2,131-149).
caagccttgcaccaaagaa

SEQ ID NO: 124542 - DNA, 19 bp, Homo sapiens
  siRNA target sequence for CCR4 (NM_005508.2,233-251).
ggttctggtcctgttcaaa

SEQ ID NO: 124543 - DNA, 19 bp, Homo sapiens
  siRNA target sequence for CCR4 (NM_005508.2,234-252).
gttctggtcctgttcaaat

SEQ ID NO: 124544 - DNA, 19 bp, Homo sapiens
  siRNA target sequence for CCR4 (NM_005508.2,306-324).
gatctgctcttcgtgtttt

SEQ ID NO: 124545 - DNA, 19 bp, Homo sapiens
  siRNA target sequence for CCR4 (NM_005508.2,375-393).
ggtctgtgcaagatgattt

SEQ ID NO: 124546 - DNA, 19 bp, Homo sapiens
  siRNA target sequence for CCR4 (NM_005508.2,573-591).
ctgttcagcacttgttata

SEQ ID NO: 124547 - DNA, 19 bp, Homo sapiens
  siRNA target sequence for CCR4 (NM_005508.2,592-610).
ctgagcgcaaccataccta

SEQ ID NO: 124548 - DNA, 19 bp, Homo sapiens
  siRNA target sequence for CCR4 (NM_005508.2,741-759).
cagcattgtaaaaatgaga

SEQ ID NO: 124549 - DNA, 19 bp, Homo sapiens
  siRNA target sequence for CCR4 (NM_005508.2,817-835).
ggacaccttacaacatagt

SEQ ID NO: 124550 - DNA, 19 bp, Homo sapiens
  siRNA target sequence for CCR4 (NM_005508.2,978-996).
gagaaatttcgcaagtaca

SEQ ID NO: 124551 - DNA, 19 bp, Homo sapiens
  siRNA target sequence for CCR4 (NM_005508.2,1100-1118).
gtccaccatggatcatgat

SEQ ID NO: 124552 - DNA, 19 bp, Homo sapiens
  siRNA target sequence for CCR7 (NM_001838.2,142-160).
gaggtcacggacgattaca

SEQ ID NO: 124553 - DNA, 19 bp, Homo sapiens
  siRNA target sequence for CCR7 (NM_001838.2,176-194).
cagtggactacactttgtt

SEQ ID NO: 124554 - DNA, 19 bp, Homo sapiens
  siRNA target sequence for CCR7 (NM_001838.2,213-231).
gaaggacgtgcggaacttt

SEQ ID NO: 124555 - DNA, 19 bp, Homo sapiens
  siRNA target sequence for CCR7 (NM_001838.2,216-234).
ggacgtgcggaactttaaa

SEQ ID NO: 124556 - DNA, 19 bp, Homo sapiens
  siRNA target sequence for CCR7 (NM_001838.2,298-316).
gtcgtgttgacctatatct

SEQ ID NO: 124557 - DNA, 19 bp, Homo sapiens
  siRNA target sequence for CCR7 (NM_001838.2,300-318).
cgtgttgacctatatctat

SEQ ID NO: 124558 - DNA, 19 bp, Homo sapiens
  siRNA target sequence for CCR7 (NM_001838.2,301-319).
gtgttgacctatatctatt

SEQ ID NO: 124559 - DNA, 19 bp, Homo sapiens
  siRNA target sequence for CCR7 (NM_001838.2,490-508).
ggcatgctcctacttcttt

SEQ ID NO: 124560 - DNA, 19 bp, Homo sapiens
  siRNA target sequence for CCR7 (NM_001838.2,709-727).
catgtggaggcctttatca

SEQ ID NO: 124561 - DNA, 19 bp, Homo sapiens
  siRNA target sequence for CCR7 (NM_001838.2,919-937).
cagacggtggccaacttca

SEQ ID NO: 124562 - DNA, 19 bp, Homo sapiens
  siRNA target sequence for CCR7 (NM_001838.2,950-968).
gcacctgtgagctcagtaa

SEQ ID NO: 124563 - DNA, 19 bp, Homo sapiens
  siRNA target sequence for CCR7 (NM_001838.2,1022-1040).
gcgtcaaccctttcttgta

SEQ ID NO: 124564 - DNA, 19 bp, Homo sapiens
  siRNA target sequence for CMKLR1 (NM_004072.1,520-538).
gatgaagattacaacactt

SEQ ID NO: 124565 - DNA, 19 bp, Homo sapiens
  siRNA target sequence for CMKLR1 (NM_004072.1,540-558).
catcagttacggtgatgaa

SEQ ID NO: 124566 - DNA, 19 bp, Homo sapiens
  siRNA target sequence for CMKLR1 (NM_004072.1,551-569).
gtgatgaataccctgatta

SEQ ID NO: 124567 - DNA, 19 bp, Homo sapiens
  siRNA target sequence for CMKLR1 (NM_004072.1,677-695).
gcaatggtctggtgatcat

SEQ ID NO: 124568 - DNA, 19 bp, Homo sapiens
  siRNA target sequence for CMKLR1 (NM_004072.1,862-880).
ctcatccacaacatgttca

SEQ ID NO: 124569 - DNA, 19 bp, Homo sapiens
  siRNA target sequence for CMKLR1 (NM_004072.1,962-980).
gcgttcgcctggcttacat

SEQ ID NO: 124570 - DNA, 19 bp, Homo sapiens
  siRNA target sequence for CMKLR1 (NM_004072.1,1509-1527).
ggtcaatgctctaagtgaa

SEQ ID NO: 124571 - DNA, 19 bp, Homo sapiens
  siRNA target sequence for CMKLR1 (NM_004072.1,1512-1530).
caatgctctaagtgaagat

SEQ ID NO: 124572 - DNA, 19 bp, Homo sapiens
  siRNA target sequence for CMKLR1 (NM_004072.1,1549-1567).
cccagccatagaagcttta

SEQ ID NO: 124573 - DNA, 19 bp, Homo sapiens
  siRNA target sequence for CX3CR1 (NM_001337.2,90-108).
ggatcagttccctgaatca

SEQ ID NO: 124574 - DNA, 19 bp, Homo sapiens
  siRNA target sequence for CX3CR1 (NM_001337.2,341-359).
ccttctggactcactattt

SEQ ID NO: 124575 - DNA, 19 bp, Homo sapiens
  siRNA target sequence for CX3CR1 (NM_001337.2,345-363).
ctggactcactatttgata

SEQ ID NO: 124576 - DNA, 19 bp, Homo sapiens
  siRNA target sequence for CX3CR1 (NM_001337.2,352-370).
cactatttgataaatgaaa

SEQ ID NO: 124577 - DNA, 19 bp, Homo sapiens
  siRNA target sequence for CX3CR1 (NM_001337.2,414-432).
cttcatcggcttttttgga

SEQ ID NO: 124578 - DNA, 19 bp, Homo sapiens
  siRNA target sequence for CX3CR1 (NM_001337.2,420-438).
cggcttttttggaagcata

SEQ ID NO: 124579 - DNA, 19 bp, Homo sapiens
  siRNA target sequence for CX3CR1 (NM_001337.2,655-673).
ctccgcaatgtggaaacaa

SEQ ID NO: 124580 - DNA, 19 bp, Homo sapiens
  siRNA target sequence for CX3CR1 (NM_001337.2,688-706).
ctactccccctgctcatta

SEQ ID NO: 124581 - DNA, 19 bp, Homo sapiens
  siRNA target sequence for CX3CR1 (NM_001337.2,694-712).
cccctgctcattatgagtt

SEQ ID NO: 124582 - DNA, 19 bp, Homo sapiens
  siRNA target sequence for CX3CR1 (NM_001337.2,710-728).
gttattgctacttcagaat

SEQ ID NO: 124583 - DNA, 19 bp, Homo sapiens
  siRNA target sequence for CX3CR1 (NM_001337.2,766-784).
gccaaagccattaaactga

SEQ ID NO: 124584 - DNA, 19 bp, Homo sapiens
  siRNA target sequence for CX3CR1 (NM_001337.2,790-808).
ctggtggtcatcgtgtttt

SEQ ID NO: 124585 - DNA, 19 bp, Homo sapiens
  siRNA target sequence for CX3CR1 (NM_001337.2,823-841).
ccctacaacgttatgattt

SEQ ID NO: 124586 - DNA, 19 bp, Homo sapiens
  siRNA target sequence for CX3CR1 (NM_001337.2,824-842).
cctacaacgttatgatttt

SEQ ID NO: 124587 - DNA, 19 bp, Homo sapiens
  siRNA target sequence for CX3CR1 (NM_001337.2,918-936).
gactgagacggttgcattt

SEQ ID NO: 124588 - DNA, 19 bp, Homo sapiens
  siRNA target sequence for CX3CR1 (NM_001337.2,1039-1057).
cgctcagtccacgttgatt

SEQ ID NO: 124589 - DNA, 19 bp, Homo sapiens
  siRNA target sequence for CX3CR1 (NM_001337.2,1040-1058).
gctcagtccacgttgattt

SEQ ID NO: 124590 - DNA, 19 bp, Homo sapiens
  siRNA target sequence for CX3CR1 (NM_001337.2,1099-1117).
ctgagcagcaattttactt

SEQ ID NO: 124591 - DNA, 19 bp, Homo sapiens
  siRNA target sequence for CXCR4 (NM_003467.1,92-110).
gaggggatcagtatataca

SEQ ID NO: 124592 - DNA, 19 bp, Homo sapiens
  siRNA target sequence for CXCR4 (NM_003467.1,102-120).
gtatatacacttcagataa

SEQ ID NO: 124593 - DNA, 19 bp, Homo sapiens
  siRNA target sequence for CXCR4 (NM_003467.1,168-186).
cctgtttccgtgaagaaaa

SEQ ID NO: 124594 - DNA, 19 bp, Homo sapiens
  siRNA target sequence for CXCR4 (NM_003467.1,169-187).
ctgtttccgtgaagaaaat

SEQ ID NO: 124595 - DNA, 19 bp, Homo sapiens
  siRNA target sequence for CXCR4 (NM_003467.1,242-260).
ggcattgtgggcaatggat

SEQ ID NO: 124596 - DNA, 19 bp, Homo sapiens
  siRNA target sequence for CXCR4 (NM_003467.1,243-261).
gcattgtgggcaatggatt

SEQ ID NO: 124597 - DNA, 19 bp, Homo sapiens
  siRNA target sequence for CXCR4 (NM_003467.1,414-432).
gcaaggcagtccatgtcat

SEQ ID NO: 124598 - DNA, 19 bp, Homo sapiens
  siRNA target sequence for CXCR4 (NM_003467.1,419-437).
gcagtccatgtcatctaca

SEQ ID NO: 124599 - DNA, 19 bp, Homo sapiens
  siRNA target sequence for CXCR4 (NM_003467.1,591-609).
ctattcccgacttcatctt

SEQ ID NO: 124600 - DNA, 19 bp, Homo sapiens
  siRNA target sequence for CXCR4 (NM_003467.1,709-727).
ccttatcctgcctggtatt

SEQ ID NO: 124601 - DNA, 19 bp, Homo sapiens
  siRNA target sequence for CXCR4 (NM_003467.1,734-752).
ctgtcctgctattgcatta

SEQ ID NO: 124602 - DNA, 19 bp, Homo sapiens
  siRNA target sequence for CXCR4 (NM_003467.1,948-966).
ccgaggccctagctttctt

SEQ ID NO: 124603 - DNA, 19 bp, Homo sapiens
  siRNA target sequence for CXCR4 (NM_003467.1,996-1014).
ctttccttggagccaaatt

SEQ ID NO: 124604 - DNA, 19 bp, Homo sapiens
  siRNA target sequence for CXCR4 (NM_003467.1,1004-1022).
ggagccaaatttaaaacct

SEQ ID NO: 124605 - DNA, 19 bp, Homo sapiens
  siRNA target sequence for CXCR4 (NM_003467.1,1115-1133).
gagtctgagtcttcaagtt

SEQ ID NO: 124606 - DNA, 19 bp, Homo sapiens
  siRNA target sequence for CXCR4 (NM_003467.1,1119-1137).
ctgagtcttcaagttttca

SEQ ID NO: 124607 - DNA, 19 bp, Homo sapiens
  siRNA target sequence for CXCR4 (NM_003467.1,1121-1139).
gagtcttcaagttttcact

SEQ ID NO: 124608 - DNA, 19 bp, Homo sapiens
  siRNA target sequence for GPR17 (NM_005291.1,186-204).
ggtctgatcaccaacttct

SEQ ID NO: 124609 - DNA, 19 bp, Homo sapiens
  siRNA target sequence for XCR1 (NM_005283.1,26-44).
gcaccacctttttttacta

SEQ ID NO: 124610 - DNA, 19 bp, Homo sapiens
  siRNA target sequence for XCR1 (NM_005283.1,665-683).
gcacggtcaagctcatctt

SEQ ID NO: 124611 - DNA, 19 bp, Homo sapiens
  siRNA target sequence for IFNGR1 (NM_000416.1,131-149).
cctacaccaactaatgtta

SEQ ID NO: 124612 - DNA, 19 bp, Homo sapiens
  siRNA target sequence for IFNGR1 (NM_000416.1,150-168).
caattgaatcctataacat

SEQ ID NO: 124613 - DNA, 19 bp, Homo sapiens
  siRNA target sequence for IFNGR1 (NM_000416.1,203-221).
ccacaggtccctgttttta

SEQ ID NO: 124614 - DNA, 19 bp, Homo sapiens
  siRNA target sequence for IFNGR1 (NM_000416.1,222-240).
ccgtagaggtaaagaacta

SEQ ID NO: 124615 - DNA, 19 bp, Homo sapiens
  siRNA target sequence for IFNGR1 (NM_000416.1,235-253).
gaactatggtgttaagaat

SEQ ID NO: 124616 - DNA, 19 bp, Homo sapiens
  siRNA target sequence for IFNGR1 (NM_000416.1,238-256).
ctatggtgttaagaattca

SEQ ID NO: 124617 - DNA, 19 bp, Homo sapiens
  siRNA target sequence for IFNGR1 (NM_000416.1,277-295).
caatatttctcatcattat

SEQ ID NO: 124618 - DNA, 19 bp, Homo sapiens
  siRNA target sequence for IFNGR1 (NM_000416.1,285-303).
ctcatcattattgtaatat

SEQ ID NO: 124619 - DNA, 19 bp, Homo sapiens
  siRNA target sequence for IFNGR1 (NM_000416.1,314-332).
gttggtgatccatcaaatt

SEQ ID NO: 124620 - DNA, 19 bp, Homo sapiens
  siRNA target sequence for IFNGR1 (NM_000416.1,354-372).
ccagggttggacaaaaaga

SEQ ID NO: 124621 - DNA, 19 bp, Homo sapiens
  siRNA target sequence for IFNGR1 (NM_000416.1,355-373).
cagggttggacaaaaagaa

SEQ ID NO: 124622 - DNA, 19 bp, Homo sapiens
  siRNA target sequence for IFNGR1 (NM_000416.1,426-444).
gaccacctaaactggatat

SEQ ID NO: 124623 - DNA, 19 bp, Homo sapiens
  siRNA target sequence for IFNGR1 (NM_000416.1,508-526).
cgagcaggaagtcgattat

SEQ ID NO: 124624 - DNA, 19 bp, Homo sapiens
  siRNA target sequence for IFNGR1 (NM_000416.1,511-529).
gcaggaagtcgattatgat

SEQ ID NO: 124625 - DNA, 19 bp, Homo sapiens
  siRNA target sequence for IFNGR1 (NM_000416.1,521-539).
gattatgatcccgaaacta

SEQ ID NO: 124626 - DNA, 19 bp, Homo sapiens
  siRNA target sequence for IFNGR1 (NM_000416.1,530-548).
cccgaaactacctgttaca

SEQ ID NO: 124627 - DNA, 19 bp, Homo sapiens
  siRNA target sequence for IFNGR1 (NM_000416.1,531-549).
ccgaaactacctgttacat

SEQ ID NO: 124628 - DNA, 19 bp, Homo sapiens
  siRNA target sequence for IFNGR1 (NM_000416.1,532-550).
cgaaactacctgttacatt

SEQ ID NO: 124629 - DNA, 19 bp, Homo sapiens
  siRNA target sequence for IFNGR1 (NM_000416.1,533-551).
gaaactacctgttacatta

SEQ ID NO: 124630 - DNA, 19 bp, Homo sapiens
  siRNA target sequence for IFNGR1 (NM_000416.1,581-599).
ggaagtgagatccagtata

SEQ ID NO: 124631 - DNA, 19 bp, Homo sapiens
  siRNA target sequence for IFNGR1 (NM_000416.1,582-600).
gaagtgagatccagtataa

SEQ ID NO: 124632 - DNA, 19 bp, Homo sapiens
  siRNA target sequence for IFNGR1 (NM_000416.1,623-641).
gattgtgacgagattcagt

SEQ ID NO: 124633 - DNA, 19 bp, Homo sapiens
  siRNA target sequence for IFNGR1 (NM_000416.1,740-758).
gaagtttgtattaccattt

SEQ ID NO: 124634 - DNA, 19 bp, Homo sapiens
  siRNA target sequence for IFNGR1 (NM_000416.1,792-810).
cagttgttgctgctttact

SEQ ID NO: 124635 - DNA, 19 bp, Homo sapiens
  siRNA target sequence for IFNGR1 (NM_000416.1,824-842).
cttagcctggtattcatct

SEQ ID NO: 124636 - DNA, 19 bp, Homo sapiens
  siRNA target sequence for IFNGR1 (NM_000416.1,904-922).
gatctctgtggtaagaagt

SEQ ID NO: 124637 - DNA, 19 bp, Homo sapiens
  siRNA target sequence for IFNGR1 (NM_000416.1,921-939).
gtgctactttagagacaaa

SEQ ID NO: 124638 - DNA, 19 bp, Homo sapiens
  siRNA target sequence for IFNGR1 (NM_000416.1,1041-1059).
gcatgcataccgaagacaa

SEQ ID NO: 124639 - DNA, 19 bp, Homo sapiens
  siRNA target sequence for IFNGR1 (NM_000416.1,1042-1060).
catgcataccgaagacaat

SEQ ID NO: 124640 - DNA, 19 bp, Homo sapiens
  siRNA target sequence for IFNGR1 (NM_000416.1,1147-1165).
cagccatctgactccaata

SEQ ID NO: 124641 - DNA, 19 bp, Homo sapiens
  siRNA target sequence for IFNGR1 (NM_000416.1,1172-1190).
gagagttcttcacctttaa

SEQ ID NO: 124642 - DNA, 19 bp, Homo sapiens
  siRNA target sequence for IFNGR1 (NM_000416.1,1208-1226).
cctggcagcatcgctttaa

SEQ ID NO: 124643 - DNA, 19 bp, Homo sapiens
  siRNA target sequence for IFNGR1 (NM_000416.1,1209-1227).
ctggcagcatcgctttaaa

SEQ ID NO: 124644 - DNA, 19 bp, Homo sapiens
  siRNA target sequence for IFNGR1 (NM_000416.1,1211-1229).
ggcagcatcgctttaaact

SEQ ID NO: 124645 - DNA, 19 bp, Homo sapiens
  siRNA target sequence for IFNGR1 (NM_000416.1,1220-1238).
gctttaaactcgtatcact

SEQ ID NO: 124646 - DNA, 19 bp, Homo sapiens
  siRNA target sequence for IFNGR1 (NM_000416.1,1228-1246).
ctcgtatcactccagaaat

SEQ ID NO: 124647 - DNA, 19 bp, Homo sapiens
  siRNA target sequence for IFNGR1 (NM_000416.1,1264-1282).
ctccagaaatggttttgat

SEQ ID NO: 124648 - DNA, 19 bp, Homo sapiens
  siRNA target sequence for IFNGR1 (NM_000416.1,1269-1287).
gaaatggttttgatactga

SEQ ID NO: 124649 - DNA, 19 bp, Homo sapiens
  siRNA target sequence for IFNGR1 (NM_000416.1,1291-1309).
cagctgtctggaatcacat

SEQ ID NO: 124650 - DNA, 19 bp, Homo sapiens
  siRNA target sequence for IFNGR1 (NM_000416.1,1401-1419).
cctcctttggttatgataa

SEQ ID NO: 124651 - DNA, 19 bp, Homo sapiens
  siRNA target sequence for IFNGR1 (NM_000416.1,1436-1454).
gatctacttgtggatgata

SEQ ID NO: 124652 - DNA, 19 bp, Homo sapiens
  siRNA target sequence for IFNGR1 (NM_000416.1,1448-1466).
gatgatagcggtaaagagt

SEQ ID NO: 124653 - DNA, 19 bp, Homo sapiens
  siRNA target sequence for IFNGR1 (NM_000416.1,1456-1474).
cggtaaagagtccttgatt

SEQ ID NO: 124654 - DNA, 19 bp, Homo sapiens
  siRNA target sequence for IFNGR1 (NM_000416.1,1463-1481).
gagtccttgattggttata

SEQ ID NO: 124655 - DNA, 19 bp, Homo sapiens
  siRNA target sequence for IFNGR1 (NM_000416.1,1465-1483).
gtccttgattggttataga

SEQ ID NO: 124656 - DNA, 19 bp, Homo sapiens
  siRNA target sequence for IFNGR2 (NM_005534.1,755-773).
cgaagattcgcctgtacaa

SEQ ID NO: 124657 - DNA, 19 bp, Homo sapiens
  siRNA target sequence for IFNGR2 (NM_005534.1,818-836).
gcacgaggcctgttgtcta

SEQ ID NO: 124658 - DNA, 19 bp, Homo sapiens
  siRNA target sequence for IFNGR2 (NM_005534.1,891-909).
cataggggtgaattgtaca

SEQ ID NO: 124659 - DNA, 19 bp, Homo sapiens
  siRNA target sequence for IFNGR2 (NM_005534.1,955-973).
gcaggcttcccaatggatt

SEQ ID NO: 124660 - DNA, 19 bp, Homo sapiens
  siRNA target sequence for IFNGR2 (NM_005534.1,956-974).
caggcttcccaatggattt

SEQ ID NO: 124661 - DNA, 19 bp, Homo sapiens
  siRNA target sequence for IFNGR2 (NM_005534.1,959-977).
gcttcccaatggatttcaa

SEQ ID NO: 124662 - DNA, 19 bp, Homo sapiens
  siRNA target sequence for IFNGR2 (NM_005534.1,960-978).
cttcccaatggatttcaat

SEQ ID NO: 124663 - DNA, 19 bp, Homo sapiens
  siRNA target sequence for IFNGR2 (NM_005534.1,1045-1063).
caacactatcggaatgtga

SEQ ID NO: 124664 - DNA, 19 bp, Homo sapiens
  siRNA target sequence for IFNGR2 (NM_005534.1,1064-1082).
ctgtcgggcctccagaaaa

SEQ ID NO: 124665 - DNA, 19 bp, Homo sapiens
  siRNA target sequence for IFNGR2 (NM_005534.1,1152-1170).
ctccacggcctttttttgt

SEQ ID NO: 124666 - DNA, 19 bp, Homo sapiens
  siRNA target sequence for IFNGR2 (NM_005534.1,1235-1253).
ccatttcattggataactt

SEQ ID NO: 124667 - DNA, 19 bp, Homo sapiens
  siRNA target sequence for IFNGR2 (NM_005534.1,1258-1276).
ccctccagagtgtactgtt

SEQ ID NO: 124668 - DNA, 19 bp, Homo sapiens
  siRNA target sequence for IFNGR2 (NM_005534.1,1259-1277).
cctccagagtgtactgttt

SEQ ID NO: 124669 - DNA, 19 bp, Homo sapiens
  siRNA target sequence for IFNGR2 (NM_005534.1,1260-1278).
ctccagagtgtactgttta

SEQ ID NO: 124670 - DNA, 19 bp, Homo sapiens
  siRNA target sequence for IFNGR2 (NM_005534.1,1322-1340).
gagtcgggcatttaagcaa

SEQ ID NO: 124671 - DNA, 19 bp, Homo sapiens
  siRNA target sequence for IFNGR2 (NM_005534.1,1326-1344).
cgggcatttaagcaacata

SEQ ID NO: 124672 - DNA, 19 bp, Homo sapiens
  siRNA target sequence for IFNGR2 (NM_005534.1,1327-1345).
gggcatttaagcaacatat

SEQ ID NO: 124673 - DNA, 19 bp, Homo sapiens
  siRNA target sequence for IFNGR2 (NM_005534.1,1403-1421).
ccgtgggaacattttcgtt

SEQ ID NO: 124674 - DNA, 19 bp, Homo sapiens
  siRNA target sequence for IFNGR2 (NM_005534.1,1499-1517).
caccaagcatcccattaca

SEQ ID NO: 124675 - DNA, 19 bp, Homo sapiens
  siRNA target sequence for IFNGR2 (NM_005534.1,1502-1520).
caagcatcccattacagat

SEQ ID NO: 124676 - DNA, 19 bp, Homo sapiens
  siRNA target sequence for IFNGR2 (NM_005534.1,1541-1559).
caactcagcccatcttaga

SEQ ID NO: 124677 - DNA, 19 bp, Homo sapiens
  siRNA target sequence for IFNAR1 (NM_000629.1,144-162).
cgcagccgcaggtggaaaa

SEQ ID NO: 124678 - DNA, 19 bp, Homo sapiens
  siRNA target sequence for IFNAR1 (NM_000629.1,242-260).
ctgtcgggaatgtgacttt

SEQ ID NO: 124679 - DNA, 19 bp, Homo sapiens
  siRNA target sequence for IFNAR1 (NM_000629.1,244-262).
gtcgggaatgtgacttttt

SEQ ID NO: 124680 - DNA, 19 bp, Homo sapiens
  siRNA target sequence for IFNAR1 (NM_000629.1,306-324).
gtctgggtgtcagaatatt

SEQ ID NO: 124681 - DNA, 19 bp, Homo sapiens
  siRNA target sequence for IFNAR1 (NM_000629.1,312-330).
gtgtcagaatattactagt

SEQ ID NO: 124682 - DNA, 19 bp, Homo sapiens
  siRNA target sequence for IFNAR1 (NM_000629.1,318-336).
gaatattactagtaccaaa

SEQ ID NO: 124683 - DNA, 19 bp, Homo sapiens
  siRNA target sequence for IFNAR1 (NM_000629.1,419-437).
ggtatgaggttgactcatt

SEQ ID NO: 124684 - DNA, 19 bp, Homo sapiens
  siRNA target sequence for IFNAR1 (NM_000629.1,420-438).
gtatgaggttgactcattt

SEQ ID NO: 124685 - DNA, 19 bp, Homo sapiens
  siRNA target sequence for IFNAR1 (NM_000629.1,464-482).
gtcctccagaagtacattt

SEQ ID NO: 124686 - DNA, 19 bp, Homo sapiens
  siRNA target sequence for IFNAR1 (NM_000629.1,490-508).
gaagataaggcaatagtga

SEQ ID NO: 124687 - DNA, 19 bp, Homo sapiens
  siRNA target sequence for IFNAR1 (NM_000629.1,521-539).
ctggaacaaaagatagtgt

SEQ ID NO: 124688 - DNA, 19 bp, Homo sapiens
  siRNA target sequence for IFNAR1 (NM_000629.1,543-561).
gtgggctttggatggttta

SEQ ID NO: 124689 - DNA, 19 bp, Homo sapiens
  siRNA target sequence for IFNAR1 (NM_000629.1,547-565).
gctttggatggtttaagct

SEQ ID NO: 124690 - DNA, 19 bp, Homo sapiens
  siRNA target sequence for IFNAR1 (NM_000629.1,548-566).
ctttggatggtttaagctt

SEQ ID NO: 124691 - DNA, 19 bp, Homo sapiens
  siRNA target sequence for IFNAR1 (NM_000629.1,552-570).
ggatggtttaagctttaca

SEQ ID NO: 124692 - DNA, 19 bp, Homo sapiens
  siRNA target sequence for IFNAR1 (NM_000629.1,594-612).
ctcttcaggtgtagaagaa

SEQ ID NO: 124693 - DNA, 19 bp, Homo sapiens
  siRNA target sequence for IFNAR1 (NM_000629.1,599-617).
caggtgtagaagaaaggat

SEQ ID NO: 124694 - DNA, 19 bp, Homo sapiens
  siRNA target sequence for IFNAR1 (NM_000629.1,652-670).
ctctcaccagagactactt

SEQ ID NO: 124695 - DNA, 19 bp, Homo sapiens
  siRNA target sequence for IFNAR1 (NM_000629.1,659-677).
cagagactacttattgtct

SEQ ID NO: 124696 - DNA, 19 bp, Homo sapiens
  siRNA target sequence for IFNAR1 (NM_000629.1,661-679).
gagactacttattgtctaa

SEQ ID NO: 124697 - DNA, 19 bp, Homo sapiens
  siRNA target sequence for IFNAR1 (NM_000629.1,682-700).
gttaaagcagcactactta

SEQ ID NO: 124698 - DNA, 19 bp, Homo sapiens
  siRNA target sequence for IFNAR1 (NM_000629.1,694-712).
ctacttacgtcatggaaaa

SEQ ID NO: 124699 - DNA, 19 bp, Homo sapiens
  siRNA target sequence for IFNAR1 (NM_000629.1,802-820).
cagaactatgttcttaaat

SEQ ID NO: 124700 - DNA, 19 bp, Homo sapiens
  siRNA target sequence for IFNAR1 (NM_000629.1,821-839).
gggattatacatatgcaaa

SEQ ID NO: 124701 - DNA, 19 bp, Homo sapiens
  siRNA target sequence for IFNAR1 (NM_000629.1,886-904).
cctggaaaccatttgtata

SEQ ID NO: 124702 - DNA, 19 bp, Homo sapiens
  siRNA target sequence for IFNAR1 (NM_000629.1,887-905).
ctggaaaccatttgtataa

SEQ ID NO: 124703 - DNA, 19 bp, Homo sapiens
  siRNA target sequence for IFNAR1 (NM_000629.1,889-907).
ggaaaccatttgtataaat

SEQ ID NO: 124704 - DNA, 19 bp, Homo sapiens
  siRNA target sequence for IFNAR1 (NM_000629.1,993-1011).
ccgcgtacaagcatctgat

SEQ ID NO: 124705 - DNA, 19 bp, Homo sapiens
  siRNA target sequence for IFNAR1 (NM_000629.1,1031-1049).
ggtctgaagagataaagtt

SEQ ID NO: 124706 - DNA, 19 bp, Homo sapiens
  siRNA target sequence for IFNAR1 (NM_000629.1,1041-1059).
gataaagtttgatactgaa

SEQ ID NO: 124707 - DNA, 19 bp, Homo sapiens
  siRNA target sequence for IFNAR1 (NM_000629.1,1092-1110).
cattagatcccttagtgat

SEQ ID NO: 124708 - DNA, 19 bp, Homo sapiens
  siRNA target sequence for IFNAR1 (NM_000629.1,1097-1115).
gatcccttagtgattcatt

SEQ ID NO: 124709 - DNA, 19 bp, Homo sapiens
  siRNA target sequence for IFNAR1 (NM_000629.1,1101-1119).
ccttagtgattcattccat

SEQ ID NO: 124710 - DNA, 19 bp, Homo sapiens
  siRNA target sequence for IFNAR1 (NM_000629.1,1108-1126).
gattcattccatatctata

SEQ ID NO: 124711 - DNA, 19 bp, Homo sapiens
  siRNA target sequence for IFNAR1 (NM_000629.1,1122-1140).
ctatatcggtgctccaaaa

SEQ ID NO: 124712 - DNA, 19 bp, Homo sapiens
  siRNA target sequence for IFNAR1 (NM_000629.1,1154-1172).
cgcctgtgatccaggatta

SEQ ID NO: 124713 - DNA, 19 bp, Homo sapiens
  siRNA target sequence for IFNAR1 (NM_000629.1,1155-1173).
gcctgtgatccaggattat

SEQ ID NO: 124714 - DNA, 19 bp, Homo sapiens
  siRNA target sequence for IFNAR1 (NM_000629.1,1233-1251).
cgagaaaaaaactgatgtt

SEQ ID NO: 124715 - DNA, 19 bp, Homo sapiens
  siRNA target sequence for IFNAR1 (NM_000629.1,1249-1267).
gttacagttcctaatttga

SEQ ID NO: 124716 - DNA, 19 bp, Homo sapiens
  siRNA target sequence for IFNAR1 (NM_000629.1,1266-1284).
gaaaccactgactgtatat

SEQ ID NO: 124717 - DNA, 19 bp, Homo sapiens
  siRNA target sequence for IFNAR1 (NM_000629.1,1345-1363).
gacgctgtatgtgagaaaa

SEQ ID NO: 124718 - DNA, 19 bp, Homo sapiens
  siRNA target sequence for IFNAR1 (NM_000629.1,1347-1365).
cgctgtatgtgagaaaaca

SEQ ID NO: 124719 - DNA, 19 bp, Homo sapiens
  siRNA target sequence for IFNAR1 (NM_000629.1,1382-1400).
ctaaaatttggcttatagt

SEQ ID NO: 124720 - DNA, 19 bp, Homo sapiens
  siRNA target sequence for IFNAR1 (NM_000629.1,1392-1410).
gcttatagttggaatttgt

SEQ ID NO: 124721 - DNA, 19 bp, Homo sapiens
  siRNA target sequence for IFNAR1 (NM_000629.1,1424-1442).
ctctcccgtttgtcattta

SEQ ID NO: 124722 - DNA, 19 bp, Homo sapiens
  siRNA target sequence for IFNAR1 (NM_000629.1,1428-1446).
cccgtttgtcatttatgct

SEQ ID NO: 124723 - DNA, 19 bp, Homo sapiens
  siRNA target sequence for IFNAR1 (NM_000629.1,1444-1462).
gctgcgaaagtcttcttga

SEQ ID NO: 124724 - DNA, 19 bp, Homo sapiens
  siRNA target sequence for IFNAR1 (NM_000629.1,1463-1481).
gatgcatcaattatgtctt

SEQ ID NO: 124725 - DNA, 19 bp, Homo sapiens
  siRNA target sequence for IFNAR1 (NM_000629.1,1505-1523).
ccagtatagatgagtattt

SEQ ID NO: 124726 - DNA, 19 bp, Homo sapiens
  siRNA target sequence for IFNAR1 (NM_000629.1,1526-1544).
ctgaacagccattgaagaa

SEQ ID NO: 124727 - DNA, 19 bp, Homo sapiens
  siRNA target sequence for IFNAR1 (NM_000629.1,1645-1663).
gatcataaaaaatacagtt

SEQ ID NO: 124728 - DNA, 19 bp, Homo sapiens
  siRNA target sequence for IFNAR1 (NM_000629.1,1665-1683).
ccaaactagccaagattca

SEQ ID NO: 124729 - DNA, 19 bp, Homo sapiens
  siRNA target sequence for IFNAR1 (NM_000629.1,1673-1691).
gccaagattcaggaaatta

SEQ ID NO: 124730 - DNA, 19 bp, Homo sapiens
  siRNA target sequence for IFNAR2 (NM_000874.2,350-368).
catcttcagatcacttaat

SEQ ID NO: 124731 - DNA, 19 bp, Homo sapiens
  siRNA target sequence for IFNAR2 (NM_000874.2,372-390).
gttctcatggtgtatatca

SEQ ID NO: 124732 - DNA, 19 bp, Homo sapiens
  siRNA target sequence for IFNAR2 (NM_000874.2,409-427).
catatgattcgcctgatta

SEQ ID NO: 124733 - DNA, 19 bp, Homo sapiens
  siRNA target sequence for IFNAR2 (NM_000874.2,419-437).
gcctgattacacagatgaa

SEQ ID NO: 124734 - DNA, 19 bp, Homo sapiens
  siRNA target sequence for IFNAR2 (NM_000874.2,420-438).
cctgattacacagatgaat

SEQ ID NO: 124735 - DNA, 19 bp, Homo sapiens
  siRNA target sequence for IFNAR2 (NM_000874.2,423-441).
gattacacagatgaatctt

SEQ ID NO: 124736 - DNA, 19 bp, Homo sapiens
  siRNA target sequence for IFNAR2 (NM_000874.2,435-453).
gaatcttgcactttcaaga

SEQ ID NO: 124737 - DNA, 19 bp, Homo sapiens
  siRNA target sequence for IFNAR2 (NM_000874.2,526-544).
cattgctgtatacaatcat

SEQ ID NO: 124738 - DNA, 19 bp, Homo sapiens
  siRNA target sequence for IFNAR2 (NM_000874.2,660-678).
ggattcagcgggaacacaa

SEQ ID NO: 124739 - DNA, 19 bp, Homo sapiens
  siRNA target sequence for IFNAR2 (NM_000874.2,669-687).
gggaacacaacgttgttca

SEQ ID NO: 124740 - DNA, 19 bp, Homo sapiens
  siRNA target sequence for IFNAR2 (NM_000874.2,683-701).
gttcagttgctcacacaat

SEQ ID NO: 124741 - DNA, 19 bp, Homo sapiens
  siRNA target sequence for IFNAR2 (NM_000874.2,708-726).
ctggccatagacatgtctt

SEQ ID NO: 124742 - DNA, 19 bp, Homo sapiens
  siRNA target sequence for IFNAR2 (NM_000874.2,710-728).
ggccatagacatgtctttt

SEQ ID NO: 124743 - DNA, 19 bp, Homo sapiens
  siRNA target sequence for IFNAR2 (NM_000874.2,713-731).
catagacatgtcttttgaa

SEQ ID NO: 124744 - DNA, 19 bp, Homo sapiens
  siRNA target sequence for IFNAR2 (NM_000874.2,729-747).
gaaccaccagagtttgaga

SEQ ID NO: 124745 - DNA, 19 bp, Homo sapiens
  siRNA target sequence for IFNAR2 (NM_000874.2,798-816).
gttgaggaagaattacagt

SEQ ID NO: 124746 - DNA, 19 bp, Homo sapiens
  siRNA target sequence for IFNAR2 (NM_000874.2,826-844).
ctctcgtcattgaagaaca

SEQ ID NO: 124747 - DNA, 19 bp, Homo sapiens
  siRNA target sequence for IFNAR2 (NM_000874.2,847-865).
cagagggaattgttaagaa

SEQ ID NO: 124748 - DNA, 19 bp, Homo sapiens
  siRNA target sequence for IFNAR2 (NM_000874.2,863-881).
gaagcataaacccgaaata

SEQ ID NO: 124749 - DNA, 19 bp, Homo sapiens
  siRNA target sequence for IFNAR2 (NM_000874.2,895-913).
gtggaaatttcacctatat

SEQ ID NO: 124750 - DNA, 19 bp, Homo sapiens
  siRNA target sequence for IFNAR2 (NM_000874.2,897-915).
ggaaatttcacctatatca

SEQ ID NO: 124751 - DNA, 19 bp, Homo sapiens
  siRNA target sequence for IFNAR2 (NM_000874.2,898-916).
gaaatttcacctatatcat

SEQ ID NO: 124752 - DNA, 19 bp, Homo sapiens
  siRNA target sequence for IFNAR2 (NM_000874.2,907-925).
cctatatcattgacaagtt

SEQ ID NO: 124753 - DNA, 19 bp, Homo sapiens
  siRNA target sequence for IFNAR2 (NM_000874.2,908-926).
ctatatcattgacaagtta

SEQ ID NO: 124754 - DNA, 19 bp, Homo sapiens
  siRNA target sequence for IFNAR2 (NM_000874.2,935-953).
cacgaactactgtgtatct

SEQ ID NO: 124755 - DNA, 19 bp, Homo sapiens
  siRNA target sequence for IFNAR2 (NM_000874.2,970-988).
gtgatgagcaagcagtaat

SEQ ID NO: 124756 - DNA, 19 bp, Homo sapiens
  siRNA target sequence for IFNAR2 (NM_000874.2,977-995).
gcaagcagtaataaagtct

SEQ ID NO: 124757 - DNA, 19 bp, Homo sapiens
  siRNA target sequence for IFNAR2 (NM_000874.2,1116-1134).
ctgaaatggattggttata

SEQ ID NO: 124758 - DNA, 19 bp, Homo sapiens
  siRNA target sequence for IFNAR2 (NM_000874.2,1208-1226).
caggtgcagtcataatgca

SEQ ID NO: 124759 - DNA, 19 bp, Homo sapiens
  siRNA target sequence for IL22RA1 (NM_021258.2,109-127).
ctgctccagcacgtgaaat

SEQ ID NO: 124760 - DNA, 19 bp, Homo sapiens
  siRNA target sequence for IL22RA1 (NM_021258.2,130-148).
cagtccagcaactttgaaa

SEQ ID NO: 124761 - DNA, 19 bp, Homo sapiens
  siRNA target sequence for IL22RA1 (NM_021258.2,300-318).
cctcacggagctctactat

SEQ ID NO: 124762 - DNA, 19 bp, Homo sapiens
  siRNA target sequence for IL22RA1 (NM_021258.2,349-367).
cggtcagccaccaagatga

SEQ ID NO: 124763 - DNA, 19 bp, Homo sapiens
  siRNA target sequence for IL22RA1 (NM_021258.2,437-455).
gatcgattcagatgattgt

SEQ ID NO: 124764 - DNA, 19 bp, Homo sapiens
  siRNA target sequence for IL22RA1 (NM_021258.2,440-458).
cgattcagatgattgttca

SEQ ID NO: 124765 - DNA, 19 bp, Homo sapiens
  siRNA target sequence for IL22RA1 (NM_021258.2,441-459).
gattcagatgattgttcat

SEQ ID NO: 124766 - DNA, 19 bp, Homo sapiens
  siRNA target sequence for IL22RA1 (NM_021258.2,497-515).
ggctaaccctggaagacat

SEQ ID NO: 124767 - DNA, 19 bp, Homo sapiens
  siRNA target sequence for IL22RA1 (NM_021258.2,550-568).
gtcaaccgcacctaccaaa

SEQ ID NO: 124768 - DNA, 19 bp, Homo sapiens
  siRNA target sequence for IL22RA1 (NM_021258.2,631-649).
cttggcaccatcatgattt

SEQ ID NO: 124769 - DNA, 19 bp, Homo sapiens
  siRNA target sequence for IL22RA1 (NM_021258.2,670-688).
gagagtgccccctacatgt

SEQ ID NO: 124770 - DNA, 19 bp, Homo sapiens
  siRNA target sequence for IL22RA1 (NM_021258.2,779-797).
gctacctgagctacagata

SEQ ID NO: 124771 - DNA, 19 bp, Homo sapiens
  siRNA target sequence for IL22RA1 (NM_021258.2,780-798).
ctacctgagctacagatat

SEQ ID NO: 124772 - DNA, 19 bp, Homo sapiens
  siRNA target sequence for IL22RA1 (NM_021258.2,882-900).
cgtcctgatccctgtcttt

SEQ ID NO: 124773 - DNA, 19 bp, Homo sapiens
  siRNA target sequence for IL22RA1 (NM_021258.2,1002-1020).
gtccgagatcacctactta

SEQ ID NO: 124774 - DNA, 19 bp, Homo sapiens
  siRNA target sequence for IL22RA1 (NM_021258.2,1241-1259).
cctcctatggggtatgcat

SEQ ID NO: 124775 - DNA, 19 bp, Homo sapiens
  siRNA target sequence for IL22RA1 (NM_021258.2,1261-1279).
gaaggttctggcaaagact

SEQ ID NO: 124776 - DNA, 19 bp, Homo sapiens
  siRNA target sequence for IL22RA1 (NM_021258.2,1292-1310).
cactttctagtcctaaaca

SEQ ID NO: 124777 - DNA, 19 bp, Homo sapiens
  siRNA target sequence for IL22RA1 (NM_021258.2,1319-1337).
ctaaaggtcagcttcagaa

SEQ ID NO: 124778 - DNA, 19 bp, Homo sapiens
  siRNA target sequence for IL22RA1 (NM_021258.2,1498-1516).
gggacaccacagtacctaa

SEQ ID NO: 124779 - DNA, 19 bp, Homo sapiens
  siRNA target sequence for IL22RA1 (NM_021258.2,1499-1517).
ggacaccacagtacctaaa

SEQ ID NO: 124780 - DNA, 19 bp, Homo sapiens
  siRNA target sequence for CRIM1 (NM_016441.1,390-408).
ccaactgcttggttttaaa

SEQ ID NO: 124781 - DNA, 19 bp, Homo sapiens
  siRNA target sequence for CRIM1 (NM_016441.1,424-442).
cttattgctggctgcaata

SEQ ID NO: 124782 - DNA, 19 bp, Homo sapiens
  siRNA target sequence for CRIM1 (NM_016441.1,685-703).
ggctgtctgcgcaaagtct

SEQ ID NO: 124783 - DNA, 19 bp, Homo sapiens
  siRNA target sequence for CRIM1 (NM_016441.1,708-726).
gccgggaaacctgaacata

SEQ ID NO: 124784 - DNA, 19 bp, Homo sapiens
  siRNA target sequence for CRIM1 (NM_016441.1,710-728).
cgggaaacctgaacatact

SEQ ID NO: 124785 - DNA, 19 bp, Homo sapiens
  siRNA target sequence for CRIM1 (NM_016441.1,711-729).
gggaaacctgaacatacta

SEQ ID NO: 124786 - DNA, 19 bp, Homo sapiens
  siRNA target sequence for CRIM1 (NM_016441.1,713-731).
gaaacctgaacatactagt

SEQ ID NO: 124787 - DNA, 19 bp, Homo sapiens
  siRNA target sequence for CRIM1 (NM_016441.1,720-738).
gaacatactagtgtcaaaa

SEQ ID NO: 124788 - DNA, 19 bp, Homo sapiens
  siRNA target sequence for CRIM1 (NM_016441.1,1040-1058).
cagcctgcgtatttaacaa

SEQ ID NO: 124789 - DNA, 19 bp, Homo sapiens
  siRNA target sequence for CRIM1 (NM_016441.1,1043-1061).
cctgcgtatttaacaatgt

SEQ ID NO: 124790 - DNA, 19 bp, Homo sapiens
  siRNA target sequence for CRIM1 (NM_016441.1,1072-1090).
gatggagacatgtttcgaa

SEQ ID NO: 124791 - DNA, 19 bp, Homo sapiens
  siRNA target sequence for CRIM1 (NM_016441.1,1147-1165).
cagtgtggtgagataaact

SEQ ID NO: 124792 - DNA, 19 bp, Homo sapiens
  siRNA target sequence for CRIM1 (NM_016441.1,1213-1231).
gatccagtgtatcctttta

SEQ ID NO: 124793 - DNA, 19 bp, Homo sapiens
  siRNA target sequence for CRIM1 (NM_016441.1,1291-1309).
gaagacgactgcacattct

SEQ ID NO: 124794 - DNA, 19 bp, Homo sapiens
  siRNA target sequence for CRIM1 (NM_016441.1,1362-1380).
ctgcacaaaccctgtgaaa

SEQ ID NO: 124795 - DNA, 19 bp, Homo sapiens
  siRNA target sequence for CRIM1 (NM_016441.1,1408-1426).
gaagaaccaaccatcatca

SEQ ID NO: 124796 - DNA, 19 bp, Homo sapiens
  siRNA target sequence for CRIM1 (NM_016441.1,1442-1460).
catgtggggagttatcaaa

SEQ ID NO: 124797 - DNA, 19 bp, Homo sapiens
  siRNA target sequence for CRIM1 (NM_016441.1,1476-1494).
gaaggactgcattaatggt

SEQ ID NO: 124798 - DNA, 19 bp, Homo sapiens
  siRNA target sequence for CRIM1 (NM_016441.1,1493-1511).
gtttcaaacgcgatcacaa

SEQ ID NO: 124799 - DNA, 19 bp, Homo sapiens
  siRNA target sequence for CRIM1 (NM_016441.1,1519-1537).
cggacctgtcagtgcataa

SEQ ID NO: 124800 - DNA, 19 bp, Homo sapiens
  siRNA target sequence for CRIM1 (NM_016441.1,1542-1560).
cgaggaactatgttcagaa

SEQ ID NO: 124801 - DNA, 19 bp, Homo sapiens
  siRNA target sequence for CRIM1 (NM_016441.1,1590-1608).
cttcggtttccttactgat

SEQ ID NO: 124802 - DNA, 19 bp, Homo sapiens
  siRNA target sequence for CRIM1 (NM_016441.1,1653-1671).
gtgcagacccataatctgt

SEQ ID NO: 124803 - DNA, 19 bp, Homo sapiens
  siRNA target sequence for CRIM1 (NM_016441.1,1717-1735).
gacatctgtcgctgtaaga

SEQ ID NO: 124804 - DNA, 19 bp, Homo sapiens
  siRNA target sequence for CRIM1 (NM_016441.1,1747-1765).
ctctcatgcagtaagatct

SEQ ID NO: 124805 - DNA, 19 bp, Homo sapiens
  siRNA target sequence for CRIM1 (NM_016441.1,1786-1804).
gacagtcacggctgtctta

SEQ ID NO: 124806 - DNA, 19 bp, Homo sapiens
  siRNA target sequence for CRIM1 (NM_016441.1,1868-1886).
ccgtggatggtcatcatca

SEQ ID NO: 124807 - DNA, 19 bp, Homo sapiens
  siRNA target sequence for CRIM1 (NM_016441.1,1869-1887).
cgtggatggtcatcatcat

SEQ ID NO: 124808 - DNA, 19 bp, Homo sapiens
  siRNA target sequence for CRIM1 (NM_016441.1,1870-1888).
gtggatggtcatcatcata

SEQ ID NO: 124809 - DNA, 19 bp, Homo sapiens
  siRNA target sequence for CRIM1 (NM_016441.1,1920-1938).
ggaatgctactgtctcaat

SEQ ID NO: 124810 - DNA, 19 bp, Homo sapiens
  siRNA target sequence for CRIM1 (NM_016441.1,2080-2098).
gcccctggaggagaatact

SEQ ID NO: 124811 - DNA, 19 bp, Homo sapiens
  siRNA target sequence for CRIM1 (NM_016441.1,2081-2099).
cccctggaggagaatactt

SEQ ID NO: 124812 - DNA, 19 bp, Homo sapiens
  siRNA target sequence for CRIM1 (NM_016441.1,2108-2126).
gagaaacgtggaacattga

SEQ ID NO: 124813 - DNA, 19 bp, Homo sapiens
  siRNA target sequence for CRIM1 (NM_016441.1,2110-2128).
gaaacgtggaacattgact

SEQ ID NO: 124814 - DNA, 19 bp, Homo sapiens
  siRNA target sequence for CRIM1 (NM_016441.1,2229-2247).
ctgcccacagtgtacagat

SEQ ID NO: 124815 - DNA, 19 bp, Homo sapiens
  siRNA target sequence for CRIM1 (NM_016441.1,2238-2256).
gtgtacagatcaacctttt

SEQ ID NO: 124816 - DNA, 19 bp, Homo sapiens
  siRNA target sequence for CRIM1 (NM_016441.1,2273-2291).
gcaataacagcgtacctaa

SEQ ID NO: 124817 - DNA, 19 bp, Homo sapiens
  siRNA target sequence for CRIM1 (NM_016441.1,2274-2292).
caataacagcgtacctaat

SEQ ID NO: 124818 - DNA, 19 bp, Homo sapiens
  siRNA target sequence for CRIM1 (NM_016441.1,2284-2302).
gtacctaattactgcaaaa

SEQ ID NO: 124819 - DNA, 19 bp, Homo sapiens
  siRNA target sequence for CRIM1 (NM_016441.1,2288-2306).
ctaattactgcaaaaatga

SEQ ID NO: 124820 - DNA, 19 bp, Homo sapiens
  siRNA target sequence for CRIM1 (NM_016441.1,2358-2376).
cagctgcatctgcattgat

SEQ ID NO: 124821 - DNA, 19 bp, Homo sapiens
  siRNA target sequence for CRIM1 (NM_016441.1,2367-2385).
ctgcattgatagcgtaatt

SEQ ID NO: 124822 - DNA, 19 bp, Homo sapiens
  siRNA target sequence for CRIM1 (NM_016441.1,2379-2397).
cgtaattagctgtttctct

SEQ ID NO: 124823 - DNA, 19 bp, Homo sapiens
  siRNA target sequence for CRIM1 (NM_016441.1,2398-2416).
gagtcctgcccttctgtat

SEQ ID NO: 124824 - DNA, 19 bp, Homo sapiens
  siRNA target sequence for CRIM1 (NM_016441.1,2460-2478).
ctgcatagaagacacaatt

SEQ ID NO: 124825 - DNA, 19 bp, Homo sapiens
  siRNA target sequence for CRIM1 (NM_016441.1,2463-2481).
catagaagacacaattcca

SEQ ID NO: 124826 - DNA, 19 bp, Homo sapiens
  siRNA target sequence for CRIM1 (NM_016441.1,2671-2689).
gtcccagaaccaaccaata

SEQ ID NO: 124827 - DNA, 19 bp, Homo sapiens
  siRNA target sequence for CRIM1 (NM_016441.1,2673-2691).
cccagaaccaaccaatata

SEQ ID NO: 124828 - DNA, 19 bp, Homo sapiens
  siRNA target sequence for CRIM1 (NM_016441.1,2742-2760).
gtggcccacgcctagtgaa

SEQ ID NO: 124829 - DNA, 19 bp, Homo sapiens
  siRNA target sequence for CRIM1 (NM_016441.1,2744-2762).
ggcccacgcctagtgaaaa

SEQ ID NO: 124830 - DNA, 19 bp, Homo sapiens
  siRNA target sequence for CRIM1 (NM_016441.1,2745-2763).
gcccacgcctagtgaaaat

SEQ ID NO: 124831 - DNA, 19 bp, Homo sapiens
  siRNA target sequence for CRIM1 (NM_016441.1,2748-2766).
cacgcctagtgaaaatgat

SEQ ID NO: 124832 - DNA, 19 bp, Homo sapiens
  siRNA target sequence for CRIM1 (NM_016441.1,2750-2768).
cgcctagtgaaaatgatat

SEQ ID NO: 124833 - DNA, 19 bp, Homo sapiens
  siRNA target sequence for CRIM1 (NM_016441.1,2753-2771).
ctagtgaaaatgatatcgt

SEQ ID NO: 124834 - DNA, 19 bp, Homo sapiens
  siRNA target sequence for CRIM1 (NM_016441.1,2770-2788).
gtccatctccctagagata

SEQ ID NO: 124835 - DNA, 19 bp, Homo sapiens
  siRNA target sequence for CRIM1 (NM_016441.1,2791-2809).
ggtcacctccaggtagatt

SEQ ID NO: 124836 - DNA, 19 bp, Homo sapiens
  siRNA target sequence for CRIM1 (NM_016441.1,2794-2812).
cacctccaggtagattaca

SEQ ID NO: 124837 - DNA, 19 bp, Homo sapiens
  siRNA target sequence for CRIM1 (NM_016441.1,2827-2845).
cacccaagtgaagattctt

SEQ ID NO: 124838 - DNA, 19 bp, Homo sapiens
  siRNA target sequence for CRIM1 (NM_016441.1,2829-2847).
cccaagtgaagattcttca

SEQ ID NO: 124839 - DNA, 19 bp, Homo sapiens
  siRNA target sequence for CRIM1 (NM_016441.1,2864-2882).
cagttgtggttcccataat

SEQ ID NO: 124840 - DNA, 19 bp, Homo sapiens
  siRNA target sequence for CRIM1 (NM_016441.1,2866-2884).
gttgtggttcccataatta

SEQ ID NO: 124841 - DNA, 19 bp, Homo sapiens
  siRNA target sequence for CRIM1 (NM_016441.1,2869-2887).
gtggttcccataattatat

SEQ ID NO: 124842 - DNA, 19 bp, Homo sapiens
  siRNA target sequence for CRIM1 (NM_016441.1,2906-2924).
cattcctattcatcaatca

SEQ ID NO: 124843 - DNA, 19 bp, Homo sapiens
  siRNA target sequence for CRIM1 (NM_016441.1,2954-2972).
ggtatcgaacaccaactaa

SEQ ID NO: 124844 - DNA, 19 bp, Homo sapiens
  siRNA target sequence for CRIM1 (NM_016441.1,3048-3066).
gagaatgctaagaattgca

SEQ ID NO: 124845 - DNA, 19 bp, Homo sapiens
  siRNA target sequence for CRIM1 (NM_016441.1,3088-3106).
ggcttctacagcatgcaaa

SEQ ID NO: 124846 - DNA, 19 bp, Homo sapiens
  siRNA target sequence for CRIM1 (NM_016441.1,3115-3133).
catctacaggcagacaatt

SEQ ID NO: 124847 - DNA, 19 bp, Homo sapiens
  siRNA target sequence for CRIM1 (NM_016441.1,3124-3142).
gcagacaatttctaccaaa

SEQ ID NO: 124848 - DNA, 19 bp, Homo sapiens
  siRNA target sequence for CTGF (NM_001901.1,424-442).
cgtgtgcaccgccaaagat

SEQ ID NO: 124849 - DNA, 19 bp, Homo sapiens
  siRNA target sequence for CTGF (NM_001901.1,710-728).
ggcccagacccaactatga

SEQ ID NO: 124850 - DNA, 19 bp, Homo sapiens
  siRNA target sequence for CTGF (NM_001901.1,711-729).
gcccagacccaactatgat

SEQ ID NO: 124851 - DNA, 19 bp, Homo sapiens
  siRNA target sequence for CTGF (NM_001901.1,712-730).
cccagacccaactatgatt

SEQ ID NO: 124852 - DNA, 19 bp, Homo sapiens
  siRNA target sequence for CTGF (NM_001901.1,713-731).
ccagacccaactatgatta

SEQ ID NO: 124853 - DNA, 19 bp, Homo sapiens
  siRNA target sequence for CTGF (NM_001901.1,912-930).
gcatccgtactcccaaaat

SEQ ID NO: 124854 - DNA, 19 bp, Homo sapiens
  siRNA target sequence for CTGF (NM_001901.1,933-951).
ccaagcctatcaagtttga

SEQ ID NO: 124855 - DNA, 19 bp, Homo sapiens
  siRNA target sequence for CTGF (NM_001901.1,973-991).
gaagacataccgagctaaa

SEQ ID NO: 124856 - DNA, 19 bp, Homo sapiens
  siRNA target sequence for CTGF (NM_001901.1,1044-1062).
ccctgccggtggagttcaa

SEQ ID NO: 124857 - DNA, 19 bp, Homo sapiens
  siRNA target sequence for CTGF (NM_001901.1,1046-1064).
ctgccggtggagttcaagt

SEQ ID NO: 124858 - DNA, 19 bp, Homo sapiens
  siRNA target sequence for CTGF (NM_001901.1,1070-1088).
gacggcgaggtcatgaaga

SEQ ID NO: 124859 - DNA, 19 bp, Homo sapiens
  siRNA target sequence for CTGF (NM_001901.1,1126-1144).
caactgtcccggagacaat

SEQ ID NO: 124860 - DNA, 19 bp, Homo sapiens
  siRNA target sequence for CTGF (NM_001901.1,1131-1149).
gtcccggagacaatgacat

SEQ ID NO: 124861 - DNA, 19 bp, Homo sapiens
  siRNA target sequence for CTGF (NM_001901.1,1134-1152).
ccggagacaatgacatctt

SEQ ID NO: 124862 - DNA, 19 bp, Homo sapiens
  siRNA target sequence for CTGF (NM_001901.1,1135-1153).
cggagacaatgacatcttt

SEQ ID NO: 124863 - DNA, 19 bp, Homo sapiens
  siRNA target sequence for CYR61 (NM_001554.3,494-512).
gagggcagaccctgtgaat

SEQ ID NO: 124864 - DNA, 19 bp, Homo sapiens
  siRNA target sequence for CYR61 (NM_001554.3,543-561).
gtttccagcccaactgtaa

SEQ ID NO: 124865 - DNA, 19 bp, Homo sapiens
  siRNA target sequence for CYR61 (NM_001554.3,547-565).
ccagcccaactgtaaacat

SEQ ID NO: 124866 - DNA, 19 bp, Homo sapiens
  siRNA target sequence for CYR61 (NM_001554.3,607-625).
gtgtccccaagaactatct

SEQ ID NO: 124867 - DNA, 19 bp, Homo sapiens
  siRNA target sequence for CYR61 (NM_001554.3,692-710).
gtctgtgacgaggatagta

SEQ ID NO: 124868 - DNA, 19 bp, Homo sapiens
  siRNA target sequence for CYR61 (NM_001554.3,696-714).
gtgacgaggatagtatcaa

SEQ ID NO: 124869 - DNA, 19 bp, Homo sapiens
  siRNA target sequence for CYR61 (NM_001554.3,778-796).
ggagttgacgagaaacaat

SEQ ID NO: 124870 - DNA, 19 bp, Homo sapiens
  siRNA target sequence for CYR61 (NM_001554.3,829-847).
gaagcggctccctgttttt

SEQ ID NO: 124871 - DNA, 19 bp, Homo sapiens
  siRNA target sequence for CYR61 (NM_001554.3,854-872).
gagcctcgcatcctataca

SEQ ID NO: 124872 - DNA, 19 bp, Homo sapiens
  siRNA target sequence for CYR61 (NM_001554.3,1085-1103).
cccgaaccagtcaggttta

SEQ ID NO: 124873 - DNA, 19 bp, Homo sapiens
  siRNA target sequence for CYR61 (NM_001554.3,1218-1236).
gcgaagatggggagacatt

SEQ ID NO: 124874 - DNA, 19 bp, Homo sapiens
  siRNA target sequence for CYR61 (NM_001554.3,1219-1237).
cgaagatggggagacattt

SEQ ID NO: 124875 - DNA, 19 bp, Homo sapiens
  siRNA target sequence for CYR61 (NM_001554.3,1239-1257).
ccaagaacgtcatgatgat

SEQ ID NO: 124876 - DNA, 19 bp, Homo sapiens
  siRNA target sequence for CYR61 (NM_001554.3,1282-1300).
ctgcccgcatgccaatgaa

SEQ ID NO: 124877 - DNA, 19 bp, Homo sapiens
  siRNA target sequence for CYR61 (NM_001554.3,1301-1319).
gcagcgtttcccttctaca

SEQ ID NO: 124878 - DNA, 19 bp, Homo sapiens
  siRNA target sequence for CYR61 (NM_001554.3,1311-1329).
ccttctacaggctgttcaa

SEQ ID NO: 124879 - DNA, 19 bp, Homo sapiens
  siRNA target sequence for CYR61 (NM_001554.3,1324-1342).
gttcaatgacattcacaaa

SEQ ID NO: 124880 - DNA, 19 bp, Homo sapiens
  siRNA target sequence for ESM1 (NM_007036.2,122-140).
cgcctggagcaataattat

SEQ ID NO: 124881 - DNA, 19 bp, Homo sapiens
  siRNA target sequence for ESM1 (NM_007036.2,311-329).
gaggtgtcagccttctaat

SEQ ID NO: 124882 - DNA, 19 bp, Homo sapiens
  siRNA target sequence for ESM1 (NM_007036.2,325-343).
ctaatggggaggatccttt

SEQ ID NO: 124883 - DNA, 19 bp, Homo sapiens
  siRNA target sequence for ESM1 (NM_007036.2,381-399).
ggcaccttcgggatggatt

SEQ ID NO: 124884 - DNA, 19 bp, Homo sapiens
  siRNA target sequence for ESM1 (NM_007036.2,435-453).
gacagggggacgggaaaat

SEQ ID NO: 124885 - DNA, 19 bp, Homo sapiens
  siRNA target sequence for ESM1 (NM_007036.2,464-482).
ccccttcttccaatattca

SEQ ID NO: 124886 - DNA, 19 bp, Homo sapiens
  siRNA target sequence for ESM1 (NM_007036.2,466-484).
ccttcttccaatattcagt

SEQ ID NO: 124887 - DNA, 19 bp, Homo sapiens
  siRNA target sequence for ESM1 (NM_007036.2,511-529).
ctctcacggagcatgacat

SEQ ID NO: 124888 - DNA, 19 bp, Homo sapiens
  siRNA target sequence for ESM1 (NM_007036.2,582-600).
gccgggtctcccgtaatga

SEQ ID NO: 124889 - DNA, 19 bp, Homo sapiens
  siRNA target sequence for ESM1 (NM_007036.2,591-609).
cccgtaatgaggaaatggt

SEQ ID NO: 124890 - DNA, 19 bp, Homo sapiens
  siRNA target sequence for ESM1 (NM_007036.2,592-610).
ccgtaatgaggaaatggtt

SEQ ID NO: 124891 - DNA, 19 bp, Homo sapiens
  siRNA target sequence for ESM1 (NM_007036.2,594-612).
gtaatgaggaaatggttaa

SEQ ID NO: 124892 - DNA, 19 bp, Homo sapiens
  siRNA target sequence for HTRA3 (NM_053044.2,659-677).
cagccgtggtccacataga

SEQ ID NO: 124893 - DNA, 19 bp, Homo sapiens
  siRNA target sequence for IGFALS (NM_004970.1,579-597).
ctcaacctcggctggaata

SEQ ID NO: 124894 - DNA, 19 bp, Homo sapiens
  siRNA target sequence for IGFALS (NM_004970.1,1779-1797).
gcgtacacctacaacaaca

SEQ ID NO: 124895 - DNA, 19 bp, Homo sapiens
  siRNA target sequence for IGFBP1 (NM_000596.1,564-582).
gctcctggataatttccat

SEQ ID NO: 124896 - DNA, 19 bp, Homo sapiens
  siRNA target sequence for IGFBP1 (NM_000596.1,601-619).
gaggatcattccatccttt

SEQ ID NO: 124897 - DNA, 19 bp, Homo sapiens
  siRNA target sequence for IGFBP1 (NM_000596.1,616-634).
ctttgggacgccatcagta

SEQ ID NO: 124898 - DNA, 19 bp, Homo sapiens
  siRNA target sequence for IGFBP1 (NM_000596.1,621-639).
ggacgccatcagtacctat

SEQ ID NO: 124899 - DNA, 19 bp, Homo sapiens
  siRNA target sequence for IGFBP1 (NM_000596.1,624-642).
cgccatcagtacctatgat

SEQ ID NO: 124900 - DNA, 19 bp, Homo sapiens
  siRNA target sequence for IGFBP1 (NM_000596.1,684-702).
ggagccctgccgaatagaa

SEQ ID NO: 124901 - DNA, 19 bp, Homo sapiens
  siRNA target sequence for IGFBP1 (NM_000596.1,708-726).
cagagtcgtagagagttta

SEQ ID NO: 124902 - DNA, 19 bp, Homo sapiens
  siRNA target sequence for IGFBP1 (NM_000596.1,852-870).
gtgcgtctacccttggaat

SEQ ID NO: 124903 - DNA, 19 bp, Homo sapiens
  siRNA target sequence for IGFBP1 (NM_000596.1,909-927).
ccccaactgccagatatat

SEQ ID NO: 124904 - DNA, 19 bp, Homo sapiens
  siRNA target sequence for IGFBP1 (NM_000596.1,910-928).
cccaactgccagatatatt

SEQ ID NO: 124905 - DNA, 19 bp, Homo sapiens
  siRNA target sequence for IGFBP1 (NM_000596.1,918-936).
ccagatatattttaatgta

SEQ ID NO: 124906 - DNA, 19 bp, Homo sapiens
  siRNA target sequence for IGFBP2 (NM_000597.1,665-683).
ccctcaagtcgggtatgaa

SEQ ID NO: 124907 - DNA, 19 bp, Homo sapiens
  siRNA target sequence for IGFBP2 (NM_000597.1,1037-1055).
ccgagtgtcatctcttcta

SEQ ID NO: 124908 - DNA, 19 bp, Homo sapiens
  siRNA target sequence for IGFBP3 (NM_000598.2,592-610).
cattcaaagataatcatca

SEQ ID NO: 124909 - DNA, 19 bp, Homo sapiens
  siRNA target sequence for IGFBP3 (NM_000598.2,699-717).
caagcgggagacagaatat

SEQ ID NO: 124910 - DNA, 19 bp, Homo sapiens
  siRNA target sequence for IGFBP3 (NM_000598.2,718-736).
ggtccctgccgtagagaaa

SEQ ID NO: 124911 - DNA, 19 bp, Homo sapiens
  siRNA target sequence for IGFBP3 (NM_000598.2,719-737).
gtccctgccgtagagaaat

SEQ ID NO: 124912 - DNA, 19 bp, Homo sapiens
  siRNA target sequence for IGFBP3 (NM_000598.2,722-740).
cctgccgtagagaaatgga

SEQ ID NO: 124913 - DNA, 19 bp, Homo sapiens
  siRNA target sequence for IGFBP3 (NM_000598.2,806-824).
gtgacaagaagggatttta

SEQ ID NO: 124914 - DNA, 19 bp, Homo sapiens
  siRNA target sequence for IGFBP4 (NM_001552.1,646-664).
ggtgaccaccccaacaaca

SEQ ID NO: 124915 - DNA, 19 bp, Homo sapiens
  siRNA target sequence for IGFBP4 (NM_001552.1,705-723).
gaagcacttcgccaaaatt

SEQ ID NO: 124916 - DNA, 19 bp, Homo sapiens
  siRNA target sequence for IGFBP4 (NM_001552.1,708-726).
gcacttcgccaaaattcga

SEQ ID NO: 124917 - DNA, 19 bp, Homo sapiens
  siRNA target sequence for IGFBP5 (NM_000599.1,1043-1061).
ggggtttgcctcaacgaaa

SEQ ID NO: 124918 - DNA, 19 bp, Homo sapiens
  siRNA target sequence for IGFBP5 (NM_000599.1,1044-1062).
gggtttgcctcaacgaaaa

SEQ ID NO: 124919 - DNA, 19 bp, Homo sapiens
  siRNA target sequence for IGFBP5 (NM_000599.1,1065-1083).
gctaccgcgagcaagtcaa

SEQ ID NO: 124920 - DNA, 19 bp, Homo sapiens
  siRNA target sequence for IGFBP5 (NM_000599.1,1407-1425).
gtgaccgcaaaggattcta

SEQ ID NO: 124921 - DNA, 19 bp, Homo sapiens
  siRNA target sequence for IGFBP5 (NM_000599.1,1409-1427).
gaccgcaaaggattctaca

SEQ ID NO: 124922 - DNA, 19 bp, Homo sapiens
  siRNA target sequence for IGFBP5 (NM_000599.1,1412-1430).
cgcaaaggattctacaaga

SEQ ID NO: 124923 - DNA, 19 bp, Homo sapiens
  siRNA target sequence for IGFBP6 (NM_002178.1,387-405).
gttgcagaggagaatccta

SEQ ID NO: 124924 - DNA, 19 bp, Homo sapiens
  siRNA target sequence for IGFBP6 (NM_002178.1,587-605).
ctaccgaggggctcaaaca

SEQ ID NO: 124925 - DNA, 19 bp, Homo sapiens
  siRNA target sequence for IGFBP7 (NM_001553.1,490-508).
cgagcaaggtccttccata

SEQ ID NO: 124926 - DNA, 19 bp, Homo sapiens
  siRNA target sequence for IGFBP7 (NM_001553.1,542-560).
ggtgcccaggtgtacttga

SEQ ID NO: 124927 - DNA, 19 bp, Homo sapiens
  siRNA target sequence for IGFBP7 (NM_001553.1,721-739).
gctggtatctcctctaagt

SEQ ID NO: 124928 - DNA, 19 bp, Homo sapiens
  siRNA target sequence for IGFBP7 (NM_001553.1,722-740).
ctggtatctcctctaagta

SEQ ID NO: 124929 - DNA, 19 bp, Homo sapiens
  siRNA target sequence for IGFBP7 (NM_001553.1,761-779).
gagtgccatgcatccaatt

SEQ ID NO: 124930 - DNA, 19 bp, Homo sapiens
  siRNA target sequence for NOV (NM_002514.2,382-400).
gcggtagagggagataact

SEQ ID NO: 124931 - DNA, 19 bp, Homo sapiens
  siRNA target sequence for NOV (NM_002514.2,384-402).
ggtagagggagataactgt

SEQ ID NO: 124932 - DNA, 19 bp, Homo sapiens
  siRNA target sequence for NOV (NM_002514.2,420-438).
ctaccgcagtggagagaaa

SEQ ID NO: 124933 - DNA, 19 bp, Homo sapiens
  siRNA target sequence for NOV (NM_002514.2,423-441).
ccgcagtggagagaaattt

SEQ ID NO: 124934 - DNA, 19 bp, Homo sapiens
  siRNA target sequence for NOV (NM_002514.2,749-767).
cccgggtcaccaataggaa

SEQ ID NO: 124935 - DNA, 19 bp, Homo sapiens
  siRNA target sequence for NOV (NM_002514.2,995-1013).
ccatccaggcagagtttca

SEQ ID NO: 124936 - DNA, 19 bp, Homo sapiens
  siRNA target sequence for NOV (NM_002514.2,1014-1032).
gtgctccccagggcaaata

SEQ ID NO: 124937 - DNA, 19 bp, Homo sapiens
  siRNA target sequence for NOV (NM_002514.2,1016-1034).
gctccccagggcaaatagt

SEQ ID NO: 124938 - DNA, 19 bp, Homo sapiens
  siRNA target sequence for NOV (NM_002514.2,1019-1037).
ccccagggcaaatagtcaa

SEQ ID NO: 124939 - DNA, 19 bp, Homo sapiens
  siRNA target sequence for PRSS11 (NM_002775.2,523-541).
caggaagatcccaacagtt

SEQ ID NO: 124940 - DNA, 19 bp, Homo sapiens
  siRNA target sequence for PRSS11 (NM_002775.2,534-552).
caacagtttgcgccataaa

SEQ ID NO: 124941 - DNA, 19 bp, Homo sapiens
  siRNA target sequence for PRSS11 (NM_002775.2,539-557).
gtttgcgccataaatataa

SEQ ID NO: 124942 - DNA, 19 bp, Homo sapiens
  siRNA target sequence for PRSS11 (NM_002775.2,544-562).
cgccataaatataacttta

SEQ ID NO: 124943 - DNA, 19 bp, Homo sapiens
  siRNA target sequence for PRSS11 (NM_002775.2,586-604).
gcccctgccgtggttcata

SEQ ID NO: 124944 - DNA, 19 bp, Homo sapiens
  siRNA target sequence for PRSS11 (NM_002775.2,587-605).
cccctgccgtggttcatat

SEQ ID NO: 124945 - DNA, 19 bp, Homo sapiens
  siRNA target sequence for PRSS11 (NM_002775.2,592-610).
gccgtggttcatatcgaat

SEQ ID NO: 124946 - DNA, 19 bp, Homo sapiens
  siRNA target sequence for PRSS11 (NM_002775.2,593-611).
ccgtggttcatatcgaatt

SEQ ID NO: 124947 - DNA, 19 bp, Homo sapiens
  siRNA target sequence for PRSS11 (NM_002775.2,595-613).
gtggttcatatcgaattgt

SEQ ID NO: 124948 - DNA, 19 bp, Homo sapiens
  siRNA target sequence for PRSS11 (NM_002775.2,597-615).
ggttcatatcgaattgttt

SEQ ID NO: 124949 - DNA, 19 bp, Homo sapiens
  siRNA target sequence for PRSS11 (NM_002775.2,656-674).
gtgggtctgggtttattgt

SEQ ID NO: 124950 - DNA, 19 bp, Homo sapiens
  siRNA target sequence for PRSS11 (NM_002775.2,658-676).
gggtctgggtttattgtgt

SEQ ID NO: 124951 - DNA, 19 bp, Homo sapiens
  siRNA target sequence for PRSS11 (NM_002775.2,720-738).
caagcaccgggtcaaagtt

SEQ ID NO: 124952 - DNA, 19 bp, Homo sapiens
  siRNA target sequence for PRSS11 (NM_002775.2,747-765).
gaacggtgccacttacgaa

SEQ ID NO: 124953 - DNA, 19 bp, Homo sapiens
  siRNA target sequence for PRSS11 (NM_002775.2,755-773).
ccacttacgaagccaaaat

SEQ ID NO: 124954 - DNA, 19 bp, Homo sapiens
  siRNA target sequence for PRSS11 (NM_002775.2,758-776).
cttacgaagccaaaatcaa

SEQ ID NO: 124955 - DNA, 19 bp, Homo sapiens
  siRNA target sequence for PRSS11 (NM_002775.2,798-816).
catcgcactcatcaaaatt

SEQ ID NO: 124956 - DNA, 19 bp, Homo sapiens
  siRNA target sequence for PRSS11 (NM_002775.2,1005-1023).
cgacgccatcatcaactat

SEQ ID NO: 124957 - DNA, 19 bp, Homo sapiens
  siRNA target sequence for PRSS11 (NM_002775.2,1029-1047).
ctcgggaggcccgttagta

SEQ ID NO: 124958 - DNA, 19 bp, Homo sapiens
  siRNA target sequence for PRSS11 (NM_002775.2,1034-1052).
gaggcccgttagtaaacct

SEQ ID NO: 124959 - DNA, 19 bp, Homo sapiens
  siRNA target sequence for PRSS11 (NM_002775.2,1056-1074).
cggtgaagtgattggaatt

SEQ ID NO: 124960 - DNA, 19 bp, Homo sapiens
  siRNA target sequence for PRSS11 (NM_002775.2,1063-1081).
gtgattggaattaacactt

SEQ ID NO: 124961 - DNA, 19 bp, Homo sapiens
  siRNA target sequence for PRSS11 (NM_002775.2,1108-1126).
gcaatcccatctgataaga

SEQ ID NO: 124962 - DNA, 19 bp, Homo sapiens
  siRNA target sequence for PRSS11 (NM_002775.2,1109-1127).
caatcccatctgataagat

SEQ ID NO: 124963 - DNA, 19 bp, Homo sapiens
  siRNA target sequence for PRSS11 (NM_002775.2,1113-1131).
cccatctgataagattaaa

SEQ ID NO: 124964 - DNA, 19 bp, Homo sapiens
  siRNA target sequence for PRSS11 (NM_002775.2,1153-1171).
gaccgacaggccaaaggaa

SEQ ID NO: 124965 - DNA, 19 bp, Homo sapiens
  siRNA target sequence for WISP1 (NM_003882.2,161-179).
cctacgaccatggacttta

SEQ ID NO: 124966 - DNA, 19 bp, Homo sapiens
  siRNA target sequence for WISP1 (NM_003882.2,291-309).
gctgtgagtgctgtaagat

SEQ ID NO: 124967 - DNA, 19 bp, Homo sapiens
  siRNA target sequence for WISP1 (NM_003882.2,397-415).
cccgaggtacgcaatagga

SEQ ID NO: 124968 - DNA, 19 bp, Homo sapiens
  siRNA target sequence for WISP1 (NM_003882.2,452-470).
gatggggtgcgctacaaca

SEQ ID NO: 124969 - DNA, 19 bp, Homo sapiens
  siRNA target sequence for WISP1 (NM_003882.2,488-506).
cctaactgcaagtacaact

SEQ ID NO: 124970 - DNA, 19 bp, Homo sapiens
  siRNA target sequence for WISP1 (NM_003882.2,783-801).
ctcggatctccaatgttaa

SEQ ID NO: 124971 - DNA, 19 bp, Homo sapiens
  siRNA target sequence for WISP1 (NM_003882.2,859-877).
ggacatccatacactcatt

SEQ ID NO: 124972 - DNA, 19 bp, Homo sapiens
  siRNA target sequence for WISP1 (NM_003882.2,860-878).
gacatccatacactcatta

SEQ ID NO: 124973 - DNA, 19 bp, Homo sapiens
  siRNA target sequence for WISP1 (NM_003882.2,949-967).
cagcacacgctcctatcaa

SEQ ID NO: 124974 - DNA, 19 bp, Homo sapiens
  siRNA target sequence for WISP1 (NM_003882.2,980-998).
ggagtttgcatggacaata

SEQ ID NO: 124975 - DNA, 19 bp, Homo sapiens
  siRNA target sequence for WISP1 (NM_003882.2,983-1001).
gtttgcatggacaataggt

SEQ ID NO: 124976 - DNA, 19 bp, Homo sapiens
  siRNA target sequence for WISP1 (NM_003882.2,1005-1023).
gcatcccctacaagtctaa

SEQ ID NO: 124977 - DNA, 19 bp, Homo sapiens
  siRNA target sequence for WISP1 (NM_003882.2,1009-1027).
cccctacaagtctaagact

SEQ ID NO: 124978 - DNA, 19 bp, Homo sapiens
  siRNA target sequence for WISP1 (NM_003882.2,1010-1028).
ccctacaagtctaagacta

SEQ ID NO: 124979 - DNA, 19 bp, Homo sapiens
  siRNA target sequence for WISP1 (NM_003882.2,1011-1029).
cctacaagtctaagactat

SEQ ID NO: 124980 - DNA, 19 bp, Homo sapiens
  siRNA target sequence for WISP1 (NM_003882.2,1069-1087).
ccgccaggtcctatggatt

SEQ ID NO: 124981 - DNA, 19 bp, Homo sapiens
  siRNA target sequence for WISP1 (NM_003882.2,1070-1088).
cgccaggtcctatggatta

SEQ ID NO: 124982 - DNA, 19 bp, Homo sapiens
  siRNA target sequence for WISP1 (NM_003882.2,1113-1131).
gtaggaatcccaatgacat

SEQ ID NO: 124983 - DNA, 19 bp, Homo sapiens
  siRNA target sequence for WISP1 (NM_003882.2,1116-1134).
ggaatcccaatgacatctt

SEQ ID NO: 124984 - DNA, 19 bp, Homo sapiens
  siRNA target sequence for WISP2 (NM_003881.2,869-887).
ggggtcgcagtccacaaaa

SEQ ID NO: 124985 - DNA, 19 bp, Homo sapiens
  siRNA target sequence for WISP2 (NM_003881.2,871-889).
ggtcgcagtccacaaaaca

SEQ ID NO: 124986 - DNA, 19 bp, Homo sapiens
  siRNA target sequence for WISP3 (NM_003880.2,176-194).
gggcactggaccattagat

SEQ ID NO: 124987 - DNA, 19 bp, Homo sapiens
  siRNA target sequence for WISP3 (NM_003880.2,231-249).
gcacctcagcgtaaacagt

SEQ ID NO: 124988 - DNA, 19 bp, Homo sapiens
  siRNA target sequence for WISP3 (NM_003880.2,232-250).
cacctcagcgtaaacagtt

SEQ ID NO: 124989 - DNA, 19 bp, Homo sapiens
  siRNA target sequence for WISP3 (NM_003880.2,466-484).
ctgttgggtgcgagttcaa

SEQ ID NO: 124990 - DNA, 19 bp, Homo sapiens
  siRNA target sequence for WISP3 (NM_003880.2,477-495).
gagttcaaccaggtacatt

SEQ ID NO: 124991 - DNA, 19 bp, Homo sapiens
  siRNA target sequence for WISP3 (NM_003880.2,479-497).
gttcaaccaggtacattat

SEQ ID NO: 124992 - DNA, 19 bp, Homo sapiens
  siRNA target sequence for WISP3 (NM_003880.2,516-534).
cagcccaaccccttgttca

SEQ ID NO: 124993 - DNA, 19 bp, Homo sapiens
  siRNA target sequence for WISP3 (NM_003880.2,629-647).
gtctgatcagtcaaactgt

SEQ ID NO: 124994 - DNA, 19 bp, Homo sapiens
  siRNA target sequence for WISP3 (NM_003880.2,644-662).
ctgtagcctggaaccatta

SEQ ID NO: 124995 - DNA, 19 bp, Homo sapiens
  siRNA target sequence for WISP3 (NM_003880.2,646-664).
gtagcctggaaccattact

SEQ ID NO: 124996 - DNA, 19 bp, Homo sapiens
  siRNA target sequence for WISP3 (NM_003880.2,676-694).
caacaagctacaaaacaat

SEQ ID NO: 124997 - DNA, 19 bp, Homo sapiens
  siRNA target sequence for WISP3 (NM_003880.2,686-704).
caaaacaatgccagcttat

SEQ ID NO: 124998 - DNA, 19 bp, Homo sapiens
  siRNA target sequence for WISP3 (NM_003880.2,741-759).
gtgcaagcaacaaaatgga

SEQ ID NO: 124999 - DNA, 19 bp, Homo sapiens
  siRNA target sequence for WISP3 (NM_003880.2,778-796).
gtgggatgggaatatctaa

SEQ ID NO: 125000 - DNA, 19 bp, Homo sapiens
  siRNA target sequence for WISP3 (NM_003880.2,815-833).
cagcaactgtgaaatgaga

SEQ ID NO: 125001 - DNA, 19 bp, Homo sapiens
  siRNA target sequence for WISP3 (NM_003880.2,858-876).
cagccttgcgacagcaata

SEQ ID NO: 125002 - DNA, 19 bp, Homo sapiens
  siRNA target sequence for WISP3 (NM_003880.2,860-878).
gccttgcgacagcaatata

SEQ ID NO: 125003 - DNA, 19 bp, Homo sapiens
  siRNA target sequence for WISP3 (NM_003880.2,865-883).
gcgacagcaatatattaaa

SEQ ID NO: 125004 - DNA, 19 bp, Homo sapiens
  siRNA target sequence for WISP3 (NM_003880.2,867-885).
gacagcaatatattaaaga

SEQ ID NO: 125005 - DNA, 19 bp, Homo sapiens
  siRNA target sequence for WISP3 (NM_003880.2,871-889).
gcaatatattaaagacaat

SEQ ID NO: 125006 - DNA, 19 bp, Homo sapiens
  siRNA target sequence for WISP3 (NM_003880.2,964-982).
gctcaagtactcagagtta

SEQ ID NO: 125007 - DNA, 19 bp, Homo sapiens
  siRNA target sequence for WISP3 (NM_003880.2,967-985).
caagtactcagagttacaa

SEQ ID NO: 125008 - DNA, 19 bp, Homo sapiens
  siRNA target sequence for WISP3 (NM_003880.2,977-995).
gagttacaaacccactttt

SEQ ID NO: 125009 - DNA, 19 bp, Homo sapiens
  siRNA target sequence for WISP3 (NM_003880.2,987-1005).
cccactttttgtggaatat

SEQ ID NO: 125010 - DNA, 19 bp, Homo sapiens
  siRNA target sequence for WISP3 (NM_003880.2,1024-1042).
gtatccctaataagtctaa

SEQ ID NO: 125011 - DNA, 19 bp, Homo sapiens
  siRNA target sequence for WISP3 (NM_003880.2,1029-1047).
cctaataagtctaaaatga

SEQ ID NO: 125012 - DNA, 19 bp, Homo sapiens
  siRNA target sequence for WISP3 (NM_003880.2,1030-1048).
ctaataagtctaaaatgat

SEQ ID NO: 125013 - DNA, 19 bp, Homo sapiens
  siRNA target sequence for WISP3 (NM_003880.2,1094-1112).
gatgctgtggattacatct

SEQ ID NO: 125014 - DNA, 19 bp, Homo sapiens
  siRNA target sequence for WISP3 (NM_130396.1,53-71).
gtgtggctggtcgtaaaca

SEQ ID NO: 125015 - DNA, 19 bp, Homo sapiens
  siRNA target sequence for WISP3 (NM_130396.1,55-73).
gtggctggtcgtaaacagt

SEQ ID NO: 125016 - DNA, 19 bp, Homo sapiens
  siRNA target sequence for WISP3 (NM_130396.1,57-75).
ggctggtcgtaaacagttt

SEQ ID NO: 125017 - DNA, 19 bp, Homo sapiens
  siRNA target sequence for WISP3 (NM_130396.1,58-76).
gctggtcgtaaacagtttt

SEQ ID NO: 125018 - DNA, 19 bp, Homo sapiens
  siRNA target sequence for FIBP (NM_004214.4,150-168).
ggaacacgacccttatcga

SEQ ID NO: 125019 - DNA, 19 bp, Homo sapiens
  siRNA target sequence for FIBP (NM_004214.4,183-201).
gcctctggctcgatggtta

SEQ ID NO: 125020 - DNA, 19 bp, Homo sapiens
  siRNA target sequence for FIBP (NM_004214.4,282-300).
gcgacaccatggaccatta

SEQ ID NO: 125021 - DNA, 19 bp, Homo sapiens
  siRNA target sequence for FIBP (NM_004214.4,381-399).
cccggcaggcactactcat

SEQ ID NO: 125022 - DNA, 19 bp, Homo sapiens
  siRNA target sequence for FIBP (NM_004214.4,403-421).
gaggtactatgcctttgat

SEQ ID NO: 125023 - DNA, 19 bp, Homo sapiens
  siRNA target sequence for FIBP (NM_004214.4,522-540).
gccggagacagtttgacaa

SEQ ID NO: 125024 - DNA, 19 bp, Homo sapiens
  siRNA target sequence for FIBP (NM_004214.4,525-543).
ggagacagtttgacaactt

SEQ ID NO: 125025 - DNA, 19 bp, Homo sapiens
  siRNA target sequence for FIBP (NM_004214.4,528-546).
gacagtttgacaactttaa

SEQ ID NO: 125026 - DNA, 19 bp, Homo sapiens
  siRNA target sequence for FIBP (NM_004214.4,578-596).
ggctccctggtggacaata

SEQ ID NO: 125027 - DNA, 19 bp, Homo sapiens
  siRNA target sequence for FIBP (NM_004214.4,645-663).
ccatcgtcttctttgctaa

SEQ ID NO: 125028 - DNA, 19 bp, Homo sapiens
  siRNA target sequence for FIBP (NM_004214.4,728-746).
gctgagctcatgatccaaa

SEQ ID NO: 125029 - DNA, 19 bp, Homo sapiens
  siRNA target sequence for FIBP (NM_004214.4,1074-1092).
ggttcttcctgaatcagta

SEQ ID NO: 125030 - DNA, 19 bp, Homo sapiens
  siRNA target sequence for FIBP (NM_004214.4,1170-1188).
gcctcctgcgcctgtatca

SEQ ID NO: 125031 - DNA, 19 bp, Homo sapiens
  siRNA target sequence for LTBP1 (NM_000627.1,94-112).
gatactaagctgatgtgtt

SEQ ID NO: 125032 - DNA, 19 bp, Homo sapiens
  siRNA target sequence for LTBP1 (NM_000627.1,134-152).
ctccgctcctagtgagtaa

SEQ ID NO: 125033 - DNA, 19 bp, Homo sapiens
  siRNA target sequence for LTBP1 (NM_000627.1,184-202).
ccgagcatctgtaaagtga

SEQ ID NO: 125034 - DNA, 19 bp, Homo sapiens
  siRNA target sequence for LTBP1 (NM_000627.1,246-264).
caccaccactctcattagt

SEQ ID NO: 125035 - DNA, 19 bp, Homo sapiens
  siRNA target sequence for LTBP1 (NM_000627.1,252-270).
cactctcattagtgagaat

SEQ ID NO: 125036 - DNA, 19 bp, Homo sapiens
  siRNA target sequence for LTBP1 (NM_000627.1,299-317).
cgaacttccgagtggtaat

SEQ ID NO: 125037 - DNA, 19 bp, Homo sapiens
  siRNA target sequence for LTBP1 (NM_000627.1,300-318).
gaacttccgagtggtaatt

SEQ ID NO: 125038 - DNA, 19 bp, Homo sapiens
  siRNA target sequence for LTBP1 (NM_000627.1,320-338).
gccatcttccatgtatgaa

SEQ ID NO: 125039 - DNA, 19 bp, Homo sapiens
  siRNA target sequence for LTBP1 (NM_000627.1,321-339).
ccatcttccatgtatgaat

SEQ ID NO: 125040 - DNA, 19 bp, Homo sapiens
  siRNA target sequence for LTBP1 (NM_000627.1,472-490).
gggacgcatgtcatccatt

SEQ ID NO: 125041 - DNA, 19 bp, Homo sapiens
  siRNA target sequence for LTBP1 (NM_000627.1,540-558).
gaaatttcctcctaacata

SEQ ID NO: 125042 - DNA, 19 bp, Homo sapiens
  siRNA target sequence for LTBP1 (NM_000627.1,548-566).
ctcctaacatagtcaatat

SEQ ID NO: 125043 - DNA, 19 bp, Homo sapiens
  siRNA target sequence for LTBP1 (NM_000627.1,551-569).
ctaacatagtcaatatcca

SEQ ID NO: 125044 - DNA, 19 bp, Homo sapiens
  siRNA target sequence for LTBP1 (NM_000627.1,756-774).
ccccgtggctgctaagaca

SEQ ID NO: 125045 - DNA, 19 bp, Homo sapiens
  siRNA target sequence for LTBP1 (NM_000627.1,823-841).
gcgctccctggcctttcaa

SEQ ID NO: 125046 - DNA, 19 bp, Homo sapiens
  siRNA target sequence for LTBP1 (NM_000627.1,872-890).
cctcctggggctttaacaa

SEQ ID NO: 125047 - DNA, 19 bp, Homo sapiens
  siRNA target sequence for LTBP1 (NM_000627.1,873-891).
ctcctggggctttaacaaa

SEQ ID NO: 125048 - DNA, 19 bp, Homo sapiens
  siRNA target sequence for LTBP1 (NM_000627.1,894-912).
ccagaaatgccccaagaaa

SEQ ID NO: 125049 - DNA, 19 bp, Homo sapiens
  siRNA target sequence for LTBP1 (NM_000627.1,943-961).
gaatgcctaccgggttata

SEQ ID NO: 125050 - DNA, 19 bp, Homo sapiens
  siRNA target sequence for LTBP1 (NM_000627.1,955-973).
ggttataagcgggttaaca

SEQ ID NO: 125051 - DNA, 19 bp, Homo sapiens
  siRNA target sequence for LTBP1 (NM_000627.1,956-974).
gttataagcgggttaacaa

SEQ ID NO: 125052 - DNA, 19 bp, Homo sapiens
  siRNA target sequence for LTBP1 (NM_000627.1,1019-1037).
gccctaatggtgagtgttt

SEQ ID NO: 125053 - DNA, 19 bp, Homo sapiens
  siRNA target sequence for LTBP1 (NM_000627.1,1022-1040).
ctaatggtgagtgtttgaa

SEQ ID NO: 125054 - DNA, 19 bp, Homo sapiens
  siRNA target sequence for LTBP1 (NM_000627.1,1027-1045).
ggtgagtgtttgaatacca

SEQ ID NO: 125055 - DNA, 19 bp, Homo sapiens
  siRNA target sequence for LTBP1 (NM_000627.1,1061-1079).
gtacctgcaaaataggatt

SEQ ID NO: 125056 - DNA, 19 bp, Homo sapiens
  siRNA target sequence for LTBP1 (NM_000627.1,1084-1102).
ccggatcctaccttttcaa

SEQ ID NO: 125057 - DNA, 19 bp, Homo sapiens
  siRNA target sequence for LTBP1 (NM_000627.1,1121-1139).
ctgtgatctcggaagagaa

SEQ ID NO: 125058 - DNA, 19 bp, Homo sapiens
  siRNA target sequence for LTBP1 (NM_000627.1,1163-1181).
gttctggaagacagtgtat

SEQ ID NO: 125059 - DNA, 19 bp, Homo sapiens
  siRNA target sequence for LTBP1 (NM_000627.1,1347-1365).
ccatcaccatgtaggtaaa

SEQ ID NO: 125060 - DNA, 19 bp, Homo sapiens
  siRNA target sequence for LTBP1 (NM_000627.1,1361-1379).
gtaaaggacctgtatttgt

SEQ ID NO: 125061 - DNA, 19 bp, Homo sapiens
  siRNA target sequence for LTBP1 (NM_000627.1,1396-1414).
caacctgttgctaaaagta

SEQ ID NO: 125062 - DNA, 19 bp, Homo sapiens
  siRNA target sequence for LTBP1 (NM_000627.1,1514-1532).
caccccctgaaaaggaaat

SEQ ID NO: 125063 - DNA, 19 bp, Homo sapiens
  siRNA target sequence for LTBP1 (NM_000627.1,1620-1638).
gtttccagtagtgattgaa

SEQ ID NO: 125064 - DNA, 19 bp, Homo sapiens
  siRNA target sequence for LTBP1 (NM_000627.1,1720-1738).
gtgacagaaatcaatgaat

SEQ ID NO: 125065 - DNA, 19 bp, Homo sapiens
  siRNA target sequence for LTBP1 (NM_000627.1,1739-1757).
gtactgtgaaccctgatat

SEQ ID NO: 125066 - DNA, 19 bp, Homo sapiens
  siRNA target sequence for LTBP1 (NM_000627.1,1766-1784).
caggacactgcattaacct

SEQ ID NO: 125067 - DNA, 19 bp, Homo sapiens
  siRNA target sequence for LTBP1 (NM_000627.1,1783-1801).
ctaccagtgagatatacct

SEQ ID NO: 125068 - DNA, 19 bp, Homo sapiens
  siRNA target sequence for LTBP1 (NM_000627.1,1793-1811).
gatatacctgtatatgcta

SEQ ID NO: 125069 - DNA, 19 bp, Homo sapiens
  siRNA target sequence for LTBP1 (NM_000627.1,1818-1836).
ctacaggttcagtgaacaa

SEQ ID NO: 125070 - DNA, 19 bp, Homo sapiens
  siRNA target sequence for LTBP1 (NM_000627.1,1952-1970).
ccagtgaggagggtactaa

SEQ ID NO: 125071 - DNA, 19 bp, Homo sapiens
  siRNA target sequence for LTBP1 (NM_000627.1,1967-1985).
ctaactgcatagatgttga

SEQ ID NO: 125072 - DNA, 19 bp, Homo sapiens
  siRNA target sequence for LTBP1 (NM_000627.1,2013-2031).
ggaggggcactgtgtcaat

SEQ ID NO: 125073 - DNA, 19 bp, Homo sapiens
  siRNA target sequence for LTBP1 (NM_000627.1,2016-2034).
ggggcactgtgtcaatact

SEQ ID NO: 125074 - DNA, 19 bp, Homo sapiens
  siRNA target sequence for LTBP1 (NM_000627.1,2041-2059).
gccttccggtgtgaatact

SEQ ID NO: 125075 - DNA, 19 bp, Homo sapiens
  siRNA target sequence for LTBP1 (NM_000627.1,2043-2061).
cttccggtgtgaatactgt

SEQ ID NO: 125076 - DNA, 19 bp, Homo sapiens
  siRNA target sequence for LTBP1 (NM_000627.1,2087-2105).
gaggccgttgtgaggatat

SEQ ID NO: 125077 - DNA, 19 bp, Homo sapiens
  siRNA target sequence for LTBP1 (NM_000627.1,2090-2108).
gccgttgtgaggatattga

SEQ ID NO: 125078 - DNA, 19 bp, Homo sapiens
  siRNA target sequence for LTBP1 (NM_000627.1,2091-2109).
ccgttgtgaggatattgat

SEQ ID NO: 125079 - DNA, 19 bp, Homo sapiens
  siRNA target sequence for LTBP1 (NM_000627.1,2093-2111).
gttgtgaggatattgatga

SEQ ID NO: 125080 - DNA, 19 bp, Homo sapiens
  siRNA target sequence for LTBP1 (NM_000627.1,2250-2268).
ctgcgcaaatggtgattgt

SEQ ID NO: 125081 - DNA, 19 bp, Homo sapiens
  siRNA target sequence for LTBP1 (NM_000627.1,2281-2299).
ggctcctacatgtgttcat

SEQ ID NO: 125082 - DNA, 19 bp, Homo sapiens
  siRNA target sequence for LTBP1 (NM_000627.1,2361-2379).
gcaagggaatctatgtgta

SEQ ID NO: 125083 - DNA, 19 bp, Homo sapiens
  siRNA target sequence for LTBP1 (NM_000627.1,2362-2380).
caagggaatctatgtgtaa

SEQ ID NO: 125084 - DNA, 19 bp, Homo sapiens
  siRNA target sequence for LTBP1 (NM_000627.1,2436-2454).
ccagctgtcggcagctaaa

SEQ ID NO: 125085 - DNA, 19 bp, Homo sapiens
  siRNA target sequence for LTBP1 (NM_000627.1,2544-2562).
gtgtgaccagggttacaga

SEQ ID NO: 125086 - DNA, 19 bp, Homo sapiens
  siRNA target sequence for LTBP1 (NM_000627.1,2580-2598).
ccactgtgaagatatcaat

SEQ ID NO: 125087 - DNA, 19 bp, Homo sapiens
  siRNA target sequence for LTBP1 (NM_000627.1,2626-2644).
cagagaggagactgcatta

SEQ ID NO: 125088 - DNA, 19 bp, Homo sapiens
  siRNA target sequence for LTBP1 (NM_000627.1,2653-2671).
gggtcctatgattgtactt

SEQ ID NO: 125089 - DNA, 19 bp, Homo sapiens
  siRNA target sequence for LTBP1 (NM_000627.1,2655-2673).
gtcctatgattgtacttgt

SEQ ID NO: 125090 - DNA, 19 bp, Homo sapiens
  siRNA target sequence for LTBP1 (NM_000627.1,2666-2684).
gtacttgtccggatggatt

SEQ ID NO: 125091 - DNA, 19 bp, Homo sapiens
  siRNA target sequence for LTBP1 (NM_000627.1,2669-2687).
cttgtccggatggatttca

SEQ ID NO: 125092 - DNA, 19 bp, Homo sapiens
  siRNA target sequence for LTBP1 (NM_000627.1,2688-2706).
gctagatgacaataaaaca

SEQ ID NO: 125093 - DNA, 19 bp, Homo sapiens
  siRNA target sequence for LTBP1 (NM_000627.1,2769-2787).
cacagagggttctttccat

SEQ ID NO: 125094 - DNA, 19 bp, Homo sapiens
  siRNA target sequence for LTBP1 (NM_000627.1,2824-2842).
ggccgtacgtgtgaagata

SEQ ID NO: 125095 - DNA, 19 bp, Homo sapiens
  siRNA target sequence for LTBP1 (NM_000627.1,2825-2843).
gccgtacgtgtgaagatat

SEQ ID NO: 125096 - DNA, 19 bp, Homo sapiens
  siRNA target sequence for LTBP1 (NM_000627.1,2826-2844).
ccgtacgtgtgaagatatt

SEQ ID NO: 125097 - DNA, 19 bp, Homo sapiens
  siRNA target sequence for LTBP1 (NM_000627.1,2828-2846).
gtacgtgtgaagatattga

SEQ ID NO: 125098 - DNA, 19 bp, Homo sapiens
  siRNA target sequence for LTBP1 (NM_000627.1,2878-2896).
cacgggttttgtgacaata

SEQ ID NO: 125099 - DNA, 19 bp, Homo sapiens
  siRNA target sequence for LTBP1 (NM_000627.1,2880-2898).
cgggttttgtgacaataca

SEQ ID NO: 125100 - DNA, 19 bp, Homo sapiens
  siRNA target sequence for LTBP1 (NM_000627.1,3001-3019).
ggtgaagccttctgtgaaa

SEQ ID NO: 125101 - DNA, 19 bp, Homo sapiens
  siRNA target sequence for LTBP1 (NM_000627.1,3096-3114).
ccggacctccacagattta

SEQ ID NO: 125102 - DNA, 19 bp, Homo sapiens
  siRNA target sequence for LTBP1 (NM_000627.1,3098-3116).
ggacctccacagatttaga

SEQ ID NO: 125103 - DNA, 19 bp, Homo sapiens
  siRNA target sequence for LTBP1 (NM_000627.1,3101-3119).
cctccacagatttagatgt

SEQ ID NO: 125104 - DNA, 19 bp, Homo sapiens
  siRNA target sequence for LTBP1 (NM_000627.1,3102-3120).
ctccacagatttagatgta

SEQ ID NO: 125105 - DNA, 19 bp, Homo sapiens
  siRNA target sequence for LTBP1 (NM_000627.1,3172-3190).
gacgccagtctctgtgata

SEQ ID NO: 125106 - DNA, 19 bp, Homo sapiens
  siRNA target sequence for LTBP1 (NM_000627.1,3174-3192).
cgccagtctctgtgataat

SEQ ID NO: 125107 - DNA, 19 bp, Homo sapiens
  siRNA target sequence for LTBP1 (NM_000627.1,3201-3219).
ccccaatgtcacgaaacaa

SEQ ID NO: 125108 - DNA, 19 bp, Homo sapiens
  siRNA target sequence for LTBP1 (NM_000627.1,3203-3221).
ccaatgtcacgaaacaaga

SEQ ID NO: 125109 - DNA, 19 bp, Homo sapiens
  siRNA target sequence for LTBP1 (NM_000627.1,3204-3222).
caatgtcacgaaacaagaa

SEQ ID NO: 125110 - DNA, 19 bp, Homo sapiens
  siRNA target sequence for LTBP1 (NM_000627.1,3331-3349).
gtgcctgctggagaatcat

SEQ ID NO: 125111 - DNA, 19 bp, Homo sapiens
  siRNA target sequence for LTBP1 (NM_000627.1,3409-3427).
gaaatctgcaaaaatggtt

SEQ ID NO: 125112 - DNA, 19 bp, Homo sapiens
  siRNA target sequence for LTBP1 (NM_000627.1,3443-3461).
ggcctgggtatgaatgcta

SEQ ID NO: 125113 - DNA, 19 bp, Homo sapiens
  siRNA target sequence for LTBP1 (NM_000627.1,3448-3466).
gggtatgaatgctactgta

SEQ ID NO: 125114 - DNA, 19 bp, Homo sapiens
  siRNA target sequence for LTBP1 (NM_000627.1,3468-3486).
gcaagggacgtactatgat

SEQ ID NO: 125115 - DNA, 19 bp, Homo sapiens
  siRNA target sequence for LTBP1 (NM_000627.1,3523-3541).
caagaccccagtagttgta

SEQ ID NO: 125116 - DNA, 19 bp, Homo sapiens
  siRNA target sequence for LTBP1 (NM_000627.1,3528-3546).
ccccagtagttgtattgat

SEQ ID NO: 125117 - DNA, 19 bp, Homo sapiens
  siRNA target sequence for LTBP1 (NM_000627.1,3548-3566).
gccagtgtgttaatacaga

SEQ ID NO: 125118 - DNA, 19 bp, Homo sapiens
  siRNA target sequence for LTBP1 (NM_000627.1,3610-3628).
gcgtcagaaaaaagatgta

SEQ ID NO: 125119 - DNA, 19 bp, Homo sapiens
  siRNA target sequence for LTBP1 (NM_000627.1,3611-3629).
cgtcagaaaaaagatgtat

SEQ ID NO: 125120 - DNA, 19 bp, Homo sapiens
  siRNA target sequence for LTBP1 (NM_000627.1,3799-3817).
ctctgccccctgaaggatt

SEQ ID NO: 125121 - DNA, 19 bp, Homo sapiens
  siRNA target sequence for LTBP1 (NM_000627.1,3803-3821).
gccccctgaaggattcaga

SEQ ID NO: 125122 - DNA, 19 bp, Homo sapiens
  siRNA target sequence for LTBP1 (NM_000627.1,3933-3951).
catccaagaccgttttcta

SEQ ID NO: 125123 - DNA, 19 bp, Homo sapiens
  siRNA target sequence for LTBP1 (NM_000627.1,3937-3955).
caagaccgttttctaaata

SEQ ID NO: 125124 - DNA, 19 bp, Homo sapiens
  siRNA target sequence for LTBP1 (NM_000627.1,3940-3958).
gaccgttttctaaatagct

SEQ ID NO: 125125 - DNA, 19 bp, Homo sapiens
  siRNA target sequence for LTBP1 (NM_000627.1,3993-4011).
caatggatgtgaaaatggt

SEQ ID NO: 125126 - DNA, 19 bp, Homo sapiens
  siRNA target sequence for LTBP1 (NM_000627.1,4102-4120).
gaatgcgatgagttgaaca

SEQ ID NO: 125127 - DNA, 19 bp, Homo sapiens
  siRNA target sequence for LTBP1 (NM_000627.1,4162-4180).
gatggttcctacaagtgtt

SEQ ID NO: 125128 - DNA, 19 bp, Homo sapiens
  siRNA target sequence for LTBP1 (NM_000627.1,4218-4236).
ctactgcactccgttgaat

SEQ ID NO: 125129 - DNA, 19 bp, Homo sapiens
  siRNA target sequence for LTBP1 (NM_000627.1,4230-4248).
gttgaataccgccttgaat

SEQ ID NO: 125130 - DNA, 19 bp, Homo sapiens
  siRNA target sequence for LTBP1 (NM_000627.1,4233-4251).
gaataccgccttgaattta

SEQ ID NO: 125131 - DNA, 19 bp, Homo sapiens
  siRNA target sequence for LTBP1 (NM_000627.1,4239-4257).
cgccttgaatttagagaaa

SEQ ID NO: 125132 - DNA, 19 bp, Homo sapiens
  siRNA target sequence for LTBP1 (NM_000627.1,4241-4259).
ccttgaatttagagaaaga

SEQ ID NO: 125133 - DNA, 19 bp, Homo sapiens
  siRNA target sequence for AVPR1A (NM_000706.3,2141-2159).
ccgtgctggcggtgacttt

SEQ ID NO: 125134 - DNA, 19 bp, Homo sapiens
  siRNA target sequence for AVPR1A (NM_000706.3,2758-2776).
gcgggtgtggccttccaaa

SEQ ID NO: 125135 - DNA, 19 bp, Homo sapiens
  siRNA target sequence for AVPR1A (NM_000706.3,2980-2998).
ctgggttccttgaatagct

SEQ ID NO: 125136 - DNA, 19 bp, Homo sapiens
  siRNA target sequence for AVPR1A (NM_000706.3,3120-3138).
cagaagacagactttttat

SEQ ID NO: 125137 - DNA, 19 bp, Homo sapiens
  siRNA target sequence for AVPR1A (NM_000706.3,3177-3195).
gaaggactcgcctaaatct

SEQ ID NO: 125138 - DNA, 19 bp, Homo sapiens
  siRNA target sequence for AVPR1B (NM_000707.2,991-1009).
gcctccctcaagtcttcat

SEQ ID NO: 125139 - DNA, 19 bp, Homo sapiens
  siRNA target sequence for AVPR1B (NM_000707.2,992-1010).
cctccctcaagtcttcatt

SEQ ID NO: 125140 - DNA, 19 bp, Homo sapiens
  siRNA target sequence for AVPR1B (NM_000707.2,995-1013).
ccctcaagtcttcattttt

SEQ ID NO: 125141 - DNA, 19 bp, Homo sapiens
  siRNA target sequence for AVPR1B (NM_000707.2,996-1014).
cctcaagtcttcatttttt

SEQ ID NO: 125142 - DNA, 19 bp, Homo sapiens
  siRNA target sequence for AVPR1B (NM_000707.2,1102-1120).
ggaccaccctggctatctt

SEQ ID NO: 125143 - DNA, 19 bp, Homo sapiens
  siRNA target sequence for AVPR1B (NM_000707.2,1163-1181).
ctgccatgagatctgtaaa

SEQ ID NO: 125144 - DNA, 19 bp, Homo sapiens
  siRNA target sequence for AVPR1B (NM_000707.2,1406-1424).
gtccgtgtgggacaagaat

SEQ ID NO: 125145 - DNA, 19 bp, Homo sapiens
  siRNA target sequence for AVPR1B (NM_000707.2,1418-1436).
caagaatgcccctgatgaa

SEQ ID NO: 125146 - DNA, 19 bp, Homo sapiens
  siRNA target sequence for AVPR1B (NM_000707.2,1752-1770).
gctgagaccatcatctttt

SEQ ID NO: 125147 - DNA, 19 bp, Homo sapiens
  siRNA target sequence for COPB2 (NM_004766.1,72-90).
cctctgcgacttgatatca

SEQ ID NO: 125148 - DNA, 19 bp, Homo sapiens
  siRNA target sequence for COPB2 (NM_004766.1,73-91).
ctctgcgacttgatatcaa

SEQ ID NO: 125149 - DNA, 19 bp, Homo sapiens
  siRNA target sequence for COPB2 (NM_004766.1,98-116).
gctaactgctagatctgat

SEQ ID NO: 125150 - DNA, 19 bp, Homo sapiens
  siRNA target sequence for COPB2 (NM_004766.1,106-124).
ctagatctgatcgagttaa

SEQ ID NO: 125151 - DNA, 19 bp, Homo sapiens
  siRNA target sequence for COPB2 (NM_004766.1,158-176).
gttggcaagtctttacaat

SEQ ID NO: 125152 - DNA, 19 bp, Homo sapiens
  siRNA target sequence for COPB2 (NM_004766.1,294-312).
gcggatgacatgcagatta

SEQ ID NO: 125153 - DNA, 19 bp, Homo sapiens
  siRNA target sequence for COPB2 (NM_004766.1,305-323).
gcagattagagtgttcaat

SEQ ID NO: 125154 - DNA, 19 bp, Homo sapiens
  siRNA target sequence for COPB2 (NM_004766.1,394-412).
caacccagcctttcattct

SEQ ID NO: 125155 - DNA, 19 bp, Homo sapiens
  siRNA target sequence for COPB2 (NM_004766.1,463-481).
ggtcttgctcacaagtgtt

SEQ ID NO: 125156 - DNA, 19 bp, Homo sapiens
  siRNA target sequence for COPB2 (NM_004766.1,464-482).
gtcttgctcacaagtgttt

SEQ ID NO: 125157 - DNA, 19 bp, Homo sapiens
  siRNA target sequence for COPB2 (NM_004766.1,466-484).
cttgctcacaagtgtttga

SEQ ID NO: 125158 - DNA, 19 bp, Homo sapiens
  siRNA target sequence for COPB2 (NM_004766.1,486-504).
ggacacacccattatgtta

SEQ ID NO: 125159 - DNA, 19 bp, Homo sapiens
  siRNA target sequence for COPB2 (NM_004766.1,487-505).
gacacacccattatgttat

SEQ ID NO: 125160 - DNA, 19 bp, Homo sapiens
  siRNA target sequence for COPB2 (NM_004766.1,553-571).
ctttggacaggactatcaa

SEQ ID NO: 125161 - DNA, 19 bp, Homo sapiens
  siRNA target sequence for COPB2 (NM_004766.1,586-604).
gctcttcgtcaccaaactt

SEQ ID NO: 125162 - DNA, 19 bp, Homo sapiens
  siRNA target sequence for COPB2 (NM_004766.1,592-610).
cgtcaccaaacttcacttt

SEQ ID NO: 125163 - DNA, 19 bp, Homo sapiens
  siRNA target sequence for COPB2 (NM_004766.1,618-636).
catgagaaaggcgtgaatt

SEQ ID NO: 125164 - DNA, 19 bp, Homo sapiens
  siRNA target sequence for COPB2 (NM_004766.1,627-645).
ggcgtgaattgcattgatt

SEQ ID NO: 125165 - DNA, 19 bp, Homo sapiens
  siRNA target sequence for COPB2 (NM_004766.1,628-646).
gcgtgaattgcattgatta

SEQ ID NO: 125166 - DNA, 19 bp, Homo sapiens
  siRNA target sequence for COPB2 (NM_004766.1,630-648).
gtgaattgcattgattact

SEQ ID NO: 125167 - DNA, 19 bp, Homo sapiens
  siRNA target sequence for COPB2 (NM_004766.1,660-678).
gacaagccatacctcattt

SEQ ID NO: 125168 - DNA, 19 bp, Homo sapiens
  siRNA target sequence for COPB2 (NM_004766.1,684-702).
gcagatgaccgtcttgtta

SEQ ID NO: 125169 - DNA, 19 bp, Homo sapiens
  siRNA target sequence for COPB2 (NM_004766.1,788-806).
gttgccaatcattatcaca

SEQ ID NO: 125170 - DNA, 19 bp, Homo sapiens
  siRNA target sequence for COPB2 (NM_004766.1,855-873).
cttgagagcacactgaatt

SEQ ID NO: 125171 - DNA, 19 bp, Homo sapiens
  siRNA target sequence for COPB2 (NM_004766.1,893-911).
gtgcgtggccagtctaaga

SEQ ID NO: 125172 - DNA, 19 bp, Homo sapiens
  siRNA target sequence for COPB2 (NM_004766.1,904-922).
gtctaagagggtcaaacaa

SEQ ID NO: 125173 - DNA, 19 bp, Homo sapiens
  siRNA target sequence for COPB2 (NM_004766.1,946-964).
ggagcatcattgttaagct

SEQ ID NO: 125174 - DNA, 19 bp, Homo sapiens
  siRNA target sequence for COPB2 (NM_004766.1,947-965).
gagcatcattgttaagctt

SEQ ID NO: 125175 - DNA, 19 bp, Homo sapiens
  siRNA target sequence for COPB2 (NM_004766.1,1032-1050).
gtccagcaggccaacctaa

SEQ ID NO: 125176 - DNA, 19 bp, Homo sapiens
  siRNA target sequence for COPB2 (NM_004766.1,1034-1052).
ccagcaggccaacctaaaa

SEQ ID NO: 125177 - DNA, 19 bp, Homo sapiens
  siRNA target sequence for COPB2 (NM_004766.1,1091-1109).
gccactggcagtaaaggat

SEQ ID NO: 125178 - DNA, 19 bp, Homo sapiens
  siRNA target sequence for COPB2 (NM_004766.1,1092-1110).
ccactggcagtaaaggata

SEQ ID NO: 125179 - DNA, 19 bp, Homo sapiens
  siRNA target sequence for COPB2 (NM_004766.1,1093-1111).
cactggcagtaaaggatat

SEQ ID NO: 125180 - DNA, 19 bp, Homo sapiens
  siRNA target sequence for COPB2 (NM_004766.1,1138-1156).
ctattcagcacaatcctaa

SEQ ID NO: 125181 - DNA, 19 bp, Homo sapiens
  siRNA target sequence for COPB2 (NM_004766.1,1177-1195).
gtggtgatggggagtatat

SEQ ID NO: 125182 - DNA, 19 bp, Homo sapiens
  siRNA target sequence for COPB2 (NM_004766.1,1179-1197).
ggtgatggggagtatatca

SEQ ID NO: 125183 - DNA, 19 bp, Homo sapiens
  siRNA target sequence for COPB2 (NM_004766.1,1180-1198).
gtgatggggagtatatcat

SEQ ID NO: 125184 - DNA, 19 bp, Homo sapiens
  siRNA target sequence for COPB2 (NM_004766.1,1182-1200).
gatggggagtatatcatct

SEQ ID NO: 125185 - DNA, 19 bp, Homo sapiens
  siRNA target sequence for COPB2 (NM_004766.1,1185-1203).
ggggagtatatcatctaca

SEQ ID NO: 125186 - DNA, 19 bp, Homo sapiens
  siRNA target sequence for COPB2 (NM_004766.1,1251-1269).
gcatgggcccacgattctt

SEQ ID NO: 125187 - DNA, 19 bp, Homo sapiens
  siRNA target sequence for COPB2 (NM_004766.1,1259-1277).
ccacgattcttcagagtat

SEQ ID NO: 125188 - DNA, 19 bp, Homo sapiens
  siRNA target sequence for COPB2 (NM_004766.1,1263-1281).
gattcttcagagtatgcaa

SEQ ID NO: 125189 - DNA, 19 bp, Homo sapiens
  siRNA target sequence for COPB2 (NM_004766.1,1291-1309).
gcaacagcattgtaaagat

SEQ ID NO: 125190 - DNA, 19 bp, Homo sapiens
  siRNA target sequence for COPB2 (NM_004766.1,1292-1310).
caacagcattgtaaagata

SEQ ID NO: 125191 - DNA, 19 bp, Homo sapiens
  siRNA target sequence for COPB2 (NM_004766.1,1385-1403).
gggagtcagatctgtaaat

SEQ ID NO: 125192 - DNA, 19 bp, Homo sapiens
  siRNA target sequence for COPB2 (NM_004766.1,1404-1422).
ggcttagccttctatgact

SEQ ID NO: 125193 - DNA, 19 bp, Homo sapiens
  siRNA target sequence for COPB2 (NM_004766.1,1415-1433).
ctatgactgggacaataca

SEQ ID NO: 125194 - DNA, 19 bp, Homo sapiens
  siRNA target sequence for COPB2 (NM_004766.1,1437-1455).
ctcatacgaagaattgaaa

SEQ ID NO: 125195 - DNA, 19 bp, Homo sapiens
  siRNA target sequence for COPB2 (NM_004766.1,1556-1574).
ggctgcacaggaaacacat

SEQ ID NO: 125196 - DNA, 19 bp, Homo sapiens
  siRNA target sequence for COPB2 (NM_004766.1,1621-1639).
gtgagattcaggaaattgt

SEQ ID NO: 125197 - DNA, 19 bp, Homo sapiens
  siRNA target sequence for COPB2 (NM_004766.1,1655-1673).
ggtaggcgattgcttcatt

SEQ ID NO: 125198 - DNA, 19 bp, Homo sapiens
  siRNA target sequence for COPB2 (NM_004766.1,1656-1674).
gtaggcgattgcttcattt

SEQ ID NO: 125199 - DNA, 19 bp, Homo sapiens
  siRNA target sequence for COPB2 (NM_004766.1,1659-1677).
ggcgattgcttcatttaca

SEQ ID NO: 125200 - DNA, 19 bp, Homo sapiens
  siRNA target sequence for COPB2 (NM_004766.1,1661-1679).
cgattgcttcatttacaca

SEQ ID NO: 125201 - DNA, 19 bp, Homo sapiens
  siRNA target sequence for COPB2 (NM_004766.1,1684-1702).
ctgtgaacagattaaatta

SEQ ID NO: 125202 - DNA, 19 bp, Homo sapiens
  siRNA target sequence for COPB2 (NM_004766.1,1691-1709).
cagattaaattattatgtt

SEQ ID NO: 125203 - DNA, 19 bp, Homo sapiens
  siRNA target sequence for COPB2 (NM_004766.1,1736-1754).
cttggacaggacgatgtat

SEQ ID NO: 125204 - DNA, 19 bp, Homo sapiens
  siRNA target sequence for COPB2 (NM_004766.1,1751-1769).
gtatctcctaggctacatt

SEQ ID NO: 125205 - DNA, 19 bp, Homo sapiens
  siRNA target sequence for COPB2 (NM_004766.1,1755-1773).
ctcctaggctacattccta

SEQ ID NO: 125206 - DNA, 19 bp, Homo sapiens
  siRNA target sequence for COPB2 (NM_004766.1,1784-1802).
gctttatctgggggataaa

SEQ ID NO: 125207 - DNA, 19 bp, Homo sapiens
  siRNA target sequence for COPB2 (NM_004766.1,1791-1809).
ctgggggataaagaattga

SEQ ID NO: 125208 - DNA, 19 bp, Homo sapiens
  siRNA target sequence for COPB2 (NM_004766.1,1794-1812).
ggggataaagaattgaaca

SEQ ID NO: 125209 - DNA, 19 bp, Homo sapiens
  siRNA target sequence for COPB2 (NM_004766.1,1803-1821).
gaattgaacatcattagct

SEQ ID NO: 125210 - DNA, 19 bp, Homo sapiens
  siRNA target sequence for COPB2 (NM_004766.1,1860-1878).
gtcatgcggagggacttta

SEQ ID NO: 125211 - DNA, 19 bp, Homo sapiens
  siRNA target sequence for COPB2 (NM_004766.1,1984-2002).
cagatcctgagcatcgttt

SEQ ID NO: 125212 - DNA, 19 bp, Homo sapiens
  siRNA target sequence for COPB2 (NM_004766.1,2181-2199).
gcctctggaaatgctaata

SEQ ID NO: 125213 - DNA, 19 bp, Homo sapiens
  siRNA target sequence for COPB2 (NM_004766.1,2182-2200).
cctctggaaatgctaatat

SEQ ID NO: 125214 - DNA, 19 bp, Homo sapiens
  siRNA target sequence for COPB2 (NM_004766.1,2185-2203).
ctggaaatgctaatatggt

SEQ ID NO: 125215 - DNA, 19 bp, Homo sapiens
  siRNA target sequence for COPB2 (NM_004766.1,2224-2242).
cggagagagatggcaaaaa

SEQ ID NO: 125216 - DNA, 19 bp, Homo sapiens
  siRNA target sequence for COPB2 (NM_004766.1,2225-2243).
ggagagagatggcaaaaat

SEQ ID NO: 125217 - DNA, 19 bp, Homo sapiens
  siRNA target sequence for COPB2 (NM_004766.1,2249-2267).
ggcattcatgagctacttt

SEQ ID NO: 125218 - DNA, 19 bp, Homo sapiens
  siRNA target sequence for COPB2 (NM_004766.1,2286-2304).
gcctgcctagagctcttaa

SEQ ID NO: 125219 - DNA, 19 bp, Homo sapiens
  siRNA target sequence for COPB2 (NM_004766.1,2287-2305).
cctgcctagagctcttaat

SEQ ID NO: 125220 - DNA, 19 bp, Homo sapiens
  siRNA target sequence for COPB2 (NM_004766.1,2288-2306).
ctgcctagagctcttaatt

SEQ ID NO: 125221 - DNA, 19 bp, Homo sapiens
  siRNA target sequence for COPB2 (NM_004766.1,2291-2309).
cctagagctcttaattaga

SEQ ID NO: 125222 - DNA, 19 bp, Homo sapiens
  siRNA target sequence for COPB2 (NM_004766.1,2292-2310).
ctagagctcttaattagaa

SEQ ID NO: 125223 - DNA, 19 bp, Homo sapiens
  siRNA target sequence for COPB2 (NM_004766.1,2332-2350).
ccttcttggcccgaactta

SEQ ID NO: 125224 - DNA, 19 bp, Homo sapiens
  siRNA target sequence for COPB2 (NM_004766.1,2363-2381).
ggtttcaagggtagtgaaa

SEQ ID NO: 125225 - DNA, 19 bp, Homo sapiens
  siRNA target sequence for COPB2 (NM_004766.1,2391-2409).
gagaatctctcaaaagtca

SEQ ID NO: 125226 - DNA, 19 bp, Homo sapiens
  siRNA target sequence for COPB2 (NM_004766.1,2393-2411).
gaatctctcaaaagtcaat

SEQ ID NO: 125227 - DNA, 19 bp, Homo sapiens
  siRNA target sequence for COPB2 (NM_004766.1,2397-2415).
ctctcaaaagtcaatcaga

SEQ ID NO: 125228 - DNA, 19 bp, Homo sapiens
  siRNA target sequence for COPB2 (NM_004766.1,2436-2454).
gacccaacagagtatgaaa

SEQ ID NO: 125229 - DNA, 19 bp, Homo sapiens
  siRNA target sequence for COPB2 (NM_004766.1,2459-2477).
gttccctggattaaaagaa

SEQ ID NO: 125230 - DNA, 19 bp, Homo sapiens
  siRNA target sequence for COPB2 (NM_004766.1,2520-2538).
ctgtggccagccaaacaat

SEQ ID NO: 125231 - DNA, 19 bp, Homo sapiens
  siRNA target sequence for COPB2 (NM_004766.1,2542-2560).
cacttgtcacgccaaatga

SEQ ID NO: 125232 - DNA, 19 bp, Homo sapiens
  siRNA target sequence for COPB2 (NM_004766.1,2693-2711).
gagtttactcgaactagaa

SEQ ID NO: 125233 - DNA, 19 bp, Homo sapiens
  siRNA target sequence for COPB2 (NM_004766.1,2695-2713).
gtttactcgaactagaagt

SEQ ID NO: 125234 - DNA, 19 bp, Homo sapiens
  siRNA target sequence for COPB2 (NM_004766.1,2700-2718).
ctcgaactagaagtagatt

SEQ ID NO: 125235 - DNA, 19 bp, Homo sapiens
  siRNA target sequence for COPB2 (NM_004766.1,2706-2724).
ctagaagtagatttggata

SEQ ID NO: 125236 - DNA, 19 bp, Homo sapiens
  siRNA target sequence for COPB2 (NM_004766.1,2739-2757).
gatattgacacaacagata

SEQ ID NO: 125237 - DNA, 19 bp, Homo sapiens
  siRNA target sequence for GNB2L1 (NM_006098.2,202-220).
gagataagaccatcatcat

SEQ ID NO: 125238 - DNA, 19 bp, Homo sapiens
  siRNA target sequence for GNB2L1 (NM_006098.2,204-222).
gataagaccatcatcatgt

SEQ ID NO: 125239 - DNA, 19 bp, Homo sapiens
  siRNA target sequence for GNB2L1 (NM_006098.2,276-294).
ggtcactcccactttgtta

SEQ ID NO: 125240 - DNA, 19 bp, Homo sapiens
  siRNA target sequence for GNB2L1 (NM_006098.2,281-299).
ctcccactttgttagtgat

SEQ ID NO: 125241 - DNA, 19 bp, Homo sapiens
  siRNA target sequence for GNB2L1 (NM_006098.2,291-309).
gttagtgatgtggttatct

SEQ ID NO: 125242 - DNA, 19 bp, Homo sapiens
  siRNA target sequence for GNB2L1 (NM_006098.2,382-400).
ccaccacgaggcgatttgt

SEQ ID NO: 125243 - DNA, 19 bp, Homo sapiens
  siRNA target sequence for GNB2L1 (NM_006098.2,394-412).
gatttgtgggccataccaa

SEQ ID NO: 125244 - DNA, 19 bp, Homo sapiens
  siRNA target sequence for GNB2L1 (NM_006098.2,441-459).
gacaaccggcagattgtct

SEQ ID NO: 125245 - DNA, 19 bp, Homo sapiens
  siRNA target sequence for GNB2L1 (NM_006098.2,458-476).
ctctggatctcgagataaa

SEQ ID NO: 125246 - DNA, 19 bp, Homo sapiens
  siRNA target sequence for GNB2L1 (NM_006098.2,463-481).
gatctcgagataaaaccat

SEQ ID NO: 125247 - DNA, 19 bp, Homo sapiens
  siRNA target sequence for GNB2L1 (NM_006098.2,471-489).
gataaaaccatcaagctat

SEQ ID NO: 125248 - DNA, 19 bp, Homo sapiens
  siRNA target sequence for GNB2L1 (NM_006098.2,498-516).
ctgggtgtgtgcaaataca

SEQ ID NO: 125249 - DNA, 19 bp, Homo sapiens
  siRNA target sequence for GNB2L1 (NM_006098.2,664-682).
gccacacaggctatctgaa

SEQ ID NO: 125250 - DNA, 19 bp, Homo sapiens
  siRNA target sequence for GNB2L1 (NM_006098.2,732-750).
gatggccaggccatgttat

SEQ ID NO: 125251 - DNA, 19 bp, Homo sapiens
  siRNA target sequence for GNB2L1 (NM_006098.2,742-760).
ccatgttatgggatctcaa

SEQ ID NO: 125252 - DNA, 19 bp, Homo sapiens
  siRNA target sequence for GNB2L1 (NM_006098.2,881-899).
gggaaagatcattgtagat

SEQ ID NO: 125253 - DNA, 19 bp, Homo sapiens
  siRNA target sequence for GNB2L1 (NM_006098.2,883-901).
gaaagatcattgtagatga

SEQ ID NO: 125254 - DNA, 19 bp, Homo sapiens
  siRNA target sequence for HINT1 (NM_005340.2,145-163).
cgatctttgggaagatcat

SEQ ID NO: 125255 - DNA, 19 bp, Homo sapiens
  siRNA target sequence for LIM (NM_006457.1,134-152).
gctgcagggcggtaaggat

SEQ ID NO: 125256 - DNA, 19 bp, Homo sapiens
  siRNA target sequence for LIM (NM_006457.1,135-153).
ctgcagggcggtaaggatt

SEQ ID NO: 125257 - DNA, 19 bp, Homo sapiens
  siRNA target sequence for LIM (NM_006457.1,297-315).
ggttgtacaggctctttga

SEQ ID NO: 125258 - DNA, 19 bp, Homo sapiens
  siRNA target sequence for LIM (NM_006457.1,432-450).
gtcacttccacaaacaaca

SEQ ID NO: 125259 - DNA, 19 bp, Homo sapiens
  siRNA target sequence for LIM (NM_006457.1,464-482).
ggcaccacggccttttggt

SEQ ID NO: 125260 - DNA, 19 bp, Homo sapiens
  siRNA target sequence for LIM (NM_006457.1,465-483).
gcaccacggccttttggtt

SEQ ID NO: 125261 - DNA, 19 bp, Homo sapiens
  siRNA target sequence for LIM (NM_006457.1,620-638).
gcatgctaatgccaatctt

SEQ ID NO: 125262 - DNA, 19 bp, Homo sapiens
  siRNA target sequence for LIM (NM_006457.1,621-639).
catgctaatgccaatctta

SEQ ID NO: 125263 - DNA, 19 bp, Homo sapiens
  siRNA target sequence for LIM (NM_006457.1,660-678).
gcactgagcgctggtaaaa

SEQ ID NO: 125264 - DNA, 19 bp, Homo sapiens
  siRNA target sequence for LIM (NM_006457.1,772-790).
gtgacagtaaacagcaaaa

SEQ ID NO: 125265 - DNA, 19 bp, Homo sapiens
  siRNA target sequence for LIM (NM_006457.1,792-810).
ggcccaccaagaaaacaca

SEQ ID NO: 125266 - DNA, 19 bp, Homo sapiens
  siRNA target sequence for LIM (NM_006457.1,793-811).
gcccaccaagaaaacacat

SEQ ID NO: 125267 - DNA, 19 bp, Homo sapiens
  siRNA target sequence for LIM (NM_006457.1,796-814).
caccaagaaaacacattgt

SEQ ID NO: 125268 - DNA, 19 bp, Homo sapiens
  siRNA target sequence for LIM (NM_006457.1,815-833).
ggagcgctatacagagttt

SEQ ID NO: 125269 - DNA, 19 bp, Homo sapiens
  siRNA target sequence for LIM (NM_006457.1,816-834).
gagcgctatacagagtttt

SEQ ID NO: 125270 - DNA, 19 bp, Homo sapiens
  siRNA target sequence for LIM (NM_006457.1,818-836).
gcgctatacagagttttat

SEQ ID NO: 125271 - DNA, 19 bp, Homo sapiens
  siRNA target sequence for LIM (NM_006457.1,820-838).
gctatacagagttttatca

SEQ ID NO: 125272 - DNA, 19 bp, Homo sapiens
  siRNA target sequence for LIM (NM_006457.1,952-970).
ctgggactgaacatttgaa

SEQ ID NO: 125273 - DNA, 19 bp, Homo sapiens
  siRNA target sequence for LIM (NM_006457.1,972-990).
gaatctgaagccgataata

SEQ ID NO: 125274 - DNA, 19 bp, Homo sapiens
  siRNA target sequence for LIM (NM_006457.1,1169-1187).
ctggcaacggccaaaccaa

SEQ ID NO: 125275 - DNA, 19 bp, Homo sapiens
  siRNA target sequence for LIM (NM_006457.1,1335-1353).
ccgatgtgcgcccattgta

SEQ ID NO: 125276 - DNA, 19 bp, Homo sapiens
  siRNA target sequence for LIM (NM_006457.1,1336-1354).
cgatgtgcgcccattgtaa

SEQ ID NO: 125277 - DNA, 19 bp, Homo sapiens
  siRNA target sequence for LIM (NM_006457.1,1361-1379).
catcagaggaccattctta

SEQ ID NO: 125278 - DNA, 19 bp, Homo sapiens
  siRNA target sequence for LIM (NM_006457.1,1613-1631).
gcccattcggaacaatgtt

SEQ ID NO: 125279 - DNA, 19 bp, Homo sapiens
  siRNA target sequence for LIM (NM_006457.1,1614-1632).
cccattcggaacaatgttt

SEQ ID NO: 125280 - DNA, 19 bp, Homo sapiens
  siRNA target sequence for LIM (NM_006457.1,1615-1633).
ccattcggaacaatgtttt

SEQ ID NO: 125281 - DNA, 19 bp, Homo sapiens
  siRNA target sequence for LIM (NM_006457.1,1653-1671).
ccctactgtgagactgatt

SEQ ID NO: 125282 - DNA, 19 bp, Homo sapiens
  siRNA target sequence for LIM (NM_006457.1,1654-1672).
cctactgtgagactgatta

SEQ ID NO: 125283 - DNA, 19 bp, Homo sapiens
  siRNA target sequence for LIM (NM_006457.1,1677-1695).
gccctctttggtactatat

SEQ ID NO: 125284 - DNA, 19 bp, Homo sapiens
  siRNA target sequence for LIM (NM_006457.1,1787-1805).
gtgttgtgaaagtttggaa

SEQ ID NO: 125285 - DNA, 19 bp, Homo sapiens
  siRNA target sequence for CDK5RAP3 (NM_025197.2,192-210).
gatccgcgagaagatcaat

SEQ ID NO: 125286 - DNA, 19 bp, Homo sapiens
  siRNA target sequence for CDK5RAP3 (NM_176096.1,1102-1120).
gccctgacactgcttgaat

SEQ ID NO: 125287 - DNA, 19 bp, Homo sapiens
  siRNA target sequence for CDK5RAP3 (NM_176096.1,1103-1121).
ccctgacactgcttgaata

SEQ ID NO: 125288 - DNA, 19 bp, Homo sapiens
  siRNA target sequence for CDK5RAP3 (NM_176096.1,1124-1142).
ctgagacccggaatcagtt

SEQ ID NO: 125289 - DNA, 19 bp, Homo sapiens
  siRNA target sequence for CGI-121 (NM_016058.1,117-135).
cacatcagctggacctatt

SEQ ID NO: 125290 - DNA, 19 bp, Homo sapiens
  siRNA target sequence for CGI-121 (NM_016058.1,288-306).
cagttcacctctacaaact

SEQ ID NO: 125291 - DNA, 19 bp, Homo sapiens
  siRNA target sequence for CGI-121 (NM_016058.1,327-345).
ctctatctactgaaattat

SEQ ID NO: 125292 - DNA, 19 bp, Homo sapiens
  siRNA target sequence for CGI-121 (NM_016058.1,333-351).
ctactgaaattattttcaa

SEQ ID NO: 125293 - DNA, 19 bp, Homo sapiens
  siRNA target sequence for CGI-121 (NM_016058.1,353-371).
ctttccccaaataacaata

SEQ ID NO: 125294 - DNA, 19 bp, Homo sapiens
  siRNA target sequence for CGI-121 (NM_016058.1,469-487).
cctaatatctcaagtagaa

SEQ ID NO: 125295 - DNA, 19 bp, Homo sapiens
  siRNA target sequence for CGI-121 (NM_016058.1,536-554).
gaagtcaaaaagatatata

SEQ ID NO: 125296 - DNA, 19 bp, Homo sapiens
  siRNA target sequence for CGI-121 (NM_016058.1,561-579).
cttcacaagaagaaagtat

SEQ ID NO: 125297 - DNA, 19 bp, Homo sapiens
  siRNA target sequence for CGI-121 (NM_016058.1,585-603).
cattattggatgctatcat

SEQ ID NO: 125298 - DNA, 19 bp, Homo sapiens
  siRNA target sequence for CGI-121 (NM_016058.1,592-610).
ggatgctatcatttgtaga

SEQ ID NO: 125299 - DNA, 19 bp, Homo sapiens
  siRNA target sequence for CGI-121 (NM_016058.1,596-614).
gctatcatttgtagaatgt

SEQ ID NO: 125300 - DNA, 19 bp, Homo sapiens
  siRNA target sequence for CGI-121 (NM_016058.1,609-627).
gaatgtcaacaaaagatgt

SEQ ID NO: 125301 - DNA, 19 bp, Homo sapiens
  siRNA target sequence for NBEA (NM_015678.2,407-425).
ccgcaacatccggatgaaa

SEQ ID NO: 125302 - DNA, 19 bp, Homo sapiens
  siRNA target sequence for NBEA (NM_015678.2,408-426).
cgcaacatccggatgaaat

SEQ ID NO: 125303 - DNA, 19 bp, Homo sapiens
  siRNA target sequence for NBEA (NM_015678.2,422-440).
gaaattcgcagtgttgatt

SEQ ID NO: 125304 - DNA, 19 bp, Homo sapiens
  siRNA target sequence for NBEA (NM_015678.2,504-522).
gttggtggagaatttgact

SEQ ID NO: 125305 - DNA, 19 bp, Homo sapiens
  siRNA target sequence for NBEA (NM_015678.2,542-560).
ccaggatgctgagagtata

SEQ ID NO: 125306 - DNA, 19 bp, Homo sapiens
  siRNA target sequence for NBEA (NM_015678.2,543-561).
caggatgctgagagtataa

SEQ ID NO: 125307 - DNA, 19 bp, Homo sapiens
  siRNA target sequence for NBEA (NM_015678.2,562-580).
catgtatgacagagctttt

SEQ ID NO: 125308 - DNA, 19 bp, Homo sapiens
  siRNA target sequence for NBEA (NM_015678.2,730-748).
cagatcttctagttgatat

SEQ ID NO: 125309 - DNA, 19 bp, Homo sapiens
  siRNA target sequence for NBEA (NM_015678.2,732-750).
gatcttctagttgatatgt

SEQ ID NO: 125310 - DNA, 19 bp, Homo sapiens
  siRNA target sequence for NBEA (NM_015678.2,786-804).
gagttgaagcttttgttca

SEQ ID NO: 125311 - DNA, 19 bp, Homo sapiens
  siRNA target sequence for NBEA (NM_015678.2,832-850).
ggccaagacatgcagtaaa

SEQ ID NO: 125312 - DNA, 19 bp, Homo sapiens
  siRNA target sequence for NBEA (NM_015678.2,838-856).
gacatgcagtaaaattatt

SEQ ID NO: 125313 - DNA, 19 bp, Homo sapiens
  siRNA target sequence for NBEA (NM_015678.2,885-903).
cacggtcctgatacttttt

SEQ ID NO: 125314 - DNA, 19 bp, Homo sapiens
  siRNA target sequence for NBEA (NM_015678.2,936-954).
gccttgcctcctattgcaa

SEQ ID NO: 125315 - DNA, 19 bp, Homo sapiens
  siRNA target sequence for NBEA (NM_015678.2,937-955).
ccttgcctcctattgcaaa

SEQ ID NO: 125316 - DNA, 19 bp, Homo sapiens
  siRNA target sequence for NBEA (NM_015678.2,972-990).
ggcttcaccttaaacactt

SEQ ID NO: 125317 - DNA, 19 bp, Homo sapiens
  siRNA target sequence for NBEA (NM_015678.2,986-1004).
cacttggtttcgtatggat

SEQ ID NO: 125318 - DNA, 19 bp, Homo sapiens
  siRNA target sequence for NBEA (NM_015678.2,991-1009).
ggtttcgtatggatccatt

SEQ ID NO: 125319 - DNA, 19 bp, Homo sapiens
  siRNA target sequence for NBEA (NM_015678.2,992-1010).
gtttcgtatggatccatta

SEQ ID NO: 125320 - DNA, 19 bp, Homo sapiens
  siRNA target sequence for NBEA (NM_015678.2,996-1014).
cgtatggatccattaaata

SEQ ID NO: 125321 - DNA, 19 bp, Homo sapiens
  siRNA target sequence for NBEA (NM_015678.2,997-1015).
gtatggatccattaaataa

SEQ ID NO: 125322 - DNA, 19 bp, Homo sapiens
  siRNA target sequence for NBEA (NM_015678.2,1031-1049).
ggataaaccttatctttat

SEQ ID NO: 125323 - DNA, 19 bp, Homo sapiens
  siRNA target sequence for NBEA (NM_015678.2,1170-1188).
ccacgcaagtggtacatga

SEQ ID NO: 125324 - DNA, 19 bp, Homo sapiens
  siRNA target sequence for NBEA (NM_015678.2,1171-1189).
cacgcaagtggtacatgat

SEQ ID NO: 125325 - DNA, 19 bp, Homo sapiens
  siRNA target sequence for NBEA (NM_015678.2,1173-1191).
cgcaagtggtacatgatca

SEQ ID NO: 125326 - DNA, 19 bp, Homo sapiens
  siRNA target sequence for NBEA (NM_015678.2,1227-1245).
gaaattcggtgttatgtta

SEQ ID NO: 125327 - DNA, 19 bp, Homo sapiens
  siRNA target sequence for NBEA (NM_015678.2,1274-1292).
ggcttggcatgttaacaca

SEQ ID NO: 125328 - DNA, 19 bp, Homo sapiens
  siRNA target sequence for NBEA (NM_015678.2,1279-1297).
ggcatgttaacacaaatga

SEQ ID NO: 125329 - DNA, 19 bp, Homo sapiens
  siRNA target sequence for NBEA (NM_015678.2,1280-1298).
gcatgttaacacaaatgat

SEQ ID NO: 125330 - DNA, 19 bp, Homo sapiens
  siRNA target sequence for NBEA (NM_015678.2,1310-1328).
gtgctttcttggatcatca

SEQ ID NO: 125331 - DNA, 19 bp, Homo sapiens
  siRNA target sequence for NBEA (NM_015678.2,1349-1367).
ggtattctgtggtcaactt

SEQ ID NO: 125332 - DNA, 19 bp, Homo sapiens
  siRNA target sequence for NBEA (NM_015678.2,1365-1383).
cttggtgccgtgtatgtgt

SEQ ID NO: 125333 - DNA, 19 bp, Homo sapiens
  siRNA target sequence for NBEA (NM_015678.2,1395-1413).
ctcaacccagcacagatat

SEQ ID NO: 125334 - DNA, 19 bp, Homo sapiens
  siRNA target sequence for NBEA (NM_015678.2,1425-1443).
cagttaggacctggatata

SEQ ID NO: 125335 - DNA, 19 bp, Homo sapiens
  siRNA target sequence for NBEA (NM_015678.2,1431-1449).
ggacctggatataagagta

SEQ ID NO: 125336 - DNA, 19 bp, Homo sapiens
  siRNA target sequence for NBEA (NM_015678.2,1644-1662).
gatgtgaaagcgatagtaa

SEQ ID NO: 125337 - DNA, 19 bp, Homo sapiens
  siRNA target sequence for NBEA (NM_015678.2,1649-1667).
gaaagcgatagtaacacat

SEQ ID NO: 125338 - DNA, 19 bp, Homo sapiens
  siRNA target sequence for NBEA (NM_015678.2,1653-1671).
gcgatagtaacacattcaa

SEQ ID NO: 125339 - DNA, 19 bp, Homo sapiens
  siRNA target sequence for NBEA (NM_015678.2,1669-1687).
caattcatagtgcaattca

SEQ ID NO: 125340 - DNA, 19 bp, Homo sapiens
  siRNA target sequence for NBEA (NM_015678.2,1819-1837).
cagtagccatgcaagaaca

SEQ ID NO: 125341 - DNA, 19 bp, Homo sapiens
  siRNA target sequence for NBEA (NM_015678.2,2109-2127).
cgcagagtaggaacagtat

SEQ ID NO: 125342 - DNA, 19 bp, Homo sapiens
  siRNA target sequence for NBEA (NM_015678.2,2122-2140).
cagtattacagctaatgca

SEQ ID NO: 125343 - DNA, 19 bp, Homo sapiens
  siRNA target sequence for NBEA (NM_015678.2,2307-2325).
gatgaacttcagagtatat

SEQ ID NO: 125344 - DNA, 19 bp, Homo sapiens
  siRNA target sequence for NBEA (NM_015678.2,2400-2418).
gaacacccagcctcaatga

SEQ ID NO: 125345 - DNA, 19 bp, Homo sapiens
  siRNA target sequence for NBEA (NM_015678.2,2442-2460).
ggaataagggtgatctaca

SEQ ID NO: 125346 - DNA, 19 bp, Homo sapiens
  siRNA target sequence for NBEA (NM_015678.2,2443-2461).
gaataagggtgatctacaa

SEQ ID NO: 125347 - DNA, 19 bp, Homo sapiens
  siRNA target sequence for NBEA (NM_015678.2,2449-2467).
gggtgatctacaaattatt

SEQ ID NO: 125348 - DNA, 19 bp, Homo sapiens
  siRNA target sequence for NBEA (NM_015678.2,2485-2503).
gtatttgggttcaagcttt

SEQ ID NO: 125349 - DNA, 19 bp, Homo sapiens
  siRNA target sequence for NBEA (NM_015678.2,2504-2522).
gaaggttctgggatacttt

SEQ ID NO: 125350 - DNA, 19 bp, Homo sapiens
  siRNA target sequence for NBEA (NM_015678.2,2519-2537).
ctttctgaagcatttaggt

SEQ ID NO: 125351 - DNA, 19 bp, Homo sapiens
  siRNA target sequence for NBEA (NM_015678.2,2529-2547).
catttaggtcacaagagaa

SEQ ID NO: 125352 - DNA, 19 bp, Homo sapiens
  siRNA target sequence for NBEA (NM_015678.2,2564-2582).
cacccatagtcttttcact

SEQ ID NO: 125353 - DNA, 19 bp, Homo sapiens
  siRNA target sequence for NBEA (NM_015678.2,2596-2614).
ggctgatgttgcatacaaa

SEQ ID NO: 125354 - DNA, 19 bp, Homo sapiens
  siRNA target sequence for NBEA (NM_015678.2,2598-2616).
ctgatgttgcatacaaaca

SEQ ID NO: 125355 - DNA, 19 bp, Homo sapiens
  siRNA target sequence for NBEA (NM_015678.2,2600-2618).
gatgttgcatacaaacact

SEQ ID NO: 125356 - DNA, 19 bp, Homo sapiens
  siRNA target sequence for NBEA (NM_015678.2,2629-2647).
ccacatacaacacacttta
